United States Patent Application Publication US 2007/0054278 A1 - sequence listing, part 129

SEQ ID NO: 316479 - DNA, 201 bp, Homo sapiens
tgctgaattcacctggcgagtcctgcacctgactgtgtgagttacagctggatggcattgttcagctcaatcttcagtgtgttctgaaaatgtttcttctkccagtcctgtcactgaatttccctaaagttccttcctcctttccctcattagatttctctttggggactatttttttcaatcaaatctcgcaaatccata

SEQ ID NO: 316480 - DNA, 201 bp, Homo sapiens
aggtaaagcactttgcctatttctgttttcaaagcacgtgtgtataggagaaaggagaagggagaatggtgaatatgtacacttttctacttggtcctttrggcaaacccatctgaaggtctgacaaaattacaggagcagaaaaactttccgtcacatactcctggtgcatacaccctcagggactaagtgggagctttt

SEQ ID NO: 316481 - DNA, 201 bp, Homo sapiens
tcccagccacttcacatagtcctcgagtccctgaagagagaaggcaaagaacctctggtgttgaaaggtaatgcccctgctcccttcccaagcacggtccygattagccgggttcactttgggttttctcgtagagtgacagcattctccttaccctggctaccaaagaccaaaatagactttattcttctcttcccttct

SEQ ID NO: 316482 - DNA, 201 bp, Homo sapiens
tttttgcagacactctgaaatcagagatagatccggtgggcaacaattcactgtccctttcaacgagtacaggctaattgggaggtcctctttacggaatsagtactcttgaaggggggatatctgtatgggattgaaaccttatacaacgtggctgcctcccattgagagaagctctaggatgcacagtctgtgccagcc

SEQ ID NO: 316483 - DNA, 201 bp, Homo sapiens
tggcttccggccactgctgtcacctgtgcagcaaactgttcctatgagcaattctttcatttaatcttctctttaaatgtagatgtatagcttcttgttcrtgctgatatcaactttagccagttctggaagttgtgacataagtatacgtaatgaactagtggattatacttggctttaaaactgttttaattcattatt

SEQ ID NO: 316484 - DNA, 201 bp, Homo sapiens
gttcgtgctgatatcaactttagccagttctggaagttgtgacataagtatacgtaatgaactagtggattatacttggctttaaaactgttttaattcaytatttctatacaaaataaggcattgcaaagttgagatgaaagtttctctctccgtgcctctctcttccatcttcccttcatctcttgtctttctcccttt

SEQ ID NO: 316485 - DNA, 201 bp, Homo sapiens
tctgacctttgctcttaacctccatgctacactgctcctgctttgtttgttaattatcatgttctaatattcttaaatagtaataaacataacatcatcarggttcctcattaagtgatcagtcactttggcctctggtgatacttgatggggtagggtcggaggaaagtaactggaaaagaaaaaccagattagctttac

SEQ ID NO: 316486 - DNA, 201 bp, Homo sapiens
ggaggtgggggtcccagcgcgtgtctctgtgaacacgcttatgcgtccctctcagaagaaatggtatgttgatcctggacgtgtcctaccaggtaacacawtagcaaagactttcaccgcttggtccaaccgggaaacagttatagcttctggaatagaactcgctcttcagaaaaaatactacgcaagggaaggggggtt

SEQ ID NO: 316487 - DNA, 201 bp, Homo sapiens; identical to SEQ ID NO: 66172

SEQ ID NO: 316488 - DNA, 201 bp, Homo sapiens
gagccccaaaccattggacccctataaattttactgaggtagaaggtccctgaatttaatcagatttatttcccatcctctgtcccacaaatgtctcatcrataaatccagtgtgtttgctacttcttgctcactagttccagtcagcatgtcatcaatgtaatggaccactgtgatatcttgtggaagtgaaaggtgagc

SEQ ID NO: 316489 - DNA, 201 bp, Homo sapiens; identical to SEQ ID NO: 66174

SEQ ID NO: 316490 - DNA, 201 bp, Homo sapiens
gtaattgaaatacagagtgacgagcgctataacacttttacacatctgtctccccattcaattatatgcactccaatcatgttttttcatctggtttcttwagtggcattgcagtgtgtgtttatcaaataagttatctcagtatctcaagtagaagggcaaattaattaaagtctagtgatattttctcattaactgaaa

SEQ ID NO: 316491 - DNA, 201 bp, Homo sapiens
caagcagaggagcaaggaagccagtccaagtcccaaagctgaaggacttggagtccaatgtttgagggcaggaagcatccagcatgggagaaagatgtagrcttggaggctaagccagtccaggattttcacatgttttttttctgcctgctttatatcctggccacactggcaactgattagatggtgcccacccagatt

SEQ ID NO: 316492 - DNA, 201 bp, Homo sapiens
gcatctctgaattaaaactttctctgccttaatgcttgaaatggttctgatggacatttattctttggggagttgttcaaaaacaaactggactgctttarttgaaagtgaatttgctctccaaggaagtgtttaaatatagggtgaccgcttggcaagagtaaaatagagtaagttcagcaccccaggaggaattgaact

SEQ ID NO: 316493 - DNA, 201 bp, Homo sapiens
gagagaggaactcacaaatcagactgtcctaaagctctcaagacagttaattcatctcattggagaagcatctctgaattaaaactttctctgccttaatrcttgaaatggttctgatggacatttattctttggggagttgttcaaaaacaaactggactgctttaattgaaagtgaatttgctctccaaggaagtgttt

SEQ ID NO: 316494 - DNA, 201 bp, Homo sapiens
gagtctagttgggttgattctttggccttcaggcagtttgcttgggtgtcagtagtggccatagtagactgggctggtgtgtgggtcctcaggcttctggrcagtgggtgtggtgtgggtgatggctgtagcaactgcaggacaaccctctggctcccaagcagtctgcactggtgttggtggtggctgcaagggctgaat

SEQ ID NO: 316495 - DNA, 201 bp, Homo sapiens
ttaaataagttagtgagacatgtaaagagtttagtgttgtgactgacacatagtgaacattgctattcttaggaggactagggccttttcctcctctgagygcatacaaggatataggcgctggtctgaagccaagctttggtctatttcccctggcagctgaatgcactgtgatgggtatccccagtgtgaccacgaatc

SEQ ID NO: 316496 - DNA, 201 bp, Homo sapiens
aaaccaaacactgcatgttctcactcataagtgggagttgaacaatgagaacacatggacacagggaggggaacatcacacatcggggcctgtcgggttgyggggcgaggtgagggagagcattaggacaaatacctaatgcatgcagggcttaaaacctagacgatgggttgataggtgcagcaaaccaccatagcacat

SEQ ID NO: 316497 - DNA, 201 bp, Homo sapiens
ggtacacattaaataatcaataaatgagtactataataaccattattattgttattgattaacttgtttcattgtaccagtgcttcattgttattttggtmaggcatttctgatttcctatttcaatcagtagaccaaatttgttgcgaatttttatgaattttttatgaactggaagttttataaattttaaattttatg

SEQ ID NO: 316498 - DNA, 201 bp, Homo sapiens
tttcacggcattgtagacaaaattttgtatacatatgtgtataagaatatttctcttcatcatcctcagcaaactaacacaggaacagaaaaccaaacacygcatgttctcactcataagtgggagttgaacaatgagaacacatggacacagggaggggaacatcacacatcggggcctgtcgggttgcggggcgaggtg

SEQ ID NO: 316499 - DNA, 201 bp, Homo sapiens
acaagatggcaggaggtagtttagtgcagggttaaggaaacagtatgtggggtcagactgcatggattctgcttcgacttaccagctgtgtgttcttggayggcgtctttaaacaactctgtgcctgagtttccacctctgaaaatgcagataagagcactcactcccttggtttgttgaagagattgagttacactctaa

SEQ ID NO: 316500 - DNA, 201 bp, Homo sapiens
tactttgctattgaacatcagaacatattccttctatctaactgcctgtttccattaaccaacttctcttcgtctcccttcctcccataacgtacacaccyttctctacctctggtttctgtcattctactctctacctacatgatattaacttttttagctcccacatatcagtgagaacatgcaaaatttgtctttcta

SEQ ID NO: 316501 - DNA, 201 bp, Homo sapiens
gtgtcccatacacttgtggaaaacaagatggcaggaggtagtttagtgcagggttaaggaaacagtatgtggggtcagactgcatggattctgcttcgacytaccagctgtgtgttcttggacggcgtctttaaacaactctgtgcctgagtttccacctctgaaaatgcagataagagcactcactcccttggtttgttg

SEQ ID NO: 316502 - DNA, 201 bp, Homo sapiens
agcaacaaaatctcctgggaagaatgaatcagttgtgttagaaataagagatggaaataagaatagaaattagaagtaagaggtttccttttccaattttycaaatgcacaaaaggtgtcccatacacttgtggaaaacaagatggcaggaggtagtttagtgcagggttaaggaaacagtatgtggggtcagactgcatg

SEQ ID NO: 316503 - DNA, 201 bp, Homo sapiens
gagaccctgtttctacagaaatttaaaaaatttctctagctggccatggaggctcacacctgtagtcctagctacctgagaggctaaagcaggaggatcamttgaatccaggcgttctagtgaggcttcagtgagcaagattgcaccattgcactccagccggggtgacagagtgagaccctgtttcaaacaaacaagcaa

SEQ ID NO: 316504 - DNA, 201 bp, Homo sapiens
aactttaaacttacttaaaatatattttctgagaatttattagctttccttagttgtttttacatctacaagaaatattttaagtattttaaaggaaaatkggttcagtttcttgtcttggataactaaagtataatgaatattttggtataattcttgaaaattgaagcatattcatagctttgagctacaattctagca

SEQ ID NO: 316505 - DNA, 201 bp, Homo sapiens
tgtattatccttgctaaatattcatgctttatgtttcgactcctttaagttgcaaaataatttatagacaccataactccacttatgatgtggaccatgakcacaatcaagcttcatcaacaacttttctgaatgctttttttttcctaatgtaggtgacagatcatgcagatggtaaatatgtcgttgcccaattccatg

SEQ ID NO: 316506 - DNA, 201 bp, Homo sapiens
tttatagaatgaaaataggcaaacactacgaatcatggcttcatttactgcgtattgatttctggatctgtaacctgtacattgtgagtggcaaaaaaaawattttctccatgttcaaaaactaatatctgacccagcaaagaagtcacttgcattactgatgaactcatgaagttccaacaaatgtctctgttatttccg

SEQ ID NO: 316507 - DNA, 201 bp, Homo sapiens
ttggaggttctagatgaatggatttatgcccattccagcttgaggctcaaacagcagaggctatatgttatcaatattcttttctaagtagcttgtttaayttgctattgagtactacataaagtttatatcctcagagtgcaaatacattgtcctgtcttgcatgacttaatatcactacatggctgtgttctttatatg

SEQ ID NO: 316508 - DNA, 201 bp, Homo sapiens
gagatgggatttccccaggttgcccaggttggtcttgaactcctgggctcaaggaatccacccacctctgcctcccaaactgctgggattacaggtgtgarctaccaagccctggccttccctcagtcttttatgggtgtactgtggctctttcctcaggctagatctggggttttcagcctcggctgaacagtgggaaca

SEQ ID NO: 316509 - DNA, 201 bp, Homo sapiens
agagaactattttctgataggtccatattttgagcataatatgaagactcaggtggaacagtgtgaacctgtaaatgatgctgtcagaagagcagtggacrcaatgaataagcatggctgccaggtaaaggaactgacacttcacttggcaattctcagtaaacttatgggaaaaaagactgtaactaacatgaactcaca

SEQ ID NO: 316510 - DNA, 201 bp, Homo sapiens
tttgttcttcctctttttctcctaccccccaccacttttaaagatccatcaaggcccagcatggtgattcacacctgtaatctcaacacttttcaaggctraggtgggagaattgtttgagaccaagagttggataccagcctggggaacatagggagaccctgtttctacagaaatttaaaaaatttctctagctggcca

SEQ ID NO: 316511 - DNA, 201 bp, Homo sapiens
gagtctcactctgtcacccaggctggagtgcagtggcatgatcttggctcactgcaaccttcgcctcctgggttcaagagattctcgtgcctcagcctctygagtagctgggattacaggcacacaccaccacgcctggctaatttttgtgtttttagtagagacaggtttcatcatgttggccaggctggtctcaaactg

SEQ ID NO: 316512 - DNA, 201 bp, Homo sapiens
ttgaaggaacattagcaaagaaaaagtcatggttttgaaggctgagttcctcaagatcttgaagaatcaagccaactgattgctgggtaaatggcagtgawgacttgtgtgatttaaacgatctgaaattatgtcatgtgttgtgatatataacacatttatttttcattttgtgtttactatttcatgtctattacagta

SEQ ID NO: 316513 - DNA, 201 bp, Homo sapiens
tcacttgaacctgggaggcggaggaggcagtgagctgagatcgtgccactgcacacctgcctgggtgacagagcctcaggctgtctcataaaaaaaaaaaagtagatttataaatagaattctgtcctttgcagcaacatggacgcagctggaggtcattatcttaagtgaattaatgcgggaacagataaccaaatactg

SEQ ID NO: 316514 - DNA, 201 bp, Homo sapiens
aaactgtttggttttgttttgttttagtcatctcgactttgatcttgaaaagactttgttccttttcattgctgggaggtatgagttttcaaacaaaggasctgacatcttcctagaatccttatccaggctaaatttcctgctgagggtaagaaagctctaggacatggtataacactcttgtagggagaactttctcct

SEQ ID NO: 316515 - DNA, 201 bp, Homo sapiens
gttcgagaccagcatggccaacacggcaaaatcccatctctactaaaaatacaaaaaaattagccaagtatggtggtgcacgcctgtaattccagctactscagaggctgaggcactataatcacttgaacctgggaggcggaggaggcagtgagctgagatcgtgccactgcacacctgcctgggtgacagagcctcagg

SEQ ID NO: 316516 - DNA, 201 bp, Homo sapiens
cccaggctgaagtgcagtggcgtgatttcagctcactgcaacctccacctcctgggttgaagcaattctcctggctcagcctccccagtagctgggactamaggcgcacaccaccatgcctgactaatttttgtatttttagtagagatggggtttcaccatgttggccaggctggaaaagattcttaaaattacaaaaat

SEQ ID NO: 316517 - DNA, 201 bp, Homo sapiens
ctttacttgctcctttttctttttttttaaattagaattttccttttttaggtgattttgcacccagagtttctatcctccaccagtcccttactacccakggactatgaagagtttgttagaggttgtcatcttggagtatttccatcatactatgaaccctggggttatactccaggtatgtgtcatgtatagagtgtg

SEQ ID NO: 316518 - DNA, 201 bp, Homo sapiens
aaaagtcaatttaggctgggcacagtggctcatgcctgtaatcccagcactttgggaggccgaggtgggtggatcacttgaggtcaggggttcgagaccakcatggccaacacggcaaaatcccatctctactaaaaatacaaaaaaattagccaagtatggtggtgcacgcctgtaattccagctactccagaggctgag

SEQ ID NO: 316519 - DNA, 201 bp, Homo sapiens
ctgtcacccaggctgaagtgcagtggcgtgatttcagctcactgcaacctccacctcctgggttgaagcaattctcctggctcagcctccccagtagctgkgactacaggcgcacaccaccatgcctgactaatttttgtatttttagtagagatggggtttcaccatgttggccaggctggaaaagattcttaaaattac

SEQ ID NO: 316520 - DNA, 201 bp, Homo sapiens; identical to SEQ ID NO: 66177

SEQ ID NO: 316521 - DNA, 201 bp, Homo sapiens
cctcctgagtagctgggactacaggtgcatgccaccacacccagctgatttttgtatttttagtggagatggggtttcatcatgttggccaggctggtctygaactcctgacctcaggtgatctacctgcctcagcctcccaaagtgctgggattacagcagtgagccacggcacccggcctgtctcctttttctttgtct

SEQ ID NO: 316522 - DNA, 201 bp, Homo sapiens; identical to SEQ ID NO: 66186

SEQ ID NO: 316523 - DNA, 201 bp, Homo sapiens; identical to SEQ ID NO: 66170

SEQ ID NO: 316524 - DNA, 201 bp, Homo sapiens
cccaaaatgatagaggagatatatctactgttttaagataaaggccaaagaagatgttacaaaggatattataaatagacaaataagggagtttgtggaakagtccatagtgaatgagtcatgctgtgttttacattaaccaaagggagctggtcactcttcccctaacctatagttacaggaagaatgcgacttctggtg

SEQ ID NO: 316525 - DNA, 201 bp, Homo sapiens; identical to SEQ ID NO: 66173

SEQ ID NO: 316526 - DNA, 201 bp, Homo sapiens
ttgcttgcaatgcactatcttttgagatacataaagcacacgtttcactgatgaacttaacactttgtttttgaccttgttcttattatttctagtaaaayaatttactattggaagtatcatggatagaagagtatacaaccaaatgcatgagtgactgaggcaatgtgggaagtcctttctgtcgggtcaagaaaatgt

SEQ ID NO: 316527 - DNA, 201 bp, Homo sapiens
tttgccagcagctataaaaactttaaaatttcttggggaaaatagacaaaggattgtcttgaaacatgacataggaaatatttgtatctaactcttccgggtatctctcttgcagatctaaaagtggcctacttttgtgaaggtggtgtcttcttacttaggaaatgtccacataaatatctcaaattgcttgcaatgcac

SEQ ID NO: 316528 - DNA, 201 bp, Homo sapiens
ggccaaggtgagagggaataataggctgaattatgaagaggaagaattttttctattatttgcatctttatcctagaattaaaatacagaatttaaaagtytacaaaaataggatcctgtattatttacagcaggaacaacatgagggctgggcatgtttggtcataaggtcctattctattgttctagcttcaccaagca

SEQ ID NO: 316529 - DNA, 201 bp, Homo sapiens
catggtaagaccagtaaattccatgagcatgagcccactgtcacacttctttagccataaagtgagtggcttggtcagaagcaatgctgtgtggaataccrtgacagtggatacggcattctgtgattccatggatggtagtcttggcataagcattgagttcaggattgggaaacccatatccagagtaagtgtctattc

SEQ ID NO: 316530 - DNA, 201 bp, Homo sapiens
tacagatacaaaactgaatacaacatatgccttaaatatcttatgttgctttaaaaaaatttgtcattttccctttaatatagtcattaatagtgttgcarttattgattttggagcccatgctaataccttactatgaactctagctaataccatcctttagtcaacgtttttcttttgtgttggcgttgttaacatcag

SEQ ID NO: 316531 - DNA, 201 bp, Homo sapiens
gattcctggacccgtgaatcctgtctatgggagaaacagtaccatatattggacactgattcagagcatacacagccttctggagaactttgccccaggcmtgcaaagtattgtcacctagttggcattgtaatcgtgacttcaaaaggccattcaaaagctgcttcaggatgatagggatcatggtaagaccagtaaatt

SEQ ID NO: 316532 - DNA, 201 bp, Homo sapiens
agcatagacacttctacagaatggagagaggagaacaaaccaccacggcttttttctttttcttttgtcttatctctttttttctttctgaatctagaacrtaaggattctatagtagagtactgaaataaccaaattgtaggagatttttcactttacttgctcctttttctttttttttaaattagaattttccttttt

SEQ ID NO: 316533 - DNA, 201 bp, Homo sapiens
taaatgttcagaagctttgtgaaccagttttaaatacagctattgctaaaattaaattatataaattttaaaataagtcaactatattaaatgaaaggtarttctcaaaattcatcacatcctaattatttacttcatattactatgacctatgcagttgagactctatgtctgtcagatcttcgtggtgcaaatgcttta

SEQ ID NO: 316534 - DNA, 201 bp, Homo sapiens
gcatgagctttttgccaaactgcctgtattcagtaccaaaaatgattttatgttgagtatacgttactagctgtgtgacattataaaagttacttaagctytctgtgtcttatctgcataatgtggataatcctttctcttatctagaatcattgcaatgattcaaacgttaacatatggaaaaaactcagctcagtgcct

SEQ ID NO: 316535 - DNA, 201 bp, Homo sapiens
atgaaagtaatttttttcttcaatgctatgcttatgtaggaattataaaataaagaaaatcaaattgataaaacaatttgcgagtgaggtataacctcatytgtgctgggtaagagaaggcaaggtagagaaccacaatgtaaatgattttgaaaataaagacatctgtaaaattataaaacaattccttgtgggtttata

SEQ ID NO: 316536 - DNA, 201 bp, Homo sapiens
acctacctcataaacttgccaagtacttagaaacacaggctagaaagaagcaagaaacaaaaccagctgggattgaagctgcagtggagcccggcagttcygcacaagggttctgcagccgggtgcctgacttcaaatcccagctataccacgaaccctggctttgtgaaggtgggaaagttattaatttctctgtgcctc

SEQ ID NO: 316537 - DNA, 201 bp, Homo sapiens
ggtttcatcatgttggccaggctggtcttgaactcctgacctcaggtgatctacctgcctcagcctcccaaagtgctgggattacagcagtgagccacggyacccggcctgtctcctttttctttgtctttccttttccttccagaacaattcagttctaaagccatttggtgggcaacataaggtaggtatctgcactag

SEQ ID NO: 316538 - DNA, 201 bp, Homo sapiens
cctgtcccttagttccatttcagttgaataactcatgcttaaggcatgtaagagtggtctgttacacagccccctcttccctgctcaagttgggaacaaayagataaaaagacaagagcaattagataaccaaatataaggtttattgcatgtcaaagctggactggaggatatagtttagtgtgagagcaaaaatgagca

SEQ ID NO: 316539 - DNA, 201 bp, Homo sapiens
cttcactaggtgactgaggaatgtagagtaagatttcacagataactctctagtgataaccaattgctagtgagtgaggaaagcatttaaacggaatatayatttaggctacatttaaccttgtctattacaacaggctatgaatacagacttgtgtatgtgttgaagagggagaaagttgaaaatattagccattgccat

SEQ ID NO: 316540 - DNA, 201 bp, Homo sapiens
atctccccatctgactaaaattgggggatttatataaacagggaaggaatgtaaaacaggaattaggaaaggataaagaagcaatcatgaggaatgagggktctggcatctcattgtctggatgtgatgatctggtgagcttcagtcccttacctgaagatcagtttcctaagggaggaactcagatgagacaaatgtaaa

SEQ ID NO: 316541 - DNA, 201 bp, Homo sapiens
aatctagttgtgttgaatagagaccccagtgggacagaaagaagcaggcaagtatgttaggaggtgatggtctctagctgagagaggagggaggtttgcaygaagtcctctagcatgatttaatctagatggcattcctagaacatcttccctgtcccttagttccatttcagttgaataactcatgcttaaggcatgtaa

SEQ ID NO: 316542 - DNA, 201 bp, Homo sapiens
gttagcaagttaaatagctattctagtcacaactttccaattatagccatgctcttgtcattagtaatattttgtgccactcacattgtaatggctacagrtacaacacattttaaggctaaacctgaactattaatatttttccattactttcttgagtccagaaatcaatacacagtaaatcaagccatgatttgtagt

SEQ ID NO: 316543 - DNA, 201 bp, Homo sapiens
tgttactgagatgccatgtttttgatctgggtccccttgctggtggggcagaaagccagttactgagaaaatgagtattgccagggaagaaggctttttcrggtgctgcagcctaggagaatgagagatcagcctcatactcatctccccatctgactaaaattgggggatttatataaacagggaaggaatgtaaaacag

SEQ ID NO: 316544 - DNA, 201 bp, Homo sapiens
ttttaaaggatcaatctagttgtgttgaatagagaccccagtgggacagaaagaagcaggcaagtatgttaggaggtgatggtctctagctgagagaggakggaggtttgcacgaagtcctctagcatgatttaatctagatggcattcctagaacatcttccctgtcccttagttccatttcagttgaataactcatgct

SEQ ID NO: 316545 - DNA, 201 bp, Homo sapiens
taattcattcacagagttagcaagttaaatagctattctagtcacaactttccaattatagccatgctcttgtcattagtaatattttgtgccactcacawtgtaatggctacaggtacaacacattttaaggctaaacctgaactattaatatttttccattactttcttgagtccagaaatcaatacacagtaaatcaa

SEQ ID NO: 316546 - DNA, 201 bp, Homo sapiens
tgaaagccaagaaaacagaaatttgtgtgagactatcccagtcctacatcttgtaatattgcctcattggtgctgtgttggtagaaacgttttatattacytatccccagattccttggaaatttttccaggaactatctacagacccaaccagagcttgcaatgtgaagaactcatgctcataagacatggccctgtcac

SEQ ID NO: 316547 - DNA, 201 bp, Homo sapiens
atgactgacatttttaaaggatcaatctagttgtgttgaatagagaccccagtgggacagaaagaagcaggcaagtatgttaggaggtgatggtctctagytgagagaggagggaggtttgcacgaagtcctctagcatgatttaatctagatggcattcctagaacatcttccctgtcccttagttccatttcagttgaa

SEQ ID NO: 316548 - DNA, 201 bp, Homo sapiens
attgaagagaataaagtcgctgagaatggggaaggggacaagatccaaagcaatactgaaagaatcatttttcgcttgtctcactcaaaaaaggaaaaaargataaatgcaaatactagatacaagttaatgaagaattcaggacaatcttacccaatgtttttgatgatctcactgaagcaggtattaaaggtcatttta

SEQ ID NO: 316549 - DNA, 201 bp, Homo sapiens
attgatgactccaccgaccccatcctcagcaccattagacggattggacttttcaacaaccgcacagatagagtcaaggtagaacaaattgttcatgtggsgaactttaaacttacttaaaatatattttctgagaatttattagctttccttagttgtttttacatctacaagaaatattttaagtattttaaaggaaaa

SEQ ID NO: 316550 - DNA, 201 bp, Homo sapiens
atccacattgagaaagactcgtagcctctgctgagttccagaaagggtttgaagtggtttatgaggttgtatatcatgtaaaaggagaataaacataaaawgaaaattaagacaaaagaacaagtaaattactatagaaatatggagacaaaaaaggaagttaaaacttggatatgcaagtgatgatatacatacaactgg

SEQ ID NO: 316551 - DNA, 201 bp, Homo sapiens
ttatgattgttaaatagttttaggcaacatttgcttctccataattgggccactacaaatatacaaggcattttcaagtctcttcctggccatttctttartaaatatcaaaatatatactataaataaacacaagtctagtcaattaaaaaaaatttaagtagttttttaaaaataagcttataagtaagtggtcccaat

SEQ ID NO: 316552 - DNA, 201 bp, Homo sapiens
ataaataaacacaagtctagtcaattaaaaaaaatttaagtagttttttaaaaataagcttataagtaagtggtcccaattgattcagctgttcagtgatmtctttaagaatttatttattcttaaataaatattttttgagtgcctactttgcatttattccatttatttattaatattcattacctgttattaatatta

SEQ ID NO: 316553 - DNA, 201 bp, Homo sapiens
aagcaagtttagataaacacagcagaccacttaaaaaattccactggactataaacatattgattctagtcataatctctaaagttaatccaatattataattgttaaaatctcagtgtctccatgtactttttaaaatttaataagtttacaaagtcctatatgtatttcttcatgtttcgtttgagtctattcataata

SEQ ID NO: 316554 - DNA, 201 bp, Homo sapiens
atcacttgaacctgggaggcggaggaggcagtgagctgagatcgtgccactgcacacctgcctgggtgacagagcctcaggctgtctcataaaaaaaaaaaagtagatttataaatagaattctgtcctttgcagcaacatggacgcagctggaggtcattatcttaagtgaattaatgcgggaacagataaccaaatact

SEQ ID NO: 316555 - DNA, 201 bp, Homo sapiens
tcaaaaactaatatctgacccagcaaagaagtcacttgcattactgatgaactcatgaagttccaacaaatgtctctgttatttccgctccttctactcataacaaaggaaatcaaccaacatttatgtcagagctatattcagccatcaattgaaaccataaattggttatgaatacaaaattttggaaaaataaaaata

SEQ ID NO: 316556 - DNA, 201 bp, Homo sapiens
tattactatgacctatgcagttgagactctatgtctgtcagatcttcgtggtgcaaatgctttataatgatgtgctactgctttccctgtctctgaattcrgcaacatcatattggtagcttaaaaatggccttggtggtagtgggagtatttatagaatgaaaataggcaaacactacgaatcatggcttcatttactgc

SEQ ID NO: 316557 - DNA, 201 bp, Homo sapiens
tcacaactttccaattatagccatgctcttgtcattagtaatattttgtgccactcacattgtaatggctacaggtacaacacattttaaggctaaacctkaactattaatatttttccattactttcttgagtccagaaatcaatacacagtaaatcaagccatgatttgtagtatatgcctattttcattctatgaaaa

SEQ ID NO: 316558 - DNA, 201 bp, Homo sapiens
aaacaaagacttcagactttttttttttactttaatccttggcatatgataagattataaagtgataaaatcaatttaaaattgataattcaacagccctytttatgtcttatcttctttaccaattgcacaaggtcactaagattaaatgaggtaatatgtatatttatagtatataaaatgttatacaatataatgata

SEQ ID NO: 316559 - DNA, 201 bp, Homo sapiens
ggccattgttagcaaatgtgtgttttatttttgtttctaacagtttaacattgacaaagaggctggggaaaggcagatttaccaccggtactgcatggagygagcttccgttcattgcgctcacgtgttcaccacggtttctgaaataacagcaatagaagctgaacatatgctgaagagaaagcctggtaattattatcc

SEQ ID NO: 316560 - DNA, 201 bp, Homo sapiens
ggggataatgatggccccacttcacagggttgttgagagattaaataagttagtgagacatgtaaagagtttagtgttgtgactgacacatagtgaacatygctattcttaggaggactagggccttttcctcctctgagtgcatacaaggatataggcgctggtctgaagccaagctttggtctatttcccctggcagct

SEQ ID NO: 316561 - DNA, 201 bp, Homo sapiens
tgtaataataaatgtttatctttcccagccccctgtgtacattaacagaattcatgtgtacattttgttactgttgctgtatttcatttgaaactgtttgrttttgttttgttttagtcatctcgactttgatcttgaaaagactttgttccttttcattgctgggaggtatgagttttcaaacaaaggagctgacatctt

SEQ ID NO: 316562 - DNA, 201 bp, Homo sapiens
tgccctaaaaattgtctatactctgcccactcatccctccctcacccctgacgcctggaaaccacagatcttttcactggttccatagtttaactttttcmagattgtcacacagttgaaatcatacatcatgtagtattttcagatgagcttctttcacttagtagtatgcatttatgtttcctctatttattttcatgg

SEQ ID NO: 316563 - DNA, 201 bp, Homo sapiens
atttcccctggcagctgaatgcactgtgatgggtatccccagtgtgaccacgaatctctccgggtttggctgtttcatgcaggagcacgtggctgatcctrctgcttacggtgagggttttcatcattaacccatgctggggagacatgacctctaaccaaacaaagcacagggtctttacagagcctaactctaaagcta

SEQ ID NO: 316564 - DNA, 201 bp, Homo sapiens
attgagggacatacatcaaaataaatatagtcttcaaaaataccaaagtcagaaaagccaaaaaagcccatgaactcttccaaattgaaggactctaaagsgatgtgacaactaaatgtaatatgtaattctgaactggatcctttggtttaaaaatcactatttgaatcatcagaaacacttaaatggggtttaagaatt

SEQ ID NO: 316565 - DNA, 201 bp, Homo sapiens
tagtaaggaattaggatgcattgaatgacataaggaatcagaagtccaatacaaatattaattaaaagtttaattaggaatgagagatttacacagcttcsaaataactgcctcaatacttgttaataacaaagagtaaaaagaataactttatagtggagaagccaaaaagtcttggccttaatcaagagatcaaaataa

SEQ ID NO: 316566 - DNA, 201 bp, Homo sapiens
gacacttagagcgcaagaacgttctttctgaaaaactttaacatctgtaaagcaatgagtggtcctgatgagcccttccctataaaaaggtcagcctaatytaaaggtcaaactagaaacacaagctgtacatttaaaataaaatcaccaaggaattcagaaagcctggggatctgggaggttcttagcggtatatagtaa

SEQ ID NO: 316567 - DNA, 201 bp, Homo sapiens
gggttatccacatgtgtcactggactgtgttttattgattaatatgtactttacccattttttgtttttctatacacattatccagaattcaataaaaaaytatgagatatattaaaatgcaagaaagtaaaaacccattgtcagaaagaccaggtccagatatgtcctgtgttggaattattgtacagagattttaagat

SEQ ID NO: 316568 - DNA, 201 bp, Homo sapiens
ctaaataaacactttcagagtggcttttcttgtttacaggacaaaggcaaaattcctaggctcatcttcagggatttcagtgatctggccctattgtatcygaccagcctctgtctcttacattctacatccagtgctacagtcacatcagatgtcctgctattttctgcacatgccatagcattttctatacttgttctt

SEQ ID NO: 316569 - DNA, 201 bp, Homo sapiens
atttcccccttatgttcttcagcaaataaaaatgtttgcatctaccaaagtgtatatgaatttgaaatacgtaatctaacaaacaaggatgttttaagatytctgagtaagatgcatagttgcaaataaaaggagttttcaaggataaaaaatgtaaataaaacatctaataaatgtgtaccatcagaaacttatggtata

SEQ ID NO: 316570 - DNA, 201 bp, Homo sapiens
atttttcactttacttgctcctttttctttttttttaaattagaattttccttttttaggtgattttgcacccagagtttctatcctccaccagtcccttrctacccatggactatgaagagtttgttagaggttgtcatcttggagtatttccatcatactatgaaccctggggttatactccaggtatgtgtcatgtat

SEQ ID NO: 316571 - DNA, 201 bp, Homo sapiens
tttccatcgtgaagtagtagtttgaggaaaaattgcattcagttaccacgcagctctttttatgtattttaattctcaatttcagtaggtttgcagggaarccaactcaaagctatatctggaacatggctaagtgttcaatctgtgcttgttgaataaatgagctatgcttgaaataaccttggtatgacctgggttgtc

SEQ ID NO: 316572 - DNA, 201 bp, Homo sapiens
ctaacacaaattcagaactattttacagtgcttcatttcttaatacaaaagaagcctattttatgtgtgtgtgtgtgtgtgtgtgtgtgttatgtgtgtgtataaattggtttactgttaacttattttaaatatattagtgttaatgttactacataccacttttgcctgtattcagcaacctttccattctgttttacc

SEQ ID NO: 316573 - DNA, 201 bp, Homo sapiens
gctaacacaaattcagaactattttacagtgcttcatttcttaatacaaaagaagcctattttatgtgtgtgtgtgtgtgtgtgtgtgtgttatgtgtgtgtataaattggtttactgttaacttattttaaatatattagtgttaatgttactacataccacttttgcctgtattcagcaacctttccattctgttttac

SEQ ID NO: 316574 - DNA, 201 bp, Homo sapiens
taatctacagctaacacaaattcagaactattttacagtgcttcatttcttaatacaaaagaagcctattttatgtgtgtgtgtgtgtgtgtgtgtgtgttatgtgtgtgtataaattggtttactgttaacttattttaaatatattagtgttaatgttactacataccacttttgcctgtattcagcaacctttccatt

SEQ ID NO: 316575 - DNA, 201 bp, Homo sapiens
gctattgatggcagctattggtttatattccaatcccatcacataaaaatgtagaataagtaataggaaaatattcacaggagaagagtgtagaatttcamtcttaatgagataatgagaaaatctaaactttcctgagttctgtactaccctccagttaaatttttatttcttggacataaattttttgctttagagcag

SEQ ID NO: 316576 - DNA, 201 bp, Homo sapiens
tgtgtacattggcactgatggtaatgagtctagttgggttgattctttggccttcaggcagtttgcttgggtgtcagtagtggccatagtagactgggctrgtgtgtgggtcctcaggcttctgggcagtgggtgtggtgtgggtgatggctgtagcaactgcaggacaaccctctggctcccaagcagtctgcactggtg

SEQ ID NO: 316577 - DNA, 201 bp, Homo sapiens
gtaatctacagctaacacaaattcagaactattttacagtgcttcatttcttaatacaaaagaagcctattttatgtgtgtgtgtgtgtgtgtgtgtgtgttatgtgtgtgtataaattggtttactgttaacttattttaaatatattagtgttaatgttactacataccacttttgcctgtattcagcaacctttccat

SEQ ID NO: 316578 - DNA, 201 bp, Homo sapiens
tgtaatctacagctaacacaaattcagaactattttacagtgcttcatttcttaatacaaaagaagcctattttatgtgtgtgtgtgtgtgtgtgtgtgtgttatgtgtgtgtataaattggtttactgttaacttattttaaatatattagtgttaatgttactacataccacttttgcctgtattcagcaacctttcca

SEQ ID NO: 316579 - DNA, 201 bp, Homo sapiens
gtgtaatctacagctaacacaaattcagaactattttacagtgcttcatttcttaatacaaaagaagcctattttatgtgtgtgtgtgtgtgtgtgtgtgtgttatgtgtgtgtataaattggtttactgttaacttattttaaatatattagtgttaatgttactacataccacttttgcctgtattcagcaacctttcc

SEQ ID NO: 316580 - DNA, 201 bp, Homo sapiens
agtgtaatctacagctaacacaaattcagaactattttacagtgcttcatttcttaatacaaaagaagcctattttatgtgtgtgtgtgtgtgtgtgtgtgtgttatgtgtgtgtataaattggtttactgttaacttattttaaatatattagtgttaatgttactacataccacttttgcctgtattcagcaacctttc

SEQ ID NO: 316581 - DNA, 201 bp, Homo sapiens
atagtgtaatctacagctaacacaaattcagaactattttacagtgcttcatttcttaatacaaaagaagcctattttatgtgtgtgtgtgtgtgtgtgtrtgtgttatgtgtgtgtataaattggtttactgttaacttattttaaatatattagtgttaatgttactacataccacttttgcctgtattcagcaacctt

SEQ ID NO: 316582 - DNA, 201 bp, Homo sapiens
cgatagtgtaatctacagctaacacaaattcagaactattttacagtgcttcatttcttaatacaaaagaagcctattttatgtgtgtgtgtgtgtgtgtgtgtgtgttatgtgtgtgtataaattggtttactgttaacttattttaaatatattagtgttaatgttactacataccacttttgcctgtattcagcaacc

SEQ ID NO: 316583 - DNA, 201 bp, Homo sapiens
taaaactatccttcgtgcaattgaaaatgcaccaatccccattgcaaatgctattacataaacttaacaatacttaaatgctgatatgaagtcaataaatsttatgtcacatgataaaggaaaaaggaagtaaaatgtatatattttcttagtacaagtgtatacagacacgaaggtgtttttaacaaaagaaggaggaaa

SEQ ID NO: 316584 - DNA, 201 bp, Homo sapiens
ccctccctccctccttccctgcctctctccttcccttcctcacttccttccttccttgctcacttccttccttcctcacttccttttttccttcaccccctccttccttccttcttccttccttcctcgcttccttccttccttccattcttctttccttcctagaaaggaaagtcaatgtatttaataaaaaaacaagaa

SEQ ID NO: 316585 - DNA, 201 bp, Homo sapiens
atatatataatattcaaagttgatattaaatttctaataagatttcaattcttcagttttaaaaaattttggttggatttatcacagggattaatttatgrtttgtagataattacttaagaataaggatgaagattatataagtataccacggtttgggcatattttaggaggtatgtgaggtattgcctcattgaattc

SEQ ID NO: 316586 - DNA, 201 bp, Homo sapiens
tatataatatataatctgatgcttaggaatcactgaattagtgccagctgtttttatttttgttattaacattttttccctgcagaggagaaattcctgasctgaacgatattttagatcgagatgatctaacaattatgaaaagagccatcttttcaactcaggtaataaggaaaaaagcacccactatgtcccatagtt

SEQ ID NO: 316587 - DNA, 201 bp, Homo sapiens
caggggtctatctttaaccaggcccaggatgtggtctcaggctgtttgcctgtggatttcatttctgccttttagtttttacttcttctttctttggaggmagaaattgggcataaaacaatatgaagggtggtctcctcccttactaggaagagagaaataccatgtgagaatgaaatacgtatttgtgttattggattt

SEQ ID NO: 316588 - DNA, 201 bp, Homo sapiens
cagcagcagcacttgtgcctcacacaggggaaaagcagtggtcgaagaccactcaacatggcttttcagttaatggaagagaaaaaggaatacatacatayacatgtacacagacaaataggaaaaatagttttcgatagtgtaatctacagctaacacaaattcagaactattttacagtgcttcatttcttaatacaaa

SEQ ID NO: 316589 - DNA, 201 bp, Homo sapiens
tagcaattgttatctattctagatggtcaaaggcacgaaaatattttgtttgaattttcaaattgttaactgacaaatactgattgaaagtcaatttgttyattggcaagtacagactgaaaatttaaaatttattttgattttaattaaaatttctgaaaaagtctcaggaaggtgaatataatctctctgtgaaacata

SEQ ID NO: 316590 - DNA, 201 bp, Homo sapiens
ccctccagttaaatttttatttcttggacataaattttttgctttagagcagacattatgccaaatatgctaaaaaaatttactaaagccacgttaataarcaagcgattcattaataaaatccaactatgcaaaacagaactgaagactaaaaagattattcttaaataaccttacttaatatttcctagtatatattca

SEQ ID NO: 316591 - DNA, 201 bp, Homo sapiens
aaatttttatttcttggacataaattttttgctttagagcagacattatgccaaatatgctaaaaaaatttactaaagccacgttaataagcaagcgattyattaataaaatccaactatgcaaaacagaactgaagactaaaaagattattcttaaataaccttacttaatatttcctagtatatattcattcaacaagc

SEQ ID NO: 316592 - DNA, 201 bp, Homo sapiens
cttgcatttgaagttctggtgaaggaagagttagatgagaaacacaatggaactgactggtctcaagacttcatggctttctagtgtagggatattttcaygttgcagccaagaactgactggaggtcaatgccaattggcttacattctctatttgtgtaataggttcagctcttctttatgatcttagcttatgtatca

SEQ ID NO: 316593 - DNA, 201 bp, Homo sapiens
ttcccccttatgttcttcagcaaataaaaatgtttgcatctaccaaagtgtatatgaatttgaaatacgtaatctaacaaacaaggatgttttaagatctytgagtaagatgcatagttgcaaataaaaggagttttcaaggataaaaaatgtaaataaaacatctaataaatgtgtaccatcagaaacttatggtatatt

SEQ ID NO: 316594 - DNA, 201 bp, Homo sapiens
agactaaaaagattattcttaaataaccttacttaatatttcctagtatatattcattcaacaagctttataatggactcacaactatatcacatatacartctttagggacattattaataaatgcatttatatagttattaaatattcactttatttatagatatgaagaaaagactgattactattatactagacata

SEQ ID NO: 316595 - DNA, 201 bp, Homo sapiens
tcatttattttttgatagcaccttggctgttcctagggtgagtttcctattgtatgccttcagtagctttccctaataaaatgtcaggccctagagggccraggctgcatactagacggtaaagtgccccacactctggagctagtcagtcatttccagaacacataaaccttcatagaggttcatgattttaagtgagtt

SEQ ID NO: 316596 - DNA, 201 bp, Homo sapiens
tatctatatctatatctatctctatatctatctctatatctatatctatatgagagtttattatgtagtattgactcacatgttcacaaggtcccaaaacwggccatctgccagctgaggaacaaggaagctaatcggagtcccaaagctgaagaacctggagttcgatgttccagggcaggaagaatccagcatgggaga

SEQ ID NO: 316597 - DNA, 201 bp, Homo sapiens
tagaggttcatgattttaagtgagtttatgctttcattcttacagcttcttaacaagtcatttccttttgagagatgctaagccagcagtttaaatgtcasctttggcactaacctgttataggactcagagaaaatatttaacctctcattcctttcttttgacattaataaaatgaggagagaaatgcctattgtacat

SEQ ID NO: 316598 - DNA, 201 bp, Homo sapiens
tattatgtagtattgactcacatgttcacaaggtcccaaaactggccatctgccagctgaggaacaaggaagctaatcggagtcccaaagctgaagaaccyggagttcgatgttccagggcaggaagaatccagcatgggagaaaaatgtaggctgggatgccaagccaatctagccttttcacatttttctgcctgcttt

SEQ ID NO: 316599 - DNA, 201 bp, Homo sapiens
cttagtcagtaatcttcaagccccttcccttgaaattttttaagctttatgtttttatttctaatagactgaaagagcataatcatattttaaacactctraggctatatgggggactatctgaaggcctcagatgagtaaaagaagtagcgaattagttaactatgtttttcttttcatttcatttcccaaatcaaatca

SEQ ID NO: 316600 - DNA, 201 bp, Homo sapiens
tgaataagcaaaaaaattgaaatattattttagcttttaccaaagcttaaatcttcattaaacttccaatctgaaattttaaagaactaattttggtcttktaatattagctctcattcatgctatttttttaaccacagaaaagcacagtgtcatcaatagcaattgttatctattctagatggtcaaaggcacgaaaat

SEQ ID NO: 316601 - DNA, 201 bp, Homo sapiens
caatgtttaagttccatctatcatactttttaaaaatctttgatagttgactctgtgttttctaattcctcatcagatgcataaaagtgacatcacagtgrtggtgtttttcattatgcctgccaagacaaataatttcaacgtggaaaccctgaaaggacaagcagtgcgaaaacagctgtggtaatctcacatcctgtg

SEQ ID NO: 316602 - DNA, 201 bp, Homo sapiens
cctccctccctccctccttccctgcctctctccttcccttcctcacttccttccttccttgctcacttccttccttcctcacttccttttttccttcaccycctccttccttccttcttccttccttcctcgcttccttccttccttccattcttctttccttcctagaaaggaaagtcaatgtatttaataaaaaaacaa

SEQ ID NO: 316603 - DNA, 201 bp, Homo sapiens
cttcctccctccctccctccttccctgcctctctccttcccttcctcacttccttccttccttgctcacttccttccttcctcacttccttttttccttcaccccctccttccttccttcttccttccttcctcgcttccttccttccttccattcttctttccttcctagaaaggaaagtcaatgtatttaataaaaaaa

SEQ ID NO: 316604 - DNA, 201 bp, Homo sapiens
acagtggtggtgtttttcattatgcctgccaagacaaataatttcaacgtggaaaccctgaaaggacaagcagtgcgaaaacagctgtggtaatctcacawcctgtgaatgttctctagcaataaatgtgaaaagatttcttttaagtgaatgacatctcatgtatcgccttgaactttgttttttccttaagattattac

SEQ ID NO: 316605 - DNA, 201 bp, Homo sapiens
ttcctctactccagacaggaacggttgtttccttatctgtattctcgagacactttatatctgctatagttataggagtgattacaataaattgtgtttttaaaaatgttatgtgtccatttttctagaataactcagttatttgaggcagcaatcattctcatatgtattgtctctgtttaggttctctgagaagcagac

SEQ ID NO: 316606 - DNA, 201 bp, Homo sapiens
cgttatttccttgcacctttccctaacacacattcctctactccagacaggaacggttgtttccttatctgtattctcgagacactttatatctgctatarttataggagtgattacaataaattgtgtttttaaaaatgttatgtgtccatttttctagaataactcagttatttgaggcagcaatcattctcatatgta

SEQ ID NO: 316607 - DNA, 201 bp, Homo sapiens
tcatgtatcgccttgaactttgttttttccttaagattattacagacaaataatacttgactctcttttcatcgtgctactattttaggttatcgtaatgkttataacattataggtgttatacaaattttggaatgagctaccattgaaggaacaaggccctgtagaaatctttaaagatgagtcaaacatttttaaact

SEQ ID NO: 316608 - DNA, 201 bp, Homo sapiens
gcccgcaaccatgcccggctaattttttgtatttttagtagagacggggtttcaccatgtaagccaggatggtctcgatctcctgacctcgtgatccaccygcctcggcctcccaaagtgctgggattacaggcgtgagccaccgcgcccggccagaaattacttactttttaatgataccaattattctaagaattattt

SEQ ID NO: 316609 - DNA, 201 bp, Homo sapiens
gcgctgggaaaaatagcacattgtgcaaattaattgactatatagaattgacaatatggagtactgtatatatacatttttaatagactttatttttagarcagttttaggttcacagcaaaattgaacagaaagtacagaatatcgatgctcttgtttctgcgtttccagtgtgggcccagaactggctcatacaagtgc

SEQ ID NO: 316610 - DNA, 201 bp, Homo sapiens
cttttttttctttttttgagacggagtctcgctctgtcgcccaggctggagtgcagtggcgctatctcggctcactgcaagctccgcctcccgggtccacrccattctcctgcctcagcctcccgagtagctgggactacaggcgcccgcaaccatgcccggctaattttttgtatttttagtagagacggggtttcacca

SEQ ID NO: 316611 - DNA, 201 bp, Homo sapiens
ctaaatctataggtctttttctgaggatctgtctgctgcctggcacatgttacgtacaatacatgcagacagaagggagggatgagggaaagtgggaaaargagggatgggtcatgcagctggcaatagttcatgcttcccttggccttgggaagactgaggctggaaggttcattgaaattggacgctctaaatgaagaa

SEQ ID NO: 316612 - DNA, 201 bp, Homo sapiens
atttcttttttttctttttttgagacggagtctcgctctgtcgcccaggctggagtgcagtggcgctatctcggctcactgcaagctccgcctcccgggtycacaccattctcctgcctcagcctcccgagtagctgggactacaggcgcccgcaaccatgcccggctaattttttgtatttttagtagagacggggtttc

SEQ ID NO: 316613 - DNA, 201 bp, Homo sapiens
ttgcctcagctctggagatgtcaacttaagctgaattggcaagtagtaaaataatagaagagactataaaaaagatacctgtaatttcaaagaatgtcaamaaaacaatagcattatcgtgacaaataaagattaaacattgtcatactgtttaaatgataaatctttctgtttcaaacagggatgttgcacattctgtga

SEQ ID NO: 316614 - DNA, 201 bp, Homo sapiens
acagaaaagcacagtgtcatcaatagcaattgttatctattctagatggtcaaaggcacgaaaatattttgtttgaattttcaaattgttaactgacaaawactgattgaaagtcaatttgttcattggcaagtacagactgaaaatttaaaatttattttgattttaattaaaatttctgaaaaagtctcaggaaggtga

SEQ ID NO: 316615 - DNA, 201 bp, Homo sapiens
gatttcagctcactgcaacctccacctcctgggttgaagcaattctcctggctcagcctccccagtagctgggactacaggcgcacaccaccatgcctgastaatttttgtatttttagtagagatggggtttcaccatgttggccaggctggaaaagattcttaaaattacaaaaatcttcatagccctatgccacattt

SEQ ID NO: 316616 - DNA, 201 bp, Homo sapiens
tctgttgcctcagctctggagatgtcaacttaagctgaattggcaagtagtaaaataatagaagagactataaaaaagatacctgtaatttcaaagaatgwcaacaaaacaatagcattatcgtgacaaataaagattaaacattgtcatactgtttaaatgataaatctttctgtttcaaacagggatgttgcacattct

SEQ ID NO: 316617 - DNA, 201 bp, Homo sapiens
ccctgtatactcatagttcagattcaacaatgatcaacgaattcccgtcttgttacacctatacctccatctactccccctctctgctctctatcctgttscaatcatcatgaagcaaaaaaattttaagctctttgtgctggccatggtgttctgttgcctcagctctggagatgtcaacttaagctgaattggcaagta

SEQ ID NO: 316618 - DNA, 201 bp, Homo sapiens
caaatccctcccacaacacgtgaggattatgggaactacaattcaagatgagatttgggtggggacacagtcaagctgtatcagggtacaagctcgggttycttacatatgtatgttgcatagtggtgaagtctgagcttttagtggaccatcacctgaaaagtgaatgttgtatccaatccgtagtttttcagtcctcac

SEQ ID NO: 316619 - DNA, 201 bp, Homo sapiens
cactcagtggtgtgtgtggacaccggctatcataggctggagtggagtgatcctcaggcccccagcagaatgcctgagtgaattagcagctactgcattgytgccctgctcttgaaggggtgcggggtgtgttgctttcagtggcagcagctataaatgggttgctggtgggcatgtgtttcagccccagatggtggctgc

SEQ ID NO: 316620 - DNA, 201 bp, Homo sapiens
ccccagtggtggtggtgggcctagcattcctgtccttgggccccatggctgtgtacattggcactgatggtaatgagtctagttgggttgattctttggcyttcaggcagtttgcttgggtgtcagtagtggccatagtagactgggctggtgtgtgggtcctcaggcttctgggcagtgggtgtggtgtgggtgatggct

SEQ ID NO: 316621 - DNA, 201 bp, Homo sapiens
gtttaatttttaaaagaatttaaggagacttcttagttttctttgaaagtttggtaaaatttgacagtaaagccatctggtcttgaaattttcttttttgrgagactttttactactgattcaatttcattattcattactggtctgttcaggttttctattctttcttaattcaatcttggtaggtggtatgtgtccaga

SEQ ID NO: 316622 - DNA, 201 bp, Homo sapiens
tttggaagtgtcatatttcttcacctttttatgtttattttgttcttgcattgatatctctgcatctggtgtaatgattgctgcttccagttttgtaaatktgtttttgtaggggaagacttttttctgaagatgtatcttggtgttgattgagtagggcactttgattttgatttctaggtgcatacagcagcatagtct

SEQ ID NO: 316623 - DNA, 201 bp, Homo sapiens
cttctgcttgatctgatctattgttgaagtttttgaatgtattttgtatttctttcaataaactcttcagttacagaatttctgtttggttcattcttgtygtatctatctcttgggtaaatttctcattcatatcctgaattgtttttctgatttctttttattgtttatctgagttctcttgtgtctcactgagcttcc

SEQ ID NO: 316624 - DNA, 201 bp, Homo sapiens
catccttgtctggttatggaatcaggataatactggcctcagagaatgagttagggagaattccttcctgtttaatttttaaaagaatttaaggagacttsttagttttctttgaaagtttggtaaaatttgacagtaaagccatctggtcttgaaattttcttttttgggagactttttactactgattcaatttcatta

SEQ ID NO: 316625 - DNA, 201 bp, Homo sapiens
tagcttgtttaatttgctattgagtactacataaagtttatatcctcagagtgcaaatacattgtcctgtcttgcatgacttaatatcactacatggctgygttctttatatgacaggtgcattttggaagatggctgatagaaggaagtccttatgtggtactttttgacataggctattcagcttggaatctggacagg

SEQ ID NO: 316626 - DNA, 201 bp, Homo sapiens
ttaaatgataaatctttctgtttcaaacagggatgttgcacattctgtgaaggaaaagtttggaaaaaaactctatgatgcattattaaggtaggtgcttraaatgctttctacttcaatcacttaaggcttcactattcaaatttaacaatttagacatcataacttattaattttgttccaaatatcaaggaattaata

SEQ ID NO: 316627 - DNA, 201 bp, Homo sapiens
tttgacaaaacttgtaaatagctgtacaaataagaatacatttatatgcaggcaagttctaattcaatgatgaactcattaagggttgatatgtcaatctsaagctgagagagacttcatgagattttaattcaaaatatatattgacaatgtgtattaaatatgtacttaaatattaagtctatgtgaacacatttactt

SEQ ID NO: 316628 - DNA, 201 bp, Homo sapiens
acgccagtgaaactaagttattttatggatcttataatcagtagcatgtgtgttgatctcagggtctagaacagtgcctggtacatagaaaatgctcaatrgatttttttttgaaaaaatttgtttttcaacccctaagctgcctttaatacttattttctatcatttccctttcaaggggaagggaagtgtttttgtgga

SEQ ID NO: 316629 - DNA, 201 bp, Homo sapiens
acctgaggctagaaaagacattcttacatagtcacttaaatgattactttggacattttttcattagtggttttaagagctcctttaaaacatctcatgamacttgtccttccacttgcttacaaaattatttttgaattaatatattcaatataaaaattatgtatagtttagtaactacaaaaaagtcctaaatacttc

SEQ ID NO: 316630 - DNA, 201 bp, Homo sapiens
tccaaaacatagaatttgagtcacattagagaaaagaatatttcttagtcgagtggaattattacaaaggagataaaacaaatgtgtcaggcttgcatcaraatgcttgttataatagggaagaatcagatactggaggacagccttgctaaaagaaatcagtaaagttcatcttaagtcaagacttcaggacacctttat

SEQ ID NO: 316631 - DNA, 201 bp, Homo sapiens
cacattagagaaaagaatatttcttagtcgagtggaattattacaaaggagataaaacaaatgtgtcaggcttgcatcagaatgcttgttataatagggargaatcagatactggaggacagccttgctaaaagaaatcagtaaagttcatcttaagtcaagacttcaggacacctttatattccaaataagtcccggaag

SEQ ID NO: 316632 - DNA, 201 bp, Homo sapiens
gaacatgtcaagtaaaaagcttagtaatatgactccctgtatactcatagttcagattcaacaatgatcaacgaattcccgtcttgttacacctatacctycatctactccccctctctgctctctatcctgttgcaatcatcatgaagcaaaaaaattttaagctctttgtgctggccatggtgttctgttgcctcagct

SEQ ID NO: 316633 - DNA, 201 bp, Homo sapiens
gacacctttatattccaaataagtcccggaagcaatcaagaagtccaggtctctcatatagtagctgcaggcggaaaacaaaagcttcatgtattcatagyatgcaaaggagattcttcaacccatatcttcctttgacacacacacaagacttagtcatcatcattagtgccatctcaaaagactgaaggtgtgaaggtt

SEQ ID NO: 316634 - DNA, 201 bp, Homo sapiens
aatgtttataacattataggtgttatacaaattttggaatgagctaccattgaaggaacaaggccctgtagaaatctttaaagatgagtcaaacatttttwaactttctattgtgaaattctaagaacatgtcaagtaaaaagcttagtaatatgactccctgtatactcatagttcagattcaacaatgatcaacgaatt

SEQ ID NO: 316635 - DNA, 201 bp, Homo sapiens
aagaagattaaactacactgaattgttataagaagcaaaaacagactgagagagagaactagaggctctccacagtgatttcgacccctttttcttttttwtttttgagatggagtcttgctccattgcccaggctggagtgcagtggcgtgatctcagctcactgcagcttctgcctcccgggttcaagcaattctctgc

SEQ ID NO: 316636 - DNA, 201 bp, Homo sapiens
ctggatgcaaagaagattaaactacactgaattgttataagaagcaaaaacagactgagagagagaactagaggctctccacagtgatttcgacccctttwtcttttttttttttgagatggagtcttgctccattgcccaggctggagtgcagtggcgtgatctcagctcactgcagcttctgcctcccgggttcaagca

SEQ ID NO: 316637 - DNA, 201 bp, Homo sapiens; identical to SEQ ID NO: 66179

SEQ ID NO: 316638 - DNA, 201 bp, Homo sapiens
gtatgaaatttctgagaatatgtctccaaattcattttttaaagtccaatcattgatcaattatcctctcgactctaatgactacataataaattcttttytttcctctaaagcctttagttttcttgttttgccccccgccccaccccccctcccattttatgttgtttgtttgtttttgtttttgacacggagtcttgc

SEQ ID NO: 316639 - DNA, 201 bp, Homo sapiens
cttataagagtcattcagagattcccaaaaactctggcgccttatcaagtatttatagatttttcagttcagatataatttctcaatcaggggtcactgtwaccataaacaaccatccctaataacatgacttatattccacctatatcaggtttccagaggaacagatctagaaagttaacctgaagtaaaatttgcccg

SEQ ID NO: 316640 - DNA, 201 bp, Homo sapiens
gaagttgaagaaaacatcaagagaaaagtccctactttgtttctctctagagaaatagtgtagtcatatttctcaactgtagtgagtaatgggtataatayggtttttcaaaatgatgactacaggaaatacctcctttcagtcatgcaataggtttataaacacctggatgctcacacagcttagcagtggtgatttaat

SEQ ID NO: 316641 - DNA, 201 bp, Homo sapiens
gtaagcaagtttagataaacacagcagaccacttaaaaaattccactggactataaacatattgattctagtcataatctctaaagttaatccaatattawaattgttaaaatctcagtgtctccatgtactttttaaaatttaataagtttacaaagtcctatatgtatttcttcatgtttcgtttgagtctattcataa

SEQ ID NO: 316642 - DNA, 201 bp, Homo sapiens
tccttatgtatattgtagtaatgggtttaattcaagtttttattacttttttgtggtcataaatttttacacagccttgaggtaagccacttggtgaaatrtgtgattttgtttagcttgtgtagaagggccattgttagcaaatgtgtgttttatttttgtttctaacagtttaacattgacaaagaggctggggaaagg

SEQ ID NO: 316643 - DNA, 201 bp, Homo sapiens
agaatggagagaggagaacaaaccaccacggcttttttctttttcttttgtcttatctctttttttctttctgaatctagaacataaggattctatagtasagtactgaaataaccaaattgtaggagatttttcactttacttgctcctttttctttttttttaaattagaattttccttttttaggtgattttgcaccc

SEQ ID NO: 316644 - DNA, 201 bp, Homo sapiens
ctggtcatcagaatggaacagaacaggacagggattttcacactgcttttccatacagtgtctggaatctatagataacataactggccaggtcaggggtytatctttaaccaggcccaggatgtggtctcaggctgtttgcctgtggatttcatttctgccttttagtttttacttcttctttctttggaggcagaaatt

SEQ ID NO: 316645 - DNA, 201 bp, Homo sapiens
gctggatccaaagtgtgcatattttccaaatgtatccatatattgtggctttgtgttttaatagaggtagcagcaatattagaggagagaattaaggaacsattctagtgtagcaggacaagctgcatacaaaacccctcagacaccgagttaaagaaggaagggctttattcggctgggagcttgggcaagactcacatc

SEQ ID NO: 316646 - DNA, 201 bp, Homo sapiens
tccacagaattgatcatcctatccacttgattattaaaatcatgagcactcacatgggatgaaaatatctttgtagtttttgactaatcatagaggtccatccacatacctcttccccaaatttctttgtcatcaattttccagtcatgctttttccaagtccctgaccatctagccaaacctttggctacagcccatgaa

SEQ ID NO: 316647 - DNA, 201 bp, Homo sapiens
atgaaggaggaaaaagaaggttcttactcccaaccatgtgaaatcattttttttactcaggaaggtgggatacaaagtgggttctcaactaaccgagcaayacaatatgcataaataaaagcaactataaaaaaagataccatgtcatagctattgatggcagctattggtttatattccaatcccatcacataaaaatgt

SEQ ID NO: 316648 - DNA, 201 bp, Homo sapiens
ttgttcatgggtccattggacgatgacatgagtggcctgggaaaaggctgagtggtgtccacagaattgatcatcctatccacttgattattaaaatcatgagcactcacatgggatgaaaatatctttgtagtttttgactaatcatagaggtccatccacatacctcttccccaaatttctttgtcatcaattttccag

SEQ ID NO: 316649 - DNA, 201 bp, Homo sapiens
agtaagcaagtttagataaacacagcagaccacttaaaaaattccactggactataaacatattgattctagtcataatctctaaagttaatccaatattwtaattgttaaaatctcagtgtctccatgtactttttaaaatttaataagtttacaaagtcctatatgtatttcttcatgtttcgtttgagtctattcata

SEQ ID NO: 316650 - DNA, 201 bp, Homo sapiens
tttgttcatgggtccattggacgatgacatgagtggcctgggaaaaggctgagtggtgtccacagaattgatcatcctatccacttgattattaaaatcatgagcactcacatgggatgaaaatatctttgtagtttttgactaatcatagaggtccatccacatacctcttccccaaatttctttgtcatcaattttcca

SEQ ID NO: 316651 - DNA, 201 bp, Homo sapiens
tgtgtcccagaacttaaagtaaaattttttaaaaaagaaaataagagatactctccaactcccaactcccatagaaggtggagctgagtccaggaggaagwctgaggaaataaaagtgtgtaaaaattaaaaaaagaagaatatttctggagaggagttccaaaatgttcatcagactctcaaaagggctgatagtcccca

SEQ ID NO: 316652 - DNA, 201 bp, Homo sapiens
aagcataacttccatccctgcaactgtggccactttgttcatgggtccattggacgatgacatgagtggcctgggaaaaggctgagtggtgtccacagaaytgatcatcctatccacttgattattaaaatcatgagcactcacatgggatgaaaatatctttgtagtttttgactaatcatagaggtccatccacatacc

SEQ ID NO: 316653 - DNA, 201 bp, Homo sapiens
gccaaacccgacagcatgaactctctatagaacagggcagacacatacacactcggttcactcacctccccagccacaccacctccctgcgactaagagtyttaaactcttgaactagtggatgtcacaccacatgaaagcatgaaggaggaaaaagaaggttcttactcccaaccatgtgaaatcattttttttactcag

SEQ ID NO: 316654 - DNA, 201 bp, Homo sapiens
tctcatatagtagctgcaggcggaaaacaaaagcttcatgtattcatagcatgcaaaggagattcttcaacccatatcttcctttgacacacacacaagasttagtcatcatcattagtgccatctcaaaagactgaaggtgtgaaggttggatgaaatgtcaatgacctattgttgaaattagtcacccttattaattct

SEQ ID NO: 316655 - DNA, 201 bp, Homo sapiens
gagacaccctaatggatctcctatattccatgcatacgcttccttacctccattgtggagttgtagactgatttcatcttgatagtctgggttaatcaccscagccaacactgtaactctcttcttagcctgttgacttaaaggtgggaggagcccaaagtgtccaggtggcaatcttaatttgcagtttaatggaatcat

SEQ ID NO: 316656 - DNA, 201 bp, Homo sapiens
atatagtagctgcaggcggaaaacaaaagcttcatgtattcatagcatgcaaaggagattcttcaacccatatcttcctttgacacacacacaagacttartcatcatcattagtgccatctcaaaagactgaaggtgtgaaggttggatgaaatgtcaatgacctattgttgaaattagtcacccttattaattctttcc

SEQ ID NO: 316657 - DNA, 201 bp, Homo sapiens
gaatggagagaggagggcatccgtgcatgtgagggagtgtatggagaaagattagttacacagaagaagattgacccaatatgtagcaaattaaaggtagyaaaaaccaggggtgtgtgtgtgtgtgtgtgtgtgtgtgtgttctttctgtctactcagagcacttgggggaagtaataggccaatgacaatgagcacacc

SEQ ID NO: 316658 - DNA, 201 bp, Homo sapiens
tgctcaggacctgagctcactgtatttgtcagggttccctagagagacagaactaataggagatagatagatagatagatagatagatagatagatagatdgatatagatttagatataaaagggagtttattaagtagtgttaacttacacaatcacaaggtcccacaataggccatctgcaagcagaggagcaaggaag

SEQ ID NO: 316659 - DNA, 201 bp, Homo sapiens
atttaatcataggaagctctgaccatcactctcctctcccgactgaagcaggccttcagagtagcacgtgccacatagctggcagccaaacccgacagcaygaactctctatagaacagggcagacacatacacactcggttcactcacctccccagccacaccacctccctgcgactaagagtcttaaactcttgaacta

SEQ ID NO: 316660 - DNA, 201 bp, Homo sapiens
gtgtgtgtgtgtgtgtgtgtgtgttatgtgtgtgtataaattggtttactgttaacttattttaaatatattagtgttaatgttactacataccacttttkcctgtattcagcaacctttccattctgttttacctttatatgtacctcccacttaccagaatagtttcagattggcagacagataggtgtctgattctat

SEQ ID NO: 316661 - DNA, 201 bp, Homo sapiens
tctacagctaacacaaattcagaactattttacagtgcttcatttcttaatacaaaagaagcctattttatgtgtgtgtgtgtgtgtgtgtgtgtgttatrtgtgtgtataaattggtttactgttaacttattttaaatatattagtgttaatgttactacataccacttttgcctgtattcagcaacctttccattctg

SEQ ID NO: 316662 - DNA, 201 bp, Homo sapiens
ttttctttattaaaaagaaaaagaagtatcagatatgagtgatctttggtagagagaaaacagaattgtaataataaatgtttatctttcccagccccctktgtacattaacagaattcatgtgtacattttgttactgttgctgtatttcatttgaaactgtttggttttgttttgttttagtcatctcgactttgatct

SEQ ID NO: 316663 - DNA, 201 bp, Homo sapiens
aataaataaagagtcagacaagcctttgtctctgtttcttgttttgtttttcctactgatctaggtagggtctgctgtgagccaggagctttcctgggcgmtttttgtacaggatctcatttaatcctctttataaccttcagctgacctctaatatcccttcctcatccctgggcttctgcaattggctggtttagagcc

SEQ ID NO: 316664 - DNA, 201 bp, Homo sapiens
ccagaatccaagattttgttcgaggtcatttctatgggtatgattttctttattaaaaagaaaaagaagtatcagatatgagtgatctttggtagagagaraacagaattgtaataataaatgtttatctttcccagccccctgtgtacattaacagaattcatgtgtacattttgttactgttgctgtatttcatttgaa

SEQ ID NO: 316665 - DNA, 201 bp, Homo sapiens
gaattaggtattatattttattaacaattcttcaaaaatttggcaataacttaggcctgtgctgatttaagtgcctatttaatcacctgcttaaagaactstgtagaatggttctaaactctgagtgcattgataagtttttgatatgaatgtcatatttgattcagcaaacattgcagatcattttgaatttgaatttat

SEQ ID NO: 316666 - DNA, 201 bp, Homo sapiens
ttaagatcagaagtgtcaatttctatgtttatttaaaaaccagtaagtattatttctataggactatggggcccctttcattataagtggtttttattttytcatttgtgtttctgtatttctgaaatatctacacctagcacacctcctataataagtgagctacatccctgggaatgcaggaatgtatccatcaaagtg

SEQ ID NO: 316667 - DNA, 201 bp, Homo sapiens
actgtaactaacatgaactcacaagagaagaccattcacttacttaaggaaaactttcaggtttgtgagaaagatgatgaacttgcttttaaatggattgmatttgagacaccttgtgaaaaccgaggaggaaggataattggtttggagttcagcagaagatacagagtaaacatgtttttgaggaagtcatttgtacat

SEQ ID NO: 316668 - DNA, 201 bp, Homo sapiens
gagtatgtcagtactaactaggcctcattctcatatagtttaacctaagctggtctttctgtctctgtctcctggaaaggaaatagtagaggcagggaaastttatttccctgtagacttctgtttttctcagaacattttgtgtcacacttttatctaaatctataggtctttttctgaggatctgtctgctgcctggca

SEQ ID NO: 316669 - DNA, 201 bp, Homo sapiens
aaatctataggtctttttctgaggatctgtctgctgcctggcacatgttacgtacaatacatgcagacagaagggagggatgagggaaagtgggaaaaggrgggatgggtcatgcagctggcaatagttcatgcttcccttggccttgggaagactgaggctggaaggttcattgaaattggacgctctaaatgaagaatg

SEQ ID NO: 316670 - DNA, 201 bp, Homo sapiens
ttatgaattttttatgaactggaagttttataaattttaaattttatggtagtcagaaagtagaatgtcaataaacatctaactttatagttttaaagatrcttttttctacaatggtaccctctttgaaaagagaattttcataataattttgttttgcctttctagatgtagttactccaaacggcttgaatgttaaga

SEQ ID NO: 316671 - DNA, 201 bp, Homo sapiens
gaaccctggggttatactccaggtatgtgtcatgtatagagtgtggaatgttttgaattttgttagtatattattttatgtgcatatatataatattcaargttgatattaaatttctaataagatttcaattcttcagttttaaaaaattttggttggatttatcacagggattaatttatgatttgtagataattactt

SEQ ID NO: 316672 - DNA, 201 bp, Homo sapiens
caatgaatgaggagtcactgaaattctatccacagtagtgggaagtactaagtagtcagatatgttttggaagaagcactgttaccagttgagggagaggrgaggagggaaattagactgtggtgtgacccaggatggaaagttttgcccaaatgtgggggaaaaatgtttactctctcctttgcccaggtcttactacaa

SEQ ID NO: 316673 - DNA, 201 bp, Homo sapiens
acttatggatctgctgagatataattaatgtttgtaatgtccttgaggatccaaggggtaaatctctccaataaaacaaagacttcagactttttttttttactttaatccttggcatatgataagattataaagtgataaaatcaatttaaaattgataattcaacagccctctttatgtcttatcttctttaccaattg

SEQ ID NO: 316674 - DNA, 201 bp, Homo sapiens
tgcccaatttcttcacccttttaattaccccattaagtgatattttgcttgctcaatttttgccttttcaatcagatctaatttattttatatttttaaamtttatttatatatatttagaaggtatgtactagttcgttatcatgctgcttataaagacatacctgagactgggtaatttataaggaaaaaacgtttaat

SEQ ID NO: 316675 - DNA, 201 bp, Homo sapiens
ttgttttttttttagtttgtttgttttgtgtttttttcttccttccttccttttctttctttcattctctctctctctctctttctttctttctttctttyttattatttatgattgtggtttggtgattttctgtagtggtaacgtttgagttctttctcttctttatttgtgttttgctctaccagttagttgtatacc

SEQ ID NO: 316676 - DNA, 201 bp, Homo sapiens
gatgctctggtgttgagtgtgaatgtttagaattgttatatactcttgctgaattgttccttttatcattatgtaatgacttttgtctcttagtgtttttyatttaaagtcaattttatctgttataggtataactacttttgctcatttttggtttctctttgtatggaagatctttcatctttttactttcagtctata

SEQ ID NO: 316677 - DNA, 201 bp, Homo sapiens
aatccccaactattattgtattggattctatttcaccctttatatctaataacatttgctttacatatctggatgctctggtgttgagtgtgaatgtttaraattgttatatactcttgctgaattgttccttttatcattatgtaatgacttttgtctcttagtgttttttatttaaagtcaattttatctgttataggt

SEQ ID NO: 316678 - DNA, 201 bp, Homo sapiens
gagctgacatcttcctagaatccttatccaggctaaatttcctgctgagggtaagaaagctctaggacatggtataacactcttgtagggagaactttctyctgtgggaagtgaagaattttttggcttcttaaatagttttcaagagaataaacgataatcgtattctaaaaatggcttcagcctttcaatttacatatt

SEQ ID NO: 316679 - DNA, 201 bp, Homo sapiens
tgttgtatttcaattttcatttgtttcaaaaaatttttgatttccttcttaattttcttcttgacataacgttcattcaggagcatgttgtttaatttccrtgtatttgtataggttttaaagtttttcttgttattgatttctagttttattccattgtggtctgagaagatgcttaatatgatttcaaatatttcaaat

SEQ ID NO: 316680 - DNA, 201 bp, Homo sapiens
tggtacaaatctttgctctaccatttatgtgctgagtgatgttgggcaagttacttgacccctctaaccctccattttcttctgtactgaaaaaaacatakttatcagagtgttgttaaaagataagatgataataatatgtatataacacttagcacatttcagtacttaataaagaatagctatatattgaatgaatcc

SEQ ID NO: 316681 - DNA, 201 bp, Homo sapiens
gtcagtcaagattcctggggctaagatctctagaagtaaagctgagctatatttccagggttggcagatctataaagaaggcagcagactaagtccatgamgactgtatttaaatccctgacacttatcaattttgtaaattcacttaatctctctgcacttcagtcttctcatctgtgaatggtcataaaataaccccac

SEQ ID NO: 316682 - DNA, 201 bp, Homo sapiens
tcagtctctttttcttggttagtctagctagagccatatccattttatcttttttaaataacaacttttcattttgctaatcccttgttgttgttgtttttctctatttcattaagttcttctgttcttcattttttctttccttctgctagttttgggttttgttcttgcttttctagcttgttgaggtacatgattaga

SEQ ID NO: 316683 - DNA, 201 bp, Homo sapiens
ttcagtctctttttcttggttagtctagctagagccatatccattttatcttttttaaataacaacttttcattttgctaatcccttgttgttgttgtttttctctatttcattaagttcttctgttcttcattttttctttccttctgctagttttgggttttgttcttgcttttctagcttgttgaggtacatgattag

SEQ ID NO: 316684 - DNA, 201 bp, Homo sapiens
aaataagagatggaaataagaatagaaattagaagtaagaggtttccttttccaattttccaaatgcacaaaaggtgtcccatacacttgtggaaaacaaratggcaggaggtagtttagtgcagggttaaggaaacagtatgtggggtcagactgcatggattctgcttcgacttaccagctgtgtgttcttggacggcg

SEQ ID NO: 316685 - DNA, 201 bp, Homo sapiens
ttatttcagtctctttttcttggttagtctagctagagccatatccattttatcttttttaaataacaacttttcattttgctaatcccttgttgttgttgtttttctctatttcattaagttcttctgttcttcattttttctttccttctgctagttttgggttttgttcttgcttttctagcttgttgaggtacatga

SEQ ID NO: 316686 - DNA, 201 bp, Homo sapiens
tcatgcttcccttggccttgggaagactgaggctggaaggttcattgaaattggacgctctaaatgaagaatgccttgctgatccgtgttttaaaagtgtkttgcatcagtgaaacaattttccaggaatggaaaagtaccttatttcctaaacatacgtaacacttacatacctctgtgtccttcctgatgttatcatct

SEQ ID NO: 316687 - DNA, 201 bp, Homo sapiens
aatcttttctatttctgtggtatcggttgtaatatattttcttttttatttctgattttctttatttcagtctctttttcttggttagtctagctagagcyatatccattttatcttttttaaataacaacttttcattttgctaatcccttgttgttgttgtttttctctatttcattaagttcttctgttcttcatttt

SEQ ID NO: 316688 - DNA, 201 bp, Homo sapiens
gaattcataaataggtgctgcatttaacagcttggcacatagtaaatacataataagtattagcttcttttagttcttagcccagaatctgacacatgatkggaactcattatttttaggagagatgtgaatagggtttggtgagaggtgaagaaagcggatttatcttctcctgcaggatttggtaagacgttttataaa

SEQ ID NO: 316689 - DNA, 201 bp, Homo sapiens
gtatttggggtgtctcctgggtcctgcaggagcaatctacttccttcagagggtctgtgggtcctctcaggattgctggtttgttcttgcagtctatctgsagctaaaattcacaatgcgagcctccacatgctgctctgtccatctgagttggagctgcaatctaggcctacctcccatccgccaagatcctgagaagtt

SEQ ID NO: 316690 - DNA, 201 bp, Homo sapiens
ttatttttaggagagatgtgaatagggtttggtgagaggtgaagaaagcggatttatcttctcctgcaggatttggtaagacgttttataaaagagatgaygtgttagctagatcttgattaatgatctggaatttgtcatgcaaataacaggaaaggggactcaccaggcagagaaaaaaagtagaggagaaggcacaga

SEQ ID NO: 316691 - DNA, 201 bp, Homo sapiens
gaaagtgggaaaaggagggatgggtcatgcagctggcaatagttcatgcttcccttggccttgggaagactgaggctggaaggttcattgaaattggacgytctaaatgaagaatgccttgctgatccgtgttttaaaagtgttttgcatcagtgaaacaattttccaggaatggaaaagtaccttatttcctaaacatac

SEQ ID NO: 316692 - DNA, 201 bp, Homo sapiens
tttttttttaacatagcttcttttttcttgtttttgctttatgctgctaaatctgataacccatgtattcaactcagtaggtagtttccgtcatatgctcrgagtggtccctctctttcttgtcacagaccaatgttttgaaaaccaagaatgtcttcctgcctgagcaacaaaatctcctgggaagaatgaatcagttgt

SEQ ID NO: 316693 - DNA, 201 bp, Homo sapiens
cacataataggaactcaaatcatgttctatgaatgaaaatattgtattcacttttactttgccattttttaatttctgtgattgaattcttaagtactggrgtttgcatatcattttattcttaagtttaacttatctcctacttatggatctgctgagatataattaatgtttgtaatgtccttgaggatccaaggggta

SEQ ID NO: 316694 - DNA, 201 bp, Homo sapiens
tattgtattcacttttactttgccattttttaatttctgtgattgaattcttaagtactggggtttgcatatcattttattcttaagtttaacttatctcytacttatggatctgctgagatataattaatgtttgtaatgtccttgaggatccaaggggtaaatctctccaataaaacaaagacttcagacttttttttt

SEQ ID NO: 316695 - DNA, 201 bp, Homo sapiens
taaatttttacacagccttgaggtaagccacttggtgaaatgtgtgattttgtttagcttgtgtagaagggccattgttagcaaatgtgtgttttattttygtttctaacagtttaacattgacaaagaggctggggaaaggcagatttaccaccggtactgcatggagcgagcttccgttcattgcgctcacgtgttcac

SEQ ID NO: 316696 - DNA, 201 bp, Homo sapiens
tttttttttcctaatgtaggtgacagatcatgcagatggtaaatatgtcgttgcccaattccatgaatggcaggctggaattggactgatcctttctcgarccaggaaacttcctattgccacaatatttacaacccacgctacactacttgggaggtatctctgtgcagcaaatattgatttctacaaccatcttgataa

SEQ ID NO: 316697 - DNA, 201 bp, Homo sapiens
gtattatccttgctaaatattcatgctttatgtttcgactcctttaagttgcaaaataatttatagacaccataactccacttatgatgtggaccatgatyacaatcaagcttcatcaacaacttttctgaatgctttttttttcctaatgtaggtgacagatcatgcagatggtaaatatgtcgttgcccaattccatga

SEQ ID NO: 316698 - DNA, 201 bp, Homo sapiens
tcaagcttcatcaacaacttttctgaatgctttttttttcctaatgtaggtgacagatcatgcagatggtaaatatgtcgttgcccaattccatgaatggyaggctggaattggactgatcctttctcgagccaggaaacttcctattgccacaatatttacaacccacgctacactacttgggaggtatctctgtgcagc

SEQ ID NO: 316699 - DNA, 201 bp, Homo sapiens
gggatgttgcacattctgtgaaggaaaagtttggaaaaaaactctatgatgcattattaaggtaggtgcttaaaatgctttctacttcaatcacttaaggyttcactattcaaatttaacaatttagacatcataacttattaattttgttccaaatatcaaggaattaataacctttgaaaatgtgttatgtcatgtgaa

SEQ ID NO: 316700 - DNA, 201 bp, Homo sapiens
ggagttaatagccttaaggagttttgtctccagggtatgaacaatgaatgaggagtcactgaaattctatccacagtagtgggaagtactaagtagtcagrtatgttttggaagaagcactgttaccagttgagggagaggggaggagggaaattagactgtggtgtgacccaggatggaaagttttgcccaaatgtgggg

SEQ ID NO: 316701 - DNA, 201 bp, Homo sapiens
atttacattcaatgttagtaatgtaaatgcctggctatgccaggcaggaatggcctgctcagggacccagtgagctcccagggcctttctcactgcttcckctacacctgtattttgctcagctctctaagttaactcaactccaggtaaggtcagaaacttctcccacaaacagaccttcagtttctccagtgggagtgt

SEQ ID NO: 316702 - DNA, 201 bp, Homo sapiens
catttcatggcctatcatatggtctaccttggagaaatttccacgcgctgttgaatagaatgtgtgttctgtggttattggatgaaatgttctgtatatawctgttaagtccatttgttctaaggtataatttaaatccattatttttttgttgactttctgtcttgatgaactgtctagtgctgtcaatgaagtattgaa

SEQ ID NO: 316703 - DNA, 201 bp, Homo sapiens
tcagtctgtagttttcttttttggttatgtccttccctggttttggtgtgatgctggcttcatagaatgaattagggcaggttccttctttatctgtcttktagaatagtgtcaaaaagatggggaccaattcctctttgaatgtctagtagaattctgttgtgaatccatctggtcctgaacttttttttggttggtaat

SEQ ID NO: 316704 - DNA, 201 bp, Homo sapiens
tgaatgctttttctgcatctattgagatgatcatgtaatttttgtttttaaatctgtttatgtggtgtatcacacttattgacttgcagatgtcaaaccarccctgcatccctggcatggaacctgcttgatcatggtggattatctttttgttatgttgttgaatttggttatctagtattttgttaaggattttagcat

SEQ ID NO: 316705 - DNA, 201 bp, Homo sapiens
ttcatttgacaaaacttgtaaatagctgtacaaataagaatacatttatatgcaggcaagttctaattcaatgatgaactcattaagggttgatatgtcartctcaagctgagagagacttcatgagattttaattcaaaatatatattgacaatgtgtattaaatatgtacttaaatattaagtctatgtgaacacattt

SEQ ID NO: 316706 - DNA, 201 bp, Homo sapiens
gaggagtggtgagagtgggcatccttgtcttgttccagttctcagagggaatgctttcaacttttccccattcaatattatgttggctgtgggtttgtcayagatggcttttattacactgaggtatgtctcttgtatgctgattttgctgagcattttaatcataaatgtatgctggattttgttgaatgctttttctgc

SEQ ID NO: 316707 - DNA, 201 bp, Homo sapiens
aatataatagggcctggcacaaagtgagccctacataattgctgtagaaagataaatacattttaagatgtaattgtcatactgtacgaatcacattatayagttcatttaggaattattcacatgaaagctttcactggaaaccttggctacttaaaattgattctactgtggccatgtatgtaaaagagtgtaacaaag

SEQ ID NO: 316708 - DNA, 201 bp, Homo sapiens
gtgttaggaacatttcaagacctttcttctactattttgaaatatacaatatattgtttttaactataatcaccctactttgctattgaacatcagaacayattccttctatctaactgcctgtttccattaaccaacttctcttcgtctcccttcctcccataacgtacacacccttctctacctctggtttctgtcatt

SEQ ID NO: 316709 - DNA, 201 bp, Homo sapiens
atatgagatcgactttcttttattgatatatgacgtgtttatatgtatcaggtacatgtgacattttgttacatgcatataatgtataatgatcaagtcasgtatttggggtattcatcacctcaagtatttatcgtttctatgtgttaggaacatttcaagacctttcttctactattttgaaatatacaatatattgtt

SEQ ID NO: 316710 - DNA, 201 bp, Homo sapiens
tcatatgacttccaaagtctgtaatttttaagcatatacaaaatagtgaaatttctccatatgtgtataatatgtatatatgtgtgtatacatatatatakagagagagacagagagagatgggggagagagagagagagagagcgagagagaggcagagaaagagatccttattttggctgatatctattctatacttct

SEQ ID NO: 316711 - DNA, 201 bp, Homo sapiens
cccctgatcccttttctattccttttggatggctttcctcttgtgcctgccacatcccctctttctcgaacagtctgatctgccaggccatggcaagcctsatttcagcgcactctcctttgctgctttggaagagtgagagtagcattttctttgcagtttcctttctcagagctgtactgtctttaagccctggacata

SEQ ID NO: 316712 - DNA, 201 bp, Homo sapiens
caagagcaaaactctgtctcaaaaagaaaaaaaaaatggatgtgtaccacgtacctcatggatgccagatggtgctggaggctcaacaagacacagcgtcrctgccttcaaggcacttgcagttgaaggcatgatggcatcacagtactgcgagactgcagttcacagcgccctgtgctgaaccgcagggcctacagcgct

SEQ ID NO: 316713 - DNA, 201 bp, Homo sapiens
actggggtgtggttcccaggcaaagctgttcagcatccctggcagtagctggtagagccctgtctccaaggcttggtgccgctgtggtgcagggctgagcygataagcttttcctccatttctcttcctgacagatggcttgaaacccctccttcctgtgtctgtgcggagtcagatagacatgctggtcccacgccagtg

SEQ ID NO: 316714 - DNA, 201 bp, Homo sapiens
gagcatgccagcgagaagctgcagcttgtcatcagctacactggctccaactgcagccaccaagtccagcagtgagtggccctgtcggaccccagcagggsacttcctttaggcagggtcagccccatctcccttccccatctctcttcccacgtggcctggaagccactgggtcctaagcatcgtagaccctgggccttc

SEQ ID NO: 316715 - DNA, 201 bp, Homo sapiens
gcagccaccaagtccagcagtgagtggccctgtcggaccccagcaggggacttcctttaggcagggtcagccccatctcccttccccatctctcttcccaygtggcctggaagccactgggtcctaagcatcgtagaccctgggccttcaggtgtgcagggccagctttgaggccagtcatggggagaggggtctcccagg

SEQ ID NO: 316716 - DNA, 201 bp, Homo sapiens
ggctgggtattagtgagagcagggaggctcctggaccggctgaactcccagcagaccttgtaacctggagctcccaagcttctactggtgtacacgctgtygagtcttgcagttagtgagcactaatgcttttggttttatatctcctgggcttgcaaacattgaccagaacttaaaagcacctgcttctgatggcaggga

SEQ ID NO: 316717 - DNA, 201 bp, Homo sapiens
cagtgttttttttttttggacaccggatccatctcccttttcttttctaataagtcaggactggtggagtcaacacagtcaatcaatagccaacctcaacytgagacaggacagaagagaactcagaatctttttgtcttttggacttcagccatgtccatgatgcctaccctgtgaagatctctcaccatccaaaaaagt

SEQ ID NO: 316718 - DNA, 201 bp, Homo sapiens
ctcctgtcagcacctcaaccccttgcttggcaagcagggaaactgagttcccgacagctcagggacttgcacatggtcctgggtgaaggaaacacagggcytgagaatcagaaaagcctaacttgtagctccctggcttattagccgtgtggccttgggaagttatttaacccctctgggcctccttttccccatctgtga

SEQ ID NO: 316719 - DNA, 201 bp, Homo sapiens; identical to SEQ ID NO: 66232

SEQ ID NO: 316720 - DNA, 201 bp, Homo sapiens
agtagagacagggtttcaccatggtggccaggctggtcttgaactcccgacctcaagtgatccacctgccttggcttcccaaagtgctgggattacaggcrtcagccaccatgcccagcctcttatgacctattcttttaataaaagaggcaggtgggggctgtggggccacctacactcactctggacacatttgtttgg

SEQ ID NO: 316721 - DNA, 201 bp, Homo sapiens
catccaaaaaagtaagtagtagctgtgacttctggcaccctggatttgagctgagtggacaggggtgtgctctcctggacctctggtggcaagtctcttgratggcatcctctttgtatagagccacagctttctaacttgtgttgaaaaactaccgtatcttttacttccgtgaaggatttcgctggttgcttagagagc

SEQ ID NO: 316722 - DNA, 201 bp, Homo sapiens
gcagaggcggttcgactcatcatggactccctgcacatggcggctcgggagcagcagtaagagtccaagactgcagataggtggagagagctgccgagacragggtgctccacccctgccttgggcagttaggacacgccttgatggcagggctgagtctctgggctcccatccagagccctttccctggccaccagacca

SEQ ID NO: 316723 - DNA, 201 bp, Homo sapiens
gtctctgggctcccatccagagccctttccctggccaccagaccatgttagaaccacatagacagcctggtgaggagggcggctgggtgcttcatcacccsacctggtctgtgcagcacgattccctgtgttggaggtcttggcccatgccctgctgagctctgcagccattctcagagcctgaacacatttttcaaaaca

SEQ ID NO: 316724 - DNA, 201 bp, Homo sapiens
ctggacacatttgtttgggctccaggtgcggcggcagcacatggagcgttgtaccagcttcctggtggatgagctgggcgtggtggatcgatcccaggccrgggaccgcatcttctttgtgtctgctaaggaggtgctcaacgccaggattcagaaagcccagggcatgcctgaaggaggtaatgatgagaacagatgtcc

SEQ ID NO: 316725 - DNA, 201 bp, Homo sapiens
gccggggaccgcatcttctttgtgtctgctaaggaggtgctcaacgccaggattcagaaagcccagggcatgcctgaaggaggtaatgatgagaacagatrtcctccttttctctgatgtttgagacattttgtctcgtgctgaggagtctgtcagtagaaaatccttctgagaaggggatgctgagaagagcagagaggc

SEQ ID NO: 316726 - DNA, 201 bp, Homo sapiens
tctggacacatttgtttgggctccaggtgcggcggcagcacatggagcgttgtaccagcttcctggtggatgagctgggcgtggtggatcgatcccaggcyggggaccgcatcttctttgtgtctgctaaggaggtgctcaacgccaggattcagaaagcccagggcatgcctgaaggaggtaatgatgagaacagatgtc

SEQ ID NO: 316727 - DNA, 201 bp, Homo sapiens
gaccccagcaggggacttcctttaggcagggtcagccccatctcccttccccatctctcttcccacgtggcctggaagccactgggtcctaagcatcgtasaccctgggccttcaggtgtgcagggccagctttgaggccagtcatggggagaggggtctcccagggacactttgcgtcttgggctgggacggggtaggcc

SEQ ID NO: 316728 - DNA, 201 bp, Homo sapiens; identical to SEQ ID NO: 66203

SEQ ID NO: 316729 - DNA, 201 bp, Homo sapiens
ctccctgaagagttagtctctgtctccctcatttggtctctgctgtgctggctcttccccatctcggcccagcacaggttggctccttgtcactgctcttytaagactctgctctgtcccctttaccctgtatactctttttgtttcgatttctcagcttctcctcttttccagttgtgccagcagacgatccgtggatcc

SEQ ID NO: 316730 - DNA, 201 bp, Homo sapiens
cgggagaacctggagcaggaaattgccgccatgaacaagaaaattgaggttcttgactcacttcagagcaaagcaaagctgctcaggtgaggctggcccgygtggccaaaggttagggctccagggtgcagcccaggcacactggggctcagctgctgggcttgcgtcttgggtgtggacacaaatttttctggtggggat

SEQ ID NO: 316731 - DNA, 201 bp, Homo sapiens
agctgggctctcaggctatgcttgcaggatggtccccacgtgcctgtggcaaggtctgtggtgaagcagagattatcaaggctttccagaggcagaggagraacccagctgccctgcatcaccctggaggagtagggagtcagcagtcaaagccttgagataattggggaacacaggatgtgataaaaaccagaagtctgt

SEQ ID NO: 316732 - DNA, 201 bp, Homo sapiens; identical to SEQ ID NO: 66219

SEQ ID NO: 316733 - DNA, 201 bp, Homo sapiens
gcctaacttgtagctccctggcttattagccgtgtggccttgggaagttatttaacccctctgggcctccttttccccatctgtgagacagggataaacasgattgttggaggatgatgtaagggtgtgtgtcaagcgtccttaggatggtgcctggcgggtagtcctaatactgcctatcatcagctatcatggttacaa

SEQ ID NO: 316734 - DNA, 201 bp, Homo sapiens
agtttgagaccagcctgggcaatctggcaaaaccctgtctctacaaaaaatacaaaaattagcccagcatggtggtgtgcactggtagtcccagctattcygggggctgaggtaggagaatcacttgaacccaggaggtggaggctgcagtgagccgagattgcatcactgcactccaacctaggcaacagaatgagaccc

SEQ ID NO: 316735 - DNA, 201 bp, Homo sapiens
agtcgcggggcagcagaggcgtaaggagtaggcggggcgagccggctgggctcagggtccaccagctcacccgggtcgaggggcaatctgaggcgactggwgacgcgcttatccacttccctcctcccgcctccccctggggtggcgctcgctggtgacgtagtgagtgtgatggccgccgcgaggccgggaaggtgaagg

SEQ ID NO: 316736 - DNA, 201 bp, Homo sapiens
acatggctgaggtgaatgcatccccacttaagcactttgtcactgccaagaagaagatcaatggcatttttgagcagctgggggcctacatccaggagagygccaccttccttgaaggtaagggggcaccggctcagccaggcccgctcttacctgtttagatatttagctagtgggatttgcgggtggggaggtatatct

SEQ ID NO: 316737 - DNA, 201 bp, Homo sapiens
cgagccggctgggctcagggtccaccagctcacccgggtcgaggggcaatctgaggcgactggtgacgcgcttatccacttccctcctcccgcctcccccyggggtggcgctcgctggtgacgtagtgagtgtgatggccgccgcgaggccgggaaggtgaaggtgagagggcgagcaagccggggtggcggggactggcc

SEQ ID NO: 316738 - DNA, 201 bp, Homo sapiens
acatgccagcgcaactccccaatacctcaatgagtaagcttccctcagggatgagtttgtttggcttgaaacctgattagacatgttttgtacaccagtgttttttttttttggacaccggatccatctcccttttcttttctaataagtcaggactggtggagtcaacacagtcaatcaatagccaacctcaacctgaga

SEQ ID NO: 316739 - DNA, 201 bp, Homo sapiens
agtagcattttctttgcagtttcctttctcagagctgtactgtctttaagccctggacatatggcttccatgctgagaaaacatctctcatagctgtggcktcatgctgaggaggaatgtagaaacggaagtggggtcacttccttcccttgtctccagaggaatcattaacattgcacaagaacttgttggtttgggcac

SEQ ID NO: 316740 - DNA, 201 bp, Homo sapiens
aagtccgttttggcatttggtcttcatgtacctcttccgggtgttctttctgcttttcaggaccttgtgcaacatactttggccccatttggaagtttttsacgtgtgcttgctggggagcaacacctcatttccaatctagagagagtgagcttactgctgggtggagaactgagcagtaagattagggtggctggggag

SEQ ID NO: 316741 - DNA, 201 bp, Homo sapiens
ctgataagcttttcctccatttctcttcctgacagatggcttgaaacccctccttcctgtgtctgtgcggagtcagatagacatgctggtcccacgccagygcttctccctcaactatgacctaaactgtgacaagctgtgtgctgacttccaggaagacattgagttccatttctctctcggatggaccatgctggtgaa

SEQ ID NO: 316742 - DNA, 201 bp, Homo sapiens
tgaggcaggagaatagcttgaactcgggaggtggtggttgcagtgagccgagatcatgccacagcactccagcctgagcgatagagcaagactctgtctcagaaaaaaaaaaaaaaaatgttggctgggcatggtggctcacgcctttaatcccagcactttaatcccaacactttgggaatccaaagtgagaggatcatt

SEQ ID NO: 316743 - DNA, 201 bp, Homo sapiens
cttttcctccatttctcttcctgacagatggcttgaaacccctccttcctgtgtctgtgcggagtcagatagacatgctggtcccacgccagtgcttctcyctcaactatgacctaaactgtgacaagctgtgtgctgacttccaggaagacattgagttccatttctctctcggatggaccatgctggtgaataggttcc

SEQ ID NO: 316744 - DNA, 201 bp, Homo sapiens
tttctgaaagaagtatggccaaaagcactttaatgctgctgacattgttgtttttatgttcatttgctggagcgcaagacgtgctgacacagtgagttttytctgatgtatttaaggtgatgtatttgcttgagttactcctgtatcattgctcataatattggaaactaaaataaaacctagttggaaatcctttgtgag

SEQ ID NO: 316745 - DNA, 201 bp, Homo sapiens
catggctgaggtgaatgcatccccacttaagcactttgtcactgccaagaagaagatcaatggcatttttgagcagctgggggcctacatccaggagagcrccaccttccttgaaggtaagggggcaccggctcagccaggcccgctcttacctgtttagatatttagctagtgggatttgcgggtggggaggtatatctc

SEQ ID NO: 316746 - DNA, 201 bp, Homo sapiens; identical to SEQ ID NO: 66233

SEQ ID NO: 316747 - DNA, 201 bp, Homo sapiens
ccatctctactaaaaatacaaaaaattagccgggtgaggtggcgggcgcctgtagtcccagctacttgggaggctagggcaggagaatggtgtgaaccccrgggggcggagcctgcagtgagccgagatcgggccactgcactccagcctgggcgacagtgagactccatctcaaaaaaaaaaaaaaaaatctaaaaataa

SEQ ID NO: 316748 - DNA, 201 bp, Homo sapiens; identical to SEQ ID NO: 66236

SEQ ID NO: 316749 - DNA, 201 bp, Homo sapiens
ggtggtgtggattcagggactgtgcttgggatccaaacacaccttgcagtgaattttgctactgctgtctctacacccaagatacctaatactcctcaacraatagcctaggttgaggcaaagctgttgaccaccttggagggctaatagcagtttccatttagaactgggttcatttctggtcttaggttaatatttatt

SEQ ID NO: 316750 - DNA, 201 bp, Homo sapiens
gcagtgagcctcttgtagattgatctgaaatgatgaaccaggggcatgtcagaggtttgggcctgggggtgtttattcattttaataaacagtgcctactstttgtctctcagcactgtctgggcactggcaacattgcactgaatagggctttggccttccaggctggtatctgcgttgtgaaagtaattcaggtcagat

SEQ ID NO: 316751 - DNA, 201 bp, Homo sapiens
caatttgaacccagctctgcctgattacaaaacctgtcataggtagtgctatatcatgccccatccttgatcccttttttttttttttttttttttttttwaaagagagagacttcgctctgtcacccaggctggagtacagtggcgagatcttggctcactgcaaattctacctcccaggttcaagtgattctcctgcct

SEQ ID NO: 316752 - DNA, 201 bp, Homo sapiens
gaggcaggagaatagcttgaactcgggaggtggtggttgcagtgagccgagatcatgccacagcactccagcctgagcgatagagcaagactctgtctcaraaaaaaaaaaaaaaaatgttggctgggcatggtggctcacgcctttaatcccagcactttaatcccaacactttgggaatccaaagtgagaggatcattg

SEQ ID NO: 316753 - DNA, 201 bp, Homo sapiens
cgattctgtgcctccccagctcccattggctgtgtccctggcagtgaaaaccagagtctggcccttggttgtaggcccctggtggcccccacctccctccrtgcctctgtgtgttccaggagtgcatctcccagtctgcagtgaagaccaagtttgagcagcacacggtccgggccaagcagattgcagaggcggttcgac

SEQ ID NO: 316754 - DNA, 201 bp, Homo sapiens
tttcccctctcccatccactttgctggatgcaccccctcttcaagccactctcccctaggcctaaaaaggatccctgctgcattagtgcatcttcagtgcyggtgctcagtttggtttctgaggaattaatacagaacaggctcagctctagggaggcctctgggaaagaggctggaaagaggaatggagaataactggtt

SEQ ID NO: 316755 - DNA, 201 bp, Homo sapiens
cttaccgagggctcagaggaaaagaggagtgccaaggtgagggtgccaggctggctgtcagccctgtgcctgctgggggagcaagtcctccgttgtgacayggctgacctcacctctagggagggggcagcaccaccctgtggaggtgaatgggagaccctattttagatgaactttttgaaggatgtaagagcttttggg

SEQ ID NO: 316756 - DNA, 201 bp, Homo sapiens
gaggcaggaggactgcttgaacccaggaggtggaggttgtggtgagctgagatcacgccactgtactccaaacctgggtgacagagcgagactccgtctcaaaaaaaaaaaaaaaaaaagaatcaatcagtgcagaacagatgactttagggtgatatccgggaaagaagctcaaaagagcagtgaagaaagtgggttctt

SEQ ID NO: 316757 - DNA, 201 bp, Homo sapiens
cgctggttgcttagagagcctgtttaaaagttgacagttcagaagtggctgggatctcttgggctccctgaagagttagtctctgtctccctcatttggtytctgctgtgctggctcttccccatctcggcccagcacaggttggctccttgtcactgctcttttaagactctgctctgtcccctttaccctgtatactct

SEQ ID NO: 316758 - DNA, 201 bp, Homo sapiens; identical to SEQ ID NO: 66208

SEQ ID NO: 316759 - DNA, 201 bp, Homo sapiens
ctgcatgactgaatgtaaaagtgccctgcaaaagtcctcggcctgcccagctcatgataacatcagcacacggggaccctgcagaagtcctcggcctgccyagcccatgatagcatcagcacacggggaccctgcacttcctgccctcgcccctgacgtcagagtctgcagggtggcagagccagaggggagatggatcag

SEQ ID NO: 316760 - DNA, 201 bp, Homo sapiens
gtttgtgctggtggccaactcagagtccaccctgatgcagacggtaactcctcctctgccttctcccaagctcccagcaccccctgggcaggcagctgatrgggccttggctgtcaagctcctgctccaccgaggtcttaccctttatctaggaaaagcacttcttccacaaggtgagtgagcgtctctcccggccaaaca

SEQ ID NO: 316761 - DNA, 201 bp, Homo sapiens; identical to SEQ ID NO: 66224

SEQ ID NO: 316762 - DNA, 201 bp, Homo sapiens
accttctggcctcggtgggatcaaaggagacattgaaagaggaactcagagtagaaacatgaaggctccttggctggggcccttcagatggccctggtagkgatgggccccagaggagggtgggccacagagaggctgcactccaggctgaccatgtgctctgcaggtgtggaaggcagtgggctggcggctcattgccct

SEQ ID NO: 316763 - DNA, 201 bp, Homo sapiens
aagtatgtaactattaaaaatagacgactttaaaaataaccacctacatacgactattttaaagttcagattttaaaaacattcatctctaaaccacttgrgttgtcacatgtactgccctctgtacacatcccacactcggggaagctgccaggcgggtcaggatggctcctgctcacattttgcacgtcccgtggtgct

SEQ ID NO: 316764 - DNA, 201 bp, Homo sapiens
tctcagagctgtactgtctttaagccctggacatatggcttccatgctgagaaaacatctctcatagctgtggcgtcatgctgaggaggaatgtagaaacrgaagtggggtcacttccttcccttgtctccagaggaatcattaacattgcacaagaacttgttggtttgggcacacatgtgggtccctatcccgctttgg

SEQ ID NO: 316765 - DNA, 201 bp, Homo sapiens
ctagggcaggagaatggtgtgaaccccagggggcggagcctgcagtgagccgagatcgggccactgcactccagcctgggcgacagtgagactccatctcaaaaaaaaaaaaaaaaatctaaaaataagttaaatacgtgttttttttgttttgttttactgctagcttgatatacatgaagtattcatttttcctgcatc

SEQ ID NO: 316766 - DNA, 201 bp, Homo sapiens
ttccttatctgtcacttttcatgatgattcaactcgataccttcaggttctgggtacatgttctgaactcattcttgtttgctttttgagacagagtcgcrctccgtaacccaggctggagtgcagtggcatgatcttggctcactgcaacctctgccaccgaggttcaagcgattcttctgctccagcgtcccgagtagc

SEQ ID NO: 316767 - DNA, 201 bp, Homo sapiens
ttaaatacaaataaaatgagtgtagcaaaaataatgaaagctaacagcagataactttacaaataatggagtgtgaaccatttctgcccttatccagattraaatgggtcacaactttgtttaaaggaacacttccacagctgtagtcaaaggtgtgcacattgagattgagtattccacagacacacatggtttaacatg

SEQ ID NO: 316768 - DNA, 201 bp, Homo sapiens
ccctcctaggaggtccaaactggaaggcaccaggtttccatttctggataatctaggccagggtccctgggccccatccttgctctgcttaagtattactmcctttcagatgggctcaaccaaatcctctggcctcttggctttcctctggagtctggttactatacctatttatcagtaccctgcagatgtcccagggat

SEQ ID NO: 316769 - DNA, 201 bp, Homo sapiens; identical to SEQ ID NO: 66227

SEQ ID NO: 316770 - DNA, 201 bp, Homo sapiens; identical to SEQ ID NO: 66215

SEQ ID NO: 316771 - DNA, 201 bp, Homo sapiens
aggtggaggttgtggtgagctgagatcacgccactgtactccaaacctgggtgacagagcgagactccgtctcaaaaaaaaaaaaaaaaaaagaatcaatyagtgcagaacagatgactttagggtgatatccgggaaagaagctcaaaagagcagtgaagaaagtgggttcttattgacaactcccagctgttaactttt

SEQ ID NO: 316772 - DNA, 201 bp, Homo sapiens
agcactttgggaggccgaggtggatggatcatttgaggtcaggagttcaagaccagcctggccaacatggtgaaaccccatctctactaaaaatacaaaamttagctgggcgtggtggtaggcacctgtaatcccagctagtcgcgaggctgaggcaggaggactgcttgaacccaggaggtggaggttgtggtgagctga

SEQ ID NO: 316773 - DNA, 201 bp, Homo sapiens
tgacctatcagtcagggaccgacactctgagttttctgagaggcagctgcattcttgtttggggccagatgctcaatttgcttcataaagaatcaattggycgggcacggtggctcacgcctgtaatcccagcactttgggaggccgaggtggatggatcatttgaggtcaggagttcaagaccagcctggccaacatggt

SEQ ID NO: 316774 - DNA, 201 bp, Homo sapiens
cacctgggaggtatgaccccctacttaggtgagctagtgggcttcctgtctcactgggtgcaggtaaggtcattgtagttctgctctagtgatatggctgrgaaacttcaactcagaatgagaaacactgtgtttagcacaggttgaaagctctgagactcagagcagatgagtctgctgagcagagctattctcaagaag

SEQ ID NO: 316775 - DNA, 201 bp, Homo sapiens
ttgtattatagccattaaacaataactccctgtcccacatgtcccttgccctggccaccaccattctactttctgtccctatgaatttgactattctagaygtctcacgtaagtggaatcatacagtatttgtttttttttctccattcataaaacttttattccacttacatgaatttaatacacgtgttcttaacaatt

SEQ ID NO: 316776 - DNA, 201 bp, Homo sapiens
ataatgtagttatctccgttttgtgcttaaggaaactaagacccagaaaggttcttttgcttgaggccacagagctagaaagtggtaagaaccagcttcaraaccaggcagtgttgctcctgagccatcttcttaaccaccacaccgtggggccaccatagaggatctggagctcagcctgtcggctgcagggtgccagag

SEQ ID NO: 316777 - DNA, 201 bp, Homo sapiens
cctctgggagcccagactaaccctcttggaagctctgagtcacctactcagatgatgtggtggacaaacacatgcgtaatgcaggtgtttatgtgatgcaygctttgatttctctgtgtgtgaaaatatgaggcctcccctgttgtttaaatggaagggaaagagctggagtgatcctgagctgtgctgggtcagggaaag

SEQ ID NO: 316778 - DNA, 201 bp, Homo sapiens
ttctctcccgtccctggctttctcctccatgacctgcctgcctcacaagtcccaggtctgttctcagcaggaagaatagggctcctgctctgcctgatgayttggtttacccctgtcacctttagccctggtattgatgtcaccacagagctggacagctggattgacaagttttgtctggatgctgatgtgtttgtgctg

SEQ ID NO: 316779 - DNA, 201 bp, Homo sapiens
ctgctacatctgaagctagttgtcccctttttgccttttggaaattgaagagccactctgtgtccctgttccccagactagggcaacactgagggttcacrtgaatgagagactcaatacgtccccctcacccctctcatgtttctctcctcaggtccagcgtcccatccctctgacgccagccaaccccagcatgccccc

SEQ ID NO: 316780 - DNA, 201 bp, Homo sapiens
gctggtgaataggttcctgggccccaagaacagccgtcgggccttgatgggctacaatgaccaggcaagcaaagttcctcacctcaagggcattgtggggsgtcagtctgtaccctgcctccagacacgggaaccattctaaaacgggggttccctaaggtcagcagctgtggtggtgtgccccaccacacagtacaccac

SEQ ID NO: 316781 - DNA, 201 bp, Homo sapiens
gtacatggaggaggttcgtgcttctgtttggcagtttggggaatgcaaccccgagggagcactgcctgccactggggccacttcctgcacccctggatctrgtgacttccctgaattaattttattgccaaagaattctccaaatactcttctgtggtatcttctggtggtctttcccctctcccatccactttgctggat

SEQ ID NO: 316782 - DNA, 201 bp, Homo sapiens
ccaggacctccatgggcattcttgttgttggaggagtggtcagtgaccagttctgctcgggaaggtgggggcggagggcaggtgggcggggcctgagggcyaggttcctgctgtggcccctgcattgggccacactccacagtccactgcatactttctcctctgtgattgcatggggagcgcttactccctcaccaagtt

SEQ ID NO: 316783 - DNA, 201 bp, Homo sapiens
gaactacagcccccatgatgcagtgggagtccgagcctctgcgtcgtccgcttgggacgcgccggcggaggagtggcgcgcggaggagtggcgcgctgagrcgccgctcgaagcgccgagtcgcggggcagcagaggcgtaaggagtaggcggggcgagccggctgggctcagggtccaccagctcacccgggtcgagggg

SEQ ID NO: 316784 - DNA, 201 bp, Homo sapiens
gcaggcagctgatggggccttggctgtcaagctcctgctccaccgaggtcttaccctttatctaggaaaagcacttcttccacaaggtgagtgagcgtctytcccggccaaacatcttcatcctgaacaaccgctgggatgcatctgcctcagagcccgagtacatggaggaggttcgtgcttctgtttggcagtttgggg

SEQ ID NO: 316785 - DNA, 201 bp, Homo sapiens
tgggcggggcctgagggctaggttcctgctgtggcccctgcattgggccacactccacagtccactgcatactttctcctctgtgattgcatggggagcgyttactccctcaccaagtttccctcacttcctgctggacatggtcccagaccttctggcctcggtgggatcaaaggagacattgaaagaggaactcagagt

SEQ ID NO: 316786 - DNA, 201 bp, Homo sapiens
gcaggtgcatgccatcaagcctgacttttttttttttattttctaattaaggttaaaggcatataatataaaatttaccaccttaaccattttaagcatayaattcactagtaggtatatttgcaaccagtctcaagagctttttcatcttgcagaactgaagcttgtattatagccattaaacaataactccctgtccca

SEQ ID NO: 316787 - DNA, 201 bp, Homo sapiens
aggggagtagacagagcctgggggccatcctagaattctgcctaaacattcacctcggtcacctccaggacaaccgcatccagggtggctacgagaacgtkccgactattgacatccacatgaaccagatcggctttgagcgggagtggcacaaattcctgctggagtacattgcgcccatgacggagaagctctaccccg

SEQ ID NO: 316788 - DNA, 201 bp, Homo sapiens
aataaaaataaataaataaataaataaaataaaatagggataataattgtgcaatcacacagaattgctgcaagggctaagcaagctgacatgcgaagttygtaaaaggtgcctggtgcacaggacgcatctagttgcttctaactgttgtcatcttcacttccatccctgtcactgttaatccttcctaccttcctaatt

SEQ ID NO: 316789 - DNA, 201 bp, Homo sapiens
gttcttcaactacaagatccaggtaaggggtttcctgggtgaggcagagacagtgaggggtggcaggaggatctaggagctagtgtcctttccaaactacyacgtctcttaagatagacttggggccacaggggaggcttctggaagcctgaaggatgaaaatgagttagtcgggaatgggaagacacagcagaggacaca

SEQ ID NO: 316790 - DNA, 201 bp, Homo sapiens
tggagcactttggccagtggtctctgggcaacaacaaggtgggaccctgatgcctgggctggggccgcagggaggctgcctctccatcagtgccgctcacwgtctggggtcttctggcaagctggcctggccaccctttctgggactcttgacataggggtgctggcatgggtatctgcaggcaggtaggagtagagggat

SEQ ID NO: 316791 - DNA, 201 bp, Homo sapiens
caaccagctctcacatgaactcagagcaagaactcactcattaccaaggagatggcaccaagccattcatgagggatctacctctgtgacccaaacacctsccactgggccccacctccaacagtggggatcacatttcaatgtgcaatttggaggggacaaatatccaactatatcggtcagttactgggtggagggagc

SEQ ID NO: 316792 - DNA, 201 bp, Homo sapiens
gatggcaagaggttcctgggctctggaggtgagaggcctgggtgcagggcgcttggcccagcagaggggtccatctactgcctttgtggggaccccccttrtttgacgtgcaatctgggtgtctcacaggtctccagtgcagaatgtcctgaatagagctcctgacttttcaaccccaaatgtgctcccctgcagttctga

SEQ ID NO: 316793 - DNA, 201 bp, Homo sapiens
ccagaccagcctgagtaacatggtgaaacctcatctccactaaaaaatttagctgggcttggtggggtgcacctgcagtccctcccagctacctgggaggytaaggtgggaggatcacctgagtgcaggaagtcaaggttgcagtgagccatgagccatgattgtgcctctgcactccagcctgggcaacgggagtgagat

SEQ ID NO: 316794 - DNA, 201 bp, Homo sapiens
gcagatcaccagaggtcagctgttcaagaccagcctggccaacgtggcaaagccccgtgtctactaaaaacataaaaattagccaggtgtggtggcacccrcctgtagtcccagctacttgggaggctgaggcaggagaatagcttgaacccaggaggtggaggttgcagtgagctgagatcatgccactgcactccagcc

SEQ ID NO: 316795 - DNA, 201 bp, Homo sapiens
tcactgcaacctccgcctcccaagttcaagcagttctctgcctctgcaacctccgcctcccgggttcaagcagttctctgcctcagcctcctcccgagtasctggaattacaagtgcctgccaccatgcccggctaatttttgtatttttagtagagacgtggtttcaccatcttggccaggctagtcttgaactcctgac

SEQ ID NO: 316796 - DNA, 201 bp, Homo sapiens
acatcgccctgaaccgagtcggggtggattacgaggtgagcaggagccagccggggtcaaggggccggcaatggggatgaggagggctagctgaggagagscttcagggtggttgaggcagaggggccccaggtaaccagtgccagagaaccagaaaaaaaaggatgtgggtctgtgggagggcttcctggaagggttcac

SEQ ID NO: 316797 - DNA, 201 bp, Homo sapiens
cgcttgttcaacacaaatcctccccctcaccccatgaagaagggattattcctattttatagatgaggaaactgaggcttagagagaagtgacttgcccgwggacataatctactcactgcacagctgggatttgagcccagctggttggaccctgagcctgacctctgggtctgatgctgggtgggactgtgctttctga

SEQ ID NO: 316798 - DNA, 201 bp, Homo sapiens
acttgcccgaggacataatctactcactgcacagctgggatttgagcccagctggttggaccctgagcctgacctctgggtctgatgctgggtgggactgkgctttctgacccccagatgaggtcgtgctcaagtttgaaatgggccatgtgagagcgaggaacctggcctatgacaccctcccggtcctgatccatggca

SEQ ID NO: 316799 - DNA, 201 bp, Homo sapiens
aattagctgggcatgatggcacgcacctgtaatcccagctgcttaggaggctgaggcgggagaatcacttgaacctgggaggcggaggttgcagtgagccraggtggcgtcactgcactccagcctgggcaatagagtgaaactctgtctcaaaaaaaaaaaagaaaataaaagaaaaaagaaacatgagctaatgcccga

SEQ ID NO: 316800 - DNA, 201 bp, Homo sapiens
ccctgcctggggttctatcccggttgccacccaagtgcctcctcctggaagccctctcagattgcatgtctctagcttcccccgagatgtccaggttctgrtttcttctgcctggtccttcaggctctcctgcagccccctccccatcccatgaacctcatcctcatttatgactcacctcgaacaccacgccagccacga

SEQ ID NO: 316801 - DNA, 201 bp, Homo sapiens
tgaggcgggagaatcacttgaacctgggaggcggaggttgcagtgagccgaggtggcgtcactgcactccagcctgggcaatagagtgaaactctgtctcaaaaaaaaaaaagaaaataaaagaaaaaagaaacatgagctaatgcccgatcgaccactggcatgggcttggtgtcatctgtgtgcagtccatggggctga

SEQ ID NO: 316802 - DNA, 201 bp, Homo sapiens
tgggggagcgcctcttccaccgggcctgtcctccccaggatgtgttcatgttcctgaccaaccggcacacccttggccatctgctctccctagacagctascgcaccacccacctgcacaacgacctctgggaggtgttcagcaaccccgaggtgaggccagggtgggcacataggggctgggagcaaaggggcccagtga

SEQ ID NO: 316803 - DNA, 201 bp, Homo sapiens
aagagacaggccccctttctccatgaagcttgggcagggttcaagtttcagcaatttggtgaagggaacaggaaacagataccaaaggaggagagggcagsctttgccagagtgaatcctttctcccagagaggccagcagcctccaagattgattccccctcctgacttaaaatgacttttgggcatgggactcccactg

SEQ ID NO: 316804 - DNA, 201 bp, Homo sapiens
ttggctcactgcaacctccgcctcccaagttcaagcagttctctgcctctgcaacctccgcctcccgggttcaagcagttctctgcctcagcctcctcccragtacctggaattacaagtgcctgccaccatgcccggctaatttttgtatttttagtagagacgtggtttcaccatcttggccaggctagtcttgaactc

SEQ ID NO: 316805 - DNA, 201 bp, Homo sapiens
ggcagccaccactggttaaagagacaggccccctttctccatgaagcttgggcagggttcaagtttcagcaatttggtgaagggaacaggaaacagatacmaaaggaggagagggcaggctttgccagagtgaatcctttctcccagagaggccagcagcctccaagattgattccccctcctgacttaaaatgacttttg

SEQ ID NO: 316806 - DNA, 201 bp, Homo sapiens
gagggtgttgtgatgatcagaaggggagacagttgtaactgtttctagacgttgggagctcacagctgatgggtgtaagcacatgcctgcacacagacatrtacacacaagcacacacatgtacatacatgtgcaaacaccacctcctatgggcacacctgtgcacccagacaacacacacgcacccagtgggtgcaggtg

SEQ ID NO: 316807 - DNA, 201 bp, Homo sapiens
tggcctgctgagggtgctaggccctgtgttctctccgtgagaatcccaacacctgttcctgtcctggaaagttcaggtaccatttttttttttcttttcakgtgtgtgtgtgtgtatatatatatatatataaaaagaaatatatatagattttatttatatatatatatatatattttttttaaataatagagacggggt

SEQ ID NO: 316808 - DNA, 201 bp, Homo sapiens
acgccgctaatttttgtgtttttagtagagacagggtttcgccatgttggccagtctggtcttgaattcctgacctcaggtggtccacacgtctcggcctyccaaagtgctgggattaccagcatgagccaccacggccagccctggaaaaatatttctttaccaaaagcccgtgttaaggggtgtttctctccaggcgct

SEQ ID NO: 316809 - DNA, 201 bp, Homo sapiens
tgtggagaaggggacgtcggcaggtggagggcagaaggtccggctgctgaagaaagctctggagaagcacgcagacaaggaggatctggtcattctcttcrcagacaggtaggtgggtcagggcttcctagcctgggcccctccgcggaagatagaagaatattctaaaatgaggccctcccagaacatcggggaagaagg

SEQ ID NO: 316810 - DNA, 201 bp, Homo sapiens
atgtggagaaggggacgtcggcaggtggagggcagaaggtccggctgctgaagaaagctctggagaagcacgcagacaaggaggatctggtcattctcttygcagacaggtaggtgggtcagggcttcctagcctgggcccctccgcggaagatagaagaatattctaaaatgaggccctcccagaacatcggggaagaag

SEQ ID NO: 316811 - DNA, 201 bp, Homo sapiens
tggttaaagagacaggccccctttctccatgaagcttgggcagggttcaagtttcagcaatttggtgaagggaacaggaaacagataccaaaggaggagarggcaggctttgccagagtgaatcctttctcccagagaggccagcagcctccaagattgattccccctcctgacttaaaatgacttttgggcatgggactc

SEQ ID NO: 316812 - DNA, 201 bp, Homo sapiens
aaacatccggtggattctggcaccaagtcctgtctccagatgctgaaactcccagccctggatcccagctgggaggtaggggccctggattctgctcaggsctcttccttttacttgccttgggaccttgagcttgctgccccatgcctatggatatcacttgtgctatctgtgcaatgagcacatctccatacaatgaga

SEQ ID NO: 316813 - DNA, 201 bp, Homo sapiens; identical to SEQ ID NO: 66263

SEQ ID NO: 316814 - DNA, 201 bp, Homo sapiens
ccttttgattaacccaaagtcaactgattaggagccttaattgtatctgcaaagcctgttcagttttgtcatgtaatgtggtccggtcacattcccgggtrtaggagaggggagtagacagagcctgggggccatcctagaattctgcctaaacattcacctcggtcacctccaggacaaccgcatccagggtggctacga

SEQ ID NO: 316815 - DNA, 201 bp, Homo sapiens
tggaagtggaatttagagttcctctccttagggagtccagagattgtggaggaggaaacaatccgacccagtaccaggcagctagcagctgaggccccaargcacgctacatcccagacagggccctgtctacaccctgaggctgagtctgcgtgtggccccacagtccacagtcagacccgcggggcactaggctactca

SEQ ID NO: 316816 - DNA, 201 bp, Homo sapiens
ggccaggatccctttgctaagtaagaaatcatcaactccattttggagatgggaagactgaggtcctggtaggttaaacatctggtctctcattgccagarctggttggaggtggggtcattgtctggaactcagacctactgttcatttctgcacctctggacgggaagggggtgctgttgcctggaaatgctgcctggg

SEQ ID NO: 316817 - DNA, 201 bp, Homo sapiens
cactttgtggataagtttgtgctttcatccatgtcccctgtggtctgcttagcccctgccagggtggtcttcctctctgcagtttattttttttattttayttaatgtattatttatttagttatttatttatttttgagacagagtcttgctctgtcgcccaggctggaacgcagtatgcgatctcggcttactgcaacc

SEQ ID NO: 316818 - DNA, 201 bp, Homo sapiens
ttgcccaagatcatacaacttgtgggccttggaaccaggatttaccccacccacccaggtgtctggttccagagccaggaggcctcatgaccatgggaatraggggtcttgagggggacaggggaggaatgggggtagaaggtgtggctcactttgtggataagtttgtgctttcatccatgtcccctgtggtctgcttag

SEQ ID NO: 316819 - DNA, 201 bp, Homo sapiens
ccaggcccctttgttcctacagtctaggttcctcctgacttcctgaggtggtgggaggggagggccttacctgcctgctgtcaatctggccaccaggtgaraagtgtaagctgcagaccctcagggagctaagactcacccagggaaacaatgatgagcactgcagtgtgggtcttgcctctgtggcttggaggccagaga

SEQ ID NO: 316820 - DNA, 201 bp, Homo sapiens
acttgcccaagatcatacaacttgtgggccttggaaccaggatttaccccacccacccaggtgtctggttccagagccaggaggcctcatgaccatgggartgaggggtcttgagggggacaggggaggaatgggggtagaaggtgtggctcactttgtggataagtttgtgctttcatccatgtcccctgtggtctgctt

SEQ ID NO: 316821 - DNA, 201 bp, Homo sapiens
catcctcatttatgactcacctcgaacaccacgccagccacgatctcctgacagcaggccctcaaccgagtccttgttccaggcctgggctcctgctgctstctccccggggcaccctcctgctgcttccctgcccccccgtaccccctgactggagttccccggcccgggcacctttcttgggaagtctacatgcttctg

SEQ ID NO: 316822 - DNA, 201 bp, Homo sapiens
ttccagaacctggatggagccttgggtgagcagcccccacggggaggggtggatcctcagaggggtgataggaagaattccaggcagggcccgagcccagrgaggagaaatgggctgcttctttctggccattgtgctgagaggtcactggcctcatccccaggtccccaggggccacttggatatcctggcgcagagcca

SEQ ID NO: 316823 - DNA, 201 bp, Homo sapiens
tgagaggcctgggtgcagggcgcttggcccagcagaggggtccatctactgcctttgtggggaccccccttgtttgacgtgcaatctgggtgtctcacagrtctccagtgcagaatgtcctgaatagagctcctgacttttcaaccccaaatgtgctcccctgcagttctgatctcattcaacagacacgcagccccatag

SEQ ID NO: 316824 - DNA, 201 bp, Homo sapiens
tgccacccaagtgcctcctcctggaagccctctcagattgcatgtctctagcttcccccgagatgtccaggttctggtttcttctgcctggtccttcaggmtctcctgcagccccctccccatcccatgaacctcatcctcatttatgactcacctcgaacaccacgccagccacgatctcctgacagcaggccctcaacc

SEQ ID NO: 316825 - DNA, 201 bp, Homo sapiens
gggagccctggaggagactcaggagacctgggttatttcctgctctatcatcctttcttccctgggccctgttctgtaatgggttgacatgaagacacttyctgccagaatttgacaggtcactgggaacaaagacctcctccctgtcacctccctcatcctccattcccattcaccataccctcctctgtctgcagacaa

SEQ ID NO: 316826 - DNA, 201 bp, Homo sapiens
ggtctccagtgcagaatgtcctgaatagagctcctgacttttcaaccccaaatgtgctcccctgcagttctgatctcattcaacagacacgcagccccatrgacagaacccaggagtcactcctgactcctcccttgccctcctccacctacgtccaatgccagtcacctgtctactactttttaaattttgagacggcat

SEQ ID NO: 316827 - DNA, 201 bp, Homo sapiens; identical to SEQ ID NO: 66248

SEQ ID NO: 316828 - DNA, 201 bp, Homo sapiens
ttcacctcggtcacctccaggacaaccgcatccagggtggctacgagaacgtgccgactattgacatccacatgaaccagatcggctttgagcgggagtgscacaaattcctgctggagtacattgcgcccatgacggagaagctctaccccggctactacaccagggtgggcaagcctggggcatagccaggatgcgggg

SEQ ID NO: 316829 - DNA, 201 bp, Homo sapiens
tgctcacccttgccctgctccgtcttctcgctgctctggccacagctatgacgtgctgtttgcatcggggccccgggagctcctgaagaagttccggcagkccaggagccaggtggtcttctctgctgaggagctcatctacccagaccgcaggctggagaccaagtatccggtggtgtccgatggcaagaggttcctggg

SEQ ID NO: 316830 - DNA, 201 bp, Homo sapiens
aagtgctgggattaccagcatgagccaccacggccagccctggaaaaatatttctttaccaaaagcccgtgttaaggggtgtttctctccaggcgcttggyctaggggaggactggaatgtggagaaggggacgtcggcaggtggagggcagaaggtccggctgctgaagaaagctctggagaagcacgcagacaaggagg

SEQ ID NO: 316831 - DNA, 201 bp, Homo sapiens; identical to SEQ ID NO: 316735

SEQ ID NO: 316832 - DNA, 201 bp, Homo sapiens; identical to SEQ ID NO: 316737

SEQ ID NO: 316833 - DNA, 201 bp, Homo sapiens
gaaagttcaggtaccatttttttttttcttttcatgtgtgtgtgtgtgtatatatatatatatataaaaagaaatatatatagattttatttatatatatrtatatatattttttttaaataatagagacggggtctggctgtgttgcccaggctggttgtgaaccaggcacaatttcattttatttattttaattaatta

SEQ ID NO: 316834 - DNA, 201 bp, Homo sapiens
accatcaacatcgccctgaaccgagtcggggtggattacgaggtgagcaggagccagccggggtcaaggggccggcaatggggatgaggagggctagctgrggagaggcttcagggtggttgaggcagaggggccccaggtaaccagtgccagagaaccagaaaaaaaaggatgtgggtctgtgggagggcttcctggaag

SEQ ID NO: 316835 - DNA, 201 bp, Homo sapiens
tgcctcagtggctcctataccagcccaccaaaaaagcacccctgcccaccttagctggccagcgtgcccactccctccctagccacaagcctgtgccccaygcctgggccctgcttcgtccgaagcagccttcttccaatagtgaggaaaaccctgaactcctgttactgacagttgtcattcatcccttgaatgcttact

SEQ ID NO: 316836 - DNA, 201 bp, Homo sapiens
aggtaccatttttttttttcttttcatgtgtgtgtgtgtgtatatatatatatatataaaaagaaatatatatagattttatttatatatatatatatatwttttttttaaataatagagacggggtctggctgtgttgcccaggctggttgtgaaccaggcacaatttcattttatttattttaattaattaattaatta

SEQ ID NO: 316837 - DNA, 201 bp, Homo sapiens
gtgctgggctgggactctagggccggctagttggcctctagcctgagctggagtctcactcagcctcatgagtagctgggattacaggcacctgccaccaygcctggctaatttttgtattttttgtagagacagggtttcaccatgttggccaggctggtctcaaattcctgacctcaagtaatccgcccacctctgcct

SEQ ID NO: 316838 - DNA, 201 bp, Homo sapiens
gggcgtgatggtgcgtgcctgtagtcccagctacacgggagggtgaggtgggaggatcacttaggcctggaaggttgaggctgcagtgagctgaagttgcrccactgcgctcttacctgtgcaacagagggataccctgtctcaaaaaataaggtctttctgcagatgactcacctagtaggtcaggcccccccaggataa

SEQ ID NO: 316839 - DNA, 201 bp, Homo sapiens
cacctctgattttcttttttcttttttttttttttgaatggagtctcgctgtgtcgcccaggctggagtgcagtggcgccatctcagctcactgcaacctycgcctcccaggttcaagcagttctcttgcctcagcctcccgagtagctgggattacaggcgcctgccaccatgcccgactaatttttgtatatttagtag

SEQ ID NO: 316840 - DNA, 201 bp, Homo sapiens
ggctggagtgcagtggcatgatctcagctcactgcaaccttcctttcccaagttcaagcagttttcttgcctcagcctctccagtagctgggactacaggygtgtgccaccatccctggctaatttttgtatttttagtagacactgggtttcaccatgttggccaggctggtctcaaactcctggcctcaggtaagctac

SEQ ID NO: 316841 - DNA, 201 bp, Homo sapiens
cactgtctggggtcttctggcaagctggcctggccaccctttctgggactcttgacataggggtgctggcatgggtatctgcaggcaggtaggagtagagrgattgagaaacctgagatggagtttggtccctgagctgctgttgccaccgtgtggctttgagttgccttgaccgtaagctactaggttttcagttcctgg

SEQ ID NO: 316842 - DNA, 201 bp, Homo sapiens
gaggagatggagcactttggccagtggtctctgggcaacaacaaggtgggaccctgatgcctgggctggggccgcagggaggctgcctctccatcagtgcygctcactgtctggggtcttctggcaagctggcctggccaccctttctgggactcttgacataggggtgctggcatgggtatctgcaggcaggtaggagta

SEQ ID NO: 316843 - DNA, 201 bp, Homo sapiens
tggacaggcatggtcacatgaccaccaggaaccggctaatcctcatacaggtggagaatggtttccttacaggggagggtcagagttgctggacccacagragcaaaaaaattatttctttttctctttttttgagacggagtgttgctctgtctcccaggctgaagtgcaatggagcgatttcggctcactggaaccccc

SEQ ID NO: 316844 - DNA, 201 bp, Homo sapiens
cccatccccaaccccaggagcagcaccacaaggctcaggtggaagagttcctggcacagcatggcagcgagtaccagtctgtgaagctggtgggccctgargtgcggatggcgaatgcagatgccaggaacatgggcgcgtgagttgtgggccacagtactctccactgacagtgggggcaggggagctgtggctgtggta

SEQ ID NO: 316845 - DNA, 201 bp, Homo sapiens
tgccggcaggaccgcagctgcacctactacttcagcgtggatgctgacgtggccctgaccgagcccaacagcctgcggctgctgatccaacagaacaagtraggctgctccgtctgcacccagcactgctcaggactggcctggtcctggggtggcagccctccttgccttcctcctcctcctcctcatccacctcctctt

SEQ ID NO: 316846 - DNA, 201 bp, Homo sapiens
ttgggtgagagagcccagcagtccaggggtttgggactcagagtcgggaggaacctttgaggctgctggtgtgacctctctaaagccccttggctgatatrtggtgaagccagactgtggtcacagatgtgagcagccaccagtagctccaggatcaggtgcactgaccctgtgtcctcctccttgcagagacctgtgccg

SEQ ID NO: 316847 - DNA, 201 bp, Homo sapiens
ggcaatagagtgaaactctgtctcaaaaaaaaaaaagaaaataaaagaaaaaagaaacatgagctaatgcccgatcgaccactggcatgggcttggtgtcrtctgtgtgcagtccatggggctgagccctgcagggagacgagtatcctgagtgcttccttatgtcaggcacaaggttgggcactggcaatagggtgatgg

SEQ ID NO: 316848 - DNA, 201 bp, Homo sapiens
aagaaaataaaagaaaaaagaaacatgagctaatgcccgatcgaccactggcatgggcttggtgtcatctgtgtgcagtccatggggctgagccctgcagsgagacgagtatcctgagtgcttccttatgtcaggcacaaggttgggcactggcaatagggtgatggacaatacagaacatgtcattgcttacacagagct

SEQ ID NO: 316849 - DNA, 201 bp, Homo sapiens
ttcccattcaccataccctcctctgtctgcagacaaccttttagtcctcacggtggccactaaggagaccgagggattccgtcgcttcaagcgctcagctyagttcttcaactacaagatccaggtaaggggtttcctgggtgaggcagagacagtgaggggtggcaggaggatctaggagctagtgtcctttccaaacta

SEQ ID NO: 316850 - DNA, 201 bp, Homo sapiens
gcccacggtcctggtcggcgtgttcatcgaacagcccacgccgtttgtgtccctgttcttccagcggctcctgcggctccactacccccagaaacacatgygacttttcatccacaaccacgtgagtaacaggcgctctgtggggtcgtcatgtggcttagatccagggcccagcttcacaaggtagcccgagacctctga

SEQ ID NO: 316851 - DNA, 201 bp, Homo sapiens
gcacagcctggcagtgacaggaggtgctacagtccctgggtggaagctgtgtcctccttcctcacccccgcatccccttccccatccccaaccccaggagyagcaccacaaggctcaggtggaagagttcctggcacagcatggcagcgagtaccagtctgtgaagctggtgggccctgaggtgcggatggcgaatgcaga

SEQ ID NO: 316852 - DNA, 201 bp, Homo sapiens
aaggggtgtttctctccaggcgcttggcctaggggaggactggaatgtggagaaggggacgtcggcaggtggagggcagaaggtccggctgctgaagaaarctctggagaagcacgcagacaaggaggatctggtcattctcttcgcagacaggtaggtgggtcagggcttcctagcctgggcccctccgcggaagataga

SEQ ID NO: 316853 - DNA, 201 bp, Homo sapiens
cattctcttcgcagacaggtaggtgggtcagggcttcctagcctgggcccctccgcggaagatagaagaatattctaaaatgaggccctcccagaacatcrgggaagaagggggaccactctagctaaggttgcctagttttagggtgtccattcccggtcttagtaaagcccattcccaggcttggtgaaaagataaaga

SEQ ID NO: 316854 - DNA, 201 bp, Homo sapiens
acctcaagtgatcctcctgcctcggcctcccaaagtgctgggattacaggtgggagccactgcacccagccaggaaccaccatttcttttcttttctttctttttttttttttgaggcagagtttcactcccgttgcccaggctggagtccaatggtgcgatctcagctcactgcaacctccgcctcccaggttcaagcga

SEQ ID NO: 316855 - DNA, 201 bp, Homo sapiens
ggtggagggcagaaggtccggctgctgaagaaagctctggagaagcacgcagacaaggaggatctggtcattctcttcgcagacaggtaggtgggtcaggrcttcctagcctgggcccctccgcggaagatagaagaatattctaaaatgaggccctcccagaacatcggggaagaagggggaccactctagctaaggttg

SEQ ID NO: 316856 - DNA, 201 bp, Homo sapiens
tctagcttcccccgagatgtccaggttctggtttcttctgcctggtccttcaggctctcctgcagccccctccccatcccatgaacctcatcctcatttaygactcacctcgaacaccacgccagccacgatctcctgacagcaggccctcaaccgagtccttgttccaggcctgggctcctgctgctctctccccggggc

SEQ ID NO: 316857 - DNA, 201 bp, Homo sapiens
tgaccaacatttcaggaccagaacacgctccttttcttttacgcattttttctttcattctgtgttcagtcctctgggaagacttccctgatcacattctyagtgtcaggcctgggctgggccctggggacatagcggtgactgcacttggtctctgatattgggaacttcagttcggcgggtggaggaggctgcactgtt

SEQ ID NO: 316858 - DNA, 201 bp, Homo sapiens
gcccacgccgtttgtgtccctgttcttccagcggctcctgcggctccactacccccagaaacacatgcgacttttcatccacaaccacgtgagtaacaggygctctgtggggtcgtcatgtggcttagatccagggcccagcttcacaaggtagcccgagacctctgagggtctcaccgaatctagcttatctgggccaaa

SEQ ID NO: 316859 - DNA, 201 bp, Homo sapiens
cctggcagttgagccaatggtgaggaccctagcctgcttcccacttcccacaggactggaaggagaagtacatccaccagaactacaccaaagccctggcmgggaagctggtggagacggtaagggccatggacaccctcttggaccagccttgcctgctgcagggggcagggcacagaagggaaactgcttgccctgggg

SEQ ID NO: 316860 - DNA, 201 bp, Homo sapiens
tctcccagcccctgcttctgactgtaagtaaccacaacaagtacaggggttgccgtggattctgtgctcatgatgggccaggcttggtgccccacgcttgytcaacacaaatcctccccctcaccccatgaagaagggattattcctattttatagatgaggaaactgaggcttagagagaagtgacttgcccgaggacat

SEQ ID NO: 316861 - DNA, 201 bp, Homo sapiens
ccattgtgctgagaggtcactggcctcatccccaggtccccaggggccacttggatatcctggcgcagagccatgtctctcttgggggcgggggacaagtragcattcagcctgggaggagttgggggatgcgcacagcaggtgctggaccccctgccctgcataccaggtccttacaggtgggccctctttccccacttt

SEQ ID NO: 316862 - DNA, 201 bp, Homo sapiens
acagaagaggcatctgtgcacagctcgatcttctacttgcctgtggggaggggagtgacaggtccacacaccacactgggtcaccctgtcctggatgcctmtgaagagagggacagaccgtcagaaactggagagtttctattaaaggtcatttaaaccactgaagggaagatgctcagggcgagtgggtgtgtgtgtgtc

SEQ ID NO: 316863 - DNA, 201 bp, Homo sapiens
gacctgggaggcggaggttgcagtgagccgagattgtgccattgcactgcagcctgggtgacaagagccagactccatctcaaaaaaaaaagcaataatgrtaatactttctcacagagatgttgtcaggattaaattgattaatatatgtagaatagtttatttatttatttgagacagggtctcactgtcacccaggct

SEQ ID NO: 316864 - DNA, 201 bp, Homo sapiens; identical to SEQ ID NO: 66255

SEQ ID NO: 316865 - DNA, 201 bp, Homo sapiens
taatcccagctactcaggaggctgaggcaggagaattgcttggacctgggaggcggaggttgcagtgagccgagattgtgccattgcactgcagcctgggygacaagagccagactccatctcaaaaaaaaaagcaataatgataatactttctcacagagatgttgtcaggattaaattgattaatatatgtagaatagt

SEQ ID NO: 316866 - DNA, 201 bp, Homo sapiens; identical to SEQ ID NO: 66257

SEQ ID NO: 316867 - DNA, 201 bp, Homo sapiens
ccaggtttcccagataactgtaaaaagggacaccaggcctgtatcctcccagccctgctctccaggggctcctcgtacaatccgtttcttcaccacctatrtggtgcccagcactgaacagtacagcttagtgggcaccattggtcttattcttggggtcattaggaactcattaataagtgacattcactggcagcccca

SEQ ID NO: 316868 - DNA, 201 bp, Homo sapiens; identical to SEQ ID NO: 66258

SEQ ID NO: 316869 - DNA, 201 bp, Homo sapiens
cccatgtgggcttccccactatgccaggtctcagcccccaaggcactctgtgagcttggcccagcctttcccttctctgggccaggtttcccagataactrtaaaaagggacaccaggcctgtatcctcccagccctgctctccaggggctcctcgtacaatccgtttcttcaccacctatatggtgcccagcactgaaca

SEQ ID NO: 316870 - DNA, 201 bp, Homo sapiens
cccagggcgggggctgtcggttcctgcgctacaactgttccatccgagccccaaggaagggctggaccctcatgcaccctggacgactcacgcattaccaygaggggctccccaccaccaggggcacccgctacatcgcagtctccttcgtcgatccctaattggccaggcctgaccctcttggacctttcttctttgccg

SEQ ID NO: 316871 - DNA, 201 bp, Homo sapiens
tttttcttgcttttagagatggggtttcactatgttgcccaggctggagctataattttttgagagcttacaacaaacatatcaggcatccctaatccaargattctcaaccaggagcaactgtggcctgcaagggacattggcagtacctggagacataattggtttttacaactatgaggggctactggcatctagtgg

SEQ ID NO: 316872 - DNA, 201 bp, Homo sapiens
cgcctgtagtcccagctactcgggaggctgaggcaggagaatggcatgaacccgggaggcggagcttgcagtgagccgagatcgtgccactgcactccagmctgggcgacagagcgagacattgtcttaaaaataaataaataaataaagatgcaaattcacacacatcacttaatgactttccactgcacggagaataaa

SEQ ID NO: 316873 - DNA, 201 bp, Homo sapiens
tggtacaagttaccaaattgcatttcagaaaggcagccccagcttactccccaccctgggccatgtaggcacctgtgggctgtgttcttcccagtaccagrattttcagggcacttgataccagttgccaacctctgggccttgggtgagagagcccagcagtccaggggtttgggactcagagtcgggaggaacctttga

SEQ ID NO: 316874 - DNA, 201 bp, Homo sapiens
tgattggacaggcatggtcacatgaccaccaggaaccggctaatcctcatacaggtggagaatggtttccttacaggggagggtcagagttgctggacccmcaggagcaaaaaaattatttctttttctctttttttgagacggagtgttgctctgtctcccaggctgaagtgcaatggagcgatttcggctcactggaac

SEQ ID NO: 316875 - DNA, 201 bp, Homo sapiens
aaggacttcctgacaaataggcccatgtgtccagggcgggggaatcaaatcagcacaattgtgcccccctagcctgtgacttcccttctcacacccagacwccaggctatgactccccaccaccaccctgtgaccccctccatcttccccaccaccagcctctgacccccacccgctttctgtctctcccacagtggtgtc

SEQ ID NO: 316876 - DNA, 201 bp, Homo sapiens
tgcagtcctcagatctcttccaccacagcaagctggaccccgacatggccttctgtgccaacatccggcagcaggtcagccaggagcgggcagcacaggaygccctctggatggggcaggcgggaaggtgggcctccagctctgaccctcatggtgggccgccttgtcaccgtaggcctgggagctccagagattctagca

SEQ ID NO: 316877 - DNA, 201 bp, Homo sapiens
gtgccaacatccggcagcaggtcagccaggagcgggcagcacaggacgccctctggatggggcaggcgggaaggtgggcctccagctctgaccctcatggygggccgccttgtcaccgtaggcctgggagctccagagattctagcagggcatctcggaagccaccagggcctgctggaggaatgggggccgtcgggcacg

SEQ ID NO: 316878 - DNA, 201 bp, Homo sapiens
atgtcaggcacaaggttgggcactggcaatagggtgatggacaatacagaacatgtcattgcttacacagagcttgcaatctagtggcattaagtcagcargcaagtgtatcagctcacatgaatgagggttgcagcagagggttgcttcaggcatggctggatccagggattcaagcagcaaagtgagggccttgtgttt

SEQ ID NO: 316879 - DNA, 201 bp, Homo sapiens
ttaactaacacgggctctcttgtccccctgccttggtacaggcccagtttgacctggcctttgtcgtccgctacaagcctgatgagcagccctcactgatkccacaccatgatgcctccaccttcaccatcaacatcgccctgaaccgagtcggggtggattacgaggtgagcaggagccagccggggtcaaggggccggc

SEQ ID NO: 316880 - DNA, 201 bp, Homo sapiens
gtttgacctggcctttgtcgtccgctacaagcctgatgagcagccctcactgatgccacaccatgatgcctccaccttcaccatcaacatcgccctgaacygagtcggggtggattacgaggtgagcaggagccagccggggtcaaggggccggcaatggggatgaggagggctagctgaggagaggcttcagggtggttg

SEQ ID NO: 316881 - DNA, 201 bp, Homo sapiens
tgctgagggccacttggccatgacaggagatcatgacgggagaacagacgggcaggggggcggtggggaaaggccactgatgctttctgtctcccagggcrggggctgtcggttcctgcgctacaactgttccatccgagccccaaggaagggctggaccctcatgcaccctggacgactcacgcattaccatgaggggct

SEQ ID NO: 316882 - DNA, 201 bp, Homo sapiens
agctgaggcaggcagatcacctgaggtcatgagtttgcgaccagcctggccaacatggtgaaaccccatctctactaaaaatacaaaaaattagctgggcrtggtggccggcacctgtaatcccaactatttaggaggctgaggcatgagaatcgcttgaacccaggagatagaggttgtagtgagacaagatctagccac

SEQ ID NO: 316883 - DNA, 201 bp, Homo sapiens
cagcattcagagtaatcttccttccacaccctctaaagccagaaactcagtcctataatgtagggtgtagacacctctcctgtctacagcacatgcttcakgacatgttggtcagtgtatttgtctgttttatgttgctgtaaagaagtacccgtggctgggtgatttctcaagaggtttatttggctcacagttctgcag

SEQ ID NO: 316884 - DNA, 201 bp, Homo sapiens
aatcttccttccacaccctctaaagccagaaactcagtcctataatgtagggtgtagacacctctcctgtctacagcacatgcttcatgacatgttggtcagtgtatttgtctgttttatgttgctgtaaagaagtacccgtggctgggtgatttctcaagaggtttatttggctcacagttctgcaggctgtacaagcat

SEQ ID NO: 316885 - DNA, 201 bp, Homo sapiens
ggccccgggagctcctgaagaagttccggcaggccaggagccaggtggtcttctctgctgaggagctcatctacccagaccgcaggctggagaccaagtawccggtggtgtccgatggcaagaggttcctgggctctggaggtgagaggcctgggtgcagggcgcttggcccagcagaggggtccatctactgcctttgtg

SEQ ID NO: 316886 - DNA, 201 bp, Homo sapiens
gggacaccaggcctgtatcctcccagccctgctctccaggggctcctcgtacaatccgtttcttcaccacctatatggtgcccagcactgaacagtacagyttagtgggcaccattggtcttattcttggggtcattaggaactcattaataagtgacattcactggcagccccatttccaacctgcagccccacctcctg

SEQ ID NO: 316887 - DNA, 201 bp, Homo sapiens
gaggacttctgagaggtgacagggtttgtgggcatatgagtggaggtggataagagggaagggtgggaggaggcccctgacttagaggctggaagctaagrgtccgtcttggtgtccccacccaccaaccttcaggcttcatcggttatgcccccaacctcagcaaactggtggccgagtgggagggccaggacagcgaca

SEQ ID NO: 316888 - DNA, 201 bp, Homo sapiens
ttggtgtccccacccaccaaccttcaggcttcatcggttatgcccccaacctcagcaaactggtggccgagtgggagggccaggacagcgacagcgatcarctgttttacaccaagatcttcttggacccggagaagagggtaagaggcagtgggcgggccaaggagagggggctggggatccaccggccaggctgcacgg

SEQ ID NO: 316889 - DNA, 201 bp, Homo sapiens
aaatgtttggattacaggcgtgagccatcgcgcccggccggttcaagcgactcctgtacctcagcctcccaggtaggtgggatcacagacatgtgccaccrtgcccagctaatttttgtatttttggtggagatggggtttcaccatgttggccaggctggtcttgaactcttgacctcaggtgatcagcccaccttggtc

SEQ ID NO: 316890 - DNA, 201 bp, Homo sapiens
agtaaacctttatttcatgtttgcaccagacagtaagacatagtcataagcaggacggatgtcctgcattcatggtgacagaagggactgggtgcagatgyggccagggacagaatggacctcactggtccctggggaactggctcatagctcatagcatatttgagtgtggtccttcaccgctggaatgagggagaggaa

SEQ ID NO: 316891 - DNA, 201 bp, Homo sapiens
ttactgacagttgtcattcatcccttgaatgcttactgtggttccccggaaacaattacctggctggcctcggttaattctcacaattctttccagtgctrtcactcatgtgtctgtccactgctaccttggctttctccaaggtactttctccaagactcagttccttccttggtctctggtttctccagatacctgccc

SEQ ID NO: 316892 - DNA, 201 bp, Homo sapiens
gccgtatcttccagaacctggatggagccttgggtgagcagcccccacggggaggggtggatcctcagaggggtgataggaagaattccaggcagggcccragcccagggaggagaaatgggctgcttctttctggccattgtgctgagaggtcactggcctcatccccaggtccccaggggccacttggatatcctggcg

SEQ ID NO: 316893 - DNA, 201 bp, Homo sapiens
cagactgatgacagggcgttaggcaccctgatccccagcaagtgacaggaggagggcagagcagatccaaggaagccttcacagagggtgctgctatgggyggaggacaggatcagtgtgctactgaggtaacccaggtagagcacctggtaggtagaaagcacatctgtgctcactgatgcacaagagagcagatcccca

SEQ ID NO: 316894 - DNA, 201 bp, Homo sapiens
aggggctttgagccacgccaccccatccccttcccccacccctgctgctggagttcaagagcctgttccatcaagaatcctgaattgcgcatgcacgcgtacacacacacacacacacacacacacacacactcactcacatgctctcacgctggctttttccatccatgaaatgtgacactcttcctgtccccagcagcc

SEQ ID NO: 316895 - DNA, 201 bp, Homo sapiens
tgttgaccaggctgctctcaaactcctgacctcaggtgatccacctgcctcagcctctcaaagtgctgcgattacaggcgtgagtcaccacgcctggccayggaacctgggggttaaggtcccagtgtgggctctcagcagcactgtttccctggaaaacagggaatagacaggttatagggaggaaagtgggcatgtggg

SEQ ID NO: 316896 - DNA, 201 bp, Homo sapiens
ccctcttggggctgcggttcctgcttcgggaaggaaagggtgacagctgagtcccattcagcacagaaaggctcaaataataatagttttcataataatarccgacaatggctattctgcccagtgctcactatgggccaggcatcagttaggcatgattgctaccctggtaagtgtttccttctattatccccgttttcc

SEQ ID NO: 316897 - DNA, 201 bp, Homo sapiens
ggggctttgagccacgccaccccatccccttcccccacccctgctgctggagttcaagagcctgttccatcaagaatcctgaattgcgcatgcacgcgtacacacacacacacacacacacacacacacactcactcacatgctctcacgctggctttttccatccatgaaatgtgacactcttcctgtccccagcagccc

SEQ ID NO: 316898 - DNA, 201 bp, Homo sapiens
tggcacagtctctgctcactgcagccgccacctcccgggttcaagcgattctcttgcctgagcctcacgagtagttgggattacaggcatgtgccaccacrcccggctaatttttgtattcttagtagagacagggtttcaccatgttgaccaggctgctctcaaactcctgacctcaggtgatccacctgcctcagcctc

SEQ ID NO: 316899 - DNA, 201 bp, Homo sapiens
ggattacaggctcccgcccaccaccatgcctagctaatttttgtatttttagtaaagatggggtttcaccatgttggccaggctggtcttgaactcctgayctcatgatccacctgccttggcctcccaaagtgctaggattataggcatgagccaccgtgcccggctttttttttctttctttttttttttttgagacag

SEQ ID NO: 316900 - DNA, 201 bp, Homo sapiens
cagtaggtggggagggctgagagctctgggtgccaggccttggccttagcccaaggcagctggctggaccagacagaaagcagatgggaggggccttggtrctcgaaaatgaatcttccacatccatgccttaagggtttctctggcctggcctaacagtgagctgggaaaagacctcaccacgtgactgcagttgggtgc

SEQ ID NO: 316901 - DNA, 201 bp, Homo sapiens
ggtactatcatctgtattattcccattttacagatgagaaaactgaggcacggagaggctaaattccctgcccagcaatctgtctttagcaccctctctgytgtatctcattgatttctgctgatcctggatcacgggttcatctggggaagtcattgctggactttgggcagtaggtggggagggctgagagctctgggt

SEQ ID NO: 316902 - DNA, 201 bp, Homo sapiens
atgttggccagtctggtcttgaattcctgacctcaggtggtccacacgtctcggcctcccaaagtgctgggattaccagcatgagccaccacggccagccstggaaaaatatttctttaccaaaagcccgtgttaaggggtgtttctctccaggcgcttggcctaggggaggactggaatgtggagaaggggacgtcggca

SEQ ID NO: 316903 - DNA, 201 bp, Homo sapiens
attggctcattgaatcctcatgaaagtctctggagggaggtactatcatctgtattattcccattttacagatgagaaaactgaggcacggagaggctaarttccctgcccagcaatctgtctttagcaccctctctgttgtatctcattgatttctgctgatcctggatcacgggttcatctggggaagtcattgctgga

SEQ ID NO: 316904 - DNA, 201 bp, Homo sapiens
cggcattggctcattgaatcctcatgaaagtctctggagggaggtactatcatctgtattattcccattttacagatgagaaaactgaggcacggagaggmtaaattccctgcccagcaatctgtctttagcaccctctctgttgtatctcattgatttctgctgatcctggatcacgggttcatctggggaagtcattgc

SEQ ID NO: 316905 - DNA, 201 bp, Homo sapiens
tggcagccctccttgccttcctcctcctcctcctcatccacctcctcttcctcctctttttccttctcctgctcctctttctcctcctcgtcttcctcctygtcttcctcctcctcttcctcttcctcctcttcctcctttttcctcctcctcctcgtcttcctcatcctctttctcctcctcctcttcctcctcctcctt

SEQ ID NO: 316906 - DNA, 201 bp, Homo sapiens
ctcccaggttcaagcgattctcctgcctcaatctccctagtggctgggattacaggcggatgccacaacgctcagctaatgtttgtatttttagtagagayggggtttcaccatgttggtcaggctggtttcaaactcttgatctcaggtgatccgcctacctcggcctcccaaagtaccgggattacaggcgtgagccac

SEQ ID NO: 316907 - DNA, 201 bp, Homo sapiens
gccaccacacctggccctctctgcagtttatacttgaggaaactgaggcccagacaggtgaagtgactgtccagggtggtccagacagaggtggttggtcygaggtcagctgggctccagtctagcgctctttctacttcctcaaggcagattggattgcagtgtgtgccccactgtcctgagtgggtgcttccctcctcc

SEQ ID NO: 316908 - DNA, 201 bp, Homo sapiens
ccactgtgcctggcctggactgttgtttttcaaagcgaagttgaggatcacctggcacattttgtaacaaagtggatctctgggccacacccaggaatcarcaatgtctctggatgtgggatcctgagcgtggtggcggagctctatcctgatgacagaggctcttaggaggcctgacctggtcagaggagaatgggcaaa

SEQ ID NO: 316909 - DNA, 201 bp, Homo sapiens
tgtgacttcccttctcacacccagactccaggctatgactccccaccaccaccctgtgaccccctccatcttccccaccaccagcctctgacccccacccrctttctgtctctcccacagtggtgtctggaatgtgccctatatttcaaacatctacttgatcaagggcagtgccctgcggggtgagctgcagtcctcaga

SEQ ID NO: 316910 - DNA, 201 bp, Homo sapiens; identical to SEQ ID NO: 66289

SEQ ID NO: 316911 - DNA, 201 bp, Homo sapiens
accatcctgcacatgacctgctgccgtcagcgcctggaggagatcacgggccatctgcacaaagctaagcagctgggcctgaagaacatcatggcgctgcrgggaggtgtggagccagcactcccctacactctgggttctggctttcccggaggccacttggtagcctgaacttggttcctgaaatggtcctttacttct

SEQ ID NO: 316912 - DNA, 201 bp, Homo sapiens
gaggagctgaccagtgaagaaagtgtctttgaagtctttgttctttacctctcgggagaaccaaaccggaatggtcacaaagtgagtgatgctggagtggrgaccctggttcatcccctgcccctggcctgaccccagctgcaggccaggctgcggggctgtgacttccccatcctgtgccctcccctccatgctgtggac

SEQ ID NO: 316913 - DNA, 201 bp, Homo sapiens
aggaagcactccctgaaaggcagctgctgttactatcctgagttgacacctttctcccagggctgctggagttaacattatgttctgatctaaggcccacrggccctggagcagaaagacctgagtttaaggaccagctctactgtttactgtcagagtagccaacgtgctcaacttccctgaacccactttcctcacgtg

SEQ ID NO: 316914 - DNA, 201 bp, Homo sapiens
cctcccaaagtgctgggattacaggtgtgttttttgtttttttaagagatggagtctcgctatgttgcccaggctggccttgaactcctgggctcaggcawtccttctgcctcagccttcccagtagctgggtcactgtgatgatttgaattgaattctgtgatgtgtaagaagagcagcctgcaaggcaagcacagatgg

SEQ ID NO: 316915 - DNA, 201 bp, Homo sapiens
gccagcagtggcagtgagagctccaaagatagttcgagatgttccaccccgggcctggaccccgagcggcatgagagactccgggagaagatgaggcggcrattggaatctggtgacaagtggttctccctggaattcttccctcctcgaactgctgagggagctgtcaatctcatctcaaggtaaactcatgcaaggtta

SEQ ID NO: 316916 - DNA, 201 bp, Homo sapiens
cagagcaaagcagcttggccttccgcctggctcagagtcctgccctgggcttgggctgatgaaaccagcactccatgtagtttcatgaaggcctatggtcrtcctgcttgcctgaccgagcaaggcggctagtaagtttagtcattgaggaaaggggtcagagagttcacagagccagtaaggagcctatgggacatctga

SEQ ID NO: 316917 - DNA, 201 bp, Homo sapiens
actactacctcttctacctgaagagcaagtcccccaaggaggagctgctgaagatgtggggggaggagctgaccagtgaagaaagtgtctttgaagtcttygttctttacctctcgggagaaccaaaccggaatggtcacaaagtgagtgatgctggagtggggaccctggttcatcccctgcccctggcctgaccccagc

SEQ ID NO: 316918 - DNA, 201 bp, Homo sapiens
gcctttggggagctgaaggactactacctcttctacctgaagagcaagtcccccaaggaggagctgctgaagatgtggggggaggagctgaccagtgaagmaagtgtctttgaagtctttgttctttacctctcgggagaaccaaaccggaatggtcacaaagtgagtgatgctggagtggggaccctggttcatcccctg

SEQ ID NO: 316919 - DNA, 201 bp, Homo sapiens
gcaattcctcttcccctgcctttggggagctgaaggactactacctcttctacctgaagagcaagtcccccaaggaggagctgctgaagatgtggggggakgagctgaccagtgaagaaagtgtctttgaagtctttgttctttacctctcgggagaaccaaaccggaatggtcacaaagtgagtgatgctggagtgggga

SEQ ID NO: 316920 - DNA, 201 bp, Homo sapiens; identical to SEQ ID NO: 66295

SEQ ID NO: 316921 - DNA, 201 bp, Homo sapiens
ccagagaggagcacctgaaccccatgggcttggacttcctggggccccgctgggatttcttcgctgctctagctggcaggacacatcccggcctcttcttccacccattcccccatgtggctgaagacattccaacaatggggtgggcccataatagttagccctcagtcagttcccggagcacagccctgggagggggct

SEQ ID NO: 316922 - DNA, 201 bp, Homo sapiens
gccagagaggagcacctgaaccccatgggcttggacttcctggggccccgctgggatttcttcgctgctctagctggcaggacacatcccggcctcttcttccacccattcccccatgtggctgaagacattccaacaatggggtgggcccataatagttagccctcagtcagttcccggagcacagccctgggagggggc

SEQ ID NO: 316923 - DNA, 201 bp, Homo sapiens
agccagagaggagcacctgaaccccatgggcttggacttcctggggccccgctgggatttcttcgctgctctagctggcaggacacatcccggcctcttcttccacccattcccccatgtggctgaagacattccaacaatggggtgggcccataatagttagccctcagtcagttcccggagcacagccctgggaggggg

SEQ ID NO: 316924 - DNA, 201 bp, Homo sapiens
ctattggcaggttaccccaaaggccaccccgaagcagggagctttgaggctgacctgaagcacttgaaggagaaggtgtctgcgggagccgatttcatcaycacgcagcttttctttgaggctgacacattcttccgctttgtgaaggcatgcaccgacatgggcatcacttgccccatcgtccccgggatctttcccatc

SEQ ID NO: 316925 - DNA, 201 bp, Homo sapiens
tctgggcctccagaccaaagagttacatctaccgtacccaggagtgggacgagttccctaacggccgctggtgagggcctgcagaccttccttgcaaatayatctttgttcttgggagcgggagggcagaagaagtttgcatgcttgtggttgacctgggaggagtcaggggcagaatttacaggaatggcctcctgggca

SEQ ID NO: 316926 - DNA, 201 bp, Homo sapiens
ctcaggggtgctcccctgcttccggctccctctagccaatcccttgtctcaattctctgtccccatcctcacccaggcgtcccctaccctgggctctcagygcccaccccaagcgccgagaggaagatgtacgtcccatcttctgggcctccagaccaaagagttacatctaccgtacccaggagtgggacgagttcccta

SEQ ID NO: 316927 - DNA, 201 bp, Homo sapiens
ctcagagggcatcagatggaagaactcagcctcaggggtgctcccctgcttccggctccctctagccaatcccttgtctcaattctctgtccccatcctcrcccaggcgtcccctaccctgggctctcagcgcccaccccaagcgccgagaggaagatgtacgtcccatcttctgggcctccagaccaaagagttacatct

SEQ ID NO: 316928 - DNA, 201 bp, Homo sapiens
ggccaaggtgggaggattgcttgagcccagaagttccagacaaacctggacaagatagcaagaccccatctctaaaaaataaataattaattaaaaaaaawttttttaattagccagatgtggtggcttgcatctgtagtccaagctactcaggagactgaagtgggagatcacttgtgcccgggagttcaaggctacagt

SEQ ID NO: 316929 - DNA, 201 bp, Homo sapiens
agagatccccagaggagggtccaagagcagccccggctgcagtgctggctccccacggtggtacagatggatgtctgtgccatggctagctgggcacatcraaggctccagtctcagagggcatcagatggaagaactcagcctcaggggtgctcccctgcttccggctccctctagccaatcccttgtctcaattctctg

SEQ ID NO: 316930 - DNA, 201 bp, Homo sapiens
ctgctgaccctctttctaactgttcctacagcgaggctgtgcttgccacagttaggattcccctaactctcaatcatgatgtcttaactcacctgagatartaaacaggcaagcgctgtgaaaagtctgaagtgctgctctcacacaaaatgatagcgctgttgttgtgtcttacctctgtaatagtgattataacggcac

SEQ ID NO: 316931 - DNA, 201 bp, Homo sapiens
tgactgtcatccctattggcaggttaccccaaaggccaccccgaagcagggagctttgaggctgacctgaagcacttgaaggagaaggtgtctgcgggagycgatttcatcatcacgcagcttttctttgaggctgacacattcttccgctttgtgaaggcatgcaccgacatgggcatcacttgccccatcgtccccggg

SEQ ID NO: 316932 - DNA, 201 bp, Homo sapiens
tggagagccctgttaatcttgcctctgtgtgtgtgtgcatgtgtgcgtgtgtgcgggggtatgtgtgtgtaggacgaggcctttgccctgtggattgagcrgtggggaaagctgtatgaggaggagtccccgtcccgcaccatcatccagtacatccacgacaactacttcctggtcaacctggtggacaatgacttccca

SEQ ID NO: 316933 - DNA, 201 bp, Homo sapiens
cgagagatcatccagcccaccgtagtggatcccgtcagcttcatgttctggaaggtaaaggagccgggggcaagcttgccccgcccacctggaaaaccgtsgggagggattgggaccaagtcccaagcgtgtgctgaaggccacactggacccagccttcagggcacacccagctctgactcacccatgtcactgctgacg

SEQ ID NO: 316934 - DNA, 201 bp, Homo sapiens
tggcccaggtcttacccccaccccacatcccctcagggtgaaaacatcaccaatgcccctgaactgcagccgaatgctgtcacttggggcatcttccctgrgcgagagatcatccagcccaccgtagtggatcccgtcagcttcatgttctggaaggtaaaggagccgggggcaagcttgccccgcccacctggaaaaccg

SEQ ID NO: 316935 - DNA, 201 bp, Homo sapiens
tggccagcatcaagttctaacccacaacacggtctttttggagtagcatgaattcaggagaaatctggctgcatagtcaagccctcaccccttccatcctrtgcacgaactgtttcaagtaacagatgttccaggcagagccagccagagtgagctgttccttctctggagggtgatctggtatccctgaacgcctgttgg

SEQ ID NO: 316936 - DNA, 201 bp, Homo sapiens
tgctcttaaggagctcccagcctagagtgagggaggcagatcaatgtgtgaccaccagccagtgtaagtgggaaaatcaagttcaggagaggatgctgtcrggtccagaggagggatatctcacctgggaggccagggaaggcttctcagagggtcatctgtgggaatcactgaggacaaagaggagttggccaacaggag

SEQ ID NO: 316937 - DNA, 201 bp, Homo sapiens
tttagttgcccaagcagtatcaaaggagctcacctcatagtctttccttggaagaatctcatcctcctcctcctgtgtttctccaaggatggtctagaaamacagatccgcagagggagccttttttagtggttaggagtggaaggaggcagaagtatttactgaaatcagtggctagcttctaaatcatctggagccatt

SEQ ID NO: 316938 - DNA, 201 bp, Homo sapiens
ttaaccagactgccagatgaccctatgccctctgttggcctgtctgtgccctggtggctctgattacttgtttctgttttttgtttttgttttttttttttgagatggagttttgcttttgtcgcccaggctggagtgctatggcacaatcttggttcactgcaacctctgccttccgggttcaagcgattctcctgcctc

SEQ ID NO: 316939 - DNA, 201 bp, Homo sapiens
ctgagcccaggccgttccccttggcttcctccgtccacccaggctgcactgcagtgatggcgcgggaggcaccagctctgtggcctgtgtccagcagctgygggtctgaaggaatagccagagaggagcacctgaaccccatgggcttggacttcctggggccccgctgggatttcttcgctgctctagctggcaggacac

SEQ ID NO: 316940 - DNA, 201 bp, Homo sapiens
ttcaaggacatgtccccagactgctgtgcagtgtcattttttgtgtttggtttggtggtggcttcttcccccttgctaggctatcaacctcttatcaccayttgttggtgtcagaactaactgcttctggtctggagagggactgaccgatgcctttgggtagagagaattatgaaagaaattttggtatttttctacttt

SEQ ID NO: 316941 - DNA, 201 bp, Homo sapiens
accacacacccattcactactgtgtgtttgcccattgctgtgcaagtgttttgtttgtttttaagtgtttgtcttattttcttaaccagactgccagatgrccctatgccctctgttggcctgtctgtgccctggtggctctgattacttgtttctgttttttgtttttgttttttttttttgagatggagttttgctttt

SEQ ID NO: 316942 - DNA, 201 bp, Homo sapiens
tagccctcagacctgtccagactgagaaactcacgtccccactcccctcaccctttgcttatggacgtgccaacgccacagttcattattccgcccacatkgctgccagtagtcctgataccttaggtgtctgcgaaagggcgtctggcagggctggggttggtgacaggcacctgtctctcccacaggcctacttagagt

SEQ ID NO: 316943 - DNA, 201 bp, Homo sapiens
gatgctgccatccgcaactatggcatcgagctggccgtgagcctgtgccaggagcttctggccagtggcttggtgccaggcctccacttctacaccctcarccgcgagatggctaccacagaggtgctgaagcgcctggggatgtggactgaggaccccaggtgagggcagtggcccagagatccccagaggagggtccaa

SEQ ID NO: 316944 - DNA, 201 bp, Homo sapiens
aggagttgagtacagtgaggagggtggaggaaggtgctgagcttagccttgtgccctgcccccatctccccaggcctccagcctctcccggctgcctgccrcccaaagagaaatcacaggggcggggcaggaatgcaaagtgttttctcagaacagctgaaacattccgaagagggaatggatggggagaatggtcaatac

SEQ ID NO: 316945 - DNA, 201 bp, Homo sapiens
tgcccctgaactgcagccgaatgctgtcacttggggcatcttccctgggcgagagatcatccagcccaccgtagtggatcccgtcagcttcatgttctggwaggtaaaggagccgggggcaagcttgccccgcccacctggaaaaccgtggggagggattgggaccaagtcccaagcgtgtgctgaaggccacactggacc

SEQ ID NO: 316946 - DNA, 201 bp, Homo sapiens
aaggctagttcctttcaattccatttaaaaaacaaaaaccagcaggtgtggtggctcatggcgtaatgggcctgcccaatgctttgggaggccaaggcagrtagatcgcttgagcccaggagtttgagacaagccctggcaacatagtgagatcccatttctacaaaaaaaaaaaaaaaattagccgggtgtggtggcaca

SEQ ID NO: 316947 - DNA, 201 bp, Homo sapiens
cctcacccaggcgtcccctaccctgggctctcagcgcccaccccaagcgccgagaggaagatgtacgtcccatcttctgggcctccagaccaaagagttasatctaccgtacccaggagtgggacgagttccctaacggccgctggtgagggcctgcagaccttccttgcaaatatatctttgttcttgggagcgggaggg

SEQ ID NO: 316948 - DNA, 201 bp, Homo sapiens
agtgccagcagtggcagtgagagctccaaagatagttcgagatgttccaccccgggcctggaccccgagcggcatgagagactccgggagaagatgaggcsgcgattggaatctggtgacaagtggttctccctggaattcttccctcctcgaactgctgagggagctgtcaatctcatctcaaggtaaactcatgcaagg

SEQ ID NO: 316949 - DNA, 201 bp, Homo sapiens
aacgatgctgccatccgcaactatggcatcgagctggccgtgagcctgtgccaggagcttctggccagtggcttggtgccaggcctccacttctacacccycaaccgcgagatggctaccacagaggtgctgaagcgcctggggatgtggactgaggaccccaggtgagggcagtggcccagagatccccagaggagggtc

SEQ ID NO: 316950 - DNA, 201 bp, Homo sapiens
tgtgaaggtaggccaggccccagggttcccacagagtaccaggcccttcgttgagcaaacacccagcacctagcctgggctaggcattgtgcaagacagasagatacaggcagaactggggccctgctcttaaggagctcccagcctagagtgagggaggcagatcaatgtgtgaccaccagccagtgtaagtgggaaaat

SEQ ID NO: 316951 - DNA, 201 bp, Homo sapiens
gtggactgaggaccccaggtgagggcagtggcccagagatccccagaggagggtccaagagcagccccggctgcagtgctggctccccacggtggtacagrtggatgtctgtgccatggctagctgggcacatcgaaggctccagtctcagagggcatcagatggaagaactcagcctcaggggtgctcccctgcttccgg

SEQ ID NO: 316952 - DNA, 201 bp, Homo sapiens
gtgtgctcctagaatatgatcggactttcgtgggtccctctgcctgacactgtggttggcatggatgatggaagggggagaagtatttagggtgggagacrggctggccagcagccgccacagcccctcatgtcttggacagggctaccactcccttcggcagcttgtgaagctgtccaagctggaggtgccacaggagat

SEQ ID NO: 316953 - DNA, 201 bp, Homo sapiens
ccctggcggctgagaccagcctgctgaaggaggagctgctgcgggtgaaccgccagggcatcctcaccatcaactcacagcccaacatcaacgggaagccrtcctccgaccccatcgtgggctggggccccagcgggggctatgtcttccagaaggtgtggtagggaggcacggggtgcccccctctcttgaccggcaccc

SEQ ID NO: 316954 - DNA, 201 bp, Homo sapiens
tgctgccatccgcaactatggcatcgagctggccgtgagcctgtgccaggagcttctggccagtggcttggtgccaggcctccacttctacaccctcaacygcgagatggctaccacagaggtgctgaagcgcctggggatgtggactgaggaccccaggtgagggcagtggcccagagatccccagaggagggtccaaga

SEQ ID NO: 316955 - DNA, 201 bp, Homo sapiens
tttccctcctgctgtcttaccaagtgctagaaagagacgaaccaaacctaaataatatgaagtttctgccttccagggactcgcagtcctgggtgtcgggrctaggtagagggaacagaaagggtctctggaggttgggtgagacccagtgactatgacctccaccaaccctgcagacccaataggtgaccagtgggaaga

SEQ ID NO: 316956 - DNA, 201 bp, Homo sapiens; identical to SEQ ID NO: 66323

SEQ ID NO: 316957 - DNA, 201 bp, Homo sapiens
ccctgcttccggctccctctagccaatcccttgtctcaattctctgtccccatcctcacccaggcgtcccctaccctgggctctcagcgcccaccccaagygccgagaggaagatgtacgtcccatcttctgggcctccagaccaaagagttacatctaccgtacccaggagtgggacgagttccctaacggccgctggtg

SEQ ID NO: 316958 - DNA, 201 bp, Homo sapiens
ttttttccctcctgctgtcttaccaagtgctagaaagagacgaaccaaacctaaataatatgaagtttctgccttccagggactcgcagtcctgggtgtcrgggctaggtagagggaacagaaagggtctctggaggttgggtgagacccagtgactatgacctccaccaaccctgcagacccaataggtgaccagtggga

SEQ ID NO: 316959 - DNA, 201 bp, Homo sapiens
actggtgggctgcttttttccctcctgctgtcttaccaagtgctagaaagagacgaaccaaacctaaataatatgaagtttctgccttccagggactcgcrgtcctgggtgtcggggctaggtagagggaacagaaagggtctctggaggttgggtgagacccagtgactatgacctccaccaaccctgcagacccaatag

SEQ ID NO: 316960 - DNA, 201 bp, Homo sapiens
caagttcaggagaggatgctgtcgggtccagaggagggatatctcacctgggaggccagggaaggcttctcagagggtcatctgtgggaatcactgaggasaaagaggagttggccaacaggagagaagggtattcctgggacagggcagaggacaggcagaggcagtgagctgcaccatctggggaaaccgggaacatga

SEQ ID NO: 316961 - DNA, 201 bp, Homo sapiens
agacctcctccatgatgatcgccagcaccgccgtgaactactgtggcctggagaccatcctgcacatgacctgctgccgtcagcgcctggaggagatcacrggccatctgcacaaagctaagcagctgggcctgaagaacatcatggcgctgcggggaggtgtggagccagcactcccctacactctgggttctggctttc

SEQ ID NO: 316962 - DNA, 201 bp, Homo sapiens
tttgagtgaggcggcccggacagccatagctgaggagcatggagccactgggagggggcagtgtcaccttttttggccttcttcctgtgtggaaatacagygcctccggcttgaacctgccactcaggtgtcttgatgtgtcgggggtgtggctgcctgccccctgatgctccctgccccaccctgtgcagtaggaaccca

SEQ ID NO: 316963 - DNA, 201 bp, Homo sapiens; identical to SEQ ID NO: 66326

SEQ ID NO: 316964 - DNA, 201 bp, Homo sapiens
ccgggcctggaccccgagcggcatgagagactccgggagaagatgaggcggcgattggaatctggtgacaagtggttctccctggaattcttccctcctcraactgctgagggagctgtcaatctcatctcaaggtaaactcatgcaaggttaaggtgggaggcgggagtggtggtgcctggggagcaaactgtcagccct

SEQ ID NO: 316965 - DNA, 201 bp, Homo sapiens
cgcagggagagtggaggccgggagtggaggcgcaggcagagggtattgagcccagacagcctcattgagtcaaggctgtccaggcagtgggactccagttrttcttggcccaggtcttacccccaccccacatcccctcagggtgaaaacatcaccaatgcccctgaactgcagccgaatgctgtcacttggggcatcttc

SEQ ID NO: 316966 - DNA, 201 bp, Homo sapiens
cgtcagcttcatgttctggaaggtaaaggagccgggggcaagcttgccccgcccacctggaaaaccgtggggagggattgggaccaagtcccaagcgtgtrctgaaggccacactggacccagccttcagggcacacccagctctgactcacccatgtcactgctgacgcagggtgtttatttctgggcaggggtgggaag

SEQ ID NO: 316967 - DNA, 201 bp, Homo sapiens
tggggagggattgggaccaagtcccaagcgtgtgctgaaggccacactggacccagccttcagggcacacccagctctgactcacccatgtcactgctgaygcagggtgtttatttctgggcaggggtgggaagtgatactggcagtgggccttgttctattccgggaaatgtcctgttgagcagagcccttggagagccc

SEQ ID NO: 316968 - DNA, 201 bp, Homo sapiens
agtgactatgacctccaccaaccctgcagacccaataggtgaccagtgggaagaggaggagggaggcttcaactacgcagtggacctggtgaagcacatcygaagtgagtttggtgactactttgacatctgtgtggcaggtgagtggctggatcatcctggtggcggggatggagctagggaggctgagatgcccagaga

SEQ ID NO: 316969 - DNA, 201 bp, Homo sapiens
cgcgtttatggcgcttgctgagtggctggctgtgctggtgactgcaaggcatgaccattagagacttccccaaggaggggacacacagcaagaggcggtgycaggatgtggcccaggactagatggccagggcggcctctccctgtcacccccaaccaccctcttgagcctttgccctgccacccagccatgaattacgct

SEQ ID NO: 316970 - DNA, 201 bp, Homo sapiens
ttagtgcccgcctaggagttgagtacagtgaggagggtggaggaaggtgctgagcttagccttgtgccctgcccccatctccccaggcctccagcctctcmcggctgcctgccacccaaagagaaatcacaggggcggggcaggaatgcaaagtgttttctcagaacagctgaaacattccgaagagggaatggatgggga

SEQ ID NO: 316971 - DNA, 201 bp, Homo sapiens
gaaatgtcctgttgagcagagcccttggagagccctgttaatcttgcctctgtgtgtgtgtgcatgtgtgcgtgtgtgcgggggtatgtgtgtgtaggacraggcctttgccctgtggattgagcggtggggaaagctgtatgaggaggagtccccgtcccgcaccatcatccagtacatccacgacaactacttcctggt

SEQ ID NO: 316972 - DNA, 201 bp, Homo sapiens
tgcttccggctccctctagccaatcccttgtctcaattctctgtccccatcctcacccaggcgtcccctaccctgggctctcagcgcccaccccaagcgcygagaggaagatgtacgtcccatcttctgggcctccagaccaaagagttacatctaccgtacccaggagtgggacgagttccctaacggccgctggtgagg

SEQ ID NO: 316973 - DNA, 201 bp, Homo sapiens
tcactgaggacaaagaggagttggccaacaggagagaagggtattcctgggacagggcagaggacaggcagaggcagtgagctgcaccatctggggaaacsgggaacatgagcaggaggaggcgggagtgttaagcaggggccaggcccgcagagatcatggttgtcctgctggaatttgagttttccctcaatgcaaggg

SEQ ID NO: 316974 - DNA, 201 bp, Homo sapiens; identical to SEQ ID NO: 66301

SEQ ID NO: 316975 - DNA, 201 bp, Homo sapiens
cagatggggcagcttttgttctgagaaattcgtgcccttactgaacttgggtctggctatttttggaacatggccagcatcaagttctaacccacaacackgtctttttggagtagcatgaattcaggagaaatctggctgcatagtcaagccctcaccccttccatcctgtgcacgaactgtttcaagtaacagatgttc

SEQ ID NO: 316976 - DNA, 201 bp, Homo sapiens
caccccaagcgccgagaggaagatgtacgtcccatcttctgggcctccagaccaaagagttacatctaccgtacccaggagtgggacgagttccctaacgrccgctggtgagggcctgcagaccttccttgcaaatatatctttgttcttgggagcgggagggcagaagaagtttgcatgcttgtggttgacctgggagga

SEQ ID NO: 316977 - DNA, 201 bp, Homo sapiens
acgcttcgagagccctggctgcggtccccaggccccacccgctgccacctgcgggcccagattggcccggccccacccccggcaacgcctctctcagtccyttagcaaccgccccctccccaggccgactccgccggcttcttaccagctcctcgggggtgcgggtctcacgctcaccgcagcagcagcaccacctgcagc

SEQ ID NO: 316978 - DNA, 201 bp, Homo sapiens
ttggcaggttaccccaaaggccaccccgaagcagggagctttgaggctgacctgaagcacttgaaggagaaggtgtctgcgggagccgatttcatcatcaygcagcttttctttgaggctgacacattcttccgctttgtgaaggcatgcaccgacatgggcatcacttgccccatcgtccccgggatctttcccatccag

SEQ ID NO: 316979 - DNA, 201 bp, Homo sapiens
aagcagggagctttgaggctgacctgaagcacttgaaggagaaggtgtctgcgggagccgatttcatcatcacgcagcttttctttgaggctgacacattyttccgctttgtgaaggcatgcaccgacatgggcatcacttgccccatcgtccccgggatctttcccatccaggtgaggggcccaggagagcccataagct

SEQ ID NO: 316980 - DNA, 201 bp, Homo sapiens
tagcgctgttgttgtgtcttacctctgtaatagtgattataacggcacctcacatatactgagtattcggtttgtacaccaggcactgttctaagttctgtggaaccagctgccgtcatattctcctagtgttatggttttttgttgttgttgttgctttttttttttgagacagagtctcattctgtggcccaggctgga

SEQ ID NO: 316981 - DNA, 201 bp, Homo sapiens
atagcgctgttgttgtgtcttacctctgtaatagtgattataacggcacctcacatatactgagtattcggtttgtacaccaggcactgttctaagttctgtggaaccagctgccgtcatattctcctagtgttatggttttttgttgttgttgttgctttttttttttgagacagagtctcattctgtggcccaggctgg

SEQ ID NO: 316982 - DNA, 201 bp, Homo sapiens
gatagcgctgttgttgtgtcttacctctgtaatagtgattataacggcacctcacatatactgagtattcggtttgtacaccaggcactgttctaagttctgtggaaccagctgccgtcatattctcctagtgttatggttttttgttgttgttgttgctttttttttttgagacagagtctcattctgtggcccaggctg

SEQ ID NO: 316983 - DNA, 201 bp, Homo sapiens
tgatagcgctgttgttgtgtcttacctctgtaatagtgattataacggcacctcacatatactgagtattcggtttgtacaccaggcactgttctaagttctgtggaaccagctgccgtcatattctcctagtgttatggttttttgttgttgttgttgctttttttttttgagacagagtctcattctgtggcccaggct

SEQ ID NO: 316984 - DNA, 201 bp, Homo sapiens
gcccaggtcttacccccaccccacatcccctcagggtgaaaacatcaccaatgcccctgaactgcagccgaatgctgtcacttggggcatcttccctgggygagagatcatccagcccaccgtagtggatcccgtcagcttcatgttctggaaggtaaaggagccgggggcaagcttgccccgcccacctggaaaaccgtg

SEQ ID NO: 316985 - DNA, 201 bp, Homo sapiens
atgatagcgctgttgttgtgtcttacctctgtaatagtgattataacggcacctcacatatactgagtattcggtttgtacaccaggcactgttctaagttctgtggaaccagctgccgtcatattctcctagtgttatggttttttgttgttgttgttgctttttttttttgagacagagtctcattctgtggcccaggc

SEQ ID NO: 316986 - DNA, 201 bp, Homo sapiens
gcccccatcggtgactcagtgacctggtgactggattctcggccacctgggcgccgagacggcttccggctcctgccttttaaacctgcctccccggcgakcacctggagaagagcgctgggcccggggcactgcggtccctggcgcccactgcgtcccgctgcgcacgggggtccgccgggacctttctgggagtcgtag

SEQ ID NO: 316987 - DNA, 201 bp, Homo sapiens
aaggagctcccagcctagagtgagggaggcagatcaatgtgtgaccaccagccagtgtaagtgggaaaatcaagttcaggagaggatgctgtcgggtccaraggagggatatctcacctgggaggccagggaaggcttctcagagggtcatctgtgggaatcactgaggacaaagaggagttggccaacaggagagaaggg

SEQ ID NO: 316988 - DNA, 201 bp, Homo sapiens
gttccccttggcttcctccgtccacccaggctgcactgcagtgatggcgcgggaggcaccagctctgtggcctgtgtccagcagctgcgggtctgaaggartagccagagaggagcacctgaaccccatgggcttggacttcctggggccccgctgggatttcttcgctgctctagctggcaggacacatcccggcctctt

SEQ ID NO: 316989 - DNA, 201 bp, Homo sapiens
gagaagatgaggcggcgattggaatctggtgacaagtggttctccctggaattcttccctcctcgaactgctgagggagctgtcaatctcatctcaaggtraactcatgcaaggttaaggtgggaggcgggagtggtggtgcctggggagcaaactgtcagccctgaggctgggctgccctttaacccggcagaaaaaagc

SEQ ID NO: 316990 - DNA, 201 bp, Homo sapiens
ggggaggtgtggagccagcactcccctacactctgggttctggctttcccggaggccacttggtagcctgaacttggttcctgaaatggtcctttacttcytcctgggccccacgctgaggatccgcaggatcccatccccgccagtagtgtcagtaggcattgtgggtagtgagtcatcctgggcaccacacacaggcag

SEQ ID NO: 316991 - DNA, 201 bp, Homo sapiens
tccactgcccctgtgttttcagactccaggagctcattgttttgtgagtggcttatagtactctagccagctctctgaaccggatgctggttctgccattrgaaacaacacagaatatgactaataaagaacttcactagggggctgggtacagtggctcatgcctgtaatctcagcactttgggaggccaaggtgggagg

SEQ ID NO: 316992 - DNA, 201 bp, Homo sapiens
gggctgcttttttccctcctgctgtcttaccaagtgctagaaagagacgaaccaaacctaaataatatgaagtttctgccttccagggactcgcagtcctsggtgtcggggctaggtagagggaacagaaagggtctctggaggttgggtgagacccagtgactatgacctccaccaaccctgcagacccaataggtgacc

SEQ ID NO: 316993 - DNA, 201 bp, Homo sapiens
gaagcacttctgcaagtgctgaagaagtacgagctccgggttaattaccaccttgtcaatgtgaaggtaggccaggccccagggttcccacagagtaccargcccttcgttgagcaaacacccagcacctagcctgggctaggcattgtgcaagacagagagatacaggcagaactggggccctgctcttaaggagctccc

SEQ ID NO: 316994 - DNA, 201 bp, Homo sapiens
tgtggggcatggttccttccctgggaaggctaagttcagttctgttttttattctatgagaacaagtcacagctgcagctgggccccatgctctgccccargcccccaaccccgcggtgctccggcggcttcctgtccactctcggggcccttggggcctggcttgctccagggtcttgggctactggcagctcctctcct

SEQ ID NO: 316995 - DNA, 201 bp, Homo sapiens
gggaaggctaagttcagttctgttttttattctatgagaacaagtcacagctgcagctgggccccatgctctgccccaagcccccaaccccgcggtgctcyggcggcttcctgtccactctcggggcccttggggcctggcttgctccagggtcttgggctactggcagctcctctccttgggctcctggctgccaggcgt

SEQ ID NO: 316996 - DNA, 201 bp, Homo sapiens
gcggaagcacttctgcaagtgctgaagaagtacgagctccgggttaattaccaccttgtcaatgtgaaggtaggccaggccccagggttcccacagagtaycaggcccttcgttgagcaaacacccagcacctagcctgggctaggcattgtgcaagacagagagatacaggcagaactggggccctgctcttaaggagct

SEQ ID NO: 316997 - DNA, 201 bp, Homo sapiens
caagcccctcagcccttgcccccatccctcggacccaccaaactgcacacacagctcctcttaccgtagcctccgtttatgggccttgctttgggctttgsaggctctgggctcagggctggagtgcgctcttggtccctggtccctcgtccacaggggcaggcctgggacccagctactctgtccaggccactgtggcca

SEQ ID NO: 316998 - DNA, 201 bp, Homo sapiens
gggacccagctactctgtccaggccactgtggccagagctggaaggcagggcagagggaatgttccctgcaccctggaaaggggagttgagtcacaagagkttaaggtgggtccaggaaggcagctgctcttagtgcccgcctaggagttgagtacagtgaggagggtggaggaaggtgctgagcttagccttgtgccctg

SEQ ID NO: 316999 - DNA, 201 bp, Homo sapiens
gaaggcagggcagagggaatgttccctgcaccctggaaaggggagttgagtcacaagaggttaaggtgggtccaggaaggcagctgctcttagtgcccgcytaggagttgagtacagtgaggagggtggaggaaggtgctgagcttagccttgtgccctgcccccatctccccaggcctccagcctctcccggctgcctgc

SEQ ID NO: 317000 - DNA, 201 bp, Homo sapiens
gctccagcatccagcctgtgtgttctgtaatggaactgaccccctcccctgaaaacgaaggggccccggggctggcaagcagggaaagctccacggtgcgyggctgtggcacagacttctggaaggctggctgagtggaatgcagggaagagggcagtacctgggaaaggacccacccatcttcctgctgctgtaactgct

SEQ ID NO: 317001 - DNA, 201 bp, Homo sapiens
ccaatgctttgggaggccaaggcaggtagatcgcttgagcccaggagtttgagacaagccctggcaacatagtgagatcccatttctacaaaaaaaaaaaaaaaattagccgggtgtggtggcacacgcctgtagtctcagctactcaggtggctgaggtgggaggatcgtttgagccctggaggttgaggctgcagtgag

SEQ ID NO: 317002 - DNA, 201 bp, Homo sapiens; identical to SEQ ID NO: 66319

SEQ ID NO: 317003 - DNA, 201 bp, Homo sapiens
cccaatgctttgggaggccaaggcaggtagatcgcttgagcccaggagtttgagacaagccctggcaacatagtgagatcccatttctacaaaaaaaaaaaaaaaattagccgggtgtggtggcacacgcctgtagtctcagctactcaggtggctgaggtgggaggatcgtttgagccctggaggttgaggctgcagtga

SEQ ID NO: 317004 - DNA, 201 bp, Homo sapiens
ctccgaccccatcgtgggctggggccccagcgggggctatgtcttccagaaggtgtggtagggaggcacggggtgcccccctctcttgaccggcacccgtkggttccccagagcttagggcagagcagcctgcctctcctgggctcttaaattttgaatgagcatggattggagcggatgggagctcatgctttaagtcag

SEQ ID NO: 317005 - DNA, 201 bp, Homo sapiens
tctgggcaggggtgggaagtgatactggcagtgggccttgttctattccgggaaatgtcctgttgagcagagcccttggagagccctgttaatcttgcctstgtgtgtgtgtgcatgtgtgcgtgtgtgcgggggtatgtgtgtgtaggacgaggcctttgccctgtggattgagcggtggggaaagctgtatgaggagga

SEQ ID NO: 317006 - DNA, 201 bp, Homo sapiens
tcagtgaatgttggctatcaccgtgtgccaaactctggggataccccaggcaggacaccggtcctgtctcagggaactggggaaagagaaaggagacaggycttttcacccacagttacaacccagggtgctatgggagtccagctgataacggataaatcgtgggagttggcttacaaatatggcacatgcgtggcatat

SEQ ID NO: 317007 - DNA, 201 bp, Homo sapiens
agacctgtccagactgagaaactcacgtccccactcccctcaccctttgcttatggacgtgccaacgccacagttcattattccgcccacatggctgccartagtcctgataccttaggtgtctgcgaaagggcgtctggcagggctggggttggtgacaggcacctgtctctcccacaggcctacttagagtttttcact

SEQ ID NO: 317008 - DNA, 201 bp, Homo sapiens
ggctggagtgctatggcacaatcttggttcactgcaacctctgccttccgggttcaagcgattctcctgcctcagcctccagagtagctgggattacaggygcccgccaccaaacctggctaatttttatatttttagtagagtcgggatttcaccatgttggccaggctggtctcaaactcctggcctcaggtgatccac

SEQ ID NO: 317009 - DNA, 201 bp, Homo sapiens
agactgtacccctcttgttcaacactcaatagtcaaaacaatactgaacatatgtgttaaaggaataaagctattcaaaggcacatgcctacatctacctwctcttaagtccatgatcttttccctttatcaatagcctctcttccaactaaggctacaatccacttaacctcagctggcagttacactcagttagaacaa

SEQ ID NO: 317010 - DNA, 201 bp, Homo sapiens
tatacaatgatggagtccctaaacctgtgaattacagcagaaagtatggacacaccaaaggtatgacaaagattcttggtttctctttcctactggaaatsaacaatttcttaaatatttcatcttgagtatccttatattccatactaaatagatagcctttcttcttaatagtttatttgagttattgaaatgtatgac

SEQ ID NO: 317011 - DNA, 201 bp, Homo sapiens
agctggaattatgtgccagaagtgactgtgagaatattactcctccaccccctgacctggaattgaacctctgacagagagtgaaatgcaagattagaccractggtttaaatctcaaatgtgaaggtgaccaaggccaatagctgggttacatttggaattgtttcccttctcttgcctttacaaataagaatcttccgt

SEQ ID NO: 317012 - DNA, 201 bp, Homo sapiens
tgacccttgaaccatgctggggtaggggtgccggccctcatgccgtcaaaaatttatgtacaacttttgacttcctaaaaatttatctactaacagcctaytggatgccttactgataacatcagtttgactggatgccttactgataacatcaatagtcgaataacatgtaatttttatgttatatatcttatatactat

SEQ ID NO: 317013 - DNA, 201 bp, Homo sapiens
tcaaaataattcaagtcctctccccatcctcccacaacaagtacatcagctttttccttcagtatgtcaacttctagattttactcaatccatcaacagtyttctaaaaatctgaacaaaaataagctgaactttaacagataaattttatggtgtgtaaataatacttcaaaaagctattggaaataaataaataaagcc

SEQ ID NO: 317014 - DNA, 201 bp, Homo sapiens
agagacacaggtaagtaggcctgctggcttattatgggcatgctcccaatattctaggcatcatctgttgcttagtttcaagatactgctttccaaccagragtgacaagtaaaatcaagccatgattaacatccaattatactcatgtatgcatttcctaacaataacttatagacaagtaaatatataacatgactctg

SEQ ID NO: 317015 - DNA, 201 bp, Homo sapiens
atatccaagggagatatacaaatggaaaacaacagtaaaggaaggaaagggcctacttaattacttggttttagccctgaatcatcaaggcagagtattckgataaactgagctgaggaatgcagcttatgacaggggctcaaagtaccttccacctctcctgaagcccaaacccaaatctcatatccagtcagccaactg

SEQ ID NO: 317016 - DNA, 201 bp, Homo sapiens
atgactatttttcaaccttttttcaatttcatatatcataaataactttccatggcaacaagtattcagaagattccaaattcaaatgccttcaagggagmaggcaaatgatgtcagcaagtgaaaggaggcagttactattcaacttgcctgatacggacacaattttccaggagatgttgaaaattaatatttgtggaa

SEQ ID NO: 317017 - DNA, 201 bp, Homo sapiens
cttagaggccttccatgaaacagaaatgagagatatattaaagtgtgtaatacagttactgccacaggaaaacagtcaataaatgttagtaattcataatsattttgtctgttaggtttactttttataagttacctaaaagacaaaacaaggaaagtggagagactgggttagagtacctgtacctagactctacaacta

SEQ ID NO: 317018 - DNA, 201 bp, Homo sapiens
tattaattctttactaacattcctttaaaaactctccactgatttcaggaaaatccaaacactttggcatgatttacaaagttccctagaaactggccctrattccttctctagactaattttttccaaaggtctttccaggacaaagacatatattgcttcattcgttttatagaacagaagatgtttgcaaacaccaac

SEQ ID NO: 317019 - DNA, 201 bp, Homo sapiens; identical to SEQ ID NO: 66503

SEQ ID NO: 317020 - DNA, 201 bp, Homo sapiens
aagacttatttgtcattctttcagctactacttactaattggatgatcttgagccattcacttggattctctgaaccttgttttttttaatctatgaaagrgagataatagctaggtatgttcaagtacctagcacagagcccggcacatagatgacacttaaaaataatggtggcatttgagtttgaattccagcaaaaa

SEQ ID NO: 317021 - DNA, 201 bp, Homo sapiens
tttgaaaagagcctagctgcttagcagtgaagacactatctaaatcttgctaggtgactgtatagtttaacaaggtccaattccaatttagcaaatttgcwttctgccaaaacaaattttccttgtgatttcaaaatgaaattcctcttaactcttcacaggatggctaccttggttcccttttcgtggtggctttttatc

SEQ ID NO: 317022 - DNA, 201 bp, Homo sapiens
atatgcacatgaatatgtatatatgtatatgtgcatgtagtatatatgtacaaacacattttagtcagatttattgaagtatgatttatagagagtaaaaygagctcttcttaacatacagttcccttggaaatatacatttttgaaaaagtattttaaatagctttttatattaatttttatcatgttatttacattatc

SEQ ID NO: 317023 - DNA, 201 bp, Homo sapiens
agatttttattttcttctctggggaggagcaaagataagagtgaagaaagaggcaaagagcttgagcaaatccctttccttagaggccttccatgaaacakaaatgagagatatattaaagtgtgtaatacagttactgccacaggaaaacagtcaataaatgttagtaattcataatcattttgtctgttaggtttactt

SEQ ID NO: 317024 - DNA, 201 bp, Homo sapiens
ttaacatattttaaaatatttgctttgcagcagcaggaatccaggtactgatactgaggacacacacacacaccagcaattttatatatatatatatatatgcacatgaatatgtatatatgtatatgtgcatgtagtatatatgtacaaacacattttagtcagatttattgaagtatgatttatagagagtaaaacgag

SEQ ID NO: 317025 - DNA, 201 bp, Homo sapiens
cttaacatattttaaaatatttgctttgcagcagcaggaatccaggtactgatactgaggacacacacacacaccagcaattttatatatatatatatatatgcacatgaatatgtatatatgtatatgtgcatgtagtatatatgtacaaacacattttagtcagatttattgaagtatgatttatagagagtaaaacga

SEQ ID NO: 317026 - DNA, 201 bp, Homo sapiens
cattgagttatgttctgttaatttctctagtgtggtgtctattagcttttgaatttctccaggaatcatatcttgaaatccatcacccccaacctttcttsccatatccacaatctctttcatgactttcttgattgactctgtcataaatcctgtgaagtcatgctcaacatctgaacacagatttttccagcaggaatg

SEQ ID NO: 317027 - DNA, 201 bp, Homo sapiens
ccattgagttatgttctgttaatttctctagtgtggtgtctattagcttttgaatttctccaggaatcatatcttgaaatccatcacccccaacctttctygccatatccacaatctctttcatgactttcttgattgactctgtcataaatcctgtgaagtcatgctcaacatctgaacacagatttttccagcaggaat

SEQ ID NO: 317028 - DNA, 201 bp, Homo sapiens
agcttttacgggtttgtgacactgttgtatggtaatagtgtatatattataatgtttggtgcactgtgagtgtttaggggttaatggtggggttcatgctmttagaaagtatttggctagatcagtggttctcaaccgagggtaattttgccctcagaggatttttgataatgtctggagataatttcgattgtcacaact

SEQ ID NO: 317029 - DNA, 201 bp, Homo sapiens
gctgggggcagcaacaatttcatgcagaaatgaagaagggaaagctgtggactggtaggtaaatgaaatggaaggactgctgcatgcaaacagcctcggtwcagagttggcctggctcactgcgaagttcctaaggggaatgtccattctctttcctccctttacaaataaaggaagttaaagtgtgcaaatcggccaaac

SEQ ID NO: 317030 - DNA, 201 bp, Homo sapiens
acttttcggggcattcctaagcacagtagacaagaatgctccaacagactatgttgtgcattgaaaaaaaaattttatcacatcatataattaagcaactrtgagaggcttcttcattgaatttgttttctaagaaaaaagcaagggccttttttaaggacataggttatcctttcctgcttttaattatgtcactcagat

SEQ ID NO: 317031 - DNA, 201 bp, Homo sapiens
tttcgattgtcacaacttggcagtgctactggcatctaataggtagagggcagggatcttacaatgcacaggacagctcccacaacaaagaatgatcggcygaaaatgtgaatagagcacactgagaaacgctgagctaggtaatccaataatgccttaatgctgtcttggctgagctacctctcctccctgtgagatatc

SEQ ID NO: 317032 - DNA, 201 bp, Homo sapiens
actccagcctgaataacaagaatgagactccgtctcaaaaaaaaacaaaaaacaaaacaagaaagaaaaagaaagaaataattttaggcttctgcttctgwgactgcatgaatatgttccctaatagtgtgggatgagcagatttggagcaaaatattataaatttggtttcaaaaatacggagttgggggttaatgggac

SEQ ID NO: 317033 - DNA, 201 bp, Homo sapiens
tatgacaggggctcaaagtaccttccacctctcctgaagcccaaacccaaatctcatatccagtcagccaactgcatggtctgggccttggccttctctcyactgtagccacatggatcatggaagcaacagaaagagccactctcaatgtatatggacttccacttcagggactccacccaccagtataaccaaggtctt

SEQ ID NO: 317034 - DNA, 201 bp, Homo sapiens
agatgtaatccttggttggttgttcctacttcatttcctgaacaaataattcagtactcctttattatacactggttgcttaatcagaaacttggttccaraacaaccaagagaaataggaacattgccctcacacacagatcacaatgcacagggctcctgtcacatgagtaaaaatcatgcacagttaaaaatggactt

SEQ ID NO: 317035 - DNA, 201 bp, Homo sapiens
taacctgtccttcccaattcatcctgcccattgcctctcaactgatatttatgatcataaaccagtttctattaattctttactaacattcctttaaaaaytctccactgatttcaggaaaatccaaacactttggcatgatttacaaagttccctagaaactggccctaattccttctctagactaattttttccaaagg

SEQ ID NO: 317036 - DNA, 201 bp, Homo sapiens
atccaaacactttggcatgatttacaaagttccctagaaactggccctaattccttctctagactaattttttccaaaggtctttccaggacaaagacatrtattgcttcattcgttttatagaacagaagatgtttgcaaacaccaacatcatcatagtaatgatgataataacttacatttgcacatcactttagcatt

SEQ ID NO: 317037 - DNA, 201 bp, Homo sapiens
catatattgcttcattcgttttatagaacagaagatgtttgcaaacaccaacatcatcatagtaatgatgataataacttacatttgcacatcactttagsatttacaaaatgttttctcatccactatctcaattatgttgttattattgtgctcgtgacatccacatatcaggggtgaaagatgatttccattccagag

SEQ ID NO: 317038 - DNA, 201 bp, Homo sapiens
cctttccttagaggccttccatgaaacagaaatgagagatatattaaagtgtgtaatacagttactgccacaggaaaacagtcaataaatgttagtaattyataatcattttgtctgttaggtttactttttataagttacctaaaagacaaaacaaggaaagtggagagactgggttagagtacctgtacctagactcta

SEQ ID NO: 317039 - DNA, 201 bp, Homo sapiens
tgctgttgaactgactagggatagcttagagaaatattttgagtattcagagaaagagagatgaaaaaagggagcaaaagaaaaggaaaaaggaaagtcayggatcagttcgaacatcagccggctatatgagtcaaccacaaaagtatctcacaaccatccagccacgggccagtgaaaactcagtctccatcctctgct

SEQ ID NO: 317040 - DNA, 201 bp, Homo sapiens
tattagcctaataaaacactagtctgaagcataaatgggcttaaatgttgccactgtgaaccctattataaaagaagctttgtttttctgatttatctttrttaaatgtgtctttggtaggtttactgctgtggaacagagttcaagggttctggctgattcattccatccctcagtttcctccaattccggaagaaggct

SEQ ID NO: 317041 - DNA, 201 bp, Homo sapiens
cacaggtaagtaggcctgctggcttattatgggcatgctcccaatattctaggcatcatctgttgcttagtttcaagatactgctttccaaccaggagtgrcaagtaaaatcaagccatgattaacatccaattatactcatgtatgcatttcctaacaataacttatagacaagtaaatatataacatgactctgctcct

SEQ ID NO: 317042 - DNA, 201 bp, Homo sapiens
cttccaactaaggctacaatccacttaacctcagctggcagttacactcagttagaacaataaacttcatttatcataaaaaataaattcctcactggatsatcccagaattcctccatgttgtaccccaaaggcacacaaatggcctccttaccacattcaatgcaggttcacagagtaactaactcttcagagttctcc

SEQ ID NO: 317043 - DNA, 201 bp, Homo sapiens
aacgcctgcagctgcttctgctttccaggttggggatggggaccagaagcatatctattagtgggaaaataatgcctacattgttcctttccacatcaacragactgctaggggaggaagaaggaaagagcaacattgtaaagcctctatcatttgccttagttggagtagataggccttcacttgccggaatacaataat

SEQ ID NO: 317044 - DNA, 201 bp, Homo sapiens
cacatagacccatgcagttcaaacccaagggccaaccgtattatataaaatgaaaacgcctgcagctgcttctgctttccaggttggggatggggaccagragcatatctattagtgggaaaataatgcctacattgttcctttccacatcaacgagactgctaggggaggaagaaggaaagagcaacattgtaaagcctc

SEQ ID NO: 317045 - DNA, 201 bp, Homo sapiens
gccctttacactactctgcaccctcactcatggcttccttttttccttcataaatagaacaatgttcactagggagaaaccacttctatatgctacccccvccccacccctccaacaatcttatctgttctccttcctttttgcagggtttctcccacccccaaagaagtgatgcaccccctatgctctgaaacctatctc

SEQ ID NO: 317046 - DNA, 201 bp, Homo sapiens
acttaggcaaacacgagtgaatcttatgtttgcatagtcatatgcaaactggaaagtctagctatcataccaaacctaccatgataaatttctaaacacaraaatagtcagatgtctgttttacaaagttctttttggtatgtcacaaaatgataaaaatctttctattttcttccttattggctttcaagttgtttattt

SEQ ID NO: 317047 - DNA, 201 bp, Homo sapiens
tcccagccacctttcaccaggagctcattcacatgccccagctgtgcaccagggccagctcatcagagattcctggcaggctcctcaccacacttcagtckgcccagggacaaaaattcctccattttgcaaagtcggattcttttcttgacggtatgaaagaccatcatcaaacaacatgctgtataattctgctgttga

SEQ ID NO: 317048 - DNA, 201 bp, Homo sapiens
tatttctaggctatgtggttcatctgtgagttttttttttcaaattgtcaaaaatctccccctaaattttccaacatatgtttttaaaggcctgcatacayatagacccatgcagttcaaacccaagggccaaccgtattatataaaatgaaaacgcctgcagctgcttctgctttccaggttggggatggggaccagaag

SEQ ID NO: 317049 - DNA, 201 bp, Homo sapiens
ctttggcatgatttacaaagttccctagaaactggccctaattccttctctagactaattttttccaaaggtctttccaggacaaagacatatattgcttyattcgttttatagaacagaagatgtttgcaaacaccaacatcatcatagtaatgatgataataacttacatttgcacatcactttagcatttacaaaatg

SEQ ID NO: 317050 - DNA, 201 bp, Homo sapiens
ctgtgaatggcaccatgtttggtctatgtttgtatatgtaaattttgatgaattttaactttttataatagatttgtgcatagtttagggcagcaaatgawaaaatagactagtatctacatatattgtatgcattcataatgtatctaactttttcttaatttttaaaaatatttctaggctatgtggttcatctgtgag

SEQ ID NO: 317051 - DNA, 201 bp, Homo sapiens
aggtgaccctcccacctcagcctctggagtagctgggactacaggcatgcaccaccatgcctggctaatttttttttttttttttttttggcggagggggygggtaaagatagggtttcatgatgttacccaggctagtctcaaactcctggactcaagcaatccacccatattggcctctgaagtgctgggattatacac

SEQ ID NO: 317052 - DNA, 201 bp, Homo sapiens
agtttcagtgcccgtatcacagaagggttcatgttgtaaaagaagttaaaagcaatctttttatttttttcttttgagacaggatctcattcgacacccargctgcagtgcagtggcaccataagagctatctgttgcctcgacctcccaggcccaggtgaccctcccacctcagcctctggagtagctgggactacaggc

SEQ ID NO: 317053 - DNA, 201 bp, Homo sapiens
gtttctatacagtagtaatcattttttcaccatttgctttagtttcagtgcccgtatcacagaagggttcatgttgtaaaagaagttaaaagcaatctttwtatttttttcttttgagacaggatctcattcgacacccaggctgcagtgcagtggcaccataagagctatctgttgcctcgacctcccaggcccaggtga

SEQ ID NO: 317054 - DNA, 201 bp, Homo sapiens
acagcctactggatgccttactgataacatcagtttgactggatgccttactgataacatcaatagtcgaataacatgtaatttttatgttatatatcttwtatactatattcttacaataaagtaagctagagaaaggaaaatgttattaagagaatcattaaggaagagagaatatattcactcttcattaagtggaaa

SEQ ID NO: 317055 - DNA, 201 bp, Homo sapiens
agtgtgtaatacagttactgccacaggaaaacagtcaataaatgttagtaattcataatcattttgtctgttaggtttactttttataagttacctaaaaracaaaacaaggaaagtggagagactgggttagagtacctgtacctagactctacaactagaagctggaggaagagtgagcaactaatgaatgacaccaag

SEQ ID NO: 317056 - DNA, 201 bp, Homo sapiens
ctttggtgttgaactcatgggacttttagtgcccggtggcactatccaataccaaaagaactttaaaaggcagttccttactggcaaggtaccttctaacyttagagacaaagcatcactggaaccaatttagaaaaagggttttgttgcccaggccttcttattgtacaactggcagctggtatgtatcttttcccttca

SEQ ID NO: 317057 - DNA, 201 bp, Homo sapiens
gtggtgtctattagcttttgaatttctccaggaatcatatcttgaaatccatcacccccaacctttcttgccatatccacaatctctttcatgactttctygattgactctgtcataaatcctgtgaagtcatgctcaacatctgaacacagatttttccagcaggaatgtattgttttgggcttgatggctttcatggct

SEQ ID NO: 317058 - DNA, 201 bp, Homo sapiens
cccaggaaaaatgtttaaaagtactagctctcaactggtgtgccacagcacactgatagttcacaaacccttcactggtgggccaccaaattgtgattgayatggaaaatcatttttgccacaagtgaatggacatattacttagcaatgtctgttagagagaatataagcaacttgttgccaagctgctaacatttattg

SEQ ID NO: 317059 - DNA, 201 bp, Homo sapiens
ggtctgggctagaaacagactgaggactcttgagtacataattagagacagtcacccaggaaaaatgtttaaaagtactagctctcaactggtgtgccacrgcacactgatagttcacaaacccttcactggtgggccaccaaattgtgattgacatggaaaatcatttttgccacaagtgaatggacatattacttagca

SEQ ID NO: 317060 - DNA, 201 bp, Homo sapiens
gtgggattgagctgacagcttctgtgagctggcaatttcttttaattacatcatggcttttcctaacagaacacttccaacatcctttgaaagactgacasagtaaagaaggcagattatttttttctgaaaatggagcatgtgctgctccttatgagaaagagaagggggacctggtcacacacagcactgtttgcctaa

SEQ ID NO: 317061 - DNA, 201 bp, Homo sapiens
acgctgagctaggtaatccaataatgccttaatgctgtcttggctgagctacctctcctccctgtgagatatccaagggagatatacaaatggaaaacaayagtaaaggaaggaaagggcctacttaattacttggttttagccctgaatcatcaaggcagagtattctgataaactgagctgaggaatgcagcttatgac

SEQ ID NO: 317062 - DNA, 201 bp, Homo sapiens
tgtaagagtttccctttctcctcatcatcaccagcattcattattttttgtctttttgataatagccattttaactggggtaagatgatatcactgggtgyggtggctcacacctgtaatcccagcactttgggaggctgaggcgggcagatcacctgaggtcaggagttcgagaccagcctaatgaacatggagaaaccc

SEQ ID NO: 317063 - DNA, 201 bp, Homo sapiens
tccaggacaaagacatatattgcttcattcgttttatagaacagaagatgtttgcaaacaccaacatcatcatagtaatgatgataataacttacatttgsacatcactttagcatttacaaaatgttttctcatccactatctcaattatgttgttattattgtgctcgtgacatccacatatcaggggtgaaagatgat

SEQ ID NO: 317064 - DNA, 201 bp, Homo sapiens
tatatcataaataactttccatggcaacaagtattcagaagattccaaattcaaatgccttcaagggagcaggcaaatgatgtcagcaagtgaaaggaggsagttactattcaacttgcctgatacggacacaattttccaggagatgttgaaaattaatatttgtggaaaaactccccagtttttaaatgttggcactaa

SEQ ID NO: 317065 - DNA, 201 bp, Homo sapiens
agtattcagaagattccaaattcaaatgccttcaagggagcaggcaaatgatgtcagcaagtgaaaggaggcagttactattcaacttgcctgatacggamacaattttccaggagatgttgaaaattaatatttgtggaaaaactccccagtttttaaatgttggcactaaattcaaagtttaaaaaatactctgcaagc

SEQ ID NO: 317066 - DNA, 201 bp, Homo sapiens
cctctcctccctgtgagatatccaagggagatatacaaatggaaaacaacagtaaaggaaggaaagggcctacttaattacttggttttagccctgaatcwtcaaggcagagtattctgataaactgagctgaggaatgcagcttatgacaggggctcaaagtaccttccacctctcctgaagcccaaacccaaatctcat

SEQ ID NO: 317067 - DNA, 201 bp, Homo sapiens
tggggttcatgctattagaaagtatttggctagatcagtggttctcaaccgagggtaattttgccctcagaggatttttgataatgtctggagataatttygattgtcacaacttggcagtgctactggcatctaataggtagagggcagggatcttacaatgcacaggacagctcccacaacaaagaatgatcggccgaa

SEQ ID NO: 317068 - DNA, 201 bp, Homo sapiens
tccacccatattggcctctgaagtgctgggattatacacatgagacactgcacccagcctaaaagcagtcttgaatgatcagactgcgtctaatattgatytgtgttcttgcaccacctcttctatgtcttcttgctcatcatctggctctggttccattgagttatgttctgttaatttctctagtgtggtgtctattag

SEQ ID NO: 317069 - DNA, 201 bp, Homo sapiens
aatcaaacgtcagagccagcacagcctgagagcgccttgaaactcagactccacaatctatggggaaagtgtcctgctgtggcatgaaataaatgaaacasaaaatgatggcaagactgctaagaacatcctttgctttgctcttccttggcctctttggggtgctgggggcagcaacaatttcatgcagaaatgaagaag

SEQ ID NO: 317070 - DNA, 201 bp, Homo sapiens
gagttttctgttcacccacccaacccccaatcctagcaccttgaagtgagctagctcaggaccagctcaagacaactatctgagtcaatctgactaagacytgaggaaacatgtcatcatactctacagcaatgccaaatttacttggcaccatgtccagtggtgtcactaggcaaggtgtgaattaattgtatattgaag

SEQ ID NO: 317071 - DNA, 201 bp, Homo sapiens
ccaagagtgttttgggaaggacattacaacagctatatgaagcatatgcctctaaggtatgttatatagttaattgttcacttgaataatataaaatgcayaaaactgaatccaaagccttcaccagagttttctgttcacccacccaacccccaatcctagcaccttgaagtgagctagctcaggaccagctcaagacaa

SEQ ID NO: 317072 - DNA, 201 bp, Homo sapiens
gactttctttcccctgtctttcatgtcacaggcttcatattgatggggaagctgcctattaggggaatagatgacttctcatgtgtattaatgaaagcaaygtattgcaggctgggtagctggtagaaatgttgtgggcgtttgtaagtggaagatttacgccattataaccctaatatattcctgcagagtaacaacaca

SEQ ID NO: 317073 - DNA, 201 bp, Homo sapiens
caggctagtctcaaactcctggactcaagcaatccacccatattggcctctgaagtgctgggattatacacatgagacactgcacccagcctaaaagcagycttgaatgatcagactgcgtctaatattgatttgtgttcttgcaccacctcttctatgtcttcttgctcatcatctggctctggttccattgagttatgt

SEQ ID NO: 317074 - DNA, 201 bp, Homo sapiens
ctcccaggcccaggtgaccctcccacctcagcctctggagtagctgggactacaggcatgcaccaccatgcctggctaatttttttttttttttttttttkgcggagggggcgggtaaagatagggtttcatgatgttacccaggctagtctcaaactcctggactcaagcaatccacccatattggcctctgaagtgctg

SEQ ID NO: 317075 - DNA, 201 bp, Homo sapiens
atgcacactgaggagatgatgattcttaaagctttttggtacatggagttctcaacttttgtatatgtatatgtacatttagaagaaaaaatatatggtcyccaaggccaaattacctgggttcgaatatcaatttcatcaattacaaacttcataatcttgggtgtgtgatgtaaattctcagttaattcatctataaag

SEQ ID NO: 317076 - DNA, 201 bp, Homo sapiens
tttagcaaagttgctctcctgaataccctatttactgggaacccaacaattttcataacatgctacattcttcaacctctcctccaacaatctcccacacyattcctgctctaccctgctaactgccacaaggctttggggaaatggctctaaagaagtagggcacaatatcaagtggaggggttctcttggccaacagat

SEQ ID NO: 317077 - DNA, 201 bp, Homo sapiens
gttctcaacttttgtatatgtatatgtacatttagaagaaaaaatatatggtctccaaggccaaattacctgggttcgaatatcaatttcatcaattacamacttcataatcttgggtgtgtgatgtaaattctcagttaattcatctataaagtaaagataatgataacaacagaatttgcctgataacatgtttgctgt

SEQ ID NO: 317078 - DNA, 201 bp, Homo sapiens
tgttattattgtgctcgtgacatccacatatcaggggtgaaagatgatttccattccagagtatattttcagggactaatctaagtgtaaataccaacctmactatctttctcctcctaaaccctagacatctttgcagcctggatggctcaacggctgaagacacacttgttaacagaaacctggcagcgaaaaagacaa

SEQ ID NO: 317079 - DNA, 201 bp, Homo sapiens
ggacaaagtggcatctgcataactttcaagtacaaccagtatgaggcaataggtaaaactaaagtatgtgagaaaaaaaacgataactatgttgaagaaakgatttggaaatatattcataaatgtgtcacttcatttgttaatctattcatagaccctctgatacctagattctaatactggctttgccatggtgaggtc

SEQ ID NO: 317080 - DNA, 201 bp, Homo sapiens
cagtaaaggaaggaaagggcctacttaattacttggttttagccctgaatcatcaaggcagagtattctgataaactgagctgaggaatgcagcttatgasaggggctcaaagtaccttccacctctcctgaagcccaaacccaaatctcatatccagtcagccaactgcatggtctgggccttggccttctctccactgt

SEQ ID NO: 317081 - DNA, 201 bp, Homo sapiens
gggccagctcatcagagattcctggcaggctcctcaccacacttcagtcggcccagggacaaaaattcctccattttgcaaagtcggattcttttcttgayggtatgaaagaccatcatcaaacaacatgctgtataattctgctgttgaactgactagggatagcttagagaaatattttgagtattcagagaaagagag

SEQ ID NO: 317082 - DNA, 201 bp, Homo sapiens
taaaatttactgaatgcctactactagccaagccctgtgttaggcactagagatcttaaacttgacaggacagagacagtctctgcagaatgtggcactgytgaaattctttcctttttgaaactctcaccttcactgattttggggaacacgcagtcccctggtctttctcccacttctaagtttcttctgccaggtcct

SEQ ID NO: 317083 - DNA, 201 bp, Homo sapiens
gaaataattgccatcgggtgtggatgcaaagggcatgactcaggtcccatattcgtgtctccctgggcctgatacattttgcatacttcacatagctcacrctgctctgagctatttttctcttttcggtagtattgtacccattttccaggtgaggaaactgaggctcgcagactttctaagaatgcactgaggtcatgg

SEQ ID NO: 317084 - DNA, 201 bp, Homo sapiens
agcttagctgaggtccctgtcagaagcttccagatggtcccaggggattgacactgccttgtcccttcctgagggactgtggagactcgtggctgcctctycattcttctcatgatggtagatggaagagggccgtgcagattttaatgtatttatcgttatcaaatctccatattaaccccatgagggggtgtcagtgtt

SEQ ID NO: 317085 - DNA, 201 bp, Homo sapiens
taacctgggttcctgaagggtaaattgcaggagccagaacccaggctgctttctggatcaggcatttgccactgcctgctcctcggtccccatggtgagcrccccctctgctgcacagagctggtatgacagcccctcagcctgctaaatgccttcttagattggctcagcagccctctggggtgggcgtcagctctgcgt

SEQ ID NO: 317086 - DNA, 201 bp, Homo sapiens
tcctctctgcctctgcccacgtgtcctcctgcctggaatgcctgctgtctcttccgtgctcagtgaactcttacctcctggtccagcccagatgtcacccmctccgtgagacttcctgagccttctccagccgaaaggactattcctgcctctgtttccccagagcatgttgttcctgcatcagttacagctcagattgca

SEQ ID NO: 317087 - DNA, 201 bp, Homo sapiens
ggccccgagcacctcagatggcattggcctaagaagcccccatgcttggagtttatccatccagaaactggcatgcactttacgtgggccaggaaactcayaggtctgtgatttgagggagaataaaaggtcagcccttttgcaaacagggcaagcacattctggctctgtccggctgaaaccctgggcagacgtgtgcag

SEQ ID NO: 317088 - DNA, 201 bp, Homo sapiens
agagggttgggaggcagcagagcatgggtgacagtgggagcacacgacttccttggagcctgggcctttgcgggtcccaggtggtcaggcagctggagcaraagtggaaatggcttaagatgctcatagcccagccccggctgtgtctactccaggccaagcctgggctgcagtccttgctatgttccccccagggccctg

SEQ ID NO: 317089 - DNA, 201 bp, Homo sapiens
cctggccattatgaaagaggagggaggtagaggggatccagccacaagtcaggtggatgaaccatttcaggcaccagcactgcccagtagaactttttgtsatgagggatgcgtccagtaccttcactctccaatatgcagccaccagccacacatggccatggagcccttgaagggtggcctgtgcgactgaggaactgc

SEQ ID NO: 317090 - DNA, 201 bp, Homo sapiens
acacatggccatggagcccttgaagggtggcctgtgcgactgaggaactgcattatctagttttctttcattttaattaagttaaatcttagtagccagtygtggctggtggctgccgtgtcgggcattgcagctgtaagcggaggcaagtgcaaatgcagagaccagaagtgggaatgaacttgtatttgaagaaacaaa

SEQ ID NO: 317091 - DNA, 201 bp, Homo sapiens
gcctcttagacctccctcctccctgcccaccccagtcctttgcccgtatcaagaagtggctggagcacgcacgctcctcacccagcctcaccatcctggcygggggcaagtgtgatgactccgtgggctactttgtggagccctgcatcgtggagagcaaggaccctcaggagcccatcatgaaggaggtgactggggtgg

SEQ ID NO: 317092 - DNA, 201 bp, Homo sapiens
tgccgcagggatgccttcccagcctcttagacctccctcctccctgcccaccccagtcctttgcccgtatcaagaagtggctggagcacgcacgctcctcrcccagcctcaccatcctggccgggggcaagtgtgatgactccgtgggctactttgtggagccctgcatcgtggagagcaaggaccctcaggagcccatca

SEQ ID NO: 317093 - DNA, 201 bp, Homo sapiens
ggccctgccacctctcctcatggggccaggaaggcccctcggagtggggttcgaagccacaccacacagactttctctgccctcccttctctggaggcccygagggactgctgcttccttccttccttccacaccaccaacgggtgccccgtctccatcccccacccacccaaggaatggtgctgtcaatttctattgttc

SEQ ID NO: 317094 - DNA, 201 bp, Homo sapiens
ggtgagcgggaccctccgctcagccttcgagtacggtggccagaagtgttccgcctgctcgcgtctctacgtgccgcactcgctgtggccgcagatcaaarggcggctgctggaggagcacagtcggatcaaagtgggcgacgtgagtggcaccgtcacccccgccgcggcccagcggggggctgatgggattgggtccct

SEQ ID NO: 317095 - DNA, 201 bp, Homo sapiens
tgtgggggctgccgcagggatgccttcccagcctcttagacctccctcctccctgcccaccccagtcctttgcccgtatcaagaagtggctggagcacgcrcgctcctcacccagcctcaccatcctggccgggggcaagtgtgatgactccgtgggctactttgtggagccctgcatcgtggagagcaaggaccctcagg

SEQ ID NO: 317096 - DNA, 201 bp, Homo sapiens
ccccacccagggagactttataccccatgatcctgccccaccgttgctgttgtctgccagctgggtctagcatcacagggaagggggggatttatactcayggaaagactactgatcctaccggaaaccaacctgtttactgtactgttgtaaatatcatgccctttatatcctgtatattggcttcttttaaataaagtg

SEQ ID NO: 317097 - DNA, 201 bp, Homo sapiens
ctggcttccccctggagctgggagagaggccggggttagggtgatctgtgtggcagcactgactgggtagtgtgggtttggccgaggttggtcatgaggcyggggttcccgcaaggcactggcctccctgaccgcttgcttccttccggacctctgggttcagggcgggggcggagggatccttgatttccctgataactt

SEQ ID NO: 317098 - DNA, 201 bp, Homo sapiens
gtgggtttggccgaggttggtcatgaggctggggttcccgcaaggcactggcctccctgaccgcttgcttccttccggacctctgggttcagggcgggggyggagggatccttgatttccctgataacttgatgttcttccctccctcgccagccaacaatagaggcttagagatctgtaatttctctgtgagaaagtctg

SEQ ID NO: 317099 - DNA, 201 bp, Homo sapiens
tgaatgtgttcatatagggctccgtgtggctccacatgtaggtctttccatataaacatgtacatatccatttgcacataagcacacacacgcatatgtcrataagtccacccacacgcatgtacatggagaaggcatgcagatccctacatgcttagacatgtgaccatgcatatgcctatatatgcattgattgatgtg

SEQ ID NO: 317100 - DNA, 201 bp, Homo sapiens
ctcctaatagcatttgcatgagtgcatgtacacgtgtgtttgtgaatgtgttcatatagggctccgtgtggctccacatgtaggtctttccatataaacaygtacatatccatttgcacataagcacacacacgcatatgtcgataagtccacccacacgcatgtacatggagaaggcatgcagatccctacatgcttaga

SEQ ID NO: 317101 - DNA, 201 bp, Homo sapiens
gaaagaacttccacttcgtgcaccgctcggccgacgtggagagcgtggtgagcgggaccctccgctcagccttcgagtacggtggccagaagtgttccgcstgctcgcgtctctacgtgccgcactcgctgtggccgcagatcaaagggcggctgctggaggagcacagtcggatcaaagtgggcgacgtgagtggcaccg

SEQ ID NO: 317102 - DNA, 201 bp, Homo sapiens
aaatgcgtgaatggatgaggaatgctgtcctgccaagaaggtcctcatggatcctcagagaggccccaagtcctgtgactgattcatctctgccttcaccygagcagccagtggatggatactcctgttagcccaaaattgttcatgaaccaaaaaaaaaaaaaaaaaaaaagaaagaaagaaagaaaaaagaaagcactg

SEQ ID NO: 317103 - DNA, 201 bp, Homo sapiens
cctgtgactgattcatctctgccttcacccgagcagccagtggatggatactcctgttagcccaaaattgttcatgaaccaaaaaaaaaaaaaaaaaaaaagaaagaaagaaagaaaaaagaaagcactgatgggtgggagtccttaggttatttttagctgcagtcgactcaggctgaactttgaactagtgtctgttct

SEQ ID NO: 317104 - DNA, 201 bp, Homo sapiens
tcttctcatgatggtagatggaagagggccgtgcagattttaatgtatttatcgttatcaaatctccatattaaccccatgagggggtgtcagtgttttakggagggagggaaactggcttcaagacatgtgacttgcccaaggtcacacagctagtgggaggcagagtgggggtggggagtgcagagctaccggctcagg

SEQ ID NO: 317105 - DNA, 201 bp, Homo sapiens
gccaccgacctggcctggcccccttctcatttctgtattgcctgggcacctccgtctgtggactctgcgttagggttttagatgggaggaagcgaggaagkcggtgaccatacccactcttgtccctctccccaggccttgaaggacctgaagggccggatggaagccatcccatgcgtggtgggggatgaggaggtgtgg

SEQ ID NO: 317106 - DNA, 201 bp, Homo sapiens
attggcctaagaagcccccatgcttggagtttatccatccagaaactggcatgcactttacgtgggccaggaaactcataggtctgtgatttgagggagartaaaaggtcagcccttttgcaaacagggcaagcacattctggctctgtccggctgaaaccctgggcagacgtgtgcagggggaggggtgactgaggggga

SEQ ID NO: 317107 - DNA, 201 bp, Homo sapiens
tcagatcccagtacttgcaaccctgacatctggtgcaggaggtgaaatggtgcatgtcctttgtagatcatatctcagtacttgtagccctgacatctccygccacaggaggtgaaatggtgcatggccttcatggatcggatcccagtacttgcagccctgacatgtcccgctgcaggaggtgaaacggtacatggcctt

SEQ ID NO: 317108 - DNA, 201 bp, Homo sapiens
taacctgaccgaaggcccacagccaacagctggccagcatccctcatccctgactcggcctcgtgttgaacctggaaagccagtgtgggctggagcagggstgttgaggctggagctggggctggaggggagatgagctggttgctctgtcaccactgctctgctttgtagggacgtcgtgcaggaggccacaaaggtgct

SEQ ID NO: 317109 - DNA, 201 bp, Homo sapiens
agtacctcggacgaggtgtcttgggcaaggtggagtctgggccctctgtgtcttttcagtttttccctctatagatttctgaagctgcattggctggcccrcagctccttgcaaccctgacatctcctggtgcagaaggtgaaatggtgcctggcctttgtagatcagatcccagtacttgcaaccctgacatctggtgca

SEQ ID NO: 317110 - DNA, 201 bp, Homo sapiens
cgtcttgagaaaatgtcttgaggtccctgaagggccaaatccatcgtggactaactctgtgggtagagctcagatgacctagggagaattaaaccacttamgcttggagtgggaggagagggggtggggtgggggagaatataagatgtaacttaagctaaatgtaatctatttataaagcaagagactctcatctatttt

SEQ ID NO: 317111 - DNA, 201 bp, Homo sapiens
aacttccacttcgtgcaccgctcggccgacgtggagagcgtggtgagcgggaccctccgctcagccttcgagtacggtggccagaagtgttccgcctgctygcgtctctacgtgccgcactcgctgtggccgcagatcaaagggcggctgctggaggagcacagtcggatcaaagtgggcgacgtgagtggcaccgtcacc

SEQ ID NO: 317112 - DNA, 201 bp, Homo sapiens
caaaaggcctgctctgccagccacgggcccctgggctccccgcctatcagcgggcggagcgggcctggaccccattctccacgctctgatgagcagcgggsttaaaggtgggaaggccataaattagtattagctactgtgtcgctggctcccgggtgattagcatttttattgttttgtggtgctgaggttggtcacact

SEQ ID NO: 317113 - DNA, 201 bp, Homo sapiens
gggggacagcaggcgtgtccaggactttcctggaaaaccggctctgagtccagtcctcttcatccttatcctggcacctccctcccgggcaaggacctcaytcttctctcctttcagccttttaaccatggacataaggtggccaagttctgttatgcagacaaggtgagtgagcctgtgtgcctggtgacccggggttag

SEQ ID NO: 317114 - DNA, 201 bp, Homo sapiens; identical to SEQ ID NO: 66523

SEQ ID NO: 317115 - DNA, 201 bp, Homo sapiens; identical to SEQ ID NO: 66522

SEQ ID NO: 317116 - DNA, 201 bp, Homo sapiens; identical to SEQ ID NO: 66524

SEQ ID NO: 317117 - DNA, 201 bp, Homo sapiens
gaggttgttgtgaggctttggtcagacaaagcacagcgtacttcgtccagagttgggcagctgttaagtgctttcagctgctgttagctgctgcttcccayggagggaggaaactgaggccgggagagtgaagtgacctgtctgaagctccctcccactggggaaatgggggagcggtttccagcacgcgtggggaggagg

SEQ ID NO: 317118 - DNA, 201 bp, Homo sapiens
gaacttctcagagccttgaatgctctaatacgcatggcacatcttcaaggacaaggtctgccatgtagtgtttcccacacgcattgggccatggaaccccrtttctgcaaagacccccatggaccaagtgttttgtggagcacattttgggaatgtgctgaggcctagagggagggagagttgcagccagcacgtgaccag

SEQ ID NO: 317119 - DNA, 201 bp, Homo sapiens
aggagaagacgggctgagacgtaggcagggctggaccttgttggcatattaaagttttcccacaaagaaacagtttcatggtcaaggaaatttggcatgtrtggtgttaaagcaaaatggactcctcccgtgcagaacttctcagagccttgaatgctctaatacgcatggcacatcttcaaggacaaggtctgccatgta

SEQ ID NO: 317120 - DNA, 201 bp, Homo sapiens
gccaagttctgttatgcagacaaggtgagtgagcctgtgtgcctggtgacccggggttagggttgctgcccctgctctgccctgccagctgctgatatggygggggcagggggcatcagttgctgtgtccttctttggccatggtgggtaggtgggcagggggtggctgacactgagggagtccctgggtgatgtctttga

SEQ ID NO: 317121 - DNA, 201 bp, Homo sapiens
tatgcagccaccagccacacatggccatggagcccttgaagggtggcctgtgcgactgaggaactgcattatctagttttctttcattttaattaagttawatcttagtagccagtcgtggctggtggctgccgtgtcgggcattgcagctgtaagcggaggcaagtgcaaatgcagagaccagaagtgggaatgaacttg

SEQ ID NO: 317122 - DNA, 201 bp, Homo sapiens
cctcccgtgtggccccagggacccctcccctggccattatgaaagaggagggaggtagaggggatccagccacaagtcaggtggatgaaccatttcaggcmccagcactgcccagtagaactttttgtgatgagggatgcgtccagtaccttcactctccaatatgcagccaccagccacacatggccatggagcccttga

SEQ ID NO: 317123 - DNA, 201 bp, Homo sapiens
cactgggtgtgtgtgcaggtgccagctgacagcagcacctgccacccagctccctggttgtctctgtagctgcctagagcttgccctcacctgtagctccrcaggcgtctgaggctgcatggcagctgggatttttccaggcagcgaggctccggcattctgataagcccctgggtggatactgctgattttcatttccca

SEQ ID NO: 317124 - DNA, 201 bp, Homo sapiens
gcgatctcggctcactgcaagctccgcctcccaggttcatgccattctcctgcctcagcctccccagtagctgggattacaggcatccgccaccacgcccrgctaattttttgtatttttagtagagagagggtttcaccatgttagccaggatggtctcgatctcctgaccttgtgatccgcccgccttggcctcccaaa

SEQ ID NO: 317125 - DNA, 201 bp, Homo sapiens
tcccaggttcatgccattctcctgcctcagcctccccagtagctgggattacaggcatccgccaccacgcccagctaattttttgtatttttagtagagasagggtttcaccatgttagccaggatggtctcgatctcctgaccttgtgatccgcccgccttggcctcccaaagtgctgggatcacaggtgtgagccaccg

SEQ ID NO: 317126 - DNA, 201 bp, Homo sapiens
ggctcagggccctggtccctggtcccgtggagggtctgacgccggggcctctctcctaggagatcttcgggcctgtactgtctgtgtacgtctacccggaygacaagtacaaggagacgctgcagctggttgacagcaccaccagctatggcctcacgggggcagtgttctcccaggataagtgagtggccaggccgcagc

SEQ ID NO: 317127 - DNA, 201 bp, Homo sapiens
ggagggtctgacgccggggcctctctcctaggagatcttcgggcctgtactgtctgtgtacgtctacccggatgacaagtacaaggagacgctgcagctgrttgacagcaccaccagctatggcctcacgggggcagtgttctcccaggataagtgagtggccaggccgcagccctggtgctgtgctccgggtgtcctgtc

SEQ ID NO: 317128 - DNA, 201 bp, Homo sapiens
tggagagcgtggtgagcgggaccctccgctcagccttcgagtacggtggccagaagtgttccgcctgctcgcgtctctacgtgccgcactcgctgtggccrcagatcaaagggcggctgctggaggagcacagtcggatcaaagtgggcgacgtgagtggcaccgtcacccccgccgcggcccagcggggggctgatggga

SEQ ID NO: 317129 - DNA, 201 bp, Homo sapiens
cccaggctgctttctggatcaggcatttgccactgcctgctcctcggtccccatggtgagcaccccctctgctgcacagagctggtatgacagcccctcakcctgctaaatgccttcttagattggctcagcagccctctggggtgggcgtcagctctgcgtgttcctggtgagccgcacgttgctgggaagacagtctag

SEQ ID NO: 317130 - DNA, 201 bp, Homo sapiens
gctactttgtggagccctgcatcgtggagagcaaggaccctcaggagcccatcatgaaggaggtgactggggtgggcagcctggggtccagaggaggacartcccaccggagcacagcacacacacagttctcctggagacattctcccatttcacagatgaggccctaaagggagaccctaaaagggaatgcctccgacc

SEQ ID NO: 317131 - DNA, 201 bp, Homo sapiens; identical to SEQ ID NO: 66541

SEQ ID NO: 317132 - DNA, 201 bp, Homo sapiens
ggctgtgtgttagttctgagcaaatccctcaccaagacccttccctcccaagccctcaaagaaatgaggcaaagcccttccctgcaagaccccttgtggaygtttttgcatctacctgatttttagccccacccagggagactttataccccatgatcctgccccaccgttgctgttgtctgccagctgggtctagcatca

SEQ ID NO: 317133 - DNA, 201 bp, Homo sapiens
ggagctaggtttggagaggtaggtgggacacagaccctgccccagaggggttcctagtctggtggggctgcccacctgtggatcagccccccctcccattkgaggtttgtttgcttgacccctggggctgttagtggcagtgtctttcctgatgagctgtgccctttctgagttaatcagtggccctctcccttcccccaa

SEQ ID NO: 317134 - DNA, 201 bp, Homo sapiens
cccagaggggttcctagtctggtggggctgcccacctgtggatcagccccccctcccatttgaggtttgtttgcttgacccctggggctgttagtggcagkgtctttcctgatgagctgtgccctttctgagttaatcagtggccctctcccttcccccaagggatggcatggtggtgctctgagcacaagtgagttgcaa

SEQ ID NO: 317135 - DNA, 201 bp, Homo sapiens; identical to SEQ ID NO: 66546

SEQ ID NO: 317136 - DNA, 201 bp, Homo sapiens
gttagtggcagtgtctttcctgatgagctgtgccctttctgagttaatcagtggccctctcccttcccccaagggatggcatggtggtgctctgagcacawgtgagttgcaacactgctgtgtgtcctctgtgggtgaagaggggataggaaagggcgcaggaagaggacatgggacagaggggttcctcttctaggctga

SEQ ID NO: 317137 - DNA, 201 bp, Homo sapiens
tggcagcaggctcgctgctggccgctacactgctggtccgttgattccatcatctcctcccttccccttctgcccaggctgttgcatcttttcagagaaawacagaagtgtcttttccgcaggaaccaatgacaagccagggggcccacactacatcctgcgctggacgtcgccgcaggtcatcaaggagacacataagcc

SEQ ID NO: 317138 - DNA, 201 bp, Homo sapiens
gtggtgttccttgtacctttacccagcaagatatgatagggatggtttttttttttctgagacggagtctcgctctgtcgcccaggctggagtgcagtggygcgatctcggctcactgcaagctccgcctcccaggttcatgccattctcctgcctcagcctccccagtagctgggattacaggcatccgccaccacgccc

SEQ ID NO: 317139 - DNA, 201 bp, Homo sapiens
gcatgccccaagcttggcagcaggctcgctgctggccgctacactgctggtccgttgattccatcatctcctcccttccccttctgcccaggctgttgcaycttttcagagaaaaacagaagtgtcttttccgcaggaaccaatgacaagccagggggcccacactacatcctgcgctggacgtcgccgcaggtcatcaag

SEQ ID NO: 317140 - DNA, 201 bp, Homo sapiens
gaattctggctaggaaccaggggtgaaggctagatatgtacctcttatggcaccccaggaccatgccaagtccctgcctctcagtctagtgttctctccaygccacaccctgcctcttagacatcctcgcatcccagcaaggatgcaaggctgggtgcgactggagagaacaatggaggctccccacagactggagactgg

SEQ ID NO: 317141 - DNA, 201 bp, Homo sapiens
gcttactattacccatgtattgcagagggtattttaaaggatacagatgaacagccagatgcgcagacacatagggcaaagactggaagggtccccggcakgggcaccgccgtccccctggagttcgggctgtgccacccccttggcatgtggacgtgttcaccaatctggaagctctcccgaccctgtccttttaggttt

SEQ ID NO: 317142 - DNA, 201 bp, Homo sapiens
ttacctcctcttccaggccccaggctctgccacccccttccccgcagctttgctgggggtgggagtgggtggtggcagcgttagaactgctgagaagggcygttttccaaaaggcctgctctgccagccacgggcccctgggctccccgcctatcagcgggcggagcgggcctggaccccattctccacgctctgatgagc

SEQ ID NO: 317143 - DNA, 201 bp, Homo sapiens
agcgtgcttactattacccatgtattgcagagggtattttaaaggatacagatgaacagccagatgcgcagacacatagggcaaagactggaagggtcccyggcatgggcaccgccgtccccctggagttcgggctgtgccacccccttggcatgtggacgtgttcaccaatctggaagctctcccgaccctgtcctttta

SEQ ID NO: 317144 - DNA, 201 bp, Homo sapiens
ggtgctgaggttggtcacacttggagcctggggaggaggcgaggccctccagggtggtggcttcgggcggggcctgagctccctctcccaggactctcctyggtttggcctctcaggcctgggcgctgggcttgggggggatccttcgcagaccacagcggggtctgttccctgccaggtacctgcagtgtgcccagcatg

SEQ ID NO: 317145 - DNA, 201 bp, Homo sapiens
caggttaagaactcagtcccgtaagactgaccccccaacttcagatgccaatcacaagtactgggaccccaggttacccacaccttgtctgactttgcgaygcattagaagctcccatgatgccctcttgagttttgatacgttgttagaacagctcacggaaccgaggggaagcgtgcttactattacccatgtattgca

SEQ ID NO: 317146 - DNA, 201 bp, Homo sapiens
ttgatggatgctggctgggtgtcctacagtttaacttgatgctcactgcctggggttagtgcagaccccacaggttaagaactcagtcccgtaagactgaycccccaacttcagatgccaatcacaagtactgggaccccaggttacccacaccttgtctgactttgcgacgcattagaagctcccatgatgccctcttga

SEQ ID NO: 317147 - DNA, 201 bp, Homo sapiens
gaagggccggatggaagccatcccatgcgtggtgggggatgaggaggtgtggacgtcggacgtgcagtaccaagtgtcggtatgtccagcgggtgggcagrgctcagcccctcccctgaatatgtgacctctttctctgacagctcgtaagcttataatgtgtgggctctgacttcaaggcctttatagtgcccctcccca

SEQ ID NO: 317148 - DNA, 201 bp, Homo sapiens
aggtcagaggatttgagcaaggagttcttgagactcagtgtcctggaatcaggcacctcacccccagggccagccctcccggggctgtgagctgagctcarggcagctctccaagttcatggtccacatcttggacattcctgcccagccagagctctcagccctttgtgccaaggggatctcagctggttcacattctga

SEQ ID NO: 317149 - DNA, 201 bp, Homo sapiens
tagtgggccagcagccctttgggggggcccgagcctctggtgagtgggtcccccttcccacaggggagctgagttcctggtgggagaccctagatgttacrtctcgaggggcttcagagtaataggaaggataccatttactgagcacttattgtgggccaagcaagtgcactagctcagggtcctttcagcaaactcgtg

SEQ ID NO: 317150 - DNA, 201 bp, Homo sapiens; identical to SEQ ID NO: 66509

SEQ ID NO: 317151 - DNA, 201 bp, Homo sapiens
gtcccctagacttggggctggtggctcttgagggcccagtgcctgctcggggacctgaggcctctttgcatggtcaccacaataagtccctgtgtctgcgktggcccaaggagccccttcatttccctgctgtggccagggccagggcttggagcgtgaaccatttgactgaggccggatgtccctgccaccactgtccca

SEQ ID NO: 317152 - DNA, 201 bp, Homo sapiens
aatgccaagtatgcggtggagctggaggggcagcagcccatcagcgtgcccccgagcaccaacagcacggtgtaccggggtctggaggtacctgcaggagrcagtgggcgagcaggcggggcagcccaatgccatgggcctgatctcaccgctgcctccttccccagggcttcgtggcggccatctcgccctttaacttca

SEQ ID NO: 317153 - DNA, 201 bp, Homo sapiens
cagcgctcactctgagcctccgcccgctctgggctgctccgtgctcgtgttggtcccgggccatggatggcgtaggtggtgctttgggcccctgggcaacygggggagccagctcctctggtcatttccccacccccgacccctgtagagtgcggcggaaagaacttccacttcgtgcaccgctcggccgacgtggagagc

SEQ ID NO: 317154 - DNA, 201 bp, Homo sapiens
gctcagccttcccactccttgacccttcagaggcccagggctgctctctgaatttccccactctcttgtgcttctcaggaattcaccgtcccccagctccrtggccagcagcgactcaggaagtacagatgagatccaggatgagttcgagcgcgaggcggatgtggagcccatggtcagctgatgactgaggccctgcga

SEQ ID NO: 317155 - DNA, 201 bp, Homo sapiens; identical to SEQ ID NO: 66514

SEQ ID NO: 317156 - DNA, 201 bp, Homo sapiens
catcctcatgcatcactgaaacacctcccgggcagggcaacgtggtcctatggaagcccagtgacactgccatgctggccagctatgctgtctaccgcatycttcgggaggctggcctgccccccaacatcatccagtttgtgccagctgatgggcccctatttggggacactgtcaccagctcagagcacctctgtggca

SEQ ID NO: 317157 - DNA, 201 bp, Homo sapiens; identical to SEQ ID NO: 66518

SEQ ID NO: 317158 - DNA, 201 bp, Homo sapiens
ctctgctttgtagggacgtcgtgcaggaggccacaaaggtgctgaggaatgctgccggcaacttctacatcaacgacaagtccactggctcgatagtgggycagcagccctttgggggggcccgagcctctggtgagtgggtcccccttcccacaggggagctgagttcctggtgggagaccctagatgttacgtctcgag

SEQ ID NO: 317159 - DNA, 201 bp, Homo sapiens
caggaggtgctagctcaggggcttgagaatcctttccccctcagcccctgggatgggacctggtgagccctccaaatgtttcctggtccctcctggggccyggctcagtgctcgctttgggcacagcgtcagatgtgagaagaggatggacaggaggctgttggctgctcctgacccccggccctctgccttgcagggtaa

SEQ ID NO: 317160 - DNA, 201 bp, Homo sapiens
ctgagcgagatgccctgcaaaaggtaatgggagggtgggaggcacccgagaggtgcagggcatggagcagaggccatccccagcagccctgagatagcgcyccgtgcctgcagccatcacccgcttctacccttgctcccagccttgggtggaagcctgggagggctgtgggtctggagtgtgggaacagctgggaggacc

SEQ ID NO: 317161 - DNA, 201 bp, Homo sapiens
tccacccacacgcatgtacatggagaaggcatgcagatccctacatgcttagacatgtgaccatgcatatgcctatatatgcattgattgatgtgtgtctrtgtttatatgcgagtgcacctgtagtactaacacacgtacacttgtgtgtgtacacacacacacacacacacacacacacacagtgttcatgtctgtcct

SEQ ID NO: 317162 - DNA, 201 bp, Homo sapiens
tccactggctcgatagtgggccagcagccctttgggggggcccgagcctctggtgagtgggtcccccttcccacaggggagctgagttcctggtgggagascctagatgttacgtctcgaggggcttcagagtaataggaaggataccatttactgagcacttattgtgggccaagcaagtgcactagctcagggtccttt

SEQ ID NO: 317163 - DNA, 201 bp, Homo sapiens
cccctccccagaggaggaagctgggctcagagactgggtaacctgaccgaaggcccacagccaacagctggccagcatccctcatccctgactcggcctcstgttgaacctggaaagccagtgtgggctggagcaggggtgttgaggctggagctggggctggaggggagatgagctggttgctctgtcaccactgctctg

SEQ ID NO: 317164 - DNA, 201 bp, Homo sapiens; identical to SEQ ID NO: 66547

SEQ ID NO: 317165 - DNA, 201 bp, Homo sapiens
ttcctccgtggcactggttgcccccatgtctgcctctatgagaaagtggaggtgagcttggagagggaggaagggtgtgggcctgggagctggagtttccsctgctcctgagggacaggaacattggaccaggacaggccactcccttcaacttcgcagtagccctgtaacgaggcgtgccaagcccctccccagaggagg

SEQ ID NO: 317166 - DNA, 201 bp, Homo sapiens
ccaccgacctggcctggcccccttctcatttctgtattgcctgggcacctccgtctgtggactctgcgttagggttttagatgggaggaagcgaggaaggsggtgaccatacccactcttgtccctctccccaggccttgaaggacctgaagggccggatggaagccatcccatgcgtggtgggggatgaggaggtgtgga

SEQ ID NO: 317167 - DNA, 201 bp, Homo sapiens
atgcgagtgcacctgtagtactaacacacgtacacttgtgtgtgtacacacacacacacacacacacacacacacagtgttcatgtctgtccttgtctctkctgtggctcagccagaccctggcttttgcccttggcgtcccctacccctgcccctgtttcaggagttgggcccttcaggtgcaggtgtttcggggtgagt

SEQ ID NO: 317168 - DNA, 201 bp, Homo sapiens; identical to SEQ ID NO: 66551

SEQ ID NO: 317169 - DNA, 201 bp, Homo sapiens
cagctgggctgggtgtgggttctgtgtccttccaggatatgtgtcatttcccatgaggggccggggcaggtggctgggtgggggcacaggctggagtattyttagttctactggttctacactgtgaggtggcaatgggatttgctcagatgccacccaataaaatgcctgttacttaatcacagtggtggatggtctttc

SEQ ID NO: 317170 - DNA, 201 bp, Homo sapiens; identical to SEQ ID NO: 66526

SEQ ID NO: 317171 - DNA, 201 bp, Homo sapiens; identical to SEQ ID NO: 66556

SEQ ID NO: 317172 - DNA, 201 bp, Homo sapiens; identical to SEQ ID NO: 66531

SEQ ID NO: 317173 - DNA, 201 bp, Homo sapiens; identical to SEQ ID NO: 66534

SEQ ID NO: 317174 - DNA, 201 bp, Homo sapiens
tgggcgtggtggtgggcgcctgtagtcccagctactatggaggctgaggcaggagaatggcatgaacctgggaggcggagcttgcagtgagccgagattgygccactgcactccagcctgggcaaaagagcaagactccgtctcaaaaaaaaaaaaaaaaaaaaaaagaaatgcaggaaacctatttaaaagtaacagaaa

SEQ ID NO: 317175 - DNA, 201 bp, Homo sapiens
caaacgaatgttaggtatgacctatgatgatacaacttctgcaaaattgaggaccagcctatttcttcattagaaatgcaggaaacctggccgggcgcagkggctgacgcctgtaatctcagcactttgggaggcagaggtgggcggatcacaaggtcaggagattgagaccatcctggctaactcggtgaaaccccgtct

SEQ ID NO: 317176 - DNA, 201 bp, Homo sapiens
cccaccagttcctcatctgtcaaatatatgcaataaaagtgcacaattcagtgggttagtgtgaggattagagtatttgcaaagcatgtaggacaatgggrgaaatgctgatagggatccaaatgctgtatatcagtagagaaatgaagagtttttaagtacagtttctacatcaaatgtaatgtaagaagattgcttgga

SEQ ID NO: 317177 - DNA, 201 bp, Homo sapiens
ttggaataaagtcatcattgatcattgaagcatcctggaataatattctggaactgattttagttttctaaggcttttttcccttgtatataccatctattttctaatacttcatttattttcaagtatgtactttacacgttaatgtttctgaaattgagatggctctaccagccaatggaacatcatttataattgagt

SEQ ID NO: 317178 - DNA, 201 bp, Homo sapiens
atcaaatgtaatgtaagaagattgcttggacttgcgaaaagaggaaaagaagatgcagtcgggctaggcgcagtggctcacgtctgtaatcccagcatttwgagaggccgaggcgggcggatcacaaggtcaggagatcaagaccatactggccaacatggtgaaaccctgtctgtactaaaaatacaaaaattacccaga

SEQ ID NO: 317179 - DNA, 201 bp, Homo sapiens
agaaactggctttgcaatttatgtttgggacctctaactacaataaaacagaagctctagaatagagagttgaacagtgttcacagctaatttacattgactgactcaattctcttgttttattgttggaataaagtcatcattgatcattgaagcatcctggaataatattctggaactgattttagttttctaaggctt

SEQ ID NO: 317180 - DNA, 201 bp, Homo sapiens
gctcctagcctctcccattaaatcagagattttgtgtgttgttttttttttttttagcaggttgaggaagttctctattcctagtttgctgagagactttwtcatgactgggtgttagattttgttggatgctttttctgcacctattgattgtatgattttttctttaacctgttgacgtaatagattatattatttgat

SEQ ID NO: 317181 - DNA, 201 bp, Homo sapiens
caatttgctttttttgatatttaaaaatattaattatttaaagtaacaaacccaactcatgtgtccagtttccccttctccatttctcactctttcctgawcatgaatgctcttaaaatgacattctgttcccgagaatcccctcctcacatctctactttgtgcacacatttcatcatgctcagttctcctgtgtagctt

SEQ ID NO: 317182 - DNA, 201 bp, Homo sapiens
gcaaacacaggcactttgtatggatttgaaggcagaaagatcatctaatattttttagcatgtcttcccccattaggccaggaattctctcatattcatcwttcaccaacatttcatttaagcctaatcattttgacttctgcacattagcatttcaattttaaagacttgaaaaaaaatactaaatgttatgtaaatgta

SEQ ID NO: 317183 - DNA, 201 bp, Homo sapiens
tgagactaggagaaagaaacagctcacaactgaggaatcagatggaggtgtagtgtgaaccagtacaagataccttttgggaatgttagcaacgaaccacrtgcctctggaggctgtgtgtatgtgtgtgtgtgtgtgtgcacgccactatacctggctaatttaaaaaaaaattttttttttagagatggggtcttgcta

SEQ ID NO: 317184 - DNA, 201 bp, Homo sapiens
tccaaatattttacatcggctgttggttgaatccatggatactgagggccaactatatactgctttcctcaagaaaatttcttagttgttgaaaaactttratgtttatgaaaaaaaggttaagataatgggaattttattcaaaaagttattaagttgaatacccactatgtgcacagtacagtgctagacacagtgtta

SEQ ID NO: 317185 - DNA, 201 bp, Homo sapiens
tacagtgctagacacagtgttaaggatgtgattctctcttttaaggcacttatattctaataggataagaaacatacaagtaattgtgattagataaaacrtgtagtaagttctttttgactcgttccttcttacctcctgctaatcagttaccatgctctttaagttttaccttctaactatctcttgaatcttccccct

SEQ ID NO: 317186 - DNA, 201 bp, Homo sapiens
ccgcaatggtatggcagcttgcgggaagatcggcaggaccgcaagggatggaagagcttgggcacggggcagggaggaggagatgggcgcgggggcagatstggggtcgcagggcctagctgggcccctggcccgtcggaggcgccgggtagcgggggctgcaggaagcggctctgaggtcgggcaaggtgtgcgcagggc

SEQ ID NO: 317187 - DNA, 201 bp, Homo sapiens
catcatggaaggaggaaaagcaggaatttgaaatcagtcaacataagtaagaataatctgtgtctgaactggaatactagctcagcccttaacagctgtgwccttgggcaagttacttaatctttcagttttatgatctataagatggagattaaaagattgttaggattaaatgagctaatattttaaaatatcgagaat

SEQ ID NO: 317188 - DNA, 201 bp, Homo sapiens
tattctgtcattaattgaaaagtcagtatctattgaggttcatcattagatttttttgtcctcaaggattgaagagcgtagctagaaactggctttgcaakttatgtttgggacctctaactacaataaaacagaagctctagaatagagagttgaacagtgttcacagctaatttacattgactgactcaattctcttgt

SEQ ID NO: 317189 - DNA, 201 bp, Homo sapiens
gttccatcctcagacaagaggtaaagttcacacattcttcccatgtctgttcagaaaagaaacctattcagatataagttaagctaatttagtaatcctakaattgtcctctgagagatttagatggatgggccacttcacagtagcagccaactcacgggagcacctgggcaacgctagtggacttttttgtagtgagtg

SEQ ID NO: 317190 - DNA, 201 bp, Homo sapiens
tagaaactggctttgcaatttatgtttgggacctctaactacaataaaacagaagctctagaatagagagttgaacagtgttcacagctaatttacattgactgactcaattctcttgttttattgttggaataaagtcatcattgatcattgaagcatcctggaataatattctggaactgattttagttttctaaggct

SEQ ID NO: 317191 - DNA, 201 bp, Homo sapiens
ctagaaactggctttgcaatttatgtttgggacctctaactacaataaaacagaagctctagaatagagagttgaacagtgttcacagctaatttacattgactgactcaattctcttgttttattgttggaataaagtcatcattgatcattgaagcatcctggaataatattctggaactgattttagttttctaaggc

SEQ ID NO: 317192 - DNA, 201 bp, Homo sapiens
atttttgtatttttagtagagacagcgtttcaccgtgttcgccaggctggtcttgaactcctgccctcaagtgatccacctgccttggccttccaaagtgstgggattacaggcatgagccactgcacccggccgatctggggctgtttctgagaagtgccatctcttgacttccatgatacttaattcagtcattgtttg

SEQ ID NO: 317193 - DNA, 201 bp, Homo sapiens
cgggttcacgccgttctcctgcctcagcctcccaagtagctgggattacaggtgcacgccaccacgcctggctaatttttgtatttttagtagagacagcrtttcaccgtgttcgccaggctggtcttgaactcctgccctcaagtgatccacctgccttggccttccaaagtgctgggattacaggcatgagccactgca

SEQ ID NO: 317194 - DNA, 201 bp, Homo sapiens
tttgaaagatagtaagtatgttgtttgtctcaatatgtgaattgagaaaaactaaattttgacaaatacaaatactttcaaaaatatactgctttagcccrttgtgtatttgatcaaaactgaccaaatggatttccattgtatgtttgggacattggacttgttctgaaaagaccagtaagaaaggacacctgagacagc

SEQ ID NO: 317195 - DNA, 201 bp, Homo sapiens
ttttatttttttttttttgagacggagtctcactgtgtcacccaggctgaagtgcaatggcatgatctcggctcactgcaaccttcgcctcccgggttcaygccgttctcctgcctcagcctcccaagtagctgggattacaggtgcacgccaccacgcctggctaatttttgtatttttagtagagacagcgtttcaccg

SEQ ID NO: 317196 - DNA, 201 bp, Homo sapiens
gtctcaatctcctgacctcgtgatccacccgcctcggcctcccaaagtgctgggattacaggcatgagcccagccttttatttttttatttttttttttttgagacggagtctcactgtgtcacccaggctgaagtgcaatggcatgatctcggctcactgcaaccttcgcctcccgggttcacgccgttctcctgcctca

SEQ ID NO: 317197 - DNA, 201 bp, Homo sapiens
ccaccgcgcccggctattagtactagttctaatattaagactggtttagcatcgtgctgtttattgtttatctaagcgctcattattctgccttgcacttyagaaaaatatgtcaataaattcacaaggaagttatactgtaattcctttgtcttaacacagtacttctatttttcagtcaccaggagactaaagtccatc

SEQ ID NO: 317198 - DNA, 201 bp, Homo sapiens
aggatggtctcaatctcctgacctcgtgatccacccgcctcggcctcccaaagtgctgggattacaggcatgagcccagccttttatttttttattttttwttttttgagacggagtctcactgtgtcacccaggctgaagtgcaatggcatgatctcggctcactgcaaccttcgcctcccgggttcacgccgttctcct

SEQ ID NO: 317199 - DNA, 201 bp, Homo sapiens
cctgggactacaggcacccgccaccaagcctggctaattttttgtatttttagtagagacggggtttcaccatgttagccaggatggtctcaatctcctgwcctcgtgatccacccgcctcggcctcccaaagtgctgggattacaggcatgagcccagccttttatttttttatttttttttttttgagacggagtctca

SEQ ID NO: 317200 - DNA, 201 bp, Homo sapiens
caagtagctggggctacaggcgcccgccaccacgcctggctaatttttttgtattttttagtagagacggggtttcaccgtggtcttgatatcgtgacctygtgatccgcccgccttggcctcccaaagtgctgggattacagacgtgagccaccgtgcccagccaatttttatatttttaatagagacgggatttcacta

SEQ ID NO: 317201 - DNA, 201 bp, Homo sapiens
tgatagtaaagaagatcatgcagtgaaccccctatttatctaccaaatcctcagtatctcaactgacagctgtcctttgtttttttatgtgtgtgtgtgtkttttgttgttgttttttgtttgttttctttttgtgtttttttttgagatggagtctcattctgttgcccaggctagagtgcaatggtgcaatctcagctc

SEQ ID NO: 317202 - DNA, 201 bp, Homo sapiens
tgatacttaattcagtcattgtttgataactcctgctctattctgtcattaattgaaaagtcagtatctattgaggttcatcattagatttttttgtcctyaaggattgaagagcgtagctagaaactggctttgcaatttatgtttgggacctctaactacaataaaacagaagctctagaatagagagttgaacagtgt

SEQ ID NO: 317203 - DNA, 201 bp, Homo sapiens
agctagaaactggctttgcaatttatgtttgggacctctaactacaataaaacagaagctctagaatagagagttgaacagtgttcacagctaatttacaytgactgactcaattctcttgttttattgttggaataaagtcatcattgatcattgaagcatcctggaataatattctggaactgattttagttttctaag

SEQ ID NO: 317204 - DNA, 201 bp, Homo sapiens
gtttgggacctctaactacaataaaacagaagctctagaatagagagttgaacagtgttcacagctaatttacattgactgactcaattctcttgttttawtgttggaataaagtcatcattgatcattgaagcatcctggaataatattctggaactgattttagttttctaaggcttttttcccttgtatataccatct

SEQ ID NO: 317205 - DNA, 201 bp, Homo sapiens
gatggtcttgatctcctgacctcgtgatccgcccacctcagcctcccaaagtgctgggattacaggcgtgagccaccgcgcccggctattagtactagttytaatattaagactggtttagcatcgtgctgtttattgtttatctaagcgctcattattctgccttgcactttagaaaaatatgtcaataaattcacaagg

SEQ ID NO: 317206 - DNA, 201 bp, Homo sapiens
ttcaagggcagaaactgggcagaatgccagagagacacaactagaactttttgagccaacagagacctttgtgtaagttgttagttggatccatcagcctygctatcctaagcattcttctcttattttactttctaagcacagctgtgttaggactaacccattcacagcctggtcaccaatgttctatcagcatcacag

SEQ ID NO: 317207 - DNA, 201 bp, Homo sapiens
tggattgggatctttaggtaagggaagagtgtaattcacaaattaggaagaactgtttcacacaaggaagactactgatgacttacatttagagcttacastgatgtcaagcctatctgagcacttgccatgtacttatttttcatctacatccacttgacacgtaatgataacaacccgtgtaggtagtacaggtaggga

SEQ ID NO: 317208 - DNA, 201 bp, Homo sapiens
gggaggagaaaagggatatgtaattttagacttgaattagaggcatctgtgtgtactttgcacttcaaaagtacacatattgctgggtgcagtgggtcacrcctgtaatcccagcactttaggaggccgaggtgggcggatcacctgaggtcaggagttagagaccagcctggccaacatggtgaaaccccatctgtacta

SEQ ID NO: 317209 - DNA, 201 bp, Homo sapiens
agttcattaggattagaaggagaggaataaaggggaaaagaatataaaacagacctcatttttagttcttagttctttgcaggtgctgaaggaaaggaatkatgatagtgtgtggaacaactcaggaaatcaccaccacccataccccaaaagacctgatccatggtgacaatgttttctcctgcctgtcccctgtgctct

SEQ ID NO: 317210 - DNA, 201 bp, Homo sapiens
tgatttcttacttgttctgtactttgtttttcaggtaaagaaggaaaattcagccagttgattttgtttttagcttactgctgcctttgtccgaagaaacygttcctccattatttgaattactgaagacagcaagatatttgtaaattatcttaaaataaacaacttaaaataaaatcattgtttttcttatatataaga

SEQ ID NO: 317211 - DNA, 201 bp, Homo sapiens
ccatatggtattctctgactagaaacttgtgtcagttgaagtgtctgcctaaaacaataatatccaagagtgacttgttataaccaataaattttgtgttsagggagaaaagtcattactacaccaaaaaaggaaggttgaccaaaaactggtattacttttcaagtgtgattatgaaaagctgttgtagtagaacagtca

SEQ ID NO: 317212 - DNA, 201 bp, Homo sapiens
ggggtttcaccgtgttagccaagatggtcttgatctcctgacctcgtgatccgcccacctcagcctcccaaagtgctgggattacaggcgtgagccaccgygcccggctattagtactagttctaatattaagactggtttagcatcgtgctgtttattgtttatctaagcgctcattattctgccttgcactttagaaaa

SEQ ID NO: 317213 - DNA, 201 bp, Homo sapiens
agttcagtagtctctaaaatggaactgttttttaataacgtgtcagtagtcataaactacagataccgataaggagatggcatttcaggagagaaaagacraattgtcatctgagaccatgagggcagatatttactaataaatgtaaaaaatgtgaggcagcagagtgtagtactgtatgaagagagagactctgtagcc

SEQ ID NO: 317214 - DNA, 201 bp, Homo sapiens
gactacaggcgcccgccaccacgctcggctaattttttgtatttttagtggagacggggtttcaccgtgttagccaagatggtcttgatctcctgacctcrtgatccgcccacctcagcctcccaaagtgctgggattacaggcgtgagccaccgcgcccggctattagtactagttctaatattaagactggtttagcat

SEQ ID NO: 317215 - DNA, 201 bp, Homo sapiens
ggacagctacttgggaggctgaggcatgagaatcacttgaacccgggaggcaaaggttgcagtgagctgagatcgcatcactgcactccagcctgtgagayaggtgagactctgtctagaaaaaaaaaaaaaagaaaaaggggtggagggaaaatgggttatattctaaattcagaatatagagaaaattaaatttagaga

SEQ ID NO: 317216 - DNA, 201 bp, Homo sapiens
gggttcacgccgttctcctgcctcagcctcccgagtagctgggactacaggcgcccgccaccacgctcggctaattttttgtatttttagtggagacggggtttcaccgtgttagccaagatggtcttgatctcctgacctcgtgatccgcccacctcagcctcccaaagtgctgggattacaggcgtgagccaccgcgcc

SEQ ID NO: 317217 - DNA, 201 bp, Homo sapiens
ttttaaatgtatattattgtcttatgttgccatttgcttgtcctaagtagtagctagttttgccttccttttattagtactatttctttttttttttttttggagatggagcctcattctatcacccaggctggagtgcagtggcgccatctcggctcactgcaagctccgcctcccgggttcacgccgttctcctgcctc

SEQ ID NO: 317218 - DNA, 201 bp, Homo sapiens
ataccatttaatgttttaaatgtatattattgtcttatgttgccatttgcttgtcctaagtagtagctagttttgccttccttttattagtactatttctwtttttttttttttggagatggagcctcattctatcacccaggctggagtgcagtggcgccatctcggctcactgcaagctccgcctcccgggttcacgcc

SEQ ID NO: 317219 - DNA, 201 bp, Homo sapiens
tggaataaagtcatcattgatcattgaagcatcctggaataatattctggaactgattttagttttctaaggcttttttcccttgtatataccatctattytctaatacttcatttattttcaagtatgtactttacacgttaatgtttctgaaattgagatggctctaccagccaatggaacatcatttataattgagta

SEQ ID NO: 317220 - DNA, 201 bp, Homo sapiens
attgactctgttactggaagaggttgctgtgaactaaggaaatttttagagtggctggccttgattcgaagtatagttgggcagcttaacaaggggaggggcttttctgtcatggaaacaagataagcaaagatatggaggtgggactagagcatgtgtgagtcaatagagcatgttgacttctgggaaggtggtggtaca

SEQ ID NO: 317221 - DNA, 201 bp, Homo sapiens
ggaataaagtcatcattgatcattgaagcatcctggaataatattctggaactgattttagttttctaaggcttttttcccttgtatataccatctatttyctaatacttcatttattttcaagtatgtactttacacgttaatgtttctgaaattgagatggctctaccagccaatggaacatcatttataattgagtac

SEQ ID NO: 317222 - DNA, 201 bp, Homo sapiens
aaacattcatttccctattaacctacaaataagatttaaaccaatttgctttttttgatatttaaaaatattaattatttaaagtaacaaacccaactcatgtgtccagtttccccttctccatttctcactctttcctgatcatgaatgctcttaaaatgacattctgttcccgagaatcccctcctcacatctctactt

SEQ ID NO: 317223 - DNA, 201 bp, Homo sapiens
tgctttgaaaggttttccctctctcattttccagattgatacattcagatttcttcagtaatcaaatgactaagttggaattactgcacaggttgagtatsccttgtgtgaatgcttaggaccagaaatgtttgggatttcagaatattttcatatttataatgcagtatcttggggacaggacctgagtctgtacaccct

SEQ ID NO: 317224 - DNA, 201 bp, Homo sapiens
taaacattcatttccctattaacctacaaataagatttaaaccaatttgctttttttgatatttaaaaatattaattatttaaagtaacaaacccaactcatgtgtccagtttccccttctccatttctcactctttcctgatcatgaatgctcttaaaatgacattctgttcccgagaatcccctcctcacatctctact

SEQ ID NO: 317225 - DNA, 201 bp, Homo sapiens
tagaacagattcatttaccttatctagcattaatttctgctctgtaattataaaggagttttacactgaaaagctgtttttgatgaattactattccttcyatataacttgaaagaaactcatcacttgttttaacagacagcatgagtatctatgacgatattgatgctgacgtgctgcaaaattaccaagaatacaatc

SEQ ID NO: 317226 - DNA, 201 bp, Homo sapiens
tactgaagaagagtgatgagtggggatttccttgtcttgttcgcaatcttatggggaaagctcctagcctctcccattaaatcagagattttgtgtgttgktttttttttttttagcaggttgaggaagttctctattcctagtttgctgagagactttttcatgactgggtgttagattttgttggatgctttttctgca

SEQ ID NO: 317227 - DNA, 201 bp, Homo sapiens
tgctgcagctctgtgagtaattgtagattgtcgccttcagagaattttttttcctcttgctgtgtctgcttgtttggatgcttaaaagtttttcgtttttktcttttgaagttgaaactcattgctgaaacttgcatcctaactcttaggctataaagatgtggtaaaaatgggacctctttgctttatttttattgtttc

SEQ ID NO: 317228 - DNA, 201 bp, Homo sapiens
cttcccttcaaatttctatgcctcttattttcttgtcttactgcattagctaagacttccagtatgatactgaagaagagtgatgagtggggatttccttrtcttgttcgcaatcttatggggaaagctcctagcctctcccattaaatcagagattttgtgtgttgttttttttttttttagcaggttgaggaagttctc

SEQ ID NO: 317229 - DNA, 201 bp, Homo sapiens
gaattttttaatcattatgttttttaatcattatgttttctatatcagtaccaaaagatagtatagccatccctcagtatctgcagtggattggttccagwactcactctcacctcccccaggataccaaaatctgaagatcctcaagtccctgaaataaaatagcacagtactacatataaaaaatgcacatcctctcgt

SEQ ID NO: 317230 - DNA, 201 bp, Homo sapiens
aatcatctctagttataatgctatgtaaattgttgttgtattggtttttgtttttattattttatcattatttttgtcttttttccaaatattttacatcrgctgttggttgaatccatggatactgagggccaactatatactgctttcctcaagaaaatttcttagttgttgaaaaactttaatgtttatgaaaaaaag

SEQ ID NO: 317231 - DNA, 201 bp, Homo sapiens
cgcatgcgcgctgaggcctgcctgaccgaccttcagcagggctgtggctaccatgttctctcgcgcgggtgtcgctgggctgtcggcctggaccttgcagscgcaatggtatggcagcttgcgggaagatcggcaggaccgcaagggatggaagagcttgggcacggggcagggaggaggagatgggcgcgggggcagatc

SEQ ID NO: 317232 - DNA, 201 bp, Homo sapiens
tgaaaagccactatttcttcccttgctcccttgattcttcatctgactgcctcctgtgtatccttccttactcagctgggggaatcctttcttccagaaarcactccttccttcagtctgagtgaggcagccttctgtagcatcctgtcttccatttagcttagctcttacagccttgtatgaggaattggctttttattt

SEQ ID NO: 317233 - DNA, 201 bp, Homo sapiens
cctgcctgaccgaccttcagcagggctgtggctaccatgttctctcgcgcgggtgtcgctgggctgtcggcctggaccttgcagccgcaatggtatggcarcttgcgggaagatcggcaggaccgcaagggatggaagagcttgggcacggggcagggaggaggagatgggcgcgggggcagatctggggtcgcagggcct

SEQ ID NO: 317234 - DNA, 201 bp, Homo sapiens
cggcggtgggcgggacaaatcccagctgagaggcggaaggaggtggggcctgggaagactgggttgcaacggtcgcgagactcccctcgccgtagcgcgawgaaacgagactgaagaagagagcaaggtgggaggggcgcgctggggagcttcggcgcatgcgcgctgaggcctgcctgaccgaccttcagcagggctgtg

SEQ ID NO: 317235 - DNA, 201 bp, Homo sapiens
cttaattagtcttcttaatggaaaagagatgagatatgacagtttaaaaagaatttatattgtgtttttagatgcttttatacttgtttgattatgaattyatcttggaaataaagttgtaaagagctggaaatgggaaagaagtttctattttaacttgtaattacattctttctcttaacttttttatgatcatgctgt

SEQ ID NO: 317236 - DNA, 201 bp, Homo sapiens
attattttgagatattatatataggttgtgaagagtggtggttgtcacactttatggtctctggaccccttaatgtctgattcatgtagcagaagccagcyagattttcatctgtctctattcattttgttgtgatgtcatggatcatgtggcctctggaaaactctactgtatactcgagaatgagaatataacaggcaa

SEQ ID NO: 317237 - DNA, 201 bp, Homo sapiens
tccgtctcaaaaaaaaaaaaaaaaaaaaaaagaaatgcaggaaacctatttaaaagtaacagaaacagctgggtgcattggctcatgcttgtaatcccagyattttgggagaccgaagcgagtggattgcttgagcccaggagttcaagacaagcctgagcaacatagcaagaccccatctctacaaaaatgaaaaaatta

SEQ ID NO: 317238 - DNA, 201 bp, Homo sapiens
gagaattgcttgaacccgggaggcggaggttgcagtgagctgagatcgtgccactgcatttcagcctggcgacacagtgagactccatctcaaaaacaaamaaaaaaagatgatgcagtcatgggtgtgggttaggtaagtgtgaaggagtcagtttttgctggtggcaggtaatggacttttacacgcttaatatcagaa

SEQ ID NO: 317239 - DNA, 201 bp, Homo sapiens
cataaaaacattaggcttacttaaattcacagtggttattttaatagttgttagggtatcggcaaaatactctaacgttttgaaaattaaaccttttttttaaagcagcatataagaaaatggaaattaaaaatttgagagaaagaatcccggattttactgtcttcaaatttgggaaaaacatttctatttcttagagtt

SEQ ID NO: 317240 - DNA, 201 bp, Homo sapiens
tctaagttgatctttaaaaaagtggaaatagtttctgaaacaaagacaatattttacaaaaaattttagaaatatctttttttaaagcacctgtaagatawtttgaagctcttttagtgaaggattgttttaaataagagctctcagttcaagacaactactgttaggagcttaaatcggaaccacaatcagcatataaag

SEQ ID NO: 317241 - DNA, 201 bp, Homo sapiens
agcttgcagtgagccgagattgcgccactgcactccagcctgggcaaaagagcaagactccgtctcaaaaaaaaaaaaaaaaaaaaaaagaaatgcaggamacctatttaaaagtaacagaaacagctgggtgcattggctcatgcttgtaatcccagcattttgggagaccgaagcgagtggattgcttgagcccaggag

SEQ ID NO: 317242 - DNA, 201 bp, Homo sapiens
cttgtaatcccagcattttgggagaccgaagcgagtggattgcttgagcccaggagttcaagacaagcctgagcaacatagcaagaccccatctctacaaraatgaaaaaattagccaggcctggtggcatgtgcctgttgtcctagctactcaggaaattgaggcaggaggattgcttgagcccaggagttttaggctgc

SEQ ID NO: 317243 - DNA, 201 bp, Homo sapiens
gttccagaccagcctggccaacatggcaaaaccccgtctctactaaaaaagtacaaaaattagctgggcgtggtggcgggcacctgtaatcccagctactygggaggctgaggcaggagaatgacttgaacccaggaggaggttgcagtgagctgagatcacgccactgcactccagcctgggcaacagaacaagactcca

SEQ ID NO: 317244 - DNA, 201 bp, Homo sapiens
aaaattgtaatttaaattacatattcatagtcttgcctacttgcatgagcatgtttttattgcttctaacctggattgaaatctatgactttttataacaktcattgagtctgtttcaaaggaatcttgtggtaagtatttttgcatgatgtactcaaggtatcaagtttaacaattgactttttttcattggaaagcata

SEQ ID NO: 317245 - DNA, 201 bp, Homo sapiens
ctgttcagaaaagaaacctattcagatataagttaagctaatttagtaatcctagaattgtcctctgagagatttagatggatgggccacttcacagtagyagccaactcacgggagcacctgggcaacgctagtggacttttttgtagtgagtgtgttgatcatagaaaatgtagatataaggaaataaactttgaggat

SEQ ID NO: 317246 - DNA, 201 bp, Homo sapiens
aggaggccttcaatacagggattcgcgccactactaagggatttaaatatatgtctattcatatacattctgagtcctgtatttgatagattgtttctttrtggggtattctttaaataaatatatattaactgaaagtttttcttgtataatggaactatttttcaaaaaactgaaacatttttaaaacttttatcctca

SEQ ID NO: 317247 - DNA, 201 bp, Homo sapiens
agtatgttgtttgtctcaatatgtgaattgagaaaaactaaattttgacaaatacaaatactttcaaaaatatactgctttagcccattgtgtatttgatsaaaactgaccaaatggatttccattgtatgtttgggacattggacttgttctgaaaagaccagtaagaaaggacacctgagacagctatgttctgttgtt

SEQ ID NO: 317248 - DNA, 201 bp, Homo sapiens
tgggaaagaagttatgcttgttggaattggtgacaaaatcagaggcatactttataggtaatttaaatatatattgtttattttcataaagatgtaagcaygaataaatcttctctcaaaagttttgacaaactctcaaaaccttcatcaataacaaggtatattcttcagggccttttttggtatattcacaagggggtg

SEQ ID NO: 317249 - DNA, 201 bp, Homo sapiens
agctggccttgtggtcatggatatgactcatgatggtgttttgagaatccgaacgatgttgaagcaggaaaagcagctgagaacctccattttcaagatasttaatcaccattcttatcttttcaaaagcatgaagacatttttccttcagaaatttatgtaatccatccttaattagtcttcttaatggaaaagagatga

SEQ ID NO: 317250 - DNA, 201 bp, Homo sapiens
aattggtgacaaaatcagaggcatactttataggtaatttaaatatatattgtttattttcataaagatgtaagcacgaataaatcttctctcaaaagttytgacaaactctcaaaaccttcatcaataacaaggtatattcttcagggccttttttggtatattcacaagggggtgtttgtttcctttttcttttttcca

SEQ ID NO: 317251 - DNA, 201 bp, Homo sapiens
tcagaagcctcacgacccggaccccgggagccccagccccgcgccctcagccccgcgtccaggacctgatcctggattgccaggggccctcctgggaagayggggccactccgggcccactcacctcgtcccggcactgcttctggcacatctggcaataccagcgtagcttctgcagccccttggacttgatcctgttgg

SEQ ID NO: 317252 - DNA, 201 bp, Homo sapiens
aggcccccagtctcagggcctgcaaggtgacgggagcctgagcaatagcccaggggaaggttaagtcgtgctttttgtccttgacgccctttgaaaccctstagtgctggacagagtgaccctttaagattcgatcgagtcagagagcgcggccgtcgagcacctcccgtgttgcagacgctttgctgggtgctgcaacag

SEQ ID NO: 317253 - DNA, 201 bp, Homo sapiens
ggtgggactagagcatgtgtgagtcaatagagcatgttgacttctgggaaggtggtggtacagacaggccaaataaaaggaggccttcaatacagggattygcgccactactaagggatttaaatatatgtctattcatatacattctgagtcctgtatttgatagattgtttctttatggggtattctttaaataaatat

SEQ ID NO: 317254 - DNA, 201 bp, Homo sapiens
gatatcaactaaaatcaaacttgctgagattctaatggatttttaaaattgtaaaacacatggaacatgaagtttatcattttaaccatacaattgtgtgygggcatttttaacttcatactccagtagttcagggctgctgcagaggaatgcaactagctttttatatacactaaccttatatcctgcaaccttgtcata

SEQ ID NO: 317255 - DNA, 201 bp, Homo sapiens
gagtatttgcaaagcatgtaggacaatgggagaaatgctgatagggatccaaatgctgtatatcagtagagaaatgaagagtttttaagtacagtttctayatcaaatgtaatgtaagaagattgcttggacttgcgaaaagaggaaaagaagatgcagtcgggctaggcgcagtggctcacgtctgtaatcccagcattt

SEQ ID NO: 317256 - DNA, 201 bp, Homo sapiens
aaaattaccaagtctatgaaaatggtagcggcagcaaaatatgcccgagctgagagagagctgaaaccagctcgaatatatggattgggatctttaggtargggaagagtgtaattcacaaattaggaagaactgtttcacacaaggaagactactgatgacttacatttagagcttacagtgatgtcaagcctatctgag

SEQ ID NO: 317257 - DNA, 201 bp, Homo sapiens
ttcatctgactgcctcctgtgtatccttccttactcagctgggggaatcctttcttccagaaaacactccttccttcagtctgagtgaggcagccttctgyagcatcctgtcttccatttagcttagctcttacagccttgtatgaggaattggctttttatttgtctgtgtgctcctcgaggctaggatgggaccatatc

SEQ ID NO: 317258 - DNA, 201 bp, Homo sapiens
aatgaaaaaattagccaggcctggtggcatgtgcctgttgtcctagctactcaggaaattgaggcaggaggattgcttgagcccaggagttttaggctgcrgtgagctatgatcgtgccactgcacaaaaccaagaatttagaaaaaggaatccacataattggaaattgagtattaagtttttgcttcctaggaaggtag

SEQ ID NO: 317259 - DNA, 201 bp, Homo sapiens
cagctactcgggaggctgaggcaggagaatgacttgaacccaggaggaggttgcagtgagctgagatcacgccactgcactccagcctgggcaacagaacragactccatctccaaaaaaaaaaaaaacctctaaatatattgtgttaatttatagaaaaattgtaatttaaattacatattcatagtcttgcctacttgc

SEQ ID NO: 317260 - DNA, 201 bp, Homo sapiens
agaacagaggttgctaaactgtggcctggagctaagaatgggttctgcatttttaaagggatataagaaaaaggagagtgatagcgtgtgacccacagagygcagaatacttgctgtgtggcccttcaccgaaaaaatttgcctattcttgtgacagtgttatgaggaaaataacaaaatccattctctgttatacactca

SEQ ID NO: 317261 - DNA, 201 bp, Homo sapiens
caaggttggattgcttgtgaatgggtttgcatgctctgtaacctatcagttattctgaatcaagacttgaatatttaaacatacttggaaaagaaaaagawcaaaaaacaaaataaacatatttggctatttagtaatataattaagaacatgagtaaaccatagtattcgaggtccaagtattagttgccagcctaaaaa

SEQ ID NO: 317262 - DNA, 201 bp, Homo sapiens
gccgaggcgggtggatcacctgaggtcaggagttccagaccagcctggccaacatggcaaaaccccgtctctactaaaaaagtacaaaaattagctgggcrtggtggcgggcacctgtaatcccagctactcgggaggctgaggcaggagaatgacttgaacccaggaggaggttgcagtgagctgagatcacgccactgc

SEQ ID NO: 317263 - DNA, 201 bp, Homo sapiens
cctgggaggcggagcttgcagtgagccgagattgcgccactgcactccagcctgggcaaaagagcaagactccgtctcaaaaaaaaaaaaaaaaaaaaaaagaaatgcaggaaacctatttaaaagtaacagaaacagctgggtgcattggctcatgcttgtaatcccagcattttgggagaccgaagcgagtggattgct

SEQ ID NO: 317264 - DNA, 201 bp, Homo sapiens
gaggctgaggcaggagaatggcatgaacctgggaggcggagcttgcagtgagccgagattgcgccactgcactccagcctgggcaaaagagcaagactccktctcaaaaaaaaaaaaaaaaaaaaaaagaaatgcaggaaacctatttaaaagtaacagaaacagctgggtgcattggctcatgcttgtaatcccagcatt

SEQ ID NO: 317265 - DNA, 201 bp, Homo sapiens
agagacagagcggcagtcttcccatatctcagccagtttgggtgacccaagaggccccatggggcagaccagaggggccctgttccagtcctgggtcagcrccagtgaaagtcaaggtgacctcagcattgttaccagttatccacaagacagccacgtgaatcacagaatcttaaatcagagggcccaacaccctaatgg

SEQ ID NO: 317266 - DNA, 201 bp, Homo sapiens
gtggtttaccatgattgtgcctgtgaatagctactgacctctgaggcaagttatgctataaaagtgcttggaacagtgcctggcacatagtaagcacccaataaatgtcaccttatgttattttttaaaaaaacatgagtactgggcttgtttgagacagagatagcatcttcagtggtggggcctggctgtgtgtttctt

SEQ ID NO: 317267 - DNA, 201 bp, Homo sapiens
aaattcaaaggaatagaaattgcacagaccacagttttggaccgaaatacaataaaactaaactcatattaaaaatataaacaggccgggcgcggtggctyatgactataatcccagcactttgggaagccgaggcaggtggatcactcggggtcaggcattcaagactagcctggccaacatggtgaaaccccatctcta

SEQ ID NO: 317268 - DNA, 201 bp, Homo sapiens
agagactgaggaagcatagggcaaggcctcagggagatggaggacctcctccccctggtgcagtgctttggtttggcttcgagcatccctgtcaagttatstttctgcgcctcgcagcagcttgtgagttagggcacgggcaattttttacagctaagggtgcggggggggggacgttcagaaaggggacttgaattgctc

SEQ ID NO: 317269 - DNA, 201 bp, Homo sapiens
aataaaactaaactcatattaaaaatataaacaggccgggcgcggtggcttatgactataatcccagcactttgggaagccgaggcaggtggatcactcgrggtcaggcattcaagactagcctggccaacatggtgaaaccccatctctactaaaatataaaaataagctgggcgttgtggcaggtgcctgtgatcccag

SEQ ID NO: 317270 - DNA, 201 bp, Homo sapiens
gtagtatattaactattgtttgtgttgccttatttcttcatctggactatgaactcctttaggacaagaactacctacttaaaagtgtgtatcttgccagrtgcagtggctcatgcctgtaattccagcactttgggaggccaaggtgggtggatcacctgaggtcaggagttcaagaccagcccggccaacatggtgaaa

SEQ ID NO: 317271 - DNA, 201 bp, Homo sapiens
ctcagtattaaattgatgattgataatgagcttgtttacctgttccttttatagttgctgagcaaacaattaaattgtgagagccccactaacgagagagytccaagcccctcttctaagaatgcattgtagaaaaggctaatttcataggtcatttttgtaattccaggcaaggtctttgcagggcctcctgagggcaac

SEQ ID NO: 317272 - DNA, 201 bp, Homo sapiens
gccctgggcctgtttacctgttagagtgagccacacaagaaggaattcaacgtggcagagctcttgccagagggagctgaccatcttcaaatgttaaaaaaggtagacagaagagagcccttagcccaacccctatggttttgagggacttgatttgcattcaccttgcttggacactgaaccagctgaggaaggagtttc

SEQ ID NO: 317273 - DNA, 201 bp, Homo sapiens
aaaaaaaagtacacttctaactatttgatcaggaacacgtaaaaaatattgccagatacttagaaaataaagacgttgcaaatcaaaacttagagaatgtyagagaatgtggctaaaactggaagagttaaattcctttttttttttgagtcagggtctcgctgtcacccaggttacagtgcaatggcatgctcacggttc

SEQ ID NO: 317274 - DNA, 201 bp, Homo sapiens
ttggacttccagaaaaaatggagagaaagaaaaggcaaaataaatatctatttgaagaactcatggccaagaatttcctgagcccatgaaagacataattyacatatccaagaagcttagtgaaccccaactaggtaaataaaaataaaactatgccctgttccatgaagtcaagttgctgacgaccaaaaataggagaaa

SEQ ID NO: 317275 - DNA, 201 bp, Homo sapiens
atgggaagtaacgggactaacagttggatggaaaaccacaatccgactgggtgcattggctcatgcctgtaatcccagcactttgggaggccaaagcaggycgacatggtgaaaccccatctctactaaaaatataaaaattagccaggcatggtggcacatgcctgtaatcccagccacttgggaggctaatgggggaga

SEQ ID NO: 317276 - DNA, 201 bp, Homo sapiens
cagatctgagatcgtgccactgcactccagcctgggtaacagagcaagaccccgtctcaagaaaaaaaagaaaaaaaatgaaatacagatagtactaaagsaaatggcgtatttttaagtatatttttaatctcatgcatagaaaattagtgagtggaatgggggcagggtggcaaccagaaaatagatttgtggagcact

SEQ ID NO: 317277 - DNA, 201 bp, Homo sapiens
agaaagaagagaaacacagaggaggagcactaaatgctgttcatgaactctgcccacatcttgcgtgcagccatattaattgcctgtgtaaaattttaaartccacacttttcagaaaaacataatgcaatccagattctctacagcatattaatttttcttttttttcttttttatttttttattttgagtctgagtttc

SEQ ID NO: 317278 - DNA, 201 bp, Homo sapiens
ttgaggctgggatgcggaggttacagatctgagatcgtgccactgcactccagcctgggtaacagagcaagaccccgtctcaagaaaaaaaagaaaaaaaatgaaatacagatagtactaaaggaaatggcgtatttttaagtatatttttaatctcatgcatagaaaattagtgagtggaatgggggcagggtggcaacc

SEQ ID NO: 317279 - DNA, 201 bp, Homo sapiens
ctgagtttcactctgtcacctggactggagtacagtggtgcgatcttggctcactgcaacctccgcctcccgggttcaagcgattcccttgcctcagcctyctgagtagctgggactacaggcgcgcgtcacacaccgtctaatttttgtagtagagttggggtttcgccatgttggccaggctggtcttgatctcctggc

SEQ ID NO: 317280 - DNA, 201 bp, Homo sapiens
aagagttaaagatgtaaattatgtaaagtataattctagagtaactttttttcttcttctgagacagggcctcactctgtcatccaggctggaaggcagtrgcacaatcatggctcactaaaccctcccaggctcaaccaagcaatcctccctccctgagacctcctaggctcaagcaatcctcccacctcagcctcccat

SEQ ID NO: 317281 - DNA, 201 bp, Homo sapiens
tgctaggattacaggtgtgagccaccatgcccagccaagagtaattatttttttaaatgcaaagagatatagctaaaaagccaatatataaattaaaattkatttctaaaaatatttacttagtctaaaaatattacttagaataagaaaagaagaagagaacagcagcaaaatgatggaacaaatagtaaaatgatagac

SEQ ID NO: 317282 - DNA, 201 bp, Homo sapiens
cttgagcacaagagttccaggctgcagtgaactgtgattgtgccactgcactccagccaggggcacacagcaagaccctgtctcaaaaaaaaaaaaaaaaagaatttataattccaccaccaaaacataatctctgttaatatttatagtttcctttgttttttgtttattacattatatttttatgtagctgggatcaaa

SEQ ID NO: 317283 - DNA, 201 bp, Homo sapiens
accttcctgtgcctatagtcccagctacttggaggctgaggtgggagaatcacttgagcctgggaggtcaaacctgcagtgagctgtgatcacaacactgyactccatccagcctgggcgacagagtgagatcctgtctcaaaaatcaaataagtaaaagacttatatgctgaaaaactgtaaaacattgttgaaagaaat

SEQ ID NO: 317284 - DNA, 201 bp, Homo sapiens
ataagaagcaaaagaggatttagtcagtgatttgggacaactgatacagtttttgcagttttaggggagtaacttaaaattttttttaagtagaaaaaaaygtaaagtatttatcagacctcaggaagggcagtggtctgtttaggcttaaaagtgatagataatgttataaaagaaagaatagccacctttattaatgta

SEQ ID NO: 317285 - DNA, 201 bp, Homo sapiens
tcacccactatattttggagattatcccatgttggtatatgaagagtgtctttttgaccagcctggacaacatagtgagatcccatctctacaaacaaaawtttttttaattagccaggtgtggtggcacgcacctgtagtttcagttacttgagaggctgaggccggaggatcacttgagccaggtgttccaggccacag

SEQ ID NO: 317286 - DNA, 201 bp, Homo sapiens
aaaacatttgtagaaatggctttccttttgttgatgattttagccagcttggtgataaggtaaaacatagctttcatcttaactttcattttcttcatatrttttcttcttttctactgttagctgatgtttgtattttcagcttcagttaatacgggacactttaccaagaaataatgttactggtagacggtcttgacc

SEQ ID NO: 317287 - DNA, 201 bp, Homo sapiens
ttctaaccatggtgcaagttctggtttctgagtttactttccttcaggagcattctatcctgtggttactgcatctggcggtccctgtgagctgctccacrcttcaaggcctagctaggacctgctggctggcaccttccatgctgctgagctcttttattaagggagcagtggagagtttctgtctggcacttatgcttg

SEQ ID NO: 317288 - DNA, 201 bp, Homo sapiens
gggaggcggaggttgtggtgagccaagattgcaccattgcactccagcctgggcaacaagagcaaaactcagtctcaaagataaataaataaataaatagkttaattttttaaaaaagcatttaactatggttatatgcagtaacatatgaatctcagaagcattatgttgagtgaaagaagctagacatgagactacgta

SEQ ID NO: 317289 - DNA, 201 bp, Homo sapiens
catgggtgagtggatggatggatgtaacacacatgtaattggacttccagaaaaaatggagagaaagaaaaggcaaaataaatatctatttgaagaactcrtggccaagaatttcctgagcccatgaaagacataatttacatatccaagaagcttagtgaaccccaactaggtaaataaaaataaaactatgccctgttc

SEQ ID NO: 317290 - DNA, 201 bp, Homo sapiens
tgtcagttgcttaaaaaaaactaaacttgtagctaccatacagcccaacaattacacacctgggtgtttatcctgagaaatgaagatgtaacgttcacacagaaatttgtccacaaatgttcatctcagctttattcatgtcaccaaaaattagaacacccccaatgtccctcagtagttacatggttaagcaaattgtgg

SEQ ID NO: 317291 - DNA, 201 bp, Homo sapiens
ttgtcagttgcttaaaaaaaactaaacttgtagctaccatacagcccaacaattacacacctgggtgtttatcctgagaaatgaagatgtaacgttcacacagaaatttgtccacaaatgttcatctcagctttattcatgtcaccaaaaattagaacacccccaatgtccctcagtagttacatggttaagcaaattgtg

SEQ ID NO: 317292 - DNA, 201 bp, Homo sapiens
acttgaagtcgggaggtggaggttgcagtgagccgagatcgcgccattgtactccagcctgggggacaagagtgagaccccatctcaaaataaataaatamataaatattttaaaaaataaatgaaaaataaaagtgtccaaattagaagtaaaaacttgaagtagccccattttttaaaaggcatattgtcccacttacc

SEQ ID NO: 317293 - DNA, 201 bp, Homo sapiens
gaccatgtgtctataaaaataaaaaataaaggccgggcaaggtggcctgtacctataatcccagcactttgggaggccaaggcaggcggatcacctgaggycaggagttcaagaccagcctggccaacatggtgaaaccccgtctctactaaaaatataaaaattagctcggcgtggtggcaggcacctgtagtcccagct

SEQ ID NO: 317294 - DNA, 201 bp, Homo sapiens
tgtgcatcttgttccttaggctggcagggctaggatacctatttacaaatcagaataatacaaagactgataaggttgccaatcttgtagagcaaaaattwttttctgggctatgctagaaacttgaccccccctccccccggttatcttatgaggcagatattaatactacccaccctttacaaaggaagaaatagaatc

SEQ ID NO: 317295 - DNA, 201 bp, Homo sapiens
tttgggaggccaaggtgggtggatcacctgaggtcaggagttcaagaccagcccggccaacatggtgaaaccccgtctctactaaaaaaataaaaaataaaaaaattagctgggcgtggtggtgggcgcctataatcctagctacacaggaggctgaggcaggagaattgcttgaacctgggaggtggagggtgcagtgag

SEQ ID NO: 317296 - DNA, 201 bp, Homo sapiens
ctttgggaggccaaggtgggtggatcacctgaggtcaggagttcaagaccagcccggccaacatggtgaaaccccgtctctactaaaaaaataaaaaataaaaaaattagctgggcgtggtggtgggcgcctataatcctagctacacaggaggctgaggcaggagaattgcttgaacctgggaggtggagggtgcagtga

SEQ ID NO: 317297 - DNA, 201 bp, Homo sapiens
gctgatctcaggctgctgagagcgctgtgtaagttcaaagaatcattaagtgggacaaatactatctgtagacaggtctgttaaatcattcctttactcaragacagcaagtccagcatgggtaggtgccatgaagacagataagagttatatgatacagtccctgccttcaccaaattataagctgggtaggaagctatt

SEQ ID NO: 317298 - DNA, 201 bp, Homo sapiens
acagaacaaattccgaaggtgacctgagaagaccaaatggataagctaatacatccaggtgtctccgattatattatgataaagtgtagggaggttgaackttacataaataccactggatatttttctttgttagatgtggccccatggtattggatgctttaatcaagattaagaatgaagttgactctactttgacct

SEQ ID NO: 317299 - DNA, 201 bp, Homo sapiens
ataaaggatcttgttcccgtgagtttctgcatctctctggttttgtttttatttgcatggggggcagtgctatgtgtgttacgctattagtttttcagggmaggatttgtttgagtatttaaggctcctcttctagtcagatagtaaatagatgggactgtttcctatattatggcaggaggaggaccacagtgtcactga

SEQ ID NO: 317300 - DNA, 201 bp, Homo sapiens
agggtaattggttgcattgtattcacttgctttcggtaaatctggggccttgtctgcaaattgcctttgtttcagtgcagtgagggtcaccccaaaggggygcaaaccatgccttgcagatgtttaaaatgtatttccgtttgcctggtggtcagaggctccccctctccctctcataggatttgtaacataagacttgta

SEQ ID NO: 317301 - DNA, 201 bp, Homo sapiens
ccgaggagcccagacagctgcagccacagctccccgtatcaagaaatttgccatctatcgatgggacccagacaaggctggagacaaacctcatatgcagrcttatgaagttgaccttaataagtgagtatctctgtgaaagccagctattgaaggagagttcttgatttgatttagggacatgcttttcacatccttgga

SEQ ID NO: 317302 - DNA, 201 bp, Homo sapiens
tttcttcctctctatttccccaccttcttctctggcctccaaatctttatccactccatccaactccaagcctgcaccctaaggacactttactggaggarcaacaaccagccttcagcaccattcagaattcacccttctcagttcagttgttgcttaccttgcttaaattataaactatgaaattcatactatccaaga

SEQ ID NO: 317303 - DNA, 201 bp, Homo sapiens
acattgctttgtcaaaactcattatacccttaaaattagtgaattttattataatgaattataccttattaaatctcacagaaaaaagaccaaaaaaaaaatgggacattaagcaagcaaagtccactggagttgataccttcaggaatctttcctctcacttcctcccaaataccacaaggtggcattagatgttcatgt

SEQ ID NO: 317304 - DNA, 201 bp, Homo sapiens
atatagtctcattgtatgattagagcaacaacttcttttgttccttggatctcattgtgaaatggaattatctttttgcactgttgcgttttatgtttgcrttttcaccactggttataatggctaaaaggttggatttttgaatcaagtgacctgtgttgctatatgatcctatcctcgtcttttaactgggaacaacaa

SEQ ID NO: 317305 - DNA, 201 bp, Homo sapiens
atacttggcatgtggcttctaacctcaaggttgccacatggtcatagagtagtttttggaactcaagccattagaaccacattcgaggcaggaagaaggarggaagggagaaaagccaacaggcacctctgtcagaggaatgttgcatgtcagtgctgcccctgatggcacagcaaggaggatccagaagaaagtatttgg

SEQ ID NO: 317306 - DNA, 201 bp, Homo sapiens
agtgacctgtgttgctatatgatcctatcctcgtcttttaactgggaacaacaaaacatttttcatagagatgttataaagattagagattatttggcacygtgtgtgacagattataaaggttcgatgaatgaaatctggcaaatttttagatatatgtattcaacgaattttttggtggaacacagataacataatcct

SEQ ID NO: 317307 - DNA, 201 bp, Homo sapiens
cattctgcggcagttaaacagcagccttccccattaagtcctggcaacacaggaaaggtagatgcttttcagtaacctttccctgtaggactctttcagarccaagaacataaggtgtgacccatctggactaaaaaaaataaagcagaattgtatcaattgctactcctttttattcccatcttgtttttcttatttttt

SEQ ID NO: 317308 - DNA, 201 bp, Homo sapiens
tttctctgtcccagtatgatctgcaggattactttttacctttgatttgaatttatttatttatttatctatttatttatttatttttttgagacagtctygctctgtctcccaggctggagtgcagtggtgcggtctcggctcactgcaacctccgcctctggggttcaagcaattttcctgcctcagcctcccaagtaa

SEQ ID NO: 317309 - DNA, 201 bp, Homo sapiens
cccaagtagctgagattacaggtgcccgccatcgtgcctgtctaatttttttgtatttttagtagagacggggtttcaccgtgttggccaggctgatctcraactcctgacctcaggtaatccacctgcctcggcctcccaaagtactgggattacaggcatgagccaccacgcctggcctataaaatacatttttgacac

SEQ ID NO: 317310 - DNA, 201 bp, Homo sapiens
ctgtaaaacattgttgaaagaaatttaagaagacataaataaatggaaagacatgccctgtttgtgggttggaagacttaatgttgttaaggaggcagtgktctccaaattgatttccagattcattgcaatccccatcaaaatcccacctgccttttctgcagaagttgacaagttgattctaaaaatcttatagaaatg

SEQ ID NO: 317311 - DNA, 201 bp, Homo sapiens
attacaggcatgagccaccacgcctggcctataaaatacatttttgacacaaaacaaatttaaattagttgtactgaaaaaaaaaaaatgatgacattttrgggcactccaaaactgatgttgggatatgtcgacttagatattcagtgtagtacatcctggcattgctcttatttcacatcattcatatgataagacttt

SEQ ID NO: 317312 - DNA, 201 bp, Homo sapiens
taaaagacttatatgctgaaaaactgtaaaacattgttgaaagaaatttaagaagacataaataaatggaaagacatgccctgtttgtgggttggaagacytaatgttgttaaggaggcagtggtctccaaattgatttccagattcattgcaatccccatcaaaatcccacctgccttttctgcagaagttgacaagttg

SEQ ID NO: 317313 - DNA, 201 bp, Homo sapiens
ggatatgaaacagatatttaaatgttataaagaaatgttgaagggaaaacctcattgcaggtaaccacagtcatcccacaggccttgtggttctgataccsagcttgatagagcctaatgcctgttgcccactgacaatactaaatcaggctttagaactagggggttatgcctggcacagtggctcacacctgtatgtaa

SEQ ID NO: 317314 - DNA, 201 bp, Homo sapiens
aggctgaggcaggtggatcacgacatcaggagttcaagaccatcctggctaaaacggtgaaaccccatccctactaaaaatacaaaaaagttagccgggcrtgtgacacgcgcctgtaatcccagctacttgggaggctgaggcaggagaattgcttgaacccaggaggcagagagatctcgccactccactccagcctgg

SEQ ID NO: 317315 - DNA, 201 bp, Homo sapiens
gaccctgtctctacaaaaattagctggacatgatggtgtgcacctatagtcccagctacttgggaggctgagtcaggatgatcgcctgagcccaggagttmaaggctgcagtgagccatgatctccagcctgggcaataaagctagaccatgtgtctataaaaataaaaaataaaggccgggcaaggtggcctgtacctat

SEQ ID NO: 317316 - DNA, 201 bp, Homo sapiens
ttacaaatcagaataatacaaagactgataaggttgccaatcttgtagagcaaaaattattttctgggctatgctagaaacttgaccccccctccccccggttatcttatgaggcagatattaatactacccaccctttacaaaggaagaaatagaatccgaaaagctaataatttgcagaagaatacacagcttgtaagt

SEQ ID NO: 317317 - DNA, 201 bp, Homo sapiens
aatatccagtctcttggggaactctaggagtatttgcttaagacacatctttgggttcccttacactctttctaagatttacaggagaaggagagtcttaytgtcttttctagtcttatgaaagtgataaccgactgggcgcagtggctcacgcctgtgatcccagtactttgggaggtctaggtggtaggctagcttgag

SEQ ID NO: 317318 - DNA, 201 bp, Homo sapiens
aaccccgtctctactaaaaatacaaaaattagccaggtgtggtggcgggcgtctataatcccagctactcaggaggctgaggcaggagaatcacttgaacscgggaggcagaggttgcagtaagccgagatcgtgccactgcactccagcctgggcgacagagcaagactccatctaaaaaaaaaaaaagatgataaccag

SEQ ID NO: 317319 - DNA, 201 bp, Homo sapiens
cgggtgagtagtgtgaacccgtgaatggcccagagtggaccaaggagctagagccctgtgccccgcctgcaggggcgggtggttgctgtgtggctactccmtctttttcaaaagaaaccagtatgtaaattgcctgggctttaaaaagtgaccactaagtcagaactgttccctcactgggggcaaaatgaaacacatatg

SEQ ID NO: 317320 - DNA, 201 bp, Homo sapiens
taacttacactttgctttctactgcttcagatgtatgcaccatgcgccataaaaccatttcactgttgctggacaatgaaattgtttccaattttttactrttagaaataaggctagatgaacatctttatccttcaagttctgcccaaaacattctaatttcttattacagatttttctaggagtgggttaaagaatatg

SEQ ID NO: 317321 - DNA, 201 bp, Homo sapiens
acactttgctttctactgcttcagatgtatgcaccatgcgccataaaaccatttcactgttgctggacaatgaaattgtttccaattttttactgttagarataaggctagatgaacatctttatccttcaagttctgcccaaaacattctaatttcttattacagatttttctaggagtgggttaaagaatatgactatt

SEQ ID NO: 317322 - DNA, 201 bp, Homo sapiens
gtggcagtcactggggatgatgttgatgttcccagtgaaaacctgagggcccttctgctgagcccagggcagaagcagctacagactcctgctgcttcagyccctaggcttttgaatctctcccgtcttgacctcattccaggaagctggaatttatgggagttgtttttgtgttcttgttttctatttcttttttagaca

SEQ ID NO: 317323 - DNA, 201 bp, Homo sapiens
ctcaaaaaccaacttctctttctcattttcccacaaaaagagaagttacaggtttgtgtgaccacatgagcaatattgattcccagccatgtgaagattgrataatgaagtacactcatacttgtcacttttaccagctgctccgagttggggatgtagaggtcctctaagtaacactgctagagcaggcctatggtcatg

SEQ ID NO: 317324 - DNA, 201 bp, Homo sapiens
gtattgattatatcttatacatctggacctgtgttttctataataataacagaaccgccagaaacttgccttgaatggacaaggtagggatgtggttaaaatgttaaaaattggactggcgtgttagttttctatttctgtcagagcaaattaccacaaacttagtgacttaaaacaacctaaatgtattatcttatagtt

SEQ ID NO: 317325 - DNA, 201 bp, Homo sapiens
actttgggaggccaaggtgggtggatcacctgaggtcaggagttcaagaccagcccggccaacatggtgaaaccccgtctctactaaaaaaataaaaaataaaaaaattagctgggcgtggtggtgggcgcctataatcctagctacacaggaggctgaggcaggagaattgcttgaacctgggaggtggagggtgcagtg

SEQ ID NO: 317326 - DNA, 201 bp, Homo sapiens
cactttgggaggccaaggtgggtggatcacctgaggtcaggagttcaagaccagcccggccaacatggtgaaaccccgtctctactaaaaaaataaaaaataaaaaaattagctgggcgtggtggtgggcgcctataatcctagctacacaggaggctgaggcaggagaattgcttgaacctgggaggtggagggtgcagt

SEQ ID NO: 317327 - DNA, 201 bp, Homo sapiens
tttaaaaaatttcaggcctcccgaggagcccagacagctgcagccacagctccccgtatcaagaaatttgccatctatcgatgggacccagacaaggctgragacaaacctcatatgcagacttatgaagttgaccttaataagtgagtatctctgtgaaagccagctattgaaggagagttcttgatttgatttagggac

SEQ ID NO: 317328 - DNA, 201 bp, Homo sapiens
attagctggacatgatggtgtgcacctatagtcccagctacttgggaggctgagtcaggatgatcgcctgagcccaggagttaaaggctgcagtgagccaygatctccagcctgggcaataaagctagaccatgtgtctataaaaataaaaaataaaggccgggcaaggtggcctgtacctataatcccagcactttggga

SEQ ID NO: 317329 - DNA, 201 bp, Homo sapiens
agttcaagccattctcctgcctcagcctccctagtagctgggattacaggcacacgccaccacaccctgctaattcgtttttttgtatttttagtagggayggggtttcaccatgttggctgggctggtcttgaatccctgatctcaggtgatttcccaacctcagcctcccaaagtgctgggattacaggtgagaagagt

SEQ ID NO: 317330 - DNA, 201 bp, Homo sapiens
attacaggcacacgccaccacaccctgctaattcgtttttttgtatttttagtagggacggggtttcaccatgttggctgggctggtcttgaatccctgayctcaggtgatttcccaacctcagcctcccaaagtgctgggattacaggtgagaagagtatgtggagtctcagtattattttcttctttttgttttgtttt

SEQ ID NO: 317331 - DNA, 201 bp, Homo sapiens
ggctgccgcactccttggctcttggcctcttcttccattgtcaaaagcagcagcagcaggttgagtccttcttcacatcacatctctcaaaaccactcttyttccaacatctttcacttttaaggaactccacagttagccaaagaaaagaaagaatctagcaagttagtctctagcctcctgctgctccactccacgccc

SEQ ID NO: 317332 - DNA, 201 bp, Homo sapiens
ggcagagagatctcgccactccactccagcctgggtgacagagtgagactgtctcacaaaaaaaaaaaaaaaaaaaaaaaaaaaagaactaggggattatrctccagtcccagattctgtttaaagcccggttaggggccaggcgcggttgctcacacctgtaatcccaacactttggaacgctgaggcaggtggatcact

SEQ ID NO: 317333 - DNA, 201 bp, Homo sapiens
atttacaaatcagaataatacaaagactgataaggttgccaatcttgtagagcaaaaattattttctgggctatgctagaaacttgaccccccctcccccsggttatcttatgaggcagatattaatactacccaccctttacaaaggaagaaatagaatccgaaaagctaataatttgcagaagaatacacagcttgtaa

SEQ ID NO: 317334 - DNA, 201 bp, Homo sapiens
ttctactgttagctgatgtttgtattttcagcttcagttaatacgggacactttaccaagaaataatgttactggtagacggtcttgaccacaagtcgtcmaggtttttagcatgttgaacaaaaaattggacaaaacacacaagcaaagcaacagaagacgaaagcatagatttattgaaatgaaagtacactccataga

SEQ ID NO: 317335 - DNA, 201 bp, Homo sapiens
acaaaaagagaagttacaggtttgtgtgaccacatgagcaatattgattcccagccatgtgaagattggataatgaagtacactcatacttgtcacttttrccagctgctccgagttggggatgtagaggtcctctaagtaacactgctagagcaggcctatggtcatgtgattaactcgtttcagcctgctgatctcagg

SEQ ID NO: 317336 - DNA, 201 bp, Homo sapiens
gggacactttaccaagaaataatgttactggtagacggtcttgaccacaagtcgtcaaggtttttagcatgttgaacaaaaaattggacaaaacacacaarcaaagcaacagaagacgaaagcatagatttattgaaatgaaagtacactccatagagtaggagtgggattgagcaagtggttcaagagccccagctgcac

SEQ ID NO: 317337 - DNA, 201 bp, Homo sapiens
acactcatacttgtcacttttaccagctgctccgagttggggatgtagaggtcctctaagtaacactgctagagcaggcctatggtcatgtgattaactcrtttcagcctgctgatctcaggctgctgagagcgctgtgtaagttcaaagaatcattaagtgggacaaatactatctgtagacaggtctgttaaatcattc

SEQ ID NO: 317338 - DNA, 201 bp, Homo sapiens
gttccttggatctcattgtgaaatggaattatctttttgcactgttgcgttttatgtttgcgttttcaccactggttataatggctaaaaggttggatttytgaatcaagtgacctgtgttgctatatgatcctatcctcgtcttttaactgggaacaacaaaacatttttcatagagatgttataaagattagagattat

SEQ ID NO: 317339 - DNA, 201 bp, Homo sapiens
agtttggctcttagttgcaaggagtagactgactcgggccacctcaggagcaggctttatttgtaggctacacagggacattgtgggagttaaggatgcasaggaacccatgagcaggtacctgcgttcaaccttcccaggaaacagaaagcgaaagccgttggaacgtgggcagctgtgaggacttcatttcttctccat

SEQ ID NO: 317340 - DNA, 201 bp, Homo sapiens
tcctcttcctgctcgcatttgctgctgcttttggctcactctggcctggattttgcctcccagcacacttccagcttcagccacccgcctgcctcccagcmcttctcagcacagtttcctgagagggtgtcgcattggcccagctcaccttctcatgcctgcacatcagaggccacagctggctacagaccggctgccctt

SEQ ID NO: 317341 - DNA, 201 bp, Homo sapiens
agcctggatttaggggttgcttagaaagaaaatagtattgatgttcactgcaaagaaagtcactgtctttgttcccagaaagcttgtgcttttttagataygtgcttttcacagactctaggcaactcaaaaaccaacttctctttctcattttcccacaaaaagagaagttacaggtttgtgtgaccacatgagcaatat

SEQ ID NO: 317342 - DNA, 201 bp, Homo sapiens
gctagtgggtcctcagtggatgtaggctgggcgccgcgatgttcgacgggacaccggcggagagcgacctcggggttaaggggtggggctgacgtcaggarccaagatggcggcggtggtcgcactctccttgaggcgccggttgccggccacaacccttggcggagcctgcctgcaggtgagtcctggagcctcagagag

SEQ ID NO: 317343 - DNA, 201 bp, Homo sapiens
cacatgagcttttggggacacattcaaaccatagcaggtgtcagccctggtccagtcagccttgcccagtgggcagggaagggctagggctgtgtggttcrgaacacggctgccctccgagcaaagactgtgggtgatttcactcaaaagttgcagtgagtcagtgggcggcaaggtggaaaactgtagggtggccagtta

SEQ ID NO: 317344 - DNA, 201 bp, Homo sapiens
catagcaggtgtcagccctggtccagtcagccttgcccagtgggcagggaagggctagggctgtgtggttcagaacacggctgccctccgagcaaagactrtgggtgatttcactcaaaagttgcagtgagtcagtgggcggcaaggtggaaaactgtagggtggccagttagccgtaaaaaaagatcacactgtgtgttt

SEQ ID NO: 317345 - DNA, 201 bp, Homo sapiens
ctgatagagacatctggaaaacagctgcagctctctgctgggtgaacttgctgtgcaacctaattccttttcttgggtaaatgcatccaaaattctaaccrtggtgcaagttctggtttctgagtttactttccttcaggagcattctatcctgtggttactgcatctggcggtccctgtgagctgctccacgcttcaagg

SEQ ID NO: 317346 - DNA, 201 bp, Homo sapiens
tttcttatatcacatttatctgtattttttcacccactatattttggagattatcccatgttggtatatgaagagtgtctttttgaccagcctggacaacrtagtgagatcccatctctacaaacaaaaatttttttaattagccaggtgtggtggcacgcacctgtagtttcagttacttgagaggctgaggccggagga

SEQ ID NO: 317347 - DNA, 201 bp, Homo sapiens
tgcctcctgcaaagcagatgttaacagctgtaggggcaaactgcagctaataccaatggtattggccagttgaaatcatcatggttttacaaagggttaayagagagggtagtttcttccacatacttttgagagctggtatatgctgatttctgctgctgcctatttaataatgatgatgtaaaagatttagagatgtct

SEQ ID NO: 317348 - DNA, 201 bp, Homo sapiens
tttttttttcctttttgtgaactttaaaaaatttcaggcctcccgaggagcccagacagctgcagccacagctccccgtatcaagaaatttgccatctatsgatgggacccagacaaggctggagacaaacctcatatgcagacttatgaagttgaccttaataagtgagtatctctgtgaaagccagctattgaaggaga

SEQ ID NO: 317349 - DNA, 201 bp, Homo sapiens
acataaataccactggatatttttctttgttagatgtggccccatggtattggatgctttaatcaagattaagaatgaagttgactctactttgaccttcygaagatcatgcagagaaggtgagcatttcattcctgttgggctccagatacttgtggtcttccaaagaggcttgggctggccaaagctgatagagacatc

SEQ ID NO: 317350 - DNA, 201 bp, Homo sapiens
agcaaggaggatccagaagaaagtatttggggcaggactgattccggatatgggtgaggatgtgttaaatgtgtgtctctttcaggcatctgtggctcttrtgcaatgaacatcaatggaggcaacactctagcttgcacccgaaggattgacaccaacctcaataaggtctcaaaaatctaccctcttccacacatgtat

SEQ ID NO: 317351 - DNA, 201 bp, Homo sapiens
catagcagagtctctcccgtcacaagctcctgcctctcttttctccccatacaggacgggctctacgagtgcattctctgtgcctgctgtagcaccagctrccccagctactggtggaacggagacaaatatctggggcctgcagttcttatgcaggtgaggtgctccttaattgctttaagagaaattgaaactcaagca

SEQ ID NO: 317352 - DNA, 201 bp, Homo sapiens
agcagagtctctcccgtcacaagctcctgcctctcttttctccccatacaggacgggctctacgagtgcattctctgtgcctgctgtagcaccagctgccscagctactggtggaacggagacaaatatctggggcctgcagttcttatgcaggtgaggtgctccttaattgctttaagagaaattgaaactcaagcatcc

SEQ ID NO: 317353 - DNA, 201 bp, Homo sapiens
aggggcgcaaaccatgccttgcagatgtttaaaatgtatttccgtttgcctggtggtcagaggctccccctctccctctcataggatttgtaacataagayttgtagcgagcaagcaggggagaaagcagtgtctttgaagggcagctgcccagctatgagattggaagctgtttcccagctaatgaaagcctggatttag

SEQ ID NO: 317354 - DNA, 201 bp, Homo sapiens
acagccacgtgaatcacagaatcttaaatcagagggcccaacaccctaatggttcaggcaaggaaactataggtcaaagatggggaggggcttatccaagktcacatggccttgaagagaatattccaggttagacctagaggttcaggcctcactacacaccccctttaatgaggccacactggcggtatagcggggttc

SEQ ID NO: 317355 - DNA, 201 bp, Homo sapiens
caaacagggtaattggttgcattgtattcacttgctttcggtaaatctggggccttgtctgcaaattgcctttgtttcagtgcagtgagggtcaccccaarggggcgcaaaccatgccttgcagatgtttaaaatgtatttccgtttgcctggtggtcagaggctccccctctccctctcataggatttgtaacataagac

SEQ ID NO: 317356 - DNA, 201 bp, Homo sapiens
gaccctgtctctacaaaaactttaaaacttagccaggcatggtggtatgcacctatagtcccagctactcaggaggctgagatgggaggattgcttgagcmcaagagttccaggctgcagtgaactgtgattgtgccactgcactccagccaggggcacacagcaagaccctgtctcaaaaaaaaaaaaaaaaagaattta

SEQ ID NO: 317357 - DNA, 201 bp, Homo sapiens
gttgaacaaaaaattggacaaaacacacaagcaaagcaacagaagacgaaagcatagatttattgaaatgaaagtacactccatagagtaggagtgggatygagcaagtggttcaagagccccagctgcacagtcttctgggattaaagtaccctgtacgggtttcctattagttacaccctatgcaaatgaagacttggc

SEQ ID NO: 317358 - DNA, 201 bp, Homo sapiens
tgagatcgtgccactgcactccagcctgggtaacagagcaagaccccgtctcaagaaaaaaaagaaaaaaaatgaaatacagatagtactaaaggaaatgrcgtatttttaagtatatttttaatctcatgcatagaaaattagtgagtggaatgggggcagggtggcaaccagaaaatagatttgtggagcacttactgt

SEQ ID NO: 317359 - DNA, 201 bp, Homo sapiens
caggcctcccgaggagcccagacagctgcagccacagctccccgtatcaagaaatttgccatctatcgatgggacccagacaaggctggagacaaacctcrtatgcagacttatgaagttgaccttaataagtgagtatctctgtgaaagccagctattgaaggagagttcttgatttgatttagggacatgcttttcaca

SEQ ID NO: 317360 - DNA, 201 bp, Homo sapiens
ctatacactagcaatgaacaatcctaaaatgaaatttaaaaactattttccatataacagcatcaaaaaagaaattcttaggaacaaattatatgggcaayaagacaaaaccccatctctacaaaaaaagttagctgggcttgatgaccttcctgtgcctatagtcccagctacttggaggctgaggtgggagaatcactt

SEQ ID NO: 317361 - DNA, 201 bp, Homo sapiens
actgcaggcatgagccaccaccctcagaccacaccccacactccttccccttaattctggtttgtcaagcctccacttagatgacatgtgaggaagccttstctgactcttcactcattgaagtctctgctgtattcatccagagctccctgtactttcccaacagtatcactctttatattcatcgtgaatgtttaattt

SEQ ID NO: 317362 - DNA, 201 bp, Homo sapiens
ctccacttagatgacatgtgaggaagccttctctgactcttcactcattgaagtctctgctgtattcatccagagctccctgtactttcccaacagtatcrctctttatattcatcgtgaatgtttaatttaactcttgttcactacaaagtaagttctgtgaagatgaaggtttttgtgtattaagtgctgtgtcactag

SEQ ID NO: 317363 - DNA, 201 bp, Homo sapiens
gtgtcactagcccctaataccatgtctgatatattagcatatgataggtgcttaatacttgttggatattgaatgcctgccttttctaagaagattatgtrtcagtaatgtgtgagtttatatccagcgttacatctgttgtgccagcaaaatggaattatcttgtatttctaatttttttttcctttttgtgaactttaa

SEQ ID NO: 317364 - DNA, 201 bp, Homo sapiens
aggctgggcgccgcgatgttcgacgggacaccggcggagagcgacctcggggttaaggggtggggctgacgtcaggagccaagatggcggcggtggtcgcmctctccttgaggcgccggttgccggccacaacccttggcggagcctgcctgcaggtgagtcctggagcctcagagagggaaaagtcaggaaagccacaga

SEQ ID NO: 317365 - DNA, 201 bp, Homo sapiens
tatcgatgggacccagacaaggctggagacaaacctcatatgcagacttatgaagttgaccttaataagtgagtatctctgtgaaagccagctattgaagragagttcttgatttgatttagggacatgcttttcacatccttggaaggcttaaaaatctgagatcatccgatggctctgtttttaaaacaagaatgagct

SEQ ID NO: 317366 - DNA, 201 bp, Homo sapiens
cagtgagctgagatcatgccattgcactccagcctgggcaacagagtgagactctgtctccaaaaaaaaaaaaaaaatgaggttgttacctgattcagaaraataataccaaaataattcccaaatgaaagtatgacaaatttctagaaatactggtataattaactttatgcacagtatttaaagtcatttaatatatta

SEQ ID NO: 317367 - DNA, 201 bp, Homo sapiens
gttgagtccttcttcacatcacatctctcaaaaccactcttcttccaacatctttcacttttaaggaactccacagttagccaaagaaaagaaagaatctrgcaagttagtctctagcctcctgctgctccactccacgcccccatataaccagaactgttctctgatctgttttatgtgtaagtgaataagtgttttatt

SEQ ID NO: 317368 - DNA, 201 bp, Homo sapiens
ctgttttatgtgtaagtgaataagtgttttatttgtttcaaacaaaagcttctgtggcaccaaaaaaaagtttgaataccacgaatactctaaatgcttaytttgactttctgtggtgacaagtaagtgctgttaatgaggtagcattaattgatatataaccttcttaaatagacaaaattttcaaatactcagcaacca

SEQ ID NO: 317369 - DNA, 201 bp, Homo sapiens
ggaaaatatgtcaggatcaggccatgaaaatttctaagtccttctgcagctgtgactttctggcatcccaaagtccagggcggaggtacagccgcccaggratttattcctccataactttgagctccccaaatccccacgaagcccaggaatgatgtgactgcagggcatgtgggcccattggcaccaacagcccctcca

SEQ ID NO: 317370 - DNA, 201 bp, Homo sapiens
gttctgctgcctatagtggcacgtccctgggcacatggcctaactcactctcctcgccttggttccttacctgtaagtggaacttgctggagtcacctcayaggattactgtgatgatcagttaaggaaagcgtgtaaggcgcagggcctccgtcaggattggcagtggcagtcactggggatgatgttgatgttcccagt

SEQ ID NO: 317371 - DNA, 201 bp, Homo sapiens
agaaggtcacgggggaagccaaatgggcatgcgccgctactgcgctattgcgcacgctcgctgtgcttgccccgccttccctccgcccacccgggaaacckgaagccgcctcccacttggttgctcgtacgcggctagtgggtcctcagtggatgtaggctgggcgccgcgatgttcgacgggacaccggcggagagcgac

SEQ ID NO: 317372 - DNA, 201 bp, Homo sapiens
atcgctggatgattgactccagagatgacttcacagaggagcgcctggccaagctgcaggacccattctctctataccgctgccacaccatcatgaactgmacaaggacctgtcctaaggtacgtggggctggtgaccctcagctctgcctcagagctgacacgccagaagtagcatgtgctcacaaagaggtgattggca

SEQ ID NO: 317373 - DNA, 201 bp, Homo sapiens
ggaggccgaggcgggtggatcagctggcgtcaggagttcgagatcaacctggccaacatggtgaaaccttgtctctactaaaaatacaaaaattagccggstgatagcggacgcctgtaatcctggctactcgggaggctgaggcaggaacccgggaggtggagtttgcagtgagccaagatcacgccactgcactccagc

SEQ ID NO: 317374 - DNA, 201 bp, Homo sapiens
ttcttcttcttcttcttcttcttcctcttaaccacaggatttgagcaacttctatgcacagtacaaatccattgagccttatttgaagaagaaggatgaayctcaggaaggcaagcagcagtatctgcagtccatagaagagcgtgagaaactggtcattagtccctatttattgtttcaatctgaagaatttattgcaaa

SEQ ID NO: 317375 - DNA, 201 bp, Homo sapiens
tatttttagtaaagacaaggtttcgccatgttggcaggctggtcttaaactcctgacctcaagtgattcacccgcctcggcctcccaaagtgctgggattmcagacgtgagccaccatgcccggccgaaattatctgttcttaagaaaaagaaagatttttgaaaagggaaagcgctcctgtgatctatggaacagcatca

SEQ ID NO: 317376 - DNA, 201 bp, Homo sapiens
gtgagcccgaggtctctgtcattctgctgactgtaagctgagggctgttccaagcttccagaggctgccgcactccttggctcttggcctcttcttccatygtcaaaagcagcagcagcaggttgagtccttcttcacatcacatctctcaaaaccactcttcttccaacatctttcacttttaaggaactccacagttag

SEQ ID NO: 317377 - DNA, 201 bp, Homo sapiens
atctttttgtaattagtcaattaaccttccgagtttttacttttctatatcagtttattttaaaaattagcagtcctggagtatagtcttttctttctttktttcttttttattttgtatttttgaaaaagagtctcactctgttgcccaggctagagtgcagtggcatgatcttggctcactgcagcctcaacctctcgg

SEQ ID NO: 317378 - DNA, 201 bp, Homo sapiens
tcacacttttcagcaagcctgcaccttgtattttactcaggcttatcttcatacagtcctttttgctttcttcctctctatttccccaccttcttctctgkcctccaaatctttatccactccatccaactccaagcctgcaccctaaggacactttactggaggaacaacaaccagccttcagcaccattcagaattcac

SEQ ID NO: 317379 - DNA, 201 bp, Homo sapiens
gaggatcacctgagtttaggaaggtcaaggctgcagagagctgtgattgtgccactgcactccagcctcagcaacaacaacaaaaaaaaaaaaaaaaaaaragagagagagagagagaaaaagaaatatctagggtgcagaggctataccagcaaagcaccagtagggtttgggggatgcagcatcacctctgcccaggga

SEQ ID NO: 317380 - DNA, 201 bp, Homo sapiens
gcaagctgaccatctgcccacaggccgagaaccgcaacgaccgctggatccaggtaaccacagccactgggcagggcccagcaaggacgccatcctggagrgagaggccttcatttgggggccaccgagaaacatccaggaggacctgggtgctccccagggaacttgctgccgtttctaatgtgagacctagaggcttct

SEQ ID NO: 317381 - DNA, 201 bp, Homo sapiens
ggataattatggtgcccacgcccaggcatgtcatgaggatgaatggagttaatgtttataaagagtttagggcaggacctggatgtgaagttcattcacaytgggccatcttttcctccagaaccagaggggtcaggactgacctgggcacatttatggatccaactcaggccactgtgagggcttctctgtgtccacctg

SEQ ID NO: 317382 - DNA, 201 bp, Homo sapiens
ggaggcaggatggtgcacctgttcagagcacaagctttagggtcagaccaaccctgttccgttacttacatgctgtgtgatgttgcgtgagttactaccgytctctgagcctcagtttcctcatcagtaaaaatgacattttggccctggcctcacaggggtttgtgaagcatctcatcatcacagtacctgcatggaggg

SEQ ID NO: 317383 - DNA, 201 bp, Homo sapiens
ggctgagggttgggggtggtgatgatggtggagcaggggccattgcactccttgaagagagccagaagcaaggaatgatgaaattatactcccggatgtgstggggttggtgggtgttcaccagacacagtccacacttacctcggggactctgaaaccagagagagcagagacctaagagatcattcagtccaacacttt

SEQ ID NO: 317384 - DNA, 201 bp, Homo sapiens; identical to SEQ ID NO: 116224

SEQ ID NO: 317385 - DNA, 201 bp, Homo sapiens
cctgggagaaaatgcatttaggtcaaagcttgttcatactaccatgtaaatgactaatataagatcttttcctgagagcaagagaagtgaggtacaagacwtgctaagtgaaatgacaataacatacagagagagtaacaaatgatgtgttgttcagtagtgacacaggggtgctgatggaaaaggaatcctatcatattg

SEQ ID NO: 317386 - DNA, 201 bp, Homo sapiens
taagtgaaatgacaataacatacagagagagtaacaaatgatgtgttgttcagtagtgacacaggggtgctgatggaaaaggaatcctatcatattggttrcttgctgtggactagaccaagacattgagctaaccaaatgcaacaaagctgttagaacagacttgggatcaaataatgaatgaatccagagtcaagcttt

SEQ ID NO: 317387 - DNA, 201 bp, Homo sapiens
acctgcacgacgcccacatggccttaccctccttgcttctctggagcacctgttgtgtgtcagacaccagctggctatgccacacttcatgtttctctggscaattgaggaaacatgagtccaggagagcatagatgtcttcatggtttgttcttgatggcttccagggttttcacaaagctagggctgggagacccaggt

SEQ ID NO: 317388 - DNA, 201 bp, Homo sapiens
agctttggaagggactactgccctcaaatacataatcccattgaaagaggaagctggaccatgcccttagatacattttcctaaaaattgaacatgggggwgaaatctgtctcttggagaataagaacctggtgtgagggtggttctgaagattttcctggatggtgggacctggtaggtcattgccctggtgtgactgac

SEQ ID NO: 317389 - DNA, 201 bp, Homo sapiens
ctcccttttttttttttcctttttgagacggagtttcactcttgttgcccaggctggagtgcaatggcgtgatctccactcaccgcaacctccgcctcccragttcaagcgattctcctgcctcagcctcctgagtagctgggattacaggcatgcgccaccacgcccggctaattttgtgtttttagtagagacgggggt

SEQ ID NO: 317390 - DNA, 201 bp, Homo sapiens
tgagtcttggggcagtgggtggtccctctggcccccaggccccggctccatcctgagcccctcttccctgggcttgtccgtagtgtgaggaacaacacgtrttttgtggatgcggtggcagagctggccaggaaggccggctgcaagctgaccatctgcccacaggccgagaaccgcaacgaccgctggatccaggtaacc

SEQ ID NO: 317391 - DNA, 201 bp, Homo sapiens
cgtgatctccactcaccgcaacctccgcctcccaagttcaagcgattctcctgcctcagcctcctgagtagctgggattacaggcatgcgccaccacgccyggctaattttgtgtttttagtagagacgggggtttctccatgttggtcaggctggtctcgaactcctgacctcaggtgatcagcccgcctcggcctctca

SEQ ID NO: 317392 - DNA, 201 bp, Homo sapiens
tcagctcactgcagcctccacctttcaggctcaagcaatccttccaccttagcctcacgagtagctgggactacaggcatgtaccaccacaccctgctaatttttttttttttgtaaagacagggtttcaccatgctgcccaggctggtcgtgaactcctgggctcaagcaatccacccgctttggcctctcaaagtacta

SEQ ID NO: 317393 - DNA, 201 bp, Homo sapiens
taaaacctgactgatggtgggtgggtgggcagcaactgacccagctccccgctaagccaaagcaagaggattcctcatccagtgccctcgggcagttgtamatttccagtgaaaggcgttaccacttccagtgaactcaaataaaggtctcagttcattccactgtggcaaccagaccctcccactccttataccccaaga

SEQ ID NO: 317394 - DNA, 201 bp, Homo sapiens
gatggtgggtgggtgggcagcaactgacccagctccccgctaagccaaagcaagaggattcctcatccagtgccctcgggcagttgtacatttccagtgamaggcgttaccacttccagtgaactcaaataaaggtctcagttcattccactgtggcaaccagaccctcccactccttataccccaagatgtgcacagtgg

SEQ ID NO: 317395 - DNA, 201 bp, Homo sapiens
gttgcagtgagccatgatcaccccactgcactccacagcctgggcaacaaagtaagaccctgtctccaaaaaataataataataaagggcagtggggaggrctccattcctggtaagtctaccaggcaccactggtgtgaaagaccccagacttcttgaccacccctctggttcatttccatcttgcagagaagcaagggg

SEQ ID NO: 317396 - DNA, 201 bp, Homo sapiens; identical to SEQ ID NO: 66620

SEQ ID NO: 317397 - DNA, 201 bp, Homo sapiens; identical to SEQ ID NO: 66622

SEQ ID NO: 317398 - DNA, 201 bp, Homo sapiens
gttcaggcgccgcacaagaccctcccggtggtctttgactccccaaggaatggggaactgcaggatttcccttacaaaagaatcctggtgagtggtcccgrccgcagcccacccctgagagctgagaggccttaccccaggggccacaccggggtgtggggtacagagggcagcagtgggaaccgtgctctttagggatga

SEQ ID NO: 317399 - DNA, 201 bp, Homo sapiens
atagatgtcttcatggtttgttcttgatggcttccagggttttcacaaagctagggctgggagacccaggtcttgatacccactgacctggggagggagcygggcagcagaggaaggggccaggggccaggactcccttgagtcactaccactctgtctggcttcacagacctggaagacatgtctgtcatggtcctgcgg

SEQ ID NO: 317400 - DNA, 201 bp, Homo sapiens
gctagtatttcttgggcacttcctatgggctcagtcttttacatgtattgtttccaagctgcattacaagcctctgaggtagagacctatagaggtagagrccttttcccattttgcagaggagaaaactgaggtggctcaggtaggtgagaggccttggccaaggtcatagagtacccagaggtgccgggctcaagcccg

SEQ ID NO: 317401 - DNA, 201 bp, Homo sapiens
aatgaatgaatccagagtcaagctttggaagggactactgccctcaaatacataatcccattgaaagaggaagctggaccatgcccttagatacattttcstaaaaattgaacatgggggtgaaatctgtctcttggagaataagaacctggtgtgagggtggttctgaagattttcctggatggtgggacctggtaggtc

SEQ ID NO: 317402 - DNA, 201 bp, Homo sapiens
aagaaagagtcaaatggaaatgctagacataaaaaccatagtaataagagattttaaaaatgcttttgaaggtttcaccagtagacttgacacagctgagkaaagaatcagtgaacttgaagataagtgaataaaagttacccaaactgaaacccaaagagaaaaaagaataaaacaaacaaatgaaaaaacataacagat

SEQ ID NO: 317403 - DNA, 201 bp, Homo sapiens
ttaactgtcaccattatcatcatcatcagtttaaggctttgtcctgggcctgtggacagcctcaagcatccccaaacctgccatatgcaggatgtctgggraacagtctctggaccgtattgggagaaggagttgagaaaagagaaatttacatctgactcatggctgagtcagggcagtcttcctggaggaggggcacca

SEQ ID NO: 317404 - DNA, 201 bp, Homo sapiens
gtgggcaacagagagccattgccattgacatgtcttgagaaggaggtgcttcgagaacgtggacctagcctcacagggttgggtggttacaggccaggctsgggttcctgggtagggaggcacaggtctcatctgagccctcatcactggctatgttttgtcattggcagcggcagtgggtctgggggcccagtgggtatg

SEQ ID NO: 317405 - DNA, 201 bp, Homo sapiens
gtggctgaggggcccgcgaagctggtcacctttgggattcatcacaggtgggcttggagagcagtccccaggctggttcagtgagacatctctggggtctyacacgccacttcattttttagttggggaaactgaggcctggagtgtgaaatgacttgctcagggttacatagtgagttagggacagagctaaaactagaa

SEQ ID NO: 317406 - DNA, 201 bp, Homo sapiens
agtccaggggagagcgccagcctccagacacacctcgatgctcctcaaaacccatctcaggctggcagctgcccctccctagtgtctctagggccagtgarcactcacatgccagggcagaagctctggaaatgagccacctcgccattctcttcctccaggggagcagaggatgctagcattatttgagcacctactgtg

SEQ ID NO: 317407 - DNA, 201 bp, Homo sapiens
ttctgctcttttaaatacgggggatttggaaaaagggtatacggggctgccactttccagtggtggggtggggcagggccacccagattacagtgggaccrtgatttcctgaacctgattctattgatgaggctggcagcgtcggcggatctgggatcctcgctgactggggaggggcagctggaactgccacccagaaac

SEQ ID NO: 317408 - DNA, 201 bp, Homo sapiens
cctgttgccaggttgcctaccagggaacctcctgttcctgccttgggccatgggcaggtcctgcttacactccgggagatgccctggtgggtggcgggtcrcagtaagaacagtcagaagtgggggctttggaactgatgaactggtgcccccagcacaacacctggcctgaggtcattttatttgatgaatgaccttttc

SEQ ID NO: 317409 - DNA, 201 bp, Homo sapiens
ccacccagattacagtgggaccatgatttcctgaacctgattctattgatgaggctggcagcgtcggcggatctgggatcctcgctgactggggaggggcrgctggaactgccacccagaaacccagctgcctgggtcttggtctcctctgcccccacatcccagctcggtggagacctcgttggtcatcttgtcaacctt

SEQ ID NO: 317410 - DNA, 201 bp, Homo sapiens
tgacttttgctcatcctgagtgctttacccacactggttcctttcatcttctcctcatccccaccagatagatgtcgatgctgcggctgagggaggcagtsactcgctcaaagtcacacacctaatgagtggtgggactgggatttgaacccagttgtctggccccagggaccacaggctcaagtaccttgccacggctcc

SEQ ID NO: 317411 - DNA, 201 bp, Homo sapiens
ctttcaccaggagaaaaatcatcgccaggaattatcaggcatggaggtacccagccctgagctaggccttggtttgtgggatcaagaccttctggactcayaaactaggtcaggagtgggcaaactttttccgtgaaaagtcacatagcaagtattttaggctttgtgggacatatggtctcaattctgccactatagtgt

SEQ ID NO: 317412 - DNA, 201 bp, Homo sapiens
gtcacagctgtgcgtctctcgcctctcctcacttgcaggatgagatggagctgggctacgttcaggcgccgcacaagaccctcccggtggtctttgactcyccaaggaatggggaactgcaggatttcccttacaaaagaatcctggtgagtggtcccggccgcagcccacccctgagagctgagaggccttaccccaggg

SEQ ID NO: 317413 - DNA, 201 bp, Homo sapiens
gcaggtcctgcttacactccgggagatgccctggtgggtggcgggtcgcagtaagaacagtcagaagtgggggctttggaactgatgaactggtgcccccrgcacaacacctggcctgaggtcattttatttgatgaatgaccttttcaaatacattttaagcatgtgtagaaattcttatcaaaaatttcaaacatacac

SEQ ID NO: 317414 - DNA, 201 bp, Homo sapiens; identical to SEQ ID NO: 116251

SEQ ID NO: 317415 - DNA, 201 bp, Homo sapiens
gggtttcattgtcttagccaggatggtctcaatctcctgaccttgtgatctgcccgcctcggcctcccaaagtgctgggattataggcgtgagccaccgtrcctggccgcttattttttaaataatcagacaatatggaagtatagaaaatgaaacctgagagttctctacccgtctctaaatctgacttttttttttttt

SEQ ID NO: 317416 - DNA, 201 bp, Homo sapiens
gtgagccaccgtgcctggccgcttattttttaaataatcagacaatatggaagtatagaaaatgaaacctgagagttctctacccgtctctaaatctgactttttttttttttttttgagtcaaggtcttgctctgttgcccgggctggagtgcagtggcatgatctcagctcactgcagcctccacctttcaggctcaag

SEQ ID NO: 317417 - DNA, 201 bp, Homo sapiens
gtaccaccacaccctgctaatttttttttttttgtaaagacagggtttcaccatgctgcccaggctggtcgtgaactcctgggctcaagcaatccacccgmtttggcctctcaaagtactaggattataggcgtgagacgccgcacctggcctgaatctgattgtcactgttaacgagttgggatgtgtgcttcccaactt

SEQ ID NO: 317418 - DNA, 201 bp, Homo sapiens; identical to SEQ ID NO: 116262

SEQ ID NO: 317419 - DNA, 201 bp, Homo sapiens
tgggaaagagtaccccctggggaggatcctcattgggggcaacctgcctgggtgagagagagacagggaatggagttcctggggtggaggctgagggttgrgggtggtgatgatggtggagcaggggccattgcactccttgaagagagccagaagcaaggaatgatgaaattatactcccggatgtggtggggttggtgg

SEQ ID NO: 317420 - DNA, 201 bp, Homo sapiens
ctgttccagggggttgttggtgggtaacagtgccgtgtccctccttgcggcttgcctgccccttacccaaattaagacacatcatggcttgagagggggarggcaagttttaaagcaggggtgtgtccccaaattcagggcttctcactcctgcccctgcacaccttgcttcaccagacaccactgcccacagctggggcc

SEQ ID NO: 317421 - DNA, 201 bp, Homo sapiens
gctcagctgaatctgttctctgcacgcagggcttccggatgctcctggccagccctggggcctgcttcaagctcttccaggaaaagcagaagtgtggccaygggagggccctcctgttccagggggttgttggtgggtaacagtgccgtgtccctccttgcggcttgcctgccccttacccaaattaagacacatcatggc

SEQ ID NO: 317422 - DNA, 201 bp, Homo sapiens
tcttgaatttaacccttacaacaaccctgtgagctaggcttattattagcatcatctcatcagacaaatgagaaaaccgaggcagagagggcaagccattygctcaagtcacacagttactaagtggcaaagccagggtttaaacccgcttgtggtcttactcaggagtcttatggttttagctgctctgatacttggaaa

SEQ ID NO: 317423 - DNA, 201 bp, Homo sapiens
ttatgctcctactgtgtgccaggtcatgcctttgaggcccatggtagagggaggtaaggccttatcttctctctcttaggaagaaaagagggttagggtakggttttaagagctgggctctggggaccaccagggagctggcttcttaggcttttggggagaatccagggtcctggcttggaggtaatcaggatactggga

SEQ ID NO: 317424 - DNA, 201 bp, Homo sapiens
tatggttttagctgctctgatacttggaaaataaagatttccaacctggtttcctctagacactcaatgcccatgcattatgctcctactgtgtgccaggycatgcctttgaggcccatggtagagggaggtaaggccttatcttctctctcttaggaagaaaagagggttagggtagggttttaagagctgggctctggg

SEQ ID NO: 317425 - DNA, 201 bp, Homo sapiens
tcccataacatgtggagatgcttcctggagtctgttgggttgtggctgctcatgtggctgaggggcccgcgaagctggtcacctttgggattcatcacagrtgggcttggagagcagtccccaggctggttcagtgagacatctctggggtcttacacgccacttcattttttagttggggaaactgaggcctggagtgtg

SEQ ID NO: 317426 - DNA, 201 bp, Homo sapiens
tatcttctctctcttaggaagaaaagagggttagggtagggttttaagagctgggctctggggaccaccagggagctggcttcttaggcttttggggagamtccagggtcctggcttggaggtaatcaggatactgggaggggagggtgcagaactgtgggacagctctcacctctcaagtctcccagccctctcctcagg

SEQ ID NO: 317427 - DNA, 201 bp, Homo sapiens
cagggagctggcttcttaggcttttggggagaatccagggtcctggcttggaggtaatcaggatactgggaggggagggtgcagaactgtgggacagctcycacctctcaagtctcccagccctctcctcaggccaggtttctcaacctcagcactgctgtcacgatacctctttgtcatgggggccaccctgtgcactgt

SEQ ID NO: 317428 - DNA, 201 bp, Homo sapiens
ggttctcaaccctggaagtgtgtttcaatcacctggggatccataaaaaaattgatgcccaggccccaccttgggaaacctgattcaactcatctgtgaarggccccagcaccctaggttttcaggatccgctggggatgaatgtgcagctggggctaagaaccgctgccctcactgggaagacaaacaactcatgtcacc

SEQ ID NO: 317429 - DNA, 201 bp, Homo sapiens
tccgtagtgtgaggaacaacacgtgttttgtggatgcggtggcagagctggccaggaaggccggctgcaagctgaccatctgcccacaggccgagaaccgyaacgaccgctggatccaggtaaccacagccactgggcagggcccagcaaggacgccatcctggagagagaggccttcatttgggggccaccgagaaacat

SEQ ID NO: 317430 - DNA, 201 bp, Homo sapiens
ccgagaaccgcaacgaccgctggatccaggtaaccacagccactgggcagggcccagcaaggacgccatcctggagagagaggccttcatttgggggccaycgagaaacatccaggaggacctgggtgctccccagggaacttgctgccgtttctaatgtgagacctagaggcttctctccagaaccttctggagacccac

SEQ ID NO: 317431 - DNA, 201 bp, Homo sapiens
tcctgtatttttatttactgaatctggcagccctaaataggggaggcaggatggtgcacctgttcagagcacaagctttagggtcagaccaaccctgttcygttacttacatgctgtgtgatgttgcgtgagttactaccgctctctgagcctcagtttcctcatcagtaaaaatgacattttggccctggcctcacaggg

SEQ ID NO: 317432 - DNA, 201 bp, Homo sapiens
atgttgcgtgagttactaccgctctctgagcctcagtttcctcatcagtaaaaatgacattttggccctggcctcacaggggtttgtgaagcatctcatcmtcacagtacctgcatggagggagtgtgtgtgcgcgcaccactattagctagtatcattattttaagaaaaaggataacagggaaggtgatgattgctaac

SEQ ID NO: 317433 - DNA, 201 bp, Homo sapiens
tcagtttcctcatcagtaaaaatgacattttggccctggcctcacaggggtttgtgaagcatctcatcatcacagtacctgcatggagggagtgtgtgtgygcgcaccactattagctagtatcattattttaagaaaaaggataacagggaaggtgatgattgctaacgaggacctcttgagaaaacaagagtgacttgc

SEQ ID NO: 317434 - DNA, 201 bp, Homo sapiens
cagaggcccacatcagcagcctcttggttcccacaattggccacttgagctgctacttgcccttgggctgaacttgcaggaaggctgtgtaggtaaggggrtggagtggccatggcctcaggctccatgtccgatggggagtgcaggagcaaccggagcgccccctgctgtcttgccgtgataaggcagcagggccagaga

SEQ ID NO: 317435 - DNA, 201 bp, Homo sapiens
ccccacccaccgccaatgactctgtatttccacctgaagaatggatggcctttcccaccctgtcttgaaggagctcaaagcccagcaagttggttcaggcycttcctggtaccctccacccccgcctgacttggtttccctctccagggtccagattttggttacgtgactcgggaaccacgcgacaggtctgtgagtggc

SEQ ID NO: 317436 - DNA, 201 bp, Homo sapiens
gcagaactcaccctaagtggaattttaaaatatacgtatctggctgggtgcagtggctcatccctgtaatcccagcactttgtgaggctgaggcgggcagwtcacttgaggtcaggagttcgagaccagcctggccaacatggtgaaaccccatctctagtaaaaatacagaaaaattagcctggcctggtggtgcacgcc

SEQ ID NO: 317437 - DNA, 201 bp, Homo sapiens
aacttcgtgcatgacgtgtctttccctggcatctggggcaagaactgagctccagggcgccatgccaaggcaggaggctcagctgaatctgttctctgcaygcagggcttccggatgctcctggccagccctggggcctgcttcaagctcttccaggaaaagcagaagtgtggccacgggagggccctcctgttccagggg

SEQ ID NO: 317438 - DNA, 201 bp, Homo sapiens
gtgggtaacagtgccgtgtccctccttgcggcttgcctgccccttacccaaattaagacacatcatggcttgagagggggagggcaagttttaaagcaggkgtgtgtccccaaattcagggcttctcactcctgcccctgcacaccttgcttcaccagacaccactgcccacagctggggccgagctgaggtgggaagcgg

SEQ ID NO: 317439 - DNA, 201 bp, Homo sapiens
cagcaagttggttcaggcccttcctggtaccctccacccccgcctgacttggtttccctctccagggtccagattttggttacgtgactcgggaaccacgygacaggtctgtgagtggcctggactcctttgggaacctggaggtcagccctccagtggtggccaatgggaaagagtaccccctggggaggatcctcattg

SEQ ID NO: 317440 - DNA, 201 bp, Homo sapiens
gcggggctggaggcaaggatgggatacagacatctgaggctaactgttcatgaaagctcaggttagaacaggcccagacagaggggtcccaacaccctctyttgacccagaagaagtgaggggagcgacaggatgccttggtgcccccaaaacacactggcaaggtgtccccaactctggccctcccctgcccccagagct

SEQ ID NO: 317441 - DNA, 201 bp, Homo sapiens
cagacatctgaggctaactgttcatgaaagctcaggttagaacaggcccagacagaggggtcccaacaccctcttttgacccagaagaagtgaggggagcracaggatgccttggtgcccccaaaacacactggcaaggtgtccccaactctggccctcccctgcccccagagctgcatcgactggaaccgtgaggtgctg

SEQ ID NO: 317442 - DNA, 201 bp, Homo sapiens
cgactggaaccgtgaggtgctgaagcgggagctgggcctggcagagtgtgacatcattgacatcccacagctcttcaagaccgagaggaaaaaagcaacgrccttcttccctgacttggtgagggcactacccatgactcctttgccaaatcaggctgcaaacctctaagctcgagagaggaaaaatgtctggtcacagtc

SEQ ID NO: 317443 - DNA, 201 bp, Homo sapiens
gctcagcccttgcccatggacactggaggcccaaggaacagctttggggttgagggagttccataaaaagtgtacaggcttcagccaggcgcggtggctcrcgcctgtaatcccagctgggaggctgaggcaggcggatcacttgaggtcaggagttcaagaccagtctggccaatatggtgaaaccctgtttctactgaa

SEQ ID NO: 317444 - DNA, 201 bp, Homo sapiens
ctcctccccacctcatcccctaaaagaactcaatttgcccattgtcagagccttgtggggaacctgtccacaccaccattgcttcatgccccgctttttcsttcctcttttcaggcaacattttgccctccgcttgcaaagcctcttttcactccccttccttcctgttcgaggctatcttgtaattatatatgtgcccca

SEQ ID NO: 317445 - DNA, 201 bp, Homo sapiens
aaaaaaaatagcgaggtatagtggtgtacacctatagtcccagttacttgggaggctgaggtgggaggatcacctgaaccccagggaggttgaggttgcartgagccatgatcaccccactgcactccacagcctgggcaacaaagtaagaccctgtctccaaaaaataataataataaagggcagtggggagggctccat

SEQ ID NO: 317446 - DNA, 201 bp, Homo sapiens
cagcttaaagtttttctgctaagcctccacaaatggatacataaactccgtgcaagatggctcagatgttggagctatcagacagggcatgcaaagtaatmgtgattaatatgttaagggttctagtggaaaaggtagacaatatgtatgaacagatggggaatttcaacagagaagaaaatcaataagaaagagtcaaat

SEQ ID NO: 317447 - DNA, 201 bp, Homo sapiens
tgccctcacctcttggatggtgtctccttagaaatgacttgcctttgctcagccccagacaagccctgagatcaaggcctgccctgggctcctgggaaccytgtagtgacttaccctctgcctcctcttgcagacatctctctggattgcgacctgaactgtgagggaaggcaggacaggaactttgtagacaaggtaagc

SEQ ID NO: 317448 - DNA, 201 bp, Homo sapiens
tgggcgtcttttgccctatgctatgtttgtgagatttatccacttgttgcatggtggttgagtatcttttcacatgtttaaaaatcatttcaggccacgcrtggtggctcatgcttgtaatcccagcactttgggaggctggggtgggtggatcacttgagcccagtagttcaagaccagcctaggcaacatggtgaaatc

SEQ ID NO: 317449 - DNA, 201 bp, Homo sapiens
aactaagaagactgcttttttttcagagcagaaagattgattctgacctcctgaatgctccatttgcattatgaaatctcacccagtgtctagggctaaaygttaagaaggtgggatgggggtgggatttggggactgcgagtagctcagaaaggacacacagccaggaggcggcagaacctgggtttgtgttcacatctg

SEQ ID NO: 317450 - DNA, 201 bp, Homo sapiens
cagatgtgtctccggtttgacctgtcccaggaagcctgggcctggctcctcccccgcagagcttccttagaggatagaggatggattggggcaataagagrtaaaggccatagcttcctggagtcacctgagccacactggaggtttgcagagaaggccatcggtgggacagccacagggtgggggatggaagctctgata

SEQ ID NO: 317451 - DNA, 201 bp, Homo sapiens
agcagtgcctgtaagcgctttccatatgttaactaattctcacaaaattctcaagtgggcactgtcatcatcgtcattttatagataagaaaacaaaggcmcagagaggttaaacaacttgtccaaggtcacatggccagtgagtggcagagccaggatgtaacccagtttggccttacttcaaagggcagttaggggcat

SEQ ID NO: 317452 - DNA, 201 bp, Homo sapiens
tgagccatgcactgggcgtctggtggctgattaactcctccctgcaactggaggcaggctcagcgggatggtggtctgacaagtgctatcccacagggctrtagggcttgaacccagatcccatcaagttccacagcccaggtggtttgcttggttccacacagctctttctcaaggctcaggcatcagcacaaaccttag

SEQ ID NO: 317453 - DNA, 201 bp, Homo sapiens
aatgtgaaatagcaaataaaaaccaccctgacaagtcaggagagagactcggggacaaagaaacaactttatactgtagcacttttaatggtactcttttstctgctctttaaacaaggagctggcattttcttttcttcttttttgagacagggtctatcagccaggctggagtgcagtgacatgatctcagctcactgc

SEQ ID NO: 317454 - DNA, 201 bp, Homo sapiens
gaaacaactttatactgtagcacttttaatggtactcttttgtctgctctttaaacaaggagctggcattttcttttcttcttttttgagacagggtctaycagccaggctggagtgcagtgacatgatctcagctcactgcagcctcgacctcccagacttaagcgagtctcccaccgcagccttgcgagtagctaggac

SEQ ID NO: 317455 - DNA, 201 bp, Homo sapiens
gcgagtctcccaccgcagccttgcgagtagctaggaccacaggcatgcaccaccacgcctggctaattttttgtattttttgtagagatggagtctcaccrtgttgcccaggctggtcttgaactcctgagctcaagtgatctgtctgtcttggcctcccaaagtatgggattacaggtgtgaactactgtgtctggccag

SEQ ID NO: 317456 - DNA, 201 bp, Homo sapiens
ttgaccctgttgctcccaaacgcaccctaactagactccggtgaacctagagtaagtcttagaaatccttaaatccaaattatgtaccaggcagggagaartgccaccttcatctttcctgggagaacttatggtgagcaagacccaggaatgggttgagcagagttattccaacctgcccagctgggagggagcgtggga

SEQ ID NO: 317457 - DNA, 201 bp, Homo sapiens
catcactaaggtatcccgggcaggtgtctcctaagagaccacacctggcaatgagccatgaagctcctcttttctccagctcagaggttctcaaccctggmagtgtgtttcaatcacctggggatccataaaaaaattgatgcccaggccccaccttgggaaacctgattcaactcatctgtgaagggccccagcacccta

SEQ ID NO: 317458 - DNA, 201 bp, Homo sapiens
agccaccccaccctcgagggctgacactcaggcagtgactgtggcgattaattacatagacacagaggccagacacagaggccagagcactgattagacamctcagtgcgccaggcctcacgctgtgtgcatcacacgtgttatctcatttgatctcacgagagatcaaatgggatgactctcacccacctttattcccaa

SEQ ID NO: 317459 - DNA, 201 bp, Homo sapiens
ggctgacactcaggcagtgactgtggcgattaattacatagacacagaggccagacacagaggccagagcactgattagacacctcagtgcgccaggcctmacgctgtgtgcatcacacgtgttatctcatttgatctcacgagagatcaaatgggatgactctcacccacctttattcccaagaatgtgaggctcagaga

SEQ ID NO: 317460 - DNA, 201 bp, Homo sapiens
ggcggggctggaggcaaggatgggatacagacatctgaggctaactgttcatgaaagctcaggttagaacaggcccagacagaggggtcccaacaccctcytttgacccagaagaagtgaggggagcgacaggatgccttggtgcccccaaaacacactggcaaggtgtccccaactctggccctcccctgcccccagagc

SEQ ID NO: 317461 - DNA, 201 bp, Homo sapiens
gggtggcagggagaatcaggggtcctatggtgctcctcagaagggcttctagctggctgaccaccatggtccctgtggaatgcttgctggccaagccctgscccaaggggcatcagggaaggggtccacttgacatttgtggagtgaatgaatgattgcatgaggtcacgtgtgcaaagcacatggcatcagctgggaacc

SEQ ID NO: 317462 - DNA, 201 bp, Homo sapiens
ttgcatgaggtcacgtgtgcaaagcacatggcatcagctgggaacccagatgctcattctgctctcttcctcccagcttgtggctcttcatccatcccacrtgtatttagggtgtcctgtggcagatgcagagatgattaagaatgccccctgctctcaagggactttcagtctaatcggttgagagggaaactcttccct

SEQ ID NO: 317463 - DNA, 201 bp, Homo sapiens
gtttcctcacctgttgcctggggatgataataatatcagcaatggcactgaatgccactccccagcagtgcctgtaagcgctttccatatgttaactaatyctcacaaaattctcaagtgggcactgtcatcatcgtcattttatagataagaaaacaaaggcacagagaggttaaacaacttgtccaaggtcacatggcc

SEQ ID NO: 317464 - DNA, 201 bp, Homo sapiens
gcaaagcctcttttcactccccttccttcctgttcgaggctatcttgtaattatatatgtgccccaagaagtttgtgcaatgattcaggttcttgtgttcrcaagagacagagtcctactgaagccagcttcagccagagggagtcttaatataaggacaccagaaacctgagggcaggatagctgcagcagagcctggaa

SEQ ID NO: 317465 - DNA, 201 bp, Homo sapiens
gacagcctcaagcatccccaaacctgccatatgcaggatgtctggggaacagtctctggaccgtattgggagaaggagttgagaaaagagaaatttacatytgactcatggctgagtcagggcagtcttcctggaggaggggcaccaatcagacccttgaaggatgaggacaagcaagtctgttgggcctctctatctgtg

SEQ ID NO: 317466 - DNA, 201 bp, Homo sapiens
cctgggtcttggtctcctctgcccccacatcccagctcggtggagacctcgttggtcatcttgtcaacctttcggtgttcagccatggggaactttcccawcagtttctcagctcctaaaatgtctgattttgttctcccagaagtccaggccctgagtccatgaagggagaagatgggtttgggtttgcaggcgagtggg

SEQ ID NO: 317467 - DNA, 201 bp, Homo sapiens
ttctgtcaacatcggattttgtttgatgcgagagctctgacctgcctgtgcagagagctgggcccttggggggattggtgcatttctgctcttttaaataygggggatttggaaaaagggtatacggggctgccactttccagtggtggggtggggcagggccacccagattacagtgggaccatgatttcctgaacctga

SEQ ID NO: 317468 - DNA, 201 bp, Homo sapiens
ctctgcctgggcccaggaagcaggagtgcagttggagcttgctctaggttgggttaagaaggatgaggccattacagatatccccctgcctcccagctgaygccgagaccaagggccaaaaacagaaaccaggcatggctggggatcttctttcaccaggagaaaaatcatcgccaggaattatcaggcatggaggtaccc

SEQ ID NO: 317469 - DNA, 201 bp, Homo sapiens
ctgggcccaggaagcaggagtgcagttggagcttgctctaggttgggttaagaaggatgaggccattacagatatccccctgcctcccagctgatgccgaraccaagggccaaaaacagaaaccaggcatggctggggatcttctttcaccaggagaaaaatcatcgccaggaattatcaggcatggaggtacccagccct

SEQ ID NO: 317470 - DNA, 201 bp, Homo sapiens; identical to SEQ ID NO: 66607

SEQ ID NO: 317471 - DNA, 201 bp, Homo sapiens; identical to SEQ ID NO: 66609

SEQ ID NO: 317472 - DNA, 201 bp, Homo sapiens
ttagccagttaccttctcattgcacaggaaagggtgagtagctattgacaaggctgtctaaaacacaaacctaggtcctgcaggtagagtagaggtgtggkgtgggagcccagtgatgaagtgctgcttcccctttggactgcaggtgaacatgctggtgctggggaagcacctgggcatccccaagccctttgggcccat

SEQ ID NO: 317473 - DNA, 201 bp, Homo sapiens
ggactgcaggtgaacatgctggtgctggggaagcacctgggcatccccaagccctttgggcccatcatcaatggctgctgctgcctggaggagaaggtgcrgtccctgctggagccgctgggcctccactgcaccttcattgatgacttcactccataccacatgctgcatggggaggtgcactgtggcaccaatgtgtgc

SEQ ID NO: 317474 - DNA, 201 bp, Homo sapiens
agaacagactggacccattcccactgggctttcccataacatgtggagatgcttcctggagtctgttgggttgtggctgctcatgtggctgaggggcccgygaagctggtcacctttgggattcatcacaggtgggcttggagagcagtccccaggctggttcagtgagacatctctggggtcttacacgccacttcattt

SEQ ID NO: 317475 - DNA, 201 bp, Homo sapiens
attgcaccactgcactccagcctgggcgacagagcaagactctgtctcaaaaaaaaaaaaaaaaaaaaaaaaaaaaggcttccttgggagatggaaggcgrgtgcctcaggagcgtggctgagggtgttcccgagggtatgagaggctgctcttcctacctgggtttgtcttcctgtgtctctttccgactccctgtctct

SEQ ID NO: 317476 - DNA, 201 bp, Homo sapiens
tctgcaagttacagacacataccatgtgtccttggaaagccttatcatccccttggggcctctgtctgccatctgtaaaatgggataatcataacccctgyctcctatcattgctgtggagtgccataggagccagtgttgctccttctcttgcttcccaagaccccctggagaaggagttgtcccagttctgctgagttg

SEQ ID NO: 317477 - DNA, 201 bp, Homo sapiens
gcatgcaaagtaatcgtgattaatatgttaagggttctagtggaaaaggtagacaatatgtatgaacagatggggaatttcaacagagaagaaaatcaataagaaagagtcaaatggaaatgctagacataaaaaccatagtaataagagattttaaaaatgcttttgaaggtttcaccagtagacttgacacagctgagt

SEQ ID NO: 317478 - DNA, 201 bp, Homo sapiens
catgcaaagtaatcgtgattaatatgttaagggttctagtggaaaaggtagacaatatgtatgaacagatggggaatttcaacagagaagaaaatcaataagaaagagtcaaatggaaatgctagacataaaaaccatagtaataagagattttaaaaatgcttttgaaggtttcaccagtagacttgacacagctgagta

SEQ ID NO: 317479 - DNA, 201 bp, Homo sapiens
atgcaaagtaatcgtgattaatatgttaagggttctagtggaaaaggtagacaatatgtatgaacagatggggaatttcaacagagaagaaaatcaataagaaagagtcaaatggaaatgctagacataaaaaccatagtaataagagattttaaaaatgcttttgaaggtttcaccagtagacttgacacagctgagtaa

SEQ ID NO: 317480 - DNA, 201 bp, Homo sapiens
tgcaaagtaatcgtgattaatatgttaagggttctagtggaaaaggtagacaatatgtatgaacagatggggaatttcaacagagaagaaaatcaataagaaagagtcaaatggaaatgctagacataaaaaccatagtaataagagattttaaaaatgcttttgaaggtttcaccagtagacttgacacagctgagtaaa

SEQ ID NO: 317481 - DNA, 201 bp, Homo sapiens
gtatgaacagatggggaatttcaacagagaagaaaatcaataagaaagagtcaaatggaaatgctagacataaaaaccatagtaataagagattttaaaartgcttttgaaggtttcaccagtagacttgacacagctgagtaaagaatcagtgaacttgaagataagtgaataaaagttacccaaactgaaacccaaaga

SEQ ID NO: 317482 - DNA, 201 bp, Homo sapiens
catgctggcagctcgaggtggcctggagaggaaggactttgtccaggtgaggctccaggtacttcccctgttctctaggaaatgggaagctagatcctccygtacctgatgcaggttctcctcccagcagctgcccctctcattctcctaacacacagctttcatgacaggcatgagcactggactggaagtcagcagccc

SEQ ID NO: 317483 - DNA, 201 bp, Homo sapiens
tgtatttttagtagagacagggtttcaccatgttggccaggctcgacctcaagtgatccgcccgcctcggcttcccaaagtgcctgacctcaagtgatccmtccgcctcggcttcccaaagtgctgggattaaaggagtgagtcaccacgcccggccgactgtgtatatgtttgtgtggggtccaggcttgactcgcagga

SEQ ID NO: 317484 - DNA, 201 bp, Homo sapiens
ggcgcctctgtgctggcagacttggctctaagggccccagagctccaggtgttctcagatgcacggctgtgtaagccctgcagtcagaaggtcctggaagrgtcaggtcccatctgcatggctgcagaggggcccagcgcacacagcagcctagagggcagctgagtctgttctctaagacacctcgaagagggggcaacc

SEQ ID NO: 317485 - DNA, 201 bp, Homo sapiens
gagactcgcctggattggaggtcctggtggggcttgtggcgcctctgtgctggcagacttggctctaagggccccagagctccaggtgttctcagatgcayggctgtgtaagccctgcagtcagaaggtcctggaagggtcaggtcccatctgcatggctgcagaggggcccagcgcacacagcagcctagagggcagctg

SEQ ID NO: 317486 - DNA, 201 bp, Homo sapiens
tgccatgttgcccgggctggtcttgaactcctgggctcaagtgatctgcctgcctgagcctcccaaagtgttgggattacaggtgagagccaccgtgtctsgcccagtttcattcttaatgggcaaaatcaaaatcccaggatgacctctggtggggagggccatcctcagggcctctgtcattggcccagtggtaagaac

SEQ ID NO: 317487 - DNA, 201 bp, Homo sapiens
tgggcccagagagactaagtgatttagtcaagctcagctggccgatgtgtgacccagcctggtctaaaacctaattcttgactctggtcccagcaccaccygagccctcggcttgcagcccctcccttccccaacctcagatgtagcttgttcacctgtgctaagcccttgttcagaccgtggtcctggggaccctcctgg

SEQ ID NO: 317488 - DNA, 201 bp, Homo sapiens
aagtgatttagtcaagctcagctggccgatgtgtgacccagcctggtctaaaacctaattcttgactctggtcccagcaccacctgagccctcggcttgcrgcccctcccttccccaacctcagatgtagcttgttcacctgtgctaagcccttgttcagaccgtggtcctggggaccctcctgggcaggggtgcttcagt

SEQ ID NO: 317489 - DNA, 201 bp, Homo sapiens
tctccttcggcaccgaccatggctctctgccctgcccaggtcagtgcctgagggcacagaaatgtttgaggtctatgggacgcctggcgtggacatctacrtctctcccaacatggagaggggccgggagcgtgcagacaccaggcggtggcgctttgacgcgactttggagatcatcgtggtcatgaactcccccagcaa

SEQ ID NO: 317490 - DNA, 201 bp, Homo sapiens
gtgtggggtccaggcttgactcgcaggagcttactgtgaggatctgaggggactgggtggccaaggaaagcttcctggaggaagcagggcttgagccaaarctcaaacatctgagcaaaatatatctccttcggcaccgaccatggctctctgccctgcccaggtcagtgcctgagggcacagaaatgtttgaggtctatg

SEQ ID NO: 317491 - DNA, 201 bp, Homo sapiens
agaaagagcaaggttccttgggccccctcccctccttaccagatccccgagagctatcttttggggcgggagctcttggcttctgctggtattactctgcrcccaactctccacaggttcagatttcctaccactccagccatgagcctctgcccctggcctatgcggtgctctacctcacctgtgttggtaagttggggg

SEQ ID NO: 317492 - DNA, 201 bp, Homo sapiens
gcagtgggtctgggggcccagtgggtatggcggcatcttgctggtgaactgtgaccgtgatgatccgagctgtgatgtccaggacaattgtgaccagcacrtgcactgcctgcaaggtgaggccggggcagcctgagtccctgggtgtccagggtcactgctcagttaccccatgggagttccaacccacaggcgagactc

SEQ ID NO: 317493 - DNA, 201 bp, Homo sapiens
gccacgggagggccctcctgttccagggggttgttggtgggtaacagtgccgtgtccctccttgcggcttgcctgccccttacccaaattaagacacatcrtggcttgagagggggagggcaagttttaaagcaggggtgtgtccccaaattcagggcttctcactcctgcccctgcacaccttgcttcaccagacaccac

SEQ ID NO: 317494 - DNA, 201 bp, Homo sapiens
caaacaaatgaaaaaacataacagatctaagagctctgtgacagtatcaaacagtctaaattcaatgaaattcctatagaaattccaacgtggcttttttktttgtttgtttgtttgttttaaggagttttgctcttgttgcccaggctggagtgcaatggcacaatctcagctcaccgcaacctccgcctcctgggttca

SEQ ID NO: 317495 - DNA, 201 bp, Homo sapiens
tgggagtttgctttggctcacacacttgagaagcaattagcaaagaagttgaaaatgctttatctgtaggaggcattttttagaagcagaacttctaggtyatagagaatctatattttttaacttgatagatattgccaaactgctctccaaaaacactgtatcagtatacatgtctgccaactgcatatatgctttgcc

SEQ ID NO: 317496 - DNA, 201 bp, Homo sapiens
ctgcagcccaaatacatacacacatgatcattggaaaataacatagacagaaaagtacataaagctttattttacatacatatgtgcataaagcatatgtacacacacacacacacacacacacacacacacgaataattacaaagcaaatcaaagaatagctcagaaaataaacccaagagtagcccaagaaatgaaaca

SEQ ID NO: 317497 - DNA, 201 bp, Homo sapiens
tgcagcccaaatacatacacacatgatcattggaaaataacatagacagaaaagtacataaagctttattttacatacatatgtgcataaagcatatgtacacacacacacacacacacacacacacacacgaataattacaaagcaaatcaaagaatagctcagaaaataaacccaagagtagcccaagaaatgaaacac

SEQ ID NO: 317498 - DNA, 201 bp, Homo sapiens
cctccttctcctacaggtaaccactatcttgtgataagtattttcttgcttctcctcatggttttatctcttgaacgcaatacccaaataacatggtctcrttttatcatctgattttctgtggatgcagtcatatcatgtatgttcttttgcgttgggcgtcttttgccctatgctatgtttgtgagatttatccacttg

SEQ ID NO: 317499 - DNA, 201 bp, Homo sapiens
aggtctgtgagtggcctggactcctttgggaacctggaggtcagccctccagtggtggccaatgggaaagagtaccccctggggaggatcctcattggggrcaacctgcctgggtgagagagagacagggaatggagttcctggggtggaggctgagggttgggggtggtgatgatggtggagcaggggccattgcactcc

SEQ ID NO: 317500 - DNA, 201 bp, Homo sapiens
atgtgtgcttcccaactttattctacatgttctccagcgtgtgtccatatgctgctttccaaccggcttctttcattaagtaataatcccacacacctttyctggtatttattgagctctacttcattcttttccactgctgtataatattcctaagcatagaggtgctgtgacttacacagttctctgaacatcatagtg

SEQ ID NO: 317501 - DNA, 201 bp, Homo sapiens
gatcctcattgggggcaacctgcctgggtgagagagagacagggaatggagttcctggggtggaggctgagggttgggggtggtgatgatggtggagcagrggccattgcactccttgaagagagccagaagcaaggaatgatgaaattatactcccggatgtggtggggttggtgggtgttcaccagacacagtccacac

SEQ ID NO: 317502 - DNA, 201 bp, Homo sapiens
gctgtgacttacacagttctctgaacatcatagtggtttgcagtgttttgattttataacaatgcaggttgcttgaggtcaggggctttgttcaagtccakaaccgtgccccatgggtgcactgtagttgcacagtaaatatttgatgaattaatgaatatcgagcactcttgtacagaaatattatgtgactttgtacct

SEQ ID NO: 317503 - DNA, 201 bp, Homo sapiens
actcatgctccctgggcccacagggagtcacagccaccccgtccctccccttccaggtcctgaggatgtgtgtgaggcctataggcatgtgctgggccaarataaggtgtcctatgaggtaccccgcttgcatggggatgaggagcgcttcttcgtggaaggcctgtccttccctgatgccggcttcacaggactcatctc

SEQ ID NO: 317504 - DNA, 201 bp, Homo sapiens
ggagtgccatggcatgatcacagctcactggcagcctggaactcctgggttcaagtgatccttctgcctcagtctcccgagtagctgagaccacaggtgcrgccaccaggctcagctaattttttgtagagatggggtcttgccatgttgcccagggttgtctcaaactcctggcctcaagcaatcctcccgcctcaccct

SEQ ID NO: 317505 - DNA, 201 bp, Homo sapiens
gatgtgaagttcattcacactgggccatcttttcctccagaaccagaggggtcaggactgacctgggcacatttatggatccaactcaggccactgtgagkgcttctctgtgtccacctgccttggcccagtactcacagggacacccccaaggtcatgtccatgttctcgttcacctccggcctctgtcttgctgtgtga

SEQ ID NO: 317506 - DNA, 201 bp, Homo sapiens
ctcttgcttcccaagaccccctggagaaggagttgtcccagttctgctgagttgggtctcagtttccccacatgtaggctgagggttgactaggggatctytgccactttgaatgaaagagagaaagcagggacaggggagggacaccggtgcctgggaagacccccttcctaggtgacagcatttccccaaggcgctttg

SEQ ID NO: 317507 - DNA, 201 bp, Homo sapiens
cccagcctggtctaaaacctaattcttgactctggtcccagcaccacctgagccctcggcttgcagcccctcccttccccaacctcagatgtagcttgttyacctgtgctaagcccttgttcagaccgtggtcctggggaccctcctgggcaggggtgcttcagtcttcactggggatcccccagcatctcacacagagcc

SEQ ID NO: 317508 - DNA, 201 bp, Homo sapiens
tcttcactggggatcccccagcatctcacacagagcctggcacatggagaggcaggggcgctgggctgaaacaccctacacccaggggctggagcctgggractgagtggggttttcataccagaaggaccatcaagggcgctcagcccttgcccatggacactggaggcccaaggaacagctttggggttgagggagttc

SEQ ID NO: 317509 - DNA, 201 bp, Homo sapiens
aaggaggtgatttagtcatttgctccacaataacttgttgagtacctactatgtctggagctgttttgcaggtgctggggattcagtggtgaataagaagmccctggaggcgagcaggacgtgctctgggtctgagtcactttcatctctgtccacgaggctgggtgaggagccttcctcactgtgctctgtagagccctg

SEQ ID NO: 317510 - DNA, 201 bp, Homo sapiens
tatttatttatttatttatttattgagatggagtcatgctctgtctcccaggctggagtgcaggggcggttcaccgcaacctccgcctcccaggttcaagygattctcctacctcagcctcctgagtagctgcaattacaggtgcatgcctccacgcccagctaatttttgtatttttagtagagacagggtttcgccatg

SEQ ID NO: 317511 - DNA, 201 bp, Homo sapiens; identical to SEQ ID NO: 66633

SEQ ID NO: 317512 - DNA, 201 bp, Homo sapiens
tcctggccaagctgtgcgctgagcagtggagatgcagagatgctgttggattcacagtgtgtactcagccatggggtcgagttcatcctgtttcagcagcrttggggcgaaccagccagctgctaccgtgactttgccctctttctgctgctttcagtcctgcctggttcagtggctgtgtctactttgatgctccaagta

SEQ ID NO: 317513 - DNA, 201 bp, Homo sapiens
ggacagacagacggacacctcggcaccattgttgtcccctttcccacagacaactttggatgaaggcaggcagcactggtccctcagctaagcacatctgkgtattccaactcaaatcactcagaatgaggccaggtgtggtggctgacacctgtaatcccagcagtttgggaggccaaggaggatggatcacctgaggtc

SEQ ID NO: 317514 - DNA, 201 bp, Homo sapiens
cacccaaatcactcagaatgaagagaattggagaaaaagtcacactcagcaccaggctttggccccacctgcctctccagcaccattgtaggccactctcrctgtcccttacccagccccacctccactggcctccttcctgttcttcaaacttgcctaacgtttccccacctcacggtctttgcatatgccgttccctct

SEQ ID NO: 317515 - DNA, 201 bp, Homo sapiens
tgatcccacagcctgactctgaattaatgaggcaaattctttgcttcaaagccaaagcaagcaaacaaaaaacaaacacaagatatccaacccacgaaacrctctatgttcacgccagactcccatgcatgcaccctttgagtgctcctttttgggacccatccaccaccccccagttgcctcattaaaggcagagcctgg

SEQ ID NO: 317516 - DNA, 201 bp, Homo sapiens
gcaatcaactggagcaggctagccagccagtctctgggacaggagctcaggtggcctcagccctctgggccccaaatgcctagagggtatttggcaacacycagaacacccttgcttcctctgcgtgagctgggctggtgattctgcctttcagcaggaagagaggcctcttcctccagggtttctggcctggatcctgag

SEQ ID NO: 317517 - DNA, 201 bp, Homo sapiens
tgagtcactttcatctctgtccacgaggctgggtgaggagccttcctcactgtgctctgtagagccctggcacaaggcagggctgccccagggtggggaaygtcagagcttccaggctgccttcctccagaccccagagcctggactgggcctcagcgacccctccccagtcaacccgtcttctccctccagctgcctctg

SEQ ID NO: 317518 - DNA, 201 bp, Homo sapiens
ctgattcaggggcttctgaggggaaggcgaggcccgcgcattgcacttgggatatggccatgtgttcatggagacctggacaaggaaagctttgatgggcrggagaagcgggttggtctgggttttagagagaagtggagagaggaactggaagtgtgattgttaaatctgtggaatcaggccaggcgcagtagctcacac

SEQ ID NO: 317519 - DNA, 201 bp, Homo sapiens
gagtaaaaggcaaaaatccactcctgagatcaaataattaattgatgtggaagcaagatgtgtaaactgcactgggttaaagaagtgatgggggccgggcrtggtggctcatgcctgtaatcccagcactttgggaggccgaggaggatggatcatgaggtcaagagattgagccatcctggccaacatggtgaaatcccg

SEQ ID NO: 317520 - DNA, 201 bp, Homo sapiens
gagtagctggagagagaagaccccagcagccctgggaagtgccagtctcatggctgtgggttctttgccatgtacaagtgcaaattccccaggaacacacsacagataaattattatggggcaaaccaggccatccgtctccctgtcttcatcgaggcaacagaagcttacagagagtctgtgacttgctcaaggtcacac

SEQ ID NO: 317521 - DNA, 201 bp, Homo sapiens
accaccaggagtaggagggaagggcactcctgcaggctcatggcctctcgtgcactgggcaaacagggggcaataagctccgcttctgagccccttctctragatcaaacatcccataggaatgtgcccttgactgcaagggtgagagtgagtggatggtttcatgcccccatcctggcgtcgggcaccaagacccaggca

SEQ ID NO: 317522 - DNA, 201 bp, Homo sapiens
aatgacaattccttgatttctcaaatgttaggggataaaataaaggcattctagactcctgcatccctttctcagctgaaggagaaccctgacctttttgycaagccccttgtccttcagggacttccctgtagcccttgctgccgataacacccctttaaccctgccatgacagcaatgacagccggcagatgcaccagg

SEQ ID NO: 317523 - DNA, 201 bp, Homo sapiens
ttcctgaagtcagtgactactctggccatgaaagccaagtgcaagctgaccatctgccctgaggaggagaacatggatgaccagtggatgcaggtatgtgycctgcggggcaggcagggtgactgtccctgagggccaagagacacttgggggacccgggctcctggggttcagcctggtgcctcaccggccactcttcct

SEQ ID NO: 317524 - DNA, 201 bp, Homo sapiens
ccaaccccggaccctcaccaacctctcctcttacttgatgggatttcagaaatctccttgtgcgcagacatcacccgcaccggcaaagtgaagccaaccasagctgtgaaagatcaggtaccactcacccaaacgctcctttcctacttctactggattctccccgggcgcccccttgtggtgatggggcaaatgctggtc

SEQ ID NO: 317525 - DNA, 201 bp, Homo sapiens
ggaaatgtcgggatggtctcccagggccacatggtggaggcaggagaccaagaagttggggagaaaaggaaaaagaaaatcacctgacatcatctgaggcrcccccaactcctctgagaatgggtgtgaaggaaatgacaggggctgaagctagcccagggcctctcccagcatgcccaggctagccctctacccagcgtc

SEQ ID NO: 317526 - DNA, 201 bp, Homo sapiens
accagcctgggcaacatagtgagaccccatctctacaggaaagaacaactttaaaaattagccaggttgtgatagcatgcacctgtggtcccagctactcrggcggctgagacgggaccgtgatcctttgagcccaggaggtcaaaactgcagtgaagaagtaaatttgaagatcacagacctccttaagacccactcatc

SEQ ID NO: 317527 - DNA, 201 bp, Homo sapiens
cgctctgtcgcccaagctgccaggctggagtgcagtggcacaatcacagctcactgcagccttgacctcctgggctcaagtgatcctcctccctcagcctscaaagtagctgggaccacaggcacgcaccaccatgccaagctaatttttaaaaatactttttttagagatggggtctcaccatgttgcccaggctggtct

SEQ ID NO: 317528 - DNA, 201 bp, Homo sapiens
gcggtggactgaataatggcccctctacatcctagtccccccgaacctgatgtttccttatatggtaaaagggactttgctgaatgtaattatattagggwtcttgtgatggggtgattatcctggtttatcctggaatgcgggagggcctgtgatgatggaagcagagactggagatctttgaaggtggaagaaggggct

SEQ ID NO: 317529 - DNA, 201 bp, Homo sapiens
attacaggcacacctggctcattcttgtatttttagtagagacggggtttcgccatgttggccaagctggtctcgagctcctgacctcaggtgatccactygcctaggcctcccaaagtgctgggattacaggcatgagccaccacacccagcaatttttatttttgaggtagagtctcgctctgtcgcccaagctgccag

SEQ ID NO: 317530 - DNA, 201 bp, Homo sapiens
cgaagggatcaagagtaagtcggccctgccttgttctcctgtctgtgcaccttcctgcttcccatagtccgctgttgcctggagggaatcatccaggcaayagggtagcatctgagcacctactgtgcgccaggcactgtgccaagtgctagggagactgcatgaacagggcagaacagcttgctgccctgtgggctcaca

SEQ ID NO: 317531 - DNA, 201 bp, Homo sapiens
ataaattattatggggcaaaccaggccatccgtctccctgtcttcatcgaggcaacagaagcttacagagagtctgtgacttgctcaaggtcacacagcamgtgtgccctggaagtaaggttagcccctgggcctcctggttcacagcacagtttgttaccccacatctcttagctaagcctccctcagtgggtgcgtaat

SEQ ID NO: 317532 - DNA, 201 bp, Homo sapiens
caggctgccttcctccagaccccagagcctggactgggcctcagcgacccctccccagtcaacccgtcttctccctccagctgcctctggccgcttgtgcrtgagggtgggtgagccctttgggatgagtctcatcagagcctctgcacgcttagtgcttcctgcctgcttaattttgccactttcaatccaaccagaggg

SEQ ID NO: 317533 - DNA, 201 bp, Homo sapiens
cacctactgtgcgccaggcactgtgccaagtgctagggagactgcatgaacagggcagaacagcttgctgccctgtgggctcacaggccagggggaagtgrgtcaaaagaacagctccaacacaggggctttgaggggtgtctgagtggatggagctcagggaaggcttcttggaggaggcagaggccaagcagtagcatg

SEQ ID NO: 317534 - DNA, 201 bp, Homo sapiens; identical to SEQ ID NO: 66639

SEQ ID NO: 317535 - DNA, 201 bp, Homo sapiens
aagtgccagtctcatggctgtgggttctttgccatgtacaagtgcaaattccccaggaacacaccacagataaattattatggggcaaaccaggccatccrtctccctgtcttcatcgaggcaacagaagcttacagagagtctgtgacttgctcaaggtcacacagcaagtgtgccctggaagtaaggttagcccctggg

SEQ ID NO: 317536 - DNA, 201 bp, Homo sapiens
agcaagtgtgccctggaagtaaggttagcccctgggcctcctggttcacagcacagtttgttaccccacatctcttagctaagcctccctcagtgggtgcrtaatagcgtgggtggggatggcgaaacggggctctgtggcgtggcagagactgaggtaggaagcctggacctgctgctggctagcaaggaggccttgggc

SEQ ID NO: 317537 - DNA, 201 bp, Homo sapiens
atttctcaaatgttaggggataaaataaaggcattctagactcctgcatccctttctcagctgaaggagaaccctgacctttttgccaagccccttgtccytcagggacttccctgtagcccttgctgccgataacacccctttaaccctgccatgacagcaatgacagccggcagatgcaccaggccctgcaggacttcc

SEQ ID NO: 317538 - DNA, 201 bp, Homo sapiens; identical to SEQ ID NO: 66662

SEQ ID NO: 317539 - DNA, 201 bp, Homo sapiens; identical to SEQ ID NO: 66663

SEQ ID NO: 317540 - DNA, 201 bp, Homo sapiens
gaggcttaggtgggaggattgcttgagtccaggagttcaagaccagcctgagcaacatggagaaactctgtctctacaaaaaacacaaaaattagccaggygtggtggcatctgctgaggcaggatgattgcttgagcccaggaggtggacactgcagtgagctgagatggcaccactgaactctagcctgggtgaagagt

SEQ ID NO: 317541 - DNA, 201 bp, Homo sapiens
aggcaaacatctggttcctgttagcatggtgccttttgaaatgtaagatggagtctttttctaagatggagtcacttatgccaagggtgctctatacaggyttgcatggccctgtaccacttccagagcaccttctggtatctcacaacaattccagaagtcagagtctatcgtcgcttctgccagggctctggcttcaaa

SEQ ID NO: 317542 - DNA, 201 bp, Homo sapiens
aggttgcagtgagccaagatcatgctattgcactccagcctgggtaacagagtgagactttgtctcgggaaaaaaaaaaaaaaagacagtcatcttgagcwagtgaagacctgctctttttatagccagagtcctctggtgaggactgatagtaatagagtatgcctgcttatgtccctatctggttgggtgcagtctctg

SEQ ID NO: 317543 - DNA, 201 bp, Homo sapiens
gctcagcccgagaggccagtggggcacccgggcggtcccagagggcttggctcctctctgtaaccgtttgtagctttgtcctgagtggtacaaggtcagamgtgaccaggtccatgcacgttggtgtctttccacaaggtcaggcttctactgatgctatttccatcataaaatccacaagccacacggagttccccaggg

SEQ ID NO: 317544 - DNA, 201 bp, Homo sapiens
ctctctcactcccttcgaggctgcctgctgctcctggcctggcctgggagacgtttcccctgggcagctgaaccactccaccccagctggtctgcaggagrgtatctgatcccaaactgctccaaccagctggtgatggctgagtgcaaaaccacaagcacatgctgtgccctggctggctggtgtagacagactggcctg

SEQ ID NO: 317545 - DNA, 201 bp, Homo sapiens
ctggtatctcacaacaattccagaagtcagagtctatcgtcgcttctgccagggctctggcttcaaaccccatgccgtaactaccatgctgccttcccacstagcaccttccctggggctccggggtgatgcaggggatggagggatggatagggaatcaaccaacaaacacgacaccctcaagtcaccttatgcaccata

SEQ ID NO: 317546 - DNA, 201 bp, Homo sapiens
agctggtctgcaggagagtatctgatcccaaactgctccaaccagctggtgatggctgagtgcaaaaccacaagcacatgctgtgccctggctggctggtrtagacagactggcctgctgtggtatgtggtgtgttgggaattcgtatgttccgttcacactgaccctggcaatctccccgaggcccaggtcagtgccacc

SEQ ID NO: 317547 - DNA, 201 bp, Homo sapiens
cttggccaaaaggaattaaagtattgaccccaagcgttttgtttccctccagtttggccaagccaggcttcccagtgcgggaatgaaagtggacgcccgcrgctatggtagtcagcaacgctgagggctgactgtgtgccttcactgttcaaggtccccagagggagtctgagcatgagaccagactctctcccaggagct

SEQ ID NO: 317548 - DNA, 201 bp, Homo sapiens
gtctgcaggagagtatctgatcccaaactgctccaaccagctggtgatggctgagtgcaaaaccacaagcacatgctgtgccctggctggctggtgtagayagactggcctgctgtggtatgtggtgtgttgggaattcgtatgttccgttcacactgaccctggcaatctccccgaggcccaggtcagtgccacccgggg

SEQ ID NO: 317549 - DNA, 201 bp, Homo sapiens
gcagggacagccatggcttgagtttagcagatgtagaatgacgtccttgtcaaggaggactggggggagtccacaagggaaccccagattttccaccttgycccatccacctttgtcctcagcacaaggtctggtacacagtgaggggtgagtgagtgtgtggtgattgattgattgattgaatgaacgaatgaaggaatg

SEQ ID NO: 317550 - DNA, 201 bp, Homo sapiens
cacaagggaaccccagattttccaccttgtcccatccacctttgtcctcagcacaaggtctggtacacagtgaggggtgagtgagtgtgtggtgattgatwgattgattgaatgaacgaatgaaggaatgagtgtgtgttttaagggaaactatgcctgtcacacaggaggtgctatttaagtgtttgttgagtgaatgaa

SEQ ID NO: 317551 - DNA, 201 bp, Homo sapiens
ttaagtgtttgttgagtgaatgaaagaaagttgagagcaggaagggtgtcattcctctttgcatcccctataatgtgtgggacgtacttggcactcagctmtcatgaaatctttttgcaacaagagcaggcggaggataaaagggaaagagagaaaaattgagagggatatggagagaaagagaacatactcaaaaacatt

SEQ ID NO: 317552 - DNA, 201 bp, Homo sapiens
aaatgaaagcttttcattcccaaactcatatcagagcaggccctgagacctctgccataggccgggcacgactctgaccactttggaatgattaactcatytgatcttccaacacaaacctttataggtaggaaaaccaaggcacggggaacttaagcaatttgcccaaggtcacagcactgacacgtagcagactcgggg

SEQ ID NO: 317553 - DNA, 201 bp, Homo sapiens
taacgggaagggctttttataaagcccttttgcccacatagcctgaacctggtgacggccctctgaaataagggttattgaaagcatcttcttgttggcaratctgttttataggtgaagcaatgggcaaaggccctcggggggcaagtgacctccccaagctcacacagcggtcagggaagagctgaggccagtgctgtc

SEQ ID NO: 317554 - DNA, 201 bp, Homo sapiens
tgaacctggtgacggccctctgaaataagggttattgaaagcatcttcttgttggcagatctgttttataggtgaagcaatgggcaaaggccctcgggggkcaagtgacctccccaagctcacacagcggtcagggaagagctgaggccagtgctgtctcctgatgcctcctacaggccctggtttccatgcctcaccctg

SEQ ID NO: 317555 - DNA, 201 bp, Homo sapiens
aataagggttattgaaagcatcttcttgttggcagatctgttttataggtgaagcaatgggcaaaggccctcggggggcaagtgacctccccaagctcacrcagcggtcagggaagagctgaggccagtgctgtctcctgatgcctcctacaggccctggtttccatgcctcaccctgctgcccaacctaaacgctcttag

SEQ ID NO: 317556 - DNA, 201 bp, Homo sapiens
gcttgggagttagaccacgcaaaattaaacgtaagtgtcaccacttccttctgcgtaaccttgagtggttacctaactcctctgagactcggtttcctcayctggaaaacggggagagatgttaaggttgctgtgaggattagagatgatgcatgttaggacctggcataggtcagggctacaccagggcatggcatgttg

SEQ ID NO: 317557 - DNA, 201 bp, Homo sapiens
atccgtaaactgtcatgacgctggtgggagtgtcttttagcatgctaatgtattataattagtgtataacgagcagtgaggacgaccagaagtcactctcrtcatcgtcttggttttggtggggtttggccagcttctttactgtcacctgttttatcagcaaggtctttatgacctgtgtcttgtgctgacctcctatct

SEQ ID NO: 317558 - DNA, 201 bp, Homo sapiens
tactgcctgagccccagcagccagagaacagcaggaaatgtcgggatggtctcccagggccacatggtggaggcaggagaccaagaagttggggagaaaargaaaaagaaaatcacctgacatcatctgaggcacccccaactcctctgagaatgggtgtgaaggaaatgacaggggctgaagctagcccagggcctctcc

SEQ ID NO: 317559 - DNA, 201 bp, Homo sapiens
aggggttgagcctctgggccacagaccgcaggtgctgactcatggcctctgctgggcgatataaaggaaccagcccaggggcttcctacagccagagggaygagctagcccgacgatggcccaggggacattgatccgtgtgaccccagagcagcccacccatgccgtgtgtgtgctgggcaccttgactcagcttgacat

SEQ ID NO: 317560 - DNA, 201 bp, Homo sapiens
cattgatccgtgtgaccccagagcagcccacccatgccgtgtgtgtgctgggcaccttgactcagcttgacatctgcaggtaagaggggggccttctgggsttttggaggcaggtcaggagatgctggatgacccagttctactgacacaggagcatgtgtttggcccaggctctaggctccagcctctgcagccactgcc

SEQ ID NO: 317561 - DNA, 201 bp, Homo sapiens
gcctcaccctgctgcccaacctaaacgctcttaggtcaaacctggagcctgaaatccttcgaaatgaaagcttttcattcccaaactcatatcagagcagsccctgagacctctgccataggccgggcacgactctgaccactttggaatgattaactcatctgatcttccaacacaaacctttataggtaggaaaaccaa

SEQ ID NO: 317562 - DNA, 201 bp, Homo sapiens
ttcgcatctttcagtccaaacaagctgacacctaatattaaccatcacaaggagaaatgctgggagagccatggctggcccagcccctcctcactgcatcytctgctttcccatgtgtcttgtccacagctctgcccctgaggactgcacgtccttcagcatcaacgcctccccaggggtggtcgtggatattgcccacgg

SEQ ID NO: 317563 - DNA, 201 bp, Homo sapiens
actctgaccactttggaatgattaactcatctgatcttccaacacaaacctttataggtaggaaaaccaaggcacggggaacttaagcaatttgcccaagrtcacagcactgacacgtagcagactcggggtttgaaccccggacgtcccaacaccggagcaggtttagaggcatgaggatggtggggaatgcaggatctc

SEQ ID NO: 317564 - DNA, 201 bp, Homo sapiens
aagtgcctcaccttttactactttcctttacaagtaccttgaccaacttagttcctggatttctcgtgtagatttaaaaatcaacttgtcaggttccatargaaaccctaaaattccattgaatatataaatccattggagagaattcatacctttacggcaacaaggcttcctaaccatatacatagtatttctatttat

SEQ ID NO: 317565 - DNA, 201 bp, Homo sapiens
gatttctcgtgtagatttaaaaatcaacttgtcaggttccataagaaaccctaaaattccattgaatatataaatccattggagagaattcatacctttayggcaacaaggcttcctaaccatatacatagtatttctatttatttggatcttctctaatggctttcaataaagtttgaatattttcttcataaaaatctt

SEQ ID NO: 317566 - DNA, 201 bp, Homo sapiens
cgggctgagatgcctctgtggctgagagctccacctcagatctgagtatgttgtgtggcatcaggagagggcggacctgtttcttcctctctcgatgggayctctttggagataagataatttagcgttaatgcaaggcaaaatgttccagtgaacaagtttcatggttcaactttataataattataagtaaacctgtta

SEQ ID NO: 317567 - DNA, 201 bp, Homo sapiens
gtagatttaaaaatcaacttgtcaggttccataagaaaccctaaaattccattgaatatataaatccattggagagaattcatacctttacggcaacaagscttcctaaccatatacatagtatttctatttatttggatcttctctaatggctttcaataaagtttgaatattttcttcataaaaatcttacacattttg

SEQ ID NO: 317568 - DNA, 201 bp, Homo sapiens
gcagagctcacagacatgggccaggccccgggctgagatgcctctgtggctgagagctccacctcagatctgagtatgttgtgtggcatcaggagagggckgacctgtttcttcctctctcgatgggatctctttggagataagataatttagcgttaatgcaaggcaaaatgttccagtgaacaagtttcatggttcaac

SEQ ID NO: 317569 - DNA, 201 bp, Homo sapiens
ttgtcaggttccataagaaaccctaaaattccattgaatatataaatccattggagagaattcatacctttacggcaacaaggcttcctaaccatatacakagtatttctatttatttggatcttctctaatggctttcaataaagtttgaatattttcttcataaaaatcttacacattttgctagatttatcctaggta

SEQ ID NO: 317570 - DNA, 201 bp, Homo sapiens
aagggaaaagagtgggaattgggccggatgtggtggctcacgcctgtaatcccagcactttaggagaccaaggagggtggatcacctgaggtcaggagttygaaaccagcctggacaacatggtgaaaccccatctctactaaaaatacaaaaattagccgggcgtggtggcagacgcttgtaatcccagctactcaggaa

SEQ ID NO: 317571 - DNA, 201 bp, Homo sapiens
ggaggcagaggccaagcagtagcatgcaagtaggggttggctgggcaaaaggggcagggaaatgagaggaagagagataccacaggcagagggacgggggyggggcggctcagaggcaggagaaagcacgatgtgtgtgaggacctcggggaggttcggtatagctggagcacagatgaaatattactctctcagcagagc

SEQ ID NO: 317572 - DNA, 201 bp, Homo sapiens
cctaccacgttcctgatttttttttttttaaacagagtctcactctgttacccaggctggagtgcaatggcacaatcttgactcactgcaacctctgcctsccaggttcaaacgattctcatgcctcagcctccccagtagctgagattacagacgtgcactacccagttaatttttgtatttttagtagagacagggttt

SEQ ID NO: 317573 - DNA, 201 bp, Homo sapiens
cttggaggaggcagaggccaagcagtagcatgcaagtaggggttggctgggcaaaaggggcagggaaatgagaggaagagagataccacaggcagagggaygggggcggggcggctcagaggcaggagaaagcacgatgtgtgtgaggacctcggggaggttcggtatagctggagcacagatgaaatattactctctcag

SEQ ID NO: 317574 - DNA, 201 bp, Homo sapiens
ttaatgtttgtcacactgtcattgacttgctttatggccaattacatagtcacttttttaaatgacccatgacccgtgtgtgctttgcttgggaaaatgtmtatttgctacttgtgggatacacaattctatatatatcgactaaatcaactttgttaattatgttagcaaaatctgtatcattacttaatttttatctgc

SEQ ID NO: 317575 - DNA, 201 bp, Homo sapiens
ggggctttgaggggtgtctgagtggatggagctcagggaaggcttcttggaggaggcagaggccaagcagtagcatgcaagtaggggttggctgggcaaamggggcagggaaatgagaggaagagagataccacaggcagagggacgggggcggggcggctcagaggcaggagaaagcacgatgtgtgtgaggacctcggg

SEQ ID NO: 317576 - DNA, 201 bp, Homo sapiens
aggaaagaaagaaagaaaatgggaggcagatttgcatgacccagttcctagcttgactttccctttggcttagtgagtttggggtcctgagatttattttyctttgacagcagcgaggactgcatgagcctctgtgtgtgagagtggcagacactgaatgccaccctcatgggggtggttgatcaggagatggcggatgct

SEQ ID NO: 317577 - DNA, 201 bp, Homo sapiens
cagctctctttgagttagcatttgcttaatgtatcttttatcctttttaaaaatttttcaacttttctggatcgttatattttagatgtgtttcttataawcagtatattactggattttgtttatttaatgaaaactctcttttaactggcaatattaatcctgttatatttattttgattatttacttttttttttttt

SEQ ID NO: 317578 - DNA, 201 bp, Homo sapiens
gtgccagcctgggcaacagagcaagactctgtctcaaaaaaaaaaaaaaagtgaggaagaacaaggcactgcaacactaatttttttttttaggagaaaaytgaggctcaaacaggtgaaggaatgtccccaaggccacatggctaacaagagatcaccgacttaggtcagactggctctaagccccatgtgtacccagaa

SEQ ID NO: 317579 - DNA, 201 bp, Homo sapiens
tggggctcaagctcccagtgctggctgtatggagggtgttggaagttacaagaagattcagctctggatggtcttatgataacacatgtgggtcacacgcytgagggcatgcacacacctggtgtgaacccccagatgtttatgaaagttccttgtttaggagctgagaacatctggaacacagccagaggaagcacactc

SEQ ID NO: 317580 - DNA, 201 bp, Homo sapiens
gaacctattgaacaagaagaggctgggcacagtggctcacacctgtaatcccagcactttgggaggccaaggcaggtggattacctgaggtcaggagttcragaccagcctgactaacatggcgaaaccccgtctctactaatgcaaaaattagctgggcctggtgatgcatgcctgtaatcccagctactcgggaggccg

SEQ ID NO: 317581 - DNA, 201 bp, Homo sapiens
gttacaagaagattcagctctggatggtcttatgataacacatgtgggtcacacgcttgagggcatgcacacacctggtgtgaacccccagatgtttatgaaagttccttgtttaggagctgagaacatctggaacacagccagaggaagcacactcatcttagaatcgaatcccagtggcccagttcccagctggccctt

SEQ ID NO: 317582 - DNA, 201 bp, Homo sapiens
atgtaactcgagggccccaaacagggggtatcagtggactggactcctttgggaacctggaagtgagccccccagtcacagtcaggggcaaggaatacccrctgggcaggattctcttcggggacagctgttatcccaggtaaggaggggagtaacaggaaggggtggccaggacccaggtatgccgtagaaaagcagagg

SEQ ID NO: 317583 - DNA, 201 bp, Homo sapiens
tttgtatttttttttagtagagactggcttttgccacgttggccaggctggtctcaaactcctaacctcaagtgatcctctcacctcagcctcccaaagtkctgggattacaagcaattatttacatatttggatttgttctcaccaatcttttatttttatttgtccaatttctccctatgtggccttttctctttcctt

SEQ ID NO: 317584 - DNA, 201 bp, Homo sapiens
aagcctggacctgctgctggctagcaaggaggccttgggcaactgagcctcagttgcctcatctgtgaaatggggataatactcacatcatgggctggttrtaggaattcaatgtaaaaaaatgtgcagatgttggctgagtacttagcacagtggtgggcccatccttggtagtttttatttactcatttaacaaatgct

SEQ ID NO: 317585 - DNA, 201 bp, Homo sapiens
cccaggagctggctgtgggaggcggggaagagggagtgatgaacagtacgaggcacttagcacgcatgggctgtgtctaggcggtggcccccttgaggacycatgacccatggaaaatggctgtgcatctactgtgtgccagcacagtgctgtgcctacatgttcttacctaattgtcattgcaacggagatatgtgttgg

SEQ ID NO: 317586 - DNA, 201 bp, Homo sapiens
gccaagttctaagaacagcagacgcagcagtgggcaagacagacgacatctcgtctactaccttccagttggaggacacagacaaaatgactcgttattgytccctgcttttctttctctctctctcacacacgcgcgcacacacacacacacacacacacacacctcctggttatagactttgagtgcaagctgacagca

SEQ ID NO: 317587 - DNA, 201 bp, Homo sapiens
tcccagctactcaggaagctgaggcaagagaatcacttgaacccaggaggcggaggttgcagtgagctgagattgcaccattgcactccaacctgggcaayaagagtgaaactccgcctcaaaaaaaaaaaaaaaaaaagtgggtattggggcaaagaggaagaaagaaaaaaaagatgggtagataagaggtaagtggtt

SEQ ID NO: 317588 - DNA, 201 bp, Homo sapiens
gaggcaagagaatcacttgaacccaggaggcggaggttgcagtgagctgagattgcaccattgcactccaacctgggcaataagagtgaaactccgcctcaaaaaaaaaaaaaaaaaaagtgggtattggggcaaagaggaagaaagaaaaaaaagatgggtagataagaggtaagtggttgcattgagtctttgatcagc

SEQ ID NO: 317589 - DNA, 201 bp, Homo sapiens
cctagatgcccaggcagaagtttgctgcaggggtggtgttctcatggaaaacctctgctacagcagtgcagaggggaaatgttggtttggagcccccacasagagtccctactgggacaccacgtagtggagttgtgagaagagggccactgtcctccagactccagaagggtagatccactgacagcttgcaccgtgtgc

SEQ ID NO: 317590 - DNA, 201 bp, Homo sapiens
aggcaagagaatcacttgaacccaggaggcggaggttgcagtgagctgagattgcaccattgcactccaacctgggcaataagagtgaaactccgcctcaaaaaaaaaaaaaaaaaaagtgggtattggggcaaagaggaagaaagaaaaaaaagatgggtagataagaggtaagtggttgcattgagtctttgatcagct

SEQ ID NO: 317591 - DNA, 201 bp, Homo sapiens
acacaaacctttataggtaggaaaaccaaggcacggggaacttaagcaatttgcccaaggtcacagcactgacacgtagcagactcggggtttgaaccccrgacgtcccaacaccggagcaggtttagaggcatgaggatggtggggaatgcaggatctctgcaggcaaacctctgggctgctaagggggtggctccgggg

SEQ ID NO: 317592 - DNA, 201 bp, Homo sapiens
gagaggaatagtcacttatgccttgagctcagggaatctatattgtcacaaatgataaacatagagcaagggaagaaatcagatatgcatttgttgcaggyaagcagagggataactttgatttctgtcctttgttccatgcctgtgaagataagctattaacttacattgtcagggtgaaattcaacagaactggttcac

SEQ ID NO: 317593 - DNA, 201 bp, Homo sapiens
tttttaatctttgtagctatcttatttagaaacaaaatggggctgggcatggtggctcacgcctgtaatcccaacactttaggaggctgaggcgggcagaycatgaggtcaagggatggagaccatcctggccaacatggtgaaaccctgtctctactaaaaatacaaaaattagctgagcatggtggcgtgcgcctgtag

SEQ ID NO: 317594 - DNA, 201 bp, Homo sapiens
cccagctactcgcgagggtgaggcaagagaatcgcttgaacctgggaggcggaggttgcagtgagcagagatggcaccactgccctccagcctaggcgacrgagcgagactctgcctcaaaaaaaatagaaagaaagaaacaatggggccaggcgtggtagctcatgcctgtaatcccaacactttgggaggctgaagtgg

SEQ ID NO: 317595 - DNA, 201 bp, Homo sapiens
aattagccaggcctggtggcgggcgcctgtagtcccagctacttgggaggctgaggcaggagaatggcatgaacctgggaggtggagcttgcagtgagccragatcgcaccactgcactcgagcctgggcgacagagtgagactccgtctcaaaataaataaataaataaataaataaataaattaattaattaattaaaa

SEQ ID NO: 317596 - DNA, 201 bp, Homo sapiens
tcacactatgggtgcacacagtcccctggggaaacgacctgcccattcagggccaggctgggtgccccaaccccggaccctcaccaacctctcctcttacytgatgggatttcagaaatctccttgtgcgcagacatcacccgcaccggcaaagtgaagccaaccagagctgtgaaagatcaggtaccactcacccaaacg

SEQ ID NO: 317597 - DNA, 201 bp, Homo sapiens
gcaggtttagaggcatgaggatggtggggaatgcaggatctctgcaggcaaacctctgggctgctaagggggtggctccggggttgaagtgaggaaacatyatccacctgcgctggaggaaggtgctaaggggctctggctggcaggccttcctggggagctcttagaataacatagaaatggatgtattttcaagttgca

SEQ ID NO: 317598 - DNA, 201 bp, Homo sapiens
aactcccggctaatttttttttgtatttttaatagagatggggtttcaccatgttagccaggatggtctcgatctcctgaccttgtgatccacccgcctcrgcctcccaaagtgctgggattacaggcgggagccactgcgcccagcctttttttttcctttttgtggagacagggtctagctattttgcccaggctggta

SEQ ID NO: 317599 - DNA, 201 bp, Homo sapiens
tgcgctggaggaaggtgctaaggggctctggctggcaggccttcctggggagctcttagaataacatagaaatggatgtattttcaagttgcatgtagttrgcctggcccgatgccaggggacagcctctgtacagtgcctgacatgcggtaataatcacaacagctgtcctttgtgggcactcccggggtgccaagagct

SEQ ID NO: 317600 - DNA, 201 bp, Homo sapiens
ggaaacagaggcagagaaagctgaaatccgtttcctaagcccacccagatcccagattcaaaccaaattgaccgcaaagcctttaagcccttggctatcastcagtcccttgggaaccatctcttcactctccccaccctctaccccttcttggctattgttcaagttggttcacaaaccccacttcttgctcaggaccag

SEQ ID NO: 317601 - DNA, 201 bp, Homo sapiens
ctggatcatgacccccaacacccagcccccgcaggaggtgtacgcgtgcaggtgagaggtcctggggtgctggggtgggtccagacaacaaagagcctgarttccatccgcagcactcactgtgtgatgggaaaaacagtcacccctcccctgcccactgagagcttgctgcttgttgggggctctaaaaaggcagggaag

SEQ ID NO: 317602 - DNA, 201 bp, Homo sapiens
gtgggtaagtgacaaccaggatcctagagtgccgtctcatcccctgcccacctcctaatccctgcaggatgtctctgtaggagaaactacacctggagctyactttagactgagtagagaaaaagcatggtttctagccagtcagacatctgggagttcgaaatattccatccttagtcagtgaaccacaaagaaatacaa

SEQ ID NO: 317603 - DNA, 201 bp, Homo sapiens
tggttgagaaagtgcctcaccttttactactttcctttacaagtaccttgaccaacttagttcctggatttctcgtgtagatttaaaaatcaacttgtcargttccataagaaaccctaaaattccattgaatatataaatccattggagagaattcatacctttacggcaacaaggcttcctaaccatatacatagtatt

SEQ ID NO: 317604 - DNA, 201 bp, Homo sapiens
tggtttagatttaccaaaatatttaccattttatttgttcacgattctttgttgcacttcagaccattcttatgacatcagatacctccatcctaaactaygccttcagaaattgccttggtgaaaatctgattttaaaatatcggtttttgttcatccaaaaatatctatattaagatatttttattatgatatttatta

SEQ ID NO: 317605 - DNA, 201 bp, Homo sapiens
gacacggaaatataatagattctttcctcagggcctccaggaggaaccagctctgccatccctggacttaagcccagtggaactgatttcacacttctggmctccagaattttaagagaataaatgtggctgggcgtgggggctcatgcctgtaatcccagcactttgggaggtcgaggcagatggatcacttgaggtcag

SEQ ID NO: 317606 - DNA, 201 bp, Homo sapiens
aacttaaaatacctaaggaggcagctgtggggtaaacttaatataacacattgctgctgtaacaaatcactacaaacttagtgacttcaaacagcacaaayttattacttaccagtttgcaagatcagaagtccaaaatatgaatcttacttggctaaaatcaaggtgtcggcaaggctgtattccttctggaagctccag

SEQ ID NO: 317607 - DNA, 201 bp, Homo sapiens
atgcgggagggcctgtgatgatggaagcagagactggagatctttgaaggtggaagaaggggctgccagccaaggcggctattagaagctgaaaaagacayggaaatataatagattctttcctcagggcctccaggaggaaccagctctgccatccctggacttaagcccagtggaactgatttcacacttctggcctcc

SEQ ID NO: 317608 - DNA, 201 bp, Homo sapiens
agcaggagaatcacttgaacctgggagacggaggttgcagtgagccaagatcatgctattgcactccagcctgggtaacagagtgagactttgtctcgggaaaaaaaaaaaaaaagacagtcatcttgagctagtgaagacctgctctttttatagccagagtcctctggtgaggactgatagtaatagagtatgcctgct

SEQ ID NO: 317609 - DNA, 201 bp, Homo sapiens
ttgagcccaggaggtcaaaactgcagtgaagaagtaaatttgaagatcacagacctccttaagacccactcatcttcccagaaactcacacctgggcacayaatttggcgtctactctcagggagttcatggcccccatgaagcctcagggaatggaccatctatgtgtagaaggctagatgtaccctctcctgggaggca

SEQ ID NO: 317610 - DNA, 201 bp, Homo sapiens
gactatccaggcaggctggggagggggtggtcggggaaggcttcctgaaagaagtagcaagctgaagggtgacacgaactacccacctaagagcaggagaraggagagagtttgacacagaggggcaggctgtgtgcactctctggatgagaaaagggtgagacacgtgttggggaaactgaggaagttctgtatggcaag

SEQ ID NO: 317611 - DNA, 201 bp, Homo sapiens
tgatagcatgcacctgtggtcccagctactcgggcggctgagacgggaccgtgatcctttgagcccaggaggtcaaaactgcagtgaagaagtaaatttgragatcacagacctccttaagacccactcatcttcccagaaactcacacctgggcacataatttggcgtctactctcagggagttcatggcccccatgaag

SEQ ID NO: 317612 - DNA, 201 bp, Homo sapiens
tggggaaactgaggaagttctgtatggcaagaaaggtagatggaacaggaggtgaaggagtcagtttgaagagtttggtatcagggacctcattttctgcraacaacaggaagccaacaaaaagttttcagccagcgaataacaagacagcatttgtactttagaaggatcccaatggctgtggcctagcaagtagatagg

SEQ ID NO: 317613 - DNA, 201 bp, Homo sapiens
acctggacaaggaaagctttgatgggcgggagaagcgggttggtctgggttttagagagaagtggagagaggaactggaagtgtgattgttaaatctgtgsaatcaggccaggcgcagtagctcacacctataatcccaacactctaggagccgaggcaggaagattgagcccaggagtttgagaccagcctgggcaacat

SEQ ID NO: 317614 - DNA, 201 bp, Homo sapiens
tcggcaaggctgtattccttctggaagctccaggggcaaacccattccttgcagcttctagaggtgcccgcattccttggcttgtggccccttccagcaayagcatcactctgatctctgctgccatcaccacagtttccctgactcagaccctcctgcctccctcttataagacctttgtattactggaaagtggtccca

SEQ ID NO: 317615 - DNA, 201 bp, Homo sapiens
attggtgttttctcatctcttcctgaagaaacctccatccactcaaagctcctgctccccagatcccccaggacccggcctttccagggtctggttcttcrggtctttccttgatcccttctgcttgccagagtcagttctgtggcttatgatcagctctctctagcgcctcttctgccccatctccagctgctgggcccc

SEQ ID NO: 317616 - DNA, 201 bp, Homo sapiens
ggagaggcggtcagggaggagatgggaggtggtaagaggggtggtcagggaagagatgggaggtggtagcagaggtggtcaaggaggtgatgggaggagayggggggcagtagaagaggctgtggtcagaggtgatggggaagggacgggatgaccggatggggttgggcttgttggctactgttaaggctgcttgtttag

SEQ ID NO: 317617 - DNA, 201 bp, Homo sapiens
atgactaagagaagtcattagtgatctgctctcccataggttcagatttcatactacggacccaagactccaccagtcaaagctctactctacctcaccgsggtgggtaagtgacaaccaggatcctagagtgccgtctcatcccctgcccacctcctaatccctgcaggatgtctctgtaggagaaactacacctggagc

SEQ ID NO: 317618 - DNA, 201 bp, Homo sapiens
tagcatcactctgatctctgctgccatcaccacagtttccctgactcagaccctcctgcctccctcttataagacctttgtattactggaaagtggtcccratccagaccccaaaagagggttcttgaattttgcctgagaaagaattcaaggtgaatccataaagtgaaagcaagtttattaagaacgcaaaggaataaa

SEQ ID NO: 317619 - DNA, 201 bp, Homo sapiens
tgtttcaattaactaggcatggtaacacatgcctgtagtcccaactactagagaggctgaggtgggaggatcgcttgagcccaggaggtcaaggctgcagygagtcatgattgcacttctgcactccagtctgggtgacagatgagaccttgtcccagaggaaaaaaaaaaaaaaaaaaagagctacagggaaagacagag

SEQ ID NO: 317620 - DNA, 201 bp, Homo sapiens
gctggctagcaaggaggccttgggcaactgagcctcagttgcctcatctgtgaaatggggataatactcacatcatgggctggttataggaattcaatgtraaaaaatgtgcagatgttggctgagtacttagcacagtggtgggcccatccttggtagtttttatttactcatttaacaaatgctgagtgccatgctctg

SEQ ID NO: 317621 - DNA, 201 bp, Homo sapiens
ttgcccatttttatggttatttcttgattatatgctaaacaaggggtggattattcatgagttttcagggtaaagggtgggcaattccctgaactgagggytcctctactttttagaccatatagggtaacttccaagcgttgccatagtatccgtaaactgtcatgacgctggtgggagtgtcttttagcatgctaatgt

SEQ ID NO: 317622 - DNA, 201 bp, Homo sapiens
ccctgcaggatgtctctgtaggagaaactacacctggagcttactttagactgagtagagaaaaagcatggtttctagccagtcagacatctgggagttcraaatattccatccttagtcagtgaaccacaaagaaatacaatgtggcagtggtggtgcggggaattttaattatatcttaacattttgcttctcaagtta

SEQ ID NO: 317623 - DNA, 201 bp, Homo sapiens
caggagtttgagaccagactgggcaacataatgagaccttgtccctacaaaaaaaaaaaaaaaattgtttcaattaactaggcatggtaacacatgcctgyagtcccaactactagagaggctgaggtgggaggatcgcttgagcccaggaggtcaaggctgcagcgagtcatgattgcacttctgcactccagtctgggt

SEQ ID NO: 317624 - DNA, 201 bp, Homo sapiens
atttttatggttatttcttgattatatgctaaacaaggggtggattattcatgagttttcagggtaaagggtgggcaattccctgaactgagggctcctcyactttttagaccatatagggtaacttccaagcgttgccatagtatccgtaaactgtcatgacgctggtgggagtgtcttttagcatgctaatgtattata

SEQ ID NO: 317625 - DNA, 201 bp, Homo sapiens
gagttgctctggttcaaatgcctctgacacttgtggttacattgggcccatctggctaatctaggataatctccccatctcaagatcgttaacttaatcayatttgcaagtttccttttctgtgtaaggtaacatcttcacaggtttgggggactagggtgtggtcatctttgggagaccattgttctgcctaccacagag

SEQ ID NO: 317626 - DNA, 201 bp, Homo sapiens
gggggaccactgggggccaggccagggcccaccctcactctctttatgaagcagagatccaatatacctaactcttgagtttgggaaagtgacttcacctytctgtgcctcagtttactcatctgtaaaatgaacagtacccgccttacaggctagtggtgagaaccgaattaattaacgtgtggaaagaatgtgaacagt

SEQ ID NO: 317627 - DNA, 201 bp, Homo sapiens
atattttattagtatcttaataaatatctttattaagatattttttgtacgagtgcacgattctaggttaacagttacaattgacccttgaataacattgyggataggactgctgacccccaatgtagttgaaaatctgtgtatacgggaggctgagggaggagaatggcgtgaacccaggaggcagagcttgcagtgagc

SEQ ID NO: 317628 - DNA, 201 bp, Homo sapiens
actgctgacccccaatgtagttgaaaatctgtgtatacgggaggctgagggaggagaatggcgtgaacccaggaggcagagcttgcagtgagccaagatcrcgccactgcactccagcctgggcgacagtgagactctgtctcaaaaaaaaaaaaaaaatagtaaatcttgtataactttgactctccaaaacttaactac

SEQ ID NO: 317629 - DNA, 201 bp, Homo sapiens
ctgcagactatggatatgccttcatttgcctgcagaaatccaaggctgaaggctgtataactgaccccctctcacaacaacagccagggcagtgatgtggmtgaatttacattcattcatcaaacactgtttgaacacatactcagcggggccttgttctaggcacttgagatatgacagggagcaacgccaaggtccctg

SEQ ID NO: 317630 - DNA, 201 bp, Homo sapiens
tacctgtaatcctagcactttggaaggccaaggtgggagaattgtttgaacccaggagtttgagaccagactgggcaacataatgagaccttgtccctacaaaaaaaaaaaaaaaattgtttcaattaactaggcatggtaacacatgcctgtagtcccaactactagagaggctgaggtgggaggatcgcttgagcccag

SEQ ID NO: 317631 - DNA, 201 bp, Homo sapiens
ggaggcagaggttgcagtgagctgagatcacaccactacactccagcctgggcaacagagatctcacctcaaaaaacaagcaaacaaacaacaacaacaacaaaaaaaacacaaacaaacaaaaaacacatgtaatcctaagtgtttctgtgaccttatgtggacggagttctgcctctctagggattgtccactgtgaat

SEQ ID NO: 317632 - DNA, 201 bp, Homo sapiens
ctccttacattgtgcttgtctttttactttatattgtcttttgattaacagaatttattttcttttttaatttttaaattgatgttaattttttaaaaaayagaaacagggtctcactatgttgccctggctggccttgaactcctggctcaagtgatcttcccaccttggcctcccaaagcactgggattaaaggtgtga

SEQ ID NO: 317633 - DNA, 201 bp, Homo sapiens
cataggagggggtccagtgggtgtttgttgaatgactaagagaagtcattagtgatctgctctcccataggttcagatttcatactacggacccaagactmcaccagtcaaagctctactctacctcaccggggtgggtaagtgacaaccaggatcctagagtgccgtctcatcccctgcccacctcctaatccctgcagg

SEQ ID NO: 317634 - DNA, 201 bp, Homo sapiens
acttctaaccccagtgtttctgcctccagggcttccggctgctcctggccagccccaggtcctgctacaaactgttccaggagcagcagaatgagggccayggggaggccctgctgttcgaagggatcaagagtaagtcggccctgccttgttctcctgtctgtgcaccttcctgcttcccatagtccgctgttgcctgga

SEQ ID NO: 317635 - DNA, 201 bp, Homo sapiens
tacagtattttttccttttgtaaattacatcagttttttaaaaattgttttcttcttaaagaaatggtttgctagaaaaaaagaaaaatatttgtttcctrtttattgctgatgtatagaaatgtaatttattttttcctctttactttattagtcaccttattaaacttttgtctttttatttatttttaatttttaaaa

SEQ ID NO: 317636 - DNA, 201 bp, Homo sapiens
atatcttttactttatgtctttttttctcttgctgcagtgcttagaatcatccacacaatgttaaaaagatgtgactttttgatcctaccacgttcctgatttttttttttttaaacagagtctcactctgttacccaggctggagtgcaatggcacaatcttgactcactgcaacctctgcctcccaggttcaaacgatt

SEQ ID NO: 317637 - DNA, 201 bp, Homo sapiens
ttgtgcgcagacatcacccgcaccggcaaagtgaagccaaccagagctgtgaaagatcaggtaccactcacccaaacgctcctttcctacttctactggaktctccccgggcgcccccttgtggtgatggggcaaatgctggtctgtcccacgtattccgtgttaactgttaaaaaaagaaagaaaattagcatcaccatt

SEQ ID NO: 317638 - DNA, 201 bp, Homo sapiens
agcctcccaagtggctgagattacaggcacgtacaaccatgcccagctaatttttgtatttttttttagtagagactggcttttgccacgttggccaggcyggtctcaaactcctaacctcaagtgatcctctcacctcagcctcccaaagttctgggattacaagcaattatttacatatttggatttgttctcaccaat

SEQ ID NO: 317639 - DNA, 201 bp, Homo sapiens
tcataaggaagagaaaatacatttactgttcattaagtggaagtggatcatcataagggtcttcagcctcgtcttcatgttgagtaggctgaggaggaagrggggttggtcttgctgtctcaggggtggcagaggaggaaggaaatcagagtagaagtggactcacgcagttcaaacctgtgctgttcaagggtcaactat

SEQ ID NO: 317640 - DNA, 201 bp, Homo sapiens
cctctgctttcccatgtgtcttgtccacagctctgcccctgaggactgcacgtccttcagcatcaacgcctccccaggggtggtcgtggatattgcccacrgccctccagccaagaagaaatccacaggttcctccacatggcccctggaccctggggtagaggtgaccctgacgatgaaagtggccagtggtagcacagg

SEQ ID NO: 317641 - DNA, 201 bp, Homo sapiens
aagaaaagaaaaccaggcaacatggtaaagggaggtctcaggggagcggtggggtgcgaggctccaccaggaggtgaggtggctatgggaaaccagcagcrgtctcagggccctgtgactcaggcaatgcccttctcatcccagacctgcaggacatgtcgctgatgaccctgagcacgaagacccccaaggacttcttca

SEQ ID NO: 317642 - DNA, 201 bp, Homo sapiens
atgagtaattaagagttcacataatagtaactatttagattagaatattgacatacatatttagctgcatttggtttgtcaagctcaacattttatttatktatttatgtatttatgtatttatttatttatttatttattgagatggagtcatgctctgtctcccaggctggagtgcaggggcggttcaccgcaacctcc

SEQ ID NO: 317643 - DNA, 201 bp, Homo sapiens
caaggacttcttcacaaaccatacactggtgctccacgtggccaggtctgagatggacaaagtgagggtgtttcaggccacacgtaagtcatccccatctktgttcccctcctgccctggccaacggggcacaatcctgtcacacagctgtgtggcagataaatcctgagcacctactatgtgccaagttctaagaacagc

SEQ ID NO: 317644 - DNA, 201 bp, Homo sapiens
gtaattaagagttcacataatagtaactatttagattagaatattgacatacatatttagctgcatttggtttgtcaagctcaacattttatttatgtatktatgtatttatgtatttatttatttatttatttattgagatggagtcatgctctgtctcccaggctggagtgcaggggcggttcaccgcaacctccgcct

SEQ ID NO: 317645 - DNA, 201 bp, Homo sapiens
ccaggggtggtcgtggatattgcccacggccctccagccaagaagaaatccacaggttcctccacatggcccctggaccctggggtagaggtgaccctgaygatgaaagtggccagtggtagcacaggcgaccagaaggtgagtgtcatagctgtggggtggcagtgtggatgggcttcagcagggcagccacacacactc

SEQ ID NO: 317646 - DNA, 201 bp, Homo sapiens
agcagacgcagcagtgggcaagacagacgacatctcgtctactaccttccagttggaggacacagacaaaatgactcgttattgctccctgcttttctttytctctctctcacacacgcgcgcacacacacacacacacacacacacacctcctggttatagactttgagtgcaagctgacagcatgtggcatgtaatcat

SEQ ID NO: 317647 - DNA, 201 bp, Homo sapiens
cacataatagtaactatttagattagaatattgacatacatatttagctgcatttggtttgtcaagctcaacattttatttatgtatttatgtatttatgtatttatttatttatttatttattgagatggagtcatgctctgtctcccaggctggagtgcaggggcggttcaccgcaacctccgcctcccaggttcaagc

SEQ ID NO: 317648 - DNA, 201 bp, Homo sapiens
ccagacagaaggctgacaccatggtccaggcagaggcagtgatggccgtggcgttttcctggatttccactgtctacagggcaggtccgagcacctccgcrtggcccctcaggagctcctcttcctctggtggcagctctttggctctgctttggaaactccccaccgccattttgcttggatgtgtcaacccagatgctc

SEQ ID NO: 317649 - DNA, 201 bp, Homo sapiens
acataatagtaactatttagattagaatattgacatacatatttagctgcatttggtttgtcaagctcaacattttatttatgtatttatgtatttatgtatttatttatttatttatttattgagatggagtcatgctctgtctcccaggctggagtgcaggggcggttcaccgcaacctccgcctcccaggttcaagcg

SEQ ID NO: 317650 - DNA, 201 bp, Homo sapiens; identical to SEQ ID NO: 66630

SEQ ID NO: 317651 - DNA, 201 bp, Homo sapiens
tcaaacatcccataggaatgtgcccttgactgcaagggtgagagtgagtggatggtttcatgcccccatcctggcgtcgggcaccaagacccaggcagcaygcgcaacagcctcctctccactcactcccacaggatgaaatggagatcggctacatccaagccccacacaaaacgctgcccgtggtcttcgactctccaa

SEQ ID NO: 317652 - DNA, 201 bp, Homo sapiens
ttaataaaatattaatattaatattttattagtatcttaataaatatctttattaagatattttttgtacgagtgcacgattctaggttaacagttacaaytgacccttgaataacattgtggataggactgctgacccccaatgtagttgaaaatctgtgtatacgggaggctgagggaggagaatggcgtgaacccagg

SEQ ID NO: 317653 - DNA, 201 bp, Homo sapiens
aaacagggggcaataagctccgcttctgagccccttctctgagatcaaacatcccataggaatgtgcccttgactgcaagggtgagagtgagtggatggtwtcatgcccccatcctggcgtcgggcaccaagacccaggcagcatgcgcaacagcctcctctccactcactcccacaggatgaaatggagatcggctacat

SEQ ID NO: 317654 - DNA, 201 bp, Homo sapiens
cctggctcccttgttttctcaccttgaggaggggtctcagttttgctcaccaggggtccccagcactggcccaggcaccaccaggagtaggagggaagggyactcctgcaggctcatggcctctcgtgcactgggcaaacagggggcaataagctccgcttctgagccccttctctgagatcaaacatcccataggaatgt

SEQ ID NO: 317655 - DNA, 201 bp, Homo sapiens
acatataagtagcagccagacatggtggctcacacctgcaatcccagcgctttggaaggcggaggcaggaggatcgcttgagcccaggagtttgagaccarcctgggcaacatagtgagatcctgtctctacaaaaaataaaaaaaaacagctgagcatggtggcatgtgcctgtagtcccagctactcaagaggctgatg

SEQ ID NO: 317656 - DNA, 201 bp, Homo sapiens
tcatcccattttacaggtgaggaaactgaggcacaagagctaaacagacttgtccaaggtcatgcaattggttagtgaaggagtcaggaagtccaggccaygaaaggacaatgcttccccggccctaactaagacgtggctatgaatatgtttagaaggtcacctgggtcagtctcatgtgggacaagggtcaccatatca

SEQ ID NO: 317657 - DNA, 201 bp, Homo sapiens
ccccagctctgctgtccgaactgtagccagacttcctgggggccgtggaggagggatgtcttgaacctgtgtctcctctgaaggacgggaagaggggctcmcactatgggtgcacacagtcccctggggaaacgacctgcccattcagggccaggctgggtgccccaaccccggaccctcaccaacctctcctcttacttg

SEQ ID NO: 317658 - DNA, 201 bp, Homo sapiens
tcgtgtcatttatagtgttatttttcaccaattgagtgggtataaaaccctatttctttatggtgttaaccttttcattctcttacttgttagtaaggtgragtgcctcttcatgttttcatgttgatttgcctaagttctttaaatagtctgcatgctaagcctttgttggttttatgttgtgaatatattctccttaca

SEQ ID NO: 317659 - DNA, 201 bp, Homo sapiens
agagctgtgaaagatcaggtaccactcacccaaacgctcctttcctacttctactggattctccccgggcgcccccttgtggtgatggggcaaatgctggyctgtcccacgtattccgtgttaactgttaaaaaaagaaagaaaattagcatcaccattaatattttggcttatgtatttcccatctattttacaaaatca

SEQ ID NO: 317660 - DNA, 201 bp, Homo sapiens
tgctgacccccaatgtagttgaaaatctgtgtatacgggaggctgagggaggagaatggcgtgaacccaggaggcagagcttgcagtgagccaagatcacrccactgcactccagcctgggcgacagtgagactctgtctcaaaaaaaaaaaaaaaatagtaaatcttgtataactttgactctccaaaacttaactacta

SEQ ID NO: 317661 - DNA, 201 bp, Homo sapiens
agggcaggtgaacgctgtcttaaaccagagtctgcaggtaaacctgaaaccccagagctgcctgcaccattttatgctggtgtgcactgggggctgtgccytgtaaaaagatgaagatcctttgtggggtcaccaaaagtgggaagaaaaattacaactctaggagtagaatctgtccctgtatccctcccgaaatgcagt

SEQ ID NO: 317662 - DNA, 201 bp, Homo sapiens
agccgactggatggtgcccacccatactgagggtgggtcttcctctcccagtccactgactcaaatgccaacctcctctggcaacaccctcacagatacayccagaaaaaatacttcgcatctttcagtccaaacaagctgacacctaatattaaccatcacaaggagaaatgctgggagagccatggctggcccagcccc

SEQ ID NO: 317663 - DNA, 201 bp, Homo sapiens
caggatttgaactaaagcctgtttgatcccacagcctgactctgaattaatgaggcaaattctttgcttcaaagccaaagcaagcaaacaaaaaacaaacrcaagatatccaacccacgaaacactctatgttcacgccagactcccatgcatgcaccctttgagtgctcctttttgggacccatccaccaccccccagtt

SEQ ID NO: 317664 - DNA, 201 bp, Homo sapiens
tgcaggtaaacctgaaaccccagagctgcctgcaccattttatgctggtgtgcactgggggctgtgccttgtaaaaagatgaagatcctttgtggggtcascaaaagtgggaagaaaaattacaactctaggagtagaatctgtccctgtatccctcccgaaatgcagtcatttcccaggggcagacgctctcccgcgaag

SEQ ID NO: 317665 - DNA, 201 bp, Homo sapiens
aaccccagagctgcctgcaccattttatgctggtgtgcactgggggctgtgccttgtaaaaagatgaagatcctttgtggggtcaccaaaagtgggaagamaaattacaactctaggagtagaatctgtccctgtatccctcccgaaatgcagtcatttcccaggggcagacgctctcccgcgaagggaggcgccatcact

SEQ ID NO: 317666 - DNA, 201 bp, Homo sapiens
caagccacacagctaataagtaggggagccaggactcaacccaggcagcctgactctaggaccctccattctccccatgggtctccgttccagaccttccygtcacttcttatctgttcttaacatagccccagacagcgcctccctcccatctcctgagcagccatcggcctcttcctgaaccacacaggtgggagggcc

SEQ ID NO: 317667 - DNA, 201 bp, Homo sapiens
atcctttgtggggtcaccaaaagtgggaagaaaaattacaactctaggagtagaatctgtccctgtatccctcccgaaatgcagtcatttcccaggggcaracgctctcccgcgaagggaggcgccatcactattagatccctacagggtggggctgcttaatgtgctttaatctctaggcagatattaactggctgctaa

SEQ ID NO: 317668 - DNA, 201 bp, Homo sapiens
cataatagtaactatttagattagaatattgacatacatatttagctgcatttggtttgtcaagctcaacattttatttatgtatttatgtatttatgtatttatttatttatttatttattgagatggagtcatgctctgtctcccaggctggagtgcaggggcggttcaccgcaacctccgcctcccaggttcaagcga

SEQ ID NO: 317669 - DNA, 201 bp, Homo sapiens
ataatagtaactatttagattagaatattgacatacatatttagctgcatttggtttgtcaagctcaacattttatttatgtatttatgtatttatgtatttatttatttatttatttattgagatggagtcatgctctgtctcccaggctggagtgcaggggcggttcaccgcaacctccgcctcccaggttcaagcgat

SEQ ID NO: 317670 - DNA, 201 bp, Homo sapiens
ccaggttcaagcgattctcctacctcagcctcctgagtagctgcaattacaggtgcatgcctccacgcccagctaatttttgtatttttagtagagacagsgtttcgccatgttggccaggctggtcttgaactcctgacctcaggtgatctgcctgcctcagcctcccaaagtgctgggattacaggtgtgagccaccgc

SEQ ID NO: 317671 - DNA, 201 bp, Homo sapiens
gacacagacaaaatgactcgttattgctccctgcttttctttctctctctctcacacacgcgcgcacacacacacacacacacacacacacctcctggttrtagactttgagtgcaagctgacagcatgtggcatgtaatcatttgttctgcaacatcctgctaatcagagacatcaggaacttctcagtgacccacgagc

SEQ ID NO: 317672 - DNA, 201 bp, Homo sapiens
ctcaccccccatcacctcctaaccctggtgcccactgcctggctcccttgttttctcaccttgaggaggggtctcagttttgctcaccaggggtccccagyactggcccaggcaccaccaggagtaggagggaagggcactcctgcaggctcatggcctctcgtgcactgggcaaacagggggcaataagctccgcttctg

SEQ ID NO: 317673 - DNA, 201 bp, Homo sapiens
gtggtggctcatgcctgtaatcccagcactttgggaggccgaggaggatggatcatgaggtcaagagattgagccatcctggccaacatggtgaaatcccrtctctactaaaaatacaaaaattagccaggtgtggtggcatgcgcctatagtaccagctactcaggaggctgaggcaggagaatcacttcaacctggggg

SEQ ID NO: 317674 - DNA, 201 bp, Homo sapiens
ggcatgtaatcatttgttctgcaacatcctgctaatcagagacatcaggaacttctcagtgacccacgagcacctgcaactaagtaggtgccaggttgatyccaggcacggggcacagagccatgactgtgaccgagtccctgccctcgtgttgctttcatcttagtggctgggagaactataggtaaaataattacataa

SEQ ID NO: 317675 - DNA, 201 bp, Homo sapiens
gcgccaacaggtcttctctggcccatcctagctgcatcaggagcccctcctctgtgtccccacagacccctcaacccctcaccccccatcacctcctaacyctggtgcccactgcctggctcccttgttttctcaccttgaggaggggtctcagttttgctcaccaggggtccccagcactggcccaggcaccaccaggag

SEQ ID NO: 317676 - DNA, 201 bp, Homo sapiens
gggcacaatcctgtcacacagctgtgtggcagataaatcctgagcacctactatgtgccaagttctaagaacagcagacgcagcagtgggcaagacagacracatctcgtctactaccttccagttggaggacacagacaaaatgactcgttattgctccctgcttttctttctctctctctcacacacgcgcgcacacac

SEQ ID NO: 317677 - DNA, 201 bp, Homo sapiens
aggaggatggatcatgaggtcaagagattgagccatcctggccaacatggtgaaatcccgtctctactaaaaatacaaaaattagccaggtgtggtggcaygcgcctatagtaccagctactcaggaggctgaggcaggagaatcacttcaacctggggggtggaggttgcagtgagccaagatcacgccactgcactcca

SEQ ID NO: 317678 - DNA, 201 bp, Homo sapiens
gtcgtggatattgcccacggccctccagccaagaagaaatccacaggttcctccacatggcccctggaccctggggtagaggtgaccctgacgatgaaagyggccagtggtagcacaggcgaccagaaggtgagtgtcatagctgtggggtggcagtgtggatgggcttcagcagggcagccacacacactctgtcctgcc

SEQ ID NO: 317679 - DNA, 201 bp, Homo sapiens
ggcagagggaacggcaagtgcgtgggccctgaggtgagatcatgcctgtggtttggaggaatgcagggaggctagtgcagctggggcggaatgtgcaaggkttaaagtgggggatgagggtggaagagacagggcagaggggaagggggaggtcaggtaggcgtatattgactttggcttctggatggaaggagatggaga

SEQ ID NO: 317680 - DNA, 201 bp, Homo sapiens
cagacgacatctcgtctactaccttccagttggaggacacagacaaaatgactcgttattgctccctgcttttctttctctctctctcacacacgcgcgcrcacacacacacacacacacacacacctcctggttatagactttgagtgcaagctgacagcatgtggcatgtaatcatttgttctgcaacatcctgctaat

SEQ ID NO: 317681 - DNA, 201 bp, Homo sapiens
ttccctgctggtgtccagaggacctggacctggggcccttgtggacagggtgccatcctgctggtgaactgtgacagagacaatctcgaatcttctgccayggactgcgaggatgatgaagtgcttgacagcgaaggtaaagagcatttgctagctaacgggaagggctttttataaagcccttttgcccacatagcctga

SEQ ID NO: 317682 - DNA, 201 bp, Homo sapiens
atttggctgcaaggggttctctgatggtgccatgtggtgaccctgggaaaggcttctggggagcactaaggagaggaggaaaagtcttcagaagtggggaygcagacctgagtctcccctgcctctctcctagggggcaaactgtcctccaagtgcagcgtagtcttgggtcccaagtggccctctcactacctgatggtc

SEQ ID NO: 317683 - DNA, 201 bp, Homo sapiens
atatcagagcaggccctgagacctctgccataggccgggcacgactctgaccactttggaatgattaactcatctgatcttccaacacaaacctttatagrtaggaaaaccaaggcacggggaacttaagcaatttgcccaaggtcacagcactgacacgtagcagactcggggtttgaaccccggacgtcccaacaccgg

SEQ ID NO: 317684 - DNA, 201 bp, Homo sapiens
tctggctggcaggccttcctggggagctcttagaataacatagaaatggatgtattttcaagttgcatgtagttagcctggcccgatgccaggggacagcytctgtacagtgcctgacatgcggtaataatcacaacagctgtcctttgtgggcactcccggggtgccaagagctggtataagcactgtgtatcacctgac

SEQ ID NO: 317685 - DNA, 201 bp, Homo sapiens
caggaccctctggggttcccacagatctctgggccaacagccacttattcccagcagaaccagccaagcaggcttctccctgggggaacacagagcttgaytatccaggcaggctggggagggggtggtcggggaaggcttcctgaaagaagtagcaagctgaagggtgacacgaactacccacctaagagcaggagagag

SEQ ID NO: 317686 - DNA, 201 bp, Homo sapiens
acacgatcacaaggcaaagtcccacgatctgcaagctggggaagagagaagctggcagtggctcagtctgaatttgaaagcctcaaaccaaggaagccaamaatgcagccttcagtctgtggccaaaggcccaagagcccctagcaagccactggagcaagtcccagagtcgaaaagccaatgaacctggagtctagtgtc

SEQ ID NO: 317687 - DNA, 201 bp, Homo sapiens
ggagaccaagaagttggggagaaaaggaaaaagaaaatcacctgacatcatctgaggcacccccaactcctctgagaatgggtgtgaaggaaatgacaggrgctgaagctagcccagggcctctcccagcatgcccaggctagccctctacccagcgtccatgagtagtaatcaagatcacaagtgcttcctctggcccta

SEQ ID NO: 317688 - DNA, 201 bp, Homo sapiens
ttgcccctgtcttagtgatgaggaaacagaggcagagaaagctgaaatccgtttcctaagcccacccagatcccagattcaaaccaaattgaccgcaaagsctttaagcccttggctatcagtcagtcccttgggaaccatctcttcactctccccaccctctaccccttcttggctattgttcaagttggttcacaaacc

SEQ ID NO: 317689 - DNA, 201 bp, Homo sapiens
cctcaggtgatctgcctgcctcaggctcccaaagtgctcggattactggcatgaaccactgcgccaggccctctattcctttttgatacctcaaatatctmtaacaaaaagtagataatgacactgtcttatacaagaatatagatagtgttcctcaaattccattatttatatctcatcttcaccatttctgccatatca

SEQ ID NO: 317690 - DNA, 201 bp, Homo sapiens
agcttactttagactgagtagagaaaaagcatggtttctagccagtcagacatctgggagttcgaaatattccatccttagtcagtgaaccacaaagaaayacaatgtggcagtggtggtgcggggaattttaattatatcttaacattttgcttctcaagttaggaagtaggaacttggattttcaatatatgcatctcc

SEQ ID NO: 317691 - DNA, 201 bp, Homo sapiens
gctcagtctgaatttgaaagcctcaaaccaaggaagccaacaatgcagccttcagtctgtggccaaaggcccaagagcccctagcaagccactggagcaaktcccagagtcgaaaagccaatgaacctggagtctagtgtctaagggcaggaggagcgggaggaagcatccagcattggagaaagaaggcagccagaagcc

SEQ ID NO: 317692 - DNA, 201 bp, Homo sapiens
acatctcacgtaacaatggctaatatttacatcacacttcctacattcaactcattcaatggccttgggaggcaggtaatgttgttattcccattttacaraagaggaaacagaggctccaagaagttaagtaacccacctcaagccacacagctaataagtaggggagccaggactcaacccaggcagcctgactctagg

SEQ ID NO: 317693 - DNA, 201 bp, Homo sapiens
ttttttccaaatgaaatcacatcgacaagttccagggattaggatatggatgtatctttttggggaccaccattccacctactacaccccctttgcctgtwgatgggctcaacaggaccctctggggttcccacagatctctgggccaacagccacttattcccagcagaaccagccaagcaggcttctccctgggggaac

SEQ ID NO: 317694 - DNA, 201 bp, Homo sapiens
tgtcttttgagccccttattcatcttcttggtggaccagacacagggcgtgtccctctcctgtccccatcctctgaccacagtgcccaggcagttggaagkcctggcttatcactgaggctttgagagaatgaaggaaaacaacagcacacagaaccaagagaatgagcctccaggctttggcagagaaacaagagccttg

SEQ ID NO: 317695 - DNA, 201 bp, Homo sapiens
gacagacgacatctcgtctactaccttccagttggaggacacagacaaaatgactcgttattgctccctgcttttctttctctctctctcacacacgcgcrcacacacacacacacacacacacacacctcctggttatagactttgagtgcaagctgacagcatgtggcatgtaatcatttgttctgcaacatcctgcta

SEQ ID NO: 317696 - DNA, 201 bp, Homo sapiens
aggaatggtgtatactggacttcctataaagtttggaatagctcaggcacccctgccacacccttctgggacttcagccggggagcagcgtcccagctagracttcagtccttttctcctaaggggactggccagatttggctgcaaggggttctctgatggtgccatgtggtgaccctgggaaaggcttctggggagcac

SEQ ID NO: 317697 - DNA, 201 bp, Homo sapiens
caaacaagacattgagagaacataattcatttgtggaggtaggagcctgggtgcctacaccccagcagacctgacgccctgtccccggctcagccactttmccagtgattagaggcacacagaggctcagggtctcaggatgcgctggaagacagagacacagaagcaagggcagaagcaaagactgggagaggctgaggg

SEQ ID NO: 317698 - DNA, 201 bp, Homo sapiens
gcttcagcgtccctagtagctgggactacaggcgcttgccaccacgcctggctaatttttgtatttttagtagagatggagtttcaccatgttggccaggmtggtctcgaacttctgacctcaggtgatctgcctgcctcaggctcccaaagtgctcggattactggcatgaaccactgcgccaggccctctattcctttt

SEQ ID NO: 317699 - DNA, 201 bp, Homo sapiens
gtgaaatcccgtctctactaaaaatacaaaaattagccaggtgtggtggcatgcgcctatagtaccagctactcaggaggctgaggcaggagaatcacttsaacctggggggtggaggttgcagtgagccaagatcacgccactgcactccagcctggcagcagagggagactccgtctcaaaaaaataataaataaataa

SEQ ID NO: 317700 - DNA, 201 bp, Homo sapiens
ggcaataagctccgcttctgagccccttctctgagatcaaacatcccataggaatgtgcccttgactgcaagggtgagagtgagtggatggtttcatgccyccatcctggcgtcgggcaccaagacccaggcagcatgcgcaacagcctcctctccactcactcccacaggatgaaatggagatcggctacatccaagccc

SEQ ID NO: 317701 - DNA, 201 bp, Homo sapiens
agcaaaatattaataaatgtggtccccgctttgctgaggttacatccccagctcatcctagtgggaggagaccaaaaccttaatgagctctcattccaaamtgaaaaccatcatttaaatactcaaaatagcataaagaaaagaaaaccaggcaacatggtaaagggaggtctcaggggagcggtggggtgcgaggctcca

SEQ ID NO: 317702 - DNA, 201 bp, Homo sapiens
cattccaaaatgaaaaccatcatttaaatactcaaaatagcataaagaaaagaaaaccaggcaacatggtaaagggaggtctcaggggagcggtggggtgygaggctccaccaggaggtgaggtggctatgggaaaccagcagcggtctcagggccctgtgactcaggcaatgcccttctcatcccagacctgcaggacat

SEQ ID NO: 317703 - DNA, 201 bp, Homo sapiens
ttttccttcctagtctcaggtatgtttttatcagcagcgtgaaaatggactaatacagtaaattgataccagtagaggggggcgttgctgaaaagataccmaaaatgtggaagcaactttggaactgggtaacagacagaggttggaacggtttggagggctcagaggaagacaggaaaatgtgggaaagtttggaacttt

SEQ ID NO: 317704 - DNA, 201 bp, Homo sapiens
aatcagagacatcaggaacttctcagtgacccacgagcacctgcaactaagtaggtgccaggttgatcccaggcacggggcacagagccatgactgtgacygagtccctgccctcgtgttgctttcatcttagtggctgggagaactataggtaaaataattacataaaacacctagtgtgtccaacgctgtgacatgcta

SEQ ID NO: 317705 - DNA, 201 bp, Homo sapiens
gacttgttgaatggctttgacaaaaatactgataatgatatgaacaatgaaatccagactgagatggtctcagatggagatgaggaacttgttgggaaccrgagcaaaggtgactcttgttatgttttagcaaagagactggtggcattttgtacctgccctagagatttgtggaactttgaacttgagagagatgattta

SEQ ID NO: 317706 - DNA, 201 bp, Homo sapiens
tgacaatcattctgatcctgatcattctgcctggtctattccaagctttttttttttttttttaatttttttttttgagagagtctcactctgttgccccrgctggagtgcagtggtgccatcttggctcactgcagcctccacctcctgggttccagagattctcctgtctcagcctccccagtagctgaggttacaagc

SEQ ID NO: 317707 - DNA, 201 bp, Homo sapiens
ctgcaggagctccccgaggctgtggtgttccaagacagcgtggtcttccgcgtggcgccctggatcatgacccccaacacccagcccccgcaggaggtgtrcgcgtgcaggtgagaggtcctggggtgctggggtgggtccagacaacaaagagcctgagttccatccgcagcactcactgtgtgatgggaaaaacagtca

SEQ ID NO: 317708 - DNA, 201 bp, Homo sapiens
catgagatctgatggttttatcaggggtttccacttttgcatcttgctcattttctcttgccgccgccatgtaagaagtgccttttgcctcccaccatggygtccccagccatgtgggagtgtaagtccaattaaacctcttttccttcctagtctcaggtatgtttttatcagcagcgtgaaaatggactaatacagtaa

SEQ ID NO: 317709 - DNA, 201 bp, Homo sapiens
tgcaggtatgtgccctgcggggcaggcagggtgactgtccctgagggccaagagacacttgggggacccgggctcctggggttcagcctggtgcctcaccrgccactcttccttagatggacagggagataggaacctgagagatccttgggccgggaggctcaagcaagtgattcatctgacgtttgctgtgggccactg

SEQ ID NO: 317710 - DNA, 201 bp, Homo sapiens
ggagagcgccatgggagggttttttttttgcatgggcctgacaatcattctgatcctgatcattctgcctggtctattccaagcttttttttttttttttwaatttttttttttgagagagtctcactctgttgccccggctggagtgcagtggtgccatcttggctcactgcagcctccacctcctgggttccagagatt

SEQ ID NO: 317711 - DNA, 201 bp, Homo sapiens
caagtgactgcagcatctctgagctcgaggtcagctctctgctggttaaaatgagggattagcaggtgtcaaggatgtgtttgcatcactgaaacttgaayttttgaggaaccagaaaagactggaggaaaatgagaagggcaacagctttccaacgttgtgcctcaggccgcatcacctggcatccatgagcgtccccca

SEQ ID NO: 317712 - DNA, 201 bp, Homo sapiens
ggtggaaagcacaacatggacttctacgtggaggccctcgctttcccggacaccgacttcccggggctcattaccctcaccatctccctgctggacacgtycaacctggtaggccgagaaggcagccctgcatcgggggcctgggcttccaggcagtggcctggctagggaaaggggtacagagcccagctgggcaggggg

SEQ ID NO: 317713 - DNA, 201 bp, Homo sapiens
gagggtggaagagacagggcagaggggaagggggaggtcaggtaggcgtatattgactttggcttctggatggaaggagatggagagcgccatgggagggttttttttttgcatgggcctgacaatcattctgatcctgatcattctgcctggtctattccaagctttttttttttttttttaatttttttttttgagaga

SEQ ID NO: 317714 - DNA, 201 bp, Homo sapiens
aggatgtgtttgcatcactgaaacttgaatttttgaggaaccagaaaagactggaggaaaatgagaagggcaacagctttccaacgttgtgcctcaggccrcatcacctggcatccatgagcgtcccccacacagcccactcttggggggccacttctgcagactatggatatgccttcatttgcctgcagaaatccaagg

SEQ ID NO: 317715 - DNA, 201 bp, Homo sapiens
cgcaggaggtgtacgcgtgcaggtgagaggtcctggggtgctggggtgggtccagacaacaaagagcctgagttccatccgcagcactcactgtgtgatgsgaaaaacagtcacccctcccctgcccactgagagcttgctgcttgttgggggctctaaaaaggcagggaagttccctactgttgttgtcattgcctctgt

SEQ ID NO: 317716 - DNA, 201 bp, Homo sapiens
tttttgaggaaccagaaaagactggaggaaaatgagaagggcaacagctttccaacgttgtgcctcaggccgcatcacctggcatccatgagcgtcccccrcacagcccactcttggggggccacttctgcagactatggatatgccttcatttgcctgcagaaatccaaggctgaaggctgtataactgaccccctctca

SEQ ID NO: 317717 - DNA, 201 bp, Homo sapiens
tcccaggtaaggaggggagtaacaggaaggggtggccaggacccaggtatgccgtagaaaagcagaggccagagtggaagccttgccttcctgcttccgaytctagacagcccaacagacttgagggagtgtgagaggaatccaagcgcagggtgaggaatgcgggctttggagcccatagacccaagttcaattccagcc

SEQ ID NO: 317718 - DNA, 201 bp, Homo sapiens
aggtggggctggcactgcctaggctgagtgggattcaccttctggaggctgcacttgtgggtggtcccacctttgtcttgagcgttcaccgtggcccctawgtgctgtcttgatatcatccattgtgtttttgccattccttggccccattcctccctctcttcagagcatacccgagaccgaggcagagacttcacccgg

SEQ ID NO: 317719 - DNA, 201 bp, Homo sapiens
gcagggtgaggaatgcgggctttggagcccatagacccaagttcaattccagccctgccacttaccctctttcagtcagtgaatatttactgagcatccaraatgttctgggagctgggaatgcagccgtggacaagaaagacaagtccttaccactactctagtagggaaacagatgatagaaaagtagacaagataact

SEQ ID NO: 317720 - DNA, 201 bp, Homo sapiens
ccagtcattcaagctttttgctttccctccattcccatcggatggggccactccttacaggctaggaccagttcttgcccaactttgtctccccagtgccytaccctgagccggcacataggagggggtccagtgggtgtttgttgaatgactaagagaagtcattagtgatctgctctcccataggttcagatttcatac

SEQ ID NO: 317721 - DNA, 201 bp, Homo sapiens
attaatgcatttcattcattaatgcatatttaagtaataatactacagcacttactcaattgccaggcactgtgctaagactttacatttaatccttacarcaatccagtgaaattggtattattattatcatcccattttacaggtgaggaaactgaggcacaagagctaaacagacttgtccaaggtcatgcaattggt

SEQ ID NO: 317722 - DNA, 201 bp, Homo sapiens
agacctgagtctcccctgcctctctcctagggggcaaactgtcctccaagtgcagcgtagtcttgggtcccaagtggccctctcactacctgatggtcccyggtggaaagcacaacatggacttctacgtggaggccctcgctttcccggacaccgacttcccggggctcattaccctcaccatctccctgctggacacgt

SEQ ID NO: 317723 - DNA, 201 bp, Homo sapiens
cttcctgggttcaagcaattctcctgcctcagcctcccaagtagctgggattacaggcacacctggctcattcttgtatttttagtagagacggggtttcsccatgttggccaagctggtctcgagctcctgacctcaggtgatccacttgcctaggcctcccaaagtgctgggattacaggcatgagccaccacacccag

SEQ ID NO: 317724 - DNA, 201 bp, Homo sapiens
ataataatagttgcatttattgagaatgagttgtgtgttagccagtgctgcattctttacctgcactgactcatttaatttgataaactgttatggagatwctatcaataggcccattttatagaagaagaaactgaggctcagagtggagaagttggaattcaaacccggccagtccggcttggtgagcatgcttttccc

SEQ ID NO: 317725 - DNA, 201 bp, Homo sapiens
tgcaattggttagtgaaggagtcaggaagtccaggccacgaaaggacaatgcttccccggccctaactaagacgtggctatgaatatgtttagaaggtcayctgggtcagtctcatgtgggacaagggtcaccatatcatgctgtggggcacacggatctattttattggaatgaccttgcagtcatatattcggatgagg

SEQ ID NO: 317726 - DNA, 201 bp, Homo sapiens
cgtagtcttgggtcccaagtggccctctcactacctgatggtccccggtggaaagcacaacatggacttctacgtggaggccctcgctttcccggacaccracttcccggggctcattaccctcaccatctccctgctggacacgtccaacctggtaggccgagaaggcagccctgcatcgggggcctgggcttccaggca

SEQ ID NO: 317727 - DNA, 201 bp, Homo sapiens
cctgaaccctcacttccctgcaggtgaacatgctggtgctagggaagcacctgggcatccccaagcccttcgggcccgtcatcaacggccgctgctgcctrgaggagaaggtgtgttccctgctggagccactgggcctccagtgcaccttcatcaacgacttcttcacctaccacatcaggcatggggaggtgcactgcg

SEQ ID NO: 317728 - DNA, 201 bp, Homo sapiens
aggcagaggcagtgatggccgtggcgttttcctggatttccactgtctacagggcaggtccgagcacctccgcgtggcccctcaggagctcctcttcctcyggtggcagctctttggctctgctttggaaactccccaccgccattttgcttggatgtgtcaacccagatgctccaccctcctctggccaatccgaggtgt

SEQ ID NO: 317729 - DNA, 201 bp, Homo sapiens
ttgggtcccaagtggccctctcactacctgatggtccccggtggaaagcacaacatggacttctacgtggaggccctcgctttcccggacaccgacttccyggggctcattaccctcaccatctccctgctggacacgtccaacctggtaggccgagaaggcagccctgcatcgggggcctgggcttccaggcagtggcct

SEQ ID NO: 317730 - DNA, 201 bp, Homo sapiens
ccctggggaaacgacctgcccattcagggccaggctgggtgccccaaccccggaccctcaccaacctctcctcttacttgatgggatttcagaaatctccytgtgcgcagacatcacccgcaccggcaaagtgaagccaaccagagctgtgaaagatcaggtaccactcacccaaacgctcctttcctacttctactggat

SEQ ID NO: 317731 - DNA, 201 bp, Homo sapiens
aaggtcacagagcctgtcagaagcagcccaaggtcattgcctctctcactcccttcgaggctgcctgctgctcctggcctggcctgggagacgtttcccckgggcagctgaaccactccaccccagctggtctgcaggagagtatctgatcccaaactgctccaaccagctggtgatggctgagtgcaaaaccacaagcac

SEQ ID NO: 317732 - DNA, 201 bp, Homo sapiens
cagagcccagctgggcagggggactccaaacagctgcaggaagtggtaggtgctgggccctggcagcggtgacagcccctccttccccttaccccctcccytgcaggagctccccgaggctgtggtgttccaagacagcgtggtcttccgcgtggcgccctggatcatgacccccaacacccagcccccgcaggaggtgta

SEQ ID NO: 317733 - DNA, 201 bp, Homo sapiens
ggctgagtgcaaaaccacaagcacatgctgtgccctggctggctggtgtagacagactggcctgctgtggtatgtggtgtgttgggaattcgtatgttccrttcacactgaccctggcaatctccccgaggcccaggtcagtgccacccggggtgatgacaacccagccatcctgctccccacccccgtcagcatgggaac

SEQ ID NO: 317734 - DNA, 201 bp, Homo sapiens
atgcaggtatgtgccctgcggggcaggcagggtgactgtccctgagggccaagagacacttgggggacccgggctcctggggttcagcctggtgcctcacyggccactcttccttagatggacagggagataggaacctgagagatccttgggccgggaggctcaagcaagtgattcatctgacgtttgctgtgggccact

SEQ ID NO: 317735 - DNA, 201 bp, Homo sapiens
actcctattggctgtattgcatcacaaaatgtccagaacctgacccatcctcccctcctccactgccaccaccctagcctgagccccaccgtctgtcaccrgcctgtgtgcagcggccacctcacaggtcttctggcctcctcccgggtcccctacagtctgttctcacatcacagccagagtgatcacgttcaagcaagt

SEQ ID NO: 317736 - DNA, 201 bp, Homo sapiens; identical to SEQ ID NO: 66636

SEQ ID NO: 317737 - DNA, 201 bp, Homo sapiens
cctgatgctaaaagagggatccctactcccaccccaactcctagccttctccactacagccccctgttgacttcttcagtgtattttgttaaaatcatggwctcgttcatctacttttcgttgcctgcgctgctgggcctgaggctgttatgccttacgctgtccatcgggcagctggcacaaagcttcacacacagtggt

SEQ ID NO: 317738 - DNA, 201 bp, Homo sapiens
cagaaatctccttgtgcgcagacatcacccgcaccggcaaagtgaagccaaccagagctgtgaaagatcaggtaccactcacccaaacgctcctttcctasttctactggattctccccgggcgcccccttgtggtgatggggcaaatgctggtctgtcccacgtattccgtgttaactgttaaaaaaagaaagaaaatta

SEQ ID NO: 317739 - DNA, 201 bp, Homo sapiens
tggtggcatgtgcctgtagtcccagctactcaagaggctgatgtgggaggattgctcgagcccagaaggtcaagactacatgattgtgccactgcactccrgcctgggtgacagagtgagacccagtctcaaaaactaaaaaatatatatatacacacacatatatatataatatgtagcatatagaatcttcaggtttca

SEQ ID NO: 317740 - DNA, 201 bp, Homo sapiens
gtcccacgtattccgtgttaactgttaaaaaaagaaagaaaattagcatcaccattaatattttggcttatgtatttcccatctattttacaaaatcagawtttcaccaattgtgggttcagatgtgttatcctacaaactggaaaccctactgagtcacccagttaatacacagcagagaggaaattcgtgggcaggtct

SEQ ID NO: 317741 - DNA, 201 bp, Homo sapiens
tccagcactttccatggctcccatctcctcctgcttagtctgtttccaggccctctcagcctgcctggttcccttccctggggccagcctgccactgtgcytggaaacacatgattaccagtctctgtttccgtgccactcccccatcatgccaggagtgccccaaggactgagactgggcctcatccagcctagcaccct

SEQ ID NO: 317742 - DNA, 201 bp, Homo sapiens
gtgccccaaggactgagactgggcctcatccagcctagcaccctgaccctccccaccactgccttgctttgcctcgggaccctgtccttccatgccgcacycctgcggtgctgtctcttggacccatctccccattcccatcccccatctccaatccataccggtgaatcccagcacaaatgctcctcgtccataaatttc

SEQ ID NO: 317743 - DNA, 201 bp, Homo sapiens
actcatggcctctgctgggcgatataaaggaaccagcccaggggcttcctacagccagagggacgagctagcccgacgatggcccaggggacattgatccrtgtgaccccagagcagcccacccatgccgtgtgtgtgctgggcaccttgactcagcttgacatctgcaggtaagaggggggccttctggggttttggagg

SEQ ID NO: 317744 - DNA, 201 bp, Homo sapiens
gcgatcctcctgcctcagcctcccaaagtgctgggactacaggtctgagccaccacccctggaggggctattatttccaaaggtcagagaagggtggggcygctcagattgcgctgcaggctgcccgctgctgcctgtgacctgaaccctcacttccctgcaggtgaacatgctggtgctagggaagcacctgggcatccc

SEQ ID NO: 317745 - DNA, 201 bp, Homo sapiens; identical to SEQ ID NO: 66669

SEQ ID NO: 317746 - DNA, 201 bp, Homo sapiens
ctgcctctctcgagttcctgccgatggagtcccccacagccgtgaatggcgttaaggtgaggctaacccagagttccagctgtacctcacccagtgacccmacccctgtgtcacctgacccaggccccaactctccagggtgggcagggggagctaagctgagcttcctgggcccccaggatcctgaccaggctgcaagct

SEQ ID NO: 317747 - DNA, 201 bp, Homo sapiens
ttccatgggacattaggcaggtcccgctcttctctggacctcagctttcccatctgagcattgggcagaagggacgggtcgggtggtttctggagggctcyccatagccttgatttctgccttctccagcaggggccgcctggctgtaggacagggcctgggaggggaggggactcttctgagactgagtccatacctctg

SEQ ID NO: 317748 - DNA, 201 bp, Homo sapiens
gggcacttgggcagcagaggaggttgtagtgagcagagatcacgccactgcactctagcctgggcaacagagggagactctgtctcaaaaaataataggcygggcacggtggctcatgcctgtaatcccagcactttgggaggccgaggcgggtggatcacctgagatcaggagtttaagaccagcctggccaacatggtg

SEQ ID NO: 317749 - DNA, 201 bp, Homo sapiens
tgaagccgcagacaacgccagttatccaggctctgcgaaggacccgcatccgcgccgtcatggtgacaggtacaatggcatgtaggggcccgggctagcarggcagaatccgccccttcctggcagagaagaggggcaccagggattcctttttggggcatctttttgggcccttgcttcaggccaggtcctttttaaaca

SEQ ID NO: 317750 - DNA, 201 bp, Homo sapiens
aggggtgcagtggtgtgatcttgcctcactgcaacctctacctcccaggttcaagtgattcccctgcctcagcctcctgagtagctgagattacaggcacrcgctgccacgcccggctaattttttttatttttagtagagatgggtttcaccatgttagccaggttgatctcgaacttctaacctcaggtgatccacccg

SEQ ID NO: 317751 - DNA, 201 bp, Homo sapiens
tcctcagtttcatccgtggtaagtgggcagagtggggtggggaaaagctgcagggggtgaatgcccaggcccacccagacaccccaacttcctactccagycccgttcccaccccgacctgggccctctctcgctgcgttcgcagaggctcagcggctactgtggcagtccatggagggtcatcggctatcacgtcgtggt

SEQ ID NO: 317752 - DNA, 201 bp, Homo sapiens
cagcctgggagacgggcaggggggaaggggggaacggggggggaagactccatctcaaaaaaaagagcaatgccatcatgaaggtgctctcgcccccccamacagcctgtgggtgcctgttctgggctggtctgagcccacagaagccctggggagactgggctgtggctggggataaacagatgtactgcaggagagagt

SEQ ID NO: 317753 - DNA, 201 bp, Homo sapiens
aagtctgagggcaactgccccagaggctcagtgctctcgtttgtcaaactgggtaagagagcccaccttgtgggttggtgcgggaggaaatcaaatcagcmccgcagggatggctcctttcccatcatccctgagcccgctgggctgttggcctgagggttttttttttttttttttgagtcttgctctgtcaccctggct

SEQ ID NO: 317754 - DNA, 201 bp, Homo sapiens
ccgcctcggcctcccaaagtgctgggattacaggcgtgagccaccgcgcccaggctgatgtttattgtttttaaggaagcaagaggagaaggtgcctcccyaaatgacctttctcttttctgtccacagacagcagccctctcgtgggcagcacgcccaccggttatgggaccctgacgatagggacatcaatagatcccc

SEQ ID NO: 317755 - DNA, 201 bp, Homo sapiens
ctctccctggcagtgcccaccgacttcgcccagatgctgcagagctatacagctgctggctaccgtgtcgtggccctggccagcaagccactgcccactgygcccagcctggaggcagcccagcaactgacgaggtgggcctgtctcctgtcccacccactctgaggactaggcagagggaggctctcacgcaggcagagc

SEQ ID NO: 317756 - DNA, 201 bp, Homo sapiens
cgtcatctcagaacctgccgcagtcagcctagccagagagaccaggtccaggaattggaggttctgcccaaggcttgggtcacagattggggccccactcrtagggattggaggccaagaggcaaatccacgcagcctgagcatctatggggtccccagagacacgccctagagcctgggtcctctctgtgcgtcctccac

SEQ ID NO: 317757 - DNA, 201 bp, Homo sapiens
ctgatgtttattgtttttaaggaagcaagaggagaaggtgcctccccaaatgacctttctcttttctgtccacagacagcagccctctcgtgggcagcacrcccaccggttatgggaccctgacgatagggacatcaatagatcccctcagctcctcagtttcatccgtggtaagtgggcagagtggggtggggaaaagct

SEQ ID NO: 317758 - DNA, 201 bp, Homo sapiens
ttgccattgtatgacacttagataaagcacttggcgtgtagtgggggttcagtaaatacccttatcctatttatttatttgtttattttttttgagacagrgtctccctctgtcactcaggctggagtgcagtggcgcgatctcagctcactgcaccctccacctccccagcttaagtgatcctcccacctcagcctcctg

SEQ ID NO: 317759 - DNA, 201 bp, Homo sapiens
gaggagccctggggtgctggggaggcagatgggagagaggtgccggccgagtggaagactggcgtgcacacgtgtgtctgtgggtgccgggggggcgtggytcctgcctgagagactctcctgctcccagtgcccttcctggtggccctggcgctcctgagctccgtcctggtgggccttgtcctggtccccggcctcctg

SEQ ID NO: 317760 - DNA, 201 bp, Homo sapiens
gggaccgcacgtcctggcagtggtgacccgcacaggtatgagccgggaggctgggcttgagagagatcccgggctcagcacccttgggagaggtggagtgrggcagggtgggacctggaaccctggaccccacgcccacctctgctgctgccctgctgtgggacctcgggccagttgccccccatctggggtctgagcatt

SEQ ID NO: 317761 - DNA, 201 bp, Homo sapiens
gagtgcctactatgcgccagcgcacggccacagaggcctggtctcatttcctcttccccaagccctagcaagcaagctcaaatgttgcttcacggatgctraggctgggagatttggagtgacgtattccaggtcacccaacagcttgtaagtagcaaagctagagtttgaatttgagtccaccgggctccaaagcccaca

SEQ ID NO: 317762 - DNA, 201 bp, Homo sapiens
ggggcaccagggattcctttttggggcatctttttgggcccttgcttcaggccaggtcctttttaaacatttcgtgaatcttcacaatatcccccccgcargtggtaattgtcacccctgtttgacagatgaggaaactgagactcagaggagtggagtgacttccaaggaacccatgtgcgctgtcagacagcctgggtt

SEQ ID NO: 317763 - DNA, 201 bp, Homo sapiens
cactgtgaatcagactatcagctctgtactcagactgtctgcttggggtttagtcactgctctgccacctacaaaaggcttaagaaacatgagctcaggcygggtgcggtggctcacccctgtaatcccagcactttgggaagccaagacaggtggatcacgaggtcaggagttcaagatcagcctggccaagatgctgaa

SEQ ID NO: 317764 - DNA, 201 bp, Homo sapiens
cccccagacaccaaacttccctgcctgcctgccaggtcctggaggaagagccggctgcagactcagcatttgggacccaggtcttggcagtgatgagaccyccactttgggagccccagctgcaggcaatggtgagctgaggggggcctgttgggtgcagggcagaggggtgggctccccagccagcacctcagctgcctc

SEQ ID NO: 317765 - DNA, 201 bp, Homo sapiens
tcatattctgccagcccacccatggggtggtggggtaattccccaggccacacctgtccacacctctcttcaggtactgcgtgggcatgtgcggagacggygccaatgactgtggggccctgaaggcggctgatgtcggcatctcgctgtcccaggcagaagcctcagtggtctcacccttcacctcgagcatggccagta

SEQ ID NO: 317766 - DNA, 201 bp, Homo sapiens
caatgcctggatctacagatgagaaaactgaggcaaagggatgttggtaacctgcctcagctcacttggctggtggtggcagacggatttcatccagcctrttttcccatctgtaaggatcaggatgaggatggcctccccggatagcctcagaccctcaccttgccccataacccccaggggacaacctgcagacagcgg

SEQ ID NO: 317767 - DNA, 201 bp, Homo sapiens
cgctcccgccatggcctcagcctccaggaccaaatggtgaggtcagtgctgccctggaccggggtgccctgagaactggggctccttgtgttgccccccartgtggttgccttccagtcacctgccttctctgggcctcagttcccccagctgaaagtggggagctccttcaccccgggagggtccagccacagctcctcc

SEQ ID NO: 317768 - DNA, 201 bp, Homo sapiens; identical to SEQ ID NO: 66665

SEQ ID NO: 317769 - DNA, 201 bp, Homo sapiens
ggaggagccgccggggttacagtgctggagcgggcagggatgtagcgggcaggcaggagccttccctgtgtctggattttcagtggaaccacccagtgttwagatgctatccactagttccttgtttaaagcccttaaaaagcctacaagagccgggccagacctgttaggactccacactgctgatggctaatttcacaa

SEQ ID NO: 317770 - DNA, 201 bp, Homo sapiens; identical to SEQ ID NO: 66668

SEQ ID NO: 317771 - DNA, 201 bp, Homo sapiens
ggaaggaatgaggaaagacagcccctagaatccagatccaaagatgggaagatggttcacacacactcccgcctcagcctggcagaagacaggagctcccygccgccgggaaccacagccagggaggaggcagccgccctgggccgctgccaggtcaccagcaggaagccaaggcttccgcaggaaataagaggtcccaaa

SEQ ID NO: 317772 - DNA, 201 bp, Homo sapiens
agctgagatctctccactgcactccagcctgggagacgggcaggggggaaggggggaacggggggggaagactccatctcaaaaaaaagagcaatgccatsatgaaggtgctctcgcccccccacacagcctgtgggtgcctgttctgggctggtctgagcccacagaagccctggggagactgggctgtggctggggata

SEQ ID NO: 317773 - DNA, 201 bp, Homo sapiens
atgcatgttataaaataattccagcagaaagagaacgactcccccaccctgccccactgcacacatgatgcccacacatgctctgtctgacccaccccccsccgctggttccagggagctggctgccacctgcttccaggagtgtctccctgtgcctttatatctccgtcctctctgagcctcagtgttcctctctgtaaa

SEQ ID NO: 317774 - DNA, 201 bp, Homo sapiens
gaccggtgggtgagggctcagcagggctggtcagccaacctgggtcccctaatgtccgtgccctgccacccagggaggggcgctgttcccttgacacttcrttcagcgtcttcaagtacatggctctgtacagcctgacccagttcatctccgtcctgatcctctacacggtgagtatctgcagagctccgtacccagagc

SEQ ID NO: 317775 - DNA, 201 bp, Homo sapiens; identical to SEQ ID NO: 66666

SEQ ID NO: 317776 - DNA, 201 bp, Homo sapiens
ctctgaacaggacagtggccgcaccagacaacctgcccaactacgagaacaccgtggtcttctctctgtccagcttccagtacctcatcctggctgcagcygtgtccaagggggcgcccttccgccggccgctctacaccaatggtgccactgcgggcgcgggcgggagatgctggcggagggagggaggagccctggggt

SEQ ID NO: 317777 - DNA, 201 bp, Homo sapiens
ggtttgatctgtgaccccatggaggagacctcagccagtgctcgggaggaagaaacgcctcagtgtgggagggagaggggtttgggagaaaacccccaaargccagtggctggaggaggaagaggaggcagagccaggctgccataaagggccggggccctggaagccacagggaagttgagcctctaacctgagtgaaag

SEQ ID NO: 317778 - DNA, 201 bp, Homo sapiens
gcctggtggctgggagaggggccctggccactgcatgacctctgatccaggtctgcccaccctccagggacactgtggaaggagacctgagcctcctgggkctgctggtcatgaggaacctactgaagccgcagacaacgccagttatccaggctctgcgaaggacccgcatccgcgccgtcatggtgacaggtacaatgg

SEQ ID NO: 317779 - DNA, 201 bp, Homo sapiens
tggggggggggggtccggtgggaatggccgagacagagacgcagagagacaaagagagatcagagacgggagcgcgagggcgcgcggagcaagtttccgcsgctgattgttcccagctgtgcggcgctgcaacatctgggtttctcccgccgggacccctccccctgagcccggctctggagccggcagagccctccctcc

SEQ ID NO: 317780 - DNA, 201 bp, Homo sapiens
gagggaggagccctggggtgctggggaggcagatgggagagaggtgccggccgagtggaagactggcgtgcacacgtgtgtctgtgggtgccgggggggcrtggctcctgcctgagagactctcctgctcccagtgcccttcctggtggccctggcgctcctgagctccgtcctggtgggccttgtcctggtccccggcct

SEQ ID NO: 317781 - DNA, 201 bp, Homo sapiens
ctgccccacccacctgtctcccacagacgggcaccctcactgaggacggcttagacgtgatgggggtggtgcccctgaaggggcaggcattcctgcccctkgtcccagagcctcgccgcctgcctgtggggcccctgctccgagcactggccacctgccatgccctcagccggctccaggacacccccgtgggcgacccca

SEQ ID NO: 317782 - DNA, 201 bp, Homo sapiens; identical to SEQ ID NO: 66702

SEQ ID NO: 317783 - DNA, 201 bp, Homo sapiens
ggtgtttgtgtgctggtaaggggtgaccccagcctggagaggcagcgtggcagagtggccaagggccgagtcagatggacatgagtctagttcctggcccygtcacttaccactgtgttaccttgagcaactctcttggcctctctgaaatgcccacatcgtagagtcactgtgagaattaaatgagatgaagcaggcaaa

SEQ ID NO: 317784 - DNA, 201 bp, Homo sapiens
aggtcgccatgctgggaagcacctctggcctcctgtgacccttgctgtggctgggtggactgtgagctgcccgcagctccttagtgtcaccagcagtgcayagcgcatcttcaagtcctagcgtatactttaaatggcaccagacccagtggagggttaaatggttgaaaactgacatgcagctgggtctggtggctcatg

SEQ ID NO: 317785 - DNA, 201 bp, Homo sapiens
tggtctcgaactcctgaccccagatgatccacttaccttggcctcccaaagtgctgggattacaggtgtgagccactgtactcagccatgttttttgtttstttgtttgtttgtttgtttgtttttaagtcatctgactcctcccattctggaagccattctcagtccccttttaggcccttgacaacctagtgtgtgaag

SEQ ID NO: 317786 - DNA, 201 bp, Homo sapiens
ccagacagaggggggcctgattttgcctgggagtgccctcctgtgatccagcctctccccagtcccatctccccagtcccagtccagcagttagcccgggsctggaggatcttggcaaaaggggaacactcagcctgggtatctaaagcttgaccatcccctgtcctttgaaccccacaggcttgggtgggatgagcagca

SEQ ID NO: 317787 - DNA, 201 bp, Homo sapiens
tccccagacagaggggggcctgattttgcctgggagtgccctcctgtgatccagcctctccccagtcccatctccccagtcccagtccagcagttagcccrgggctggaggatcttggcaaaaggggaacactcagcctgggtatctaaagcttgaccatcccctgtcctttgaaccccacaggcttgggtgggatgagca

SEQ ID NO: 317788 - DNA, 201 bp, Homo sapiens
cttcttcccaaacatggtgaggccctgcagaccccaaccctcgccccatgccagtacagggcagccagatccagaaggacccctcagctgaagctgtccartggggaggcccaggtcccaatcctggctgagctgctgtgtgacctcacctcaggcacttgccctctctgggcctccatttcctcctaggggtgatatgct

SEQ ID NO: 317789 - DNA, 201 bp, Homo sapiens
aggcgatcgctggatccaggtaaggagcccaggtccaggctgggaaggacatggcccccgggtcaagcaaagaagagttggcttcatgtgaactgcctggmacccagcagctctgcagatggggattcttctgtcagctcatatctgcacatgtgcacaaagacataaacatacaagtgcactacagtgctgcttcttgta

SEQ ID NO: 317790 - DNA, 201 bp, Homo sapiens
caagcactggggccttacctctttatacaaggaaatggtaatccagtttgcccaggactttccttattttagcactgagggctcctcatgccaggaaaccyctcagtcctagggaaaccaaatcagctggtcacactatcaaggagtctcgctgggaagtggaatcattccaaagtagctagaaaggttaaggcaaaccac

SEQ ID NO: 317791 - DNA, 201 bp, Homo sapiens
acagaaatacacatgcacacataaatgcatacatacccatacgtgtgtgcacattcatacacatgtacatgtacacactgatgcatgcatatatagccacrtatacatacatgtacagacatatgtgaatgcttttgcacacacatacatacagaggcagattgcctggttttccacttcagctctgccatttgtgagtga

SEQ ID NO: 317792 - DNA, 201 bp, Homo sapiens; identical to SEQ ID NO: 66709

SEQ ID NO: 317793 - DNA, 201 bp, Homo sapiens
acctgcagctccttccgagggaggagtttcaggaagccagctccctgaaaggcagcattcagtgggcgtgactggctggaaagttcacaaaggtccaggarccaaaaccagtattattcctgcccctgcaccccaggctctttaacagcccctggtggtaccgccttcccttctttcccctggggtccttatcctgcacca

SEQ ID NO: 317794 - DNA, 201 bp, Homo sapiens; identical to SEQ ID NO: 66712

SEQ ID NO: 317795 - DNA, 201 bp, Homo sapiens
ttgaaaaggacagagtggctccctaaagaggctggacctgcagctccttccgagggaggagtttcaggaagccagctccctgaaaggcagcattcagtggrcgtgactggctggaaagttcacaaaggtccaggagccaaaaccagtattattcctgcccctgcaccccaggctctttaacagcccctggtggtaccgcct

SEQ ID NO: 317796 - DNA, 201 bp, Homo sapiens; identical to SEQ ID NO: 66713

SEQ ID NO: 317797 - DNA, 201 bp, Homo sapiens
accttggaaaacgctgtgcagctgcagagcaggatgcccgcaggggagaaatttttaccttgaaaaggacagagtggctccctaaagaggctggacctgcrgctccttccgagggaggagtttcaggaagccagctccctgaaaggcagcattcagtgggcgtgactggctggaaagttcacaaaggtccaggagccaaaa

SEQ ID NO: 317798 - DNA, 201 bp, Homo sapiens; identical to SEQ ID NO: 66714

SEQ ID NO: 317799 - DNA, 201 bp, Homo sapiens
agactccagactttgaattctctcccagggaggggacagccaggcccaggtctcagagagcctgagttcccctcacactcggccatgactgtccctgagayttgaagcgggtgcttgccctctaggggcctcaatgtgctcatctgtaaaatgaaatcacagtggtatgggcctcatggggttatcgaaagaatgggctga

SEQ ID NO: 317800 - DNA, 201 bp, Homo sapiens; identical to SEQ ID NO: 66715

SEQ ID NO: 317801 - DNA, 201 bp, Homo sapiens
accttccagaaaccctgagactctcccagaccccctaacacagcctcagccccagctccctcacagaccctccctttcacccgtaaccctccgtctggccstctccagttctcctcccgggggacctcacaccccttcagcttccctgccgtcctctcccctttcacttcccctccgcacctcacttcccctcggacccac

SEQ ID NO: 317802 - DNA, 201 bp, Homo sapiens; identical to SEQ ID NO: 66717

SEQ ID NO: 317803 - DNA, 201 bp, Homo sapiens
gtaatcccagcagtttgggaggccaaggagggcggatcatgaggtcaggagttcaagaccagcttggccaacatggtgaaaccctgtctctactaaaaatrcaaaaattagccgggcgtggtggcacacgcctgtagtcccagctactcaggatgctgaggcaggagaattgcttgaacccaagaggtggaggttgcagtg

SEQ ID NO: 317804 - DNA, 201 bp, Homo sapiens
ggatcctccatctagactcacaggtgccctcagaccaagaggggttagagacagcttcccacccacagtaaaaccctcagtccttgaaggtgggatctagmccactggaagttctgggagagaaagagacacgcacacccaggtgcacatgtgcacacctatgcgcatgcccgggtagactgagaaaggcagtttgggaat

SEQ ID NO: 317805 - DNA, 201 bp, Homo sapiens
tgctagtggagcaaattcattcctgcctgggtctccatcttccaccttcacaggaccctgtggctcccaaaactggcctcccatcagaggcactaggaagsttgttaagaattcagatccccaggcccgaccctcatacattcacactcaggaggtgcaagattggcccaagagatttcatgttcaacagatgtcctcttc

SEQ ID NO: 317806 - DNA, 201 bp, Homo sapiens
aagggctggccgggagcggtggctcacacctgtaatcccagcactttgggaagctgaggtgggcagatcacgaagtcaagagatcgagaccatcctggccracatggtaaaaccccatctctactaaaaatgcaaaaaaattagctgggcagggtggtgggcacctgtagtcccagctacttgggaggctgaggaaggagg

SEQ ID NO: 317807 - DNA, 201 bp, Homo sapiens
gaaatgtggagtgaatgcgatcggagggaggaggttacaaattatgccttacagcacctaactcaccgcacagctgcagaggctgggacacacaagactgsctctctcaagggccaggcgcccttgcagcctccttctagactggaaaagtcacatgcaggtctagggtatgcaggctataggcaaagggaggacctgaat

SEQ ID NO: 317808 - DNA, 201 bp, Homo sapiens
aggacccaggcactgggctccatccctgtgaggactcagcactttactcagcgaccctgggcagggagacagggttccaggcccagctctgctagtggagyaaattcattcctgcctgggtctccatcttccaccttcacaggaccctgtggctcccaaaactggcctcccatcagaggcactaggaagcttgttaagaat

SEQ ID NO: 317809 - DNA, 201 bp, Homo sapiens
cagcatgctaatttggggagagacaaacattcagtacacagcagccagatcacatccatttgttctcctgctctgaaatactttcggagttcttgaatttyggaattcaagaattccaaaagtatttgctttgcaatggaaaaccacttttgaaccccaagaaatgactcagaaggtgggggatgtcaggtggcaagaaag

SEQ ID NO: 317810 - DNA, 201 bp, Homo sapiens
gtggcattttctgcttgtgcttttctctctgtctagaggacaagttactttgcccttttgtccccatcggtgatcccaccccaccgacctctttctgatgygggtgggagtctgacgttggtccttttccctccagacccgttcttcggccaacgctatatccacatcctgggccggcggaagctctaccatgtggtcaag

SEQ ID NO: 317811 - DNA, 201 bp, Homo sapiens
ccgggcgtggtggcacatgcctgtaatcccagctactcaagaggctgaggcagaagaatcgcttgaactcaggaggcagaggttgcagtgagccgagatcrcgccattgcactccagcctgggcaacaagagtgaaactgcgtctcaaaaaacaaaataaaataaaataaaatattaaataaatcagctggggaagggatg

SEQ ID NO: 317812 - DNA, 201 bp, Homo sapiens
cagatgatccacttaccttggcctcccaaagtgctgggattacaggtgtgagccactgtactcagccatgttttttgtttctttgtttgtttgtttgtttktttttaagtcatctgactcctcccattctggaagccattctcagtccccttttaggcccttgacaacctagtgtgtgaagttagaaccgaaaccaatctt

SEQ ID NO: 317813 - DNA, 201 bp, Homo sapiens
tttgtatttgtagtagagatggggtttcaccatgttggccaggctggtctcgaactcctgaccccagatgatccacttaccttggcctcccaaagtgctgsgattacaggtgtgagccactgtactcagccatgttttttgtttctttgtttgtttgtttgtttgtttttaagtcatctgactcctcccattctggaagcc

SEQ ID NO: 317814 - DNA, 201 bp, Homo sapiens
ctcccaagtagctgggattacaggcatgcaccatcatgcctggctaatttttgtatttgtagtagagatggggtttcaccatgttggccaggctggtctcraactcctgaccccagatgatccacttaccttggcctcccaaagtgctgggattacaggtgtgagccactgtactcagccatgttttttgtttctttgttt

SEQ ID NO: 317815 - DNA, 201 bp, Homo sapiens
gggtgtctggcccgatcgggggtttgtgaggtcgccatgctgggaagcacctctggcctcctgtgacccttgctgtggctgggtggactgtgagctgcccrcagctccttagtgtcaccagcagtgcacagcgcatcttcaagtcctagcgtatactttaaatggcaccagacccagtggagggttaaatggttgaaaact

SEQ ID NO: 317816 - DNA, 201 bp, Homo sapiens
aaacaggaagcccagcccctgccttcaaggagatagcagaggtctcaggcatgcaaatagaccctgatgaaatggagggacttacaacgatagaaagaatracagggagtcaggtcagcccagggagtggccctgaaccccctcgaggagctcagggggggcccttaaagacaaatatttactgagaagctactctgtgcc

SEQ ID NO: 317817 - DNA, 201 bp, Homo sapiens; identical to SEQ ID NO: 66705

SEQ ID NO: 317818 - DNA, 201 bp, Homo sapiens; identical to SEQ ID NO: 66706

SEQ ID NO: 317819 - DNA, 201 bp, Homo sapiens
accaacccgaaatctccatgaccgacaacagcaaaggcctgtgtcttgctggcattccatgttgattgctgctggtggtctgccactctgcttctttatgycttccttactctagcgctcaaggtgccagagcagccccagtctgggaaatgccattctcctagcacagggagaattcaaagagttggcagacacacgtgg

SEQ ID NO: 317820 - DNA, 201 bp, Homo sapiens; identical to SEQ ID NO: 66710

SEQ ID NO: 317821 - DNA, 201 bp, Homo sapiens
tggtctgccactctgcttctttatgccttccttactctagcgctcaaggtgccagagcagccccagtctgggaaatgccattctcctagcacagggagaaktcaaagagttggcagacacacgtgggggctcctgtggcttctgctgttcactggcatgcatcccttctgctcacatttcattggccaaagcaagtcacgt

SEQ ID NO: 317822 - DNA, 201 bp, Homo sapiens
ctatagggagtgctggagtcagggagctacaattctgggtccaggcaagtcttctcaccagccccagccttggggtgctcatctctgacgtggcatgggartagtaagagttccgactgtcccgggtgtcccggatcgtggtggggatctaatgaggaaggtgtgtcaggcactgagtgcagtagctggcctttggaaagc

SEQ ID NO: 317823 - DNA, 201 bp, Homo sapiens
cagttccaggcgcggtattatctctgctggtgcatgcacggcccctctcctctttctatttattctttcattcattcaccattcattcatttgttccctcrttcatttacttattttcttttatcttgcattccccactcccattctgctcccccacagaggaccattttgctgggtttaatgtgtctctttctgctctgg

SEQ ID NO: 317824 - DNA, 201 bp, Homo sapiens
cagacctccccgatggcagctcttgcagccgtaagctacgaggtccacacagtgtctgctgacggtctccagtgggtagtgggatgttgaggcagggggtygcataagatgacttcagcgaggtcctctctttcccgtgaccaaatgaatggctgagacgcacccaaatcccacaggtcttcctcttgcccctgccctgcc

SEQ ID NO: 317825 - DNA, 201 bp, Homo sapiens
cctggctctgcgttctgggaacttcggtggtcacttccctgctgcgggcctgggtttcctcatctgtatcgttagggggtgggggtggtcacgcctccccwggagtggccgagagaacacaccttggaaaacgctgtgcagctgcagagcaggatgcccgcaggggagaaatttttaccttgaaaaggacagagtggctcc

SEQ ID NO: 317826 - DNA, 201 bp, Homo sapiens
gagcaagtcttgtgtctttgactttgggctgggcttttggaaacagcttgcagggaggtcagcctgggttcattgcagggaacagcagagagcaggcagcyggagtctgaggccctgctgagagcctggctctgcgttctgggaacttcggtggtcacttccctgctgcgggcctgggtttcctcatctgtatcgttaggg

SEQ ID NO: 317827 - DNA, 201 bp, Homo sapiens
ggaggacgataagggagccacactgtgaaatgcccacatttcgtaacaggaaggtaacgaaacctgtctgaattcagtaaatcaggaaatcgcaataagcrtgagagaggttgccttaggcagctgagaagaagggctggacaaggaactgctgtctttctttagaaacagtgtgttactattttatttgattttgtttgt

SEQ ID NO: 317828 - DNA, 201 bp, Homo sapiens
gtgggagtctgacgttggtccttttccctccagacccgttcttcggccaacgctatatccacatcctgggccggcggaagctctaccatgtggtcaagtayacgggtggctccgcggagctgctgttcttcgtggaaggcctctgtttccccgacgagggcttctcaggcctggtctccatccatgtcagcctgctggagt

SEQ ID NO: 317829 - DNA, 201 bp, Homo sapiens
gtttaatgtgtctctttctgctctggtgactctcaggaggcatgtggtgtggttggtgtgcatgtatttttaatttgtgcagacagcatggtgttctccayctcattctgttttgtacttttccctcaacctagtttttaggctccatcagtcttgctctgtgtacattcaggctgttgcttctaactgctttccattttc

SEQ ID NO: 317830 - DNA, 201 bp, Homo sapiens
accctcaggacagagggtcgcattcatcattctcagttccaggcgcggtattatctctgctggtgcatgcacggcccctctcctctttctatttattcttkcattcattcaccattcattcatttgttccctcattcatttacttattttcttttatcttgcattccccactcccattctgctcccccacagaggaccatt

SEQ ID NO: 317831 - DNA, 201 bp, Homo sapiens
ggtaatttactgaaactcctcttcctcccttctccaggtctggtggtcggaggatgaccaaggtggtgcgtgacttcctgaaggcccagcaggtgcaggcrcccgtggagctctactcagactggctgactgtgggccacgtggatgagttcatgtcctttgtccccatccccggcacaaaggtaagctagcctcctgagg

SEQ ID NO: 317832 - DNA, 201 bp, Homo sapiens
gaggagtagctatagatcagattgtttcttccctaaggagaggcccgggacagctggatgcaccaggtggtgagggaagctggctgaaggcagacgtcatkgtttgcctccactgatccctgttcagggcagctgcccacccacagggccccagccaccaccatgccgagcaccaggtgtgaggtctggactgaggtcatt

SEQ ID NO: 317833 - DNA, 201 bp, Homo sapiens
ggacagagtggctccctaaagaggctggacctgcagctccttccgagggaggagtttcaggaagccagctccctgaaaggcagcattcagtgggcgtgacyggctggaaagttcacaaaggtccaggagccaaaaccagtattattcctgcccctgcaccccaggctctttaacagcccctggtggtaccgccttcccttc

SEQ ID NO: 317834 - DNA, 201 bp, Homo sapiens
tcttgtgtctttgactttgggctgggcttttggaaacagcttgcagggaggtcagcctgggttcattgcagggaacagcagagagcaggcagctggagtcygaggccctgctgagagcctggctctgcgttctgggaacttcggtggtcacttccctgctgcgggcctgggtttcctcatctgtatcgttagggggtgggg

SEQ ID NO: 317835 - DNA, 201 bp, Homo sapiens
attaaccatatgtggtggtgggcgcctgtaatcccagctacttgggaggctgaggcaggagaatcgcttgaacccaggaggcagaggttgcagtgagccargatcatgccactgcactccagcctaggttacagagcaagaatctgtctcaaaaaataaataaataaataaataaataaacaaacaaacaaacataaaaag

SEQ ID NO: 317836 - DNA, 201 bp, Homo sapiens
cagtgacaaggtaccacggcgggaagtccagcctctgcgggcccgggaccatgccaggatagaggcagggtggaccagccctgtcccatagaaactgcacrtgggacatgtgtcattttcagttctgcagtaaccacattgaaaaggcaaaaagaggccgggcgcagtagctcaagcctgtaatcccagcactttgggagg

SEQ ID NO: 317837 - DNA, 201 bp, Homo sapiens
tcctaagtagttgggaccacaggtgtgcaccagcatgcccagctaattttttaatgtatataaagacaaggtctcactgttgtccaggctggtctcaaackcctgggctcaagtgattctcgggctttgacctcccaaagtgctggaagcaggagtctcctctcgaagcccctcatcccacctaccccagggctctcccta

SEQ ID NO: 317838 - DNA, 201 bp, Homo sapiens
gagtggcatcctgaccctcactccttctgagtcgcaaaggtgagcgaaacggcctcagcacccactccctttcccaagggctctggactccctttcctgtsatgctggcacacaggatcccctccagacacatagcaggggcctccccagcctcattcctcaatagaccttgtggtcctggcaggcactgccctaccagct

SEQ ID NO: 317839 - DNA, 201 bp, Homo sapiens
gacattggactttgttctgtaagtagcagggagtcactgaaggtttctgaggagaggagtagctatagatcagattgtttcttccctaaggagaggcccgrgacagctggatgcaccaggtggtgagggaagctggctgaaggcagacgtcatggtttgcctccactgatccctgttcagggcagctgcccacccacaggg

SEQ ID NO: 317840 - DNA, 201 bp, Homo sapiens
aacctgtggcgtgggtatcattatctcccacttaacagatgagtaaactgaggctcagggaggttaagtgaattctctgaggcttggttttttgttttttkttttttttttttttttgagatggagtctcgctctgtcgcccaggctggagtgcagtggtgcaatcttggctcaccacaatctctgcctcctgggttcaag

SEQ ID NO: 317841 - DNA, 201 bp, Homo sapiens
aggaccattttgctgggtttaatgtgtctctttctgctctggtgactctcaggaggcatgtggtgtggttggtgtgcatgtatttttaatttgtgcagacrgcatggtgttctccacctcattctgttttgtacttttccctcaacctagtttttaggctccatcagtcttgctctgtgtacattcaggctgttgcttcta

SEQ ID NO: 317842 - DNA, 201 bp, Homo sapiens
gggacccagaagagacagtttcccaataatgctgacactgggtcactgggtgaaaactcttagacacacacacacacacacacacacacacacacacacaagcaaaggacgacagataattgaccaggagcacagtctctttttcttccaggcaaacactttggagttatgtcaaattccaggcacccctgtggatgagcg

SEQ ID NO: 317843 - DNA, 201 bp, Homo sapiens
gtcaggcacagggtcccaaacaggaagcccagcccctgccttcaaggagatagcagaggtctcaggcatgcaaatagaccctgatgaaatggagggacttrcaacgatagaaagaatgacagggagtcaggtcagcccagggagtggccctgaaccccctcgaggagctcagggggggcccttaaagacaaatatttactg

SEQ ID NO: 317844 - DNA, 201 bp, Homo sapiens
ggggacccagaagagacagtttcccaataatgctgacactgggtcactgggtgaaaactcttagacacacacacacacacacacacacacacacacacacaagcaaaggacgacagataattgaccaggagcacagtctctttttcttccaggcaaacactttggagttatgtcaaattccaggcacccctgtggatgagc

SEQ ID NO: 317845 - DNA, 201 bp, Homo sapiens
gcccagattttggctacgtgacccgggagcccctctttgagtctgtcaccagccttgactcatttggaaacctggaggtcagtcccccagtgaccgtgaayggcaagacatacccgcttggccgcatcctcatcgggagcagctttcctctgtaagagaagccaggctggggctaggggctgtgggagtggggaagtcact

SEQ ID NO: 317846 - DNA, 201 bp, Homo sapiens
tgggtgcccacagacccagactgaaggtgataaaagagggtggctggcttgggggctgaggaccctggctgcagaagactaacgcaggtgtgtgccctctrcctagggcccagattttggctacgtgacccgggagcccctctttgagtctgtcaccagccttgactcatttggaaacctggaggtcagtcccccagtgac

SEQ ID NO: 317847 - DNA, 201 bp, Homo sapiens
aggacggccatggagaggccatcatgttcaaaggtgagtggccacagggccttgacaggaagtggcgagctggaggccccagagagaccctcgggagggtrgggcagataagcactttgtccctgagcacccagctccacttccctgggtgtctggcccgatcgggggtttgtgaggtcgccatgctgggaagcacctctg

SEQ ID NO: 317848 - DNA, 201 bp, Homo sapiens
cataggaagaccgtggacaacccacctggaaactgggtgcccacagacccagactgaaggtgataaaagagggtggctggcttgggggctgaggaccctgrctgcagaagactaacgcaggtgtgtgccctctgcctagggcccagattttggctacgtgacccgggagcccctctttgagtctgtcaccagccttgactc

SEQ ID NO: 317849 - DNA, 201 bp, Homo sapiens
ctcacactacaccgagatgctcacacactcagcctccccatgcccaggcccctgctctttgttaatcataggaagaccgtggacaacccacctggaaactrggtgcccacagacccagactgaaggtgataaaagagggtggctggcttgggggctgaggaccctggctgcagaagactaacgcaggtgtgtgccctctgc

SEQ ID NO: 317850 - DNA, 201 bp, Homo sapiens
ctcactctcacactcactctcactcgcactctcacactacaccgagatgctcacacactcagcctccccatgcccaggcccctgctctttgttaatcatargaagaccgtggacaacccacctggaaactgggtgcccacagacccagactgaaggtgataaaagagggtggctggcttgggggctgaggaccctggctgc

SEQ ID NO: 317851 - DNA, 201 bp, Homo sapiens
aataaaatgtttccatttaagaattcataatgaaatgaagcagtatagactgcaccataatttctctcctagcccacggccccactgctttaatggactcrccacaaggagtcccaatgtaatgtcaccttacggcctagagacgaaggccgcagggctaccaaggtggggaaatgggcacttcctctgggaatgaccttc

SEQ ID NO: 317852 - DNA, 201 bp, Homo sapiens
ctaatgctttgcattcgtcatctcatctaattctcaaaactaagctgtgaggttgttatccccaccttacagatgaggaaactgaagctcagagacaggargtgacttgctcaagattactcagcaggaaatggcagagctgggattcatacctgggtggtctggctccggagcccacccactgagcgcctgctcttgact

SEQ ID NO: 317853 - DNA, 201 bp, Homo sapiens
accgcctccccgccggatacgagatagttctgtacatttccatgtcagactcagacaaagtgggcgtgttctacgtggagagtgagtgatcccagcccagyccagcctagacctttctagccacctaccctcctccccttagcagttgtggccttcacaggtgcaggtgcctggggaagacctggattggtctctgagtga

SEQ ID NO: 317854 - DNA, 201 bp, Homo sapiens
tgagaggctgggaggacgataagggagccacactgtgaaatgcccacatttcgtaacaggaaggtaacgaaacctgtctgaattcagtaaatcaggaaatygcaataagcatgagagaggttgccttaggcagctgagaagaagggctggacaaggaactgctgtctttctttagaaacagtgtgttactattttatttga

SEQ ID NO: 317855 - DNA, 201 bp, Homo sapiens
ttttttgggagggatgggggagagcaagaggtgaggtgtggggagggaggaagaatcccaccctatttgaggtcctggcagtggaaggagtacacatatgmgggccccagaaaattttaacatcaacctaaggggcttgatcctatgccttctccccagaggctgggatacttgccctgattggctgtgggggagggtgtc

SEQ ID NO: 317856 - DNA, 201 bp, Homo sapiens
ttcaaagaggaaaaaaacatagttatgcaattgtcaaaagtcatggttccaacttccaagttcatcagcactttgaggctatggtttttggtgcgtgtgtrtgtgtgtgtttgtttttgttttctgagacaagagtcttgctctgtcgcccaggctgaaatgcagtggctcactgcaacttccatctcccaggttcaagca

SEQ ID NO: 317857 - DNA, 201 bp, Homo sapiens
cccctcagtgggcactagacgtgcaacatggcagatatgggggaccccaggcagcagaatgcacacagtggcacaggaaggcagacagcatcctaactgcmctctcagccagcaggaggggagtccacagtctagttcagttacctgagggaaaccgcccaccaacccaggagttcttcctggaggagagggttctgatgt

SEQ ID NO: 317858 - DNA, 201 bp, Homo sapiens
tctttgtttgtttgtttgtttgtttttaagtcatctgactcctcccattctggaagccattctcagtccccttttaggcccttgacaacctagtgtgtgargttagaaccgaaaccaatctttcttttgtctgcactcttctgccctgaacaggctgggggaggtttgaacagggcatgaaacaagagactggaatagatc

SEQ ID NO: 317859 - DNA, 201 bp, Homo sapiens
atcagtcttgagattcacatttgccaggtcacagctgccccagtgggtggcggctactctttaccctcatcctggggctatctctccagtgtcccatgggktctatacaagcatagagaagagggcactgacctttcttcctgccactgtaggcatcctggacctggggccccgagggccagggggccatcctgctggtga

SEQ ID NO: 317860 - DNA, 201 bp, Homo sapiens
ccagtgtcccatggggtctatacaagcatagagaagagggcactgacctttcttcctgccactgtaggcatcctggacctggggccccgagggccaggggrccatcctgctggtgaactgtgaccgagagacaccctggttgcccaaggaggactgccgtgatgagaaggtctacagcaaggaaggtgccagcaggccctg

SEQ ID NO: 317861 - DNA, 201 bp, Homo sapiens
gaagcgaggcctttccaggtcaccacctgccttcagtattccaggctggcctggttccaaggccccaggctgcgttgttccttgaggcccaggccaggccyggctttgtgctgcatacctgcccacctgtatggtgctgcagagccccagcaccccagccttggcaagctcccatgttgccagctggggccccaagatgag

SEQ ID NO: 317862 - DNA, 201 bp, Homo sapiens
aggcacccgtggagctctactcagactggctgactgtgggccacgtggatgagttcatgtcctttgtccccatccccggcacaaaggtaagctagcctccygaggctggagtgaatggggtagcggcaaaccaatatattaccagcccctgccagcagagggcaagagctagaggaactcgacagcataaaggaaggagga

SEQ ID NO: 317863 - DNA, 201 bp, Homo sapiens
ctgcatacctgcccacctgtatggtgctgcagagccccagcaccccagccttggcaagctcccatgttgccagctggggccccaagatgagaaagcactargctgctgccatctaccccatgggctcagctgtccctggagcctctcagctgagccaggataagccacatcctccgactccactggattttgtaaggcaag

SEQ ID NO: 317864 - DNA, 201 bp, Homo sapiens
gagggcacagccccagatcccgcaggcaattcccatttcacagctcaggagactaaggcccaagacaggctcccagacacacagcataccaatgatggaamccacagaggagctcaggcatctcctagagacagcaacagagcaggctcctgagtctcagtttctctatcccatgatggggacgcccaattcatggaactg

SEQ ID NO: 317865 - DNA, 201 bp, Homo sapiens
agcactaggctgctgccatctaccccatgggctcagctgtccctggagcctctcagctgagccaggataagccacatcctccgactccactggattttgtmaggcaagcttcatcccaaccccagtgcaagctcccaaacaagattcctatatttgtaccccaaaagccatgagaggaatgttaaaattcaggggccaatg

SEQ ID NO: 317866 - DNA, 201 bp, Homo sapiens
cccaaccccagtgcaagctcccaaacaagattcctatatttgtaccccaaaagccatgagaggaatgttaaaattcaggggccaatggggttatgtcttgygggctaactccaattttttggagctctgtgtgaagaagggttctgaggcttcctctgggctcagtggcaagtctggcaggttgagactgggttgagatgt

SEQ ID NO: 317867 - DNA, 201 bp, Homo sapiens
aggctcccagacacacagcataccaatgatggaacccacagaggagctcaggcatctcctagagacagcaacagagcaggctcctgagtctcagtttctcyatcccatgatggggacgcccaattcatggaactgctgggaaggataaatgtgcccgctacagaggaagcactgtgaaggcatttgctcttattattttgc

SEQ ID NO: 317868 - DNA, 201 bp, Homo sapiens
caaccccagtgcaagctcccaaacaagattcctatatttgtaccccaaaagccatgagaggaatgttaaaattcaggggccaatggggttatgtcttgcgkgctaactccaattttttggagctctgtgtgaagaagggttctgaggcttcctctgggctcagtggcaagtctggcaggttgagactgggttgagatgtca

SEQ ID NO: 317869 - DNA, 201 bp, Homo sapiens
tggggacccagaagagacagtttcccaataatgctgacactgggtcactgggtgaaaactcttagacacacacacacacacacacacacacacacacacacaagcaaaggacgacagataattgaccaggagcacagtctctttttcttccaggcaaacactttggagttatgtcaaattccaggcacccctgtggatgag

SEQ ID NO: 317870 - DNA, 201 bp, Homo sapiens
gtggggacccagaagagacagtttcccaataatgctgacactgggtcactgggtgaaaactcttagacacacacacacacacacacacacacacacacacacaagcaaaggacgacagataattgaccaggagcacagtctctttttcttccaggcaaacactttggagttatgtcaaattccaggcacccctgtggatga

SEQ ID NO: 317871 - DNA, 201 bp, Homo sapiens
agtggggacccagaagagacagtttcccaataatgctgacactgggtcactgggtgaaaactcttagacacacacacacacacacacacacacacacacacacaagcaaaggacgacagataattgaccaggagcacagtctctttttcttccaggcaaacactttggagttatgtcaaattccaggcacccctgtggatg

SEQ ID NO: 317872 - DNA, 201 bp, Homo sapiens
acagtggggacccagaagagacagtttcccaataatgctgacactgggtcactgggtgaaaactcttagacacacacacacacacacacacacacacacacacacaagcaaaggacgacagataattgaccaggagcacagtctctttttcttccaggcaaacactttggagttatgtcaaattccaggcacccctgtgga

SEQ ID NO: 317873 - DNA, 201 bp, Homo sapiens
cagagggtcgcattcatcattctcagttccaggcgcggtattatctctgctggtgcatgcacggcccctctcctctttctatttattctttcattcattcmccattcattcatttgttccctcattcatttacttattttcttttatcttgcattccccactcccattctgctcccccacagaggaccattttgctgggtt

SEQ ID NO: 317874 - DNA, 201 bp, Homo sapiens
atttgctcttattattttgcctgttcttttaagactagggaggtgggggagacagaccctcaggacagagggtcgcattcatcattctcagttccaggcgyggtattatctctgctggtgcatgcacggcccctctcctctttctatttattctttcattcattcaccattcattcatttgttccctcattcatttactta

SEQ ID NO: 317875 - DNA, 201 bp, Homo sapiens
catttgctcttattattttgcctgttcttttaagactagggaggtgggggagacagaccctcaggacagagggtcgcattcatcattctcagttccaggcrcggtattatctctgctggtgcatgcacggcccctctcctctttctatttattctttcattcattcaccattcattcatttgttccctcattcatttactt

SEQ ID NO: 317876 - DNA, 201 bp, Homo sapiens
aagctccacctcccaggttcacaccattctcctgcctcagcctccagagtagctgggactacagacgcctgccctatgcctagctaattttttttttttttgtatttttagtagagatggggtttcaccgtgttagccaggatgctgtcgatctcctgaccttgtgatccgcccaccttggcctcccaaagtgctgggatt

SEQ ID NO: 317877 - DNA, 201 bp, Homo sapiens
cgtgagcacaggtgtagactgatctgcccggcacagcccagagataccagctgctgtcaccatctcagggagatgactctggcccctcctcaccctttctyctggcctctccttcttcccccaacttctcagcatgaaggataattacctgttcctgaaagaggtgaagaaccttgtggagaaaaccaactgtgagctgaa

SEQ ID NO: 317878 - DNA, 201 bp, Homo sapiens
gggacatttcccgtcaatctgccccacacccaggagccacctgacgccttggggctattctggggaactgaggtgggatccagagcctctgggaaatgtcvtctggagcctggaggccctgaagcagagctcctctccctcctccccctcgggaaggcagagccatcccaagaggcaatgctctgggcaggtcacaccagc

SEQ ID NO: 317879 - DNA, 201 bp, Homo sapiens
cataacatctcaagctgcttagtaaggcaagaaggccaggcaccctgccactctctggcgaccctccaaaatgcttgtgcctctcggtcagagctgaggcytcagtgtcttcattctcagggcagactgccttgaacccaatcctagggacatttcccgtcaatctgccccacacccaggagccacctgacgccttggggc

SEQ ID NO: 317880 - DNA, 201 bp, Homo sapiens
gtgatgtgcagagactgcctatggacacctgtgctgccatcatcagtgtgaggggaggaggatgggggaccagggaatggggaacaagacagacgttcttyttcctttgtgctcttgtgtttctcgagttttctgcccatgtgcacaaattgtcccctggattcgtctaacagttctccttggtgtccctgcaggatgaaa

SEQ ID NO: 317881 - DNA, 201 bp, Homo sapiens
tcctagcacagggagaattcaaagagttggcagacacacgtgggggctcctgtggcttctgctgttcactggcatgcatcccttctgctcacatttcattrgccaaagcaagtcacgtgaccaagtctgacactgggcagggaagtatattccttttgcaggaagatgccagaagtcacatggcaatgggtcaggatgcaa

SEQ ID NO: 317882 - DNA, 201 bp, Homo sapiens
cgcactctcacactacaccgagatgctcacacactcagcctccccatgcccaggcccctgctctttgttaatcataggaagaccgtggacaacccacctgraaactgggtgcccacagacccagactgaaggtgataaaagagggtggctggcttgggggctgaggaccctggctgcagaagactaacgcaggtgtgtgcc

SEQ ID NO: 317883 - DNA, 201 bp, Homo sapiens
gagatttaaattcttttctcatactaaatcttcaaaatctggcaaagattttactcacatgacacacctaaattcagactagccacagctcaagtgttcartagtcacataaggctagtggctattgtgttggcggtaatgctttagagagaaatagggtatgcacctgtggcactggaaagaggttctttcattttctta

SEQ ID NO: 317884 - DNA, 201 bp, Homo sapiens
aaagattttactcacatgacacacctaaattcagactagccacagctcaagtgttcagtagtcacataaggctagtggctattgtgttggcggtaatgctytagagagaaatagggtatgcacctgtggcactggaaagaggttctttcattttcttatgggtacgacttcataccctggaaattctctgcaaattgtgtg

SEQ ID NO: 317885 - DNA, 201 bp, Homo sapiens
caagatgaggcagctctggaaaacaggaagggtgtcccctttggccatgctgcttctgccacattcatgctggtcagctgctcatccttaggagcaggctstaggtgggagaaccagggggctacttgtagcacccctgatcccactggccaaagcaagagcaaggcagctgccaccactgtcctggctcagatgtcatgg

SEQ ID NO: 317886 - DNA, 201 bp, Homo sapiens
gtctccttcctgggacttctctgctgatgccactctgggtccgaggtgggtcccagagaccaaactcctcttgcaggccctctggtgcggtgggtaatttrctgaaactcctcttcctcccttctccaggtctggtggtcggaggatgaccaaggtggtgcgtgacttcctgaaggcccagcaggtgcaggcacccgtgga

SEQ ID NO: 317887 - DNA, 201 bp, Homo sapiens
gaaaatcacagatccctaaagttttctgtttctacctggaccctcccttctgagtccctaagcctcaaagattacatccggcttgtagctgggcatctttrctgctgtccagttataaacctgggaagtgcaatggaccagcaggctcttcccagatgaggccaaaataaataaacaaataataggttaagagcataggct

SEQ ID NO: 317888 - DNA, 201 bp, Homo sapiens
gactggggcgggccgccccgcccaccggccgctggataaggctgcgcgcggggccgtggggcgcaggctgctggagaaggcgcacctgctgcaggtgctcscggccgccccggaccagcgagcgcgggcactgcggcggggaggatgctgcgcgagcggaccgtgcggctgcagtacgggagccgcgtggaggcggtgtac

SEQ ID NO: 317889 - DNA, 201 bp, Homo sapiens
ggaggcagaggttgcagtgagccaggatcatgccactgcactccagcctaggttacagagcaagaatctgtctcaaaaaataaataaataaataaataaayaaacaaacaaacaaacataaaaagactgtgatggagatggcaggtggctgtgggagctccaaacagagcccctggctttgtctctggggaaactgggctg

SEQ ID NO: 317890 - DNA, 201 bp, Homo sapiens
gagctcaggcatctcctagagacagcaacagagcaggctcctgagtctcagtttctctatcccatgatggggacgcccaattcatggaactgctgggaagrataaatgtgcccgctacagaggaagcactgtgaaggcatttgctcttattattttgcctgttcttttaagactagggaggtgggggagacagaccctcag

SEQ ID NO: 317891 - DNA, 201 bp, Homo sapiens
gggtgcgggtctgtgccaggaactggcctaagctaagtccccaaaagacaccgtgagatgctttgtggctcttccggatcccaggggagaggtgggagcarccgtgatgcatgcgacctccggccctgaatccaccaacagctgtgactacttcagctattttaaacctctgggcaccaggaaactcctgtctcatcaacc

SEQ ID NO: 317892 - DNA, 201 bp, Homo sapiens
ttctctctactccaatgtgccccctccccaccaaggtcaccgtcaactactatgacgaggaagggagcattcccatcgaccaggcggggctcttcctcacrgccattggtgagttggcatggttgccgtctcagtgccttcatcacccagggcctggcactgttgtccttctctggggcacttaggcggttctcagtgcgg

SEQ ID NO: 317893 - DNA, 201 bp, Homo sapiens
ctggcttctctcgcccagcaccaccctgcgggtcaccatgagccaggcgagcaccgaggccagcagtgacaaggtaccacggcgggaagtccagcctctgygggcccgggaccatgccaggatagaggcagggtggaccagccctgtcccatagaaactgcacgtgggacatgtgtcattttcagttctgcagtaaccaca

SEQ ID NO: 317894 - DNA, 201 bp, Homo sapiens
tagaggcagggtggaccagccctgtcccatagaaactgcacgtgggacatgtgtcattttcagttctgcagtaaccacattgaaaaggcaaaaagaggccrggcgcagtagctcaagcctgtaatcccagcactttgggaggccgaggcgggtggatcacaaggtcaggagatcgagaccatcctggctaacacggtgaaa

SEQ ID NO: 317895 - DNA, 201 bp, Homo sapiens
gggcctccagaccagtggctggatttagcaaagccgccagccctaggcaccttcctcccttagtcccctgtccttcctgtcacctctccttaagccaacamcaaaacaccatggacagggtggcttaaaaacaaattcatcttctcacaattctggaggctggaagtccgagatcagggtggtggcatggtcggggttctg

SEQ ID NO: 317896 - DNA, 201 bp, Homo sapiens
catggtgaaaccccaactctactaaaaatacaaaaattagccgggcatggtggcgggcacctgtaatcccagctactccagaggctgaggcaggagaatckcttgaaccaaggagacagagtttgcaataagctgagatcacgccactacactctagcctgagtgacagagagagactcctcctcaaaaaaaaaaaaaaaa

SEQ ID NO: 317897 - DNA, 201 bp, Homo sapiens
aacaccaggatgaagagtttggatattcttgtatgggtaggcactgaggagccagtgaatattttcaagaaagcccatgacctgatttctgggttttttttgtttgttcgtttgttttttaaatcacttgtgtaatacagcttggaaagccaagaagggcaggtgcattcattcatgtattgccaaagactacactgagca

SEQ ID NO: 317898 - DNA, 201 bp, Homo sapiens
cagccctcctgcagcaaacatttatacttacggtgtgcccatactaggccaggtgctgaaacaaacaaacaaacaaacaagaagatccaatccctaccttsaaggagtgaactgccaaaagggccagtaactgtgggggcaaatggatggagttaggtcttcaaggagagatggacatttgccaggcagagaagtcagggg

SEQ ID NO: 317899 - DNA, 201 bp, Homo sapiens
tggatatcatcttgttattccttgttccttataacaattcctagtatctcctttatagaagaagaaactgaggcccagagaggcccccagctagtgaggggcagagccagacttgaccccaggtccaccaagaccaaagtccatgctcttcactgcaggctggttggtgcctctgtgcagatggaagataataatagctct

SEQ ID NO: 317900 - DNA, 201 bp, Homo sapiens
gctctcacctcacagggctgtcgtgaggattaaacaggctgagatgtgtgtgtgaatgggctctgaacagctcctggcatggcgcaagggctcaggaagtrtgctgccccacagcagcctgtgggcagcccggccagatcatactcatagattcagactgatctctggtactagggtcatgggtgatcatattttttttaa

SEQ ID NO: 317901 - DNA, 201 bp, Homo sapiens
accaggcccccaaaatagcagctgtgcctttgagacaggcttacacctatgtcttagtcacaaatcccacgagaatcccacctaagtccctctgagccctyttgggcctccagaccagtggctggatttagcaaagccgccagccctaggcaccttcctcccttagtcccctgtccttcctgtcacctctccttaagccaa

SEQ ID NO: 317902 - DNA, 201 bp, Homo sapiens
tgagggcgtgctgtgctcacaagaatctctatcacaaagacctttcatccccagaccctagcctctcaggcccaccctgtttcgctcagaaaaaaagggarggacctggctgctctcgcaaacacaagagcccctcatttttatccccaggccactttgggaaaggatacaatgggtgctatagaaaggtgaggctggatc

SEQ ID NO: 317903 - DNA, 201 bp, Homo sapiens
cccctcttaatgatggatgtggccaggcacggtggctcacgcctgtaatcccaacactttgggaggccgaggcgggtggatcacctgaggtcaggagttcragaccagcctggccaacatggtgaaaccccaactctactaaaaatacaaaaattagccgggcatggtggcgggcacctgtaatcccagctactccagagg

SEQ ID NO: 317904 - DNA, 201 bp, Homo sapiens
ccatttcacagctcaggagactaaggcccaagacaggctcccagacacacagcataccaatgatggaacccacagaggagctcaggcatctcctagagacrgcaacagagcaggctcctgagtctcagtttctctatcccatgatggggacgcccaattcatggaactgctgggaaggataaatgtgcccgctacagagga

SEQ ID NO: 317905 - DNA, 201 bp, Homo sapiens
ccaaggcctgaaggaagaagggacacaattgtttcaggcagaggggagagcacaagtcaaactgggagctttcaggagggcaggagccctggaggaacctrtctttccgcccagccacaaaaatgaacagcccatgcactggcctttacaccaacacggcttccatgatatggagggaatttttggtataatgggcacatt

SEQ ID NO: 317906 - DNA, 201 bp, Homo sapiens
caagtgtccttggtctatctgtaaaatggggtgctgaacatccatgggtgatttgcctaagtggtgaggctgagaccagaactgtctcctttctgggttcygtaattatgaactttaccatgtgccccatcacagtgatggcattgaacatggtccaaagaaaatagcctcagccctgtcccctcagtgggcactagacgt

SEQ ID NO: 317907 - DNA, 201 bp, Homo sapiens
ggaagaggcactccctgatccatcagcaaccccccccccaagtgtcaaggtccccttcccaggctctgtggccctaaaagagaaaaaggtgaagtgtgttyccccctgcctctcccctgcagcctggagaagagtgtccctctcatggtgaggggaatggccacagtctataaaactagcagctgttcttgacaatcccag

SEQ ID NO: 317908 - DNA, 201 bp, Homo sapiens
ccccccccaagtgtcaaggtccccttcccaggctctgtggccctaaaagagaaaaaggtgaagtgtgttcccccctgcctctcccctgcagcctggagaaragtgtccctctcatggtgaggggaatggccacagtctataaaactagcagctgttcttgacaatcccagctgccccctggttctccccagattcagcccc

SEQ ID NO: 317909 - DNA, 201 bp, Homo sapiens
agtagacatttgttaaacatgaccatgtgccgggcaggccctgggccccactgggcctgtctctaccctcgcacaggtcacccacatttaaaaaggctgtkatgaggccgggtgtggtggctcacacctgtaatcccagcactttgggggtctgaaggcaggcaaatcactaaaggcaaggagttcgagaccagcctgacc

SEQ ID NO: 317910 - DNA, 201 bp, Homo sapiens
taaataaataaacaaacaaacaaacataaaaagactgtgatggagatggcaggtggctgtgggagctccaaacagagcccctggctttgtctctggggaawctgggctggattgttgcaagtgacacaaaccaaggcctgaaggaagaagggacacaattgtttcaggcagaggggagagcacaagtcaaactgggagctt

SEQ ID NO: 317911 - DNA, 201 bp, Homo sapiens
agtaagtagaagttaatgtagcaaagaggcacatggatgagggcagattttggagccctcctgcgccctagccccgtccggcaggccaggtgggactcccrcacacaaaaggtagcctctgcacactcactggcaccctcgagggctgaagcctgggctccctgcccttcacacaggccgcagctgcaactcacacctact

SEQ ID NO: 317912 - DNA, 201 bp, Homo sapiens
gtcctgaggaaatgtattcactgtcatcagtttcacccgctttgaaaggcaggcaaagaaagcacctgacaaaaccttttgatcccccacgccttgtctcycacacccaggacattcccctgactcccatcttcacggacaccgtgatattccggattgctccgtggatcatgacccccaacatcctgcctcccgtgtcgg

SEQ ID NO: 317913 - DNA, 201 bp, Homo sapiens
tcggtgtttgtgtgctggtaaggggtgaccccagcctggagaggcagcgtggcagagtggccaagggccgagtcagatggacatgagtctagttcctggcyccgtcacttaccactgtgttaccttgagcaactctcttggcctctctgaaatgcccacatcgtagagtcactgtgagaattaaatgagatgaagcaggca

SEQ ID NO: 317914 - DNA, 201 bp, Homo sapiens
cctcacgtccatcccatcttcatgccaggcagagctcttctttgaaaatctgtggagtcagaggtgtaaggcattgggacaggtgggggtgagagttcccyccctcattttatttgttcatgaccttgacaaacgccacatgagtgggtgggtttacttggcctttgattccagcggcctttataaaggtggccgtgagca

SEQ ID NO: 317915 - DNA, 201 bp, Homo sapiens
tgcatgtattggtcagcttcaccaagtaacaaaccaacccgaaatctccatgaccgacaacagcaaaggcctgtgtcttgctggcattccatgttgattgytgctggtggtctgccactctgcttctttatgccttccttactctagcgctcaaggtgccagagcagccccagtctgggaaatgccattctcctagcacag

SEQ ID NO: 317916 - DNA, 201 bp, Homo sapiens; identical to SEQ ID NO: 66700

SEQ ID NO: 317917 - DNA, 201 bp, Homo sapiens; identical to SEQ ID NO: 66701

SEQ ID NO: 317918 - DNA, 201 bp, Homo sapiens
gaggatcattccccaacccccagccagaacaatgaagtggtaggaggtcccagacctccccgatggcagctcttgcagccgtaagctacgaggtccacacrgtgtctgctgacggtctccagtgggtagtgggatgttgaggcagggggtcgcataagatgacttcagcgaggtcctctctttcccgtgaccaaatgaatg

SEQ ID NO: 317919 - DNA, 201 bp, Homo sapiens
gctcaggagctcctgaccccgagcacagcagcacagggaagagcctccaccagcatccagccagcctccttgctttgctcctgggctaaagtcccagggtkaaagaagtgccaaattgtgccgccccctcacttggggaggtaggaccatgggcaactcactaaggctgtctttgggtctctcatctctaaaaaggggata

SEQ ID NO: 317920 - DNA, 201 bp, Homo sapiens
aatggttggtgagatgccaatcattccagttatcccacattctcagggggggtctcagaatctccccaagatacaaccaactcccgagccagccccttcckctctagccctgtgctctcagctgcttaaacaggcttagcagcagggcccttctcattcttggctaattcccaaatgggcttggttgctggtccccctgtc

SEQ ID NO: 317921 - DNA, 201 bp, Homo sapiens
cccctgacttcattctgagaccacagagggacaatattctacccagctgacgacggggacttggggtgtatagcggggtactttgttggaaaaggatcctrattcagagttctgctccctccccttctctctgtccaagaacttggtagagtgcgggatgtccgagacagctgaaggtagggtagggccctaccactcccc

SEQ ID NO: 317922 - DNA, 201 bp, Homo sapiens
gatctgccccctctattccaagcatttaaaacctccccattgctagggttggaggggtcagtgctgggggcagggagcatgcaggactctgaggtgggacmctgtgctgacaccggatgagtcccctatcctctctgcctcaagctgaactcacacggaggcaccatcgtggtttatggctctcaaatcatcctgacacct

SEQ ID NO: 317923 - DNA, 201 bp, Homo sapiens
ctccttgaaccccagactggggcctcatggcaccctctcctcctttatagtaattatcacagctgtaatcatgtaatccattgaaagtctgtcttttctgkccaggcacagtagctcacacctgtaatcccagcactttgggaggctgaggcgggcagatcacttgaagtcaggagtcccaaaccagcctggacaacatgg

SEQ ID NO: 317924 - DNA, 201 bp, Homo sapiens
tgagtcccctatcctctctgcctcaagctgaactcacacggaggcaccatcgtggtttatggctctcaaatcatcctgacacctggagcaccctgcctctyccaggcccccaccaacccatcatgtgtctccccacacagccctggcagccctcccacctgcccaaccagtctcctgccaccgctgcagaggcactggcca

SEQ ID NO: 317925 - DNA, 201 bp, Homo sapiens
taaccacttgtaaggacacagttccgggacattaaatacatctacaatgctgactaaccatcagcactctctatatccgttatacttttttttttttttttgagacacagtctcactctgtcgtccaggctggagtgcagtggtgccatctcggctcactgcaagctccgcctcccaggttcaagccattctcctgcctca

SEQ ID NO: 317926 - DNA, 201 bp, Homo sapiens
agtgtttgtccaggatggcacagccagtaaactgtggggtgcagagcccaggcccctgcctgctctgccaggctgccctcctggtacttatgtttcaggcktgcctcctccttgtttgtgatcctccctggagtcaatgaagggctccctgaatgaatgaatgaatgaacgaatgaatgaatgaatgtggcctgtgatgcc

SEQ ID NO: 317927 - DNA, 201 bp, Homo sapiens
tcctgccaccgctgcagaggcactggccacgctgataccaacaagccccaggactagggacccactccatgcctctgtccctggcctcaacctctgccttyccctgggcctgggcttcagttgtcccccatgtaaacctcagaggtggactgggtggtctctgagaacaagaacacagcagtggagggtggtccaggctct

SEQ ID NO: 317928 - DNA, 201 bp, Homo sapiens
gcgcagagggtagcaaatctctggaaataataatactagctgctccccttcctcaggttacctaatctggtaactctcttatagatggggaaacgggctgrgcgcagtggctcacccctgtaatcccagcactttgggaggccaaggtgggtggatcacttgaggtcaggagttcgagaccagcctgggcaacccagtgaa

SEQ ID NO: 317929 - DNA, 201 bp, Homo sapiens
ggtggcaagaaagctgtggcaggaaggaagggatctttgtaacaagagacaccccacctctgccctgttaggacccaggcactgggctccatccctgtgargactcagcactttactcagcgaccctgggcagggagacagggttccaggcccagctctgctagtggagcaaattcattcctgcctgggtctccatcttcc

SEQ ID NO: 317930 - DNA, 201 bp, Homo sapiens
tagctgttgttatggttatcattccccgggccctgtccttagtgagcttattgtccactttccctaacactatgatgagtagagtcaaaccaaccaccagmaccagttgccacaggcatgagaagcgaggcctttccaggtcaccacctgccttcagtattccaggctggcctggttccaaggccccaggctgcgttgttc

SEQ ID NO: 317931 - DNA, 201 bp, Homo sapiens
ctggcctggtgctgcagacagggatggggttgacaaggtggccggtgtgtgtccccctcacctgcatgccctccatcctttctcctacccagcgctgcctrgactggaaccgtgacatcctcaagaaggagctgggactgacagagcaggacatcattgacctgcccgctctgttcaagatggacgaggaccaccgtgcca

SEQ ID NO: 317932 - DNA, 201 bp, Homo sapiens
caactcacacctactctttcccctgggactcaaacgccttactgcctgcgccagggtctcttaacccaacctagtctccttcctgggacttctctgctgaygccactctgggtccgaggtgggtcccagagaccaaactcctcttgcaggccctctggtgcggtgggtaatttactgaaactcctcttcctcccttctcca

SEQ ID NO: 317933 - DNA, 201 bp, Homo sapiens
actcacacctactctttcccctgggactcaaacgccttactgcctgcgccagggtctcttaacccaacctagtctccttcctgggacttctctgctgatgycactctgggtccgaggtgggtcccagagaccaaactcctcttgcaggccctctggtgcggtgggtaatttactgaaactcctcttcctcccttctccagg

SEQ ID NO: 317934 - DNA, 201 bp, Homo sapiens; identical to SEQ ID NO: 66719

SEQ ID NO: 317935 - DNA, 201 bp, Homo sapiens
actggctgactgtgggccacgtggatgagttcatgtcctttgtccccatccccggcacaaaggtaagctagcctcctgaggctggagtgaatggggtagcrgcaaaccaatatattaccagcccctgccagcagagggcaagagctagaggaactcgacagcataaaggaaggaggaagtaggctgaagctggtttgcatg

SEQ ID NO: 317936 - DNA, 201 bp, Homo sapiens
ccccataaaggcttccccgtggtgctggactctccccgagatggaaacctaaaggacttccctgtgaaggagctcctggtaagatgctgagggccacttgygggtggagcatgatcctggagattctcataagacagagtggtcaggagaccctgggccgccttgacacattcatctgctgcccagagcctctgtttctcc

SEQ ID NO: 317937 - DNA, 201 bp, Homo sapiens
atgactgcccctcagatccaaagacagtgttcctgactgtcactggtgtctaggacagacaagaccaatttaacaccaccaccctttttaaattccccacygatgggaagtttgttcttggattggcaagcttgagtcctgacttcctggaggcttcctctctaatattaaacataccctcaaaaactacccataggatat

SEQ ID NO: 317938 - DNA, 201 bp, Homo sapiens
ccctcaaaaactacccataggatatagggaccattatttttgtacaaataggggcaagcagtgccccagatttctctttgtattttagaaagagagatagrgagaaaatagatagaatacagtttggggacaggaagaaaactggactttgatggacagaaggcatggtcaggcatcgtcgttgtcagttcaggagtgaaa

SEQ ID NO: 317939 - DNA, 201 bp, Homo sapiens
tattttagaaagagagatagggagaaaatagatagaatacagtttggggacaggaagaaaactggactttgatggacagaaggcatggtcaggcatcgtcrttgtcagttcaggagtgaaacattatctcctggacttagacattcatgtaattgggacagacagagagaggatgcgcggatgtgcagtcagcagagagta

SEQ ID NO: 317940 - DNA, 201 bp, Homo sapiens
gcacagggaccggctctagtgagtgctcaggaaatggcagctgctgttctggcatctgtgaccttcctctgtcctattacgactgctgttcatgaacccckgtggacagggccagggagaggctgcagaggcgcccgctgactgctagaagtctctctggagtgccggggcccctggcctggtgctgcagacagggatggg

SEQ ID NO: 317941 - DNA, 201 bp, Homo sapiens
ctccttgtaactccttgaaatctgtattttacaccaggggtccccaacccccaggctatggaccattaccagtctgtggtctgttgggaaccaggcacacmgcaggaggtgagcattgggctagcaagggaagttttgtctttagattcccataggagcacaaatgctattgtgaactgcgcaggtgagagatctaggctg

SEQ ID NO: 317942 - DNA, 201 bp, Homo sapiens
cgtttagaagagcttcggccacatagtaggtgctcattgagcattaggcattactaatcaagctggaagccacataagccatcgtgtggtacaggaggcaracgcaggccactccagagcagcagccaagatgaggcagctctggaaaacaggaagggtgtcccctttggccatgctgcttctgccacattcatgctggtc

SEQ ID NO: 317943 - DNA, 201 bp, Homo sapiens
agcgtttagaagagcttcggccacatagtaggtgctcattgagcattaggcattactaatcaagctggaagccacataagccatcgtgtggtacaggaggmaaacgcaggccactccagagcagcagccaagatgaggcagctctggaaaacaggaagggtgtcccctttggccatgctgcttctgccacattcatgctgg

SEQ ID NO: 317944 - DNA, 201 bp, Homo sapiens
tctctgtgcctcagtttcctcatttttcagggtagtgactaccccatagaaatgtggggaggatccatgagttaattcaatgtaaagcgtttagaagagcktcggccacatagtaggtgctcattgagcattaggcattactaatcaagctggaagccacataagccatcgtgtggtacaggaggcaaacgcaggccactc

SEQ ID NO: 317945 - DNA, 201 bp, Homo sapiens
agaaggaacagcaaagggaaaagccccaagggatagcaagtgtagcaggtggctggagcagacagaaccgggggaagggagggaagcgagggaggaggtcyagccaggagccagatcagaaaggaatttgttggccaccctaaggagctagggttatcttcggaggataatggagagattgaagaccttggggggtctaga

SEQ ID NO: 317946 - DNA, 201 bp, Homo sapiens
ttcatcccaaccccagtgcaagctcccaaacaagattcctatatttgtaccccaaaagccatgagaggaatgttaaaattcaggggccaatggggttatgwcttgcgggctaactccaattttttggagctctgtgtgaagaagggttctgaggcttcctctgggctcagtggcaagtctggcaggttgagactgggttga

SEQ ID NO: 317947 - DNA, 201 bp, Homo sapiens
cccttctgagtccctaagcctcaaagattacatccggcttgtagctgggcatctttgctgctgtccagttataaacctgggaagtgcaatggaccagcagkctcttcccagatgaggccaaaataaataaacaaataataggttaagagcataggctctggaatcagactgcctgatctgcacaccaactctgccgcttgc

SEQ ID NO: 317948 - DNA, 201 bp, Homo sapiens
gatgtgactagagttgaggcttggatgttaagaagtaggcagccatcaggagattgtaaaggaagcgcattccatacagaaggaacagcaaagggaaaagmcccaagggatagcaagtgtagcaggtggctggagcagacagaaccgggggaagggagggaagcgagggaggaggtccagccaggagccagatcagaaagg

SEQ ID NO: 317949 - DNA, 201 bp, Homo sapiens
tgtcccctgagcatcagttcaagtgcagcctggggcctgtgggcatgggagggcccgagtgcctggaggaaaatgttttcatgatgccagtctatctgaawctactgactgacagggctgcagggtgcacactattgtttctgggtgagcaggacctcactttctattctttgggactttcagtatctgaatttttccacc

SEQ ID NO: 317950 - DNA, 201 bp, Homo sapiens
gaggcaggaggaccgcttgagcccaggagtttgaggctgcagtgggccataatcatggcactgcactccagcctgggcaacagagtgagaccctgtctcaraaaaaaaaaaatggggctgatatcggtaagaaacctgcctgtgatgtgcagagactgcctatggacacctgtgctgccatcatcagtgtgaggggaggag

SEQ ID NO: 317951 - DNA, 201 bp, Homo sapiens
gaccctcccttctgagtccctaagcctcaaagattacatccggcttgtagctgggcatctttgctgctgtccagttataaacctgggaagtgcaatggacyagcaggctcttcccagatgaggccaaaataaataaacaaataataggttaagagcataggctctggaatcagactgcctgatctgcacaccaactctgcc

SEQ ID NO: 317952 - DNA, 201 bp, Homo sapiens
cctgtctccatggcaggcctagggatgctgagggtcccttcaccaagagaagggataagtgggggcctggccctggatcctccatctagactcacaggtgmcctcagaccaagaggggttagagacagcttcccacccacagtaaaaccctcagtccttgaaggtgggatctagaccactggaagttctgggagagaaaga

SEQ ID NO: 317953 - DNA, 201 bp, Homo sapiens
gagaggctgcagaggcgcccgctgactgctagaagtctctctggagtgccggggcccctggcctggtgctgcagacagggatggggttgacaaggtggccrgtgtgtgtccccctcacctgcatgccctccatcctttctcctacccagcgctgcctagactggaaccgtgacatcctcaagaaggagctgggactgacag

SEQ ID NO: 317954 - DNA, 201 bp, Homo sapiens
gtaaggaggctcctggggacaatggctgaattgttcccaccaagaaatcagtccgcccggagctggccccaactgtcagaaagcagcccagaatagaggtrcattgtgaatcacaggccacgggccacatcgggagggagaaagctgccggcagacggactagaacgtgtcctccacctgccccaccacccctggccagat

SEQ ID NO: 317955 - DNA, 201 bp, Homo sapiens
gtgacatcctcaagaaggagctgggactgacagagcaggacatcattgacctgcccgctctgttcaagatggacgaggaccaccgtgccagagccttcttyccaaacatggtgaggccctgcagaccccaaccctcgccccatgccagtacagggcagccagatccagaaggacccctcagctgaagctgtccaatgggga

SEQ ID NO: 317956 - DNA, 201 bp, Homo sapiens
ggctgcccccacacgaagagttatttggctcaaaaatgtcagtagtgccttccattgcagctaatgcatctgctgtaaccaggaagggccccattttacargtgaggaaactggggctcagagaggtcctctaacctgcccaaagtcacacagcttataagcagagaaccagggtctaaaccccaccttgtctgatactaa

SEQ ID NO: 317957 - DNA, 201 bp, Homo sapiens
caggacatcattgacctgcccgctctgttcaagatggacgaggaccaccgtgccagagccttcttcccaaacatggtgaggccctgcagaccccaaccctygccccatgccagtacagggcagccagatccagaaggacccctcagctgaagctgtccaatggggaggcccaggtcccaatcctggctgagctgctgtgtg

SEQ ID NO: 317958 - DNA, 201 bp, Homo sapiens
atttttggctgtcacaactgggagggatgttactggcatctggtaggtagaagccaggagtgctgttaaacatcctacaatgcacaggctgcccccacacraagagttatttggctcaaaaatgtcagtagtgccttccattgcagctaatgcatctgctgtaaccaggaagggccccattttacaggtgaggaaactggg

SEQ ID NO: 317959 - DNA, 201 bp, Homo sapiens
cttccaactattccaaggatagatattattattatcatcctcattttatagatgagaaaatcaaggctcagaaaaggtaaaacaaatacttgcctgcagcyacatctccagaaaatggttggtgagatgccaatcattccagttatcccacattctcagggggggtctcagaatctccccaagatacaaccaactcccgag

SEQ ID NO: 317960 - DNA, 201 bp, Homo sapiens
tgaacccaagaggtggaggttgcagtgagccaagatggtgccactgccctccagcctgggcgacagagcgagactttgtctcaaaaaaaaaaaaaaaaaaatttgctatcaactatcactatcattttaactcttaaaaaataggcaaggcataatctcagaataaaagacagtcatggccgggcacagtggctcacgcct

SEQ ID NO: 317961 - DNA, 201 bp, Homo sapiens
tgcctgcagccacatctccagaaaatggttggtgagatgccaatcattccagttatcccacattctcagggggggtctcagaatctccccaagatacaacyaactcccgagccagccccttcctctctagccctgtgctctcagctgcttaaacaggcttagcagcagggcccttctcattcttggctaattcccaaatgg

SEQ ID NO: 317962 - DNA, 201 bp, Homo sapiens
ggcatccagatctgtgcagcgaggatcattccccaacccccagccagaacaatgaagtggtaggaggtcccagacctccccgatggcagctcttgcagccrtaagctacgaggtccacacagtgtctgctgacggtctccagtgggtagtgggatgttgaggcagggggtcgcataagatgacttcagcgaggtcctctct

SEQ ID NO: 317963 - DNA, 201 bp, Homo sapiens
ttgccgcatggcagaggaagggaactaccagttattgagagtcaactgcatgctgagtgctttcaaaataatgatgcggcctgcttattgcaggcctactstgtgtctagagctgcactgggcactttgatgaggaggaggagggggagaatggtaaacacctgatattaattgagcacctatggtgtgccaggctccagt

SEQ ID NO: 317964 - DNA, 201 bp, Homo sapiens
agaatgtctgtctgctcatttctctggccagcctccacctccctgcctccacccacaccagacaccagctgcaccagacaggaggcccataaatgcctcastcagccttcctgtctctgtgcctctattgaacttgcctttgatgcccacattcatcctctgtggacatcagtcttgagattcacatttgccaggtcacag

SEQ ID NO: 317965 - DNA, 201 bp, Homo sapiens
attttgttcatccaaccttggtttaacattgacagagttgccgcatggcagaggaagggaactaccagttattgagagtcaactgcatgctgagtgctttmaaaataatgatgcggcctgcttattgcaggcctactgtgtgtctagagctgcactgggcactttgatgaggaggaggagggggagaatggtaaacacctg

SEQ ID NO: 317966 - DNA, 201 bp, Homo sapiens
cagcctctttatgcttttctatagtttccataatacacatccatggggattttttcctgattatcaaagtaaaaggcattgggaagctgaggctccagcarcagatagatctcttcattctcaccttctgtccctcagatctcaaggacatgtcccagatgatcctgcggaccaaaggccccgaccgcctccccgccggat

SEQ ID NO: 317967 - DNA, 201 bp, Homo sapiens
caacaccaaaacaccatggacagggtggcttaaaaacaaattcatcttctcacaattctggaggctggaagtccgagatcagggtggtggcatggtcggggttctggtgacggctttcttcctggcctgcaaatggccaccttgtcactgcgtcctcacaagatctttcctcagtccatggagagagatctctatctacct

SEQ ID NO: 317968 - DNA, 201 bp, Homo sapiens
atggggattttttcctgattatcaaagtaaaaggcattgggaagctgaggctccagcaacagatagatctcttcattctcaccttctgtccctcagatctyaaggacatgtcccagatgatcctgcggaccaaaggccccgaccgcctccccgccggatacgagatagttctgtacatttccatgtcagactcagacaaag

SEQ ID NO: 317969 - DNA, 201 bp, Homo sapiens
gtctgacgttggtccttttccctccagacccgttcttcggccaacgctatatccacatcctgggccggcggaagctctaccatgtggtcaagtacacgggkggctccgcggagctgctgttcttcgtggaaggcctctgtttccccgacgagggcttctcaggcctggtctccatccatgtcagcctgctggagtacatgg

SEQ ID NO: 317970 - DNA, 201 bp, Homo sapiens
caaaggccccgaccgcctccccgccggatacgagatagttctgtacatttccatgtcagactcagacaaagtgggcgtgttctacgtggagagtgagtgaycccagcccagcccagcctagacctttctagccacctaccctcctccccttagcagttgtggccttcacaggtgcaggtgcctggggaagacctggattgg

SEQ ID NO: 317971 - DNA, 201 bp, Homo sapiens
ccatagttgagaactcctggaacccaagagcaccaggcccccaaaatagcagctgtgcctttgagacaggcttacacctatgtcttagtcacaaatcccaygagaatcccacctaagtccctctgagccctcttgggcctccagaccagtggctggatttagcaaagccgccagccctaggcaccttcctcccttagtccc

SEQ ID NO: 317972 - DNA, 201 bp, Homo sapiens
ggatggtgtggtggagaagaacaacccaaagaaggtacctagctttcagggcaggcaccaccctgaacccagggcttccgagggcacagccccagatcccrcaggcaattcccatttcacagctcaggagactaaggcccaagacaggctcccagacacacagcataccaatgatggaacccacagaggagctcaggcatc

SEQ ID NO: 317973 - DNA, 201 bp, Homo sapiens
tacctagctttcagggcaggcaccaccctgaacccagggcttccgagggcacagccccagatcccgcaggcaattcccatttcacagctcaggagactaargcccaagacaggctcccagacacacagcataccaatgatggaacccacagaggagctcaggcatctcctagagacagcaacagagcaggctcctgagtct

SEQ ID NO: 317974 - DNA, 201 bp, Homo sapiens
aaatggcaattatggcttttgttgagattatgatgatgactgttagttacaatgattggagtggacagaaggcttcagtgctcctaggaagacctggtgayggccttagcctcaaattctgcccaaaacaccaagcactggggccttacctctttatacaaggaaatggtaatccagtttgcccaggactttccttatttt

SEQ ID NO: 317975 - DNA, 201 bp, Homo sapiens
tattcctgcccctgcaccccaggctctttaacagcccctggtggtaccgccttcccttctttcccctggggtccttatcctgcaccagcctcccagattamcagcccgatttgctgacaagtggcttctctgaacctgggtttgctgccctgtgaaacgggagcaatgctattcatctcatgggactgtggacgccttgag

SEQ ID NO: 317976 - DNA, 201 bp, Homo sapiens; identical to SEQ ID NO: 66723

SEQ ID NO: 317977 - DNA, 201 bp, Homo sapiens
ataccaaatttaaaattagtgtgagttttacaccttataacacacctccgttcagaatagccgcatttccagtgctcggtagccatgtggatgttgtggggttagaccatggaacgatggcttcgtaaaggatgaaaattatagacagctgagtgatagaaagtttagaggctcagaaccatagaatcattggagcttaca

SEQ ID NO: 317978 - DNA, 201 bp, Homo sapiens; identical to SEQ ID NO: 66724

SEQ ID NO: 317979 - DNA, 201 bp, Homo sapiens
ataaatggcaattatggcttttgttgagattatgatgatgactgttagttacaatgattggagtggacagaaggcttcagtgctcctaggaagacctggtratggccttagcctcaaattctgcccaaaacaccaagcactggggccttacctctttatacaaggaaatggtaatccagtttgcccaggactttccttatt

SEQ ID NO: 317980 - DNA, 201 bp, Homo sapiens
accctgggccgccttgacacattcatctgctgcccagagcctctgtttctcctctgcaaaatgagtccacttgggatagctgcctctgaggtcctttcctrctctgataactgatgtttttccaaaacatagagagttttctagtgggaaatgggaactaagggaaatagagttaagacctagttccagaggccctggccc

SEQ ID NO: 317981 - DNA, 201 bp, Homo sapiens
cgtggatgagttcatgtcctttgtccccatccccggcacaaaggtaagctagcctcctgaggctggagtgaatggggtagcggcaaaccaatatattaccmgcccctgccagcagagggcaagagctagaggaactcgacagcataaaggaaggaggaagtaggctgaagctggtttgcatgttgttgctgtggcaggtaa

SEQ ID NO: 317982 - DNA, 201 bp, Homo sapiens
gctactgggttcaagcagtcctcctgccccagcctcccgagtagctgggactccaggcacctgccatcgtgcccagctaatttttttttttttttttttttagagacaggtcttactatattgcccaggctggtagtttatattctttttccataccaaatttaaaattagtgtgagttttacaccttataacacacctcc

SEQ ID NO: 317983 - DNA, 201 bp, Homo sapiens
gatagaaagaatgacagggagtcaggtcagcccagggagtggccctgaaccccctcgaggagctcagggggggcccttaaagacaaatatttactgagaarctactctgtgccaggcactattctaggctctggggatacagcggtgaccagaacagatgaagtcccagctctccgggagtttatagttgggtaagggcag

SEQ ID NO: 317984 - DNA, 201 bp, Homo sapiens
ttacaacgatagaaagaatgacagggagtcaggtcagcccagggagtggccctgaaccccctcgaggagctcagggggggcccttaaagacaaatatttaytgagaagctactctgtgccaggcactattctaggctctggggatacagcggtgaccagaacagatgaagtcccagctctccgggagtttatagttgggta

SEQ ID NO: 317985 - DNA, 201 bp, Homo sapiens
ttaatgtgtctctttctgctctggtgactctcaggaggcatgtggtgtggttggtgtgcatgtatttttaatttgtgcagacagcatggtgttctccaccwcattctgttttgtacttttccctcaacctagtttttaggctccatcagtcttgctctgtgtacattcaggctgttgcttctaactgctttccattttctg

SEQ ID NO: 317986 - DNA, 201 bp, Homo sapiens
gtgggttataccaactctgactgcaggctgaaccccaaatcccagtttcaggttgtgccctaccctggggccaggcatctcagccagccttgctcttgctytggggagaaactggatgaggagaagaggtcctgtccctctagagaagcccccatcactgagggcgtgctgtgctcacaagaatctctatcacaaagacct

SEQ ID NO: 317987 - DNA, 201 bp, Homo sapiens
gaagcacctctggcctcctgtgacccttgctgtggctgggtggactgtgagctgcccgcagctccttagtgtcaccagcagtgcacagcgcatcttcaagycctagcgtatactttaaatggcaccagacccagtggagggttaaatggttgaaaactgacatgcagctgggtctggtggctcatgcctacaattccaaca

SEQ ID NO: 317988 - DNA, 201 bp, Homo sapiens
agaccctgatgaaatggagggacttacaacgatagaaagaatgacagggagtcaggtcagcccagggagtggccctgaaccccctcgaggagctcaggggsggcccttaaagacaaatatttactgagaagctactctgtgccaggcactattctaggctctggggatacagcggtgaccagaacagatgaagtcccagct

SEQ ID NO: 317989 - DNA, 201 bp, Homo sapiens
gcaaagcctgcacgtgtctgccagggtcctctgagccatgctcctgggatcagtctccttgctgcttctgctccccacggattccctgtgggcaatgtttyctgacacactccacgcctgtgtcctggcctgccctgctccctgcctaggtctaaggcccagagtcctgctgattagcgcgaggctctaagcagccaccca

SEQ ID NO: 317990 - DNA, 201 bp, Homo sapiens
agcccctctcctgcttcccactcccagttcagcggagcttccgcggagacttgccggggactggggcaggacccgaagggagctgccctgaggctgaatcyggccctggaggttactcaggctccgatttcgccctgtgggggctgctggtggttgcttgtccccaggcactggccctgagctccgtgtccccagatacct

SEQ ID NO: 317991 - DNA, 201 bp, Homo sapiens
gtgagcaggacctcactttctattctttgggactttcagtatctgaatttttccacctcatttcttggactcctccctcccaagggaggatgaggtgggaygtggtttccctgccttctgtttggaaactattcaatgaaaactccttcacatcctcgtaatacaggtccaagcagtgttactgatggttacccatggtta

SEQ ID NO: 317992 - DNA, 201 bp, Homo sapiens
tcctttctgagattggtttcctcatctgtgaaatggaaacaattacatcctcccctggaaccactaactgctcagctggcaatttcctatcagccgttcaygagagagcttgcttattttatagatggggaagccaaaagccagagagggtgactgtctggcaaagcgccacacagccagcacacagcagtgctgagacaa

SEQ ID NO: 317993 - DNA, 201 bp, Homo sapiens
aggtccaagtcatgctcagcgtgagatgagcccactcgggcagctctggggacctggaacgggcacatgtcatgtgtgtgacactcccaacaccttcccarccacatccctactcgacctcgtccgtctccaactcaaggcaatttcgcctcccaagggacatttgacaatatctggagacatttttggctgtcacaactg

SEQ ID NO: 317994 - DNA, 201 bp, Homo sapiens
cctttccatgccctccaggcagagggtgtgcctgccacggggactaaccaggaatgcattcattaccacccagcgcccaccaggtccaagtcatgctcagygtgagatgagcccactcgggcagctctggggacctggaacgggcacatgtcatgtgtgtgacactcccaacaccttcccaaccacatccctactcgacct

SEQ ID NO: 317995 - DNA, 201 bp, Homo sapiens
gtccagcccgagttgtccctcatcccgagcccccgagcccagaaatcctaagaatctcatccagaaacctgacaacccccgaaccttgtgtccaccttccwgaaaccctgagactctcccagaccccctaacacagcctcagccccagctccctcacagaccctccctttcacccgtaaccctccgtctggccctctccag

SEQ ID NO: 317996 - DNA, 201 bp, Homo sapiens
cactcctcctttctgagattggtttcctcatctgtgaaatggaaacaattacatcctcccctggaaccactaactgctcagctggcaatttcctatcagcygttcacgagagagcttgcttattttatagatggggaagccaaaagccagagagggtgactgtctggcaaagcgccacacagccagcacacagcagtgctg

SEQ ID NO: 317997 - DNA, 201 bp, Homo sapiens
tttcccctggggtccttatcctgcaccagcctcccagattaccagcccgatttgctgacaagtggcttctctgaacctgggtttgctgccctgtgaaacgrgagcaatgctattcatctcatgggactgtggacgccttgagagcaggtgctgtgcctccattgcccgttgcctggtacagctcccggagcagtagctcct

SEQ ID NO: 317998 - DNA, 201 bp, Homo sapiens
atggatacaggatgtgcttcaagttaagttgttactcaacggaaaacatattcaggatgctgcttgctatttgtgtgttttgttttgtttgagacgaggtstcgctctgtcacccaggctggagtgcagtggcatgatctcagctcactgcaacctccgccttgcgggcttaagcaatcctcccacctcagcctcccaagt

SEQ ID NO: 317999 - DNA, 201 bp, Homo sapiens
gggcagtcgctggggaaagagtgaataccttaggttctcacgtcacaaaagggctgccaggagcctgcacagatggggtcagccaggatttggccgccagkttcctccgagccacatgggatgctcagccttctgcggggaggccactggcacagccagcgactgtttgcccacttttgcctccttctccctccactcagt

SEQ ID NO: 318000 - DNA, 201 bp, Homo sapiens
ggctgccgagtccttcccaattctcctgccagagcccaagaccagtagtctttgcccatagcccctgaagtctgtggcccaggtcagacagacactgcccrgcagcctctacagattcacgctcacggccttggccagcccagggctctcagcagtggaccgcagtgctgattgtctggaccagtggttctcaaagtgtgg

SEQ ID NO: 318001 - DNA, 201 bp, Homo sapiens
tgcgccagggtctcttaacccaacctagtctccttcctgggacttctctgctgatgccactctgggtccgaggtgggtcccagagaccaaactcctcttgsaggccctctggtgcggtgggtaatttactgaaactcctcttcctcccttctccaggtctggtggtcggaggatgaccaaggtggtgcgtgacttcctgaa

SEQ ID NO: 318002 - DNA, 201 bp, Homo sapiens
cagggaagttggggcacacagagacagaaagggcacagcttcagaggcctggagtataaggctggagggtcaatgagctctaaccaggctttgaatgcatygttcagacattggactttgttctgtaagtagcagggagtcactgaaggtttctgaggagaggagtagctatagatcagattgtttcttccctaaggagag

SEQ ID NO: 318003 - DNA, 201 bp, Homo sapiens
acttgccctccagaaaaatgcttatatcaatctatctcctgaacttggatcagttttagaaaatcacagatccctaaagttttctgtttctacctggaccytcccttctgagtccctaagcctcaaagattacatccggcttgtagctgggcatctttgctgctgtccagttataaacctgggaagtgcaatggaccagca

SEQ ID NO: 318004 - DNA, 201 bp, Homo sapiens; identical to SEQ ID NO: 66716

SEQ ID NO: 318005 - DNA, 201 bp, Homo sapiens
gggagtggactggtctggttccataatctcatccctccccgtcacttgccatctgagatgggtcctgagcagacaagaaaaaagaggaactactaccacargggctttgagaacgtcccttggagcctcttatttgggctgcccatcctgtggggagcagccacgactgagacagtggggacccagaagagacagtttccc

SEQ ID NO: 318006 - DNA, 201 bp, Homo sapiens
aaaatctggcaaagattttactcacatgacacacctaaattcagactagccacagctcaagtgttcagtagtcacataaggctagtggctattgtgttggyggtaatgctttagagagaaatagggtatgcacctgtggcactggaaagaggttctttcattttcttatgggtacgacttcataccctggaaattctctgc

SEQ ID NO: 318007 - DNA, 201 bp, Homo sapiens
gagacctgttgcaaataatgatgtctggacattatctagaagtttcttctttttgctaaagggagtggactggtctggttccataatctcatccctccccrtcacttgccatctgagatgggtcctgagcagacaagaaaaaagaggaactactaccacaggggctttgagaacgtcccttggagcctcttatttgggctg

SEQ ID NO: 318008 - DNA, 201 bp, Homo sapiens
acatatgcacacatggacacatatatacacacatgagcacacataaacacatgtgcatgcatggacacatatatacacacacatgcacacagaaacacacatgcacgcatgaacatatatacacacatgcacacacagaaatacacatgcacacataaatgcatacatacccatacgtgtgtgcacattcatacacatgta

SEQ ID NO: 318009 - DNA, 201 bp, Homo sapiens
atgacacacctaaattcagactagccacagctcaagtgttcagtagtcacataaggctagtggctattgtgttggcggtaatgctttagagagaaataggktatgcacctgtggcactggaaagaggttctttcattttcttatgggtacgacttcataccctggaaattctctgcaaattgtgtggctgcttggcaactt

SEQ ID NO: 318010 - DNA, 201 bp, Homo sapiens
acgagacctgttgcaaataatgatgtctggacattatctagaagtttcttctttttgctaaagggagtggactggtctggttccataatctcatccctccycgtcacttgccatctgagatgggtcctgagcagacaagaaaaaagaggaactactaccacaggggctttgagaacgtcccttggagcctcttatttgggc

SEQ ID NO: 318011 - DNA, 201 bp, Homo sapiens
tacatatgcacacatggacacatatatacacacatgagcacacataaacacatgtgcatgcatggacacatatatacacacacatgcacacagaaacacacatgcacgcatgaacatatatacacacatgcacacacagaaatacacatgcacacataaatgcatacatacccatacgtgtgtgcacattcatacacatgt

SEQ ID NO: 318012 - DNA, 201 bp, Homo sapiens
ataaggctagtggctattgtgttggcggtaatgctttagagagaaatagggtatgcacctgtggcactggaaagaggttctttcattttcttatgggtacracttcataccctggaaattctctgcaaattgtgtggctgcttggcaacttggagatgtcctgtccaagtccacctttgactctgagccttgatctggtga

SEQ ID NO: 318013 - DNA, 201 bp, Homo sapiens
tataacataaaaagaggttagaacaatacatatgcacacatggacacatatatacacacatgagcacacataaacacatgtgcatgcatggacacatatayacacacacatgcacacagaaacacacatgcacgcatgaacatatatacacacatgcacacacagaaatacacatgcacacataaatgcatacatacccat

SEQ ID NO: 318014 - DNA, 201 bp, Homo sapiens
cccaaccacatccctactcgacctcgtccgtctccaactcaaggcaatttcgcctcccaagggacatttgacaatatctggagacatttttggctgtcacractgggagggatgttactggcatctggtaggtagaagccaggagtgctgttaaacatcctacaatgcacaggctgcccccacacgaagagttatttggct

SEQ ID NO: 318015 - DNA, 201 bp, Homo sapiens
gagccaaaaccagtattattcctgcccctgcaccccaggctctttaacagcccctggtggtaccgccttcccttctttcccctggggtccttatcctgcascagcctcccagattaccagcccgatttgctgacaagtggcttctctgaacctgggtttgctgccctgtgaaacgggagcaatgctattcatctcatggga

SEQ ID NO: 318016 - DNA, 201 bp, Homo sapiens
tgagatgagcccactcgggcagctctggggacctggaacgggcacatgtcatgtgtgtgacactcccaacaccttcccaaccacatccctactcgacctcrtccgtctccaactcaaggcaatttcgcctcccaagggacatttgacaatatctggagacatttttggctgtcacaactgggagggatgttactggcatct

SEQ ID NO: 318017 - DNA, 201 bp, Homo sapiens
cccctgaagtctgtggcccaggtcagacagacactgcccggcagcctctacagattcacgctcacggccttggccagcccagggctctcagcagtggaccrcagtgctgattgtctggaccagtggttctcaaagtgtggtactgggaccggcagcatcaacagttcctggaagcatgttagaaatgcagattcttgggcc

SEQ ID NO: 318018 - DNA, 201 bp, Homo sapiens
agcagccaagatgaggcagctctggaaaacaggaagggtgtcccctttggccatgctgcttctgccacattcatgctggtcagctgctcatccttaggagyaggctctaggtgggagaaccagggggctacttgtagcacccctgatcccactggccaaagcaagagcaaggcagctgccaccactgtcctggctcagatg

SEQ ID NO: 318019 - DNA, 201 bp, Homo sapiens
acccagtggagggttaaatggttgaaaactgacatgcagctgggtctggtggctcatgcctacaattccaacacctttggaggctgaagaaggaggatcayttgagtccaggagttcgagaccaatctgggcaacatagtgagagccccatttttataatactttttttttttttttttgagacagagtttcgctcttatt

SEQ ID NO: 318020 - DNA, 201 bp, Homo sapiens
tggcaccagacccagtggagggttaaatggttgaaaactgacatgcagctgggtctggtggctcatgcctacaattccaacacctttggaggctgaagaargaggatcatttgagtccaggagttcgagaccaatctgggcaacatagtgagagccccatttttataatactttttttttttttttttgagacagagtttc

SEQ ID NO: 318021 - DNA, 201 bp, Homo sapiens; identical to SEQ ID NO: 66752

SEQ ID NO: 318022 - DNA, 201 bp, Homo sapiens
ccaggattccctctactatggggacctcatcctgcagatgctctcagagtccgtcctgcctgagtggaccatccgggagtttaagatatgcggtgtatgtwagcttgcttgacttaacaaccgagcttggggagatgaatgagatctgtgaaccccactttcgctggttcctctcttgtagtttcagcccataggagttgc

SEQ ID NO: 318023 - DNA, 201 bp, Homo sapiens
gtccatcaaagtgcagtcggccggcatgaccagcgaggtggttgaagacagcactatcacaatgatagaccgtaagtgtccctggaggtgcgcacagagcytcctgtcactggagtgaaggggctgtgcacctttctctatcatatccatcactgctattcacttgcatacacttcacttttgcataagcctgtctgattg

SEQ ID NO: 318024 - DNA, 201 bp, Homo sapiens
gcttaaggttggcatcaatacattgtcaaatgtttcctactaagctatgggttgatttctgtattttaaaatgtcagtttttccatgaggttctgagacarttgtccttatcctgttacctagcgcaggacctggggcttagtaggcactcagtaaatacttggcaaaggaataatcagaaatcacttagatcaggggtcc

SEQ ID NO: 318025 - DNA, 201 bp, Homo sapiens
ataatcttttcactctcagatgctttccgctcttatctggctggcgaattctctgtacacttcaaaagccagctcaaccctcaaccacccacactatcctrtcagcccacagctgggcagttgggtgctccatcagccccatgtccacgtccccatcaccgtctgcctacattcctctaatcctacatttacagtggcttt

SEQ ID NO: 318026 - DNA, 201 bp, Homo sapiens
gtctgttggtcaaaaccactattcatcctttttcacacaaggtgaaaatgtgaacctttatggttctgggactagggagcaaaaatcttagcaaaggaaaygaatgttcagtccaatgtgctggaaagaattaaatttaaatagctaccattttcccaatatatttatgctttctggggtttatacctgagatttctgctt

SEQ ID NO: 318027 - DNA, 201 bp, Homo sapiens
taatctgggaaaatgctcatcctaaaggaaaaacaaattttgtatctattttttcttaaacatgtgaatcatatttctgtgaaaacttttgataattgtgycttttctaataaaatgttagtagttgcaaatatttccagcagtttttaaaaacaagcataatgagttgcttttgagagcaactaaaggatgtatagatgg

SEQ ID NO: 318028 - DNA, 201 bp, Homo sapiens
tggggagatattggctgatggtggggggaacatttattttcatttggaacttaatctttatgtgaccaaaaattgatgtggatcaaagggattgtacaacytctctagaagaatggattgaaagggggttaatctaaaaagaaggtggaagtacagtatttttttctattaaaaatgaattattttctaaatagtgagtga

SEQ ID NO: 318029 - DNA, 201 bp, Homo sapiens
tatgttgctaaaaagtcagcattaatattttgttagtttattgtcactttcacaaactcaaaccctaattaatttgtaacttgggaaagaggaggttatcrtattgtaaatagtctcaaactgtgtgtatttgtgtgctctagtaattgtcaaaggattcttgggccatgtatcacctccatacacctgccccaaactcat

SEQ ID NO: 318030 - DNA, 201 bp, Homo sapiens
accctcccagcccagataagatggcagaatatttaaaattaaagatattagatatacttaacaaatctaattctaatctgggaaaatgctcatcctaaagsaaaaacaaattttgtatctattttttcttaaacatgtgaatcatatttctgtgaaaacttttgataattgtgtcttttctaataaaatgttagtagttgc

SEQ ID NO: 318031 - DNA, 201 bp, Homo sapiens
aagagacccagagagggttgttatgggatggtggctgcaatgagataggccacactgggaggagctggaacctcgtatatacattttctgggcctttttcrtaagctaaatgacaacgatttattcatcatttatgaagatttcattttacatgcctatcagggtccatgtggcaagcatctagaagtcaccacctggttt

SEQ ID NO: 318032 - DNA, 201 bp, Homo sapiens
tgaggaaactgacagtgagttcaggcagtgtcagcctgaacccttcattatccccatcaacccttcacttaatggttttagcagccactgatgacctctgyctagcgctgttatttcatcaaaggttgcagaattatataaccctgtatcataattattaattattatccttcttattaattattatccttcagctttctc

SEQ ID NO: 318033 - DNA, 201 bp, Homo sapiens
gaatggtcataaagttttgaggagagaatcaaatatgaataaattgagcacgagttattttactcaaacatatgaagagtgcacattatcacgataaaggaggaaaatgggagactcctgtaaagcacaataatagggattttgaaaggtgcctcttttagtaaattttgtacacagtcaattgtaaagaattcagtgggt

SEQ ID NO: 318034 - DNA, 201 bp, Homo sapiens
cacctggtttgttttgttttaatttataccatatctctagtccatatgcccttaaagttaaatggcctgaaatgtaggcaagatctgactacaatatgtaygactcacccacatgcccaacatagcatatactctcacctgtgggccaaaatgcctgtgtttctgttttgttctcagtaacaatttttcttctgtttaagt

SEQ ID NO: 318035 - DNA, 201 bp, Homo sapiens
atgtatacacctatatgtgtacatttgtatgcatatgtgatattacatatattgcatatatacatatgtacgggtatataagtgtgtacatgtgaacatgyatacatatatatgtatatttgagatactctttaaaactatgaccacaatgtcattatcacatctatgtctttcttaaccgttattcctaaatctcaccta

SEQ ID NO: 318036 - DNA, 201 bp, Homo sapiens
gctgcaggcatcatagatgcatctctttccaaaatcatgaatctcatctacttaatgaacccagaggacattaacttcattaactctcccagaagaacaaygaagtcactgagaagatgtttcatagtcttggtagaaattcactggtgtatgcccatttccctcattctatgacagctgacattgtcacttgcatgtttc

SEQ ID NO: 318037 - DNA, 201 bp, Homo sapiens
gcattcaagccagtaacaattgaaccagagaaatgaaaataaaaattaaaaatattctgcagaactcacatttgacaaaacaatggcatcattgcctcctkcaggcaggaacctctgccaccactattgtcctgggctgggagtactttcattataacaatgattctaccatattttgaatgttttattatgaaattgttt

SEQ ID NO: 318038 - DNA, 201 bp, Homo sapiens
ctgcactccagcctgggcaacagagcaagaccctgtgaaggacggaaagagggagggaggaaggaaggagagagaaagaaagaaggaaggaaagaagaaasgagaagatctatatgtagcaatatagataaatctgaaaacataatattgagtaggaaagttgacaaaaagatacctaaagcacatatgttaccatttcag

SEQ ID NO: 318039 - DNA, 201 bp, Homo sapiens
atttatagtgtacacactcatgctaaagacaacatttctttttaactactgccaacaaaatatttctaagactcacttatgagcaaattttattaaacaasaatccaggatgctatgataaaccctcactgcaccacttcttgaagctcattgtaaatagtatctgatctctatagtatttatctttctacttacgctttt

SEQ ID NO: 318040 - DNA, 201 bp, Homo sapiens
cagtcccgttcatgagggcagagccctcatgacctaatcacctcctccacctcttaatactgttgcattgaagattaagtttcaacatgaatttttggagrggacacaaacattcaaaccacagcacagcaattgccacctgtagcacctaattttttctcttaaatttgttctcttgatttctctttgcttcagtctgtc

SEQ ID NO: 318041 - DNA, 201 bp, Homo sapiens
ctatctaaacaatttttcttgaccttaatagctccctgttagaaagctaagtaaacaaataagtgtcattatggtcatgtatgtcagggagccatggcacygaggaagaaattacatagaattttctatgtaatacaatgaaagaacataaaaaattaatatatatgatatataaaatgtatgttcatttcttagaaaaaa

SEQ ID NO: 318042 - DNA, 201 bp, Homo sapiens
ctttggaagacatttagaggagggaaaccccaggttcaccaaggagtcacttttccggactcatgttttttctgtctgtcctgttctaggtaaagtgtgaycattactggccagcggaccaggattccctctactatggggacctcatcctgcagatgctctcagagtccgtcctgcctgagtggaccatccgggagttta

SEQ ID NO: 318043 - DNA, 201 bp, Homo sapiens
tatactcacttatttaccttctaaggcatctaaagatggaagcgctctttgctccagacagaactctggaaggcaaagacccctgaatgaatgggaacacscttttttccccatggagatgactaatgaaaaggagcagctgtctggctttggctccaggaaacatcactgcagtcactaggcccttcggccctaggaatt

SEQ ID NO: 318044 - DNA, 201 bp, Homo sapiens
tcctaaaatcagactcatccctggcctttacaaaagctaagtttcacaaaagctagccatccagaaggtatatggaatggaaattgggcgatgggtgatgkcaagagagaataaattctgatttttttttttttttttgagacggaatttcgctctggttgctcaggctggagtgcgatggcgtgatctcggctcaccgca

SEQ ID NO: 318045 - DNA, 201 bp, Homo sapiens
tctcttggcacacggcccacgttaggacagtgacataaaaatatgaacgaagaagggccaggaagacagtgccttcctctacccaactagatatttctttytttagaaagaacaatacgttgtgaaccacagtttacctgctagtggaactgaaatgctgaggggaaaaaaaaaaaaaaaaaaaaaaaaactcaagccata

SEQ ID NO: 318046 - DNA, 201 bp, Homo sapiens
cagtgctcttgttctgcactgtgttttcagaaagcaggtacaagcagaagtatatagcatcccaatcagcatcctcaagagaaagggaacctaggctaccrtcttggatatagagctactgacatccaacattattacttctgcagaggatgtaccttctctgttgggtgttggaagagctgatacctaaccaatatggca

SEQ ID NO: 318047 - DNA, 201 bp, Homo sapiens
cacaacagttcgctttatgatccaattacctctctatcctttactttttggcctttgagaatctcttacattcctgacaagtcattcatttacattttcayattttatccaatatgtatagttgtgtttattagaaggattttcatggtatctagcctatcatactgccagaaagggaagtccaagacattgttttagacc

SEQ ID NO: 318048 - DNA, 201 bp, Homo sapiens
accacacctggcatgcttacatgcatggatatgtgcatttatttattatttctattttttgtttgtttatttacgtggggagataagatctcactatgttsaccaggctagactcaaactcctgggctcaatggagtggatttcttttcctccagttcccacatccaagcagtcacgaagtcctttccttcccttggagct

SEQ ID NO: 318049 - DNA, 201 bp, Homo sapiens
ccagatgatgccacgcgagtgaagctctccaatgtagatgatgatccttgctctgactacatcaatgccagctacatccctgtaagtgacccactaggccrtagtgttcaggatgaggctttggtgggtggctacactggagatgccactcctccatgttcctgttattcttaggtctggaaacacctgtagatttcagaa

SEQ ID NO: 318050 - DNA, 201 bp, Homo sapiens
ggattatttctctggatgaagagagaacagtggtcttgcaaacaggtaaaggatgacaggtgcaattggatggccaagccacacggggttgggccctgccytttcaagctggtgtttcatttgagttccagggatacaaaaaatgaaggtaaaaatacctgtgaagataaatattgacagaaatgtctggtttcctcagat

SEQ ID NO: 318051 - DNA, 201 bp, Homo sapiens
caggaaccatctataacttcaggattatttctctggatgaagagagaacagtggtcttgcaaacaggtaaaggatgacaggtgcaattggatggccaagcmacacggggttgggccctgccttttcaagctggtgtttcatttgagttccagggatacaaaaaatgaaggtaaaaatacctgtgaagataaatattgacag

SEQ ID NO: 318052 - DNA, 201 bp, Homo sapiens
gtcccaataggaatggtctcatcttaaactaggttgagctatatgtttctgctggtctttcacattggtaattttcataaacagcgcaaacaattatgacmcaccctgcggcagtctctaattacagtgttcttcctttcagatccagtctattcaaggcattgagaatgtacctgaagagctcctggataaaaattattc

SEQ ID NO: 318053 - DNA, 201 bp, Homo sapiens
atttacctaccaatttactaccttttttctcattttttccccctgcatctgagatgttttatctgggattattttcctttatcctggagaacgttattcaratttcttcattgagagtttctagggacaaactctctcaaattttgtttttgctgggcatatttttatatagctctcatttttatatagctctcggtcttg

SEQ ID NO: 318054 - DNA, 201 bp, Homo sapiens
ttggtcagatgagaagcagtgtttgggtgggcgggggtggcgatggcagaggtgacataatgtggagaccctgaggaaaggcaaagagaaagagcttcgaytagaattgacaaggaattgctgtcattgccggagtgcagaaggagtagatgaaaatatcccgctcttggactgtggtttggattaaataagtcctgacct

SEQ ID NO: 318055 - DNA, 201 bp, Homo sapiens
cctcttttgatcccacaaaaatataattattgctttatatagtcaacatctgtttagatttacctaccaatttactaccttttttctcattttttcccccygcatctgagatgttttatctgggattattttcctttatcctggagaacgttattcaaatttcttcattgagagtttctagggacaaactctctcaaattt

SEQ ID NO: 318056 - DNA, 201 bp, Homo sapiens
atggggattacaattcaagatgagatttgggtggggacacagagccaaaccgtatcagctaggaaagagagaatatgtgggtgcagatgccaataggtggrtcgttgtagggtgagcagttatcttctaattgctttcatttttttcagtgtaattggaagcaaagtcatcaagatttccctttttagttggacgccgtgg

SEQ ID NO: 318057 - DNA, 201 bp, Homo sapiens
ctatagtcaaatgaaattatgagcccaagatgcattttcatagatcatctactctctgcagtccttaaccaagatgagagcttcctaaggaagatggacckcccctgctaaagctgcctagctagagaagctgatcccatgttatttggaatcttcacaaccacagacacaactcaaaggttatatcaaatctttgggctc

SEQ ID NO: 318058 - DNA, 201 bp, Homo sapiens
ctttgagctttattgaacccactaatcccaaaaccaccttgacccctgaattcttttcttgtgcagcacatattaatatcctgcattcaagccagtaacarttgaaccagagaaatgaaaataaaaattaaaaatattctgcagaactcacatttgacaaaacaatggcatcattgcctcctgcaggcaggaacctctgcc

SEQ ID NO: 318059 - DNA, 201 bp, Homo sapiens
atcttagaggccagcttgagctccagaataacacagcaaaccaagggctacctggatcagatagtaaggaagaattaacaaatctcaaatgcagacctaawgctgtcagatattcagcctggccatttgcttggctggaagatgccgtggtttcgcaaaaagcacgtagcttttggaactgattctcaggtttgccacttg

SEQ ID NO: 318060 - DNA, 201 bp, Homo sapiens
caaatcttcagtttttgcagagatccgtttctgggtgggaatgatctactttattctctttcctttccctccctcagagatgttggctgagtgcaaatctrtatgaatactgaaaaatccatatttgcacaaacatccacagccttaccataaatggaaaaatttgttcaagccaagtatcataatcagaataaaagttat

SEQ ID NO: 318061 - DNA, 201 bp, Homo sapiens
ggaaaaagactggagaaaatataaatttccctgaacattagaaaaattattatttttccttctatttttttgtattttataaatgttctagaataagcacrtaacacttttcaagtgggaaattcaatagaaaaaaaacacaaaccttacaaggcacagttctggtcaagcaataattaaatgactagaagggtcctcctg

SEQ ID NO: 318062 - DNA, 201 bp, Homo sapiens
tcatcttcctcacctgcaaagctccataaggttgtcctaagtagtagtcctgagtatgtgacagatcaaacctagtcatgtcccttctaaattaaggtttycccatagttcccattcacttaccagagcaagagcagattccagtacagggcacactgagccctgctttctcccgcctgcctcaccagccttgtctccaat

SEQ ID NO: 318063 - DNA, 201 bp, Homo sapiens
tgctaattgtacaggaaagcattttacataatgaaaatctttgcaattgactcaaaatttctatatctttatgagatgccgataattaggctgccatggartaactgtatgttggccatattttctgaaccaaagtcagggttcatggtgttacacatgtcctgaaaccagaaaatagaaattgaaatcagtgccctgcag

SEQ ID NO: 318064 - DNA, 201 bp, Homo sapiens
ccactgctctcttgctactcctcactcctcagagttcctgaatgtgacatggttcttttatacgcctgagcctttgcataatcttttcactctcagatgckttccgctcttatctggctggcgaattctctgtacacttcaaaagccagctcaaccctcaaccacccacactatcctgtcagcccacagctgggcagttgg

SEQ ID NO: 318065 - DNA, 201 bp, Homo sapiens
agttagaaaagccccattacttttctggacactctatatcactttaaaactcaatacttactctcagttcattaacaaaaataccaactccaggaaataaygtgaactctaaatttgacttaaatgttagcttctcctctcccatcaccccacccagtttgggcttaaagcagggaaagggaaacatgtccaaattctctc

SEQ ID NO: 318066 - DNA, 201 bp, Homo sapiens
cctccacctcccaaattcaagcaattctcctgcctcagcctccccagtagctgggactacaggcatgcgccaccacacccggctaatttttgtatttttaktagagacaaggtttcaccatgttggccaggctggtctcgaactcctggcttcgtgatctgcctgcctcagcctcccaaaatgctgggattacaggtatga

SEQ ID NO: 318067 - DNA, 201 bp, Homo sapiens
gaggaagtatatgttcaacatcttactcaaatagggcttggattaaatccatatttttacatgggattggtctggatttgaattcaggcagaagtctctgyagatttgttcgttcattcaacattaacaacaagggacaataaatctctctctgccctcatggggcttacaattaggtaggacgtactatttgtaaataga

SEQ ID NO: 318068 - DNA, 201 bp, Homo sapiens; identical to SEQ ID NO: 66771

SEQ ID NO: 318069 - DNA, 201 bp, Homo sapiens; identical to SEQ ID NO: 66772

SEQ ID NO: 318070 - DNA, 201 bp, Homo sapiens
agagacacactttacttgtctacaaatattatgagctgcatgataaatgtgaagcatgaaagttgcaggtggtatttgcataatgataaatttcccacatktatttgtatgatggttgtttagatttaaattacttttttaaataagatattttaaaaattgtttcagggaggaattttttagtcggttgttatttatttg

SEQ ID NO: 318071 - DNA, 201 bp, Homo sapiens
ggttgagctatatgtttctgctggtctttcacattggtaattttcataaacagcgcaaacaattatgacacaccctgcggcagtctctaattacagtgttyttcctttcagatccagtctattcaaggcattgagaatgtacctgaagagctcctggataaaaattattcactgtgtgatttgtttttaaaaacttgcttc

SEQ ID NO: 318072 - DNA, 201 bp, Homo sapiens
attttcataaacagcgcaaacaattatgacacaccctgcggcagtctctaattacagtgttcttcctttcagatccagtctattcaaggcattgagaatgyacctgaagagctcctggataaaaattattcactgtgtgatttgtttttaaaaacttgcttcatgccctacagaggtgccagctatttctgttgatactat

SEQ ID NO: 318073 - DNA, 201 bp, Homo sapiens
tagtgttcaggatgaggctttggtgggtggctacactggagatgccactcctccatgttcctgttattcttaggtctggaaacacctgtagatttcagaaragcacatctgaatgccataaaaaaaatggggtatccaattcagttcctgctacgccacatttttcacaatggctatagtcaaatgaaattatgagcccaa

SEQ ID NO: 318074 - DNA, 201 bp, Homo sapiens
gagtcaaagcgtggaggtttaaatacacaaattgtttagagaagaacaaacagtccagtttcaaacagagggtgaataaaaaggagtagactgggatgatwggacgagagaggactgtgggtgggtgctaagtgctgggctggggaaagtagttgtgatattcatttttggaaaagttttaagggaagagtgcctgataac

SEQ ID NO: 318075 - DNA, 201 bp, Homo sapiens
cagagcagaggtaacacaatgttcctcttcctccttctccttagaaataactccatcttttccctgttctgttctccttttcctcctgcctcactgaggayactgtggcatagttcctcagcttgccttcttaatgtttgagttccccaaggttttgtcctcaaggcaccaccctttctctcagtcttcattctttgtgat

SEQ ID NO: 318076 - DNA, 201 bp, Homo sapiens
tctcagaattacttcctccacaactgatctgtctggatcttcccaaaccccccagtctacttctcaatagttttccctcatgttagtaggtgacacctccmttcttccagttgttccccatccagaacatgtggaatcatccatactctatattcatcagcaaatcttttagttcttcctttgatatatccaacacttctc

SEQ ID NO: 318077 - DNA, 201 bp, Homo sapiens
tcctgttgacaataaatatgatattagaatatttttagataaaatgatctttagaaaatagtgccaaaagatatgtaagttaaaataacaacaacaataayattgatatttgggccacttgacttctctaatgggcatctcagaattacttcctccacaactgatctgtctggatcttcccaaaccccccagtctacttct

SEQ ID NO: 318078 - DNA, 201 bp, Homo sapiens
atgaaacatccagaataggcaaatccacagacacagaaagtagattagtggttgccagggatcgcggggagggaggagtgggactgactgctaataggtaygcggtttcttttgagggtgatgaaaatgttttaaaattgattgtggtgacatttgcaaaactttgactatactaaagaccactgaattgtacaacttaga

SEQ ID NO: 318079 - DNA, 201 bp, Homo sapiens
aatcccagctacttgggaagctgaggcaggagaattgcttgaaccctagaggtggaggttgcagtaagctgagatcatgccactgtactccagcctgggcracagagcaagactccatctaaaaaataaaaaagaaaaaaaaaaagattcaagagattcctcatctccttggttacctgggctcaaggaaactcgagcaaa

SEQ ID NO: 318080 - DNA, 201 bp, Homo sapiens
tctataaaataaataatttaaaaaatttaaaaagaagattaagacactgacaattagatgcaatacaggatccttggggctggatctagagagaaaacaarcaaaaaaaaggatattattgagatcgttgacaaaattgaaatatagactgtggatttaagtatatccattttgaatttcctgaatttgataactttattg

SEQ ID NO: 318081 - DNA, 201 bp, Homo sapiens; identical to SEQ ID NO: 66775

SEQ ID NO: 318082 - DNA, 201 bp, Homo sapiens
agtagatatggactcagtggtgagttattcaagataaaagataattcatagaaaaactacctcctatgaccctcatacaaatatgtctagtaatagacttygaaaataaggtaactagaataagccatttgcaattaaccactgaacaatgctatattcaaaaaatgcctgataatatgtgttggggaaagaaattaattt

SEQ ID NO: 318083 - DNA, 201 bp, Homo sapiens; identical to SEQ ID NO: 66764

SEQ ID NO: 318084 - DNA, 201 bp, Homo sapiens
aaatcactctctgatccaccttaaaataggacaaaataagtcagcaggaaaactcctttcccaatctgagaagtggagcctatgtaactgaaggtgtctgkagtatggcccattcttctgagtcacttaggcaactgagtttggatttctgaatgatctgcatgttgtttctgtcttatgctttttcatgtcacgtcactt

SEQ ID NO: 318085 - DNA, 201 bp, Homo sapiens
ctccagactgggcaacaagagcgagactctgtctcaaaaaaaagaaaagaaaagaagaggagaggggaggggagaagaaaagagaaaaaagaaaaagattmtggaaaccattaataacctaaagctcttccaatgtacaccacccatttcttctcctacccataaagagtggcaacggggaagagagggagggtagggagg

SEQ ID NO: 318086 - DNA, 201 bp, Homo sapiens
caggtaagttccccctagctagctgaagaagaataaagtgaaatcaagggaatgtttaataagtcaagtttattatatgaataactgtaatataggacaarttgaaattcttataaggtatagaagacccatatccacttttctactcagaaaaagaaggattctcttttattctaaagtttaggctagcccttggcaaca

SEQ ID NO: 318087 - DNA, 201 bp, Homo sapiens
tacttcacttacttccccaagtttcttcatcaagatatggtcaatctggccaggcatagaggcttacacctgtaatcccagcactttgggaggctgaggcmggaggatcacttgagcctaagagtttgaaaccagcctgggcaacatagggagatcctatctctacaaaaaactaaaaaaaaaaaaaatagccagacatca

SEQ ID NO: 318088 - DNA, 201 bp, Homo sapiens
tgtaagggcctgacaaaaggagaggagaaagcaaagagagcctgagaaagagcatttggggtggaggaaagagaactcaggcgaaatcaaggcagatgtcstgttctgtttctactggcatcttaagacttctgaggaatcaggcagcatctgtgccagcagtttgcaaggaggtggttgctagcagcacttgaccttgcc

SEQ ID NO: 318089 - DNA, 201 bp, Homo sapiens
tcctagttcatggcggtgttgtggacaaacatgctacttcctatgcttttcacgggctgacccctggctacctctacaacctcactgttatgactgaggcygcagggctgcaaaactacaggtggaaactagtcaggacaggtaagttccccctagctagctgaagaagaataaagtgaaatcaagggaatgtttaataag

SEQ ID NO: 318090 - DNA, 201 bp, Homo sapiens
tttagtagtaatcattttcaaagggacgttctattgggaaaggaagaatttgtatttaaggcaaggcaaattaatagatattaacttgtttcaaagcccayggtgaatcattgttaaagaatttattaataggccatagcacagatgcactagagttcattcacagcttacctctaaagtcccaaagtaatgtaatatccc

SEQ ID NO: 318091 - DNA, 201 bp, Homo sapiens
ctggagaggggcagatcacttgaggccaggagtttgacaccagcctaggccacatagcaagagcccatctccacaaaaaatttttaaaaagaaaatacacraaactaggaaaaatagtatagtgagtttccatgtacccaaacccctgcttctacaattatcagtattctgtgttcttttcccatctgtatcccacattta

SEQ ID NO: 318092 - DNA, 201 bp, Homo sapiens
gcttcctgcagccaaggccccctttgagctttattgaacccactaatcccaaaaccaccttgacccctgaattcttttcttgtgcagcacatattaatatmctgcattcaagccagtaacaattgaaccagagaaatgaaaataaaaattaaaaatattctgcagaactcacatttgacaaaacaatggcatcattgcctc

SEQ ID NO: 318093 - DNA, 201 bp, Homo sapiens
atgaaattgaatggaactgaatgtgtgaacactaagccaagccttcaccagttaacaaaaaattatcttttgtgatctgagattcatatattttgtctacytttcattaagaataaagtgagaagcacattaacaatctcaccgttttagtagtaatcattttcaaagggacgttctattgggaaaggaagaatttgtatt

SEQ ID NO: 318094 - DNA, 201 bp, Homo sapiens
tgaaattgaatggaactgaatgtgtgaacactaagccaagccttcaccagttaacaaaaaattatcttttgtgatctgagattcatatattttgtctactyttcattaagaataaagtgagaagcacattaacaatctcaccgttttagtagtaatcattttcaaagggacgttctattgggaaaggaagaatttgtattt

SEQ ID NO: 318095 - DNA, 201 bp, Homo sapiens
agcctcagggtcagatctcttcctcaatagagaccaagcattcactcctctgcatcaatgccttctaaggctcaaattctcttaccctcgtgtttcacaartttttctccaagtaactaagcaaaatcctctgtattaaaaaaaaaaaatccatggttggaaaagtaaaaagttctacatgcttctgtgtcccctcttaga

SEQ ID NO: 318096 - DNA, 201 bp, Homo sapiens
aaattgaatggaactgaatgtgtgaacactaagccaagccttcaccagttaacaaaaaattatcttttgtgatctgagattcatatattttgtctactttycattaagaataaagtgagaagcacattaacaatctcaccgttttagtagtaatcattttcaaagggacgttctattgggaaaggaagaatttgtatttaa

SEQ ID NO: 318097 - DNA, 201 bp, Homo sapiens
tatcatgagttaactccactctgagacacagaattgcttcctcagaggtcatgtgggagatctttctgtgacaaagtttaagaaacttaagtagaaaatgkaatttttgtatcattcacccctctctctgctggatacagggagatgtaagaaaaagctgctcaaaggctctttgggcaataaagcctgttatcctctggg

SEQ ID NO: 318098 - DNA, 201 bp, Homo sapiens
actgtcctcagccacgtctaactattaataagcccatcaaggcattctttaactgttactcagacttgtccacacctgtcctccagcttttcctaccccarccttggttccctgggagatttatgctcatgtgtctctgctagggtgagccacgacactctgtatttgcctgtctgtccctcctatacctagatctcagag

SEQ ID NO: 318099 - DNA, 201 bp, Homo sapiens
cacatgcttaagcagaacaaaagagcatacattgagcttgcaacagggaatgatactcccacacaaggcaatgagcccagcacagggtgtgtaggctctcsatctcttggtaagaaagtatcttaagctcaagggccatttcttacacagccaaatgggggttgatagactatgcacatgagactgcctttcccaacagcc

SEQ ID NO: 318100 - DNA, 201 bp, Homo sapiens
gcgcccggcctgtcacctgcatctttctccctgatattttctttcctttcttttaatggttcttggcaccatccattggtgtagcatacttgggggtaggkagctgaaaagcttagcatggaaatcaggaggcctaggttttggtcctagctctgccattaacttatttccctaagcttctgtgttttaatccacacacaa

SEQ ID NO: 318101 - DNA, 201 bp, Homo sapiens
atgttacccaaatctaatctcctgcctccgcatacatgtaaatgcctgcctaccagatggatccccccaaaagccttatagccatctaacttcaaaaagaycaaagtcaaactcattctctttctttcaaaacacaaaacaacaacaaaaaccttcctcctgcttttgcaccttccagtttcatttaatagtattgccatc

SEQ ID NO: 318102 - DNA, 201 bp, Homo sapiens
tctaccatgtgacacacatgcttaagcagaacaaaagagcatacattgagcttgcaacagggaatgatactcccacacaaggcaatgagcccagcacaggstgtgtaggctctccatctcttggtaagaaagtatcttaagctcaagggccatttcttacacagccaaatgggggttgatagactatgcacatgagactgc

SEQ ID NO: 318103 - DNA, 201 bp, Homo sapiens
acacaatgcaaacactggatggaacaaagctttacttacatagagaggagacagagtaagatcagcctcaacagtatgcatcagtcccccacagccagctrcagtagttgcccagagatgcacttgctatcttcaaccctgacaacagaaaacagaagggcgcattgtctgtggtctcttccagcagccaatggagggcag

SEQ ID NO: 318104 - DNA, 201 bp, Homo sapiens
tatcataatcattatttacactttagaaagttactctgggtacagtgtagagaatagattgaaagaggcaaaactagaagcagagggatcatagttagcayatactgctgtatgtccctgagataaaaatacttcgacgacgaagcatataccagtttcttcccaaaggcattttgggatagatactatcaccctcaaaga

SEQ ID NO: 318105 - DNA, 201 bp, Homo sapiens
accaagtgctcaacacttaggtatgggctgtcatgtacattacctcatttaatcctcagagctaccctcagacatgctctaaattctttaacaattttcakgttttctgacttcattagtcttcattatctctatttgttgcaacagtgtatccttaccttcatccagagattcaaatttatgttaaaattttaaaagtca

SEQ ID NO: 318106 - DNA, 201 bp, Homo sapiens
acatttctctacattttaatgcatcacacctgctgcaggttaaaattgtattcacttttgccagaatttactattgagccggttcgaagtaaaactcagamaaggatttgccatcttgtagttgtttttaattgacacatttccctgattgctatgctttcttctaataaatacctgaggtttgcataacaaaactacctc

SEQ ID NO: 318107 - DNA, 201 bp, Homo sapiens
aaaaaaatcaaaatgcccaattacatcacttaacttacttcagatgaaacttttagatgatatctgagatttgcagcatcttaagttgaaaagagaaatcrcttgttaagaatctggtggtttctctgactgggcgcagtggctcacacctgtaatcgcagcactttgggaggctgaggcaggtggatcatgaggtcagga

SEQ ID NO: 318108 - DNA, 201 bp, Homo sapiens
gtttgcaaaggtagtttaatgtagttgtgatattatttattcataatagctgtgtggtgtatttagagtaggtattattccaatgttacagttgaggaaastacattgttatctaaatacagcaagagaagaaaaacataatgttgcaaaggaataaaactgggaaaaggctcctataaaggctgagggcagccagagcct

SEQ ID NO: 318109 - DNA, 201 bp, Homo sapiens
atgtagatattttctaagacttgttattttaaaacaaatctcactggtcttgaaggtgaccatcttggggatcattttaagataggctggcagatgagcataagaacttcacttaggaaagaagaagatcccaatctcttctctcccccagccccactccctccacctacacccccatttcaggagaccccaagggagtgt

SEQ ID NO: 318110 - DNA, 201 bp, Homo sapiens
gaatagacccaggcaagtaaaagggaatgtggctcttaacactagttcaatgttctgacctttgtccttcctgctcccaagcattgacacttgtgttagtmtctttttctgaagtcagagacttggcagagacctccctatcatctaatctgaagaactctttgtttatagttctgaagaggcccattgtttctgactctc

SEQ ID NO: 318111 - DNA, 201 bp, Homo sapiens
agcctcttggtgatttcagtgctgctggtctgagaacggcactcagtagcgagaggctagagattgccatggggcatcttggagaatatcccccagcagasagaaagataaaagaaggctcagccaagcaggcaccatgctgaggataagtaaggattggtcagatgagaagcagtgtttgggtgggcgggggtggcgatg

SEQ ID NO: 318112 - DNA, 201 bp, Homo sapiens
aatggaactgaatgtgtgaacactaagccaagccttcaccagttaacaaaaaattatcttttgtgatctgagattcatatattttgtctacttttcattawgaataaagtgagaagcacattaacaatctcaccgttttagtagtaatcattttcaaagggacgttctattgggaaaggaagaatttgtatttaaggcaag

SEQ ID NO: 318113 - DNA, 201 bp, Homo sapiens
cttcctctagccatttctgcatttttctccaaaaatgaaatgaggctaaagaaatataatatagctcgatatggacaatctcaagctctgaatgcctttartaagaaatagcttgtatattcctgcacttccctccagagggataatagccagtttaaattctgattatgaaagtcctcttatgctgttgacatttcccca

SEQ ID NO: 318114 - DNA, 201 bp, Homo sapiens
atggaactgaatgtgtgaacactaagccaagccttcaccagttaacaaaaaattatcttttgtgatctgagattcatatattttgtctacttttcattaasaataaagtgagaagcacattaacaatctcaccgttttagtagtaatcattttcaaagggacgttctattgggaaaggaagaatttgtatttaaggcaagg

SEQ ID NO: 318115 - DNA, 201 bp, Homo sapiens
ccttattagctcaactacaatggttattggcaagatagtttatcaagtgggttcactcacaatgggagttgtccaacactctggagttgtgagacatgctmtcatttaatgcaatgagctacccttattttatttcctaggaaaatgatgctgtgtgtgtgtgtattttatatacacactatttatgtattttggaaaaag

SEQ ID NO: 318116 - DNA, 201 bp, Homo sapiens
accctctgcccgtctgagcattcgtagggatcgaccattatctgtccacttaaacctgggccagaaagggtaagcaccacatttgccttcgtataatttgytgaaagatggtattatgtgaaatttgctaacaaagtcttcctcttttggcttctcttcacagtaaccggaaaacttcttggtaagagagagaacacatta

SEQ ID NO: 318117 - DNA, 201 bp, Homo sapiens
gtaagctgagatcatgccactgtactccagcctgggcgacagagcaagactccatctaaaaaataaaaaagaaaaaaaaaaagattcaagagattcctcakctccttggttacctgggctcaaggaaactcgagcaaaagtcacctaagggctattttctttttgagttggaaaactgaagctgatttagtttgtttactt

SEQ ID NO: 318118 - DNA, 201 bp, Homo sapiens
ttggtctgtaatatctcctttttgacatcatttcaccgtttagttccagacaaagttgcaaacctggaggcaaacaataatggcaggatgaggtctcttgyagtgagctggtcgccccctgctggagactgggagcagtatcggatcctactcttcaatgattctgtggtgctgctcaacatcactgtgggaaaggaagaa

SEQ ID NO: 318119 - DNA, 201 bp, Homo sapiens
ggcaaacttatggcctttatctcaggtgccccaagctttatatacaagtgcaaagtccaaaattcctctataagctatgcaacattaacttcaaaagtatrcagtgacacctggcctcactgctacagggtgggagccagcctttcatcatcttcttaggtgcatactcagagcctttggaaagtaaatgcctcatcgtgg

SEQ ID NO: 318120 - DNA, 201 bp, Homo sapiens
tcagaaggcttctcaaaggatgtattaaaacacaggaattaaaacataggaaaggatttagaaatacccagatagggacagaaggagattcaatgtggaakgaatagtgggagtcaaagcgtggaggtttaaatacacaaattgtttagagaagaacaaacagtccagtttcaaacagagggtgaataaaaaggagtagac

SEQ ID NO: 318121 - DNA, 201 bp, Homo sapiens
tattaatgaaagctcctgctactatattattatcatattatctcttcctacaaagtacattaaaagtgtgtctgatgttgctcagctatcttatttgtatrtgttatggcatagctgtgattatgtgatttttcactttctcctacattcagctccaagtcctcccagtcttatgtcatttgctgacattgcaaacacatc

SEQ ID NO: 318122 - DNA, 201 bp, Homo sapiens
tgatatttcaataaagctattttaaaaatgaggccactcttacctcttcataaactcccagtagcgttaccataccagataataaaaataagacttcttaraatagctccaagcaatccactggattttccaaagccccagatgctgtgtaacatgttttatataaatgaaatggcatttttatcttggtggcaaacttat

SEQ ID NO: 318123 - DNA, 201 bp, Homo sapiens
tgccttacacataataaacactattaatgaaagctcctgctactatattattatcatattatctcttcctacaaagtacattaaaagtgtgtctgatgttrctcagctatcttatttgtatatgttatggcatagctgtgattatgtgatttttcactttctcctacattcagctccaagtcctcccagtcttatgtcatt

SEQ ID NO: 318124 - DNA, 201 bp, Homo sapiens
cccattgctttccatcttccttaccctgctcttttctttttcatagcacacatctcatctgatttattatatttgtgtgtttattgtctgacttcctccaygagaatgtaacctctggaatggcagggactttgttttgttccttgcaaagtcccagctactagaacagtgattggcgtgtggcaggggctcaataaatat

SEQ ID NO: 318125 - DNA, 201 bp, Homo sapiens
agcttccagagacacattttgattctgattttaatgacaagagataaagccaataatgatataccctgagctagcccctgaatttgggaagggactgtggkacaacagataaaggacaaggctttggtccaaaagaaatatgtccttagcttagctctatgaatctgggcaagtcattgagcatctctaggcctcagtttt

SEQ ID NO: 318126 - DNA, 201 bp, Homo sapiens
atgttggccaggctggtcttgaactcctgacctcaggtgatccaccctcctcagcctcccaaagtgctgggattacaggcatgagccactgcacctggtcrggacttacaattttagatagtacagtccccaaagacttcattgaggcagtgacatttgagtaaaaatctgaaagaaatgagaaagtcatgcaaatatttg

SEQ ID NO: 318127 - DNA, 201 bp, Homo sapiens
tattatttatttttggagacagaacctcgctctggcacccaggatggagtgcagtggcacaatctcaattcactgcaacctctgcctcctgggctcaaacratcctcccatctcaacctcccaagtagttgggacttcaggcatgtgccaccacacccagctaatttttgtattttcttgtagacacagggtttctccaca

SEQ ID NO: 318128 - DNA, 201 bp, Homo sapiens
taaaattttggaagatttggcaaaactgtgcctaaaactctctagagctgacttgtgtcttctccttttagataccaactcactggaataccacttcattyatttccttacctgaatgcattctaaagacatttgaatttgtgacttctactttgtggttttcatttgaaaattttagggagcatttatttgtctggcaat

SEQ ID NO: 318129 - DNA, 201 bp, Homo sapiens
gagcccagggaagagttgtagtggtagataactttacctgtagaaataatattttaaaagcattttccctcttgttaagtcagtttcagctacttattagkcagcctagaaaaataaaaaacaaaacctctcaaatgattttaattattttaatatggctaacttgtctttaataaaaaacattttaggaacgttaattgt

SEQ ID NO: 318130 - DNA, 201 bp, Homo sapiens
ggcttaaacaacagaaatttattttctcacaatcctggaggctagaagtccaaggcgaaggtgtctgcaggtttagtttcttctgaggcctctccttggcytgcaaatggcacctttttgcatgtcctcatatagtggtacctctgtttctgttgtctgtctgttaatgtcttctcataagaacaccagtcatattggctt

SEQ ID NO: 318131 - DNA, 201 bp, Homo sapiens
ttttcctaatatgtttgatctgcaattggttgaatccaccgatgaggaacccgcagatacaaagagccaactagatagattaggtaggtaggtaggtaggyaggcaggcaggcaggcaggcaggcaggcaggcaggaatatagatagatagatagatagatagatagatagatagatagatagatagatagatagatagat

SEQ ID NO: 318132 - DNA, 201 bp, Homo sapiens
ctgagcttcctggatctgtggttggtgtctaacatttatttgtgggaaattcttagtcattcttgtttcagatatttcttctgttcctttctttcttcttytggtattcccattttgtgtaggatacaccttttgtggttgttccatggtccttcgatcttctgttctgcttttcagtctttgttttctttgctttttcca

SEQ ID NO: 318133 - DNA, 201 bp, Homo sapiens
aaagttgtgtgtcacaccacatagcaccttctctcaccatttcttctggtatgttttcctttctaccttgtgttatggctattttggactcatttccattygtagaggttagagctaacgtcttatttacctctgtactgttcataatccccagaagagcacctggcacatagtaggtacttgtttctctcaacacgtgaa

SEQ ID NO: 318134 - DNA, 201 bp, Homo sapiens
aatatgcttcaaccataatgaatgatttgcagttctcaattttctaccatcccactccggcacctcctcctttggtacctgggtttctggtttttctctaygtagaatgcctctttcgtgataccttggcagagtgtcacctctgccttacagcttttactaactcctgctgatcactaatagccagcagctaaaagttgt

SEQ ID NO: 318135 - DNA, 201 bp, Homo sapiens
aatctatgaaaatgtgaatccagagtatcacagaggtgggcacttacttcacttacttccccaagtttcttcatcaagatatggtcaatctggccaggcayagaggcttacacctgtaatcccagcactttgggaggctgaggcaggaggatcacttgagcctaagagtttgaaaccagcctgggcaacatagggagatcc

SEQ ID NO: 318136 - DNA, 201 bp, Homo sapiens; identical to SEQ ID NO: 66768

SEQ ID NO: 318137 - DNA, 201 bp, Homo sapiens
atcacttgaggtctggagttcgagaccagcctggtcaacgagaggaaaccctgtctctactaaaaatacaacaattagccaggtgtagtggtgggcacctrtaatcccagctacttgggaggctgaggtgcctgtaatcccagctacctgggaagcggaggttgcagtgagccaagatcactccactgcacttcagcctgg

SEQ ID NO: 318138 - DNA, 201 bp, Homo sapiens
gaggccgaggtgggtggatcacttgaggtctggagttcgagaccagcctggtcaacgagaggaaaccctgtctctactaaaaatacaacaattagccaggygtagtggtgggcacctgtaatcccagctacttgggaggctgaggtgcctgtaatcccagctacctgggaagcggaggttgcagtgagccaagatcactcc

SEQ ID NO: 318139 - DNA, 201 bp, Homo sapiens
aagctacaacttcaggaaattctgctgaagagctacctctttcattatgtttaatgtgccactggcaaatcacttcctctgcctgttttccttcaggagarggggagagtttcttgattacagcattaaacacaggcacacgctcacacacacacagtctgatgcaggagagcagaatccttcatttcactaactgttgtt

SEQ ID NO: 318140 - DNA, 201 bp, Homo sapiens
acactctggagttgtgagacatgctctcatttaatgcaatgagctacccttattttatttcctaggaaaatgatgctgtgtgtgtgtgtattttatatacrcactatttatgtattttggaaaaagtgaattaaaattaactttattaggagaatttcacatcgttctttgagattgcagaatctgtactttggaaatggc

SEQ ID NO: 318141 - DNA, 201 bp, Homo sapiens
gggggagggagatgaggagtccaatttggacgtcttgagtgttggatgtctgtggtacattcagggagagatgtaatttgcaaaagcaggagaaacatctraactgaaagtttaaatttgggagttgtcaccttatggatgacacttcaaaccatggacatagacgaaatctaggaagattatgtagaatgagaaaagaaa

SEQ ID NO: 318142 - DNA, 201 bp, Homo sapiens
tctgacttgaaccaagagatagaaacaaaaaaacaatgagaatattgggggagggagatgaggagtccaatttggacgtcttgagtgttggatgtctgtgrtacattcagggagagatgtaatttgcaaaagcaggagaaacatctaaactgaaagtttaaatttgggagttgtcaccttatggatgacacttcaaaccat

SEQ ID NO: 318143 - DNA, 201 bp, Homo sapiens
gggtgagagtgataactgaagtttctgacttgaaccaagagatagaaacaaaaaaacaatgagaatattgggggagggagatgaggagtccaatttggacrtcttgagtgttggatgtctgtggtacattcagggagagatgtaatttgcaaaagcaggagaaacatctaaactgaaagtttaaatttgggagttgtcacc

SEQ ID NO: 318144 - DNA, 201 bp, Homo sapiens
gactcagcccaccacactctgtttctgatttttcattaatattggtgctattagcttcctattgctgctataataaactatcacaatcttagtggcttaawaccacccaaatttattattttctagtcctgaagattagaatctgaaaatggttttttgggactgaaatcaagacaacagggctgtgtttcttgtagagac

SEQ ID NO: 318145 - DNA, 201 bp, Homo sapiens
aagggtgagagtgataactgaagtttctgacttgaaccaagagatagaaacaaaaaaacaatgagaatattgggggagggagatgaggagtccaatttggrcgtcttgagtgttggatgtctgtggtacattcagggagagatgtaatttgcaaaagcaggagaaacatctaaactgaaagtttaaatttgggagttgtca

SEQ ID NO: 318146 - DNA, 201 bp, Homo sapiens
cccacatttaatgttcccctaccccatgaccttatcccactgaaatattttaaagcaaatcccacttatcatattatctcatccttaaatacacatatacwtatatacacatatgtatgtgtacacgtgtgtatgtatatatgtatgtgtgtaatacatgtcatattgcatatatgtgtacatgtgtatatgtgcatgtgt

SEQ ID NO: 318147 - DNA, 201 bp, Homo sapiens
gccaaggtgggtggatcacaaggtcaggagattgagaccatcctggctaacatggtgaaaccccgtctctactaaaaatacaaaaaattagctgggtgtgrtggcagacgcctgtagtcccagctactcgggaggctgaggcaggagaatggcatgaacccaggaggcggagcttgcagtgagctgagatcatgccactgc

SEQ ID NO: 318148 - DNA, 201 bp, Homo sapiens
ttctttctttttttttttgtgtgtgtgtgtgtgtatttgccttgcagatcctttacctcctgctaggtttggagtcagtaaagagaagacgacttcaaccrgcttgcatgtttggtggactccttcttccggaaaagtcacctcatatgaggtgcaattatttgatgaaaataaccaaaagatacagggggttcaaattca

SEQ ID NO: 318149 - DNA, 201 bp, Homo sapiens; identical to SEQ ID NO: 66753

SEQ ID NO: 318150 - DNA, 201 bp, Homo sapiens
cctgtgttagaagtgggcattcgggccaggcgcggtagctcacgcctgtaatcccagcactttgggaggccaaggtgggtggatcacaaggtcaggagatygagaccatcctggctaacatggtgaaaccccgtctctactaaaaatacaaaaaattagctgggtgtgatggcagacgcctgtagtcccagctactcggga

SEQ ID NO: 318151 - DNA, 201 bp, Homo sapiens
ccctactatgcctctatttcatatctatatttatatctatatctgcatatctttaaccctatgacaaatcctgtgttagaagtgggcattcgggccaggcrcggtagctcacgcctgtaatcccagcactttgggaggccaaggtgggtggatcacaaggtcaggagattgagaccatcctggctaacatggtgaaacccc

SEQ ID NO: 318152 - DNA, 201 bp, Homo sapiens
tatcaatatcactattcatgtattatttttgaaagatctctagccatactatagttctcttacagatgaggaaagaacagttcagaaagcttgtaaaacartatcaaggatacgtatataacaagacctaaagctataattcaagtctaggtctgtctggccccaaacctcgtgccctctccactgtgacacaatacttct

SEQ ID NO: 318153 - DNA, 201 bp, Homo sapiens
aatgtatgaataatatatctgtttatatcaatatcactattcatgtattatttttgaaagatctctagccatactatagttctcttacagatgaggaaagwacagttcagaaagcttgtaaaacagtatcaaggatacgtatataacaagacctaaagctataattcaagtctaggtctgtctggccccaaacctcgtgcc

SEQ ID NO: 318154 - DNA, 201 bp, Homo sapiens
caaatcttgggagagtcccatctagcatcttaataattatttttccaagttcgttataattaactcctttaacctcatctcattaaatcaattttgtattrtcattctgttgttctctggaaagcagccaattgttcagctcttgaatcagaattttcaaagactcacctctcttacctgggcttgcacatatttgtccta

SEQ ID NO: 318155 - DNA, 201 bp, Homo sapiens
taactaactgtatttgaacaaagaacttccttagtctttcaatttaaattatgtatttgcttaatacatttttatatttgtaactgtggtaaaaaaaaaaatctatatagcatcttgcatacattctcactagtacaggaataaaactgcagtttgttgaaggagagtgctctgtcttctattcacctgctcctcatttat

SEQ ID NO: 318156 - DNA, 201 bp, Homo sapiens; identical to SEQ ID NO: 66758

SEQ ID NO: 318157 - DNA, 201 bp, Homo sapiens
ttgggaggccaaggtgggtgatcagctgaggtcaggagctcaagaccagcctggccaacatgacgaaaccccatctctactaaaaatacaaaaattagccrggcatggtgacgtgtgcctgtagttccagctacttgggaggctgaggcaggagaactgcttgaacccgagaggcgaaggttgcagtgagccaagatcatg

SEQ ID NO: 318158 - DNA, 201 bp, Homo sapiens
taccccattaggtaaagcaatagaaggtaggttttctggattgtattcattccagcagtgaaagggagctggccactccatcaggcaaatgtggtaatgtyagaaagggaagcacagatggggcttcatgttgtctcctgtgtctgactggttataggccacctatgcaacatggggcaagttagttatcctgcctgagcc

SEQ ID NO: 318159 - DNA, 201 bp, Homo sapiens
agtactagtattcccctatgttaattgctgagctatagagatgagatgcataaatcatattttactgttattaaagcaatgccaactagtataatattcaractcagacaaacttcaaacaaaaaagtaattgaaaatatctgtgctttctttattctattatgcctgtcttatcagtctaaaacaaaatagaatgagagc

SEQ ID NO: 318160 - DNA, 201 bp, Homo sapiens
tgaccccccccctaaattctcatagaataggtttaattctcttttctacacagcgctgggtttttctttggtagcacagtttctacaactttccttccagrttataaaattgatagatagataaaggatgggtgaattggacaggacaaatgaacattgtcacacactcaaagtatatttgctttttcatataactgaagc

SEQ ID NO: 318161 - DNA, 201 bp, Homo sapiens
accctttctctcagtcttcattctttgtgatattctccattcctgtacatgctcatgttacccaaatctaatctcctgcctccgcatacatgtaaatgccygcctaccagatggatccccccaaaagccttatagccatctaacttcaaaaagatcaaagtcaaactcattctctttctttcaaaacacaaaacaacaaca

SEQ ID NO: 318162 - DNA, 201 bp, Homo sapiens
tcctggctggtgagcacatgtttcattattgatcataaaacaaatatagccagtgcattgaataactcatgggactttatttttgtctctacttcgccttyactataaatctttcctgtgacctagttcttccttcacttctgaatagaagttagaaaagccccattacttttctggacactctatatcactttaaaactc

SEQ ID NO: 318163 - DNA, 201 bp, Homo sapiens
tttgtctctacttcgcctttactataaatctttcctgtgacctagttcttccttcacttctgaatagaagttagaaaagccccattacttttctggacacyctatatcactttaaaactcaatacttactctcagttcattaacaaaaataccaactccaggaaataatgtgaactctaaatttgacttaaatgttagctt

SEQ ID NO: 318164 - DNA, 201 bp, Homo sapiens
gaattataattgaatctttagaattgaatctgatccatatacagtaggatttttttaatgaacgcttttgtatcttaatccagaagtcaatgaactttgaraaagaggggtgccaaggttccagtccctttgattattgtaattcaggaaagaggcacaaagaagaatgtatgttgaccaagtgccaacttcaagatctgt

SEQ ID NO: 318165 - DNA, 201 bp, Homo sapiens
ctacaataaatttaaaaattaaccaggcatggtgtgcacctgtagtcccagctacttgggaggctgaggcaggagaatcacttgagcccaggagttgaagsctacagtgagctgtaattgtgccactgcactccacctgggtgatagagcaagattgtatctcaaaaaacaaacagggtgggcatagtggctcaagactgt

SEQ ID NO: 318166 - DNA, 201 bp, Homo sapiens
tgtacagacagtctgtcctgtgcaaaggccaagaggtatgaacaggagaaaggagaagttgtgggtggctgaaatgtgtgttgcatgatggaaaggtgagrctgaaagccagattggagccaaattagagggtgcctggtagccttcctcaggaattttatcttaaagcaatacaaaacttttagccagagagtaattgtt

SEQ ID NO: 318167 - DNA, 201 bp, Homo sapiens
cttcacaggtaatgtgaaatactgttcttgaacctgaatagatgcagtggtgcatttaactttcgggtagttcaggtatttcgattgagcatttggagggrtaaaagggagacagcaagaagggacaaagtcatgttgatagtgacaatgatgttgtccaacctggatgaatgaaaataaagtatgatgtcagcagagagt

SEQ ID NO: 318168 - DNA, 201 bp, Homo sapiens
ttagcggggatgtacagcagtcagccttcattgagggcttcacaggtaatgtgaaatactgttcttgaacctgaatagatgcagtggtgcatttaactttygggtagttcaggtatttcgattgagcatttggagggataaaagggagacagcaagaagggacaaagtcatgttgatagtgacaatgatgttgtccaacct

SEQ ID NO: 318169 - DNA, 201 bp, Homo sapiens
aaaatgatgctgtgtgtgtgtgtattttatatacacactatttatgtattttggaaaaagtgaattaaaattaactttattaggagaatttcacatcgttytttgagattgcagaatctgtactttggaaatggccagagatagtggatgtggaggcagccttagaaacctaatttaaaatcactgaaatcacctaagtca

SEQ ID NO: 318170 - DNA, 201 bp, Homo sapiens
gttggctattgaaatgtatttctttgatttagttagcctttcaattatttttttagtctaatttattccctgtgctatgctttagtgttttactatgctaygtcttgtatcaatttccatttattaattttactttctttctaatcatgggtcttttaaaagtaatttagatatgtattttaggtgcactctttatttcac

SEQ ID NO: 318171 - DNA, 201 bp, Homo sapiens
ttggcaacattttgaagtaggcaaagttaattactgatatggacctagcttctcttcttctctttttaatactctatctccttgctaaggattcctacttmcttttcttaaacaggcaactgctgtctttatgacatcactcacagtgaaccagagttactttctccatgctatacataccctactcctgtgtgacagtca

SEQ ID NO: 318172 - DNA, 201 bp, Homo sapiens
tcacttgagcccaggagttgaagcctacagtgagctgtaattgtgccactgcactccacctgggtgatagagcaagattgtatctcaaaaaacaaacaggktgggcatagtggctcaagactgtaatcccagcactttgggaggccaaggtgggtgatcagctgaggtcaggagctcaagaccagcctggccaacatgacg

SEQ ID NO: 318173 - DNA, 201 bp, Homo sapiens
ccctttggaaaataatttgtcaatcaaggtatcagggtccttcatatgttcttatcttgtgaccctgtatttctcctaccacactatatacaaaacaaaamaaaaattatgcatgaagctttttgtagctaaaagtttgacaagcctgggcagcaaagtgagaccccttctctacaataaatttaaaaattaaccaggcat

SEQ ID NO: 318174 - DNA, 201 bp, Homo sapiens
aggagtgtccggcatttgttcatctactcaatttgtaaaggacctactacgtactagacacagttgtaggctctcacagaatattttatatatatatatayacacacacacacacacatatatacacatacatatatacacatatatatacatacatatacacacatatatacatacatatatacacatatatacacatat

SEQ ID NO: 318175 - DNA, 201 bp, Homo sapiens
catgtaaatgcctgcctaccagatggatccccccaaaagccttatagccatctaacttcaaaaagatcaaagtcaaactcattctctttctttcaaaacasaaaacaacaacaaaaaccttcctcctgcttttgcaccttccagtttcatttaatagtattgccatccatgtgtttgcccaagccagggagctgacttctt

SEQ ID NO: 318176 - DNA, 201 bp, Homo sapiens
aggttatcatattgtaaatagtctcaaactgtgtgtatttgtgtgctctagtaattgtcaaaggattcttgggccatgtatcacctccatacacctgccccaaactcataatgcattttggcaactaggagggactctactgtcaatatcactggctgactttcagagcagaggtaacacaatgttcctcttcctccttct

SEQ ID NO: 318177 - DNA, 201 bp, Homo sapiens
cttgaaggtgaccatcttggggatcattttaagataggctggcagatgagcataagaacttcacttaggaaagaagaagatcccaatctcttctctcccccagccccactccctccacctacacccccatttcaggagaccccaagggagtgtatgtagatggtaaagaccacgtgcttccatttgtgcagcactttgaca

SEQ ID NO: 318178 - DNA, 201 bp, Homo sapiens
gatatttctttctttagaaagaacaatacgttgtgaaccacagtttacctgctagtggaactgaaatgctgaggggaaaaaaaaaaaaaaaaaaaaaaaaactcaagccatatattactgggcctaaaaaatgagtgaacccaaaggttggagtcaggggtgctccttgtacaggctctccccttcacttggagcagcacc

SEQ ID NO: 318179 - DNA, 201 bp, Homo sapiens
ccaactagatatttctttctttagaaagaacaatacgttgtgaaccacagtttacctgctagtggaactgaaatgctgaggggaaaaaaaaaaaaaaaaamaaaaaaactcaagccatatattactgggcctaaaaaatgagtgaacccaaaggttggagtcaggggtgctccttgtacaggctctccccttcacttggag

SEQ ID NO: 318180 - DNA, 201 bp, Homo sapiens
cttcctctacccaactagatatttctttctttagaaagaacaatacgttgtgaaccacagtttacctgctagtggaactgaaatgctgaggggaaaaaaamaaaaaaaaaaaaaaaaactcaagccatatattactgggcctaaaaaatgagtgaacccaaaggttggagtcaggggtgctccttgtacaggctctcccct

SEQ ID NO: 318181 - DNA, 201 bp, Homo sapiens
ctgtagtgcagtggcgcgatctctgctcactgcaagctccgcctcccgggttcacgccattctcctgcctcagccgcccgagtagctgagactacaggcasctgccaccacgcctggctaatatttttttgtatttttagtagagacggggtttcaccgtgttagccaggaagatctccatctcctgacctcatgatccgc

SEQ ID NO: 318182 - DNA, 201 bp, Homo sapiens
gagtaaaagttctttactcttcaggtgacctaggcagagaaatagggagtttttttgttcccagaaatacacagatgttctaggtttgaccttctttgagwgtttgttaacttgaaaggatttgaaatctctggtctggctgtagattaaaagtctgtagaatctctcgaggggaagaaacttcgttttttcattaagagg

SEQ ID NO: 318183 - DNA, 201 bp, Homo sapiens
taggcctagagtagtgcctgaatgatagtaaaatagtgtttaattaattttagctgccattgttgttattgtcacttttataaatagtattatgtggattrcgtgtcttcacaaggacaaaatcgatagaacaggaaacttgtctatggtatgagtcaggaaatactttgatcaattgttcgccaagtatggaccctagtc

SEQ ID NO: 318184 - DNA, 201 bp, Homo sapiens
aggtattattccaatgttacagttgaggaaactacattgttatctaaatacagcaagagaagaaaaacataatgttgcaaaggaataaaactgggaaaagkctcctataaaggctgagggcagccagagcctgtaagaaggcttgcagtatctgtggagagcaggaggggacccctgccactgatgaggctgacaggtatg

SEQ ID NO: 318185 - DNA, 201 bp, Homo sapiens
caggaggggacccctgccactgatgaggctgacaggtatgccaggctgtgaagagccactgaacttgggcacaaaatacagagtaaaagttctttactctkcaggtgacctaggcagagaaatagggagtttttttgttcccagaaatacacagatgttctaggtttgaccttctttgagtgtttgttaacttgaaaggat

SEQ ID NO: 318186 - DNA, 201 bp, Homo sapiens
ctgggcgacagagcaagactccatctaaaaaataaaaaagaaaaaaaaaaagattcaagagattcctcatctccttggttacctgggctcaaggaaactcragcaaaagtcacctaagggctattttctttttgagttggaaaactgaagctgatttagtttgtttacttatggaaaggggaggggtgaagataactcatt

SEQ ID NO: 318187 - DNA, 201 bp, Homo sapiens
ttatattttctgaaatgttaattattcttttaaccatttccaataattatttagtccattatcattcccatctattccagtcaagtcttatttaatgcacrcacacacacgtgtgtatgtgtgtgtgtacagtcatccttcagtaacatggggatgggttccagcacctcctgcagacatcaaaatccaaggatgctcaaa

SEQ ID NO: 318188 - DNA, 201 bp, Homo sapiens
tattattgtatatgtgggatacactaaatatactgaattatactaaaaattggttggctattcatctaaaattatttgactggatagaatgtatttttatktgctaaatccatcgaccttatgttcagggtactttgcacaaccctttgtatctcaaggaaagactgctttatagccaagattattttattaactttcaga

SEQ ID NO: 318189 - DNA, 201 bp, Homo sapiens
tttttttttttttttgagatggtcttgctctgtctgccaggctgtagtgcagtggcgcgatctctgctcactgcaagctccgcctcccgggttcacgccawtctcctgcctcagccgcccgagtagctgagactacaggcacctgccaccacgcctggctaatatttttttgtatttttagtagagacggggtttcaccgt

SEQ ID NO: 318190 - DNA, 201 bp, Homo sapiens
gtcttcctctagccatttctgcatttttctccaaaaatgaaatgaggctaaagaaatataatatagctcgatatggacaatctcaagctctgaatgcctttaataagaaatagcttgtatattcctgcacttccctccagagggataatagccagtttaaattctgattatgaaagtcctcttatgctgttgacatttccc

SEQ ID NO: 318191 - DNA, 201 bp, Homo sapiens
aacctccacctcccaaattcaagcaattctcctgcctcagcctccccagtagctgggactacaggcatgcgccaccacacccggctaatttttgtatttttagtagagacaaggtttcaccatgttggccaggctggtctcgaactcctggcttcgtgatctgcctgcctcagcctcccaaaatgctgggattacaggtat

SEQ ID NO: 318192 - DNA, 201 bp, Homo sapiens
ttttttttcttttttttgagaaagtctcgctctgtcgcccaggctggagtgcagtggtgcgatctcggctcgctgcaagctccgcctcccaggttcacgcyattctcctgcctcagcctcctaagtagcagggactacaggcgcccgccaccacgcccggctaatttttttatatttttagtagagacagggtttcacgtg

SEQ ID NO: 318193 - DNA, 201 bp, Homo sapiens
catgatcttggctcactgcagcctccacctcccatgttcaagtgattctcctgcctcagcctcccaagtagccaggattacaggtgcccgccaccatgccyggctaatttttgtatttttagtagagacggggttttgccacgttggccaggctgatctcgaactcctgacctcaggtgatctgcctgccttggcctccca

SEQ ID NO: 318194 - DNA, 201 bp, Homo sapiens
cagagcaagaccctgtctcaaaaaaaaaaaaaaaaaaaggaaggaaagaaaagaaagaaaaagaaaaaaagtatttccacacttataaataagaaactctyatcagagagacactgaatttccaaatgtataataaattagcaacatatttgccaaggcattggtgttatggtggttagcatagctgccttccaaaattag

SEQ ID NO: 318195 - DNA, 201 bp, Homo sapiens
tggggttggaggatcacttgagcttgggaggtggaggttgcagtgtgcattccaacctggtgacagagcaagaccctgtctcaaaaaaaaaaaaaaaaaaaggaaggaaagaaaagaaagaaaaagaaaaaaagtatttccacacttataaataagaaactcttatcagagagacactgaatttccaaatgtataataaat

SEQ ID NO: 318196 - DNA, 201 bp, Homo sapiens
aggaggctggggttggaggatcacttgagcttgggaggtggaggttgcagtgtgcattccaacctggtgacagagcaagaccctgtctcaaaaaaaaaaaraaaaaaaggaaggaaagaaaagaaagaaaaagaaaaaaagtatttccacacttataaataagaaactcttatcagagagacactgaatttccaaatgtat

SEQ ID NO: 318197 - DNA, 201 bp, Homo sapiens
agtgctgggctggggaaagtagttgtgatattcatttttggaaaagttttaagggaagagtgcctgataacccattaattttaagctgaacctatactagrtaattatctccttcctaaaggtcctttttatctgcattcattcagtactttgtgtttacacttgtggtttcagagcagaccatgtcaaggttgttatagc

SEQ ID NO: 318198 - DNA, 201 bp, Homo sapiens
ggatcttaactactgagcgcaatgctgagccatggagccgggttggccttgtggatcacactgagcctgctgcaggtgagtggcccgagaaggggtcagarctgatgcgccccctccccgccgaaaaccaaattcccactccactttctcgtctatcgggttgtgctttgaagagggaggtggcaaaatttcttcttctgc

SEQ ID NO: 318199 - DNA, 201 bp, Homo sapiens
atgtattaaaacacaggaattaaaacataggaaaggatttagaaatacccagatagggacagaaggagattcaatgtggaaggaatagtgggagtcaaagygtggaggtttaaatacacaaattgtttagagaagaacaaacagtccagtttcaaacagagggtgaataaaaaggagtagactgggatgataggacgagag

SEQ ID NO: 318200 - DNA, 201 bp, Homo sapiens
tcgggttgtgctttgaagagggaggtggcaaaatttcttcttctgccttgggaagaatgatcctctggtgagccccccaacccagaatgacagcttatccrgctgtcaaagcaaaaagccaccttctctctccagctgctctcaagggacagcagctagggagaaagttgccatccacctcccctgcaagcctcttctctg

SEQ ID NO: 318201 - DNA, 201 bp, Homo sapiens
gacaccctgggggccgcgttgtgccctacctttcggatagacaacaccacatacggatgtaaccttcaagatttacaagcaggaaccatctataacttcargattatttctctggatgaagagagaacagtggtcttgcaaacaggtaaaggatgacaggtgcaattggatggccaagccacacggggttgggccctgcct

SEQ ID NO: 318202 - DNA, 201 bp, Homo sapiens
gcttttgaaagatacatattctaagattccacctcagacctatatcaggatttactgaggtaggacctcagcacctattgtgtgaaaatctgccagagtgrttctaatgtgcaatcaggtttgcaatccattggagaataactgaataatcagcctgttaagaaaaactctaaagcaggaaaaaggaggaagtgttgttgg

SEQ ID NO: 318203 - DNA, 201 bp, Homo sapiens
gccttttcaagctggtgtttcatttgagttccagggatacaaaaaatgaaggtaaaaatacctgtgaagataaatattgacagaaatgtctggtttcctcrgatctagccagaagcagcttggtggactttcagagactcccttagtgctgaaaacagccaactagctactgaaagggtcggggtggggtgcagggcggtc

SEQ ID NO: 318204 - DNA, 201 bp, Homo sapiens
acagccaactagctactgaaagggtcggggtggggtgcagggcggtcagcaaagagaaactttgggctgcggtgggaattttttaaagtgatgtggtttamgcttccattgcattaaattgtcaaaccctggaataattttaagtaaacgtttttagaataaataatagaagtacaatattaggggtatgcctttcctcaa

SEQ ID NO: 318205 - DNA, 201 bp, Homo sapiens
cctttcggatagacaacaccacatacggatgtaaccttcaagatttacaagcaggaaccatctataacttcaggattatttctctggatgaagagagaacwgtggtcttgcaaacaggtaaaggatgacaggtgcaattggatggccaagccacacggggttgggccctgccttttcaagctggtgtttcatttgagttcc

SEQ ID NO: 318206 - DNA, 201 bp, Homo sapiens
taagttatctaattttaagagaaactctaatatatgtagtgccttagacattagtttctggaactatgggaggctggtgggaaagatatttgaggacaccrgtacatttacataccttttataacacacctcaaatatatgtagatattcctggccaaaaatgttctatatatcttaaaagttatttatgtacatcaagag

SEQ ID NO: 318207 - DNA, 201 bp, Homo sapiens
agctataaaaaatttgtgtctggaccagagcccaccaatctcccagcacccatagtaactgcggaggtctttggaagagcccctgcatttgagttccagcyctgccactttttaactgtgtaagcagcatttcaattctctaatcctcatcttcctcacctgcaaagctccataaggttgtcctaagtagtagtcctgagt

SEQ ID NO: 318208 - DNA, 201 bp, Homo sapiens
aaatgatctttagaaaatagtgccaaaagatatgtaagttaaaataacaacaacaataatattgatatttgggccacttgacttctctaatgggcatctcrgaattacttcctccacaactgatctgtctggatcttcccaaaccccccagtctacttctcaatagttttccctcatgttagtaggtgacacctccattct

SEQ ID NO: 318209 - DNA, 201 bp, Homo sapiens
aatagactctccagctgaccgtctccaactaaattcctgttttcagttctttacttcattaataaccaaaatgtcatctgttaccaacagtgttggtgtaytctcagaggtactgccctggctagatttccactgagcccttcagagacacttcacacatttgcggacagtgtggcatttggtaaagagacgccatgacta

SEQ ID NO: 318210 - DNA, 201 bp, Homo sapiens
gaccagctggggcaacatggcgaaaccctatctctacaaaataatacaaaaattaggctgggcacgctagctcatgcttgtaatcccagcactttgggagkccaaggcgggtggatcacgaggtcaggagttcgagaccagcctggccaacacaatgaaaccctatctctactaaaaatataaaaattagctgggcgtggt

SEQ ID NO: 318211 - DNA, 201 bp, Homo sapiens
actccagcctcagcgacagagctagactccatctcaaaaaaaaaagaaaatacaaaaattagctgggcatggtggtgtgcacctgtggtcctggctactcrtgaggctgaggtgggagaatcacttgagcccaggaggttgagactgcagtgagccatgatcacgtcactggactccagcccgggtgacagagcaaggccc

SEQ ID NO: 318212 - DNA, 201 bp, Homo sapiens
tcaaaagggacttcagcactatgcaaaagctccagttcattaagggaagaactgaaggttcttaatagattgttctttcttctacaactttcattattttwttttttttttttttgagacagagtcttactctgttgcccagactggagtgcagtggtgccatctcggctcactgcaacctctgcctccctggttcaagca

SEQ ID NO: 318213 - DNA, 201 bp, Homo sapiens
ctacagataagaacaaagtctagggaatagttatcacaacatcacatacaaccactcagtatgagctttcaagcttattatatcagcatttgtcaaaccayctgtaagagtgttgtatttggggcacacctgtccatatatgtattcgccattgaggtcttgtgtgttatttctccaaaagagatgcttgtgcctggaatg

SEQ ID NO: 318214 - DNA, 201 bp, Homo sapiens
ctttctctatcatatccatcactgctattcacttgcatacacttcacttttgcataagcctgtctgattgccacctggagaggaggacctaaaagtctccagaaatggaaacatttctctgggtaaagtaccctgacagcaaacaagttagatggtcttaaagtacctgaatgagttagtatttaaatatatcactttgcc

SEQ ID NO: 318215 - DNA, 201 bp, Homo sapiens
aaatcacattaactaagcagttttcaaaaatagcagccttcattatctaaaatttaaaatcaaaaccacttaataagcatgcatcatctcatctttggatsttaaataattttgattccctatataagcagctttttcaaagtactagagcctctctagaggagtagttctccatatgccacaggaaatagaactgagagt

SEQ ID NO: 318216 - DNA, 201 bp, Homo sapiens
tctctgctagggtgagccacgacactctgtatttgcctgtctgtccctcctatacctagatctcagagctagttggacccaaaggagctgaaaaaaaaaaattctccctgagttctgaaaagtgttgcctcctctgtttcctttagagcctgacaagatacaaaacctgcattgccggcctcagaactccacggccattgc

SEQ ID NO: 318217 - DNA, 201 bp, Homo sapiens
tctgctattgtgtaagaaccccagggtgagagggatgaagcaacattgggagatgatatctatctcttgatacgctgggaacattcaccctgatttgccayttccatgtcagttgccctatccacgcaggactcagcccaccacactctgtttctgatttttcattaatattggtgctattagcttcctattgctgctata

SEQ ID NO: 318218 - DNA, 201 bp, Homo sapiens
tatggcgagctcaggatgagttttccgtggctgactgtgggctgtgttcatgaaatctgctaagcagaacaccctgcactggttaccaaacccagggcagractctaaacacttctgaccattgcatctggtattagagtagccagggaaacacaatgcaaacactggatggaacaaagctttacttacatagagaggaga

SEQ ID NO: 318219 - DNA, 201 bp, Homo sapiens
ccactggcaaatcacttcctctgcctgttttccttcaggagaaggggagagtttcttgattacagcattaaacacaggcacacgctcacacacacacagtytgatgcaggagagcagaatccttcatttcactaactgttgtttatgctgtgaaagcagagttgtgacccctcttggttccttccccacctctttttccag

SEQ ID NO: 318220 - DNA, 201 bp, Homo sapiens
tcaacctcccaaagtgttgggattacaggcacgagccaccacgcctggtcaaggggcttacaattttttttttttttttttgagatggagtctccctctgytgcccaagctggagtgcagtggtgcgatcttagctcaccacaacctccacctcctgggttcaagcaattatcctgcctcagcctcccgagtgcataccga

SEQ ID NO: 318221 - DNA, 201 bp, Homo sapiens
aatcacttgagcccaggaggtataggatgcagtgagccataatcatgccattgcactccagcctggacaacagacagagaccctacctcaaaaataaaatwaaattaaattaaaaaagaatcaatcttcacaactctatgggctggttagtattatcatcactgccatttttcctaatgaagaaactaaaacttacagagg

SEQ ID NO: 318222 - DNA, 201 bp, Homo sapiens
caatggacgattattcaaccataaaaaggaatgaaatcttggtatatgctataacatggatgaaccttgaaaacattatgctaaatgaaaggagccagtcmcaaaagatcacagatttatgatttcatttctatgaaacatccagaataggcaaatccacagacacagaaagtagattagtggttgccagggatcgcgggg

SEQ ID NO: 318223 - DNA, 201 bp, Homo sapiens
cagctgatcccagattcctaactttggaagacatttagaggagggaaaccccaggttcaccaaggagtcacttttccggactcatgttttttctgtctgtyctgttctaggtaaagtgtgaccattactggccagcggaccaggattccctctactatggggacctcatcctgcagatgctctcagagtccgtcctgcctg

SEQ ID NO: 318224 - DNA, 201 bp, Homo sapiens
ccagtgatgtggaaaatctcttcatttattatgcaaataaccatatgtgtttcttcttccatttttctttttccttttcttttcttttttttttttttttkatgagatggagtcttgctccatcacccaggctggagtgcaggggcatgatgtgatcttggttcactgcaacctgtgcctcctgggttcaagtgattcttc

SEQ ID NO: 318225 - DNA, 201 bp, Homo sapiens
aaagaaaagaagaggagaggggaggggagaagaaaagagaaaaaagaaaaagattctggaaaccattaataacctaaagctcttccaatgtacaccacccrtttcttctcctacccataaagagtggcaacggggaagagagggagggtagggagggggttcctgcagctgagcagcagtttcacaaggtatctcttccag

SEQ ID NO: 318226 - DNA, 201 bp, Homo sapiens
ctccagcctcagcgacagagctagactccatctcaaaaaaaaaagaaaatacaaaaattagctgggcatggtggtgtgcacctgtggtcctggctactcaygaggctgaggtgggagaatcacttgagcccaggaggttgagactgcagtgagccatgatcacgtcactggactccagcccgggtgacagagcaaggccct

SEQ ID NO: 318227 - DNA, 201 bp, Homo sapiens
tgcttttgcaccttccagtttcatttaatagtattgccatccatgtgtttgcccaagccagggagctgacttcttatattttttaagggatgcagtctcaytatgttgcccagactggactcaaactctgtgctcaagcaatcttctacagatgtgcaccaccacacctggcatgcttacatgcatggatatgtgcattta

SEQ ID NO: 318228 - DNA, 201 bp, Homo sapiens
ccaacatctgaaaaattctataaatatgcctatcattttccgtagacatctatttttattttttgtcattacactgaatatgcaattcatgacatcatttmccacactaggacagctaaggtgtgatagagagaaaacaggatttagagacaggtattggaagctcaactttactacctgttcctatacaacacgagtgag

SEQ ID NO: 318229 - DNA, 201 bp, Homo sapiens
tttctaaataacattaaaaaaaaaaaaaaaacagggtctttctatgttgcccaggctgaagtgcagtagctattcacaggcactattatgatgcactatarcctccaatacctggacccaagcaaccctcctgcctcagcctcctgagtaactggaactaagggcacacatcatcacacttggcttcctaagtcacattta

SEQ ID NO: 318230 - DNA, 201 bp, Homo sapiens
agcctcctgagtaactggaactaagggcacacatcatcacacttggcttcctaagtcacatttaaaaaaaagaaaaggaaaaaagaattcattttggttcrggaattttgccatactttgtcttttcttttgagaaaagaaaaattgtgttgacgtcaagcctgcttatggaactctggggctttctggtgctggtagatt

SEQ ID NO: 318231 - DNA, 201 bp, Homo sapiens
cacacatcatcacacttggcttcctaagtcacatttaaaaaaaagaaaaggaaaaaagaattcattttggttcaggaattttgccatactttgtcttttcytttgagaaaagaaaaattgtgttgacgtcaagcctgcttatggaactctggggctttctggtgctggtagatttattcaagtatatacaatgaatattat

SEQ ID NO: 318232 - DNA, 201 bp, Homo sapiens
accagtgatgtggaaaatctcttcatttattatgcaaataaccatatgtgtttcttcttccatttttctttttccttttcttttctttttttttttttttttatgagatggagtcttgctccatcacccaggctggagtgcaggggcatgatgtgatcttggttcactgcaacctgtgcctcctgggttcaagtgattctt

SEQ ID NO: 318233 - DNA, 201 bp, Homo sapiens
gagaaagcatatctgtccttgctccatatctgtggtgagctatattccaaacactaatcagtaaacacaaggcaacaaaggatgctaatgcaacttgcagktgtgagaaaatggagcttccatgccaaaatactgaaatttctggatcatttcatgatttgagaaaaagtagaggtgaaaaattggacacagccttggcat

SEQ ID NO: 318234 - DNA, 201 bp, Homo sapiens
aacgtgatattcagccaggtttttcttcctgtaatagttgctttgcctttagcaaattgcctggatcattgacctttcttagcccatgcataaaatgccayttcataatttcctctccttaactctgtgatgactgtattctaacaacactgtaattggttttaggtaaatatcttggagaaagcatatctgtccttgctc

SEQ ID NO: 318235 - DNA, 201 bp, Homo sapiens
tcattatggtcatgtatgtcagggagccatggcactgaggaagaaattacatagaattttctatgtaatacaatgaaagaacataaaaaattaatatatawgatatataaaatgtatgttcatttcttagaaaaaaattacataaacccaatagaagctttgataattattagtgggaccttgtctacttaattttatata

SEQ ID NO: 318236 - DNA, 201 bp, Homo sapiens
ccattaaaaacaaaaacaacttcattcaaactaaaagcattcccaagtcagaaaacgaatgtgtatttgttcagctagtccctggacggttgtacagtgtyactgttactacaaaaagtggacaatatgaagccaatgaacaagggaatgggagaacaagtaagtggaacgattgcaaaatctgacagttggttggacttg

SEQ ID NO: 318237 - DNA, 201 bp, Homo sapiens
acttaaacccaggaggtggaggttgcatgagtcgagatcctgccactgcacactagcctgggtgatagagcgagaacctgcctcaaaaaaaaaaaaaaaaagaaatttcttttttcaatgtatatactattgtcctgtatcttatttttctctcctcttttgatcccacaaaaatataattattgctttatatagtcaaca

SEQ ID NO: 318238 - DNA, 201 bp, Homo sapiens
caatgaacaagggaatgggagaacaagtaagtggaacgattgcaaaatctgacagttggttggacttgaaagtctctagtaatttatctgaaccttgaatwttttctgcttattcattagtacattacattcccagtaagtctcacttggtgctaacatcattcagccaagccatggcctataattacagaatatttattg

SEQ ID NO: 318239 - DNA, 201 bp, Homo sapiens
ggaaatacctccatagctggatgaaaatagatgtcaacaaggagggaaaactggtcaatgaaagcctctgtttacaaaaaggtgagctattcctttcagarcaaatcctgaaagtctttctactaaatatcttgggggttttgtttgtttgtttgtttgtttgttttacatttaagggaagtccacatgccccaacatatt

SEQ ID NO: 318240 - DNA, 201 bp, Homo sapiens
ggtcccacaccaagtctgctaaatcgcagtttccaggagcaggaccaaggcttcaatattctaacaagctccaaatatgattctgatggctacaaaagttygcaaaccactgctttaaatttgacaaaacttggaagttgaatgttaagactaaatcttctttcttgcttcttaaatagcacaagttaaaaacacagacac

SEQ ID NO: 318241 - DNA, 201 bp, Homo sapiens
tcagctggcactgtgctctccctaaatctccagctctcaaaccctttcaaccactgacatgagtgagagattcaccgcttactttttttaaactaaacttytttaaaaattttgtttaaatttagttaaagttacaattacagtagtaatcttcttacatgcatagatcgcatagtggcaaagtcagggttttgggggttt

SEQ ID NO: 318242 - DNA, 201 bp, Homo sapiens
agttagaatggcgatcattaaaaagtcaagaaacaacaggtgctggagaggatgtggagagatacgaacacttttacactgttggtgggactgtaaactakttcaaccattgtggaagacagtctggcaaatcctcaaggatctagaactagaaataccatttgacccagccatcccattactaggtatatacccaaaaga

SEQ ID NO: 318243 - DNA, 201 bp, Homo sapiens
taaggtctaagatttttcttttaaatgcacacaataataatctactctctctttttattgtcccagcttgtcatctgtgatcaattactcactcagaattmataaatatttagttactctctgtttccttttcagtgcctgacaaagtccagggagtcagtgttagcaactcagccaggagtgactatttaagggtatcct

SEQ ID NO: 318244 - DNA, 201 bp, Homo sapiens
aatcacaaagagctttgtttgcctgtgaaggtgttttggaattatggagagccactatagggccattagcatgggagtgctatgaaaatatgctagatagrgtctgcagattgaaagagtaggaggtaaggacacaagtgactggtcaataggcagttgcaataatgtatggtctcatttatacttgctaaagggtatgat

SEQ ID NO: 318245 - DNA, 201 bp, Homo sapiens
gataggtttttaggcttatttcttaccactagagggcaggaaatgccttgcaaagggaaaacggtccctctggttgtgttagctattacttcccaggaatraataacttcatcacaaaaaaattgaagctatcccagtttaaggtctttagaaaagctatcgtattcttcccctttccactcaaacatttttgctttattg

SEQ ID NO: 318246 - DNA, 201 bp, Homo sapiens
aacttaaagagccaaaaatgtaagcagagggcttgacattttattctgcagattatagagagaccttgaatgtttttaagcaaaaaaaaaaaaaaaaaaaagaacttaatcttgcaagaacattaatctttttagttggaaaagaaagaaaggaatgcctcatgatcacgacatccaatatctcttacaaaggatgccaca

SEQ ID NO: 318247 - DNA, 201 bp, Homo sapiens
actgtattgatatttgcatgtatcaggcactgactaaataatttatatccattatttcatttagttctcacaacaaaactgtgagagatgtcttgttatttattaccattatacagataattcaaagaggtcaaataatttgtccatagtcatccagccagtaagtggtagagctagaatttaaaccaggctatttgattc

SEQ ID NO: 318248 - DNA, 201 bp, Homo sapiens
ttttgagaaaaatgaacctggactgcagtaaaataagcagttatttgcaaaagtcttcaagccatgttctttttttttctttttctttctttttttttttktgtgtgtgtgtgtgtatttgccttgcagatcctttacctcctgctaggtttggagtcagtaaagagaagacgacttcaaccagcttgcatgtttggtgga

SEQ ID NO: 318249 - DNA, 201 bp, Homo sapiens
gctcccaggtagggcatcagaatgactatgcatccaactgtcatgttccagtttttttcttgaagcttaagcaaagttttaactatgtcctggtaagctartgtgtaaaagctatgctctttcaaaagacagtttctacaattgcagctctcatgactctaacgccttagactgagcatccctgagaggttattatttgat

SEQ ID NO: 318250 - DNA, 201 bp, Homo sapiens
ccttgggaagctgaggcgggcagatcacctgaagtcaggagtttgagaccagcctggccaacatggtgaaaccctgtctctactaaaaatacaaaaaaaaattcaccggacacagtggcgtgtgcctgtaatcccagctactcgggaaactgaggcagaagaattgcttgaacccgggaggcggaggttgcagtgagccga

SEQ ID NO: 318251 - DNA, 201 bp, Homo sapiens
aatttcctgaatttgataactttattgagattgcacacttaattcaggatatatgcagcctattccctccacccataatttctgtgggtgactgtttttgwtttccttttctttaaagccaatgttatcataagccatgctttatttgtctgctatcctagggtttggtaataaatgtttgctagctcctaaatccatagc

SEQ ID NO: 318252 - DNA, 201 bp, Homo sapiens
atgaccatgctgtcacaaaaacaattaagaagcaaatatcatttgtgctataaatatagctttctttctctttctaaataacattaaaaaaaaaaaaaaaacagggtctttctatgttgcccaggctgaagtgcagtagctattcacaggcactattatgatgcactatagcctccaatacctggacccaagcaaccctcc

SEQ ID NO: 318253 - DNA, 201 bp, Homo sapiens
ttggtaataaatgtttgctagctcctaaatccatagcgtacagcagctacacccatatagactgccccattgcaagcattactgcctcaactgggttcatstgggagtagactcccttccaagggtggggtggcaggaactgtggtgtgaaagaagatgcagcagaagtgcctgattggaagagtggctcacttgcactca

SEQ ID NO: 318254 - DNA, 201 bp, Homo sapiens
aaaagtctgtagaatctctcgaggggaagaaacttcgttttttcattaagaggtatttttaaaagcatgttttctaaaagaattgaagcaggccaggcacrgtggcacacgcctgtaatcccagcactttgggaggccaaggcgggtcgatcacttgaggtcaggagttcaaggccagcctggtcaacgtggtgaaaccct

SEQ ID NO: 318255 - DNA, 201 bp, Homo sapiens
gtgatctacctgcctcagcctcccaaagtgctatgattacaggtgtgagccaccgcacctggccaattaatgtttttaaattgctatgactttttttttttaagacagctgcttgttcactcatgtttaatcaaaagcagccccacccttcccatgtagtctgggaaaggtttcctggtggcaaggaagaaagcttgtccc

SEQ ID NO: 318256 - DNA, 201 bp, Homo sapiens
gaggctgggtgcagtggctcacacctgtaatcctagcactttgggaggccgaggcaggagggtcacatgagcccaggagtttgagactagcctgggcaacrtggggagatcccatctctataaaataaataatttaaaaaatttaaaaagaagattaagacactgacaattagatgcaatacaggatccttggggctggat

SEQ ID NO: 318257 - DNA, 201 bp, Homo sapiens
gtcagtctgatttttatttctctatgagtctgtttgctatgactgcttttttgcctttggggttcagttgtttcacaataatgatcaaggtgtagatatayttctttttgtttctcttgctcaagattgattggcatttctgtactttccaactagtgtctttctacaatcctggaaattctcagctattaactctctaat

SEQ ID NO: 318258 - DNA, 201 bp, Homo sapiens
aacttaaaaaggaacttgcccaagattaaatgactagggaataacagaccaagaagagtatacacacacacacacacacacacacacacacacacacacactcccctaaacatctagtcacatattctcttacatagtgtgcctgataataaaggtaaatgccaaggaggacatgatttgaaatccagcaatcactcctct

SEQ ID NO: 318259 - DNA, 201 bp, Homo sapiens
aaaaatcagagaaaagtggcaaattgttactttctttttcatgtgagttctctcagtgggtgccaaaacatcagaagcattcaaaactttgtttgaaaatktcaacagttcattctctaagtgatgacttttaaatttattttctgttttagttcctagtgctgtcaaaaatattcacatttctcccaatggagcaacaga

SEQ ID NO: 318260 - DNA, 201 bp, Homo sapiens; identical to SEQ ID NO: 66773

SEQ ID NO: 318261 - DNA, 201 bp, Homo sapiens
catctccattgctttttcctcagtccccctggctgtcctccagcttcgtgtcaaacatgccaatgaaacctcactgagtatcatgtggcagacccctgtakcagaatgggagaaatacatcatttccctagctgacagagacctcttactgatccacaagtcactctccaaagatgccaaagaattcacttttactgacct

SEQ ID NO: 318262 - DNA, 201 bp, Homo sapiens
gtttagccctcaagctaagagtggtttttacatgtttaaagggttgtacaaacaaataaggaaacaaacaagaaaaagatgagacagagaccatatgtgtsctgcaaaacctgaaatatttactacctgatccttacagaaaaaattgtccaactcctgctttagaaaactttcattttaatcacacagatgtggaataca

SEQ ID NO: 318263 - DNA, 201 bp, Homo sapiens
attcaactttatcagaaaatattcagcatatagcaccaatttgtacaatacctttcctgtggttcatctatcaaggcctctcctaaataatatagaaacaytataactgttccatttttactgttttacacaagaagtgagattcatccccaaaccccaatcaaaccttatttaacataagattacttagttggaacttta

SEQ ID NO: 318264 - DNA, 201 bp, Homo sapiens
atcattgtttaagttggtaactaagtattataatctacagcagcacaaatacatgtgttgttcatctatgggatgtgaatttttttgtgtgttcttccatraaagaaagcagacctatgaaggtaaaaatctaagccacatgtttcatatttgtttcataaaagacacattaatgattgtattcaagtttccaggtaatat

SEQ ID NO: 318265 - DNA, 201 bp, Homo sapiens
ggctagaagtccaaggcgaaggtgtctgcaggtttagtttcttctgaggcctctccttggcctgcaaatggcacctttttgcatgtcctcatatagtggtmcctctgtttctgttgtctgtctgttaatgtcttctcataagaacaccagtcatattggcttagggcccgctctaatggccccattttaacttaatcacct

SEQ ID NO: 318266 - DNA, 201 bp, Homo sapiens
tctgaggcctctccttggcctgcaaatggcacctttttgcatgtcctcatatagtggtacctctgtttctgttgtctgtctgttaatgtcttctcataagracaccagtcatattggcttagggcccgctctaatggccccattttaacttaatcacctctttaaaggccgtatctccacatactgaggtactggggttta

SEQ ID NO: 318267 - DNA, 201 bp, Homo sapiens
ccccatttctactaaaaatacaaaaaattagccaggcgtggtggtgcacacctgtagtcccagctgcttggaaggctgaggtggaagaatcacctgagccygggaggtcaaggctgcagtgagtcgtgatcgtgccactgcactccagcctgggcaaccggagtgagaccctgtcccaataaataagtaaataaataaata

SEQ ID NO: 318268 - DNA, 201 bp, Homo sapiens
tgcatgtcctcatatagtggtacctctgtttctgttgtctgtctgttaatgtcttctcataagaacaccagtcatattggcttagggcccgctctaatggycccattttaacttaatcacctctttaaaggccgtatctccacatactgaggtactggggtttagggtttcaacatataaatttggtggggacacaattca

SEQ ID NO: 318269 - DNA, 201 bp, Homo sapiens
aaacttaaaaaggaacttgcccaagattaaatgactagggaataacagaccaagaagagtatacacacacacacacacacacacacacacacacacacacactcccctaaacatctagtcacatattctcttacatagtgtgcctgataataaaggtaaatgccaaggaggacatgatttgaaatccagcaatcactcctc

SEQ ID NO: 318270 - DNA, 201 bp, Homo sapiens
gaatctgtgaccattaagcaatctaccatagtatcatcattatcattatcattatcattatcgtcatcattatcatcatcatcatcatcaccaccaccacccactatctctgttttatagatacccagctgaaacttaaaaaggaacttgcccaagattaaatgactagggaataacagaccaagaagagtatacacacac

SEQ ID NO: 318271 - DNA, 201 bp, Homo sapiens
ggaatctgtgaccattaagcaatctaccatagtatcatcattatcattatcattatcattatcgtcatcattatcatcatcatcatcatcaccaccaccacccactatctctgttttatagatacccagctgaaacttaaaaaggaacttgcccaagattaaatgactagggaataacagaccaagaagagtatacacaca

SEQ ID NO: 318272 - DNA, 201 bp, Homo sapiens
tcatcttctggtattctagaacacacatatatgaacacatcaatatatttcatattttccatgtgttttctctctgaactacagtataggtaactttctcrtatctttgattcatttcattaattctttcttcagctttgtctaatctattttaaaatctacccactgttttaaattttaattgttatgttcacttttaag

SEQ ID NO: 318273 - DNA, 201 bp, Homo sapiens
tcctccaattatttcatatgaatagtggatgtttactccattttacataaaatgctacataaatgcagttccaatcaagtctcctcaccactctgcttgtwactagattggtatcccaatttctgtaaagatgctgttgtttggttgggaggcagggataaaatccagtttgagaagaactcaagtgcctagaaagaaact

SEQ ID NO: 318274 - DNA, 201 bp, Homo sapiens
aggaatctgtgaccattaagcaatctaccatagtatcatcattatcattatcattatcattatcgtcatcattatcatcatcatcatcatcaccaccaccacccactatctctgttttatagatacccagctgaaacttaaaaaggaacttgcccaagattaaatgactagggaataacagaccaagaagagtatacacac

SEQ ID NO: 318275 - DNA, 201 bp, Homo sapiens
caaagaagaatgtatgttgaccaagtgccaacttcaagatctgtgtataagatttgttaaatgataagttggaagaaataaatgttgttaattaggaaaargacacaggcttaggggttagataaatctagctttcagttccaggttggctatttgttagcactgtgatataggctaaattacttacattttatgatcctt

SEQ ID NO: 318276 - DNA, 201 bp, Homo sapiens
atgtggaatacacacatgtacaaaaataaaaatagtacattttaataatagtgactgtattgatatttgcatgtatcaggcactgactaaataatttatayccattatttcatttagttctcacaacaaaactgtgagagatgtcttgttatttattaccattatacagataattcaaagaggtcaaataatttgtccata

SEQ ID NO: 318277 - DNA, 201 bp, Homo sapiens
tattgagtgggaggaatctgtgaccattaagcaatctaccatagtatcatcattatcattatcattatcattatcgtcatcattatcatcatcatcatcatcaccaccaccacccactatctctgttttatagatacccagctgaaacttaaaaaggaacttgcccaagattaaatgactagggaataacagaccaagaag

SEQ ID NO: 318278 - DNA, 201 bp, Homo sapiens
attgatatttgcatgtatcaggcactgactaaataatttatatccattatttcatttagttctcacaacaaaactgtgagagatgtcttgttatttattaycattatacagataattcaaagaggtcaaataatttgtccatagtcatccagccagtaagtggtagagctagaatttaaaccaggctatttgattccagag

SEQ ID NO: 318279 - DNA, 201 bp, Homo sapiens
ctatttgattccagagtccattctctctgctattagagatctgaagtaagagatatatggtcaaaaaggaaagataaaattttctttcataagagcagtaraaacttggaggaaatgggagcagggtgcggtggctcatggctataatcccagcactttaggaggctgaggtggagggttgcttgagcccaggagtttgag

SEQ ID NO: 318280 - DNA, 201 bp, Homo sapiens
atattgagtgggaggaatctgtgaccattaagcaatctaccatagtatcatcattatcattatcattatcattatcgtcatcattatcatcatcatcatcatcaccaccaccacccactatctctgttttatagatacccagctgaaacttaaaaaggaacttgcccaagattaaatgactagggaataacagaccaagaa

SEQ ID NO: 318281 - DNA, 201 bp, Homo sapiens
gcatattgagtgggaggaatctgtgaccattaagcaatctaccatagtatcatcattatcattatcattatcattatcgtcatcattatcatcatcatcatcatcaccaccaccacccactatctctgttttatagatacccagctgaaacttaaaaaggaacttgcccaagattaaatgactagggaataacagaccaag

SEQ ID NO: 318282 - DNA, 201 bp, Homo sapiens
gtaaaggagcgtgcatattgagtgggaggaatctgtgaccattaagcaatctaccatagtatcatcattatcattatcattatcattatcgtcatcattatcatcatcatcatcatcaccaccaccacccactatctctgttttatagatacccagctgaaacttaaaaaggaacttgcccaagattaaatgactagggaa

SEQ ID NO: 318283 - DNA, 201 bp, Homo sapiens
gaagaatcagataaatgtggttgggcggacaggtaagcatccacctggagaagggctagattgtagaatgcctcatggttctccaaaatgggacagtgaaygggctcagctattcacaaatccagatttaaaaccaccaaagtttgtacaattcaatggtttcaagagccttactcatttattctttgtatttttctctta

SEQ ID NO: 318284 - DNA, 201 bp, Homo sapiens
tgtaaaggagcgtgcatattgagtgggaggaatctgtgaccattaagcaatctaccatagtatcatcattatcattatcattatcattatcgtcatcattatcatcatcatcatcatcaccaccaccacccactatctctgttttatagatacccagctgaaacttaaaaaggaacttgcccaagattaaatgactaggga

SEQ ID NO: 318285 - DNA, 201 bp, Homo sapiens
ttgtaaaggagcgtgcatattgagtgggaggaatctgtgaccattaagcaatctaccatagtatcatcattatcattatcattatcattatcgtcatcattatcatcatcatcatcatcaccaccaccacccactatctctgttttatagatacccagctgaaacttaaaaaggaacttgcccaagattaaatgactaggg

SEQ ID NO: 318286 - DNA, 201 bp, Homo sapiens
cgacttttccagtcccagcagctgtcaccgacctgaggatcacagagaactccaccaggcacctgtccttccgctggaccgcctcagagggggagctcagytggtacaacatctttttgtacaacccagatgggaatctccaggagagagctcaagttgacccactagtccagagcttctctttccagaacttgctacaag

SEQ ID NO: 318287 - DNA, 201 bp, Homo sapiens
aaagtgcttttggcttttcctattgttactgtttcccgtatcactgaatccaacttcctctttctgtttgcttttccctcttccccacctgctcccttctyctcactgcatttccctccctcattctcttgctcctcgacttttccagtcccagcagctgtcaccgacctgaggatcacagagaactccaccaggcacctg

SEQ ID NO: 318288 - DNA, 201 bp, Homo sapiens
catcaaagtgcagtcggccggcatgaccagcgaggtggttgaagacagcactatcacaatgatagaccgtaagtgtccctggaggtgcgcacagagcctcytgtcactggagtgaaggggctgtgcacctttctctatcatatccatcactgctattcacttgcatacacttcacttttgcataagcctgtctgattgcca

SEQ ID NO: 318289 - DNA, 201 bp, Homo sapiens
agggtcctggagtcaatccacccccatactgagggatgactgtataatcatatgcacataaaatacaaccatgaacagaacacatgcattgaaatgggccytttaacatgacagtatttctctgccacattggtctccctgggcagacgagttctaccctagatgaaagttgatacagtggggagagagaatggcaatggg

SEQ ID NO: 318290 - DNA, 201 bp, Homo sapiens
ggctcaggcgttggctcctcggggctccctccctcgccggcgcattgttcctttgccgggagacgaggaaattgccttttgattgcggaagtcagcggacsgggctggggcgaggcagcgcgggtcagaatggcagcgtgggaagggcggcgcgctgcctgtccccgccgcctctcgcgtccgcagcccgcccggggcggc

SEQ ID NO: 318291 - DNA, 201 bp, Homo sapiens; identical to SEQ ID NO: 66759

SEQ ID NO: 318292 - DNA, 201 bp, Homo sapiens
taatcccagcaccctggaaggccaaggcaggtagattgcttgagttcaggagttcgagactagcctgggcaacatagctaaaccccatttctactaaaaayacaaaaaattagccaggcgtggtggtgcacacctgtagtcccagctgcttggaaggctgaggtggaagaatcacctgagcccgggaggtcaaggctgcag

SEQ ID NO: 318293 - DNA, 201 bp, Homo sapiens
aaattagccaggcgtggtggtgcacacctgtagtcccagctgcttggaaggctgaggtggaagaatcacctgagcccgggaggtcaaggctgcagtgagtygtgatcgtgccactgcactccagcctgggcaaccggagtgagaccctgtcccaataaataagtaaataaataaataaataaattttaataaggagacttc

SEQ ID NO: 318294 - DNA, 201 bp, Homo sapiens
gtcacattgtaaaggagcgtgcatattgagtgggaggaatctgtgaccattaagcaatctaccatagtatcatcattatcattatcattatcattatcgtcatcattatcatcatcatcatcatcaccaccaccacccactatctctgttttatagatacccagctgaaacttaaaaaggaacttgcccaagattaaatga

SEQ ID NO: 318295 - DNA, 201 bp, Homo sapiens
agtcacattgtaaaggagcgtgcatattgagtgggaggaatctgtgaccattaagcaatctaccatagtatcatcattatcattatcattatcattatcgtcatcattatcatcatcatcatcatcaccaccaccacccactatctctgttttatagatacccagctgaaacttaaaaaggaacttgcccaagattaaatg

SEQ ID NO: 318296 - DNA, 201 bp, Homo sapiens
aaaaaaaaaaaaaaagaacttaatcttgcaagaacattaatctttttagttggaaaagaaagaaaggaatgcctcatgatcacgacatccaatatctcttmcaaaggatgccacatatcactagattattaacactacaacagaagattacattactgatatcactaaaatgattttagcggacatttcttgtgtgtcaaa

SEQ ID NO: 318297 - DNA, 201 bp, Homo sapiens
aagtcacattgtaaaggagcgtgcatattgagtgggaggaatctgtgaccattaagcaatctaccatagtatcatcattatcattatcattatcattatcgtcatcattatcatcatcatcatcatcaccaccaccacccactatctctgttttatagatacccagctgaaacttaaaaaggaacttgcccaagattaaat

SEQ ID NO: 318298 - DNA, 201 bp, Homo sapiens
caagaggggatagaaatgttttgaactgcagatattgtgtctcctatctactgctgcccaagaaaagtaaatgagtatccttacttttggtctgtaatatytcctttttgacatcatttcaccgtttagttccagacaaagttgcaaacctggaggcaaacaataatggcaggatgaggtctcttgtagtgagctggtcgc

SEQ ID NO: 318299 - DNA, 201 bp, Homo sapiens
aactgcagatattgtgtctcctatctactgctgcccaagaaaagtaaatgagtatccttacttttggtctgtaatatctcctttttgacatcatttcaccrtttagttccagacaaagttgcaaacctggaggcaaacaataatggcaggatgaggtctcttgtagtgagctggtcgccccctgctggagactgggagcag

SEQ ID NO: 318300 - DNA, 201 bp, Homo sapiens
aaagacaggtattcagtgtagggactttaatccaaatatttgtgtttcaataatacccagtataagtagcttctgggatcagatcagatagttattggttrttgataaaatacatagttgaaagttagaaatttaagcaagtagttgttttatttttttaataagcattaatactataacaagtataacttttatgccaca

SEQ ID NO: 318301 - DNA, 201 bp, Homo sapiens
ctctagtgcgtcagaatttgcacattagcaagattcccaggagatggagagcacattttaaaattatggctaagtgaacctaattcatgaaccagtatgtwttttttaatatgggcaattcagccttgcaaaacaaagctataagttaatcccaccagctcataaattataagtcaattctctgttcttccagaagataga

SEQ ID NO: 318302 - DNA, 201 bp, Homo sapiens
caggcaggcaggcaggcaggcaggcaggaatatagatagatagatagatagatagatagatagatagatagatagatagatagatagatagatagatagatggatggatagacatcatccttttctaaagtatctcctgtttcatttgttatcttttttccagatgatttgctctctgttaaaaaggcacattatatttgg

SEQ ID NO: 318303 - DNA, 201 bp, Homo sapiens
gcaggcaggcaggcaggcaggcaggcaggaatatagatagatagatagatagatagatagatagatagatagatagatagatagatagatagatagatagatggatggatagacatcatccttttctaaagtatctcctgtttcatttgttatcttttttccagatgatttgctctctgttaaaaaggcacattatatttg

SEQ ID NO: 318304 - DNA, 201 bp, Homo sapiens
ggcaggcaggcaggcaggcaggcaggcaggaatatagatagatagatagatagatagatagatagatagatagatagatagatagatagatagatagatagatggatggatagacatcatccttttctaaagtatctcctgtttcatttgttatcttttttccagatgatttgctctctgttaaaaaggcacattatattt

SEQ ID NO: 318305 - DNA, 201 bp, Homo sapiens
aggcaggcaggcaggcaggcaggcaggcaggaatatagatagatagatagatagatagatagatagatagatagatagatagatagatagatagatagatagatggatggatagacatcatccttttctaaagtatctcctgtttcatttgttatcttttttccagatgatttgctctctgttaaaaaggcacattatatt

SEQ ID NO: 318306 - DNA, 201 bp, Homo sapiens
aatggagtggatttcttttcctccagttcccacatccaagcagtcacgaagtcctttccttcccttggagctagcccctcatcccactgccactgcccttkatcaactctcattagccctgctaatgagtagcctcctaatgggtctcctgcctccagctctgccctaatgatccttcgccaccactgccaccatcaaagt

SEQ ID NO: 318307 - DNA, 201 bp, Homo sapiens
agaacactcatttgcaatccacagacatcaagaggggatagaaatgttttgaactgcagatattgtgtctcctatctactgctgcccaagaaaagtaaatragtatccttacttttggtctgtaatatctcctttttgacatcatttcaccgtttagttccagacaaagttgcaaacctggaggcaaacaataatggcagg

SEQ ID NO: 318308 - DNA, 201 bp, Homo sapiens
tttccctagctgacagagacctcttactgatccacaagtcactctccaaagatgccaaagaattcacttttactgacctggtgcctggacgaaaatacatrgctacagtcaccagtattagtggagacttaaaaaattcctcttcagtaaaaggaagaacaggtagtaacctttataaattttacattttaaagtgttctg

SEQ ID NO: 318309 - DNA, 201 bp, Homo sapiens
cccctcctccacccccacacattcgtgtgaatgaaaaggatgtgctaattagcaagtcttccatcaactttactgtcaactgcagctggttcagcgacacsaatggagctgtgaaatacttcacagtggtggtgagagaggctgatggtaagttatcatgagttaactccactctgagacacagaattgcttcctcagagg

SEQ ID NO: 318310 - DNA, 201 bp, Homo sapiens
cccgccctatttctccttgaacacatttttcagctactgtgttcaacaactaatttatatttaaataaatcggttttcttttcagaatcagcattcgagcwtttacacagctctttgatgaggacctgaaggaattcacaaagccactctattcagacacatttttttctttacccatcactactgaatcaggtaaggcta

SEQ ID NO: 318311 - DNA, 201 bp, Homo sapiens
tagaaacaaaaaaacaatgagaatattgggggagggagatgaggagtccaatttggacgtcttgagtgttggatgtctgtggtacattcagggagagatgyaatttgcaaaagcaggagaaacatctaaactgaaagtttaaatttgggagttgtcaccttatggatgacacttcaaaccatggacatagacgaaatctag

SEQ ID NO: 318312 - DNA, 201 bp, Homo sapiens
ttgaattctatttgtaataacattacttgggagatatggcttcaatagctttcttactggttccctagcactaattttcccacctgcgtttgttgtttctrtctggattattgtagagcccttgtttggagctattgaaggtgtgagtgctggtctgtttttaattggcatgctagtggctgttgttgccttattgatctg

SEQ ID NO: 318313 - DNA, 201 bp, Homo sapiens
gaacaaatactagtatccactactgctgaagtcaagtcttgaagttttgaccttagttaatgttagtaataaaagtctaaacaagagacataattcagctrtcaaacccacattcactgaacatgaacttgctcagcattcttcactttctagattcataggtatgcaccactctgcatatttatcagggccattttcact

SEQ ID NO: 318314 - DNA, 201 bp, Homo sapiens
catactcagagcctttggaaagtaaatgcctcatcgtgggcatcacttgaattctatttgtaataacattacttgggagatatggcttcaatagctttctyactggttccctagcactaattttcccacctgcgtttgttgtttctatctggattattgtagagcccttgtttggagctattgaaggtgtgagtgctggtc

SEQ ID NO: 318315 - DNA, 201 bp, Homo sapiens
tcattaatattggtgctattagcttcctattgctgctataataaactatcacaatcttagtggcttaataccacccaaatttattattttctagtcctgargattagaatctgaaaatggttttttgggactgaaatcaagacaacagggctgtgtttcttgtagagactttagagggagaatccactccttgcctttttc

SEQ ID NO: 318316 - DNA, 201 bp, Homo sapiens
tcctaatatgtttgatctgcaattggttgaatccaccgatgaggaacccgcagatacaaagagccaactagatagattaggtaggtaggtaggtaggtagycaggcaggcaggcaggcaggcaggcaggcaggaatatagatagatagatagatagatagatagatagatagatagatagatagatagatagatagataga

SEQ ID NO: 318317 - DNA, 201 bp, Homo sapiens
gcagtgctataaaatcaaagcttacatttgcatttgaaaggtgctctcaacacaacagttcgctttatgatccaattacctctctatcctttactttttgscctttgagaatctcttacattcctgacaagtcattcatttacattttcacattttatccaatatgtatagttgtgtttattagaaggattttcatggtat

SEQ ID NO: 318318 - DNA, 201 bp, Homo sapiens
cataaattattgcttttgtcttctgtgcaatccaagtataatttttaaactcaccaagcaatcaaatgttacagttgaccaggcacagtggctcatgcctrtaaccccagcactctgggaggccaaggtgggagaattgcttgatgccaggagttcaagaccagcctgggcaacacagcaagaccctatctgtaaaagaaa

SEQ ID NO: 318319 - DNA, 201 bp, Homo sapiens
ccaggtttttcttcctgtaatagttgctttgcctttagcaaattgcctggatcattgacctttcttagcccatgcataaaatgccacttcataatttcctytccttaactctgtgatgactgtattctaacaacactgtaattggttttaggtaaatatcttggagaaagcatatctgtccttgctccatatctgtggtga

SEQ ID NO: 318320 - DNA, 201 bp, Homo sapiens
gtttagttaccatgtagttgtgcggttttgagtgaattttttaatgctgagttttaatttgattgcactgtggtctgagaggcagtttgttgtgatttctsttcttttacatttgctgaggagtacgcagtcattctttaaaaaaatgtttcaagggtaattttaaagttgcatatttttaaacagtcttttgggggcaca

SEQ ID NO: 318321 - DNA, 201 bp, Homo sapiens
gacagttggttggacttgaaagtctctagtaatttatctgaaccttgaattttttctgcttattcattagtacattacattcccagtaagtctcacttggygctaacatcattcagccaagccatggcctataattacagaatatttattggtagataaaagcaaacatagtgagggagcaagaaggctaaatgtcccatt

SEQ ID NO: 318322 - DNA, 201 bp, Homo sapiens
agggctctgttcggttccattggtctatatctctgttttggtaccagtaccatgctgttttggttactgtagccttgtagtatggtttgaagtcaggtagkgtgatgcctccagctttgttctttttgcttaggattgtcttggctatgtgggctcttttttggttccatatgaactttaaagtagttttttccaattctg

SEQ ID NO: 318323 - DNA, 201 bp, Homo sapiens
tggttgtagatgtgcggtattatttctgagggctctgttcggttccattggtctatatctctgttttggtaccagtaccatgctgttttggttactgtagscttgtagtatggtttgaagtcaggtagtgtgatgcctccagctttgttctttttgcttaggattgtcttggctatgtgggctcttttttggttccatatg

SEQ ID NO: 318324 - DNA, 201 bp, Homo sapiens
ttgtcaggtttgtcaaagatcagatggttgtagatgtgcggtattatttctgagggctctgttcggttccattggtctatatctctgttttggtaccagtmccatgctgttttggttactgtagccttgtagtatggtttgaagtcaggtagtgtgatgcctccagctttgttctttttgcttaggattgtcttggctatg

SEQ ID NO: 318325 - DNA, 201 bp, Homo sapiens
tctgtttacaaaaaggtgagctattcctttcagagcaaatcctgaaagtctttctactaaatatcttgggggttttgtttgtttgtttgtttgtttgttttacatttaagggaagtccacatgccccaacatatttcctatggaagattcataagctaatggaggtggatggtgacgtgcccaatgatggaaaacttcatg

SEQ ID NO: 318326 - DNA, 201 bp, Homo sapiens
gttctaacttctcaaagatctcttggcacacggcccacgttaggacagtgacataaaaatatgaacgaagaagggccaggaagacagtgccttcctctacycaactagatatttctttctttagaaagaacaatacgttgtgaaccacagtttacctgctagtggaactgaaatgctgaggggaaaaaaaaaaaaaaaaaa

SEQ ID NO: 318327 - DNA, 201 bp, Homo sapiens
actgctgaagtcaagtcttgaagttttgaccttagttaatgttagtaataaaagtctaaacaagagacataattcagctgtcaaacccacattcactgaayatgaacttgctcagcattcttcactttctagattcataggtatgcaccactctgcatatttatcagggccattttcactaacttttctatctgagatcct

SEQ ID NO: 318328 - DNA, 201 bp, Homo sapiens
ataaaatcctcgctctcccagtcttttagccagaaactcttcaaaggcacagttatctgattgtataaggttttgtggggttttctatcccataaaactcyagtgcactatggagttgatgggaagatctaaacataccacctcaaaccataatttacagaacttatcagtgcttcacttgtgctctagggtcttgcttac

SEQ ID NO: 318329 - DNA, 201 bp, Homo sapiens
ttagtggagacttaaaaaattcctcttcagtaaaaggaagaacaggtagtaacctttataaattttacattttaaagtgttctgtctgctgaattactatytaacatgcaatttacaagtattcattaactgcctattatgtactgggcattgctttatggatcctttctattgtgtttgttttctattttaccaattgca

SEQ ID NO: 318330 - DNA, 201 bp, Homo sapiens
tgctcagcattcttcactttctagattcataggtatgcaccactctgcatatttatcagggccattttcactaacttttctatctgagatcctatttaaawtcagagaaaaaatggagaatcaaagtagttgtacagacaggttaagccaacaaatcctttctcctcttttctccataagggcacacagaaagtgtcaatg

SEQ ID NO: 318331 - DNA, 201 bp, Homo sapiens
aaacagttgtttgaataaataaccagtaaatgagtagttaaaaataaaatcctcgctctcccagtcttttagccagaaactcttcaaaggcacagttatcygattgtataaggttttgtggggttttctatcccataaaactctagtgcactatggagttgatgggaagatctaaacataccacctcaaaccataatttac

SEQ ID NO: 318332 - DNA, 201 bp, Homo sapiens
tgagttttcattgtctaccaatccacattctatgtccatgtgtacacattatttagctctcacttagaacaaaattcagtgtttatgtctgacttagttcwcttaagataatggcctccagttccatccatgttgatgtgaaagacatgatttcattctttttcatggctgaatagtatcaccacttacttttgaaaatga

SEQ ID NO: 318333 - DNA, 201 bp, Homo sapiens
cagaacagatcagggaaaataggatgataaatagcttatttaggagacctcacctggcacatagtagttgtataataaacagttgtttgaataaataaccrgtaaatgagtagttaaaaataaaatcctcgctctcccagtcttttagccagaaactcttcaaaggcacagttatctgattgtataaggttttgtggggtt

SEQ ID NO: 318334 - DNA, 201 bp, Homo sapiens
ctaatagtataattgagtttgtcatgtagaaaacaccccaaggacgaataaatctgatctatgtccggagtggctaacctgggcacaaaggcagtaatagyggcacaggattcagaaaggcaaaaacaaacagaaactaagaggaatgtccaaaaatcaatcaaagccgagatctagtagatgtacaagtaggatcgccag

SEQ ID NO: 318335 - DNA, 201 bp, Homo sapiens
gacgagttctcactctgttgcccaggctggagtgcagtgatgccatcatggctccctgcagcctcgaccacctgggctcaagtgatcctcttgcttcagcytcccgagtagctgggactacaggcacacgacaccatgcatggcaaacttttaactttttaatttttattttttgtagagatgggggcctccctgtattgc

SEQ ID NO: 318336 - DNA, 201 bp, Homo sapiens
ttttcagaacacacctttcctatatttctccaatatatatgtttacttcagtcctgttaaaagcatgccagacagataatgcttgatgagaggaggtgtcrtctcccaaagcacatcagagaaccacatgcaaatcagcctcttgcgtggtggctgctgaactcagtccagtcagaattctgcctgtctcaagacagtcat

SEQ ID NO: 318337 - DNA, 201 bp, Homo sapiens
tacacacacacaaaaaaaattagctgggtgtagtggcacacgcctgtaatcccagctacacggaaggctgaggcttaagaattgcttgaacccgggaggcrgaggttgcagtgagctgaaatcgcaccactgtactccaacctgggtgacagagtgagactctgactcaaaaataaataaataaataaatagaattgaaac

SEQ ID NO: 318338 - DNA, 201 bp, Homo sapiens
  misc_feature (1)...(201): n = A,T,C or G
gcctcagttttcttatctgcaaagtgggaataatcatatacatcatcactgtgtggctatcaccagtgcttcctaactgtttttatgtcatgggcacacanagaggtctgtgtgccaccctggagttaatcaacaaggctatctgcaactgaacataattgtctgtggacgtcagccctgtaccccaaaatctgatggaat

SEQ ID NO: 318339 - DNA, 201 bp, Homo sapiens
cagttttcttatctgcaaagtgggaataatcatatacatcatcactgtgtggctatcaccagtgcttcctaactgtttttatgtcatgggcacacacagakgtctgtgtgccaccctggagttaatcaacaaggctatctgcaactgaacataattgtctgtggacgtcagccctgtaccccaaaatctgatggaattaat

SEQ ID NO: 318340 - DNA, 201 bp, Homo sapiens
gttatgcttttctacaataagtggtatgctttgctacaataaaagttgagagttatagtttctgttcttatatcatttctgcctatgagaaaaaaacctaytcaaaaattcaactttatcagaaaatattcagcatatagcaccaatttgtacaatacctttcctgtggttcatctatcaaggcctctcctaaataatata

SEQ ID NO: 318341 - DNA, 201 bp, Homo sapiens
caagcatttaactagatgccatttgaatgtgttatgcttttctacaataagtggtatgctttgctacaataaaagttgagagttatagtttctgttcttayatcatttctgcctatgagaaaaaaacctactcaaaaattcaactttatcagaaaatattcagcatatagcaccaatttgtacaatacctttcctgtggtt

SEQ ID NO: 318342 - DNA, 201 bp, Homo sapiens
tctctactaaaaatacaacaattagccaggtgtagtggtgggcacctgtaatcccagctacttgggaggctgaggtgcctgtaatcccagctacctgggargcggaggttgcagtgagccaagatcactccactgcacttcagcctgggcagcaagagcaaaactctgtctcaaaaaaaaaaaagtgaaaaaaaaaaaaaa

SEQ ID NO: 318343 - DNA, 201 bp, Homo sapiens
aatggaattacctggtcccaataggaatggtctcatcttaaactaggttgagctatatgtttctgctggtctttcacattggtaattttcataaacagcgyaaacaattatgacacaccctgcggcagtctctaattacagtgttcttcctttcagatccagtctattcaaggcattgagaatgtacctgaagagctcctg

SEQ ID NO: 318344 - DNA, 201 bp, Homo sapiens
gaccgcttcctggcaccaaggatgacttctggaaaatggtgtgggaacaaaacgttcacaacatcgtcatggtgacccagtgtgttgagaagggccgagtragtaaacagccttcctggcatcaaagctttgctttctgccacctggatagaattctgccccatcatcaaagtgaaaccccgcaaaacaacgtagggatca

SEQ ID NO: 318345 - DNA, 201 bp, Homo sapiens; identical to SEQ ID NO: 66760

SEQ ID NO: 318346 - DNA, 201 bp, Homo sapiens
ataaagagctactatttagaggagtcctttgtaaatcagataattattttgtattatgaataattacaaattacaccctaatttatctgtatagtaaattraggtttttgcatgggagattccttaagaggcttcagtatgagcaagttctgagggatcttggaggttcctttgtcttgttttgacttaagaatctttttt

SEQ ID NO: 318347 - DNA, 201 bp, Homo sapiens
tttagtagagacggggtttcaccatgttggccaggctgttctcaaacttctgacctcaagtgatctgccctcctcagcctcccaaagtgttaggattacargtgtgagccaccatgcatagcctcatttttttgaggggggcgggttgggggattgcttatattcttcttagtaacttttgagtcagcaaggtatgttgga

SEQ ID NO: 318348 - DNA, 201 bp, Homo sapiens
ggccagcggaccaggattccctctactatggggacctcatcctgcagatgctctcagagtccgtcctgcctgagtggaccatccgggagtttaagatatgyggtgtatgttagcttgcttgacttaacaaccgagcttggggagatgaatgagatctgtgaaccccactttcgctggttcctctcttgtagtttcagccca

SEQ ID NO: 318349 - DNA, 201 bp, Homo sapiens
gcatctgtaaagcacaaataaagagctactatttagaggagtcctttgtaaatcagataattattttgtattatgaataattacaaattacaccctaattkatctgtatagtaaattaaggtttttgcatgggagattccttaagaggcttcagtatgagcaagttctgagggatcttggaggttcctttgtcttgttttg

SEQ ID NO: 318350 - DNA, 201 bp, Homo sapiens
ctaacaaattaccccaacatttagcagtttaaatcagcatttattgtctcactggtggctctggcccagagtctttcaggaggttgcagtcaagacttagrctggggctgccattatctgaaggtttgactggggctggaggactcgcttcataatggcttgttcacatggctgtgggcagatgcagccacaattccttgc

SEQ ID NO: 318351 - DNA, 201 bp, Homo sapiens
cttctacacgtggtttttatatagttttttaattttgccagtcaaatggatgtaaaacagtatttcactgtggttttgacttgcatttccttgatcaccartgatgtggaaaatctcttcatttattatgcaaataaccatatgtgtttcttcttccatttttctttttccttttcttttctttttttttttttttttatg

SEQ ID NO: 318352 - DNA, 201 bp, Homo sapiens
taaaaagatctggaccagaatgctagttaaatccataaattgaatgagactgattgctcagctggggctatagaatatgaaggaaacaaaggatggatccwtgggaaataacaccttgtaagggcctgacaaaaggagaggagaaagcaaagagagcctgagaaagagcatttggggtggaggaaagagaactcaggcgaa

SEQ ID NO: 318353 - DNA, 201 bp, Homo sapiens
tccttcactgctcacaactccctctgagcagttgctcagcaagggaagttatcagcaagggaaggttccgcagaaatcaatttccttataagagaactcasggagtataaggaagggggcccaatgcacaagcttggctgcctgtggctgagacacagtggcagtggaggtctttatggtcaccaaagcactgactcttct

SEQ ID NO: 318354 - DNA, 201 bp, Homo sapiens
aggaattaattataactattatataatatttcactgtgtgtgtgtatgtgtgtatatgtatgtattcattatccagtctcctgtatatattcttctacacrtggtttttatatagttttttaattttgccagtcaaatggatgtaaaacagtatttcactgtggttttgacttgcatttccttgatcaccagtgatgtgga

SEQ ID NO: 318355 - DNA, 201 bp, Homo sapiens
tttcctattctattcaggatgtagctttatatggcatttgtgactttcaggctgtttgaccctaaatcgcacctttgattatatataactaatttgtggcyagtttttgcactggcttctgctcttttgcctccacttatttacttcctagggcttggtaaaaaatgaatgcggttcctcctcttgccatcaaactgtaca

SEQ ID NO: 318356 - DNA, 201 bp, Homo sapiens
taagcttcaaccacaaatagaattgcctagatgtcatcatttctgaggcaacccaccctttgcacatctttccttacctgctcattaatgcttaaaggtcycccaatgtggcaacagtcttcattctccaaaaaatagcaaagctattgggataggtggcagcatgactaatctatacagtgataggagtgactgttaaca

SEQ ID NO: 318357 - DNA, 201 bp, Homo sapiens
aactgaaaagatgaattatgctttgggtgggaggaaacagggaggtgtcagcctataatttggtggatcctttttaaggtagcaaaaagagactgctttayactaacaaccattctcagattgtacctttctcagattttcaagattgagattgcatgtaacattcataataaatgacaaaggtctgtgagcagaaaagca

SEQ ID NO: 318358 - DNA, 201 bp, Homo sapiens
ctctaaatacagaattgccttattccacagtgttcctaagtaacatgcatatatttatttactggttggggaggggaccacagatatacagaatggtttcrttcatatattagaaagaacctcacatgcacaaaattgtattaatcataattcttggttcaagaaaccatgcatccccagcactttgggaggccgaggcgg

SEQ ID NO: 318359 - DNA, 201 bp, Homo sapiens
aataccacccaaatttattattttctagtcctgaagattagaatctgaaaatggttttttgggactgaaatcaagacaacagggctgtgtttcttgtagasactttagagggagaatccactccttgcctttttcagcttctgaggccgcccacattccttggctcgtgtccccctcccaacagtgacattgctccaatct

SEQ ID NO: 318360 - DNA, 201 bp, Homo sapiens
aaaccttatacacaattgtatctgatgtttagcatcttataggtatttgttcactaaatactaagccatgcactcagggatcacaaagagactgtaatacyataaataatatctaatactccaaatattgatgaaattgaatggaactgaatgtgtgaacactaagccaagccttcaccagttaacaaaaaattatctttt

SEQ ID NO: 318361 - DNA, 201 bp, Homo sapiens
caaaagagatgcttgtgcctggaatgacattaatatagtttacctttcttatatatttttatactgtttaaggtgctgcatgagtttcttaagcatccctrataattttgacccatttgtgggtaagggggaaacttgaaacctgacaaactgtgaggagtttctaggccaatgggtattttaggctcacagtatctaaca

SEQ ID NO: 318362 - DNA, 201 bp, Homo sapiens
atatgtataatgtccagttaccgtgaaatagtaatgaatctgtggcctactgttgaattaaaattcagccccaaatggaaaaatgaaatctccttaatatmatgctctaaatacagaattgccttattccacagtgttcctaagtaacatgcatatatttatttactggttggggaggggaccacagatatacagaatggt

SEQ ID NO: 318363 - DNA, 201 bp, Homo sapiens
accacccaaatttattattttctagtcctgaagattagaatctgaaaatggttttttgggactgaaatcaagacaacagggctgtgtttcttgtagagacyttagagggagaatccactccttgcctttttcagcttctgaggccgcccacattccttggctcgtgtccccctcccaacagtgacattgctccaatctctg

SEQ ID NO: 318364 - DNA, 201 bp, Homo sapiens
tggtttccagaatatatgtgaaattgtatgttatgttgccttacttctttgcttgaattcttataaatatcaccttttctctttagcttgatagtttcctyccctcaaagtgagcctaatggctttctctcctgtatgaaaccttatacacaattgtatctgatgtttagcatcttataggtatttgttcactaaatacta

SEQ ID NO: 318365 - DNA, 201 bp, Homo sapiens
taaatacttggcaaaggaataatcagaaatcacttagatcaggggtcccacctgggagtccatggttcatgggagactttaggaatgtagtaacccctgarattgtttatgaggttgctggggataggaaaggtatatgcatttctttgagaagaaacagtccatggcttttatcagattcttatggtttctgtgacctcc

SEQ ID NO: 318366 - DNA, 201 bp, Homo sapiens
gataattccttcgtctcaagatccttaacttaatcacatctacaaagccctttttgccacagaaggtaacatattcacaggttctgggggttaggacatgracatctttggggccattattcagacaaccacattggcctaattgattgataacttatttattaagtacataggtctgaaggcggggatggttatgttgac

SEQ ID NO: 318367 - DNA, 201 bp, Homo sapiens
tctctgaatacttccaccaggctgagaatagcatcatttcatcaccttccctcccaacaccatcgtctgcgtagccttttcctgtaatccgtgttctgcartgcttgatctctaggtctgggaagttctttacagctaaaactgtctctcgtgctgcatgacaaacgatgactcagcctcacaaacattccaatctattta

SEQ ID NO: 318368 - DNA, 201 bp, Homo sapiens
ttggatttcattacaccagcatgagcatacaaacaaaaacagatttatatattgtaagagccagaatgaaagattgtagtttagttgagcagcagtgcatrgcattaggatagcagttggaattcttttgattaaggggaagtggtggtcaggcagtatgattagtgggagctttctgagtgactgcattcctgactgatg

SEQ ID NO: 318369 - DNA, 201 bp, Homo sapiens
acagatttatatattgtaagagccagaatgaaagattgtagtttagttgagcagcagtgcatagcattaggatagcagttggaattcttttgattaagggkaagtggtggtcaggcagtatgattagtgggagctttctgagtgactgcattcctgactgatgttcactctgtgtaagttttgtcgtttctgcaaaaatca

SEQ ID NO: 318370 - DNA, 201 bp, Homo sapiens
cagatttatatattgtaagagccagaatgaaagattgtagtttagttgagcagcagtgcatagcattaggatagcagttggaattcttttgattaaggggwagtggtggtcaggcagtatgattagtgggagctttctgagtgactgcattcctgactgatgttcactctgtgtaagttttgtcgtttctgcaaaaatcac

SEQ ID NO: 318371 - DNA, 201 bp, Homo sapiens
ggctgttggattccaaaagcttgttttttaaaggaaatccagtggagtagcatcatatgcagatataatttacgcaaattaactgcaagcattcaggtaaaaaaaaaaaaaagtctgagagaaataatggtctcagtagtacagatgattctgccctcctttttaattgtgaacatgtgccccaaaatgagcatgatgtga

SEQ ID NO: 318372 - DNA, 201 bp, Homo sapiens
cccaggtataaaaactgctatggaaactagcaatgtgtgttaatatggcaaatatctcccttaaaaaatttatttgtttagactgtcctataaacacagcrttttcctctctccaccctaggacaaaatacgaacagaaagctaccgagatttcatataccaaaatccacatatcttcaaagacaaggtaagtagtatagg

SEQ ID NO: 318373 - DNA, 201 bp, Homo sapiens
actgccaaccctgagtttaacccaactaagatttcttctaagaatgaagctggacaacttggctgggcacagtggctcatgcctgtaatcccagcacttcsgcagggcgaagcaggcaggtggcttgaggtcaggagttcaagaccagcctggccaacacggtgaaacctcgtctctactaaaattacaaagattagccgg

SEQ ID NO: 318374 - DNA, 201 bp, Homo sapiens
gtcttcataaaatattttctttgtgtgttgttgctatttctattctttattgttttcttaggagaaaaataagcttggtatcccaggtataaaaactgctrtggaaactagcaatgtgtgttaatatggcaaatatctcccttaaaaaatttatttgtttagactgtcctataaacacagcgttttcctctctccacccta

SEQ ID NO: 318375 - DNA, 201 bp, Homo sapiens
tcacactaaaatacctgagaaagtcattttttatcccaaatcattgttcttcaaatgagtgtatattaaatgaactgcatttacctttatacatataaacaaaacatggcttaaaacagattttttcatgattcagtttacaaatgccatgagttttctttttgtgaaatccacaaaaagatgagttctgaaactattaca

SEQ ID NO: 318376 - DNA, 201 bp, Homo sapiens
agatggcaggaatgtaacactggaatatatttcataccttttatgaaggaattatacttctgataatccatcctaaagaatcaattcaaaattcagacttaaaaaatacttgttacacaaagacactgctttaatttgcttttctttctttaaactatcttgctttatagaattttttttcattttttatagtcacatctg

SEQ ID NO: 318377 - DNA, 201 bp, Homo sapiens
ctcacgagagagtgggtctctccatttatgtggaccatctttaaagttgttttgtagtttatgtaagtcagacatatattgttacatttatctcaagtattgtgtgtgtgtgtgtgtgtgtgtgtgagagagagagagagagagagagagagagagagcgagagcgactgagactcggtctgtcgcccaggctggagtgca

SEQ ID NO: 318378 - DNA, 201 bp, Homo sapiens
tcacgagagagtgggtctctccatttatgtggaccatctttaaagttgttttgtagtttatgtaagtcagacatatattgttacatttatctcaagtattgtgtgtgtgtgtgtgtgtgtgtgtgagagagagagagagagagagagagagagagagcgagagcgactgagactcggtctgtcgcccaggctggagtgcag

SEQ ID NO: 318379 - DNA, 201 bp, Homo sapiens
ccatagggcctcatatttagaagttcagtaaaatgcttccattgaccctttatgaccacaatagttttactcactttcacaaggatttgacactgtggtatgtagttagttctcgcttcattcaaaaattaatgaaacagggctgggcgcagtggcttacgcctgtaatcccagcactttgggaggctgaggtaggtgagc

SEQ ID NO: 318380 - DNA, 201 bp, Homo sapiens
catagggcctcatatttagaagttcagtaaaatgcttccattgaccctttatgaccacaatagttttactcactttcacaaggatttgacactgtggtatgtagttagttctcgcttcattcaaaaattaatgaaacagggctgggcgcagtggcttacgcctgtaatcccagcactttgggaggctgaggtaggtgagcg

SEQ ID NO: 318381 - DNA, 201 bp, Homo sapiens
tagggcctcatatttagaagttcagtaaaatgcttccattgaccctttatgaccacaatagttttactcactttcacaaggatttgacactgtggtatgtagttagttctcgcttcattcaaaaattaatgaaacagggctgggcgcagtggcttacgcctgtaatcccagcactttgggaggctgaggtaggtgagcgca

SEQ ID NO: 318382 - DNA, 201 bp, Homo sapiens
gggcctcatatttagaagttcagtaaaatgcttccattgaccctttatgaccacaatagttttactcactttcacaaggatttgacactgtggtatgtagttagttctcgcttcattcaaaaattaatgaaacagggctgggcgcagtggcttacgcctgtaatcccagcactttgggaggctgaggtaggtgagcgcatc

SEQ ID NO: 318383 - DNA, 201 bp, Homo sapiens
tttatatattgtaagagccagaatgaaagattgtagtttagttgagcagcagtgcatagcattaggatagcagttggaattcttttgattaaggggaagtrgtggtcaggcagtatgattagtgggagctttctgagtgactgcattcctgactgatgttcactctgtgtaagttttgtcgtttctgcaaaaatcactggt

SEQ ID NO: 318384 - DNA, 201 bp, Homo sapiens
ccctgtgtgtgcatgtgcctgtgtgttagaaatttgtgttttttggcttttcttccttacacttttttttttctttattctctttttccctctctcttttyctccctttatacattggcatggttacttaaaagttcaggttttccgtttgttcttcctgatgggaaactagtcccctaatttaatcaggaatattatgat

SEQ ID NO: 318385 - DNA, 201 bp, Homo sapiens
agtgatctgcccacctcggcttcccaaagtgctgggattataggcgtgcaccaccacacctggcctggtagttctgtttttagctctttgaggaattaccrtactgctttccacaatgtttgacctaattgacactcagacagtgtttaagtgttgccttttcgcctcaatcttgccagcaccgttattttttcacttttt

SEQ ID NO: 318386 - DNA, 201 bp, Homo sapiens
tctgtttactctgttgatggtttcttttgctgtgcagaagctctttagtttaattaaaccctatttgtcagtttttgcttttgttgcaattgcttttggcrtctttgtcatgaaatctttgcctgttcctatgtccaggatggtattgcctaggttgtctttcggggtttttatagttttgggttttacatttaagtcttt

SEQ ID NO: 318387 - DNA, 201 bp, Homo sapiens
cctcttcctctgcttttctttctttcttttttttttttattttagagttctgttatgtgataggcaagaatctcgcccaggtgaatggctggttagaaagytctttggctccttaccagactcttgggccagggggcattctgtgcctgtggtgaccgtggttagagcaatgctgaacaatgtggtgagaccaagagacaa

SEQ ID NO: 318388 - DNA, 201 bp, Homo sapiens
tgagtatttagctgggttgattgattttacagttggcttataccctagtgagaaggcctttatttgaaatccagctgacacaactgaatttctttccctaygtgcttaacaaaagcaccttacatttggaacttaggagtcatttccagaatatgtgattaataggaggcttctcatagcaacttttaagtgattcttcaa

SEQ ID NO: 318389 - DNA, 201 bp, Homo sapiens
catgtctgtaatcccagcactttgggaggctgaggtgaaaggattgcttgagcccaggagttcaaggccagcctaggcaaaatagtgagactctgtcctcyataaaaagtgttttaaaattagccaggcatggtggtgcatgcctgtaattccacctacttgggagactgaggcaggaggattgatagacctggggaagtg

SEQ ID NO: 318390 - DNA, 201 bp, Homo sapiens
acgcatttttaagaacttgggtcttatttgagtttcagtcttcataaaatattttctttgtgtgttgttgctatttctattctttattgttttcttaggaraaaaataagcttggtatcccaggtataaaaactgctatggaaactagcaatgtgtgttaatatggcaaatatctcccttaaaaaatttatttgtttagac

SEQ ID NO: 318391 - DNA, 201 bp, Homo sapiens
gccatgtgttcaagaacagacaaattcccactgaaaccatctgggcataggataggaagcacaaagtagtagcctttcaacaactttatttcttcagtggrtatcaggatggttagattatctctcttctggagtcaatactaataaattataatttcaatacgtaatggaaagagccgggcatggtgactcctgcctgta

SEQ ID NO: 318392 - DNA, 201 bp, Homo sapiens
gggtatcaggatggttagattatctctcttctggagtcaatactaataaattataatttcaatacgtaatggaaagagccgggcatggtgactcctgcctrtaatcccagcactttgggaggccaaaggattacaggcgtgagccaccgcgcctggccagtttcagatttttattgtgatcttttcctagccagaaacatc

SEQ ID NO: 318393 - DNA, 201 bp, Homo sapiens
gataaaattgacaggacttgagaatgagttagatgatggggagtgagggcaataactcccattgctctcagtatcaatgatgactccaaggtttcttacaygtacaatttgaaaaattatggtcctgtcaaagaaaattggaagagcaaatttagaggtgaggatcagatgctcaattattagtacgttgaatttcatacc

SEQ ID NO: 318394 - DNA, 201 bp, Homo sapiens
gaaaatatccatcaaaatatgctgctgacactttaacaaagcattttaaacaatgataaaattacatgaatgaggatgtattttttaacctatgctattcsttgaggctgttggattccaaaagcttgttttttaaaggaaatccagtggagtagcatcatatgcagatataatttacgcaaattaactgcaagcattcag

SEQ ID NO: 318395 - DNA, 201 bp, Homo sapiens
ttaaaaataagaatcacacagaaaagaaaagaaaaaaaggtaacaccacaaaccctgtctctttaaggggcattctagatcatgttggtgtttgagggtaracacccattttaaaaccagaaactccctttgtttttttcagagcagcaatcttccactttctcaactgtacgaatgctgtctagtgagtagatagattat

SEQ ID NO: 318396 - DNA, 201 bp, Homo sapiens
aggtagggggccttaggtaggaaaaagcaatacagtaaataatcttcctctttgtagtggtaagccacataaaatggagaaacccttttgccgaaaacagytacaaatgccaaaaaaaagttaaatgctatctgtttgaagttaacaaataaggaagtactactaagccaagactcagaaaagaaggtaatctgaaaaatg

SEQ ID NO: 318397 - DNA, 201 bp, Homo sapiens
aaagtagtagcctttcaacaactttatttcttcagtgggtatcaggatggttagattatctctcttctggagtcaatactaataaattataatttcaataygtaatggaaagagccgggcatggtgactcctgcctgtaatcccagcactttgggaggccaaaggattacaggcgtgagccaccgcgcctggccagtttca

SEQ ID NO: 318398 - DNA, 201 bp, Homo sapiens
aatctttgggggaagaggaaatgttctatatattgattgtggtggtcaacaaagtatctgtttttcggaatttaacaaaactaccctaaaatgaatgcacygaattgtttgtaaataatacccaatgaagttaaggggtacaatttcttctttgatgcaggaaaaaaatcctctatagttacaatgtacattctgagaatt

SEQ ID NO: 318399 - DNA, 201 bp, Homo sapiens
agagtttatgccaacagtgaatcaccaggcttttttggtgtttctctgtaaaacagtttcttttttttttactgaatactctcagaacatagtagtccccraaacttgtcctctaactgtctgcattgtctttgtgacaactcatagttttaagttcattactttcctgttgaatacttcatttttccaggtagacgtaaa

SEQ ID NO: 318400 - DNA, 201 bp, Homo sapiens
agcactcgccaccatgcccggctaattttttgcatttttagtagagacagggtttcaccatgttagccaggatggtctcaatctcctgacctcgtgatccrcccgcctcggcctcccaaagtgctgggattacaggcgtgagccactgcgcccggccggcagcagcatagtttttaaggtactcagttgcaacagtttggg

SEQ ID NO: 318401 - DNA, 201 bp, Homo sapiens
ttccctgggatgcagcatactgcatcagctcagccctgggatgcacagatgcttagcttagccaggtcactgatttcccagagggtgataatccacttcascatagacctgtggggcattactgttctgggcagcccaggttccatttctcatgatactgggtgctacttcagcttaccaaatggggtcgtggtttctctg

SEQ ID NO: 318402 - DNA, 201 bp, Homo sapiens
attcacatttgctctgtagatatatttgtttgtcccagctctgttatttagggcagtttcttcttagagttctcactttggttgaactttgggctttgtcwcctatttcctccatgttcgttgactacatggagaattacaagaagccaaactatcaatgacacataataacctaatgttatgcacaattatgaagtattg

SEQ ID NO: 318403 - DNA, 201 bp, Homo sapiens
agactcctctgtggttttaatgagaaatgtttagtcagtctagtgttttctttttgttatgttagagtgagggtcttttttatgttagagtgagggtcttytgcaaccttctacatcctaattagaagtcatccttggataaattgctttttaaagcccaaactggaaaataaatctgggcctacatatttagaattttag

SEQ ID NO: 318404 - DNA, 201 bp, Homo sapiens
ccttttttgaatttcagacctttgtattcagctacatttcagacatttttatttgtttatctcttaagcactaaatgctcctgttccttttgaatctgccyatatttatgtcctattataatggttagtaccacaatctgtgctgttactaaagctaaatactgtcatccttgaccttttgccccacagccactcagcctc

SEQ ID NO: 318405 - DNA, 201 bp, Homo sapiens
acattccatttaaaatcattaatctttttatgaaatcactttttccttaaaatattggaaaaacgacaattttagtcttctcaagggcagctattaaatargaacaattagatggattaaattatatgttaccttttaacgtgtaaaggaaatgattaatttcagtgttttaaatagccatactgacttttgtttgggcca

SEQ ID NO: 318406 - DNA, 201 bp, Homo sapiens
ttatgaaatcactttttccttaaaatattggaaaaacgacaattttagtcttctcaagggcagctattaaataagaacaattagatggattaaattatatrttaccttttaacgtgtaaaggaaatgattaatttcagtgttttaaatagccatactgacttttgtttgggccaataataattctttgatataaagtttaa

SEQ ID NO: 318407 - DNA, 201 bp, Homo sapiens
tatctgagtggatggtgagtgtttatagaaaaaactactttcactggtaaaatgaaaaaacttttttaaagtaatagttttcatgaatttaattatatttsatacatggcagaatggtgacattattttttaaatagctacattagatactataatgtgtaatttaaaaaaatagctacagtcttcttactgtagtttatt

SEQ ID NO: 318408 - DNA, 201 bp, Homo sapiens
aatagatgtttcaaggaacttttggaatattcagatttaatgtagtagtgtagggagttccagtctagagctgatgacagtcacagttgttgacagttacyattttgtatgtgaaacagtatgttgattttttttttaatgctaagattggccttaaacaacctttagtcacaatatcagtattatcacaccaaagaattt

SEQ ID NO: 318409 - DNA, 201 bp, Homo sapiens
agttgttgacagttactattttgtatgtgaaacagtatgttgattttttttttaatgctaagattggccttaaacaacctttagtcacaatatcagtattmtcacaccaaagaatttgtatcagcactctgatttctcatgaattgaaagagtagatatgaattaaaaatgtaatatttctttaaagactatgaaaagatg

SEQ ID NO: 318410 - DNA, 201 bp, Homo sapiens
cccagcactttgggaggctgaggcaggtggatcacctgaggtcaggagtttgagaccagcctggccaacgtgatgaaaccccatctctactaaaaatacamagattagctgggcgtagtggcaggcacctgtaatcccagccacttgggaggctgaggcaggagagtggcttgaacccaggaggttggaggttgcagtgag

SEQ ID NO: 318411 - DNA, 201 bp, Homo sapiens
ccttaagtttggtgctttttttttaagcagagaacacagtagattaggaaagaatgcttatttatttgcattttggatacctctagaacagtggttttcartggggtggaagaggggacagtttcacactcctgggattatttgagctgtgggcaatctctggaaacattttagattgttagaatttgggactgtgggttg

SEQ ID NO: 318412 - DNA, 201 bp, Homo sapiens
attaattttttcaaaaaaacagctcctggattctttgatgttttgaagggttttttgtgtctctatcttcttcacttctgctctaatctcggttatttctygtcttctgctaggtttggggtttgtttgcttttggttctctagtgcttttagttgtgatgttaggatgtcgatttgagatctttctgtctttttgatgtg

SEQ ID NO: 318413 - DNA, 201 bp, Homo sapiens
ttttttattttagagttctgttatgtgataggcaagaatctcgcccaggtgaatggctggttagaaagttctttggctccttaccagactcttgggccagkgggcattctgtgcctgtggtgaccgtggttagagcaatgctgaacaatgtggtgagaccaagagacaagcagatggaactgctggagaacaaggccatcc

SEQ ID NO: 318414 - DNA, 201 bp, Homo sapiens
cttctattctttattatctagctagcagtctatcgtattaattttttcaaaaaaacagctcctggattctttgatgttttgaagggttttttgtgtctctrtcttcttcacttctgctctaatctcggttatttctcgtcttctgctaggtttggggtttgtttgcttttggttctctagtgcttttagttgtgatgttag

SEQ ID NO: 318415 - DNA, 201 bp, Homo sapiens
tgggctcaagcaatccttccaccccagtatcctgaggagctgggactacaggtgtgcgccactatacccagctaatttttgtgttttcagtagagatgggrttttgccatattgcccaggatggtcttgaactcctgggcttaagccagccacccacgtcagcctcccaaagtactaggattaccgcgctcagaccatttt

SEQ ID NO: 318416 - DNA, 201 bp, Homo sapiens
atgagggggactactagggtgctgagatgttctgtttcttcatctgggtgtgggtttcacagctgtattcagtttgaaaattcagcatgatgtacacttaygtgcacttttctgaatgtacattataaagcagtttctaaaatgaaaaatcagtaaatttcaatgaatatgggttgtataaaacaattttgtgtttatagc

SEQ ID NO: 318417 - DNA, 201 bp, Homo sapiens
agaatcatgaaagaaaaggtgcagattttctcttgggatacaatagaaaattaattgaaaaagaaagagtccgtaatttaatgtatagttacaattggggraaaaatcataatatataattttcatatttgttgattatgtcttcttaaacgccatttattactagcacagttcatgctctgtatgtggcagctcgtatag

SEQ ID NO: 318418 - DNA, 201 bp, Homo sapiens
cgggctgcaacattaaccgtcatcagcgcgcctcttcagcgcgcactgcgccaaccctgcggcaggaggaggcggagcccccgctctcgccccgcccccayctcacgtgacccgcacggcgcctcgaggccggaagcgattgcgagccagcgcgcgcgcttcggcgttcccggcggtctgcgaagtttccggagcccgggt

SEQ ID NO: 318419 - DNA, 201 bp, Homo sapiens
atttttctgactgtggtataattcagtgaaattttatttaactgtgaccttgcctttgcagattaacccaactcctacagatagattttaatgcttttttycccctcagcagttctcattgccccaacaagatatatacgtgagacaaaggagaaatttcttctgcagtcagccttcagacctctctgatcttttacgagc

SEQ ID NO: 318420 - DNA, 201 bp, Homo sapiens
aactgtgtggccacagaaggttttggcttaggagaaaccccccccccccacttcctgttttgcagcacaaccaccagcttcatccactccaataagtaacrtgagggagaattggtttgaagagaggaccaactctgccttttggatttctccaaattccagggaactatactagtgtaccagtgcactgggcctggctag

SEQ ID NO: 318421 - DNA, 201 bp, Homo sapiens
tagataatattaatggggaactaacttgtaagaattttacatattactgaagtactctatccagaaaaacatgtttctgtcaaatccttaattttcctaaygtaacatattgataaacaagctttgttcctaagcctctgtttaataggcagttatttttgtatcaatgaatcagtgagctggggggaataggtcaatacc

SEQ ID NO: 318422 - DNA, 201 bp, Homo sapiens
tagaattcaaggaggattctctacttggcaagtgctcatagattttttttttcttctatttaaagtaaccaaaactggaaattacctaaaacctatgaatktgttttagatagggaagatgatgaggattccagtcagtggatatatcctcaaagaatgctggcaaacgaatctgtatgtttttacttgaaatgtcttgtt

SEQ ID NO: 318423 - DNA, 201 bp, Homo sapiens
ttggaaacactcaggaagaagaaaacactaaaaaatgctatggaatggagcaagtaaaattgttttactcacaaacagttgtaaattgtttgtaaacaaaktgttttactccattccacaattttttttagtgttttctccttcctgagttgtctcctcctagtttgaagagcccgagtaggagggtggaaatcgtagaat

SEQ ID NO: 318424 - DNA, 201 bp, Homo sapiens
ggagaaccactgctctagatggatattgcatcattccagggagttatagggcttgttaataatgtctatccaaacattttttaatgaggaagaaagagtaktctggaaagtagaatcatagataaagaaaatgcagtatattttaccacaataaactttctgggttcactttataagctggcctgattttccaataactta

SEQ ID NO: 318425 - DNA, 201 bp, Homo sapiens
cctgatctataccttcattaatctcccattgctagtaatccttactgatggatttgatatttatatttaggctttaaaaaattatattccataagaaaggsagataatgcttaattgttgggcattttgtttgttacagtctaccctgacatttgcactatcagccttgtagcagtgagtgatgtgaataaacatgctgat

SEQ ID NO: 318426 - DNA, 201 bp, Homo sapiens
ataaacataggttaaaagtggatttcttctatatagcactttcttgacttttccttttctaaacctctcttacaatctcttcctataatcttaattttttwaaaaaaatcagtttcactttttctttgcaaaatgtagtatgaaaaactattgtctttttagcttgtgattatttgcctttttgttttcttttttaaaatt

SEQ ID NO: 318427 - DNA, 201 bp, Homo sapiens
gcagcgggccgcgacctcccactaacgcctgccgcaacccaaggaggagacaaaagtcatcttccgggctgcaacattaaccgtcatcagcgcgcctcttsagcgcgcactgcgccaaccctgcggcaggaggaggcggagcccccgctctcgccccgcccccacctcacgtgacccgcacggcgcctcgaggccggaagc

SEQ ID NO: 318428 - DNA, 201 bp, Homo sapiens
caaaacaaattgtgtccacataagacttgtttttttctaattatctataaagctcctgcatatgttattttccccctttgtacagtgtggaaattgaacawgtagatgtatttaaaggactaaagaagcagacttattattatctcacagtttttagtactaatgaccaagcttgtactctagttgcttgttgaatgcttt

SEQ ID NO: 318429 - DNA, 201 bp, Homo sapiens
gccatgatcacacaactgcaccccagcctgagtgacagagtgagattctctcttaaaaaaaaaaaaaaaaaaaaaaaaaaaggccaggcgcggtggctgaygcctgtaaacccagcactttgggaggccgaggcaggtggatcacgaggttaggagatcgagaccatcctggctaacacggtgaaaccccatatctactga

SEQ ID NO: 318430 - DNA, 201 bp, Homo sapiens
tgcctgtatatattctagttgtcataaaatatttattgagcaccagtggtacagtggctgtgatagcctccataaatagtccacataacctatctcggtaracatttgtggaaaactaatgctccacatgtgttaggaatatagataaggtatacagcttctctgctgtgtattcctgtctttaagtagccttcagatttg

SEQ ID NO: 318431 - DNA, 201 bp, Homo sapiens
atttcttgccactctcaaaagccttaggtcacagagatgaaattcataggaatgtaaactttactaaaatatcagctccccgtggtgtggcaggaattttyctttttttcattctttaatgtgtcccaactaccaggaaggggacccagcacatcctaggcattcagtgtaagtacttattcaatgaatgaattaatcaat

SEQ ID NO: 318432 - DNA, 201 bp, Homo sapiens
ggaagcatttgttcaccagatccattttgcaaaaatatgaatttttaaaaatctgttcacaaaactgttgaacagctatgtagtctgaacccccccccacytttgttttgaagtatcagagagttccttaaaaggatttttgaaattttcagccatacatgacagtagagagaatgatatgaattcctgtgtgcctatcac

SEQ ID NO: 318433 - DNA, 201 bp, Homo sapiens
ctatttttactaagctctttcttcacttctttttaatgggtagcatatagattgccatacgacgtctatctcagatttggaattttcatcagattttaccstgaaaatcacaaggacatccatgtgcacggtaagctatttcattctgcttttacaaatttcactagcagtgcagttgattggcaggctaatgagtttaat

SEQ ID NO: 318434 - DNA, 201 bp, Homo sapiens
gcaaactacctccattcttgggcatgttacctctctgtgcctcagtttccttctctataaaatgaaaataacagtattacctacttcataaggtttttttstgaggattaaatgagttaatacatgcaaatttcttagaacagtttctggcacataagatctcaataacttaggtattcagttttgaaagttatacaaact

SEQ ID NO: 318435 - DNA, 201 bp, Homo sapiens
gtacagacatttctttgacattctgttttcctttcttttgaatatgtatacccggtagtgtgattgttggatcatataatagttctatttttagttttttrgggaacctctatactctttttcataatggctgtactaatttatattcttaccaacagtgtataagaattctccttctctgcatccttgcatccttatttt

SEQ ID NO: 318436 - DNA, 201 bp, Homo sapiens
tgtgattgttggatcatataatagttctatttttagttttttggggaacctctatactctttttcataatggctgtactaatttatattcttaccaacagygtataagaattctccttctctgcatccttgcatccttattttgtctttttgataacagccgttctaactggcatgaaataatatcacattataatttgtt

SEQ ID NO: 318437 - DNA, 201 bp, Homo sapiens
tttgctaaagataatggcctccagctccatccatgttcccacaaaagacatgatctcattcttttttatggctgcaatagtattctatggtgtatctgtgrcaccattttctttatccactctgtcactgatggatgtttaggttgattccaattccgtatctttgttattgtgaataatgctgcaatgaacattcatgtg

SEQ ID NO: 318438 - DNA, 201 bp, Homo sapiens
ttgataacagccgttctaactggcatgaaataatatcacattataatttgtttgcattttcctgatggttagtaatgttgagcattttttaatatacctgytggccttttatatgtcttcttttgagagatgtctattcagtttatttgcccatttttgatcagattatttgggtttttgctgttgagctctttatatatt

SEQ ID NO: 318439 - DNA, 201 bp, Homo sapiens
tttcaattctttttcatttgctgaggagtgttttacttctggttaacagctcctgtaatgttttaccatgattcttagcttctttacattgggttgcaacrtgctcctttagctcagcaaagttcattattacccaccttctgaagcctacttctgtcaattcagccatctcagcccagttctgcagcctcagcccagttc

SEQ ID NO: 318440 - DNA, 201 bp, Homo sapiens
ggtttgttatttaggtaataacttgtgccatgggggtttgttgtacaaattatttcatcacctaggtactaagcctagtacccaatagttatttttttttyactcatctcccttctcccaacctctaccctcaagtaggccccagtgtctgttgttcccttctcgtattcgtgagttctcatcatttagctcccacttata

SEQ ID NO: 318441 - DNA, 201 bp, Homo sapiens
atgacattatgttaatttttcagctgctatattgatgcttagcattttttcttttgtgaaaaattaacaaatatccattactaattcattttgactggggytttttatttctaaactgaggaatgcatagaactcttataggtacatcctttgatcctgaaatgaagatgataaccagatttataagcactatggaacatt

SEQ ID NO: 318442 - DNA, 201 bp, Homo sapiens
tggtcatctgtttggcttggcatcaatgcctcaaataatattttacgtttgggtggttatgtttctaagatggacatttattgcagctatcttgtcaaackgactacttttttgtcttctttctatttcacaatctctattctcttataccataaaacttcaagctttagtcgtactctgtactcacttgcctctcttcaa

SEQ ID NO: 318443 - DNA, 201 bp, Homo sapiens
gccttgtagcagtgagtgatgtgaataaacatgctgatagaattgctttttgggatgatgtctatggcttcaagatgtcctgcatgaagaaagcagttatyccagaagctgttgtggaagttttagatccgaagactcttatttcagaaccttgtggtattaaggtaggtgttttaccaactttattttttataatggcat

SEQ ID NO: 318444 - DNA, 201 bp, Homo sapiens
ggactgcaggtgaccccagtggtgaggtctgtagatgtccaatgtgttgatggaggttgctgggatcctcttgcttacctccttgccatagggagaagttctcctgattcccacttgatcctggctgggatttggggtggtaggagactggtgttccctttcattctcaatgtggccatcctgagtttttgtgctcaccag

SEQ ID NO: 318445 - DNA, 201 bp, Homo sapiens
atcctagtaagctaataagagcttttgtgaaaatttgggtttaaaagcagcttttgtgacatcttcagatacatgaagagaagcatttctaattctgattwaaaaaagactggcaataaatataacagttatagaagtataattacagaaagatgagaggctgttacatgagtttaaaacaattttaaaaggtacactaaa

SEQ ID NO: 318446 - DNA, 201 bp, Homo sapiens
gtcccagtgattctggtatgttgtctctttgttctcattagtttcaaagaactccttgatttctgccttaatttcacttatttacccaggagtcattaagsagcagttgttcaatttccatgtagttgtgtggttttgagtgaatttgattgtgctgaggtttgagagactgttatgatttcaattctttttcatttgctg

SEQ ID NO: 318447 - DNA, 201 bp, Homo sapiens
ggactccctacttactaatatatttattatatattagtaatattttctttagcaaataccagttatactaaagactaagagttatttgtcttttccttttrtaacaacactagtccatgtacctccttcaaattaagtaaattccaaagttgctgaaaacaaggcagagtggatttagtttattaccccctaaaactttta

SEQ ID NO: 318448 - DNA, 201 bp, Homo sapiens
attccagaagctgttgtggaagttttagatccgaagactcttatttcagaaccttgtggtattaaggtaggtgttttaccaactttattttttataatggyattgctatttttcttagttcagcatttgaaaataatatattgattttatatatgggctttcaaaacagtacttttcccattgtaatcagtctaaaacaaa

SEQ ID NO: 318449 - DNA, 201 bp, Homo sapiens
tatatcatctctttagaatcacttctctgtatattaaaactccttacactcagttttacagtccttcaaatctaactctgaaccggttgaataatttatayttactttggcttaataaggtaaaaagtcctgctgtattatcagttctgcttcatcatcctccccagccttattttagcttctcatttacagccagattat

SEQ ID NO: 318450 - DNA, 201 bp, Homo sapiens
ctaaaagcagtttgagctgtgccagttcaaagcctctgaaagcagagttgacacttagaggagaaaagaatctcaagtagagaaattgtatgacttgagaraaacagactctatcaaagggaactctcttaaaagccttttgataaaatcagtgatattatttgacaaataaattcactttgacatttaaaggataattgg

SEQ ID NO: 318451 - DNA, 201 bp, Homo sapiens
tgtaaatggaactatagagttattttgcctagatgaggacacttaaagtttgaattcagggtgggttttccctttacaattcatgtacagttttattgtamaaacttttattgtaagtaaatatggcagtactttaaaattcaaatctttttaatgtgatttggctttgaaaatataaaatcaggctatttctctttattt

SEQ ID NO: 318452 - DNA, 201 bp, Homo sapiens
ttaattattacagaagtacattatattttattttgtgccccaaggtgtttaatcataagcattttgctgctgtaagcaattggggcttgtgtttgatgtcrtagattaatgtaccatgatattaaaaatcttgtacttcatcaaatacctttgaactttaccaattcaggtcgtgttctctacgggccctcagagcaccaa

SEQ ID NO: 318453 - DNA, 201 bp, Homo sapiens
cgtgacaagagaaagaagacttcatgttcagtacagaagcaatttgttttcccgaatgttttcgattagcagttggttgactccctggatggggaacccarggatataaagggctgactgtatttccttttgtaaccggcttattgcacttagcataatgtcctcaagatttgaccttgttacagcgaatgtcagaatttt

SEQ ID NO: 318454 - DNA, 201 bp, Homo sapiens
tggtggctcacgcctgtaatcccagcactttgggaggccaaggcgggcgaatcacgaggtcaggagattgagaccatcctggctaacacggtgaaaccccrtctctactaaaaatacaaaaaaaaaaaaaaaaaaaaagagaaaataaattggactggactacatcaaaattaagaaattctgtcataaaaagacacattt

SEQ ID NO: 318455 - DNA, 201 bp, Homo sapiens
tacatctgtggcagaaaaaaaaatattctgtaattaaaagagtagcaccgatgtttaaattgacctgcttatgagagtattgcacatttctaaactctttktttcccctttttttatgcagggctattttcttctgtttgagtctatgttagattctgtcctttatgcaaagaacaaatacttggcaaaaggaggctcggg

SEQ ID NO: 318456 - DNA, 201 bp, Homo sapiens
ttcattttctgccgtacagtatttcaagttgaggtactataactgtactggatacatatatactatgtagtatactgttttcttgccatttttgttactaygttttatttggaacttttaaaaaattctttttgtttgcagtgatgtatacagattgcatgttaaagtaaaattcttaatgtttataaaagtaattatgtt

SEQ ID NO: 318457 - DNA, 201 bp, Homo sapiens
gtagagacggggtttcaccatgttagccaggatggtctcgatctcctgacctcgtgatccaccagcctcggcctcctaaagtgctgggattacaggcttgmgccaccgcgcccagcctgtaattaactttttaaatataaaaagtcacaaatctacactcatattttccgtgtaagattatggaatttttacttgaagtct

SEQ ID NO: 318458 - DNA, 201 bp, Homo sapiens
catgtcagtgcttaaaaagttttagaacatggagcatttcagattttcagattagggatacataaactgtaacatttaatgacttaaaaacaacattatayatcatttgttgaccatctactggctgccaaacaatatactctaccttcatttatgttactagacataatcctcacaagagccctttgagattttacagtc

SEQ ID NO: 318459 - DNA, 201 bp, Homo sapiens
gaactgtatgttggaaggtgagagaagtggaagaaagtagtcttgcagaacagtagcacgcatataatagggacctaataagtagccgttattaccatgattcttcttcttgcgtggaagttggtgatcaagttaaataataggtaaattaggagcttctctgacagatatttgtgattaatacatgtaaaattctattgt

SEQ ID NO: 318460 - DNA, 201 bp, Homo sapiens
gctatatttcctctatgttttcagcataactttgcaaacacatagactaagtccacgaggcttagcattagtaaatgatgacggaatgtgaattgtaaaaytgtaagagaacgttcccaaacagaaattcgctggcctcagacatttataattttatgtacaatacatgaaggcatggagatatagtatatgacagggtta

SEQ ID NO: 318461 - DNA, 201 bp, Homo sapiens
aactgtatgttggaaggtgagagaagtggaagaaagtagtcttgcagaacagtagcacgcatataatagggacctaataagtagccgttattaccatgattcttcttcttgcgtggaagttggtgatcaagttaaataataggtaaattaggagcttctctgacagatatttgtgattaatacatgtaaaattctattgtc

SEQ ID NO: 318462 - DNA, 201 bp, Homo sapiens
cactggagcctgagatgaaaggagccagttgtttggaagccaaggttcttcgaaaccagtaatgaaaaacaaatcagtgtattcaggaagggataactaaraacttttcttcttcctcaccacaaaggtgttacttaagcatttgtattatctcactgtctgcctttccttgttttaagtgagttgaagtctagcaactgt

SEQ ID NO: 318463 - DNA, 201 bp, Homo sapiens
actgtatgttggaaggtgagagaagtggaagaaagtagtcttgcagaacagtagcacgcatataatagggacctaataagtagccgttattaccatgattcttcttcttgcgtggaagttggtgatcaagttaaataataggtaaattaggagcttctctgacagatatttgtgattaatacatgtaaaattctattgtca

SEQ ID NO: 318464 - DNA, 201 bp, Homo sapiens
agtattgttctttgtccctgataatgtttttaataattgtaattttcttatggttaatgtttaaatgttatgggttttcccaccctttttctttaaatataaacataggttaaaagtggatttcttctatatagcactttcttgacttttccttttctaaacctctcttacaatctcttcctataatcttaattttttaaa

SEQ ID NO: 318465 - DNA, 201 bp, Homo sapiens
attgttctttgtccctgataatgtttttaataattgtaattttcttatggttaatgtttaaatgttatgggttttcccaccctttttctttaaatataaacataggttaaaagtggatttcttctatatagcactttcttgacttttccttttctaaacctctcttacaatctcttcctataatcttaattttttaaaaaa

SEQ ID NO: 318466 - DNA, 201 bp, Homo sapiens
tgttctttgtccctgataatgtttttaataattgtaattttcttatggttaatgtttaaatgttatgggttttcccaccctttttctttaaatataaacataggttaaaagtggatttcttctatatagcactttcttgacttttccttttctaaacctctcttacaatctcttcctataatcttaattttttaaaaaaaa

SEQ ID NO: 318467 - DNA, 201 bp, Homo sapiens
ttctttgtccctgataatgtttttaataattgtaattttcttatggttaatgtttaaatgttatgggttttcccaccctttttctttaaatataaacataggttaaaagtggatttcttctatatagcactttcttgacttttccttttctaaacctctcttacaatctcttcctataatcttaattttttaaaaaaaatc

SEQ ID NO: 318468 - DNA, 201 bp, Homo sapiens
tctttgtccctgataatgtttttaataattgtaattttcttatggttaatgtttaaatgttatgggttttcccaccctttttctttaaatataaacataggttaaaagtggatttcttctatatagcactttcttgacttttccttttctaaacctctcttacaatctcttcctataatcttaattttttaaaaaaaatca

SEQ ID NO: 318469 - DNA, 201 bp, Homo sapiens
attattcagtccaacaaaggatgtatcagaaagttagccacatacctaaagctgcttctgaattcttatttttttattcagtgtttctcatcctaaggatstggttcaacaaactaaatacacttccttatagctgatcctcttactgagttaacattttcaataacaaatcagttactttgaagaatttgtatcaatcaa

SEQ ID NO: 318470 - DNA, 201 bp, Homo sapiens
cacattgggagacctaaaggaacagactgtattttcaacttctagaaacttctagaaccacacctttgaactggcctgctacagagctgcctgttttaaayagcctagcactgtaggttctatttaccttaattcccctagcccactccgtgttagccaccactgacaaccccagatgaacaaaaccctttactaccatcc

SEQ ID NO: 318471 - DNA, 201 bp, Homo sapiens
ataggcttttgcaaaaaataatcacattttaaaaaatagttttaaaacgttgcacatgagagcatatacctagaagcttagtgaggaaaagttttattatacagcaggttcacagttgattcagagggaacagccatgtattgtgactttgtgataatggatttttaacaaaacaaattgtgtccacataagacttgtttt

SEQ ID NO: 318472 - DNA, 201 bp, Homo sapiens
gggaaatgaaatgtttttaaaattagattgtaatgatggttacacaactctgagtatactaaagaatgttgaattgtacaatttaaatgggtaaatttttyggtatgtgaattatacctcagtttaaatgagggaagagaaacccacacctagacatatcctagtaaaactacagaaaccaaagaaaaatctcaaagttgg

SEQ ID NO: 318473 - DNA, 201 bp, Homo sapiens
cttttgaaatggtgctagaacaagtaaatatttgtttgagaaaatcattcttcacaccatatccaaaaactaacatacataaaaactaagtggatcatagrtacaaatctaaaagcttagactgtaaaacttctggaagaaataatatttgagactttggagtggtttatgaaactaagatagtggcaacattcgaacaca

SEQ ID NO: 318474 - DNA, 201 bp, Homo sapiens
tgatttcatttaaaaattatagttatcagttttttatatttagttttttttttgtatgctttctatatgttactatagtggagacttttcatagtttttgkttttttttttttttttttttttttgagacagagtctcgctttgtcgccatgctggagtgcactggcgcgatctccgttcactgcaacctccgcctcctgg

SEQ ID NO: 318475 - DNA, 201 bp, Homo sapiens
agaattttagaaatcagtttcccatctttttagaaatactagaaaagctttaatttgtcatctatggctgcttctcaagatattcagaagtatcattgtaktactacttctaattcttaataaaattcaaaatataagtagtaatttagaggtcagaattattttattgtttaatcagagaaggctttatagaataggtca

SEQ ID NO: 318476 - DNA, 201 bp, Homo sapiens
tatgtataattgtttctgaatattgccactgcttcagatccagcagggggagctttcagttgttcaagatagaatgtgatttagaagactcatcacactgbactccctcccctttcctcttcctcaacctctagcctttcctttattcatggtccaataaacctgtctcaagggtgtatttcaaattgattacagacaatt

SEQ ID NO: 318477 - DNA, 201 bp, Homo sapiens
tatttgttcagttgaaagacataaggagctacaatctgcggttggcattgcttttgtggtttgtagaaggagtatgtataattgtttctgaatattgccaytgcttcagatccagcagggggagctttcagttgttcaagatagaatgtgatttagaagactcatcacactgcactccctcccctttcctcttcctcaacc

SEQ ID NO: 318478 - DNA, 201 bp, Homo sapiens
caagagccctttgagattttacagtctcctaaaagtgtcctggatgacacatattaaatggctaaaccatgattttttttaaactcacatctgccagcctscagtattcatgttctttttactaagccttgttttcctactaaaatgtattttttaaatgtgattattgccttgacgttctagggaagatccaagtaactg

SEQ ID NO: 318479 - DNA, 201 bp, Homo sapiens
gttgctttaagaaaaatggggataattctgtttcgatgactcattacatggattcatgagatatatgtgaaaatacctacaatgtagccagaaacgttagrttattaaaatataaaaaatttttcatctcaaataatttataaatgtttatttttttaagataacatttactgctgtcaggagactcaaattgttcataaa

SEQ ID NO: 318480 - DNA, 201 bp, Homo sapiens
gtcccctttgtacacctacctaatacagggcatgtatgccctgtattagccaggtgcacaaggaacaatggaattcggggagcaggggagaggaacattgkaatcagaagaaaaaaagacagaagaaattgtaatgatgacattatcactgtgctgccagaaaataactgccaaccctgagtttaacccaactaagatttc

SEQ ID NO: 318481 - DNA, 201 bp, Homo sapiens
tccttcttcctcataaggtctagtctgatcttatttcattggttgccatcctattacatacacacaatgtgtcctctttaaagaaatattcatcacactaraatacctgagaaagtcattttttatcccaaatcattgttcttcaaatgagtgtatattaaatgaactgcatttacctttatacatataaacaaaacatgg

SEQ ID NO: 318482 - DNA, 201 bp, Homo sapiens
tagccaaaatagaaaagtcaaaataggaaaatcttaaatgtgttcaatatactaatgatcttttatttcttccttaggttaatgccttagataagaaaacrtgtatcattgttcattagttattatagaataatagttacatcaacttacatatcaattgtgtttataaacaagtaaatatttttaccaaaaaaaaaaaca

SEQ ID NO: 318483 - DNA, 201 bp, Homo sapiens
ggccagggggcattctgtgcctgtggtgaccgtggttagagcaatgctgaacaatgtggtgagaccaagagacaagcagatggaactgctggagaacaagsccatccatgacctggggaaagcgcatggctctctcaagccatgaccacactggagaaatggtttttattgtcaaccttaacacccatcaccaaatcggta

SEQ ID NO: 318484 - DNA, 201 bp, Homo sapiens
ttctgaacttcatctgtgagtaaggaaaatgcgcttacctcatagcaatattttgtgaccattaagtgagataaatcatgtaaagaccttagagtagagcytagcacaaagtaagtgttgaataaatataagcataaattatctaatgattaacctgaactccataaagtttgtagaactatctgactggtaatctttatt

SEQ ID NO: 318485 - DNA, 201 bp, Homo sapiens
tacctcatagcaatattttgtgaccattaagtgagataaatcatgtaaagaccttagagtagagcctagcacaaagtaagtgttgaataaatataagcatraattatctaatgattaacctgaactccataaagtttgtagaactatctgactggtaatctttattatgtccactattggtgaacatgtcatatgagatag

SEQ ID NO: 318486 - DNA, 201 bp, Homo sapiens
ctttgtccctgataatgtttttaataattgtaattttcttatggttaatgtttaaatgttatgggttttcccaccctttttctttaaatataaacataggttaaaagtggatttcttctatatagcactttcttgacttttccttttctaaacctctcttacaatctcttcctataatcttaattttttaaaaaaaatcag

SEQ ID NO: 318487 - DNA, 201 bp, Homo sapiens
tttgtccctgataatgtttttaataattgtaattttcttatggttaatgtttaaatgttatgggttttcccaccctttttctttaaatataaacataggttaaaagtggatttcttctatatagcactttcttgacttttccttttctaaacctctcttacaatctcttcctataatcttaattttttaaaaaaaatcagt

SEQ ID NO: 318488 - DNA, 201 bp, Homo sapiens
ctccttcctgagttgtctcctcctagtttgaagagcccgagtaggagggtggaaatcgtagaattcaaggaggattctctacttggcaagtgctcatagattttttttttcttctatttaaagtaaccaaaactggaaattacctaaaacctatgaatgtgttttagatagggaagatgatgaggattccagtcagtggat

SEQ ID NO: 318489 - DNA, 201 bp, Homo sapiens
acaaagtgtctgacacacatagtagatgcttagttaaggtttttgaataaaagtgaagtatcttaaggtaatgattttaaagacagtggtggtggtagtgkgtgtgtgtgtgtgtgtgtgtgtgtgtgtgtgtgtgtgtgtattttggaaaaagattacaaaatacaccagcaaaaattcttgacataagggatgctactt

SEQ ID NO: 318490 - DNA, 201 bp, Homo sapiens
catagtagatgcttagttaaggtttttgaataaaagtgaagtatcttaaggtaatgattttaaagacagtggtggtggtagtgtgtgtgtgtgtgtgtgtrtgtgtgtgtgtgtgtgtgtgtgtattttggaaaaagattacaaaatacaccagcaaaaattcttgacataagggatgctacttcatattttgtttctaag

SEQ ID NO: 318491 - DNA, 201 bp, Homo sapiens
atagtagatgcttagttaaggtttttgaataaaagtgaagtatcttaaggtaatgattttaaagacagtggtggtggtagtgtgtgtgtgtgtgtgtgtgwgtgtgtgtgtgtgtgtgtgtgtattttggaaaaagattacaaaatacaccagcaaaaattcttgacataagggatgctacttcatattttgtttctaagt

SEQ ID NO: 318492 - DNA, 201 bp, Homo sapiens
gcttgtaatcccagcactctgagaggccatggcaggcagatcacctgaggtcaggagttcaagaccagcctgaccaatatagtgaaaccccgtctttactaaaaaaaaaaaaaaaaaaaaaatccaaaaattagctgggcttggtggcaggtgcctatagtcccgacaggagaattgcttgaacccgggaggcagaggttg

SEQ ID NO: 318493 - DNA, 201 bp, Homo sapiens
gagatgcgttgaagagagtggtataggcctgactatacatggcatctcatataattgaagaaatgatatactgtagcaaattctattgagacaattgtgtaaaaaaaaaaagtaaagtttaatccacacaataaattgtacactgtgaatttcagataatcaaagattaaatgcaagataagtcaaatgctaaaaatacta

SEQ ID NO: 318494 - DNA, 201 bp, Homo sapiens
aatttttctattgtttacacctgaaagctagttaatactcatggtttttgtttgtttgtttttgtttttgctgcatttctttggtacatttatacttgttycattttgctgatatgggaacatgtgatttatatttttaattcatgagtaccctaaaagttgatatttgagatattggaaagacaaagttaattttgttat

SEQ ID NO: 318495 - DNA, 201 bp, Homo sapiens
ttatctttcatttatatgcctatggtctccaaatttatgtcttcaacttagatatccttttttgaatttcagacctttgtattcagctacatttcagacatttttatttgtttatctcttaagcactaaatgctcctgttccttttgaatctgcccatatttatgtcctattataatggttagtaccacaatctgtgctgt

SEQ ID NO: 318496 - DNA, 201 bp, Homo sapiens
aaagttagttttaaacttctcactggacagtcaatatcttcaggataaaatacaaactcctatgtccctttgcagtctgactctggtttttcatcatttcmaaccccatcctttcacaaccccaggtaagctcatgtactccagttgtacagattgctcatttttaagctaacttttatttttcttgcttttgtccaagat

SEQ ID NO: 318497 - DNA, 201 bp, Homo sapiens
agtggcaacattcgaacacattttatgtaagtaacaccgtaaagttagttttaaacttctcactggacagtcaatatcttcaggataaaatacaaactcchatgtccctttgcagtctgactctggtttttcatcatttccaaccccatcctttcacaaccccaggtaagctcatgtactccagttgtacagattgctcat

SEQ ID NO: 318498 - DNA, 201 bp, Homo sapiens
agatctggagtttcataacacatatatggaattgttttctatttcctagtatttaggatagagtacaagaaggtttgtattaaatgaaactgtatccttcmgtcatcttagttttattctgtatacttaaaagagtaaaaagaaacatcttagttttattctgtatacttaaaagagtaaaacaaaacaagaaaaaaattg

SEQ ID NO: 318499 - DNA, 201 bp, Homo sapiens
tggtgcagctggcatacatccctcacatgcctatcagggaagacttgagaaacttcttatcagtgacttagtactacgtagttttttctgagtatctcacragttaggtttggaagcaattgcgttggtgccagtaaatcttatcgtgggctttatttggagaataatttagtgctgctgtcattgaataataaaattgct

SEQ ID NO: 318500 - DNA, 201 bp, Homo sapiens
tcaaagattgtaattgaacttttaatattgaagaatctaagtatcaaatagttacttgctgcatttgtccctgtacaaagttccataagaaaaatgaattrtaagtaaactgttacattatatctataaagtaccttttatttagatttgcatttttagtcgcaacttgcctgaatggtgtttatgaaaaagtttgtttgg

SEQ ID NO: 318501 - DNA, 201 bp, Homo sapiens
tagattctgcatctacaagaaatatgttctttaatgaaactaaatgaagactttttcaggagaaaaatgctgaacaaatttattttcagcagactggaaayataagacatgtattaaagtaagttcaagaggaaacaaaatgtcaccaaatggaaacttggatcttaacaaagcagtggaaaatgccagaaatggtaaatg

SEQ ID NO: 318502 - DNA, 201 bp, Homo sapiens
ccatgtctttgccatcatgaatagtgctgcagtgaacatacatgtgcatgtatctttataattgaattatttatattacactggatatatgtacccagtartgggattgctgggtcaaatggtagttctgcctctaggtctttgaggaattgccactgtcttctgcaatggttaaactaatttacatttccaccaaccatg

SEQ ID NO: 318503 - DNA, 201 bp, Homo sapiens
ttttaaaggcagtactagttcatgttttaatcgtgagggagacttaagatagcatttgagtttgattctcaaaattttctcctacttcattacgagaaaatattgtttgatgactagtgaagttttaaaatcctaactattctttacccagtaatccttagagtaactggtttgtgctttgctcttaggtatttatagaat

SEQ ID NO: 318504 - DNA, 201 bp, Homo sapiens
ttgtgaccattaagtgagataaatcatgtaaagaccttagagtagagcctagcacaaagtaagtgttgaataaatataagcataaattatctaatgattawcctgaactccataaagtttgtagaactatctgactggtaatctttattatgtccactattggtgaacatgtcatatgagatagttttatatcattttctt

SEQ ID NO: 318505 - DNA, 201 bp, Homo sapiens
cagcagcgggccgcgacctcccactaacgcctgccgcaacccaaggaggagacaaaagtcatcttccgggctgcaacattaaccgtcatcagcgcgcctcytcagcgcgcactgcgccaaccctgcggcaggaggaggcggagcccccgctctcgccccgcccccacctcacgtgacccgcacggcgcctcgaggccggaa

SEQ ID NO: 318506 - DNA, 201 bp, Homo sapiens
ctctcgccccgcccccacctcacgtgacccgcacggcgcctcgaggccggaagcgattgcgagccagcgcgcgcgcttcggcgttcccggcggtctgcgamgtttccggagcccgggtcccgccgcgggttcgcgcttgtgctcgcgctcgttcctggagtcggcggccgctgcgcgcgctcgttgcccaacccggtcccc

SEQ ID NO: 318507 - DNA, 201 bp, Homo sapiens
tatctttcatttatatgcctatggtctccaaatttatgtcttcaacttagatatccttttttgaatttcagacctttgtattcagctacatttcagacatttttatttgtttatctcttaagcactaaatgctcctgttccttttgaatctgcccatatttatgtcctattataatggttagtaccacaatctgtgctgtt

SEQ ID NO: 318508 - DNA, 201 bp, Homo sapiens
atctttcatttatatgcctatggtctccaaatttatgtcttcaacttagatatccttttttgaatttcagacctttgtattcagctacatttcagacatttttatttgtttatctcttaagcactaaatgctcctgttccttttgaatctgcccatatttatgtcctattataatggttagtaccacaatctgtgctgtta

SEQ ID NO: 318509 - DNA, 201 bp, Homo sapiens
tttcatttatatgcctatggtctccaaatttatgtcttcaacttagatatccttttttgaatttcagacctttgtattcagctacatttcagacatttttatttgtttatctcttaagcactaaatgctcctgttccttttgaatctgcccatatttatgtcctattataatggttagtaccacaatctgtgctgttacta

SEQ ID NO: 318510 - DNA, 201 bp, Homo sapiens
gctaaatactgtcatccttgaccttttgccccacagccactcagcctcaaagtcctctgagttctacttcataaatatcccttgaatacatctcatccttkccattcccacagcaatatcctagttcagatcacctggtttattttaactatctcttaatttgtctctgttttcatcttagaccctcccattattctccac

SEQ ID NO: 318511 - DNA, 201 bp, Homo sapiens
agcagttttctgagcatttcttactttaggatatttttgacagtttagataaaattgtcattgcttttacaatagagatgaagtttagctggctcctgacrtttcatctatcatatcagcctgcttaacctagccaaaaatgaacaataaagtcagtgatttttgtggaaagtttataggtgttcaaaagcaaaagcggta

SEQ ID NO: 318512 - DNA, 201 bp, Homo sapiens
ctgaattcagtttgccaatattttgttgaggatttttgcattgatgttcatcaaggatattggcctgaagttttctttttttgtttgttcatcaaggataytggcctgaagtgttctttttttgttttgtctctgccaggttttggtatcaggatgatgctggcctcatagaacaagtagggaggagttcctccttttcaa

SEQ ID NO: 318513 - DNA, 201 bp, Homo sapiens
ttaataatatcagcaataagactttagtgtatagatttcactccaccttgcccaggatgaaaaattattgaatgtgtagaattctttacacgctgtccttmggaatgttttttttttcctccagttttattcaggtataattgataagtgaaaattgtgtacatttcaggtatacaatgtgatgatttgatatgcatatac

SEQ ID NO: 318514 - DNA, 201 bp, Homo sapiens
caggtttttatagttttctttgatggttgtttgtatttctgtggagaccacggtaatattcctttaccattcctgattgtatttatttgattcttctattmtttattatctagctagcagtctatcgtattaattttttcaaaaaaacagctcctggattctttgatgttttgaagggttttttgtgtctctatcttcttc

SEQ ID NO: 318515 - DNA, 201 bp, Homo sapiens
aaaactaaaaactctgtgatcaaaagattgtctggttttgcctttaattgcttcatgtattttggagctcttatgtgaggtttatacacatttataattgktatattttactgaaaaattggtcagcttttgcagtaattcttctctgcccgaaagaagtatccaggtgatttgaacatcctgagacagaaggtagatgta

SEQ ID NO: 318516 - DNA, 201 bp, Homo sapiens
cagttctgcagcctcagcccagttctgtgcccttgctggagaggtgttgcagtcatttggaggaagagaggcactggctttttgagtttttagcatttttrtgttgatcctttctcatctttgaggttgttaacctttgaatggggtttgtgtcaggtttttcattgatgttgttttcggtttttaacagtaggtccattc

SEQ ID NO: 318517 - DNA, 201 bp, Homo sapiens
ttacaattaaggccttccactttaaatggatgtagaagagctatactacaataaaattaactaaataggccaggtgctgtggctcacgcctgtgattccawcactttgggaggccaaggcaggtggatcacaaggtcaagagattgagaccatcctggctaacccagtgaaaacctttgggaggccaaggcggatggatca

SEQ ID NO: 318518 - DNA, 201 bp, Homo sapiens
ttcggtagagactggaaaaagagtgatgaagttaagattaatatgcaaaatactcaggtgatgtttctattgaaacttttatttaaacacacttgccttamaattaaggccttccactttaaatggatgtagaagagctatactacaataaaattaactaaataggccaggtgctgtggctcacgcctgtgattccaacac

SEQ ID NO: 318519 - DNA, 201 bp, Homo sapiens
gggcaggcatggcagctcacacctgtaatcccagcactttgggaggctgaggtgggtggatcactttaggtcgggagttcaagaccagcctggccaacatrctgaaaccccacctgtactaaaatacaaaagttatctgggtgtggtgacgcacacctgtaatagcagctgctcagaagactgaggcaggtgaattgctta

SEQ ID NO: 318520 - DNA, 201 bp, Homo sapiens
atgtcttttatgcagcttgtcttttctactatgtcttgtttccattggctggagccagacctcacaatctaaactaaaacctgactggctaataattttamacttttctaaataggtgaaagcaatggaaggacaaaggaaaagaggaagttgtttactaaaggacttagaaaagtaataacattcttaaataaggaaggg

SEQ ID NO: 318521 - DNA, 201 bp, Homo sapiens
atttcatataccaaaatccacatatcttcaaagacaaggtaagtagtataggttatagaattatacatttcatcttgttcttgggcagtagaaatcctctmttggctcatcattgtgatagcaattgatttaacatcttctgtctgtatttcatggaagacatttatgatgctgctctgtggtgcagagtaccaataacaa

SEQ ID NO: 318522 - DNA, 201 bp, Homo sapiens
atttgtgaaatttgggcaggcatggcagctcacacctgtaatcccagcactttgggaggctgaggtgggtggatcactttaggtcgggagttcaagaccarcctggccaacatactgaaaccccacctgtactaaaatacaaaagttatctgggtgtggtgacgcacacctgtaatagcagctgctcagaagactgaggca

SEQ ID NO: 318523 - DNA, 201 bp, Homo sapiens
tctaaatatcccccaactatgtcactgtatactatctcttgttgctctagtcatactaaactgttcagttatttaaatttgcttctctctctctctctgtmacacacacacacacacacacaggaggcagttgtgcacagacacaaccctcttctactcccatacctgtacacatctttgtgtatgctgtgtcctttcctg

SEQ ID NO: 318524 - DNA, 201 bp, Homo sapiens
ccacctcacgtgacccgcacggcgcctcgaggccggaagcgattgcgagccagcgcgcgcgcttcggcgttcccggcggtctgcgaagtttccggagcccsggtcccgccgcgggttcgcgcttgtgctcgcgctcgttcctggagtcggcggccgctgcgcgcgctcgttgcccaacccggtccccgcccccagacacgc

SEQ ID NO: 318525 - DNA, 201 bp, Homo sapiens
gggtttagtgagtagccacttgagaaaactaagtaaaatctgtatatttttttcacgaatggaaaaaatcaggtggtgattaacagtctcatgaaagaggytttctgtgtcagtgatatctgttttaatacaaaattaatgggaattacaaggctttgtcttttttcctgtgttttcccttaagtcataatctttcttgtt

SEQ ID NO: 318526 - DNA, 201 bp, Homo sapiens
aaacagtacttttcccattgtaatcagtctaaaacaaattgaggtcataatatttaccagttgactatatcatctctttagaatcacttctctgtatattmaaactccttacactcagttttacagtccttcaaatctaactctgaaccggttgaataatttatatttactttggcttaataaggtaaaaagtcctgctgt

SEQ ID NO: 318527 - DNA, 201 bp, Homo sapiens
taggtgtttccaaagataaagattcatttggtttatactgaagtagggtttagtgagtagccacttgagaaaactaagtaaaatctgtatatttttttcaygaatggaaaaaatcaggtggtgattaacagtctcatgaaagaggctttctgtgtcagtgatatctgttttaatacaaaattaatgggaattacaaggctt

SEQ ID NO: 318528 - DNA, 201 bp, Homo sapiens
aagtactaattccctttaaaagtgctggattcccttcctttcagatacaagtgtgtttgttttttcttaattggaagtaaaactagaaaccagcagagttaaaaaaaaaaaaaagtgtatatgtaacatgaaatcagtatttagacttcttaggggactattccatgaagctattgcttgatttttcaggttattcacatc

SEQ ID NO: 318529 - DNA, 201 bp, Homo sapiens
cagtagtttgataggttcaaggagttgaaagaagcctaggatggctgggacatgtagatcatagtgctaagagatggaaagcaccttgtgctatttggccrtttcagttgtgatgttttttaagtagagtgttgtgatcagaagggccctttagaaagattgtggctagaatatggagaacaaagaggagaccaccagagt

SEQ ID NO: 318530 - DNA, 201 bp, Homo sapiens
actctacttcccaaggaaaggggtgtctctgcaactcggactcgtgggggttagtctagcttcaggcaagcagggtactagagtcattgtgtagggtgggrtgtctcagctcagccactgctcttgtttccctgggatgcagcatactgcatcagctcagccctgggatgcacagatgcttagcttagccaggtcactgat

SEQ ID NO: 318531 - DNA, 201 bp, Homo sapiens
agtactaattccctttaaaagtgctggattcccttcctttcagatacaagtgtgtttgttttttcttaattggaagtaaaactagaaaccagcagagttaaaaaaaaaaaaaagtgtatatgtaacatgaaatcagtatttagacttcttaggggactattccatgaagctattgcttgatttttcaggttattcacatct

SEQ ID NO: 318532 - DNA, 201 bp, Homo sapiens
gggactgagtgttcctttggcttcgtgctgttagaatgcttgttcttcagtactgcaaggaaaaatcagcatttagacaaaaagttctctcagcgaggcartggtgctctttgcagatagaacaatggcaagagcacacttgaacaaaggagggaagcaatttatgtcttttatgcagcttgtcttttctactatgtcttg

SEQ ID NO: 318533 - DNA, 201 bp, Homo sapiens
gtactaattccctttaaaagtgctggattcccttcctttcagatacaagtgtgtttgttttttcttaattggaagtaaaactagaaaccagcagagttaaaaaaaaaaaaaagtgtatatgtaacatgaaatcagtatttagacttcttaggggactattccatgaagctattgcttgatttttcaggttattcacatctg

SEQ ID NO: 318534 - DNA, 201 bp, Homo sapiens
cctgtaataccagcactttgggagcccgaggcaggaggattgcttgagcccaggagtttgacaccagcctgggcaatacagtgagaccctgtctctatttaaaaaaaaaaaaaaaaaaaaaagattacagaggcatcagtcatttgtacattccatttaaaatcattaatctttttatgaaatcactttttccttaaaata

SEQ ID NO: 318535 - DNA, 201 bp, Homo sapiens
ttttaaatttctgtttattgttgttttgtattgacgtgttagcctttgttagaataaatttttagaaatggttataaaggctactcttttatttgcttgcrttttcgtatttattggatttttttttttccaaaaattaagtgactgaattgaagctctgctatatacaagacactatgttttgtatactttggatttcat

SEQ ID NO: 318536 - DNA, 201 bp, Homo sapiens
tgttgttttgtattgacgtgttagcctttgttagaataaatttttagaaatggttataaaggctactcttttatttgcttgcattttcgtatttattggatttttttttttccaaaaattaagtgactgaattgaagctctgctatatacaagacactatgttttgtatactttggatttcattacaccagcatgagcata

SEQ ID NO: 318537 - DNA, 201 bp, Homo sapiens
ttcatgttttatttttggaacactggggattggcaaaaaaaaaaaaaacccatgtgaataaagccttctagggcaccactgtgccgattgtgaaccacacrtggacaaaacaagccgcgcttgatagcaactacctacatgaccagcactcccctggatgctgatgctgccatgcgagacgggacgttggcgcagcagcat

SEQ ID NO: 318538 - DNA, 201 bp, Homo sapiens
catgagcccctcactccagcagagcccctgaccaagccaggggagcaggacttttccagccaaggcaagaaccagggttttctgactccttgaagatctgrtgtttcatggagttgaactagatgctgttccaacatctgagtgcgggaaggggaggggagggtcaccaaggatcttcatggcatggggacgggcagcggg

SEQ ID NO: 318539 - DNA, 201 bp, Homo sapiens
ataagggccttgagagagaaggaaaaggcagcctagtcgatgctctctgctctccagtgctgactgggggctgggtcgaatgctcatctgcagccagctgwggacatcacaggctcctttcctccccttcccctaatggggaaaggtggtttccccatggcctgtgagggagtcagggagcttccagaaacaagctgacaa

SEQ ID NO: 318540 - DNA, 201 bp, Homo sapiens
cccttcccctaatggggaaaggtggtttccccatggcctgtgagggagtcagggagcttccagaaacaagctgacaaggtggggaagcatgtaaccaacayagcatgagagcaggtgggaaccaggggattgggcacctggggcggggtgggggcccttgactccagatcataggcagcccttgtgtctagagccctgtgt

SEQ ID NO: 318541 - DNA, 201 bp, Homo sapiens
gcagcccttgtgtctagagccctgtgttcccagccaggtccaggccaggtaccaccttggagtacatagctgctatgtggccaaagtgtgccctggagacrttgaggagctcagtctagcagaagggcctgtgccctgtccccaacacaactgacttcaagatcccaaactgagctggatatcccagagctatccttagct

SEQ ID NO: 318542 - DNA, 201 bp, Homo sapiens
gtgaaccaccacgcccggcctgattttatattaatataaacaaagattcatctcccagctctgccactttgtgaaggttaaggtgtcacttagcctctccragtcacggtaaaatggaacaatggcacctgccctcacagagctgctgtgaaggtaatagatcatttgctgctaggacctggcacatgcagccttgcccaa

SEQ ID NO: 318543 - DNA, 201 bp, Homo sapiens
accacgcccggcctgattttatattaatataaacaaagattcatctcccagctctgccactttgtgaaggttaaggtgtcacttagcctctccgagtcacrgtaaaatggaacaatggcacctgccctcacagagctgctgtgaaggtaatagatcatttgctgctaggacctggcacatgcagccttgcccaaatggtgg

SEQ ID NO: 318544 - DNA, 201 bp, Homo sapiens; identical to SEQ ID NO: 66817

SEQ ID NO: 318545 - DNA, 201 bp, Homo sapiens
ctacgaaaataggggttgccacagattagatactgtcaggaaggagggacagccctgcaactgggcagctcaagaaatctgatctgtagggaggagagacragtgtgcagagagcagtaattgataaagaagtagcagtcactcatttcagccaagaggggtgttcggtattttctggatggcacagagacattgcttttg

SEQ ID NO: 318546 - DNA, 201 bp, Homo sapiens
tactgtcaggaaggagggacagccctgcaactgggcagctcaagaaatctgatctgtagggaggagagacgagtgtgcagagagcagtaattgataaagargtagcagtcactcatttcagccaagaggggtgttcggtattttctggatggcacagagacattgcttttgtttgtgcttgcctcattttatcatagtctc

SEQ ID NO: 318547 - DNA, 201 bp, Homo sapiens
tgactcagggtgacagtctccatccctgctgaccccgggtgacggtctccatccctgctgaccccgggtgacggtctccatccctgctgacccctggtgayggtctccatccctgctgacccctggtgacggtcctcatccctggtgacccctggtgacagtcttcatcggattcggtttcagggtttaagttctcccgcg

SEQ ID NO: 318548 - DNA, 201 bp, Homo sapiens
acacctctactcatcagctctgtgagcctgaggcaagctgttaacctcattgggcctcagtcttctcatctgtaaaatgggagaatcatagtacctacctmttggctggtgggaaaaattaaacaagacaatgtactcactgcttctggcacataatagctgccaagtgagctttttgaaaagtccgacttttgcatggca

SEQ ID NO: 318549 - DNA, 201 bp, Homo sapiens
acccaagaaaatatcctggaaggagaagaacatttgctgaagaacaggggaggggaagaaacccagccagagcaggaaaggctgtaactctcctgtgctgrtgactgtggccctgcctctgcagaacatattccactgcgccatgtccctggaccagctctacttcgcccgccccgtgcccctgcattctggctaccgctg

SEQ ID NO: 318550 - DNA, 201 bp, Homo sapiens
cctgctgaccccgggtgacggtctccatccctgctgaccccgggtgacggtctccatccctgctgacccctggtgacggtctccatccctgctgacccctrgtgacggtcctcatccctggtgacccctggtgacagtcttcatcggattcggtttcagggtttaagttctcccgcgcgtcctacctgctcagcctgctga

SEQ ID NO: 318551 - DNA, 201 bp, Homo sapiens
acagagtgtccagagctgcggcgagcctgcccgcctggagcatctccagtgtggagcaactccagcggtaattgttggaaaagcctgtttttggtttcctygtgcttttctaaaacgtctactctccgatctcatttctctcctctggggccataccttgtctgcaacctagcattcatttattcagagtcgacggaatgc

SEQ ID NO: 318552 - DNA, 201 bp, Homo sapiens; identical to SEQ ID NO: 66813

SEQ ID NO: 318553 - DNA, 201 bp, Homo sapiens
gtactcactgcttctggcacataatagctgccaagtgagctttttgaaaagtccgacttttgcatggcaccattcctgtggtcacagggccagcattttakatcggtagattcatgaccagtttggttcaacaaatatttattgatttttccactaagtgctagaaaaaaattaatagaaatccttgcatcatttgttctc

SEQ ID NO: 318554 - DNA, 201 bp, Homo sapiens
ctcaaccgtgctgctccctcagacaccatcacttgcgcctcccaagcaatggaagccctggcgatgctctcatgagcccctcactccagcagagcccctgrccaagccaggggagcaggacttttccagccaaggcaagaaccagggttttctgactccttgaagatctggtgtttcatggagttgaactagatgctgttc

SEQ ID NO: 318555 - DNA, 201 bp, Homo sapiens
aatcagacttcttttgaagaatgagctttttcaccctcaggcccacgtgggacacctatctgaagccttgggcgcctgagcttacagctgccttgggacawgagcccgatttctgccctcattgaacttgagagctgcttccctctcttggcagctggagcaggaagtggggcctggggacttttctggctcccgggcttt

SEQ ID NO: 318556 - DNA, 201 bp, Homo sapiens
aatttgcatatgataaaataagcccatttctgtgtgtaatttaatgactgttagtaaatttgccaagttgtacacccatagtgcctcctcttcttcctaabaccatctcatttctctgtttttggcaccccagtgtttgattgcatcgaggtctatgcccctggcttcaaggactctgtggttggcagagacatcctcaca

SEQ ID NO: 318557 - DNA, 201 bp, Homo sapiens
gccccccaccctttcaccttccttcacccccactgtcttataaaccgcgtcaccacattcttgaggctgattggcttctacctgcttagtgccactgtcaytcaccactcagagaaaagggttcttggtgctatctgcagctgccactcacgttggtgccatctttttttttttttttttttttgggacggagtctggctc

SEQ ID NO: 318558 - DNA, 201 bp, Homo sapiens
cgcgatctcagctcactgcaagctcctcctcccgggttcatgccattctcctgcctcagcctcctgagtagctgggactataggcgctaccaccacgccakgcaaattttttgtgtttttagtagagaagggctttcaccgtgttagccgggatggtcttgatctcctgatctcgtgatccacctgcctcagcctctcaaa

SEQ ID NO: 318559 - DNA, 201 bp, Homo sapiens
cctcccctccttgagccaaagcaccctccactgacccgctgtggtccccaccagggcctgcctccccttcctgggtgttagtttccacagctgtcaatgcragcactgacttggatcacctcccggttccatccacctagtaaatgagtttgcttttgcagcggccctgcgctggatgatggaatccaggctggaagggca

SEQ ID NO: 318560 - DNA, 201 bp, Homo sapiens
aatttgcagggccacaaagtatgacctgggaaactgctggggaaactgctggggaaaccccaggggttcttgctcacgagtctgattctgtggcagtggtrgggcccagaaacggtcgtttttatggcattctcaggtcattctgaaagaggaggcccccagaacataactttgagaaccacaccctttaaatctcttgta

SEQ ID NO: 318561 - DNA, 201 bp, Homo sapiens
cctccatactcagctttcatcaggaagggaggacagtggcagggaccccggctgagagagggcagagaagcggtcaaaccgagggaatgggggatccctastgggggctcagaaacacaggcaggacagcccccactgagaaggtcaccaggattgtggccctctgccttgacaactatgctggctctgccatctgacttt

SEQ ID NO: 318562 - DNA, 201 bp, Homo sapiens
gagaaggtcaccaggattgtggccctctgccttgacaactatgctggctctgccatctgactttcttgagagagagcacccccttctcaaggcagcagcayatcctcagacttgtcaatttatcaaaaactagagattggagacagggagaccagataggaggccaggttcaatcgcctcattgcagctactgagcacttg

SEQ ID NO: 318563 - DNA, 201 bp, Homo sapiens
ccagagcaggaaaggctgtaactctcctgtgctgatgactgtggccctgcctctgcagaacatattccactgcgccatgtccctggaccagctctacttcrcccgccccgtgcccctgcattctggctaccgctgccctctccagggcctgtatctctgtggaagtggggctcatcctggtgagtgacctggagtcccact

SEQ ID NO: 318564 - DNA, 201 bp, Homo sapiens
gttttttaagaaaaaagcttcataatccgaacaaatcttgtggatataatctgatggttatttaacattccccttctcattcagactccacataattaaamctattgttaaaagaaaaaccttcactaaattaaatttaatagagtttaattgggcaaagaatgattcataaatgaatcaggctcccgagctggagtatgc

SEQ ID NO: 318565 - DNA, 201 bp, Homo sapiens
agaaacagctggattggttacagctcagtgtttgccttatttgaacgcagtttaaacagttggtcccctttgattggccaaaactcggcgattgacacagragtaggttacagtctgtttacgcctccttctaggttatagttcactaggaacagagaaacctttaggttgagcttaaagtatttaaggaggcagctttaa

SEQ ID NO: 318566 - DNA, 201 bp, Homo sapiens
acttttcacatcagtggcacaagcacagagggcatgccccaatgtacaggcctgtttcagttctgggtttgtgtcacatcggcaaacattccactggctgrccaaatcacatggatgagcccagagccaaggagccaggcaggttaaccaagttgtggtgggttgagaggcactgcagacttatacattgcaaagagtatg

SEQ ID NO: 318567 - DNA, 201 bp, Homo sapiens
gggttacctctgagtccctgaaggcacactggcacctggccgccaccttgaagatgaatctcatttagtcatttgactaaatgtgcctgagagtgactgagggggcttgttaaaatggagattcctggccccatacctggtgacgagcattctgagggcgggaggtgtctcccagaggtcagcacatccacccaaccaaca

SEQ ID NO: 318568 - DNA, 201 bp, Homo sapiens
taagttttacttgaacattttacgtgcggcattttgtaactcaatggatcagtaatttaaaacatttattttattttattttattttaattttttttgagrcggagttttgctcttgtcacccaggctggagtgcaatggcatgatctcggctcgctgcaacctctacttcccgggttcaagcaattctcctgcctcaatc

SEQ ID NO: 318569 - DNA, 201 bp, Homo sapiens
gatgctgttccaacatctgagtgcgggaaggggaggggagggtcaccaaggatcttcatggcatggggacgggcagcggggagcacattcctcaaggactstctgtctgcccgcccgctgaccagtgatgttttccttccctgtcccgttttgttgcaggacacaacggactggtggctgtgagtacctccccacttgatc

SEQ ID NO: 318570 - DNA, 201 bp, Homo sapiens
agctgctcaggaggctgaggcaggagaatcgtttgaacccagaggcggaggttgcagtgagctgagattgcgccactgcactccagcctgggtgacagagygagactccgtctcaaaaaaaaaaaaaaaaaaaaaaaaaacagcttgagaaaagtgaagaggtgaaaaaagctgcatatgcaaaaggagatcagcagcttc

SEQ ID NO: 318571 - DNA, 201 bp, Homo sapiens
tgtcaggaaggagggacagccctgcaactgggcagctcaagaaatctgatctgtagggaggagagacgagtgtgcagagagcagtaattgataaagaagtvgcagtcactcatttcagccaagaggggtgttcggtattttctggatggcacagagacattgcttttgtttgtgcttgcctcattttatcatagtctcata

SEQ ID NO: 318572 - DNA, 201 bp, Homo sapiens
ctctggcataacccagccagaagtttatacgctagcaggggctgcaatggaaagcccttccatctggcaggcaggcacctgggattccggtgctggctctkctgtgtggcctggggcaaatgcttgccttctctgggcttggatcttcccatggagaatgacaggaagactaggtgagctcaggggtttccctatatctct

SEQ ID NO: 318573 - DNA, 201 bp, Homo sapiens
atgggcaaggtgccaaaagaggagaactggccaggccttcaaaactaaaacaccagagaattacagacagcgaacttgcccctaagccctcgttgtgggtktgtgtttgagcatttaggagaggactccagtgctcctcagcgacagacacagctgcctctgcggtgtctgaaggccctggtcgtggtgacgctagatggc

SEQ ID NO: 318574 - DNA, 201 bp, Homo sapiens
aagccaaggcctgactgtctcctactccttgttcttgagctatgatgcgctcaggcctcttggtaccaataccgcccagactcacacgtctctggctcttkgtactttgcggtgaacgtggtgatagagtgcccctggcagctccagcgcagtgtgcacagaggctgagactggagctgctggaaaccggccggctgcgtc

SEQ ID NO: 318575 - DNA, 201 bp, Homo sapiens
tgcagacagaggtaaagacagctgcacgttctgcctccagagccacagccgggcatgcgacccaactgggcctgctcctcctcactgccccattcaggatygacaactgcaggtgccattccaaagggaggaaatagtcaagggaacctcaagtcaacatagttgactgcaggggtcaggaactgggctaagaaagtcaag

SEQ ID NO: 318576 - DNA, 201 bp, Homo sapiens
acagtgacttaggatctgccaaaatccatactcctaaggacaggaagtgcatcccaggtgaaaaatctgaggatgagggcaggtaaggggtgaagagcggstcaggttagcagaaggggcagaggggcagagcactgcccaggaaagtgctggggctggggaagaagaggagaaaatgtgttctgggagagcaaaggaagt

SEQ ID NO: 318577 - DNA, 201 bp, Homo sapiens
gccttctccttccaggagtggcttcctgaggagttcctggagagaatctctcagctggacacccggtcgcctgtcaccaagatcaatggtaagaggcacascacattgcagcactgtctcctttgacccatctgagtgagaaacctccaggctgggggcagctgaactcagtcatcatctccattcccggacctccagcct

SEQ ID NO: 318578 - DNA, 201 bp, Homo sapiens
tcactgaggagatcatcccaggtgagctctgatgtggcatgggggagtggagggcagtgactcagggtgacagtctccatccctgctgaccccgggtgacrgtctccatccctgctgaccccgggtgacggtctccatccctgctgacccctggtgacggtctccatccctgctgacccctggtgacggtcctcatccctg

SEQ ID NO: 318579 - DNA, 201 bp, Homo sapiens
tacttacaaagttattgtgaggtaaccattgtaaaccctagtacagtccctggcatggaatgagtgtgtcatgctgtgatgtggtatgacatggcatggcrtagtgtggtgtgatatggcatggtatggtatcacatggtgtggtagggtgtggtatgacatggtgtgtgtggtgtgatgtgatgtagtgtggtatggtat

SEQ ID NO: 318580 - DNA, 201 bp, Homo sapiens
actaaagcctggctgaaatctggctgcttgggcgcctgctgtcttaggcctggcccctttccacactcccactgtctgtgtggaccttcgagacatttgcrtttgggagctgtggttagagcacagcgtgtgatgaaggcaggcaaggacaggccatgcattcgggggtctggggtcaggcgagctcctcacaggtgctct

SEQ ID NO: 318581 - DNA, 201 bp, Homo sapiens
gcgcggaggaggaagtggttagagctgagtgggaggggatctaggaaggcttcacaggggaggtggttttggctgagctttgaaggatgaagaggatttcyggagggagcgactgagggatcttcctgagcaaagaaagaaggcagcttccttggggccttggacatctgaggcctttcatggagccttctccttccagga

SEQ ID NO: 318582 - DNA, 201 bp, Homo sapiens
caggatgaacacatgtcggatggagaatgcacttttttcccttggaactgcattctaggaacctgctgggtggccttgtctagatgagccactgagttccrtaagggccctgccacagttggttctgtggatatagaaagattatttgaatggccattttgtaccaagcctggatattagctgagatgtagcattaaatca

SEQ ID NO: 318583 - DNA, 201 bp, Homo sapiens
gtctagatgagccactgagttccgtaagggccctgccacagttggttctgtggatatagaaagattatttgaatggccattttgtaccaagcctggatatwagctgagatgtagcattaaatcatatctcagtggagacatttttataagaagaacctaggttaatagaacccatgtacattgcttttgttgtgttaatct

SEQ ID NO: 318584 - DNA, 201 bp, Homo sapiens
gccctccagcctgggtcacagagcaagactccatctcaaaaaaaaaaaaaaaaaaaaaagaagaaaggacagaaggaagaaacttctaagtggtttcatgrtttatcgcagagaccacaccctaggattgttgccagttttctgtgggtgacacttcgtgttagccagcattagctccttgtccctgtcaccactcccagt

SEQ ID NO: 318585 - DNA, 201 bp, Homo sapiens
ctgaccaccaccaccccaccccatgcactcttcctggtgttgatgttaacccagagacctggaactgggggagctcaacagagccaagctgggccacagcrgggaatgaggcctgaggaaccgtcaagctgtgggggggtgacaggccatctggggacagcatggagggcagggatgtggacagtggggccttaatgcaga

SEQ ID NO: 318586 - DNA, 201 bp, Homo sapiens
tgcaggcaccagggcatgatgagtgaccttcaaggaggtgagcccattgtctcgatgcctagacacaagcctgaacctccatggcagcctgccagctgggwtcagttaacatgctgcgatcaattaggggcagcctggagcactttgttgagagcatcttaggctgatatgcctttaaaatagagcctgagaccaaggctt

SEQ ID NO: 318587 - DNA, 201 bp, Homo sapiens
gagcactttgttgagagcatcttaggctgatatgcctttaaaatagagcctgagaccaaggcttatgcgtgggtagttcatttggaagggtgaccccaagrcacaaaaatagcagaaagttggggtgaaagtggacagagaaagagtcaataccagagtgtgtgatcgcactagccagcactgtgggtgacaagatgctgg

SEQ ID NO: 318588 - DNA, 201 bp, Homo sapiens
aggctgattggcttctacctgcttagtgccactgtcactcaccactcagagaaaagggttcttggtgctatctgcagctgccactcacgttggtgccatctttttttttttttttttttttgggacggagtctggctctgtcgcccaggctggagtacggtggcgcgatctcagctcactgcaagctcctcctcccgggtt

SEQ ID NO: 318589 - DNA, 201 bp, Homo sapiens
agtcagagtgtgagagcactgcaaggttacacggaagtgggtgtgcaaacagggaggggtgagctttgggggcagtttttgcaattgacttaccctgtgcycaaaagatatgataacatgtatacgcacatgaagctcctagccattcttgggggcaattcttaggggcaaagcactactttttctgagtgattccattac

SEQ ID NO: 318590 - DNA, 201 bp, Homo sapiens
acggtctccatccctgctgacccctggtgacggtcctcatccctggtgacccctggtgacagtcttcatcggattcggtttcagggtttaagttctcccgygcgtcctacctgctcagcctgctgaggccgcagatttacactgatctggagctgaaggtagggcccccccgccggcccgattgcacggagggaggaggca

SEQ ID NO: 318591 - DNA, 201 bp, Homo sapiens
gagacccaaaggacaaagaggagttaacaaaacataagatgagggagggaggggcttcaggccgacagaacagcaggggaaatgctggggttgagagaacktgtgatccacccaggaaatcgagaggttctgttagttaggaggatgggatatggatagggggacaggatgagggatgaggctggagtgcctgctagaaga

SEQ ID NO: 318592 - DNA, 201 bp, Homo sapiens
gaggcagctctgctccaggtacctctcgtcctccttgtagaagcacatgctgacctgggtgtggacttttcacatcagtggcacaagcacagagggcatgmcccaatgtacaggcctgtttcagttctgggtttgtgtcacatcggcaaacattccactggctgaccaaatcacatggatgagcccagagccaaggagcca

SEQ ID NO: 318593 - DNA, 201 bp, Homo sapiens
ccccaatgtacaggcctgtttcagttctgggtttgtgtcacatcggcaaacattccactggctgaccaaatcacatggatgagcccagagccaaggagccrggcaggttaaccaagttgtggtgggttgagaggcactgcagacttatacattgcaaagagtatggagccagtggaatctattacaaatgcaaaaagtaga

SEQ ID NO: 318594 - DNA, 201 bp, Homo sapiens
gtgtgatgaaggcaggcaaggacaggccatgcattcgggggtctggggtcaggcgagctcctcacaggtgctctggaccacgctagcagccgctaagcccrtgcaggtggacaaccactgtggctgtagagcgacaatcgcccagaattggtgtcatctcagggcctccactgtgtcccaagtcatctcggatgccctacc

SEQ ID NO: 318595 - DNA, 201 bp, Homo sapiens
cagaacttggtgggatgggtttgggatgaagaagttgtgaatgcctaggagcagcacagaccatggaaatcccggaagatctaacatggatttcccttccygcggtttctggggccttgttctggtgggctctagacagtggcgaaggtgcaggtgaacagtgaaggctgtgttcaaggagttgtgctggaagatggcaca

SEQ ID NO: 318596 - DNA, 201 bp, Homo sapiens
tgtggtgggttgagaggcactgcagacttatacattgcaaagagtatggagccagtggaatctattacaaatgcaaaaagtagacactgcctctctctcarataaccagtccaaggagctctgtgtgaaaaacaggcaaaaaacatttattgagcaactactatgtgtcagacactaagctaggcccaggggctgtaaggc

SEQ ID NO: 318597 - DNA, 201 bp, Homo sapiens
cacaggtgctctggaccacgctagcagccgctaagcccgtgcaggtggacaaccactgtggctgtagagcgacaatcgcccagaattggtgtcatctcagsgcctccactgtgtcccaagtcatctcggatgccctaccctccgcactgctgctctttagacctgccgtctcctccctgcccgcacaggcctgtgattgag

SEQ ID NO: 318598 - DNA, 201 bp, Homo sapiens
ttgtgctggaagatggcacagaggtgagaagcaaaatggtgctgtccaacacatcaccgcagatcaccttcctgaagctgacgccacaggtgaggctgtgrgcaggagggtggagcttagatgtctgccaaaacaggggttagaaatcgtggggattgagggagccaggattgcatcagggtgtgagatgcaaaagccaag

SEQ ID NO: 318599 - DNA, 201 bp, Homo sapiens
caaatgcaaaaagtagacactgcctctctctcagataaccagtccaaggagctctgtgtgaaaaacaggcaaaaaacatttattgagcaactactatgtgycagacactaagctaggcccaggggctgtaaggctagagaccatgatttctaccctgaaggccttaaagcctagtttctttctgaaatggtctgaatcagg

SEQ ID NO: 318600 - DNA, 201 bp, Homo sapiens
tggacaaccactgtggctgtagagcgacaatcgcccagaattggtgtcatctcagggcctccactgtgtcccaagtcatctcggatgccctaccctccgcmctgctgctctttagacctgccgtctcctccctgcccgcacaggcctgtgattgagctctgcatcccttcctcgctggaccccaccctggctccccctggc

SEQ ID NO: 318601 - DNA, 201 bp, Homo sapiens
aatggaaggctgtgtgtgtgtgtgtgtgtgtgtgtgtgtgtgtgtgttgggatggagaatgcagccaagggttgggccgtttccagtgcaccagaagatasagctagaagctagaagctagaaggcgtcgacgtggcttttctctcaagggatgagcacaccctcggaagtggtttttcaacacatattaagccggcccca

SEQ ID NO: 318602 - DNA, 201 bp, Homo sapiens
ggtaataagctatgcacatagacacacttgttagggagagggtgtagagaaggcaaagggctcttacaagaacttgagctcattgaaggctgctgggagarggctggatggtggcagggaagggctgaagatcaagatggaaaggaatagttgcacctggaactctggggagatgagatcccacctccaggatctgagtcg

SEQ ID NO: 318603 - DNA, 201 bp, Homo sapiens
cacaccctttccaacaatttccacccaggatgactgtgcatgctgagaactctcatggggtaaataaaagaagggtttgctttcattttgtttttttgggktttttttctgttttttaagaaaaaagcttcataatccgaacaaatcttgtggatataatctgatggttatttaacattccccttctcattcagactccac

SEQ ID NO: 318604 - DNA, 201 bp, Homo sapiens
gttgggatggagaatgcagccaagggttgggccgtttccagtgcaccagaagatacagctagaagctagaagctagaaggcgtcgacgtggcttttctctmaagggatgagcacaccctcggaagtggtttttcaacacatattaagccggccccaaattcccccagggcgatggagatgggggcttggcagcagttgcca

SEQ ID NO: 318605 - DNA, 201 bp, Homo sapiens
atgagcacaccctcggaagtggtttttcaacacatattaagccggccccaaattcccccagggcgatggagatgggggcttggcagcagttgccacacatyggccaagctgtgatctaccagccaatctggatcttccagctggggcctcctgcccttttctcttcggatccctgggaggcttaaccagtgctccgtttgt

SEQ ID NO: 318606 - DNA, 201 bp, Homo sapiens
tccgtttgtgatctttaagtaatctgttccatcattaattcttccaacaaatatggatgagcgcttgcctgtgctaggtgctggggatacggtagtgagcrgagcagatgtcctgatgggtgagagacacagagcgagtgatgatgatgaagtggcgtgagtgtgatgctaggaggagcagccgggacacagcctggtcta

SEQ ID NO: 318607 - DNA, 201 bp, Homo sapiens
aaggaagtgagaatacagatcttatgggtatctggggaaaaaacgtccagacagagggaaggtcaggtgcaaaggccctggggcaggagtgtgctgctgtrtaggaggcacagggacgaggccagagtggctggagagagagcacctgggaatgaagggtctcggatggtgctgggtcttgtcaagtgccctggctcttac

SEQ ID NO: 318608 - DNA, 201 bp, Homo sapiens
tttcctccctccctccctccctctcttccttctagagataggtcctgttctatcacccaggctggagtgcagtagtgcaatcacggctcactgcagcctckacctctggggctgaagccatccatcctcccacctcagcctcctgagtagctgggcctacaggcatgcaccaccacacctggctaattttttttttttttt

SEQ ID NO: 318609 - DNA, 201 bp, Homo sapiens
caggctggagtgcagtagtgcaatcacggctcactgcagcctcgacctctggggctgaagccatccatcctcccacctcagcctcctgagtagctgggccyacaggcatgcaccaccacacctggctaatttttttttttttttgtagagatgagtctccctgtgttgtctaggctggtctcaaactctggggctcaagtg

SEQ ID NO: 318610 - DNA, 201 bp, Homo sapiens
gccatactggcctatagtgaggaccttagtctgcgggtcagcccgagggagccctgacatttcagagggataaagggagggccctgtgtgctgccccactycccaggcagcgtacctgcagagactgggggtgaacaccgccgtcttcgagaggcgccatgtgatcgggggtgcagctgtcactgaggagatcatcccagg

SEQ ID NO: 318611 - DNA, 201 bp, Homo sapiens
aggacatctagaaaaggcgagggtggaaagggaagcacagggaagggcattcccagaggcaggaacagcatgagcggggcagggaggccatggggtgtggsccatactggcctatagtgaggaccttagtctgcgggtcagcccgagggagccctgacatttcagagggataaagggagggccctgtgtgctgccccactt

SEQ ID NO: 318612 - DNA, 201 bp, Homo sapiens
gctccctgcctggaggagagcgacatcccagggcagggtggcaggaagcagcgtgagtccccgaggcaccaggcctctaaggagggaagaccactttcagytgggaagtggaggggcgggagcaggcctgtcggatcttagaggacatctagaaaaggcgagggtggaaagggaagcacagggaagggcattcccagaggc

SEQ ID NO: 318613 - DNA, 201 bp, Homo sapiens
tgaccccgggtgacggtctccatccctgctgaccccgggtgacggtctccatccctgctgacccctggtgacggtctccatccctgctgacccctggtgayggtcctcatccctggtgacccctggtgacagtcttcatcggattcggtttcagggtttaagttctcccgcgcgtcctacctgctcagcctgctgaggccg

SEQ ID NO: 318614 - DNA, 201 bp, Homo sapiens; identical to SEQ ID NO: 66818

SEQ ID NO: 318615 - DNA, 201 bp, Homo sapiens
tcaggccgacagaacagcaggggaaatgctggggttgagagaacgtgtgatccacccaggaaatcgagaggttctgttagttaggaggatgggatatggakagggggacaggatgagggatgaggctggagtgcctgctagaagactggccattatcctaagagcagtgccaagccggggaggcttggaatggtgataagt

SEQ ID NO: 318616 - DNA, 201 bp, Homo sapiens
agggcccccccgccggcccgattgcacggagggaggaggcagttccatcttcccaacctgtgtggggggtccctgttctgtgcccgaggtgatgcccgccsctgagggctccctcttccacccaagtcttgtgtatcccacgtggtctccctgctgcattcccacagatgggttttgtctcgtccatgtagtgtcttgaaa

SEQ ID NO: 318617 - DNA, 201 bp, Homo sapiens
acagaacagcaggggaaatgctggggttgagagaacgtgtgatccacccaggaaatcgagaggttctgttagttaggaggatgggatatggatagggggamaggatgagggatgaggctggagtgcctgctagaagactggccattatcctaagagcagtgccaagccggggaggcttggaatggtgataagtgagtggca

SEQ ID NO: 318618 - DNA, 201 bp, Homo sapiens
cctagcaaggcccagcctggggcagaaatggctgcaagtggccgaggtctctgcaaggctgtggccgcctctcccttcccggcgtggagacgagataacayggaagccaggggaggtctgaagcctgagtatgatgcggtggtgataggagcaggtaaagtggtaaagcaggccgggccagagctgaggggcgggaagaca

SEQ ID NO: 318619 - DNA, 201 bp, Homo sapiens
ttcatggagaagctgcagaacttggtgggatgggtttgggatgaagaagttgtgaatgcctaggagcagcacagaccatggaaatcccggaagatctaacmtggatttcccttcctgcggtttctggggccttgttctggtgggctctagacagtggcgaaggtgcaggtgaacagtgaaggctgtgttcaaggagttgtg

SEQ ID NO: 318620 - DNA, 201 bp, Homo sapiens
gtctgccaaaacaggggttagaaatcgtggggattgagggagccaggattgcatcagggtgtgagatgcaaaagccaagtctctgcatttgggaaacaggsgggtaagggcaggtagcaaacggggaagaagcctcacaggtggggagaaggggccagagaggtgaagtgaccaagattccggccattggcagagccagag

SEQ ID NO: 318621 - DNA, 201 bp, Homo sapiens
catgcgagacgggacgttggcgcagcagcatgccagccacccattgcttctcctgcttgccaactcaaccgtgctgctccctcagacaccatcacttgcgyctcccaagcaatggaagccctggcgatgctctcatgagcccctcactccagcagagcccctgaccaagccaggggagcaggacttttccagccaaggcaa

SEQ ID NO: 318622 - DNA, 201 bp, Homo sapiens
ggtctgactttcaatctagagttatttccacaactttcctactttcctgatttctcccctctcaccgctctaattccattgtctttgtcaatgatctgttrtattatccatgattattaattaatcaattaacaaagagccacaatacttctgggcatacaacaagaaatactggcacccagaactggagacttcagttga

SEQ ID NO: 318623 - DNA, 201 bp, Homo sapiens
ccacacgtggacaaaacaagccgcgcttgatagcaactacctacatgaccagcactcccctggatgctgatgctgccatgcgagacgggacgttggcgcascagcatgccagccacccattgcttctcctgcttgccaactcaaccgtgctgctccctcagacaccatcacttgcgcctcccaagcaatggaagccctggc

SEQ ID NO: 318624 - DNA, 201 bp, Homo sapiens
cctgatttctcccctctcaccgctctaattccattgtctttgtcaatgatctgttatattatccatgattattaattaatcaattaacaaagagccacaawacttctgggcatacaacaagaaatactggcacccagaactggagacttcagttgatcttggtggatttcagctgcttaaggcttgctcatgcgtctgcag

SEQ ID NO: 318625 - DNA, 201 bp, Homo sapiens
gaaccgcccaaccgaggctgtcaggtgctacgagctgctggccctgcacctgtctgtcatccccactgacctgctggtgcagcaggccggccagctggccyggcgcctctgggaggcctcccgtatccccctgctctaggccaaggtggccgcagtctgcctttgcatcctgtcctccagccacccttgcttgccactgtt

SEQ ID NO: 318626 - DNA, 201 bp, Homo sapiens
ggggattggcaaaaaaaaaaaaaacccatgtgaataaagccttctagggcaccactgtgccgattgtgaaccacacgtggacaaaacaagccgcgcttgayagcaactacctacatgaccagcactcccctggatgctgatgctgccatgcgagacgggacgttggcgcagcagcatgccagccacccattgcttctcctg

SEQ ID NO: 318627 - DNA, 201 bp, Homo sapiens
catgtatacgcacatgaagctcctagccattcttgggggcaattcttaggggcaaagcactactttttctgagtgattccattactaaaattcaacaaacrtcagtaaaaagaaacttgttaaggcaattctgagatcgtcgaggcttccaagagcttacagaccagtagtgaaaagaggcctgcaaaccactgacccctt

SEQ ID NO: 318628 - DNA, 201 bp, Homo sapiens
tgaagccaacaggactttctgttggatagggagtgggatgtgggtcaaaaaaaggagcgactgtgaaatgatgcctccatttactgaaaagaggaagaggyggtgggggtggagcagattttagaggctaatcaggcattggggtttgaacaggggatgtttgagatccctggtggacatccgagttcagcgagaacattg

SEQ ID NO: 318629 - DNA, 201 bp, Homo sapiens
tgctaagtcccagccccttcatgcttggctggcgtctgccctagggctggggttctcaagcccctggccctggcccagagatttggattcccttggcggcygtggagcccagcctttgatgtctttcaaagcttctgtggtgcgccctggattgagaaccaccacccgaggggtacagcccctctcttccaaccgagaagt

SEQ ID NO: 318630 - DNA, 201 bp, Homo sapiens
tgcccgcacaggcctgtgattgagctctgcatcccttcctcgctggaccccaccctggctccccctggctgccatgtagtctccctcttcactcagtacaygccctatacgctggctggaggcaaggcctgggacgagcaggagagagacgcttatgcagacagaggtaaagacagctgcacgttctgcctccagagccac

SEQ ID NO: 318631 - DNA, 201 bp, Homo sapiens
tcggtttcagggtttaagttctcccgcgcgtcctacctgctcagcctgctgaggccgcagatttacactgatctggagctgaaggtagggcccccccgccrgcccgattgcacggagggaggaggcagttccatcttcccaacctgtgtggggggtccctgttctgtgcccgaggtgatgcccgcccctgagggctccctc

SEQ ID NO: 318632 - DNA, 201 bp, Homo sapiens
tgttgggaaacagggtctttgcacatggagtcaagatgaagtcctaaggatgagccctaatcctatatgatcatgtccttataaaatgagggaagttgggmcacacacacacacacacacacacacacacacacacagtgccttatgaagacacagacacagggagaagacggctgtgtgaagtggaggtggagatgggcg

SEQ ID NO: 318633 - DNA, 201 bp, Homo sapiens
ctgcagcagcagagagagaacgagggactgaacctgggtggaagggtcagcattcacaagttccacctcactgtgctgcgcttgtaggagaaatgaggctkgctccctgcctggaggagagcgacatcccagggcagggtggcaggaagcagcgtgagtccccgaggcaccaggcctctaaggagggaagaccactttcag

SEQ ID NO: 318634 - DNA, 201 bp, Homo sapiens
gaaccagctcagttaatcttcacagcagccttatgaagtgggtaaagccgggactactttcatcagccccacttttgcatgtgaacaaactgaggccagayggatcaggtactgaggctgcagcagcagagagagaacgagggactgaacctgggtggaagggtcagcattcacaagttccacctcactgtgctgcgcttg

SEQ ID NO: 318635 - DNA, 201 bp, Homo sapiens
gtgccagggaccacttaaaccctgtctaggaaccagctcagttaatcttcacagcagccttatgaagtgggtaaagccgggactactttcatcagccccayttttgcatgtgaacaaactgaggccagacggatcaggtactgaggctgcagcagcagagagagaacgagggactgaacctgggtggaagggtcagcattc

SEQ ID NO: 318636 - DNA, 201 bp, Homo sapiens
ctgggagagtggtgatgcttgctgtcttttccccaggtctggtctctgatccagctggcgcgcagatacctgcagaagggctacaccacgctgctgttccrggagggggatttctactgctcctacttcctgtggttcgagaatgacatggtaggtgaggctgagtccctgggccaggacgggccacacacacttcccgct

SEQ ID NO: 318637 - DNA, 201 bp, Homo sapiens
gccatgtgatcgggggtgcagctgtcactgaggagatcatcccaggtgagctctgatgtggcatgggggagtggagggcagtgactcagggtgacagtctycatccctgctgaccccgggtgacggtctccatccctgctgaccccgggtgacggtctccatccctgctgacccctggtgacggtctccatccctgctgac

SEQ ID NO: 318638 - DNA, 201 bp, Homo sapiens
tgccacagcctcactcctgaatcccatcctccccttcctccccaggaagctcctgcgctactacagcaagaaccgcccaaccgaggctgtcaggtgctackagctgctggccctgcacctgtctgtcatccccactgacctgctggtgcagcaggccggccagctggcccggcgcctctgggaggcctcccgtatccccct

SEQ ID NO: 318639 - DNA, 201 bp, Homo sapiens
ggtagggcccccccgccggcccgattgcacggagggaggaggcagttccatcttcccaacctgtgtggggggtccctgttctgtgcccgaggtgatgcccrcccctgagggctccctcttccacccaagtcttgtgtatcccacgtggtctccctgctgcattcccacagatgggttttgtctcgtccatgtagtgtcttg

SEQ ID NO: 318640 - DNA, 201 bp, Homo sapiens
gaggcaaggcctgggacgagcaggagagagacgcttatgcagacagaggtaaagacagctgcacgttctgcctccagagccacagccgggcatgcgacccractgggcctgctcctcctcactgccccattcaggattgacaactgcaggtgccattccaaagggaggaaatagtcaagggaacctcaagtcaacatagtt

SEQ ID NO: 318641 - DNA, 201 bp, Homo sapiens
acagctgcacgttctgcctccagagccacagccgggcatgcgacccaactgggcctgctcctcctcactgccccattcaggattgacaactgcaggtgccrttccaaagggaggaaatagtcaagggaacctcaagtcaacatagttgactgcaggggtcaggaactgggctaagaaagtcaagaagacacagttcctgcc

SEQ ID NO: 318642 - DNA, 201 bp, Homo sapiens
agttcctgccctccagttgctcacagtctagcaagggatggaggagactaattaagaaaccttttattacagcacagctgactgcacgaaccaaaggagamgcatgagccagagagacaaggaaggctttcaaaggaagggatggtcaagctgggtttccaaggatgactaggagctggccaggcagcaaagggcattcca

SEQ ID NO: 318643 - DNA, 201 bp, Homo sapiens
caccagatttggagagaatcttcgggcttcctggaggggtatgtataagcctagggggtctctcaccatagccttccctctgcaccctcacttcctggctrtgacctctctgctttatcttgtccctccatactcagctttcatcaggaagggaggacagtggcagggaccccggctgagagagggcagagaagcggtcaa

SEQ ID NO: 318644 - DNA, 201 bp, Homo sapiens
ccatccatattttagaccaggaaggatggataaagttaacttcttcaactttacaattctttcttgtgcgcattccaagcctaacggagctggctgaggckatttgctatgcacactttctctcagctgtgtagacttggtaccctggaaagagtctgggcttacacatcttccccctccccccagccccttattctgaaa

SEQ ID NO: 318645 - DNA, 201 bp, Homo sapiens
gaccccgggtgacggtctccatccctgctgacccctggtgacggtctccatccctgctgacccctggtgacggtcctcatccctggtgacccctggtgacrgtcttcatcggattcggtttcagggtttaagttctcccgcgcgtcctacctgctcagcctgctgaggccgcagatttacactgatctggagctgaaggta

SEQ ID NO: 318646 - DNA, 201 bp, Homo sapiens
gaggcgccatgtgatcgggggtgcagctgtcactgaggagatcatcccaggtgagctctgatgtggcatgggggagtggagggcagtgactcagggtgacrgtctccatccctgctgaccccgggtgacggtctccatccctgctgaccccgggtgacggtctccatccctgctgacccctggtgacggtctccatccctg

SEQ ID NO: 318647 - DNA, 201 bp, Homo sapiens
tgcctaatattctcttgtaaggatgtgtcataatttattatgggacattgggttcagctttggccttgattgctaattagtataagccaaaggcccgaaarcttcttttatcactgctgttcctgttttaatggttccctgtcatttctgggatcacaagggtgcagctgttctccaggcaaatgttccctgtaaaggagg

SEQ ID NO: 318648 - DNA, 201 bp, Homo sapiens
ataatagtacacaaacttccttggaaagggctagcctaaaggggaactggttattaggagaaaaaaaaaaccaccgctgtttttacagtaaccctcctcaktctataatgagcaaacctctcttctgtatagagcagcctcctaatgtgagtcactccaagacttggcttccaaccgctgccccttagcccaggaagcagg

SEQ ID NO: 318649 - DNA, 201 bp, Homo sapiens
agcacgtccaccctcagccgttgagactgtgggctgtggacctggcccctccccagacctttggtgcaggaagcctggagggagccagaatctattgagcrgctgtcttaggtgattccagtgcccatgcccccggacccctctaaccagccccactctgctttgttgctggatctctgtaagccctgtccccacccccac

SEQ ID NO: 318650 - DNA, 201 bp, Homo sapiens
gaggagatcatcccaggtgagctctgatgtggcatgggggagtggagggcagtgactcagggtgacagtctccatccctgctgaccccgggtgacggtctycatccctgctgaccccgggtgacggtctccatccctgctgacccctggtgacggtctccatccctgctgacccctggtgacggtcctcatccctggtgac

SEQ ID NO: 318651 - DNA, 201 bp, Homo sapiens
gctaagtaatgggcagagaacaaaggggctcctaattcaaggcaggcctaagggagggtcagaaagaactttagctggaggtatttacagatgtgacctcraatccttggggattcttggaaaatgggcaaggtgccaaaagaggagaactggccaggccttcaaaactaaaacaccagagaattacagacagcgaacttg

SEQ ID NO: 318652 - DNA, 201 bp, Homo sapiens
tcaacaaatatttattgatttttccactaagtgctagaaaaaaattaatagaaatccttgcatcatttgttctcccaaaataaagctctgctatgaaccgyttcatttactgagtacattctctgtgccagggaccacttaaaccctgtctaggaaccagctcagttaatcttcacagcagccttatgaagtgggtaaagc

SEQ ID NO: 318653 - DNA, 201 bp, Homo sapiens
cacggaagccaggggaggtctgaagcctgagtatgatgcggtggtgataggagcaggtaaagtggtaaagcaggccgggccagagctgaggggcgggaagrcagccctgctcagagcttggtggggagggggagggggagccaagccccactgctctctcctctggcataacccagccagaagtttatacgctagcagggg

SEQ ID NO: 318654 - DNA, 201 bp, Homo sapiens
gtgtacatgtatatatatgtatatatacacacatatatgtgtatatatatgtatatgtgttacgtacatatatatacacatatacacatgcttattttaartattgaaataaaagatacactgcacacaattttacaaataaagatacaatactctcaatttaaatgcagtctacccgagtgattcttaccaaaggctttc

SEQ ID NO: 318655 - DNA, 201 bp, Homo sapiens
ccaaaggctttctttgatttttgccaaactcagtagccaacctatagttgcaaatgacaaatgagggtagctccaaagagaacggtgctccatattttctstaaagagtaggatgatcgtgaaacaaatgaaacaacaaagatttatgtcccaaccttactcctttattttttaaaatttatttttattttatttatttat

SEQ ID NO: 318656 - DNA, 201 bp, Homo sapiens
ggaaaatgggcaaggtgccaaaagaggagaactggccaggccttcaaaactaaaacaccagagaattacagacagcgaacttgcccctaagccctcgttgwgggtttgtgtttgagcatttaggagaggactccagtgctcctcagcgacagacacagctgcctctgcggtgtctgaaggccctggtcgtggtgacgctag

SEQ ID NO: 318657 - DNA, 201 bp, Homo sapiens
tcacctctccagggaaaaatgtgtgatgtatgtgtgtgtgtacatgtatatatatgtatatatacacacatatatgtgtatatatatgtatatgtgttacrtacatatatatacacatatacacatgcttattttaaatattgaaataaaagatacactgcacacaattttacaaataaagatacaatactctcaatttaa

SEQ ID NO: 318658 - DNA, 201 bp, Homo sapiens
aaccttactcctttattttttaaaatttatttttattttatttatttattcatttattgagatggagtcttgctctgttgcccaggctggagtgcagcggygcaatctcggctcactgcaacctccgcctcctgggttcaagcgattctcttgcctcagcctcccgagtagctgggactacaggcgcccaccaccacgccc

SEQ ID NO: 318659 - DNA, 201 bp, Homo sapiens
acatctgagtgcgggaaggggaggggagggtcaccaaggatcttcatggcatggggacgggcagcggggagcacattcctcaaggactgtctgtctgcccrcccgctgaccagtgatgttttccttccctgtcccgttttgttgcaggacacaacggactggtggctgtgagtacctccccacttgatcccacttcactgg

SEQ ID NO: 318660 - DNA, 201 bp, Homo sapiens
tgctgaggccgcagatttacactgatctggagctgaaggtagggcccccccgccggcccgattgcacggagggaggaggcagttccatcttcccaacctgkgtggggggtccctgttctgtgcccgaggtgatgcccgcccctgagggctccctcttccacccaagtcttgtgtatcccacgtggtctccctgctgcattc

SEQ ID NO: 318661 - DNA, 201 bp, Homo sapiens
ccgatattatgaggtcctcacagctcccattaccaaggtgagtggttccccagcctcaggcccgaccaggcagtgagagggccctcctcccatccaggctyctaagcccttctctctgctgttgtgctgtccaggtgctggatcagtggttcgagtctgagcctttaaaagccactctagccacagatgcagtgattggag

SEQ ID NO: 318662 - DNA, 201 bp, Homo sapiens
aatttaatgactgttagtaaatttgccaagttgtacacccatagtgcctcctcttcttcctaacaccatctcatttctctgtttttggcaccccagtgttygattgcatcgaggtctatgcccctggcttcaaggactctgtggttggcagagacatcctcacaccaccagatttggagagaatcttcgggcttcctggag

SEQ ID NO: 318663 - DNA, 201 bp, Homo sapiens
ctggtgtttcatggagttgaactagatgctgttccaacatctgagtgcgggaaggggaggggagggtcaccaaggatcttcatggcatggggacgggcagyggggagcacattcctcaaggactgtctgtctgcccgcccgctgaccagtgatgttttccttccctgtcccgttttgttgcaggacacaacggactggtgg

SEQ ID NO: 318664 - DNA, 201 bp, Homo sapiens
cgcaatctcggctcactgcaacctccgcctcctgggttcaagcgattctcttgcctcagcctcccgagtagctgggactacaggcgcccaccaccacgccyggctaatttttgtatttttagtagagacggggtttcaccatgttggcgaggctgatctcaaactcctggccttgtgatccacctgcctcagcctcccaaa

SEQ ID NO: 318665 - DNA, 201 bp, Homo sapiens
ctacaggcgcccaccaccacgcccggctaatttttgtatttttagtagagacggggtttcaccatgttggcgaggctgatctcaaactcctggccttgtgwtccacctgcctcagcctcccaaagggctgggattacaggtgtgagccactgcgcccggcctccttctttaaatgacaggaatgatgttactcaaataaga

SEQ ID NO: 318666 - DNA, 201 bp, Homo sapiens
ttagtcatttgactaaatgtgcctgagagtgactgagggggcttgttaaaatggagattcctggccccatacctggtgacgagcattctgagggcgggagrtgtctcccagaggtcagcacatccacccaaccaacactgcctgatgcaggcagctgcagagcccacgcccagagcagctcctcaagggcccaggcgcctg

SEQ ID NO: 318667 - DNA, 201 bp, Homo sapiens
tgatgcaggcagctgcagagcccacgcccagagcagctcctcaagggcccaggcgcctgctatggggcccctgaggcaggtctggggattagcagagcccrcagctgaagtcctcttcaagggaacagaggtgtcaccagaagccaaggagggctcagccaggacttgagggtggtcactgggagggggtcttgtgctttg

SEQ ID NO: 318668 - DNA, 201 bp, Homo sapiens
gcaggtctggggattagcagagcccgcagctgaagtcctcttcaagggaacagaggtgtcaccagaagccaaggagggctcagccaggacttgagggtggkcactgggagggggtcttgtgctttggatccttgaccttactcatttgaggtctgccatgattgaactggacccagttgcctggaagactatgagttttcc

SEQ ID NO: 318669 - DNA, 201 bp, Homo sapiens
tatgaacattttcaaaagcccatacaaataaagagtatgtcaaccagcactttttaagatgaactgtaaccaactagcttctcacatgcttctcatatggyaagagttaattttagctcatgaaacttttggttctgtgaaacacctgctgaacagactcctgggaagggggtctgtgggagtcgacatttatacaacctt

SEQ ID NO: 318670 - DNA, 201 bp, Homo sapiens; identical to SEQ ID NO: 66815

SEQ ID NO: 318671 - DNA, 201 bp, Homo sapiens
taagagttaattttagctcatgaaacttttggttctgtgaaacacctgctgaacagactcctgggaagggggtctgtgggagtcgacatttatacaacctyccaggtgattctgagcttatcagagctggagaggcacttgctacccaggggcttggtgtggaacgtgagatgccaaagccaaattcaggcctctcagctc

SEQ ID NO: 318672 - DNA, 201 bp, Homo sapiens; identical to SEQ ID NO: 66816

SEQ ID NO: 318673 - DNA, 201 bp, Homo sapiens
gttctgtgaaacacctgctgaacagactcctgggaagggggtctgtgggagtcgacatttatacaaccttccaggtgattctgagcttatcagagctggaraggcacttgctacccaggggcttggtgtggaacgtgagatgccaaagccaaattcaggcctctcagctcaaggcaccctgaagcacagctagtcactcca

SEQ ID NO: 318674 - DNA, 201 bp, Homo sapiens
tccaggtgattctgagcttatcagagctggagaggcacttgctacccaggggcttggtgtggaacgtgagatgccaaagccaaattcaggcctctcagctsaaggcaccctgaagcacagctagtcactccagcacatgttgaagctgtgcatgtttacttcatgttgaactgttcatgttttatttttggaacactgggg

SEQ ID NO: 318675 - DNA, 201 bp, Homo sapiens; identical to SEQ ID NO: 66819

SEQ ID NO: 318676 - DNA, 201 bp, Homo sapiens
ttctcaggtcattctgaaagaggaggcccccagaacataactttgagaaccacaccctttaaatctcttgtatctctggtcctttagacacacacacagayacacccttcacacacacacaccctttccaacaatttccacccaggatgactgtgcatgctgagaactctcatggggtaaataaaagaagggtttgctttc

SEQ ID NO: 318677 - DNA, 201 bp, Homo sapiens
ccctgctgaccccgggtgacggtctccatccctgctgacccctggtgacggtctccatccctgctgacccctggtgacggtcctcatccctggtgacccckggtgacagtcttcatcggattcggtttcagggtttaagttctcccgcgcgtcctacctgctcagcctgctgaggccgcagatttacactgatctggagct

SEQ ID NO: 318678 - DNA, 201 bp, Homo sapiens
tctcaggtcattctgaaagaggaggcccccagaacataactttgagaaccacaccctttaaatctcttgtatctctggtcctttagacacacacacagatrcacccttcacacacacacaccctttccaacaatttccacccaggatgactgtgcatgctgagaactctcatggggtaaataaaagaagggtttgctttca

SEQ ID NO: 318679 - DNA, 201 bp, Homo sapiens
gtctccatccctgctgaccccgggtgacggtctccatccctgctgacccctggtgacggtctccatccctgctgacccctggtgacggtcctcatccctgstgacccctggtgacagtcttcatcggattcggtttcagggtttaagttctcccgcgcgtcctacctgctcagcctgctgaggccgcagatttacactgat

SEQ ID NO: 318680 - DNA, 201 bp, Homo sapiens
cattttgtttttttgggttttttttctgttttttaagaaaaaagcttcataatccgaacaaatcttgtggatataatctgatggttatttaacattccccttctcattcagactccacataattaaacctattgttaaaagaaaaaccttcactaaattaaatttaatagagtttaattgggcaaagaatgattcataaat

SEQ ID NO: 318681 - DNA, 201 bp, Homo sapiens
catgagtatgcgaatggaaggctcattaagtgtgctattattttctaccctccttgagggtatacagaccagtttaacctctatatcctagaaaaaaaatyatttgtttcccacatgtcttcgtggttcagctgattccagctggctcagctgatctggtttggtctcaggcatgtgtttgtgtctgcagcagctcagtgg

SEQ ID NO: 318682 - DNA, 201 bp, Homo sapiens
actggagacttcagttgatcttggtggatttcagctgcttaaggcttgctcatgcgtctgcagttggctgtgggtcagcttgccggctgctgatcttggcrggactccttcatgtgcctgggagctggctggtggtggctggtccaggaccgtttctgctgggatgaccgggtgggggactcggctatgctccatgtgtct

SEQ ID NO: 318683 - DNA, 201 bp, Homo sapiens
cattcttctggaacaggcaggggcgctataggagcaagtgcctttccatcctgtccgctgtccagcacacactgttgaaaacctactcagtgctggactctgtactgggtatgggctgggagaattagcggggcaggggcatgaaactgacacaaagcttatgataggacaggtacacaaatatttatagcatgtggtaaa

SEQ ID NO: 318684 - DNA, 201 bp, Homo sapiens
attcttctggaacaggcaggggcgctataggagcaagtgcctttccatcctgtccgctgtccagcacacactgttgaaaacctactcagtgctggactctgtactgggtatgggctgggagaattagcggggcaggggcatgaaactgacacaaagcttatgataggacaggtacacaaatatttatagcatgtggtaaag

SEQ ID NO: 318685 - DNA, 201 bp, Homo sapiens
ccatgatccacagagtcaccctcaaaggccacggtcctgaacaatgctgggcatctcaagccacagaatcctccagtcaggcaaaaagcagccaagggtgactgcaaagtggattccactgaggccgtctgggagcccggtcttcctgattccagagcattcaggcttctgcctcccatgagctaagtctgttgcatcacc

SEQ ID NO: 318686 - DNA, 201 bp, Homo sapiens; identical to SEQ ID NO: 66824

SEQ ID NO: 318687 - DNA, 201 bp, Homo sapiens
agtgagagcaaaggcttggaggctgggagacgaaggctatagtctggtgtgagcaaaagctctcgggggcctatagtgggcaggaaggccaataagagggrctctccctgcatctaactcttggttcccgctgccgtccccccaccttccagcagcgttcatggaagggagcttccctggcccagaccccagggtcctaca

SEQ ID NO: 318688 - DNA, 201 bp, Homo sapiens
aggagtaccaaggacttgcagttgagatcggacgtggcctccatttccttctttgtacagagaggaggtgggaccaatctagaccaacggttctatcgtcrctgtcacagtagctgttaataatagttcattgttactgaaggcttgctcttctaagggtttaatgtttcttcacttaatctttacaaaaatcctatgagg

SEQ ID NO: 318689 - DNA, 201 bp, Homo sapiens
ctttctcccagggtttggaagaggtgacttggtaagtgtggggtcctatgcaggaggcagagcctgtgacctgcctctctgtgccatctttgagcatcacytccactccacaggacccatctggctggacaatgtgcgctgtgtgggcacagagagctccttggaccagtgcgggtctaatggctggggagtcagtgactg

SEQ ID NO: 318690 - DNA, 201 bp, Homo sapiens
agctccaagccccagcctttctgcatgaagatctgcagcaggctccactggaggagcaggagccccgaggcccacaggtgactgtgcaccccgcagggccrgcggctggaggaggtgcggctcaagcccatccttgccagtgccaagcagcatagcccagtgaccgagggagccgtggaggtgaagtatgagggccactgg

SEQ ID NO: 318691 - DNA, 201 bp, Homo sapiens
gggcggctggcgtaggccccacaggaggcagggttgtggggcagggactgagtgtgtgttcatgtgcgtgcatgtgatgtagggtgtgtgcatgagtctgmgtgtggactcatgtgaggggcaagtaagtatgcacacaggcgagtgtgtgatgtgtgtggcatgtgggacctcgcagagttcagtgagtactgactggca

SEQ ID NO: 318692 - DNA, 201 bp, Homo sapiens
aggtcacctgcctggggacagagccccacatggccaactgccaggtgcaggtggctccagcccggggcaagctgcggccagcctgcccaggtggcatgcaygctgtggtcagctgtgtggcagggcctcacttccgcccaccgaagacaaagccacaacgcaaagggtcctgggcagaggtgagccctgggcatcctgcac

SEQ ID NO: 318693 - DNA, 201 bp, Homo sapiens
aggtccaggacacgcaggagagaggaaccagactgggaggaggagagtgaatcacagaactgtagaaccttggaatgtatttaaaagggatcatttatagmcctaccataaatggaaagctgacatcacccgccttgaatagaaggtgaccgtaaaaacagtaattaaatcctaactacattccactgagggctggtactg

SEQ ID NO: 318694 - DNA, 201 bp, Homo sapiens
tcctttgacatcttacaaggcagacttctagaactggtcagaccatcggcttcacccaataactacatcttctacatccctgtttgcacttaaggctgttwgattgtaaactcagtttccaatctgttctagaatctttcctgtcacctcaagccatgtcaggattttcaagtccattatttttcctttctctttcatata

SEQ ID NO: 318695 - DNA, 201 bp, Homo sapiens
gggccgcctggaggtgctgcaccagggccagtggggcaccgtgtgtgatgacaactttgctatccaggaggccacagtggcttgccgccagctgggcttcraagctgccttgacctgggcccacagtgccaagtacggccaaggggagggtgagtgactggtgccacctagtgggatggcaaggagatggtaacagtcttc

SEQ ID NO: 318696 - DNA, 201 bp, Homo sapiens; identical to SEQ ID NO: 66844

SEQ ID NO: 318697 - DNA, 201 bp, Homo sapiens
ataaaatgattggtgtctgtgcccatgccatgacttgatataaaggatgagctgggcagagtggatctatgtaagttgtcagggaagggatgagactggaraggttggctacttacctgttttcctttggcccacagggaattcatacccagccaatgcagaactctccctggagcaggaacagcgtctcaggaacaacct

SEQ ID NO: 318698 - DNA, 201 bp, Homo sapiens
ccccggggaggctacagggctgagaggaggctgctgagaagagctgcccaacggcagagaagggatgagccatcctaaagttgctgcaccctcaggacagyaccccccatgctctctcttgaatactcgggcatttgctgtcttcagccctccctacctgcgctaggtcaggccaggtcccagcatctcctggcacacctg

SEQ ID NO: 318699 - DNA, 201 bp, Homo sapiens
cctgtcctatctctgctgagctctccgagggcaagcattgcctgcttcctgtctgcacacccacagtccctaacccttaggaactgcatggtaaacactgratctttagaggtttggaaggatggataggcggatgcacaagtaaattagcacgggagcgttggaatctcccaaccacagttcctagttcaacagggattt

SEQ ID NO: 318700 - DNA, 201 bp, Homo sapiens
ggacgcgatagctgggtttggcaccagtgccacaggttagagcctgcccatgcattggcactagagggttaggaacaaaaagcagggtccagggagcagtktggcccttccctggccacaggcaagttttcctgggaggggtgtgcgctctccttgctggccttgcctgcaggaggcagtgaggacagcggcatccacctg

SEQ ID NO: 318701 - DNA, 201 bp, Homo sapiens
tgtgtcatggactgccccagggaattcgggttctcatcactgaagattttcaggcccaggctggacacaacccggtgggggtggtatgactgaggccacasctcagatgggagtcaggaggtgactccaaaggcacgctgactgggtgacgctggctgtcttcttaggaaacctggttctggtcggggacgccaagggccc

SEQ ID NO: 318702 - DNA, 201 bp, Homo sapiens
aattagctgggcgtggtggtgggcgcctgtaatcccagctacccaggaggatgaggcagagaattgcttaaacctgggaggcggaggttgcagtgagctgrgattgcagcactgcagtccagcctgggcgacagagagagactctgtctcgaaaaaaaaaaaaaaaagaaagaaagaaagaaaaaagaaagaaagagtcag

SEQ ID NO: 318703 - DNA, 201 bp, Homo sapiens
tgtccacatcctttaggaaatctctcactgcccagaggtgtttattttatcctggctgcttgtcattgtaacggatggtctggtgctgcttgccaagtacytctggcataggttgagaagatcataccaagaacacgctggtgtgccacatgtcttcttcagggtatcagatttgcagagatagcagaaagcaagaaaaag

SEQ ID NO: 318704 - DNA, 201 bp, Homo sapiens
tccctctatcttcaagggttaaaaatgcccatatttgctatgggatatgcattcactcatacttgcatatgtgcggtgggatggggcagagttgttcattyagtcaacaaacatttactaaggctcactattgtgttgaacgctgtgccccagaaactgggaatgtaagtgtcagatagggtatgcacacatgcaaatagc

SEQ ID NO: 318705 - DNA, 201 bp, Homo sapiens; identical to SEQ ID NO: 66846

SEQ ID NO: 318706 - DNA, 201 bp, Homo sapiens
gtgcataaatagagggccccagcctgaggcaaggcaggccagaggaccagagctgaccccactgggaatcgcagaagctgctcccataagggagacagcaytgggtaaggggctccctcatccatgaggcctggccacaattgctgcctcttcccagcacaaacaaccctgagctaaaaacagcccaagccaaacaacagg

SEQ ID NO: 318707 - DNA, 201 bp, Homo sapiens
catgcacgctgtggtcagctgtgtggcagggcctcacttccgcccaccgaagacaaagccacaacgcaaagggtcctgggcagaggtgagccctgggcatyctgcactcacaccacagcttggaggcacgggcgggacactgcctggtggggggtgcggggaggtccaggacacgcaggagagaggaaccagactgggagg

SEQ ID NO: 318708 - DNA, 201 bp, Homo sapiens
tggaggcacgggcgggacactgcctggtggggggtgcggggaggtccaggacacgcaggagagaggaaccagactgggaggaggagagtgaatcacagaaytgtagaaccttggaatgtatttaaaagggatcatttatagccctaccataaatggaaagctgacatcacccgccttgaatagaaggtgaccgtaaaaaca

SEQ ID NO: 318709 - DNA, 201 bp, Homo sapiens
tgttatgttcttcagcccctttgggatcaggctttctctctgccctgttcagcagcccaaggcacctggagaccctggcttgaaaagttagcattcaaggyaatttcttaccttctgaaatcttacgcaggaggtttttacttcctctgaattccccacgcattgttcttcttttaaaacactcagcactttccatcttgg

SEQ ID NO: 318710 - DNA, 201 bp, Homo sapiens
cagcaccctagagggaggaggcaaaggggtgtggcatgaagggcctctatcccatcccctaccctccccttccctcctttctaccttggcctcccttagtmctgaagctcttccctcagcccttcctccaccctcagtctcccttgtcctctaggctgaagagcctgacgaataagaactccttctggatccaccaggtca

SEQ ID NO: 318711 - DNA, 201 bp, Homo sapiens
ggctacctttctgaaactgtctccaatgcccttgggccccaggtgaggaggctgttcaggctctggtctgagccaagggctgggtcagagaacagagagcytcccagaagacgggcctagaggataagcgaggggaaagggtgcagtctgcactgagcatcgtccccaggccgccgactcctgagtgtgccctgcagcagg

SEQ ID NO: 318712 - DNA, 201 bp, Homo sapiens
ccatatgtggtggggatttctaacatcagaagggtccaaatgtgtcatggactgccccagggaattcgggttctcatcactgaagattttcaggcccaggmtggacacaacccggtgggggtggtatgactgaggccacacctcagatgggagtcaggaggtgactccaaaggcacgctgactgggtgacgctggctgtct

SEQ ID NO: 318713 - DNA, 201 bp, Homo sapiens
tgtgccctgcagcaggtgcataaatagagggccccagcctgaggcaaggcaggccagaggaccagagctgaccccactgggaatcgcagaagctgctcccrtaagggagacagcactgggtaaggggctccctcatccatgaggcctggccacaattgctgcctcttcccagcacaaacaaccctgagctaaaaacagccc

SEQ ID NO: 318714 - DNA, 201 bp, Homo sapiens
gaggagatgagcaagtgcttatgaggtggtagagacgcctcagtgccaaactgagatgccctcatgaggtggtacagatgccgtgaggtggtacagatgcytcagcgccacactgagatggcctcgtgaggtggtacagacaccttagtgccacactgagatggcctcgtgaggtggtacagataccttagtgccacactg

SEQ ID NO: 318715 - DNA, 201 bp, Homo sapiens
actgagatggcctcgtgaggtggtacagacaccttagtgccacactgagatggcctcgtgaggtggtacagataccttagtgccacactgagatagcctcrtgaggtggtacagacaccttagtgccacactgagatggccttgtgaggtggtacagatgccttagcgccacacttgagacggcatccttgatgaggctgt

SEQ ID NO: 318716 - DNA, 201 bp, Homo sapiens
cagggtatttttagttctgggcagccaggcctggtgagtgattggcagcaggcagagcccacgtttccgaaccctctgtgttgcttctggctcagcatgaraggtggctgggccctaggagagggcttaggcatacctggcacccaagcccacagctgcctcattgtccctgggggaggagctgggctgctgccactgacc

SEQ ID NO: 318717 - DNA, 201 bp, Homo sapiens
cccatccacctgagtgaggtgcgctgcaggggatatgagcggaccctcagcgactgccctgccctggaagggtcccagaatggttgccaacatgagaatgmtgctgctgtcaggtgcaatgtccctaacatgggctttcagaatcaggtgagtttgggtctgagcatggcctcaggctgggggccgggaaaccctggggag

SEQ ID NO: 318718 - DNA, 201 bp, Homo sapiens
tggggcctgtcttccctaccagcccctccagagaggaccctctcctgttgctgccgcactgacagctctaccccttctgcaggcattaccacagcattgargtcttcacccactacgacctcctcactctcaatggctccaaggtggctgaggggcacaaggccagcttctgtctggaggacacaaactgccccacaggta

SEQ ID NO: 318719 - DNA, 201 bp, Homo sapiens
gcaattcattactgagtgaaactatgagccgacatgatgctgagtgctgggaacagtgtggtaaacaagaagacatagtcctaatgaaatcgtcaatgagrgacacatttgcatctgcaggaaagatgaatagaaattagtcagacaaggtggaggaggaatgaacagcttatgcaaaagccctgtggccagagaaagctt

SEQ ID NO: 318720 - DNA, 201 bp, Homo sapiens
ctgcccttagacctgggcaagggtccctgctctggtcctcctgctacagagggcatcaccgtggcccttgtcaattacactccctccacgccccacccccygtcacagggcaaggaggaacttccactcgattttcaaacccatgctcttggaattctttgcccaggaggccagagcccacttctagaccttcctcttgag

SEQ ID NO: 318721 - DNA, 201 bp, Homo sapiens; identical to SEQ ID NO: 66841

SEQ ID NO: 318722 - DNA, 201 bp, Homo sapiens
agccgacatgatgctgagtgctgggaacagtgtggtaaacaagaagacatagtcctaatgaaatcgtcaatgagggacacatttgcatctgcaggaaagawgaatagaaattagtcagacaaggtggaggaggaatgaacagcttatgcaaaagccctgtggccagagaaagcttgattcagctgaggaaatcagggccag

SEQ ID NO: 318723 - DNA, 201 bp, Homo sapiens
gacaaggtggaggaggaatgaacagcttatgcaaaagccctgtggccagagaaagcttgattcagctgaggaaatcagggccagggattgtagtgtggctstctctcgagagtgctgtcaaacatgagggcagaggaggcaggggcaagatcactcaaagcttgcaatccacatgtttgaaagatttcttcctttgctgtt

SEQ ID NO: 318724 - DNA, 201 bp, Homo sapiens
gggtcctctcggagggtttaatctgggggcaagcttgccctctgtgctggagactaagactggctgcctttccaccctttgagtcactgccatgccctccrccgccccaggtgcaccagacctggtgatgaacgcccagctagtgcaggagacggcctacttggaggaccgcccgctcagccagctgtattgtgcccacga

SEQ ID NO: 318725 - DNA, 201 bp, Homo sapiens
acagtcaagctgggtccaatgaacctgtgtttgagtattgattcagtgaacactggataaatcagtttctcagttgggacttctcagtccctatctgtaawatgggaacatcagtacctacctcctgggtaattgttaagaattaatgaagcaaatagaaacacatgtaaggattatcacagccacagtcaactcattcag

SEQ ID NO: 318726 - DNA, 201 bp, Homo sapiens
gaagccaggtaaagtggggactcccaggaacctgggggcccaaaatagacatcccatccagggtgctggctctgcaggaaaagctcgctgattccttcagyagtaaggcaaggccctcaaagaacagcatgaacagactgccactaaaaaagtgacaatgaacattctttcctatcaggagcttccagaccagagagaggg

SEQ ID NO: 318727 - DNA, 201 bp, Homo sapiens
gaacagagatgcatttcctttgacatcttacaaggcagacttctagaactggtcagaccatcggcttcacccaataactacatcttctacatccctgtttrcacttaaggctgtttgattgtaaactcagtttccaatctgttctagaatctttcctgtcacctcaagccatgtcaggattttcaagtccattatttttcc

SEQ ID NO: 318728 - DNA, 201 bp, Homo sapiens
gcctgtcacttaaaggagctgtcctgttagggaagtaacagtcaagctgggtccaatgaacctgtgtttgagtattgattcagtgaacactggataaatcwgtttctcagttgggacttctcagtccctatctgtaaaatgggaacatcagtacctacctcctgggtaattgttaagaattaatgaagcaaatagaaacac

SEQ ID NO: 318729 - DNA, 201 bp, Homo sapiens
gtgacaatgaacattctttcctatcaggagcttccagaccagagagagggagagacaatgcctgtgacaaaggcagaattgttttttcttcttcagaacayagccacgggtggagaaagtggaaaggaatgggcaatgactttgggacttggtctcgcctgagataataagcacctttccctgtagcatgaacagagctgt

SEQ ID NO: 318730 - DNA, 201 bp, Homo sapiens
ccctcccctggcccctcgcttcctacaggatgaaggcaaaccctctgtgtagtacacatggcccttgatcattggccccagctcgtccctccatctctttmccctccaaacccccacactgtggtctgggggtaagagaagggcacttcctgctcttgcacaaactcacctctttccctctttcctaatcctcttctctgt

SEQ ID NO: 318731 - DNA, 201 bp, Homo sapiens
aacttgtctggtgttgcttaaggaaaaaggggttcaattactggcaagtgagaaggttggtgcagacttgcatgagctcccgaagggacctccggggctgygtggctgtggcactgagtcttcattccgcctcatttccccccagaacttatgactttaatttacctgaatagaagcacatccaggcgctgcgcctgtgtc

SEQ ID NO: 318732 - DNA, 201 bp, Homo sapiens
gtagagaaagagcacaggactgggctttggaaggcgtcacccgaatccagtcccaccactttctagctggaggacagtgaggaaatcacgacctgagtttyctgttttgtaaaatggggctgtatacttcaaacttactaagtactagagctttttgcagggagggttgtgatagttctaagataatggattttatcccgt

SEQ ID NO: 318733 - DNA, 201 bp, Homo sapiens
catcagattaatatcaccattatcttcatcttacagatgatgaaaatgagagacaaaatggttaagcagttatagagctagtgaattatacagtcagaaartaagccaagaatgaacccaggtggcctggctccaaaaccagcaagcctaaccatgacactgtagctgcctcccaggttaaggtgatagacttcctttaaa

SEQ ID NO: 318734 - DNA, 201 bp, Homo sapiens
tgttttgggcccagctggggtggggcaggggcactggggggacatcttggacacgggcagccaggagtggatggcaggtccctggcagcagggtcattaakacctggctgtcacccaggatcgaaaaggtccatcttgacatcctagctctatcacactctgcctgtccaggcttattcttacttgcacatctgcctcccc

SEQ ID NO: 318735 - DNA, 201 bp, Homo sapiens
aacagtctaaggtttcgaatttgtgtggctgagtagattgtgctgccacttaaatgaaacagggatattgagaggaaccaggaactggaatccaaggctaygcacacggagacagcagatcctccataatgctggaatcaggctgcaagggttcccaggcagtgacaagggcaagaaaaataatgcagtcctgcaggtcct

SEQ ID NO: 318736 - DNA, 201 bp, Homo sapiens
tgacagtacaggcaaagtatccaggttaggtatcagcagagctttttgagaggattatatgaactaagctacataaaggcactttacaggcttaaaagcawtttacaaaataaatactagcttcaactgcatgtttacttaggccagacatgttacaggtgtcatcagattaatatcaccattatcttcatcttacagatg

SEQ ID NO: 318737 - DNA, 201 bp, Homo sapiens
caagaagacatagtcctaatgaaatcgtcaatgagggacacatttgcatctgcaggaaagatgaatagaaattagtcagacaaggtggaggaggaatgaayagcttatgcaaaagccctgtggccagagaaagcttgattcagctgaggaaatcagggccagggattgtagtgtggctctctctcgagagtgctgtcaaac

SEQ ID NO: 318738 - DNA, 201 bp, Homo sapiens
tcgaaccccagcagtctgaccgcccagcctgtgctctcaagcactgtgctgccacctcccatccatgcaaccacagatatgaatgagtgccacctacacayctgacactattttgggaactggggacacaacacatccccactcccatggagcttcattcccagaacttgtttagtgcacttttaggagcccactccaccc

SEQ ID NO: 318739 - DNA, 201 bp, Homo sapiens
ggcagatgccatccatggaagtgagagtggcaggggcctgtgagagcctccccactcaagcggatgagctgcatgattccccaagaggagccatggccgtgggaagaggcaggtctcatcagaacgagctttcttagcccatcttctccatcccctgttccaggtcggccttagcttccatcggcagcagagccttggggt

SEQ ID NO: 318740 - DNA, 201 bp, Homo sapiens
tgaatgcaaaagtgtcttgatatcacaatgtctagcacagagttattggaggctatcctgcctagcgcgttacaatttacaaagctgcctctctgaagctsgatttaggatctgccttaaactccgcggcggggcccttgacagcagtggggactggagcaagatcagagccgctcgcgttgatggtcactgttgcttcgg

SEQ ID NO: 318741 - DNA, 201 bp, Homo sapiens
gctgaggcaggagaatggcgagaacctgggaggcagagcttgcagtaagctgagatcgtgccactgaactccagcctgggagacagcaagactccgtctcaaaaaaaaaaaaaaaaaaattagctgggcgtggtggcgagcacctgtagtcccagctactcaggaagctaaggcaggagaattgcttgaacccgggaggcg

SEQ ID NO: 318742 - DNA, 201 bp, Homo sapiens
cctcaggaagtctctcctctaacagtccgcattaaaggggacaccaggtatttgaaagccaggaagaaatgcctgggattggaggagccaaggtcacatcmcacctgtacaatttctctcaaggctcaagaatttagggcaggcacagtggctcatgcctgtaatcccaacactttgtaatcccagctactggggaggctg

SEQ ID NO: 318743 - DNA, 201 bp, Homo sapiens
gaaggagggtgagaaggacccctggggagtatccatgatgaacacttcatttgctggaggacaaatacatcaggatatatagccaactttatggatcttcmttttcaactccaggatttaattccatatagtgcctgccattcctttattccattttaggattaaataaaggaatttgaaaatgctattgttaattcaacc

SEQ ID NO: 318744 - DNA, 201 bp, Homo sapiens
gccaaggcgggcggatcacgaggtcaggagattgagaccatcctggctaacacggtgaaactccatctctactaaaaaatacaaaaagttagtggggcgtsgtggtgggcacctgtagtcccagctactcgggaggctgaggcaggagaatggcatgaacccgggaggcagagcttgcagtcagccgagatcatgccactg

SEQ ID NO: 318745 - DNA, 201 bp, Homo sapiens; identical to SEQ ID NO: 66864

SEQ ID NO: 318746 - DNA, 201 bp, Homo sapiens
aggtgcccgccaccacacccggctaatttttgtatttttagtagagatggggttttaccatgttggccaagctggtctcgaactcctgacctcgtgatccrcccacctcggcctcacaaagttctgggattacaggcatgagctaccacgcccggcctattttttgttttttaattttacatttttgacatgaggtcttgc

SEQ ID NO: 318747 - DNA, 201 bp, Homo sapiens
tagtactttgtccgtaaataaccctcaaactggagaaatgttcccttctttcagcaatcttatactgttccttctggaacaaggtagaatgccactctttkgaagtttcacgtagccttgagaaaaagtaaataaatacaaggcagtactttccctgagtccctgtgtagtcaatatgactcctcaaatcccactgcaata

SEQ ID NO: 318748 - DNA, 201 bp, Homo sapiens
ggacatatcaaggccaaagatatgtctcatctttgagacattaatgccattgtcactcccatattttctctgccctcctcaaaggcctgctgactttcccygatggttctcatggaatcccccgcaatgaaggtctctttgagaacaacaagctgctgcgacgtgagaagtgttctgccattgttcagcgggcccagagcg

SEQ ID NO: 318749 - DNA, 201 bp, Homo sapiens
gtcacctgaccaacatggtgaaaccccatctctactgaaaatacaaaattagccaggcgtggtggcgcatgcctgtaatcccagctacttgggaggctgargcggaggttggagtgagcaaagatcgcgccattgcactccagcctggggaagaataacagtgaaactccgtctcaaaaacaaaacaaaacaaaaaacact

SEQ ID NO: 318750 - DNA, 201 bp, Homo sapiens
gcttctcttgttttctttgtgggtagggtgatggcaggtaagggatgctacaagagtaagaagggaccctgaagctgcctccttccaacctgacacctatycttctctttgttcaggccgcaggcatggttttggtcaactgatgtttgcagatggtggcacctacctgggtcattttgagaatgggctctttaatggctt

SEQ ID NO: 318751 - DNA, 201 bp, Homo sapiens
cacctcagcctcccaagtagctgggactacaggaacgcaccaccacacccggctaatttttggattttttgtaattttggtacagatggggtttcaccatrttgcccaggctggtctcaaactcctgagctcaagtggtccgcaagcctcagcctcccaaagtgctgggattgtaggtttgagccaccgtgcagttccctt

SEQ ID NO: 318752 - DNA, 201 bp, Homo sapiens; identical to SEQ ID NO: 66866

SEQ ID NO: 318753 - DNA, 201 bp, Homo sapiens
gactttccaccccactcccattcacatcctatcttctttccttgagatcagggcttcatgtcatatatactctctgctccttgggaataggtggggtaggyggagctatgtgactggtagaatcggcttgctccttagcatcattaaataacagagatcagcagctgctcgactccgttcatctggacagctaactttcca

SEQ ID NO: 318754 - DNA, 201 bp, Homo sapiens; identical to SEQ ID NO: 66859

SEQ ID NO: 318755 - DNA, 201 bp, Homo sapiens
atattttctctgccctcctcaaaggcctgctgactttccctgatggttctcatggaatcccccgcaatgaaggtctctttgagaacaacaagctgctgcgrcgtgagaagtgttctgccattgttcagcgggcccagagcgcctccaagtcagccagaaatctcactgcctgacagcgcagtgggcaccagctgataagta

SEQ ID NO: 318756 - DNA, 201 bp, Homo sapiens
gtaaggatctaatgatgtgcttattaaaactgcaggttcccaggctctgactacagaatctgattcagtaagtctgagtttgggcctaggaatctgcattrtcaaaattactggagaaaacattgtattgcttagatctggaaaagatgaggaggtagctagatgtggtagtgtgcgcctgtagtcccagctactcaggag

SEQ ID NO: 318757 - DNA, 201 bp, Homo sapiens
tcctttcctcccgccattccatgacactggttctcctttgcttatttcctacagtttcatccttttatcctgtaatctgtcaccatgaccctgacaaaagkttccttcacctactccagtggggaggaatatcgtggcgagtggaaggagggtgagaaggacccctggggagtatccatgatgaacacttcatttgctgga

SEQ ID NO: 318758 - DNA, 201 bp, Homo sapiens
ctcccgttaccctggtacccaaatacgtcccccacctctagctccctagcctcacattgaatgtctcttcaacagcagattgtggtggaagttatagccgygtgcctctatttattctctgaattgtactgtagaaaaaggtgtttataaagaataaagaaatcaccagaactgcctatacctagttttcctgactttctg

SEQ ID NO: 318759 - DNA, 201 bp, Homo sapiens
tcttagccttaaataagggagggtctgacagaaaaatgggactctggtaaatatctggtcaatcctgaccttgtctcactccctgcagaacacagatgagkaataagtagttcttttattagctattttttaagtggacctaaaatttgaaatgtcaaccaagtgagtgactttccaccccactcccattcacatcctatc

SEQ ID NO: 318760 - DNA, 201 bp, Homo sapiens; identical to SEQ ID NO: 66863

SEQ ID NO: 318761 - DNA, 201 bp, Homo sapiens
cttgaacccgggaggcagagattgcagtgagctgagatcataccattgcactctagcccgggcgacagagcaagactccatctcaaaaaaaaaaaaaaaaatcaaatcacatctctggcactgacttagtgtgggatgattgctgtccctatcggacacatgggagtgataatgctcatattatgggatggttggacaaaa

SEQ ID NO: 318762 - DNA, 201 bp, Homo sapiens
cagtctctcgagtagctgggactacaggcgcccgccaccacgcctggctaattttttccatttttagtagagacggggtttcactgtgttagccaggatgktctccatctcctgacttcgtgatccgccagcctcggcctcccaaagtgctgagattacaggtgggagccaccgtgcccagccagaaaatccctgtactat

SEQ ID NO: 318763 - DNA, 201 bp, Homo sapiens
ataatcccagcactttgggaggccgaggtgggtggatcacgaggtcaggagttcaagacctgcctggtcgagatggtgaaaccccgtctctactaaaaatmcaaaaaaaaaaaaaaaaaaaaaaattagctgcgggtagtggcaggtgcctgtaatcccagctcctcaggaagctgaggcaggagaatcgcttgaactcgg

SEQ ID NO: 318764 - DNA, 201 bp, Homo sapiens
agccattctgatagatgtatagtacagatgtatggtacaaattaaaaccgtctcattgtggttttaatttgcatttctctgatggctaatgctattgaacrtttttttcatgtatttatttgctatctgtatatccttttcagtcaactatctatatttcttacgcattttgaaattggattgttcttttgactgttgaat

SEQ ID NO: 318765 - DNA, 201 bp, Homo sapiens
ggctgcagtgagctgtgattttgccactgcactccagcctgggctacagagtgagatcctgtctcaaaaaaaaaaaacaaaaaaccaaaacaaacaaaaamcaaacccgaaacaaacaaacaaaaacccagaaacaaacctgctaaacctttccagagcagctgtactattttaaatttacactgatgtaaacgtatgagt

SEQ ID NO: 318766 - DNA, 201 bp, Homo sapiens
ttctaacaggccctgctttgcaggtgacccggcgctttgggatcccagggctgaagaaaatcatggactggtttggctactatggaggcccctgccgcgcmcccttgcaggagctgagccccgctgaggaggaggcactgcgcatggatttcaccagcaacggctggctctgagggcaggcagggtccatggctggcctga

SEQ ID NO: 318767 - DNA, 201 bp, Homo sapiens
agtaggtattccacaaacaacagctctattagctcattctgaattgcctactctctctacggttttgaggccactgtgcctagggttccactcctatctarccttagaagcatacttacaggcttgcagaagtggcgggggtttctgagatcacagccaaacccattttcattgccccgatgggcacaaagaggactagag

SEQ ID NO: 318768 - DNA, 201 bp, Homo sapiens
gctgtagcgcgcctgggacacatagtaggtattccacaaacaacagctctattagctcattctgaattgcctactctctctacggttttgaggccactgtrcctagggttccactcctatctagccttagaagcatacttacaggcttgcagaagtggcgggggtttctgagatcacagccaaacccattttcattgcccc

SEQ ID NO: 318769 - DNA, 201 bp, Homo sapiens
tttgcatgcaaggtaagggcctcatgggcctggctgcagtcccaggctgagctaggcactccacaatattttgtttgggtaaagtgatgggtgggctctaragctccctcacagctgtatccttacctcaaaggggcagattaacttagatttacagaaacgacagctgaggaggtaaatctgagtccctctggaggtgaa

SEQ ID NO: 318770 - DNA, 201 bp, Homo sapiens
ccaggctggtcttgaactcctgaccttgtggttcgcccgcctcggcgtcccaaagtgctgggatcacaagtgtgaaccattgtgcctggcctaattttaawttttttttagtagagacagggtttcaccatgttggccaggctggtctcgaactcctggcctcaaatagtccacccgtcttggcctcccaaagtgctggga

SEQ ID NO: 318771 - DNA, 201 bp, Homo sapiens
gtcctggggaggacaccgcgagggggcggagggggagcccgggaggcttcggattgctgggacggcccgtgactgctgcgtccacatctgcagactggccytgtggatgaggagaccttcctgaaagctgcggtggaggggaaaatgaaggtcattgagaagttcctggctgacggggggtcagccgacacgtgcgaccag

SEQ ID NO: 318772 - DNA, 201 bp, Homo sapiens
tgatttatttcttcagcattttgtagtttccagccaacaagtcctgtacatatttttaaaaactaacacctaaggatctggtgcagagtggctcacgcctrtaatcttagcatttttggagatagagacggcagtattgcttgaggccaggagtttgagacccacctgggcaacatggccagaccccatctcttaaaaaaa

SEQ ID NO: 318773 - DNA, 201 bp, Homo sapiens
cttttttttttttttttttgagacggagtcttgctctgtggcccaggctggagtgcagtggtgcgatctcggctcattgcaagcttcacctcccgggttcrtgccattctcctgcctcagtctctcgagtagctgggactacaggcgcccgccaccacgcctggctaattttttccatttttagtagagacggggtttcac

SEQ ID NO: 318774 - DNA, 201 bp, Homo sapiens
aacatggtacatttctctgtttatttagatcttctttgatttatttcttcagcattttgtagtttccagccaacaagtcctgtacatatttttaaaaactracacctaaggatctggtgcagagtggctcacgcctgtaatcttagcatttttggagatagagacggcagtattgcttgaggccaggagtttgagacccac

SEQ ID NO: 318775 - DNA, 201 bp, Homo sapiens
tgcaagctctgccttccaggttcacgccattttcctgcctcagcctcctgagtagctgggactacaggctcccaccaccatgcacggctaattttttttttgtgtgtgtgtatttttagtagagatggggtttcaccgtgttagccaggatggtctcaatctcctgacctcgtgatcgtccgcctcggcctcccaaagtgt

SEQ ID NO: 318776 - DNA, 201 bp, Homo sapiens; identical to SEQ ID NO: 66874

SEQ ID NO: 318777 - DNA, 201 bp, Homo sapiens
ctgcaagctctgccttccaggttcacgccattttcctgcctcagcctcctgagtagctgggactacaggctcccaccaccatgcacggctaattttttttktgtgtgtgtgtatttttagtagagatggggtttcaccgtgttagccaggatggtctcaatctcctgacctcgtgatcgtccgcctcggcctcccaaagtg

SEQ ID NO: 318778 - DNA, 201 bp, Homo sapiens
tttatacaacaaaacttccttgggaaatgatgctttgcttttcctgggagaccatttagtgttagggtcaggaggagctatggggaggtgagggcagccasatgcaaggggagtagaggtctgggctgtgcctgagactctcacagatccttccccttcctgacttcccaggtctggtgtgacctgcgtcaggtttcaggg

SEQ ID NO: 318779 - DNA, 201 bp, Homo sapiens
tactgcaagctctgccttccaggttcacgccattttcctgcctcagcctcctgagtagctgggactacaggctcccaccaccatgcacggctaattttttktttgtgtgtgtgtatttttagtagagatggggtttcaccgtgttagccaggatggtctcaatctcctgacctcgtgatcgtccgcctcggcctcccaaag

SEQ ID NO: 318780 - DNA, 201 bp, Homo sapiens
gagtgtgagccagaatgccctgggccctgggggtgggtggatgtgcaggatccaggctcctaggccctagcttgggtcctgtctccttgttctgcctcttytgggacatgctgaggcaccttcgcttggcccagtgtcctggtccaggcctccttctgcctgctctcacctctctccttcctctggcagccactcaagcca

SEQ ID NO: 318781 - DNA, 201 bp, Homo sapiens
cagaaagtcaggaaaactaggtataggcagttctggtgatttctttattctttataaacacctttttctacagtacaattcagagaataaatagaggcacrcggctataacttccaccacaatctgctgttgaagagacattcaatgtgaggctagggagctagaggtgggggacgtatttgggtaccagggtaacgggag

SEQ ID NO: 318782 - DNA, 201 bp, Homo sapiens
tcccagtgtgggaactccttgtgactcccagaaaatcctgacttcggacaaagtcgagcaccactgattgtcaaacttaagtgtgcattaaaatttccttrggggcgaattaaagttccaacttttgggcccaagaagatgcattgaaacaaacatcctgtgtgattgtgacagagtaaccctaggaccacacttagagat

SEQ ID NO: 318783 - DNA, 201 bp, Homo sapiens; identical to SEQ ID NO: 66870

SEQ ID NO: 318784 - DNA, 201 bp, Homo sapiens
gaggtgggtggatcacgaggtcaggagttcaagacctgcctggtcgagatggtgaaaccccgtctctactaaaaatacaaaaaaaaaaaaaaaaaaaaaaattagctgcgggtagtggcaggtgcctgtaatcccagctcctcaggaagctgaggcaggagaatcgcttgaactcggagggcagaggttgcagtgagccga

SEQ ID NO: 318785 - DNA, 201 bp, Homo sapiens
catccccattccttactgcacaatcccctgaggcagtgctctctgtaggaccatcccacagatgggaatctgggcctcagagtgacatggtcactgcccarggtcattcggctaacacatagctgagctgaggtttgcacctcgtctgactgcatggcccatgctccattttactccctcgctgactctcattataaaccc

SEQ ID NO: 318786 - DNA, 201 bp, Homo sapiens
gaaaatccctgtacttttttttttttttttttgagacggagtcttgctctgtggcccaggctggagtgcagtggtgcgatctcggctcattgcaagcttcrcctcccgggttcatgccattctcctgcctcagtctctcgagtagctgggactacaggcgcccgccaccacgcctggctaattttttccatttttagtaga

SEQ ID NO: 318787 - DNA, 201 bp, Homo sapiens
gcctcgaggtggtgagccgtgtgcgccaggccatgcccaagaacaggctcctgctagctggctccggatgcgagtgtgagccagaatgccctgggccctgsgggtgggtggatgtgcaggatccaggctcctaggccctagcttgggtcctgtctccttgttctgcctcttctgggacatgctgaggcaccttcgcttggc

SEQ ID NO: 318788 - DNA, 201 bp, Homo sapiens
cgctctgggcccgctgaacaatggcagaacacttctcacgtcgcagcagcttgttgttctcaaagagaccttcattgcgggggattccatgagaaccatcrgggaaagtcagcaggcctttgaggagggcagagaaaatatgggagtgacaatggcattaatgtctcaaagatgagacatatctttggccttgatatgtcc

SEQ ID NO: 318789 - DNA, 201 bp, Homo sapiens
aagccattaaagagcccattctcaaaatgacccaggtaggtgccaccatctgcaaacatcagttgaccaaaaccatgcctgcggcctgaacaaagagaagrataggtgtcaggttggaaggaggcagcttcagggtcccttcttactcttgtagcatcccttacctgccatcaccctacccacaaagaaaacaagagaagc

SEQ ID NO: 318790 - DNA, 201 bp, Homo sapiens
aagtggagtagattaaaaataaaaaaaaaagcacaggctctggaggctggggggaatctcagctctgcagtttattcactgagtaatgctgggcaaagcaytcacctctctgggcctgagtttctactctgtgtacagagggatcatgaggattagagagcatcagggccatgctgctgtagcgcgcctgggacacatagt

SEQ ID NO: 318791 - DNA, 201 bp, Homo sapiens
gagggcagctctgagatctgtttccaaccttggcttctgtgtggattctctctgtcgtgcgggctctctgggactttcttgagggcatctctttgagcacygggctttcattccaccacacttacccggccctcatccaggatgaggctctgggcacagctctcacaccacatttgctgttgcaggtgaccaggattgggc

SEQ ID NO: 318792 - DNA, 201 bp, Homo sapiens
ggagggaggcctgtccaggtggccctgtagtgaagcaggctgggacctgtgggtgggcaagtctctggctcttgggacctggggcggctgccctctcctgyttttctctgcgcccccctccccaggttgctgatctctctccaatccctgtggtgctgtacagtgtcccagccaacacagggctggacctgcctgtggatg

SEQ ID NO: 318793 - DNA, 201 bp, Homo sapiens
ttctgtctgcaaagatgggaaggaaatgtgtgaaagattatggtgtcgtaaggtaggaacaccaatgtcctagttgttcggtagaggatgggaaggagttrgtcagctgtgtctcttgcaggcttcgtggtccagggctccaatggcgagtttcctttcctgaccagcagtgagcgcctcgaggtggtgagccgtgtgcgc

SEQ ID NO: 318794 - DNA, 201 bp, Homo sapiens
gtgaaactccatctctacaaaaaaaactacacaaattagttgggcatggtagctcatgcctgtaatcctagctggctaagacaggaggatcacttgaaccyggggggctaaggctgccgtgagccgtgattgtgacactgcactccagcctgggtgacagagtgagaccctcaaagaaaaagtaaatacataaaaaatgtg

SEQ ID NO: 318795 - DNA, 201 bp, Homo sapiens
ctcctgagtagctgggactacaggcgcacactaccacatctagctacctcctcatcttttccagatctaagcaatacaatgttttctccagtaattttgayaatgcagattcctaggcccaaactcagacttactgaatcagattctgtagtcagagcctgggaacctgcagttttaataagcacatcattagatccttac

SEQ ID NO: 318796 - DNA, 201 bp, Homo sapiens
cctctcctccttttctgggtcctagcacttttgctcctgagggcagctctgagatctgtttccaaccttggcttctgtgtggattctctctgtcgtgcggrctctctgggactttcttgagggcatctctttgagcactgggctttcattccaccacacttacccggccctcatccaggatgaggctctgggcacagctct

SEQ ID NO: 318797 - DNA, 201 bp, Homo sapiens
gataggatgtgaatgggagtggggtggaaagtcactcacttggttgacatttcaaattttaggtccacttaaaaaatagctaataaaagaactacttattmctcatctgtgttctgcagggagtgagacaaggtcaggattgaccagatatttaccagagtcccatttttctgtcagaccctcccttatttaaggctaaga

SEQ ID NO: 318798 - DNA, 201 bp, Homo sapiens
agcatgggagggaggcctgtccaggtggccctgtagtgaagcaggctgggacctgtgggtgggcaagtctctggctcttgggacctggggcggctgccctytcctgcttttctctgcgcccccctccccaggttgctgatctctctccaatccctgtggtgctgtacagtgtcccagccaacacagggctggacctgcctg

SEQ ID NO: 318799 - DNA, 201 bp, Homo sapiens
ctgggattacaggtgcctgccaccacgcctggctaatttttgtatttttagtagagatggggtttcaccatgttggccaagctggtcttgaactcctgacmtcacggtccgccggcctcggcctcccaaagtgctgggattacaggcgtgagccaccgcgctgggcctcttatttatttatttatttttaagatggggtct

SEQ ID NO: 318800 - DNA, 201 bp, Homo sapiens
aatgtccccaggctgaagaggtgctgggaccagggcttgggatgcctggaggggagaggctctggctgatgttctgcgtcttacttcgtgcaggagctgtkgggggcgtctgcgccctggccaatgtcctgggggctcaggtgtgccagctggagcgactgtgctgcacggggcaatgggaagatgcccagaaactgcagc

SEQ ID NO: 318801 - DNA, 201 bp, Homo sapiens
tcggctggctttctgatggccagctatgccttgggtaggccgcccactgctctcaaattgtcatgggtgaccaagagatacccaggtacctgggtcttccrggagagatcgtgagggctggggctgggtctgcagatggtagtttgccagcctgcccactctgaaaactcagaaacctggccacgccgcttacctgtctga

SEQ ID NO: 318802 - DNA, 201 bp, Homo sapiens
gggggcacctagggagggtgcagcagggggcctgcctgtcagacatccttggggagcctgccctttcaagcatgaatcataccaccagagatcacccagcktgctcttagctctgcctgcctggtgtagggtcctggagaccttcttggagctcatccagcagccatcatgcaaggtggtgctggggactgccctcttgct

SEQ ID NO: 318803 - DNA, 201 bp, Homo sapiens
tggaaagttagctgtccagatgaacggagtcgagcagctgctgatctctgttatttaatgatgctaaggagcaagccgattctaccagtcacatagctccrcctaccccacctattcccaaggagcagagagtatatatgacatgaagccctgatctcaaggaaagaagataggatgtgaatgggagtggggtggaaagtc

SEQ ID NO: 318804 - DNA, 201 bp, Homo sapiens
tccagcaaatgaagtgttcatcatggatactccccaggggtccttctcaccctccttccactcgccacgatattcctccccactggagtaggtgaaggaamcttttgtcagggtcatggtgacagattacaggataaaaggatgaaactgtaggaaataagcaaaggagaaccagtgtcatggaatggcgggaggaaagga

SEQ ID NO: 318805 - DNA, 201 bp, Homo sapiens
gcccaacactcaggctgaggagggaacgtatcacattgtaagggcctcctgcagccagttaaaggtcctctgaagaggagatgagggccaggcacagtggmttactcctgtaatcccagcactttgggaggccaaggcaggaggatctcttgagaccaggagttggagaccagcctggccaacatagtgagaccctgtctc

SEQ ID NO: 318806 - DNA, 201 bp, Homo sapiens
tgttctgcgtcttacttcgtgcaggagctgtggggggcgtctgcgccctggccaatgtcctgggggctcaggtgtgccagctggagcgactgtgctgcacrgggcaatgggaagatgcccagaaactgcagcaccgcctcattgagccaaacgctgcggtgagccagtggcagcgggggcgcggcctggcggggggtgggc

SEQ ID NO: 318807 - DNA, 201 bp, Homo sapiens
ctgaagtttttgtattttgctattacagacctgctctctggtctctaaatctggattcccaatgtaccctgggtgccatagagttggcagttactttcctkggggaagagggtaggacttcaatgttctgaaagtgacagatctccgagttccagatatgggtgttcagcaaatttctcagtctcttctaacaggccctgc

SEQ ID NO: 318808 - DNA, 201 bp, Homo sapiens
ttcttccccaatctgaagtttttgtattttgctattacagacctgctctctggtctctaaatctggattcccaatgtaccctgggtgccatagagttggcrgttactttcctgggggaagagggtaggacttcaatgttctgaaagtgacagatctccgagttccagatatgggtgttcagcaaatttctcagtctcttct

SEQ ID NO: 318809 - DNA, 201 bp, Homo sapiens
catcccagtgtgggaactccttgtgactcccagaaaatcctgacttcggacaaagtcgagcaccactgattgtcaaacttaagtgtgcattaaaatttccytgggggcgaattaaagttccaacttttgggcccaagaagatgcattgaaacaaacatcctgtgtgattgtgacagagtaaccctaggaccacacttagag

SEQ ID NO: 318810 - DNA, 201 bp, Homo sapiens
tcagggtccttgggtttggattagatttgagccctggagggaagggagaagaagggaagctgttcccttcagctgaagccccagtgagtagagatttgagkgacttttccagcactgcaggggagaatgcttgttcctattccatctggtccctccagactttggctggttgtctaggcctttgtacatctcccctgccat

SEQ ID NO: 318811 - DNA, 201 bp, Homo sapiens
cagcctccccagtagctgggattacaaagtgttgggattacaggcatgagccactgtgcctgccctaaattcttgagccttgagagaaattgtacaggtgkgatgtgaccttggctcctccaatcccaggcatttcttcctggctttcaaatacctggtgtcccctttaatgcggactgttagaggagagacttcctgagg

SEQ ID NO: 318812 - DNA, 201 bp, Homo sapiens
tcccccagaagcaatcccacaggagcgagaagctgtgtgcctccagacgttccctgcaatgttaccaatgcaaaataactaccaaaaaaaaaaaaaaaaaagcagctaaatatccaatgagagatatcctgatatcctggcaactcactctggaatctgacggtgtagtgaacagcatggaaaaagttggtggaatgaagt

SEQ ID NO: 318813 - DNA, 201 bp, Homo sapiens
tttttagtagagatagcgtttcaccacgttggccaggctggtctcgaactcctgacctcaagtgattggcctgccttggcctcccaaagtgctggaattayaggcatgagccactgcgcctggtcttttttttttttttttttttttttgagacagagtctcactctgtcacccaggctaccgatcagtggtgcgatctgg

SEQ ID NO: 318814 - DNA, 201 bp, Homo sapiens
aaaaattagctgggtgtggtggcaggcacctgtaatctcagctactcgggaggctgagacagaagaattgcttgaacctgggaggtggaggttgcagtgagccgagaccatgccactgccctccagcctgggtaacagagccagactctgtctcaaaaaaaacataaaaaagaaaaaaataaataaagttcatcacaaaaa

SEQ ID NO: 318815 - DNA, 201 bp, Homo sapiens
ggttgaattaacaatagcattttcaaattcctttatttaatcctaaaatggaataaaggaatggcaggcactatatggaattaaatcctggagttgaaaakgaagatccataaagttggctatatatcctgatgtatttgtcctccagcaaatgaagtgttcatcatggatactccccaggggtccttctcaccctccttc

SEQ ID NO: 318816 - DNA, 201 bp, Homo sapiens
cagtggcatgatctcggctgactgcaagctctgcctcccgggttcatgccattctcctgcctcagcctcccgagtagctgggactacaggtgcccaccacsacgccccactaactttttgtattttttagtagagatggagtttcaccgtgttagccaggatggtctcaatctcctgacctcgtgatccgcccgccttggc

SEQ ID NO: 318817 - DNA, 201 bp, Homo sapiens
gcaagacctcatgtcaaaaatgtaaaattaaaaaacaaaaaataggccgggcgtggtagctcatgcctgtaatcccagaactttgtgaggccgaggtgggyggatcacgaggtcaggagttcgagaccagcttggccaacatggtaaaaccccatctctactaaaaatacaaaaattagccgggtgtggtggcgggcacct

SEQ ID NO: 318818 - DNA, 201 bp, Homo sapiens
caggagaatcacttgaacccaggaggcagagattgcaatgagctgagatcaggacactgcactccagcctgggtgacagagcaagactgtctcaaaaaaawaaataaataaaaataaatgaataaattataacaatagctttaggtcccccattatcagggaaaagcctttagagatcatgttgtccagccccttcctttt

SEQ ID NO: 318819 - DNA, 201 bp, Homo sapiens
agtgttttttgttttgttttgtttttgagacggagtttcactgttattcttccccaggctggagtgcaatggcgcgatctttgctcactccaacctccgcytcagcctcccaagtagctgggattacaggcatgcgccaccacgcctggctaattttgtattttcagtagagatggggtttcaccatgttggtcaggtgac

SEQ ID NO: 318820 - DNA, 201 bp, Homo sapiens
gggtctttcccacctactcaggctttgggtaaaaaggccaggctattagaacatcatgggggtggcgaggcctgcaggagggtggcttaccacccattccragaaaaaaaatccatgcttgataaagcctccgggactctagtggtaaagttattagtcaatctttcatcagtggttcctggcctttttatcccaaacaac

SEQ ID NO: 318821 - DNA, 201 bp, Homo sapiens
aagggaactgcacggtggctcaaacctacaatcccagcactttgggaggctgaggcttgcggaccacttgagctcaggagtttgagaccagcctgggcaayatggtgaaaccccatctgtaccaaaattacaaaaaatccaaaaattagccgggtgtggtggtgcgttcctgtagtcccagctacttgggaggctgaggtg

SEQ ID NO: 318822 - DNA, 201 bp, Homo sapiens
aaatcactcgaactcaggaggcggaagttgcagtgagccgagatcgtaccactgcactccagcctgggcgacagagtgggactgtttcaaaaaaaaaaaaattgcattgaaatattacttattttgatgattgagatttttggcctccccttaagttttgcatgcaaggtaagggcctcatgggcctggctgcagtcccag

SEQ ID NO: 318823 - DNA, 201 bp, Homo sapiens
agggcaaaacaggcatgcttggcagaggaaaccacctgtagagaggcatggcttgatgtgcctggggggcagtgagaaggtcgggttccctggggcagagrgctcccaggctggtctggatagagcataagggagctggcagaacacagaaaacatgggggccaagcacaggggtgagaatcaagctggggggaaggcctg

SEQ ID NO: 318824 - DNA, 201 bp, Homo sapiens
agagttcttagaagatcgtaaagattttctcttatttttttcttttaagttttatagctttatgttttataagtctgtgactcattttgagttaatttttrtataaagtgtaagacttaggtcaaggttttgtgttttttttccctaatggatattcacttgctgtagcatcttttgctgaaaaggccatctttcctccat

SEQ ID NO: 318825 - DNA, 201 bp, Homo sapiens
tacttatcagctggtgcccactgcgctgtcaggcagtgagatttctggctgacttggaggcgctctgggcccgctgaacaatggcagaacacttctcacgycgcagcagcttgttgttctcaaagagaccttcattgcgggggattccatgagaaccatcagggaaagtcagcaggcctttgaggagggcagagaaaatat

SEQ ID NO: 318826 - DNA, 201 bp, Homo sapiens
cgtgctatcgggggccaggtcctgaaaaaataggaatgactggggctggcaaaggagttagaaggcaggagagtgttgtcttcaaataatcggttctgtgstcagactgtataccccaattctttgttgggcaagcaaaggagaacttcagagagaacgcccatcaagttcagggtcattctgaagtctgaggcaacagaa

SEQ ID NO: 318827 - DNA, 201 bp, Homo sapiens
ccaagaagatgcattgaaacaaacatcctgtgtgattgtgacagagtaaccctaggaccacacttagagatgcctggagagaaagagtgtaaaccaggggmctctaaatccgtgctatcgggggccaggtcctgaaaaaataggaatgactggggctggcaaaggagttagaaggcaggagagtgttgtcttcaaataatc

SEQ ID NO: 318828 - DNA, 201 bp, Homo sapiens; identical to SEQ ID NO: 66872

SEQ ID NO: 318829 - DNA, 201 bp, Homo sapiens; identical to SEQ ID NO: 66873

SEQ ID NO: 318830 - DNA, 201 bp, Homo sapiens
cagttcaccctttagagacactgcacacatcccagccagctggctgtctcgcagggcccccttgcaatgcagctgtttaatgtgctcctggatgcagttgyccaccacctccttgcccaggaagttttgcgggtagcagaagctgacttcccgcagacagcgcatgatgtactctagggaaattttctccaattcctgcct

SEQ ID NO: 318831 - DNA, 201 bp, Homo sapiens
agaagaaaaaagagagctatacttttttccttgaacaatccaagaacaagatgataggacataagatagggaaacatacttacagaaaagagaagtgtaargcaggtcaatctactgctaagggatttcagcccagcaaatgcacacattaagaataatgccagaatgtagaaaagtggctttatctttcagtagcggtgg

SEQ ID NO: 318832 - DNA, 201 bp, Homo sapiens
ccgcagacagcgcatgatgtactctagggaaattttctccaattcctgcctcatgatgtgtcccaggggcatttcacgcatagtgcagaagtcggggaccyccagcgtgcacccagagagggaacgatgtatgtgatgtgaagccaaggtgtggggagtgtggccatggtcccaagccactgcagtcagtactggggacag

SEQ ID NO: 318833 - DNA, 201 bp, Homo sapiens
tagggaaattttctccaattcctgcctcatgatgtgtcccaggggcatttcacgcatagtgcagaagtcggggacctccagcgtgcacccagagagggaaygatgtatgtgatgtgaagccaaggtgtggggagtgtggccatggtcccaagccactgcagtcagtactggggacaggggaaagttgctcacaactctcag

SEQ ID NO: 318834 - DNA, 201 bp, Homo sapiens
tcacgcatagtgcagaagtcggggacctccagcgtgcacccagagagggaacgatgtatgtgatgtgaagccaaggtgtggggagtgtggccatggtcccragccactgcagtcagtactggggacaggggaaagttgctcacaactctcaggagaagggatctgcgttcagggatcagtgggagtggtgcgggactccac

SEQ ID NO: 318835 - DNA, 201 bp, Homo sapiens
tagtgcagaagtcggggacctccagcgtgcacccagagagggaacgatgtatgtgatgtgaagccaaggtgtggggagtgtggccatggtcccaagccacygcagtcagtactggggacaggggaaagttgctcacaactctcaggagaagggatctgcgttcagggatcagtgggagtggtgcgggactccacgatctag

SEQ ID NO: 318836 - DNA, 201 bp, Homo sapiens
agagccctactgccttgcacagcctcagtatgctgccaccagaatcctagaagcctcagctgaaaggacaactgatacagctcaggctgctgctgtggagrgtacaagttgtaagccttgctggtttctatgtgatgttaagccttgaggttcatggaatgcaagagtgaagggggtctggcagcttccatgtagatttca

SEQ ID NO: 318837 - DNA, 201 bp, Homo sapiens
taagatttttgtccccaagctgagcagaggtaagcttggctaatgttagatttatgtgagctctgaagagagtctgtagtgctgtgtggtgttggtaattsaaaatgtagcatttatttctctaaagtaatttcgttttagcagaagggcaaaggaagcaatgttaaaatgagaagtaaaacaaaagtgtgtcctacttag

SEQ ID NO: 318838 - DNA, 201 bp, Homo sapiens
cctcttcaggcggttttagtattctcacaaagttgtgcagccatctctttgctccctttctcacatgggtagctaattatccttggatcatgtaagcatgwctttgtggaatcatagtctgcagatttagtattagtatcaaattgatatctctaaaggggctttctgcttccatatttactctggccagtgcttcaacca

SEQ ID NO: 318839 - DNA, 201 bp, Homo sapiens
tcatgtgtcttcaggaatttgtgaatgattctgatatcccagtgatataaaacatgatctggcaaaatttgatggtgaccttttctgcttgtacctttacycatagatgaggttttccgagttctgctgctttcccctttgccagcatatactgcttttgttgaggaatcaaggtctccggtggtcgccaagtgaaaagga

SEQ ID NO: 318840 - DNA, 201 bp, Homo sapiens
aggcatagctggtggtgtcttaggggtgtcagctgcacagagcagagtgtgtgagggaaggataactcgtgtccctggttgcagagtctgagtgatccccscagtaaactaatgtaggatatatttggatgtccaggtcagcagagtgaaagtaaacagtccagggtctgtgctaggattgagtgtggccacagatagcac

SEQ ID NO: 318841 - DNA, 201 bp, Homo sapiens
ttccttctttggttactttaggcttgaaaatatgtcttctccgtgtgtacttccacagccttctcagccagatggcctcagtgggagcctgaagtgtcatktaactgctttagtttttaaatatttgtcacgttatgtatcaagctcttagaacagtacctcgccgatagtaagtgctagataagtgtattagagaaaatc

SEQ ID NO: 318842 - DNA, 201 bp, Homo sapiens
catttccacacgtcgtacccgacatgaattcctaacctgtcaccgctcctgatcccacctcctagctatccctctcttctccagcattttggacatgtctstcagcatatgtgtctgcctatctctcagaatggagtatgagtgtccactcagagacagagacttatttatcagtgctgagcacatagcctagaacatggt

SEQ ID NO: 318843 - DNA, 201 bp, Homo sapiens
gagagcatctgaaggtccatgcagtcttggcaagaaaacactaagtcccacacataagacagggatggggagtttttcatcactgaagaggccatctttakatctcaactcttttttttttttttttttttttttgagatggagtttcattcttgttgcccaggctggagtgcaatggtgcgatcttggctcactgcagtc

SEQ ID NO: 318844 - DNA, 201 bp, Homo sapiens
agccctgccatctggagacagaaacctcattcatttccacacgtcgtacccgacatgaattcctaacctgtcaccgctcctgatcccacctcctagctatmcctctcttctccagcattttggacatgtctctcagcatatgtgtctgcctatctctcagaatggagtatgagtgtccactcagagacagagacttattta

SEQ ID NO: 318845 - DNA, 201 bp, Homo sapiens
gccagccacttctctggtgtatgtgttttgttaaattttgcattattctgactaatttgcagtcgtggtattggaattccattttcatttgtcaggcatctttgataatagcctaccaaattattatttttctaatatatggcaagaattgctttttttataatagagaatttccagttttcataatgtttgaatttttaa

SEQ ID NO: 318846 - DNA, 201 bp, Homo sapiens
ctactactgtaggctagatgccaactaaaaacaactgctgggggcagtggagagggaagtagactgcagggttgatgtaagaaaaacaggtgagtttgcayttgttgggggagcgccaggaaacaagagtgtcaatttctggctcatgagtgagaagtattcctccttagttgtgcctgagaagctcccagcttccataac

SEQ ID NO: 318847 - DNA, 201 bp, Homo sapiens
ccagccacttctctggtgtatgtgttttgttaaattttgcattattctgactaatttgcagtcgtggtattggaattccattttcatttgtcaggcatctttgataatagcctaccaaattattatttttctaatatatggcaagaattgctttttttataatagagaatttccagttttcataatgtttgaatttttaac

SEQ ID NO: 318848 - DNA, 201 bp, Homo sapiens
tttttttgtgtatgtgtggtaagaaccacacaaatcctctcagcaaattctaagtgtataatacaacattactaattagagtcccatgctgtacatcctcytctcttatttccttagctagttgccacctaggactctttacctctcctgaacctccactttgtcttagacagggcagtagtgctgttctcttctcttccc

SEQ ID NO: 318849 - DNA, 201 bp, Homo sapiens
agccacttctctggtgtatgtgttttgttaaattttgcattattctgactaatttgcagtcgtggtattggaattccattttcatttgtcaggcatctttgataatagcctaccaaattattatttttctaatatatggcaagaattgctttttttataatagagaatttccagttttcataatgtttgaatttttaacaa

SEQ ID NO: 318850 - DNA, 201 bp, Homo sapiens
gccacttctctggtgtatgtgttttgttaaattttgcattattctgactaatttgcagtcgtggtattggaattccattttcatttgtcaggcatctttgataatagcctaccaaattattatttttctaatatatggcaagaattgctttttttataatagagaatttccagttttcataatgtttgaatttttaacaac

SEQ ID NO: 318851 - DNA, 201 bp, Homo sapiens
cacttctctggtgtatgtgttttgttaaattttgcattattctgactaatttgcagtcgtggtattggaattccattttcatttgtcaggcatctttgataatagcctaccaaattattatttttctaatatatggcaagaattgctttttttataatagagaatttccagttttcataatgtttgaatttttaacaacag

SEQ ID NO: 318852 - DNA, 201 bp, Homo sapiens
acttctctggtgtatgtgttttgttaaattttgcattattctgactaatttgcagtcgtggtattggaattccattttcatttgtcaggcatctttgataatagcctaccaaattattatttttctaatatatggcaagaattgctttttttataatagagaatttccagttttcataatgtttgaatttttaacaacaga

SEQ ID NO: 318853 - DNA, 201 bp, Homo sapiens
ttctctggtgtatgtgttttgttaaattttgcattattctgactaatttgcagtcgtggtattggaattccattttcatttgtcaggcatctttgataatagcctaccaaattattatttttctaatatatggcaagaattgctttttttataatagagaatttccagttttcataatgtttgaatttttaacaacagaca

SEQ ID NO: 318854 - DNA, 201 bp, Homo sapiens
aggttcaagtgattctcctgcctcagcctccagagagtagctgggattacaggcatttgccaccatgcctggttaattttttgcatttttttagtagagayggggtttcaccatgttggccagacttgtctcgaactcctgacctcaggtgatccacctgccttagcctcccaaagtgctgggattataggcgtgagccac

SEQ ID NO: 318855 - DNA, 201 bp, Homo sapiens
gggacaggtttagagttaagtaacttacccaaatcaaacaataaactagtagtaaagttggggtgtgaatccatatactcaggagaatccacatttttgtytacaatactatacttcttcagtaaatattcatgagttgaagaaaaccaattctgattaagtgaagctgaaagggaatttattatattaggaagacataaa

SEQ ID NO: 318856 - DNA, 201 bp, Homo sapiens
atagcaatgatggcaggtaagtgttttatgttcaaataatgttttctattgaattgatgtttttaggagaaattaagtaagtgaaagcatttagctattaytaaacgtgctaaccacttggaatttttttgcgggaggaatcggatattttgtaaaaacatgttcaatgtgaagtggtcaaaaactcctggctttcttcca

SEQ ID NO: 318857 - DNA, 201 bp, Homo sapiens
gctttgctttaccagtgacccaagaatgagtgttatagtatgctttttgtaaaaaatttatcaccaactggggcattgaaagtaagtttcctatgttacgyggctgctaaattggccagggacaacggaggaggaactgaatagtcaatgaaattggaaagaatttagatcatccatgtcacacaaagccagcaaaggctg

SEQ ID NO: 318858 - DNA, 201 bp, Homo sapiens
tttgattgtgcttggtgagtgattgcatgctgagcagggaagggaagggcagatccaactcctaatggtgccatttgtcaggatagggaatttaagaggaygaagtctttttcccagcccaggaaccagcgcctctgtttccatttataagacctgcacccgttcattctattattggtttattgcagaacatagcgcagt

SEQ ID NO: 318859 - DNA, 201 bp, Homo sapiens
agcgggcaggggcggggcgagcgctccagctggcgggaaggaggaagggccgggcgcggcgcagaggcgggcgcctaccagccggcagctccggagctgcycgcgccatgtccgcgcacaatcggggcaccgagctcggtaaggggcccgcggggctccccatcccctctccctcgcgttcagcgccgccgggactagcgc

SEQ ID NO: 318860 - DNA, 201 bp, Homo sapiens
tgactttaacggaatcgtatgcaaaagagtcattgttagaatgaggaaactacatatctaaagacagggaaatatagcatggaacttttttctctttttawattttaacgtggctctaaaaaaatccataaaatccattgattgtatatgtaacgtttagtctgcccagcagctagtaaattatgtagagaacatactttt

SEQ ID NO: 318861 - DNA, 201 bp, Homo sapiens
tgcccggaatgccttttgcccaaataactccacatcttggggttcagcacaggtaccacctttttcaggaattatttcccctgacactgcttctccccctrctgtttggcccattatctcctctgtgtgtccccacggcattcaagtaaaagccctatcatataacttatcacatgacattgtgattgagtgttgaatttc

SEQ ID NO: 318862 - DNA, 201 bp, Homo sapiens
atgactttaacggaatcgtatgcaaaagagtcattgttagaatgaggaaactacatatctaaagacagggaaatatagcatggaacttttttctctttttwaattttaacgtggctctaaaaaaatccataaaatccattgattgtatatgtaacgtttagtctgcccagcagctagtaaattatgtagagaacatacttt

SEQ ID NO: 318863 - DNA, 201 bp, Homo sapiens
tagtagatcattccttggaactctactgaaaatcagcctactagtcagcaatggtgctgttgctctgggcacaactgctgtatctagaaaatatctgcagytgttatctgagagcaaaatctcagaaaaacctaaggatgagaagggatggaacactttgaacagttgttcatcagtgatgttggcatttcaaagattcac

SEQ ID NO: 318864 - DNA, 201 bp, Homo sapiens
tgctcagcaaggtgttcggtaaaaatacttgagttagggggcgttcttgaaatcatcagcttattctgcagtcatgactttaacggaatcgtatgcaaaaragtcattgttagaatgaggaaactacatatctaaagacagggaaatatagcatggaacttttttctctttttaaattttaacgtggctctaaaaaaatcc

SEQ ID NO: 318865 - DNA, 201 bp, Homo sapiens
tttctatagagaggcaaggtgtttgcagaaatttataggagttggtgaacatgaaatcaatataaaagagaaaaatgacagcaagcccggggccacctgcytatgattggcccacagtaactccttgttgaaaagaaaaggtagggtgcccagagctaaaagatctcttctcaggctgcttccactgttatttgtgtttag

SEQ ID NO: 318866 - DNA, 201 bp, Homo sapiens
gcatgggtgaatatttctttatttgctgtttaaaaaaaatatttgcaggcttctaggattactttataagccaaatgaatgaaaaaaatgatttttttttwaatttggaaagatatgttaacagggaaaaattggttgaagcaagacaaaggttacattgccatcactagaataaagaaatgaagggccctgcgtgttaca

SEQ ID NO: 318867 - DNA, 201 bp, Homo sapiens
gttggtcctgcaggtgcacagaagtcaagaattgaggtttggaaaccaccacctaggtttcagaggatgtatggaatcgcctggatgtcctggcagaagtktactgcagaggggagccctcgtggagaacctctgctagggcagtgtggaagggaaatgtggggttggagtctccacacagagtccccactggggcactgc

SEQ ID NO: 318868 - DNA, 201 bp, Homo sapiens
tcaacacatccaatacagacactaaatttagcatcttaaaacactgatttcatgtgatcagacctcacattacctaaagaacagagcccaatgtctgtggrttcaaagctctctataatattttcctaagggatatttacagtcacatcttctaaaacatacattcatatatctgtgtatatgtccctcctcccacctcac

SEQ ID NO: 318869 - DNA, 201 bp, Homo sapiens
tgtgccctggatgcaggacatggagtcaaaggagattattttggagctttaagacttaatgactgccctgctgagtttggggcttgtatgaggcctatagygcacccctcccccttttttggctgatttctccctttgggaatggtaatgtttacccagcacctttgccacaattgtatcttggaagtataacttgttttt

SEQ ID NO: 318870 - DNA, 201 bp, Homo sapiens
aaaggcccatttgtttttgttcatgttacccaatatatcatgcatagctttcaacaaaaaatacattggatgctagaggcaagaaaaaaaactcaaagtcttttttttttttttttttttttgagacggagtctcgctctgtcacccaggctggagtgcagtggcgggatctcggctcactgcaagctccgcctcccgggt

SEQ ID NO: 318871 - DNA, 201 bp, Homo sapiens
cagtgttgcgatataaataataattaaaagcatgttgtatgagttgaacttcattgaaagttggctattcctattttttcttgataggcattactacagcygccgtttgtgtttatcccgcccgggtgtgtgatgctgtaaaagcactcaaggctgcaggctgtaatatccctgtggcatcaggtaaaatgtgttgtggct

SEQ ID NO: 318872 - DNA, 201 bp, Homo sapiens
atcatgaggcacagaatgagtgcctggctatcccattataagtgaagttaagtttgatcatttgcttaaggagattatagccacatccgccagtagtatasttccagtttcccgctttgacctgcatgtcctgtatgagttgatactccaataccatgtgaatgtctcatttttcattaactttttacccagtgtctttag

SEQ ID NO: 318873 - DNA, 201 bp, Homo sapiens
tggacttgttccacccacttggcccggcaggctgcacttggctcacactgctggcctgggtcgcacagctgccaagggcaagccaggcgcggagtggcaagggatgtgtgagtgagtgcacgcggggtccagccactgtgcacagccaggcacatcagctgcggcagggtgggcagctccaggtgcagactccatgcgagg

SEQ ID NO: 318874 - DNA, 201 bp, Homo sapiens
acatgtatgtcttcttttgaaaagtgcctgttcatatcctttgcccactttttaatggggttgtttgctttttcttgtaaatttgtttaagttccttagagatgctggaagttagaccttttttggatgcatagtttgcaaaaatgttctcccattctgtaggttgtctgtttattctgttgatagtttcttttttagcca

SEQ ID NO: 318875 - DNA, 201 bp, Homo sapiens
tatattccagttccaaagcatgtggcttctgctgttaatgtcaagggcacttcattgtctgagatggcttctgaagctccagcaccttacactcatctccwagaccataggaaagaaaggcttttctcatcaagtctcacacaacacctttgtttattacacctttgcccgttggcctgagctgagtgacgtggccattct

SEQ ID NO: 318876 - DNA, 201 bp, Homo sapiens
aattagatggccttaagcaacagaaatgtgttcttaaggttctggaggccagaagcccgcagtcagggtgtcagcaggcttatgctccctctgaaacctgyaggcaagcccttcttgcttattctggcttctggtgtttgccagcaatgcttgacataccttggcttcactccagtctctgcctctgtcactagatggctg

SEQ ID NO: 318877 - DNA, 201 bp, Homo sapiens
attatgcaaaggcagaattaattgatcatgctgttatactcttaggacagttgcaaataccagtagcatttgtaacatagtatcagcatcaactgttttayctgttagattttttttttttttcaaaactgtgctcttccctgggctaaggaccacaccttccttaactttattcctctgcgattactatcaaacctggca

SEQ ID NO: 318878 - DNA, 201 bp, Homo sapiens
tggatgctagaggcaagaaaaaaaactcaaagtcttttttttttttttttttttttgagacggagtctcgctctgtcacccaggctggagtgcagtggcgsgatctcggctcactgcaagctccgcctcccgggttcacgccattctcctgcctcagcctcccaagtagctgggactacaggcgcccgccactacgcccgg

SEQ ID NO: 318879 - DNA, 201 bp, Homo sapiens
agttattttgtagctcattttatggttgtatttagttatatgcttcaagtgcacttaaaagaatgtgtatttcagatgttagagcaaatgtcagatcgaaytggttgataatgtttttcagatctagttttgttttctttttggtctactggttctgtttattactaagagagtgttaaagtctccaaacatgattgtgga

SEQ ID NO: 318880 - DNA, 201 bp, Homo sapiens
tttgtcttttggaattaacagttattttgtagctcattttatggttgtatttagttatatgcttcaagtgcacttaaaagaatgtgtatttcagatgttasagcaaatgtcagatcgaactggttgataatgtttttcagatctagttttgttttctttttggtctactggttctgtttattactaagagagtgttaaagt

SEQ ID NO: 318881 - DNA, 201 bp, Homo sapiens
atattcttgtcccaattttatatgtaacttgcacaaactaatctccccaaaagtaatttacaaatttctgactaaattctgtattctacttctgtggtggyataaaaaattttttcttaaatcaatttcattgaggcagatttgcattcagtaaaattcaggtgttagatagacagtgtgatgagtttggcagtttgcaaa

SEQ ID NO: 318882 - DNA, 201 bp, Homo sapiens
cctaacactttttagtcagatatataaacatactctggcaggcagtggggcaagctgctgtgtctttattgtcatgaacataactctcaagaaaggtgtgytttatattccaaccaaagaacctattacttgtgaatggaagaattaataagaacctaagatttttttttattactttgcaaaggggtacaccactgtatg

SEQ ID NO: 318883 - DNA, 201 bp, Homo sapiens
agttgacatccttctacgttctgagttttgacgaatctgttgctcgaagcactgcaatgtatttccctgggaatatgttgtaactgcagtgagtgtacacrtgcatgcatgtgtgtgtgtgctgggatagaggcagaaaattttgaggaaatacagttttattccacgtatgaagacatgactcctcctctctgttctata

SEQ ID NO: 318884 - DNA, 201 bp, Homo sapiens
caaaatttagtatcttatatttctgaattaccttggaacaaagagcaatttagagatcatttttagtgtattatacaaaatttagtatcttatgtttctgmattaccttggaacttttcattttatgcagcttttttcccctagaagaatgaaaaccaggtcctaggattctaatgcccatctgtcaagtgagtagtttga

SEQ ID NO: 318885 - DNA, 201 bp, Homo sapiens
gtggccattcttggctgcaagtaagctggaaaatagagtttttagcttggaatattaactactttcctgtacattcccatttccattgcgttcaccccacygccccccaagttccccattaatactcatcaacatttataattcttgccaggtttaaactcttgacagttcacaaatatctttttgtattttgtgttcctt

SEQ ID NO: 318886 - DNA, 201 bp, Homo sapiens
ctattagtggccgctggatttccagctggacagactcatttgaagacacgattagaagagatcagattggctgtggaagatggagctacagaaatcgacgyggtaattaacagaagcttggtgctgacaggccagtgggaaggtaggtgcatgcttttacctaagagagtttcaccattcttccctggtgaatcagatgat

SEQ ID NO: 318887 - DNA, 201 bp, Homo sapiens
aggcagaattaattgatcatgctgttatactcttaggacagttgcaaataccagtagcatttgtaacatagtatcagcatcaactgttttacctgttagattttttttttttttcaaaactgtgctcttccctgggctaaggaccacaccttccttaactttattcctctgcgattactatcaaacctggcatatagtaga

SEQ ID NO: 318888 - DNA, 201 bp, Homo sapiens
gtcaaattcataagaaatttgcccgaggacaaataactaaagtcaaaacacagagtctagaacaaggttctcaacctgggctgcacattagagtttcctgrcaagcttctttaatgaactgttgcaatgatcttcctaccagagattgtgatttcaggggtcatgaacggagccaaggaaattcatactttgagaaacatg

SEQ ID NO: 318889 - DNA, 201 bp, Homo sapiens
aacacaggaagtctttcctttatttatttatttatttatttagagacggagtctagctgtgtcgcccaggctagagtgcaatggccggatcttggctcacrgcaacctccgccttccgggttcaagcagttctcccgcctcagcctcccgagtagctgagattacaggcatccaccaccatgcccggctaattttctattt

SEQ ID NO: 318890 - DNA, 201 bp, Homo sapiens
tgtttgctttttcttgtaaatttgtttaagttccttagagatgctggaagttagaccttttttggatgcatagtttgcaaaaatgttctcccattctgtargttgtctgtttattctgttgatagtttcttttttagccatgtttatgtaacagttcttttaaattttttattttggatgccatagcagcaacatcagctc

SEQ ID NO: 318891 - DNA, 201 bp, Homo sapiens
tatttatttatttagagacggagtctagctgtgtcgcccaggctagagtgcaatggccggatcttggctcacggcaacctccgccttccgggttcaagcarttctcccgcctcagcctcccgagtagctgagattacaggcatccaccaccatgcccggctaattttctatttttagtagagatggggtttcttcatattg

SEQ ID NO: 318892 - DNA, 201 bp, Homo sapiens
ttatttagagacggagtctagctgtgtcgcccaggctagagtgcaatggccggatcttggctcacggcaacctccgccttccgggttcaagcagttctccygcctcagcctcccgagtagctgagattacaggcatccaccaccatgcccggctaattttctatttttagtagagatggggtttcttcatattggccaggc

SEQ ID NO: 318893 - DNA, 201 bp, Homo sapiens
atggccggatcttggctcacggcaacctccgccttccgggttcaagcagttctcccgcctcagcctcccgagtagctgagattacaggcatccaccaccaygcccggctaattttctatttttagtagagatggggtttcttcatattggccaggctggtctcgaactcctgacctcaggtgatccgcctgcctcagcctc

SEQ ID NO: 318894 - DNA, 201 bp, Homo sapiens
attggccagggacaacggaggaggaactgaatagtcaatgaaattggaaagaatttagatcatccatgtcacacaaagccagcaaaggctgtttgtagaaygttagctgctatcacactggcttgatattaacattctagtgaataattaaaatattcctgtttattttttaataaaaagaaaaagcatatatgttacctc

SEQ ID NO: 318895 - DNA, 201 bp, Homo sapiens
tttaaatctgcatttgtcctactctaaagcctgcttttaatgacaacactattttgtggaagaaaatcattaattaaatcacaagttaacttggattagcrttcttggatttttagatcagaagattttccttgtcacttgttcttagaaaacaagtttctttttttagattcaataacttaagaaatgtcattccatcca

SEQ ID NO: 318896 - DNA, 201 bp, Homo sapiens
aatttattatattaggaagacataaagaagctcactgaataagtaggaagccttgcttggaaaaaaagcaggaccatgagggaataaggagcagagaacayagtcagattgtgccacaggaagagcttgggcccagggccactgctggtgctgctcctactggccagcacaggtaccacactgttggctggtggctggccc

SEQ ID NO: 318897 - DNA, 201 bp, Homo sapiens
attaagtgaagctgaaagggaatttattatattaggaagacataaagaagctcactgaataagtaggaagccttgcttggaaaaaaagcaggaccatgagrgaataaggagcagagaacacagtcagattgtgccacaggaagagcttgggcccagggccactgctggtgctgctcctactggccagcacaggtaccacac

SEQ ID NO: 318898 - DNA, 201 bp, Homo sapiens
ttcaaggaacatagatcatggtgtcctctgcttttgtaagtccctctgtaatctgagcctgataagcactgaataataacaggaacaccatcactgctgcyaccaacaactttgaaaacaggaactgacattccttgagcatgaacaatgtgctggatattgtccttatctattcgtgtgtgttaacctgtttgaaaataa

SEQ ID NO: 318899 - DNA, 201 bp, Homo sapiens
gaagaatgaaaaccaggtcctaggattctaatgcccatctgtcaagtgagtagtttgaactagaagggagttgacatccttctacgttctgagttttgacraatctgttgctcgaagcactgcaatgtatttccctgggaatatgttgtaactgcagtgagtgtacacatgcatgcatgtgtgtgtgtgctgggatagagg

SEQ ID NO: 318900 - DNA, 201 bp, Homo sapiens
ggttgagagctcccaaagatagagttcagaatcatctttctaaatcaacaagaggctctttcatcttaattataacagcttaaacttttagagtaagtcarcgtttaccatcattttacgtgtgcttattatcaaaggtggatctgaaggaaaaatgattgattaccttcctaaccgttttaatacttttatatttattgg

SEQ ID NO: 318901 - DNA, 201 bp, Homo sapiens
atcaatatttgcctttttatcaattgctttgtgtttgacaatctctagaacctgcgggttgtcttcctggctctacttgccaagtcctccccaacccctakaattttcagtcctcgctggtaagggtgaccttcactttccccagagctgactgcacgtccccctcacctcgcctccatcatgttgccatgatgtagcaac

SEQ ID NO: 318902 - DNA, 201 bp, Homo sapiens
aggcagtttcgggacctgcttcacactggctcctctatcctttttatgttcccatcattctttgagagcttccttgctttcttgtaatagatgtttcaggygtatctttgactttgtctgctccagctttggaatcagtcatttctccaaggagctcttgctccttttattgattaactgtatttagaaaccaagatctgg

SEQ ID NO: 318903 - DNA, 201 bp, Homo sapiens
tgagtgttatagtatgctttttgtaaaaaatttatcaccaactggggcattgaaagtaagtttcctatgttacgcggctgctaaattggccagggacaacrgaggaggaactgaatagtcaatgaaattggaaagaatttagatcatccatgtcacacaaagccagcaaaggctgtttgtagaacgttagctgctatcaca

SEQ ID NO: 318904 - DNA, 201 bp, Homo sapiens
ttctccattgtaaaattaataagtattttgcattttaataagtaattaatatagattatgaatggagatattttgagactatgttaatatccttttcctcwtctaacttttattcactcttttagcatccattgatgattttttcagctattactctgattttctaattctgtcatttcttctatacttaagagttggcat

SEQ ID NO: 318905 - DNA, 201 bp, Homo sapiens
ccacctgcctcggcctcccagagtgctgggattacaggcgtgagccactgtacccagccggatctcaactcttaaagataattcaggaaccattgctaaartgaacaaggccagcagattttggagcacagtcaatcttcagtgagggcagatgtttcctaattaaattcctgaatttctttttggcttctgtcctttctt

SEQ ID NO: 318906 - DNA, 201 bp, Homo sapiens
tgtagtatcagttgtttcatatctctttaatattctttaacctaagaatactaagaacagtcctcagtcttcccttgtctttgacgattacgggcctgttrttttgtaaaatatacctcagtttgggtttgtttggtattttctcacagttagattcaggttgcacatttttggcaggtataccacagaacttttgctccg

SEQ ID NO: 318907 - DNA, 201 bp, Homo sapiens
gtgtaatcttctcattatactataatggctaagagtaatgttttcatgaagaaagaaaaaaaatccttcatagcctatgtgtgaaatacatacacagagtsaataattatgtacattttagattttaactggggcatccttttgtgaatgctaactactttgattttaccttagaagtcttttactttttgcttgtaagca

SEQ ID NO: 318908 - DNA, 201 bp, Homo sapiens
agtctggaaaaatatccagattaactgctctcataatccagattcagataaggttttcaactgtccgcctaatggactgccccacagcctgagaaagaaakgtgtgtgtgtgtgtgtgtgtgtgtctgtgtgtgtgtgagagagaaagagagagagagggagggagggagagagacagaaaagggatttcattcaaatgtc

SEQ ID NO: 318909 - DNA, 201 bp, Homo sapiens
agtcaaattgagaactggagataaaaactcatctgattgacctcatcctacccaatcctctaccttttcttccaagcaaaccgccatcagaagtgagtagsgtggagattctgctgaagcacatactagtgaggctttctaatgaaatgttcattaaaactatttattattatttgatagtataattattaactgatgtgt

SEQ ID NO: 318910 - DNA, 201 bp, Homo sapiens
ttcagtgtgtatttcctaagaacaaggacaaggacagggacactcttgtaccaagccacagtactgcatcaaaatcaggaaattaacattgatgaccatayggccattaaatgtacagattgttcagattttgcagattgtcccaatagtgttctttattaggtgtagtatcagttgtttcatatctctttaatattcttt

SEQ ID NO: 318911 - DNA, 201 bp, Homo sapiens
ttcctaattaaattcctgaatttctttttggcttctgtcctttcttcattatcaaagtaccaaacagtatagcacatctggtctcataggaagacagcacytcgtgtagcttcctgcgatctgaccaggagagcaggactttttcacaattggcctccacatctgccacgaatgatttctcctctgaaaatagccatagga

SEQ ID NO: 318912 - DNA, 201 bp, Homo sapiens
taaatacttcagtgtgtatttcctaagaacaaggacaaggacagggacactcttgtaccaagccacagtactgcatcaaaatcaggaaattaacattgatraccatacggccattaaatgtacagattgttcagattttgcagattgtcccaatagtgttctttattaggtgtagtatcagttgtttcatatctctttaat

SEQ ID NO: 318913 - DNA, 201 bp, Homo sapiens
ctaattaaattcctgaatttctttttggcttctgtcctttcttcattatcaaagtaccaaacagtatagcacatctggtctcataggaagacagcacctcstgtagcttcctgcgatctgaccaggagagcaggactttttcacaattggcctccacatctgccacgaatgatttctcctctgaaaatagccataggatcc

SEQ ID NO: 318914 - DNA, 201 bp, Homo sapiens
tgttcacctgttacccttaaatacttcagtgtgtatttcctaagaacaaggacaaggacagggacactcttgtaccaagccacagtactgcatcaaaatcrggaaattaacattgatgaccatacggccattaaatgtacagattgttcagattttgcagattgtcccaatagtgttctttattaggtgtagtatcagttg

SEQ ID NO: 318915 - DNA, 201 bp, Homo sapiens
ctaaaagacttcccatctcacatgggaaaacctttctgtgctgaaaaaagttctccttaaggaccttttaaaccctgttggccatggctcaccatatgcaktgtattttatattgccacacagtacatgccacacagtacacacgggtttgaaacagaacttccacgaatgatcctacctgtataacatgtgctgtatctt

SEQ ID NO: 318916 - DNA, 201 bp, Homo sapiens
aggagagcaggactttttcacaattggcctccacatctgccacgaatgatttctcctctgaaaatagccataggatcccaccgtgtagcctggtatcccarttcttgttcagatagtagatgcaggtggtgcagcagccatcgttgttgaggtgtccacatgatgaatgtaacctattccatttttaagatagcaagccac

SEQ ID NO: 318917 - DNA, 201 bp, Homo sapiens
aaaaatatctggatgctaaattacaacaaacatatcaaattattttttaacttttatttttgaataattttaaacttacagaaaagttgtaaaattggtaygcaaaactacagttttatcactgagattctccaattataaagtgctatcccatttcctttttttgacttatttcctctgtgaagtgtgtacatacatata

SEQ ID NO: 318918 - DNA, 201 bp, Homo sapiens
ccttttctgcttgtacctttacccatagatgaggttttccgagttctgctgctttcccctttgccagcatatactgcttttgttgaggaatcaaggtctcyggtggtcgccaagtgaaaaggaataaagataaaaatgaaggcgtgactagttgaaaaatagagacagaattttaatgtgaaaattgtttatgaacagaag

SEQ ID NO: 318919 - DNA, 201 bp, Homo sapiens
catgcttagtattaatgcatgacttctgcagagtctaggtcaggaccattcttcctgcccccttcacaaccttctccttgctttctccttgcctcatgtgwcttcaggaatttgtgaatgattctgatatcccagtgatataaaacatgatctggcaaaatttgatggtgaccttttctgcttgtacctttacccatagat

SEQ ID NO: 318920 - DNA, 201 bp, Homo sapiens
ggctgaggcatgagttcgtttgaacccgggaggtggaggttgcagtgagccaagatcgtaccactgcattccagcctgggcgacagagagactgtgtctgaaaaaaaaaaaaaagaggctcccctgcgtttgagtagggggtgtttcttacaggtcttagataaattgggacgaagtctagagtgtctggtctgattttct

SEQ ID NO: 318921 - DNA, 201 bp, Homo sapiens
ttgtgttggagtgaagtggtctattttttcttatatgtaagactggcaaattctagttgtgctttcataagtattaggacagtgcttgctattttttgttygttaaagttatttttgggtttctggaagtgtataagggaaaatatgggaagctagtattgaatgattaactgcctactaaatgcctggttctattctagc

SEQ ID NO: 318922 - DNA, 201 bp, Homo sapiens
gctccttcctcctaaattccttccctcgactgtgctgtggctctcatctccccctgcattttcagaagccctgctctatctattgggcattctttcttccrtgtcatcagcctttctgccagctcattcccattaagcatttagacatactcaagcttttcttagccatttatgaaagaacctacatgctggctttccttt

SEQ ID NO: 318923 - DNA, 201 bp, Homo sapiens
ttgtgtactaaagatgaggtcattggtagctagaaaagtaaaattctctttcaaaaaagtcattataataaatagtttaaccaaaaatttttaatgaaatyacaagttaaagccaggatagtatattgtctctttatatatcaaataaatggcatattttatactaattatggaggctattcccacactcctttaaagttt

SEQ ID NO: 318924 - DNA, 201 bp, Homo sapiens
aagtgcatgctgattggtccatgggcggccatggatgggcctggaaaaagcaccatcggactgcctgaatggtcatcaatgaagttctcactccaggctgyggccttcactcagacctggcagcctggttcccaggcttcaggccatccctggcatgaaggtggggcttcaccagggacccatcccttcctgcctaggaac

SEQ ID NO: 318925 - DNA, 201 bp, Homo sapiens
atagtatgctttttgtaaaaaatttatcaccaactggggcattgaaagtaagtttcctatgttacgcggctgctaaattggccagggacaacggaggaggmactgaatagtcaatgaaattggaaagaatttagatcatccatgtcacacaaagccagcaaaggctgtttgtagaacgttagctgctatcacactggcttg

SEQ ID NO: 318926 - DNA, 201 bp, Homo sapiens
ttgttaattaaactctgcttttcctcacagatttaccatcatgtgactggaagatatgcagcttatcatgatcttccaatgtcttaaatcagtcaccagtwccagaaaagttctttacgacaatgtttaaaaattatttttctacgtaattgctaaaattatttaattaaaaaattgggcagtaggtaactggcattcctc

SEQ ID NO: 318927 - DNA, 201 bp, Homo sapiens
ctcttactaatgtctataaagccagtatgatagcaatgatggcaggtaagtgttttatgttcaaataatgttttctattgaattgatgtttttaggagaarttaagtaagtgaaagcatttagctattattaaacgtgctaaccacttggaatttttttgcgggaggaatcggatattttgtaaaaacatgttcaatgtga

SEQ ID NO: 318928 - DNA, 201 bp, Homo sapiens
gcagcccttagactataaagtttctacgtcattgatttaagggtgttttaaaatgcgataggctagcttccagaccatgattagtgtcactcctgagaagyagaggtttaatatttcataactgatttcattgcagatttatgtcttccatattctctttaaaaaaaaaaaagataaacttatgttagaacctctctggaa

SEQ ID NO: 318929 - DNA, 201 bp, Homo sapiens
cgttaatcttttgaagctagtaattttattttcctctctttgcagtctctgaggttcgcaaatgaatagagcttcattattgcagtctgcatttaataacvattatccattatcttgtaattaagactccctgtaacgaatcatgaggacaatgcaaaaatacatagtacatttctttaatgaactggaaaatgttcatct

SEQ ID NO: 318930 - DNA, 201 bp, Homo sapiens
atcatgtgaagttggtagtttataaattctttctgcagtaatcccaagagggagggagggaggagaggtatcttattatcatcttttagtagatgaaaacytgaagctcagaagttaagtgaatagaccaaggccacacactgagtaagtggcagaattttctgaaggacttttgactctaaactccatgcttttattaat

SEQ ID NO: 318931 - DNA, 201 bp, Homo sapiens
gtaccacactgttggctggtggctggcccctgggacactggacttttggatctcctgctattgctgatgccacaataataaagaaaatatctaactattcwttcatctttgcctcactctttaagattcaaaggcctgagtagaagcaatcacttgatagagcccaggtcacattttaaaaagaccagatttggtataact

SEQ ID NO: 318932 - DNA, 201 bp, Homo sapiens
ccaattataaagtgctatcccatttcctttttttgacttatttcctctgtgaagtgtgtacatacatatataaattatgtattatatacatatttttctgraccatttgggaataagttgcagacctgttcacctgttacccttaaatacttcagtgtgtatttcctaagaacaaggacaaggacagggacactcttgtac

SEQ ID NO: 318933 - DNA, 201 bp, Homo sapiens
ttttcttgacttcagatctgggctgcactttctagctctgttgtctaaagaaaaatatctgctgttactcaagatcttctgataggttctacatcgttgtytatatgttgtctacctggtctgcctctttgagcaccagagtttgacagcatagttgagtgctccatcttaacctttcataagactcagacttacctatcg

SEQ ID NO: 318934 - DNA, 201 bp, Homo sapiens
atctctgtgaacagcaggtctatccatttagacatccaagcttgcagcctaggagtcatgcttggttctttctttttctcacctcacataaatcagtgaasaagccttgagagttctctctagacctctttgctgtgtctgacacatcttccctccattctaagtgctgctgtcttaggccaccatcctcctccacaggga

SEQ ID NO: 318935 - DNA, 201 bp, Homo sapiens
atgggacatgtacagattgatcactatgacagcagccctttatagaggtaataatgttgtcattaggttgtgacaattctccagagacttcaacagccccsgattaataacatctggaaattgttcagatgacataaatttctgttttctgttttaaggcttccattgtgcctttctgtggcatctgccgttgtttttctt

SEQ ID NO: 318936 - DNA, 201 bp, Homo sapiens
ttttggggtttttttgtttttttttttttgttttttttttttgagacaaggtctcaccctgttgcgcaggctgaagcgcagtggcgcgatcttggctcackgcaacctccgcctccggggttcaagtgattcttgtgcctcagcctcctgagtagctgggattaaaagcatgcatcaccatgcccggctagcttttgtatt

SEQ ID NO: 318937 - DNA, 201 bp, Homo sapiens
aggaaatctgatgaaggctatgaaggtgaaagaaaggctattttttggtttagaaaacattagcaagataacacatgtaaatcaaaatgcagaactaatayatttgttttagtgattcaggaggaaaaggaaattcatgcttttacttgaattatcaggatgatgctttgctttaccagtgacccaagaatgagtgttata

SEQ ID NO: 318938 - DNA, 201 bp, Homo sapiens
tgggacatgtacagattgatcactatgacagcagccctttatagaggtaataatgttgtcattaggttgtgacaattctccagagacttcaacagccccgrattaataacatctggaaattgttcagatgacataaatttctgttttctgttttaaggcttccattgtgcctttctgtggcatctgccgttgtttttcttt

SEQ ID NO: 318939 - DNA, 201 bp, Homo sapiens
tggttagtaagtggagactgcagtcacctagatggccaaccccagggttccatatagtaaatgctttccattcagggctgtttgaaagttcacctgtctayggatctgctaatgggaagcacatacgtctccaggtacagtgaaataatcacttggagataagactccccacagaaaaattaacacaacttcttttatgaa

SEQ ID NO: 318940 - DNA, 201 bp, Homo sapiens
gcaaatgagttcatctggcaaagagagcatctgaaggtccatgcagtcttggcaagaaaacactaagtcccacacataagacagggatggggagtttttcrtcactgaagaggccatctttagatctcaactcttttttttttttttttttttttttgagatggagtttcattcttgttgcccaggctggagtgcaatggt

SEQ ID NO: 318941 - DNA, 201 bp, Homo sapiens
aggcttccattgtgcctttctgtggcatctgccgttgtttttctttttcaaacctttcaaatcaggaaatatacataaaatacaagattattttcctcacrtgtgctcctaggctcttgtcttgatagccagcgttaccaaatctatcaggtaaactgctggccaactggtatgtctgctggaatttctggaggtggaata

SEQ ID NO: 318942 - DNA, 201 bp, Homo sapiens
tcaacagccccggattaataacatctggaaattgttcagatgacataaatttctgttttctgttttaaggcttccattgtgcctttctgtggcatctgccrttgtttttctttttcaaacctttcaaatcaggaaatatacataaaatacaagattattttcctcacatgtgctcctaggctcttgtcttgatagccagcg

SEQ ID NO: 318943 - DNA, 201 bp, Homo sapiens
ataactccatactccaccattgtcctttcctaccaacataggggaaaacctgctcattcgtttttccattgtttggcttatttgtattgaaaggaaagtgycagctgagtttgttaaaggacataatttgagattgactgggttacatttcagccatcaagccactttgattagcatatgtcattcatctagtttctgagg

SEQ ID NO: 318944 - DNA, 201 bp, Homo sapiens
tcatgaaaaattttttggaaagggcatctgttgaacttattgcttcacttgtaatttcctctgtgtatgtggtctagcagcagttataataactccatacyccaccattgtcctttcctaccaacataggggaaaacctgctcattcgtttttccattgtttggcttatttgtattgaaaggaaagtgccagctgagtttg

SEQ ID NO: 318945 - DNA, 201 bp, Homo sapiens
ggttaaatagcgtgtggagaacactgagcatttttgagggaagaggctttgaaaacgtaggggatttctcatcctttagagtaattattcctcatgaaaawttttttggaaagggcatctgttgaacttattgcttcacttgtaatttcctctgtgtatgtggtctagcagcagttataataactccatactccaccattg

SEQ ID NO: 318946 - DNA, 201 bp, Homo sapiens
gaatgagctcattaaaaaagaaaactgaaaaaaaacaggtacacccacatttccaactccatctctcttttcagactgttcaagatgtacacatgtacttkgtatatctgtagacctgattctttccatgttgttttcagaggttgacaccaaactaccaagtagatatttatcctttggtttaaattcagattccattcc

SEQ ID NO: 318947 - DNA, 201 bp, Homo sapiens
taaatctggcctgtgaagtacatacatcatggctatcaaacattttaggataagagaatgaaatatcagcaccaaagtcacattatttttcattttcttayatgaagagaatcctaaagaccttgaatcagggcaataatctatttttcttatttgctgatttttacacaagaaggatggtagaaagaacatctcaaaaat

SEQ ID NO: 318948 - DNA, 201 bp, Homo sapiens
ctccttaaacagttctttgaagaaagcattcaccagaagttgttcatcatttcataaatcttattgagcaggttttaaaaattgaatagtttccatgctcwgtaaatatacagaggtgttcattttactttttttatgacctctttctgttgcatctatttacctaatatatttaccagtgacagggaaatgctatcagat

SEQ ID NO: 318949 - DNA, 201 bp, Homo sapiens
tgtctgtgtgatgaatcaatacaggttcttccagttccaaatgtataggctggtacagaagcaattgtggtttttgcctttgaaagtaatggagtgatttkgcatgaagtatgccttttgttgactggtcttccatcaataaggttgtttatttatagttgtacaaaaaagaaatataagctttaaaaaaaggttgatgtc

SEQ ID NO: 318950 - DNA, 201 bp, Homo sapiens
cgggtgtgtgatgctgtaaaagcactcaaggctgcaggctgtaatatccctgtggcatcaggtaaaatgtgttgtggcttttgttgttattttttaaacaygtttccagttcttcatacaatggggtattatatgtaggtttgtactatgatttaaattagtttatgtatttaattagttgtatttattcatgattttagt

SEQ ID NO: 318951 - DNA, 201 bp, Homo sapiens
ctgcaaagttaacgtttaatttttggaatggatatttatttatttatttgtttatttattgtttcaatagagaccgtgtgtcagtatgttgaccagactgktctcaaactcctagcctcaagtgatactccagcctctgcctcccaaagtgctaggattataggcatgagccaccgtgcatggcctagaatggcatcttaa

SEQ ID NO: 318952 - DNA, 201 bp, Homo sapiens
gagacagagtctcactctgtcacccaggctggagtgcagtggcgccatctcggctcactgcaacctccgcctcccgggttcaagtgagcctccagtctcakccttctgagtagctgggattacaggcatgcgccaccatgcccagctagtttttgtatttttagtagagatggggtttcacagtgttggccaggctggtct

SEQ ID NO: 318953 - DNA, 201 bp, Homo sapiens
gtacttctcctcagcctgcctcagctgtaacagtgagttccctagaaaccaaagtggttgcaagggaaggataaatgtttaatcttggctccagcaaactmtacagattttttaaatgttgagacactctggctgcaacttctggctctctgtatagtcaggccttcctcccgcaaagcaaagtctaagacaagagtagct

SEQ ID NO: 318954 - DNA, 201 bp, Homo sapiens
ctcgcggcccttcttgttgctcccagaactgtggggtgaactgatcaccccacagttcaccctttagagacactgcacacatcccagccagctggctgtcycgcagggcccccttgcaatgcagctgtttaatgtgctcctggatgcagttgcccaccacctccttgcccaggaagttttgcgggtagcagaagctgactt

SEQ ID NO: 318955 - DNA, 201 bp, Homo sapiens
agacctctaatcccattagctgaagatgtgagattaaccagaaagagtaattccgttaattttctggtagaaaaaaacatattcatgtttccttgagattrtggattaagtttgtattttggactcagggaagaaagtaggttgtaacaattcctattgtatttggtgaaggagctcaagatctgtatattgtggtatttt

SEQ ID NO: 318956 - DNA, 201 bp, Homo sapiens
tttgaaacagaacttccacgaatgatcctacctgtataacatgtgctgtatcttgacattttctattttctgtttcttcttttttattttttaatttttawttatttatttatttatttatttatttatttattttattatactttaagttctaggatacatatgcacaatgtgcaggtttgttacatgtgtatacatgtg

SEQ ID NO: 318957 - DNA, 201 bp, Homo sapiens
tcctttccccgtttcttgtttttgtcaggtttgtcaaagattagatgattgtagacgtgtggtattatttctgagggctcaattctgttccattggtctayatctctgttttggtaccagtaccatgctgttttggttactgtagccttgtagtatagtttgaagtcaggtagcgtgatacctccagctttgttcttttgg

SEQ ID NO: 318958 - DNA, 201 bp, Homo sapiens
ttcttttctttaagaatgttgaatattggcccccattctcttcaggcttgtagagtttctgctgagagatcaactgtttgtctgatgggcttccctttatgggtaacccaacctttctctctggctgcctttaacattttttccttcatttcaactttggtgaatctgacagttaggtgtcttggagttgctcttctcgag

SEQ ID NO: 318959 - DNA, 201 bp, Homo sapiens
caactttggtgaatctgacagttaggtgtcttggagttgctcttctcgaggagtatctttgtggcgttctctgtatttcctgaatttgaatgttggcctgccttgctaggttggggaagttctcctggataatatcctgcagagtgttttccaacttggttccattctccccatcactttcaggtacaccaatcaggtgta

SEQ ID NO: 318960 - DNA, 201 bp, Homo sapiens
agccgggcgtgggatataatctcctggtgtgccgtttgctaagacgattcgaaaagcacagtgttagggtgggagtgacccgattttccaggtgccatctstcacagcttcccttggctagggaggggaattccctgaccccttgtgcttcctgggtgaggtgatgcctcgccctgcttcggctcacgctcagtgggctgc

SEQ ID NO: 318961 - DNA, 201 bp, Homo sapiens
aaagcacagtgttagggtgggagtgacccgattttccaggtgccatctgtcacagcttcccttggctagggaggggaattccctgaccccttgtgcttccygggtgaggtgatgcctcgccctgcttcggctcacgctcagtgggctgcacccactgtcctgcacccactgtccgacaagccccagtgagatgaacccggt

SEQ ID NO: 318962 - DNA, 201 bp, Homo sapiens
tccaggtgccatctgtcacagcttcccttggctagggaggggaattccctgaccccttgtgcttcctgggtgaggtgatgcctcgccctgcttcggctcaygctcagtgggctgcacccactgtcctgcacccactgtccgacaagccccagtgagatgaacccggtacctcagttggaaatgcagaaatcacccgtcttc

SEQ ID NO: 318963 - DNA, 201 bp, Homo sapiens
atggcatttgtaaactgtcatggcacttgtgggagtgtggcagtgaggaggaccagaggtcactctcatagccattttggttttggtgggttttagctggyttctttactgcaacctgttttatcagcaaggtctttatgacctgtattttgtgttgacctccagtctcatcctgtgacttagaatgccttaaccatctgg

SEQ ID NO: 318964 - DNA, 201 bp, Homo sapiens
ttttcttccaagcaaaccgccatcagaagtgagtagggtggagattctgctgaagcacatactagtgaggctttctaatgaaatgttcattaaaactattyattattatttgatagtataattattaactgatgtgtataattatagaatgattgttaattaaactctgcttttcctcacagatttaccatcatgtgactg

SEQ ID NO: 318965 - DNA, 201 bp, Homo sapiens
atcccagcactttgggaggctgaggtgggcggatcacgaggtcgggagatagagaccacggtgaaacccggtctctactaaaaaatacaaaaagttagccrggcgtagtggcgggcgcctgtagtcccagctactcgggaggctgaggcaggagaatggcgtgaacccgggaggcggagcttgcttgcagtgagccgagat

SEQ ID NO: 318966 - DNA, 201 bp, Homo sapiens
caagtgtatactgatattaagtaaattattttaaattttaaaatggagaggacacaaaccttcccatataaaattccaagtaattatgtagccaagccccygctcgaggaggtggattataacttcccactccttaaatgtgggatacccataatgacttcttttcaaagagtacagtatgaaaaatgggggaaaaagatt

SEQ ID NO: 318967 - DNA, 201 bp, Homo sapiens
acatgatgcaaaggcatacaggaagcaactgaaagagctcccagtggccaaagctggaaccgtgtgaacaataaaataaataaggtagtgaggaattatawacccaagtgtaaaataaatatcttcaagtgtatactgatattaagtaaattattttaaattttaaaatggagaggacacaaaccttcccatataaaattc

SEQ ID NO: 318968 - DNA, 201 bp, Homo sapiens
gaaattgaaaacaaaaacaacagagaaatttttttttttaaatatcctaaaagctacttttttttttctccccccgtaagattggtaaacagctagctagrctaatcaagaataaaagagaaaagacataaattacccatatcggaaatgaaagaagggtcatctcctcttcccatggatattaaaaggataataaaggaa

SEQ ID NO: 318969 - DNA, 201 bp, Homo sapiens
cttcatccaacaacagcagaatacatattcaatgttcacatggaacattaaccaagatagaccacattctggtccataaaacacaccttgacagatttaaragactgaaaatcacacaaaatatgttctcagaccacaatggaactaagctagaattcaatagcagaaagttagctgaaagatccccaaatgtttggaaat

SEQ ID NO: 318970 - DNA, 201 bp, Homo sapiens
tgagctaattaaacttcttttctttataaattacccagcctcaggtattcctttatagcaatgcaataatggactaacacagcatatgttcagaaacaccwtaactaccagatacattcttatttccccccacacctaatctctagacaataaaggcttggcttgatatttaaggacttccagtttcagctttaacatata

SEQ ID NO: 318971 - DNA, 201 bp, Homo sapiens
gccaagcaactggacactatagcctagtcaagttgacgtctaaaattaaccattacaccacgattttaaagtctttaatattgttatttattatgatgctytcttcatacatttctattcttagaacattattggtcatatatgtaattaattgggtggtaagtcctgacattatttacatattctggtaggaaaatacaa

SEQ ID NO: 318972 - DNA, 201 bp, Homo sapiens
ttttaaatcacactttaagatcaaaaaaagattttaagatattttaaaagatggaggccaggcacggtggctcactcctgtaatcccagcacttcaggtgkccaaggtaggtggaccatttgaagtcaggagctcaagaccagcctagcaaagatgataaaaccctgtctctactaaaaatacgaaaattagccaggcatg

SEQ ID NO: 318973 - DNA, 201 bp, Homo sapiens
cagccctcacatttttttgaaatacattgatagttaattgagacttaaggaaaaaaatgttcctaactctaatgagaattcaagagggtatgagatggccraatcaccttggtctagataattccagcagctgaacttgtacttgttctgtttatattaatgcctagtatttgtattcattttgatactgacattgaaata

SEQ ID NO: 318974 - DNA, 201 bp, Homo sapiens
tttattagtcaatcagaatctagctaggtgcagtggcactaaacgtctttttttcttttctccttttttctcccttgccctagcttaaagctgtgcatagaagttattttattttatcctggtaaattgagcacttctgtttgttttatagaggtgtgccctttctgttgagtatctttctaagagccattatggtgtgac

SEQ ID NO: 318975 - DNA, 201 bp, Homo sapiens
tgatagttaattgagacttaaggaaaaaaatgttcctaactctaatgagaattcaagagggtatgagatggccaaatcaccttggtctagataattccagyagctgaacttgtacttgttctgtttatattaatgcctagtatttgtattcattttgatactgacattgaaatatcacattcacattgagaaatcacatca

SEQ ID NO: 318976 - DNA, 201 bp, Homo sapiens
ggtatgagatggccaaatcaccttggtctagataattccagcagctgaacttgtacttgttctgtttatattaatgcctagtatttgtattcattttgatrctgacattgaaatatcacattcacattgagaaatcacatcatttataagcattttgcaaattgaaactaatgtctggatttatagatactaccaatacag

SEQ ID NO: 318977 - DNA, 201 bp, Homo sapiens
aaatgacttgttggattttttgtaatcatgcgattcagaaacagtaatagttatgcttgggtttcaagacataatgtccaccctatcccaaagcaaacacygaaagcaaactctcacctgctgacattgttacaaaccctaagaccagaatgcagattgtgctctcctcagaagatgatattgcaggttatgggctgaata

SEQ ID NO: 318978 - DNA, 201 bp, Homo sapiens
gaacgaatgaatcatgagtttcaagcctaatgtttcccacatgtcatgattaatggtcaaactaaatcttggttcctctttctctctctctctctctttctttttttttttttgagacagagtctcgctctgtcgcccaggctggagtgcagtggcacaatctcggctcactgcaaggtctgactcctgggttcacaccat

SEQ ID NO: 318979 - DNA, 201 bp, Homo sapiens
attcctatgtttaatccctaacccccaatgcaatggtatttggagatggagcccttgctaagtaattaggattagataagctcatgagggtgaggacttcrtggtaggattgttgcaggacttttccttagttcagctaaagatgaggtccttgtccatcccacagccatgaaaatttaggttcacaggcaatttggaggg

SEQ ID NO: 318980 - DNA, 201 bp, Homo sapiens
ccaataatttatgatatcatttaccattattaaaggaaccttatttttaaagccctgtgacacctagtgtgaagcagaagagtttgcaaagtttaaacatsatattgttaaattctggagtggctttaactagctgtgtgatcttgggcaagttacttgctttctctgcttcagttcttcatttttaaagtgtgacaggat

SEQ ID NO: 318981 - DNA, 201 bp, Homo sapiens
ttggcaacttccacttacagtgttcagccaattaaacctctcttatcaacttagagtatttacagcaggaaggcaacacacaattaaagttctgtcagttmgtcagcttccacaattaaagttctgtcagttagtcagcttccacatgtgctcaaacgctcagcctcaatctgtttccaccattccttttgtatctgaggc

SEQ ID NO: 318982 - DNA, 201 bp, Homo sapiens
tgtcctgagaaaacagaggagaaaaataccgcttagaggaataattttggcaaatagtttcctcagtagacatctagtttactctgttgaaatgtatgagaaaaaaaaaaagtggaaagaaatcaatcatctgtgaattcttacacaattaacttacataagcatgtctcttttctttactagccaatatccagagcactt

SEQ ID NO: 318983 - DNA, 201 bp, Homo sapiens
aataaactaggaatctggagatacagactgtcatgtacttgttaaattaccttggacaagtaatttagtctgtgagtcatcattatatttataggtgggayggagatattttatttgctcttcctagatctcaggactgttgcaaaaggaaaaataaatgtaaaagttcttcaaaaagcagaaagcaccatataaaatgta

SEQ ID NO: 318984 - DNA, 201 bp, Homo sapiens
acataataataaatacctcacagtatgtgtgagaattaaatcatgtaatgtaagtcactattataatagattattgtcttttttatacttattttctaaacatattgaaaattctagtaggttttattttaaccttcttttttttttttttacttttactttaagttctgggatacatgtacagaacatgcagtttgttac

SEQ ID NO: 318985 - DNA, 201 bp, Homo sapiens
aaacatggcagcaaagtaatacttatgaaaacattactacttcctcaagaatatgaggcatgtgtcctgctaaccagccgctcttgttccctttagggtgygcccctctagaaaaagcaccacagttttccaaagagaagctgatagtaaaatggaaaatacacagctgctgacatttccatatagctactatattatatt

SEQ ID NO: 318986 - DNA, 201 bp, Homo sapiens
ataataataaatacctcacagtatgtgtgagaattaaatcatgtaatgtaagtcactattataatagattattgtcttttttatacttattttctaaacatattgaaaattctagtaggttttattttaaccttcttttttttttttttacttttactttaagttctgggatacatgtacagaacatgcagtttgttacat

SEQ ID NO: 318987 - DNA, 201 bp, Homo sapiens
aaatcatgtaatgtaagtcactattataatagattattgtcttttttatacttattttctaaacatattgaaaattctagtaggttttattttaaccttcttttttttttttttacttttactttaagttctgggatacatgtacagaacatgcagtttgttacataggtatacatgtgccatggtggtttgctgcaccta

SEQ ID NO: 318988 - DNA, 201 bp, Homo sapiens
ccataagaaacaacatcaaacagggaactgtgacccgcccacgctacccaggaaaaggacaaagcaaaaatccaatgactgaccctaacaagatggtgatytgtgagctctctgaacaagaattcaaaatacagtttaaggaaaatcagtgatgtccaggaaaacacagaaaagcaattcagaaatttatcagagaaattt

SEQ ID NO: 318989 - DNA, 201 bp, Homo sapiens
ctgtagtagggtcccttgtggaaattaaaaaatagggtttagagacagatagatctggatttgaatagaccctccgcataccacatataaccttgagcackttaacttttctaaatatgttttttttaatgtggaaaatggggatgataatagtatcagttatctgttattatttattacaacttcattattatataagct

SEQ ID NO: 318990 - DNA, 201 bp, Homo sapiens
cttacacaattaacttacataagcatgtctcttttctttactagccaatatccagagcactttttgttccagatgttaatagtaatattagagcagaaaastgaaagaatacccaaaaaggagaaaatagcagttacttggcaagcgctgttagtcttttgcctataatgataatcacatatttaattataagtaaacttc

SEQ ID NO: 318991 - DNA, 201 bp, Homo sapiens
taaataaattcatctatccaatagtgatctaatcagtgcctgacatggcatatccaaagaaaaatcagacatcaaagctgtccactaggagcttacttacytaactggatatatgaatagatagatatatttaaaggcataagctgacatgtagcataaaggggattaaaaacaggatgccatgaaactagagaataaaga

SEQ ID NO: 318992 - DNA, 201 bp, Homo sapiens
gaacttggagcaaaggtggtttcctgactccacatttagacacacttctgggtgcctggtagccacccactggattctcacttgatactggtgcttgtgcytgcatcaggggacctccaggcagacctgcccaactggtcccaccctttatggctcctacccccacagtgctgagcagggacctcagaccaatgtgtattc

SEQ ID NO: 318993 - DNA, 201 bp, Homo sapiens
tgaagcagcatttggtgttgacagtgtctggttaggtgataattttgtcacttatctttcagggatacaactcaccccaggagtatattgccacccagggrccactgcctgaaaccagaaatgacttctggaagatggtcctgcaacaaaagtctcagattattgtcatgctcactcagtgtaatgagaaaaggagggtac

SEQ ID NO: 318994 - DNA, 201 bp, Homo sapiens
ttaaatcaagaagaaattgaaacattgaacagaccaacatcaagttctgaaattgaatcagtaataaaataaaaactaccaaccaataaaagccccagacmagagggatttacagccaaattctaccagatgtacaaaaagctggtaccaattttactgcacctatttcaaaaaatcaagaagggagtcccttctaacaca

SEQ ID NO: 318995 - DNA, 201 bp, Homo sapiens
agcaaaacctgccctagccactgccgttgatgaaatgcttgctgttttcaaagtcaaataaaacatagagacaaatcgctaaatttaaaacattgtattcrggaagcaagaattagaatttgggggtaaacacacagacccggtggtctttgcaatgtctaaaggaaaaaagagaaggttggaagtcttctaaaaaggaga

SEQ ID NO: 318996 - DNA, 201 bp, Homo sapiens
agtcagcatcatactgaatgggcaaaaattggaatcattccccttgagaaatggaacaaaacaaggatgcccactctcaccactcctattcaacatagtaytggaattggtagccagagcaatcaggcaacagaaagaaataaaaggcaaccaaataggaaaagaagtcaaactatctctcttcatggacaatatgattct

SEQ ID NO: 318997 - DNA, 201 bp, Homo sapiens
tataaatggctggataggcacctctgtaaataaagtacgtagccttagaggctgaaacaatgtaagtgcacaggaaacatttattgtaagaaaatgaaagragtgaagttctttggttcttatttttaaagcattatgtgtcaaaaatgtatttggttgagtgtcatcaatttcatgtggcctaacctaatgttaagtgga

SEQ ID NO: 318998 - DNA, 201 bp, Homo sapiens
tagccactgccgttgatgaaatgcttgctgttttcaaagtcaaataaaacatagagacaaatcgctaaatttaaaacattgtattcgggaagcaagaattmgaatttgggggtaaacacacagacccggtggtctttgcaatgtctaaaggaaaaaagagaaggttggaagtcttctaaaaaggagaaatattgcatattg

SEQ ID NO: 318999 - DNA, 201 bp, Homo sapiens
taacaagtgatttttgcctcgcttagtagtcttatagaaagatgcacactatgtgggtaatcccacttatacacagttatgtacactgtttactaacattyctctaacatttgtataggaatataactagatccactgcattggttgcacattgtacaactccagtgaacaccgttcatatagaccacaatgtgaatgatg

SEQ ID NO: 319000 - DNA, 201 bp, Homo sapiens
gcttgtagtactatgatcttctatcttcctacccttgtatcctactgttctttattcccataaacacctttgctgcaagtaaatgaaagagacttagtttrcaggactctaagttttttaatcctacttggctaataactccactgatacctattaatattaattggttgatgtaacaaaaatatacccaaacaagtgaac

SEQ ID NO: 319001 - DNA, 201 bp, Homo sapiens
agttttcatagatgcagcaccatttttcattcccaacaacagggtaaaaaggttccaatttctccacatccccaccaaactattatcttttgtgccatccyaacagttgtgcaatgataagtcactgtggacttgatttgcatttccctgattgtaagtgatgttgagcatttttccataaggttttttggccacgtgtat

SEQ ID NO: 319002 - DNA, 201 bp, Homo sapiens
tgatgcctccaagaaatacaggtggcctgaccgtaatccccgtttcctgtaagacacatggcatagcaacttagaaatccccctttccccataacataccmtttttgaagtgtgacagttatttatataaaaatttcccatcagttcaccttctgaaatgaggtttataagagtaccaatatacgcaggcagacatttgga

SEQ ID NO: 319003 - DNA, 201 bp, Homo sapiens
tggggcagttctgcttcaggctgtgggtcagagtcaggtctgccctatgtgcctcctcattctcggactagcagcttccctgggcatgtctttttcagggyagatggcaggcacacaagagggcaaaccaaacaagcaagtgcattgaaagcttctgagtggacttgatttctatctaagatcattggccaaagcaagttg

SEQ ID NO: 319004 - DNA, 201 bp, Homo sapiens
ttagtacaagtcatttaccactataattaagtttattcctaagtattttattctttttaatgttattgtaaatgggactgttgcttaatttccttttcagwtattaaaaatgattcattattaatatttagaaatgcagctgattttgtatgttgattttgtatcctgtgactttgctgaactcatttgttacttctaaca

SEQ ID NO: 319005 - DNA, 201 bp, Homo sapiens
agtggggtggagtaccttccacctctaaagggagctactgcaatgtcatatagcaaagggcttgtgagcaataaaccagtgtgaacaataatccaattcayaccacgtatggaactctcaaatccattctctgtcctttacaggagttgaaattgattggactggatatcccacactttgctgcagatcttccactgaatc

SEQ ID NO: 319006 - DNA, 201 bp, Homo sapiens
ctcagcctcctgagtagctgagactacaggtgtgcgccaccacatctggctaatttttgtatttttagcagagatggggtttcaccgtgttggccatgatkgtctcgacctcctgacctcgtgatccgcccgcctcagcctcccaaagtgctgggtttacaggcgtgagcaaccatgcctggcctgctacagcattttaac

SEQ ID NO: 319007 - DNA, 201 bp, Homo sapiens
agctcaagatcatagaagacactattaatcattgtttatgaggcatcattgaggacagaagtgttctcattacttatattaatcatatatgagtataattrgggtatataaggcacacttatgttttaaattaaataattaaaccctgatttagtagtttgggttttgttttgttttttttcttgttttgttctggtttgg

SEQ ID NO: 319008 - DNA, 201 bp, Homo sapiens
aaatcataattattgtagaaattggatattgaagacaacgaagaaaacaatgaagagtatttgccacaccgtttgaacagggcagtgtttgtagaatctcktgaagctcatccattccaaagacatccgtgagtgcttaccatgcacgaagcactgtgctggggcttgagatagaaatgttgagaacaacacacttggtct

SEQ ID NO: 319009 - DNA, 201 bp, Homo sapiens
accacacacaccagcctctttacttagcttaatgttgctcatcttttttcttttgagacggcatttcacccttgttgcccaggctggaatgcaatggtgcratcttggctcactgcaacctccacctcctgggttcaagtggttctcctgcctcagtgtcccaagtagctggaattacaggcatgcttcaccatgcccgac

SEQ ID NO: 319010 - DNA, 201 bp, Homo sapiens
tataaggcacacttatgttttaaattaaataattaaaccctgatttagtagtttgggttttgttttgttttttttcttgttttgttctggtttggttttcrttatttgtaaggtacttctaggtcttattatcataattccctatctctcttgaagggctattgatttctgatggataacacatccaaaaaaaatgtctgt

SEQ ID NO: 319011 - DNA, 201 bp, Homo sapiens
cgtgatgccacaaagagaagtaatactgattactgaataaatagactgaaagtcagaatagctgttgaactaaataggaatcatggcgttagtgtcctgacaaaaaaaaaaaaaaaaaaatacagcttctaaaatgtgtatgtctcaaagaaaatcaatgagaaaacagatcacaaattttgtagaaacattagttactgt

SEQ ID NO: 319012 - DNA, 201 bp, Homo sapiens
aatggaatagagtctagagaacaattgcttgaatttttctttctattccatataaagtaaattatttgtcattgagcatcccccataaatacaattatctmatactgaaactgctgacagccttgtaggctatttcagtagtggaagccaggactaaacacactcaactacattagaggttgtccctggaggacagaattg

SEQ ID NO: 319013 - DNA, 201 bp, Homo sapiens
gctgaggcaggagaatgatgtgaactcgggaggtggagcttgcagtgagccgagatcgcaccactgcacaccagcctgggtgacagagcaagaatctgtcaaaaaaaaaaaaggtattaaaaaaaccttaaaagatcaaacataagaattattagtattcaagggggagctgaataaggaagtttactgaaagaaataata

SEQ ID NO: 319014 - DNA, 201 bp, Homo sapiens
aattcacattgcttccttgttaagcacgtttttactcaaatgcagagtttcagcttaagtgtcaccccctttgtggcgtcttctctgggcttggacaccgytagcccattccttctctggggcagagtcttaagtaagctgctttatcacagcacaccatagatagttacaattctcgcttcttgtgtctgcctccccagt

SEQ ID NO: 319015 - DNA, 201 bp, Homo sapiens
tccatgcaggaattccatgttcagggtcatcccgtggtctaagacaaatgctggaatttcagcatttccattcacattccagccagcaggaaggagaagaygattgccaaaaaagtgcactcctttcctctaggaacactttctaaaagttttactttcttcctgcatcccagtgtctaggaactggtcacataaccatat

SEQ ID NO: 319016 - DNA, 201 bp, Homo sapiens
ttacaattttttgactgtaattcattcttacctctgccaaatgtgattgcaaagggaaagaagacatcataattgtacgaaagggttttaaccaggttttyttgttttttgtttgtttgtttttactaattgtttcagggcatttgaggcaattgtaagagcttacacatggtaaccactacataaatattaaaatgatgg

SEQ ID NO: 319017 - DNA, 201 bp, Homo sapiens
tgagacagcagatgactattagaattgaggaacaggcagggttttttggtctcaagagagcaatgccagtgactcaattactagaaataagtatgaaaagracagacaacacagcttcctttacgaatggatttatttattattaagataaaatgtctaagataaaaaatttatctaatgttttattaatcttctaatccc

SEQ ID NO: 319018 - DNA, 201 bp, Homo sapiens
gaacaataccgtctatgaacctcttcaagaataagctcaaaaatgaactccaccaattgatgtggaaagtatttcatgcatgggacgttctaaccagggamatgggaaagagctggcatagcaaaggtggaggggctaaggaagaacactgagagatgggacagagatggcttgccaattcacgcgtcacatgagaacacc

SEQ ID NO: 319019 - DNA, 201 bp, Homo sapiens
caagtcaataaatgttttacactacataaactgaattagaaacaaaaaaaaatcttaaaagtctaggctttctgcctttactacacagagttgatcaactycatctgctactttttctagctctaaatctgattcacaatcattacaacccaggaaacataataggtgcaacactcttttctgactctttaatagattgtt

SEQ ID NO: 319020 - DNA, 201 bp, Homo sapiens
gaaaagaacagacaacacagcttcctttacgaatggatttatttattattaagataaaatgtctaagataaaaaatttatctaatgttttattaatcttcyaatcccctcctatcaattcttttcttaaaaaattatattatcagccaggcacggtggctcacacctgtaatcccaatactttgggaggccaaagtgggtg

SEQ ID NO: 319021 - DNA, 201 bp, Homo sapiens
ctcatgcttcttaggccacagtagtggcggatagtggataaaactgaccccctttgtgtcctgggcacataacatcctggagtagggcttttcaagctataggactcctggcattctacttaataacttttgtgcagttttattttctttccttggacaaattggggagataaagttacacatgatttgtgttaagaaaaa

SEQ ID NO: 319022 - DNA, 201 bp, Homo sapiens
attcacaatcattacaacccaggaaacataataggtgcaacactcttttctgactctttaatagattgtttccatttggaaaaaaatctcatttatttgtyggatatggaagctgtttcataaattttccagatctgagtgagaaaaagaatatttaagtgaagattacccataaaattttgaaacacacatccctttttt

SEQ ID NO: 319023 - DNA, 201 bp, Homo sapiens
caaatagcacagcatgatttatataaatgcccatccttccaaagaatggaatcctttcacttggtgcaataagttgaatactgtctttttacagctgttcwcaaagacaaagatatttttgagcttcatttataaaacataaatatcatattgttgttccagccttcttgtaattcaaaatagcatcagtgctggctgaac

SEQ ID NO: 319024 - DNA, 201 bp, Homo sapiens
tgggttacccatgggctattcacaaagtacacaattaccctctacccagttgaagactctgaaggactcctgttcgtggtttacactgaaaaaacactgarttgtgagaggttacttgtcttagaaatagggagaaatgtatgtacagtcacttataaataaggactgtttcgcatgtgtaatattaggaaattgcaaaat

SEQ ID NO: 319025 - DNA, 201 bp, Homo sapiens
tttaggaaacacaaaaagacaatataaaggaaaattaaaattacttattaattttttatgaaagtaagtctactccaaaaatagtactttctcccacagtyttttgtctccttgcttgcttttctcattcagagaatagctaatctgctgccagcatggtactacaacttccgggttaccatggtgacgtggggagatcca

SEQ ID NO: 319026 - DNA, 201 bp, Homo sapiens
cttgctcttggactgctggcactgccctgctccaccaagcaggggacaaccatgactcagctgctctgtgtttctgatggccaagaaaattgttccctacwttctcaattcatttttcacacccactattgattcgacacccccttgggacactgacaaagcaaagttggagggtatgggtacaagagcagactgcacata

SEQ ID NO: 319027 - DNA, 201 bp, Homo sapiens
tttccttagttcagctaaagatgaggtccttgtccatcccacagccatgaaaatttaggttcacaggcaatttggagggtgagtaaaacagggttttattmggtgaaaaggaagaaaagggagaaacagggactctcactaggctggagtccctgctagagcacttcccactggcagcttgaatctcaggttccacacagg

SEQ ID NO: 319028 - DNA, 201 bp, Homo sapiens
aatgggttccatatctctttactataattactatcattttgtattatcatttcccttgcaccatttacaccaaaccttagtctgtcctccccagtagagcsacttgctccttttcctctcctggatctcagcttaggaatacagcatcaaattaaggagctgagaatgcatcctaagcaaataaatggaagtttcacattt

SEQ ID NO: 319029 - DNA, 201 bp, Homo sapiens
tctgtctttatcccttgagagcaatagcttctccctgcttctagaccctaagtatgttttctccatgcttaatacattatttctgctccaaaccttgatcsctttggctagtccatcccttcatttcattctctgggattttctttttgagtgtcctgctgggaccatgactgatataagacatggtaggtttggtggtag

SEQ ID NO: 319030 - DNA, 201 bp, Homo sapiens
ttattccaatctctgctcaagaaacatttttattcagcacttctttctgaacagcctatctaaaatcatccctatcactctaatattttaccactcttacytaagcttctttttcttcagagaatgtatcattcactaaatgacattacattgcatattttatgataacttagctcctctatgggaatatttataggtttc

SEQ ID NO: 319031 - DNA, 201 bp, Homo sapiens
gtgatgccacaaagagaagtaatactgattactgaataaatagactgaaagtcagaatagctgttgaactaaataggaatcatggcgttagtgtcctgacmaaaaaaaaaaaaaaaaaatacagcttctaaaatgtgtatgtctcaaagaaaatcaatgagaaaacagatcacaaattttgtagaaacattagttactgtt

SEQ ID NO: 319032 - DNA, 201 bp, Homo sapiens
ataatatgccatcggaacattcttttgcagtgctggcgtgggacggacaggaacattcattgccctggacaggctcttgcagcacattcgggatcatgagwttgttgacatcttagggctggtgtcagaaatgaggtcataccggatgtctatggtacagacagaggtaggaacataatctatatgtatttttaaattttc

SEQ ID NO: 319033 - DNA, 201 bp, Homo sapiens
caatttgctgtgtgacatttgtaccgctgttctctcaagcgtaaaatgagaatgctggaccagagaaatcactacattaaatttgttatgtaaaggaaatytcagtaaaaatatttttcctgcagagtcaagcaatattattacttcatctcaaaaaaagttttacatatttttttacattaaccaaataaatcagcattg

SEQ ID NO: 319034 - DNA, 201 bp, Homo sapiens
gtggcacatatacaccatggaatactatgcagccataaaaaatgatgagttcatgtcctttgtagggacatggatgaaattggaaaccatcattctcagtraactatcgcaagaacaaaaaaccaaacaccgcatattctcacacataggtgggaattgaacaatgagatcacatggacacaggaaggggaatatcacact

SEQ ID NO: 319035 - DNA, 201 bp, Homo sapiens
gatgagttcatgtcctttgtagggacatggatgaaattggaaaccatcattctcagtaaactatcgcaagaacaaaaaaccaaacaccgcatattctcacwcataggtgggaattgaacaatgagatcacatggacacaggaaggggaatatcacactctggggactgtggtggggaggggggaggggggagggatagcat

SEQ ID NO: 319036 - DNA, 201 bp, Homo sapiens
accacttaatttctaaaaagaaagacaatgagagaagtcactggagagatagtaaaatatttttagactatacgtttgagttcttctaaaaacagtaattyttgaattgaatactcctcagtgatgcttagacatcaacaggatttactgctgacctgggtcatttacactgaagctgagggaaacataaaaaaaacatac

SEQ ID NO: 319037 - DNA, 201 bp, Homo sapiens
tgcttagacatcaacaggatttactgctgacctgggtcatttacactgaagctgagggaaacataaaaaaaacatacaagcaagcattttaagacattctyttagtttaaagtttaagtagcttgttgcagaaaaaaaattggaaaataaaatatctgttctctaatcctcctgtctgtcttgaatttcaaagtttgaccg

SEQ ID NO: 319038 - DNA, 201 bp, Homo sapiens
tgactgcactccagcctgggcaacagagcaaggccccatctcaaaatgaatgaatgaatgaatgaatgaaatatatgcagtgaatttggtttttttaaactttgaaaaaatcaaagaaacacaaattccacaaagtattatgttctttatttacaatgaaaacagataatctgcaaattaataaatggaaagttatttgtt

SEQ ID NO: 319039 - DNA, 201 bp, Homo sapiens
gactgcactccagcctgggcaacagagcaaggccccatctcaaaatgaatgaatgaatgaatgaatgaaatatatgcagtgaatttggtttttttaaactttgaaaaaatcaaagaaacacaaattccacaaagtattatgttctttatttacaatgaaaacagataatctgcaaattaataaatggaaagttatttgttt

SEQ ID NO: 319040 - DNA, 201 bp, Homo sapiens
aggcaggagaatcgcttgaactcaggaggtggaggttgcagtgagcctagataaggctgcactccagcctgggtgacagagtgagactccatctcaaaatwaataaataaataaataaataaataaataaataaataaataaggaatgaaatacgtaacacataaaaacttaaagaaggttatatgctaaaaaacagttta

SEQ ID NO: 319041 - DNA, 201 bp, Homo sapiens
aatttgcatcctaatgaaaatgtaagcattgtgacagagaatgctttagtcagtctcaaatcctaaatttgagattgaaatttaagatagcttaggatgargaaaccacagtgtccttattgaaggagtgacttactgacttctacatccaatacagctccttatatttgacaataaaattgaaacaataatagtttaaat

SEQ ID NO: 319042 - DNA, 201 bp, Homo sapiens
gtgagcctagataaggctgcactccagcctgggtgacagagtgagactccatctcaaaataaataaataaataaataaataaataaataaataaataaatmaggaatgaaatacgtaacacataaaaacttaaagaaggttatatgctaaaaaacagtttacatgctgaaaagcagtttatatgtgagcatccgtgtttta

SEQ ID NO: 319043 - DNA, 201 bp, Homo sapiens
aataatattataatcaacttgtgtattaaaaatgtctccactttgctctttggctttcaatatgttgtgatttctttgggtacccaatgctctccttttayggcatgaaggctgttcagtgtttttccagtggaagttattaatcatacttcatcagtgaataatctgagactaagagaaaaaaaaccttacaaatgactc

SEQ ID NO: 319044 - DNA, 201 bp, Homo sapiens
tttgtataggaatataactagatccactgcattggttgcacattgtacaactccagtgaacaccgttcatatagaccacaatgtgaatgatgcctccaagaaatacaggtggcctgaccgtaatccccgtttcctgtaagacacatggcatagcaacttagaaatccccctttccccataacataccctttttgaagtgtg

SEQ ID NO: 319045 - DNA, 201 bp, Homo sapiens
taaacattctaaataggcaaaatgggtgattaatgagctaggtcagcatttacacttatagtcagatgtctacaatgtgttaagtttaaatggagcaatgtttttttgtttgtttgtttttggggggtttattgagatggagtcttgctctgtcacccaggctggagtgcagtggcgtaatctcggctcactgcaacctcc

SEQ ID NO: 319046 - DNA, 201 bp, Homo sapiens
gatttgattccaggtagtccaaaaaaagaatgtgtgttctttccaccaagcaatactgtcttaaatattagagacactgaaggtcaaagcagcaccttaascttttagttgaattatcaattcttgtgtgtgccaacattcaaatttaataaatgcattttattcatctatacgttctcactatttttctctatatggtat

SEQ ID NO: 319047 - DNA, 201 bp, Homo sapiens
tctcttaaaggttgggttgaatatctgttcctcagttattgctcttttactccccaaaatcttcccctacaaaggactaaaaatagtgatcagaaatgacmtttccctccttagtcccaggtttgtttgggatttcatgtaataaactagagcatgggtgtcctcttccactgattgccatgttcatttcatggccttagt

SEQ ID NO: 319048 - DNA, 201 bp, Homo sapiens
cttacctgcctgaactattgcaacaccctccttactgcctattggccttacatcatcccagtcagcctgttattctgcatactcctaattatataagtctkgctaaactgtaatggaatcatatcacttttctgcattacaagagttcatgatttcctttggcctaaaaaatatccaaactccttagcaaggcgtgtcttg

SEQ ID NO: 319049 - DNA, 201 bp, Homo sapiens
ttatgtaatgtctgcagagaatcatggccataagtgctatgtaagcaccaaacatcattaatattactatttaaaagaactgagcagcctattccttcctrggtggtaacctgagcacagcagaattttaataagtctgatcatttattgggttgccagctggagcactgaccatgctctggatgtacgtcacacagtctg

SEQ ID NO: 319050 - DNA, 201 bp, Homo sapiens
cataaagccatattttttcaaagaccatctagttcaaaatttaagctgatgcttagatattgtctctaatatcactgctaattaatcataaatggtgacaytaccaacagctgtaaagtagccattccaccttcagacaacagttttgttgttttgttgatttggtttggtcttgagattaactacttctggttgtagcat

SEQ ID NO: 319051 - DNA, 201 bp, Homo sapiens
taagaaagaggacaaagtcgagtatttcattcttcccataagactaaaaatgcctcacttaccaaatagtttctttctgcaccagtacagatccaccgcayatgtgaacagcctccacgaaaactccacaacaattctgttctttctgacttttctcttctctgaattcctattctgtctcatagtagacagcacaaaaca

SEQ ID NO: 319052 - DNA, 201 bp, Homo sapiens
tatgcattgtacttgattttcttataaaattagattggattctcagtccaaacccggagaggcatggaatgagagagaagaaaagaaaatagggaaggccrgctagttgagtggaacgccagcaatattagaaagcttttagagggtatttaaaagcaaacaaccctatatctatacctcattttatgaaaatggtatgtc

SEQ ID NO: 319053 - DNA, 201 bp, Homo sapiens
agcgagggggcccggaggactcgggggccctgggatggggaaccacagtggctttcgtggaggttttggcagtggcatctgggctgtggtcacagccatgracagagctggggctgaggccacggagctcactgaggcaaggccgaggatgagtggatgcccgtcaccgagctggacctcctagtcaaggacatgaagatc

SEQ ID NO: 319054 - DNA, 201 bp, Homo sapiens
atgccacattgccacgctcactctttgttaaaagagaagtaagttttctcaggtgaagaatttaccaggatactctcacatgcacacgatgattgaagtgrcacttttgtttctgctgttattgccgaggctgctgtttagatcaaggtgaggtcaaggagtagagggttgcagctgggcagaggacctgaagagttgcca

SEQ ID NO: 319055 - DNA, 201 bp, Homo sapiens
ttgaacccgggaggtggaggttgcagtgagcccagatcatgccacttcactccagcctgggcgacagagtaagactctgtctcaaaaaaaaaaaaaaaaaraaaagaaagaacagtaaagaaggtctcatgtaaatgagaaatgttctctacaatattattttagggggctacaacagcctggcagggtgcttaccaggat

SEQ ID NO: 319056 - DNA, 201 bp, Homo sapiens
gccattctctggctttactttatttattaaatgagcactttggactaggtaatctctaaggtcatttccatttatttatttatttattttatttatttttyatttttgtttttttgagagcttgtctcactctgttgcccaggctggagtgcagtggcacaaactcggctcactgcacctctgcctcctgggttcaagcaa

SEQ ID NO: 319057 - DNA, 201 bp, Homo sapiens
aaagacatttctgtactgacctttgtatgtaatcagctgacaccacaatttagaatgtcaaactatcctcatggtattgctgatttgattatggttagagrctgatgtgtctctagtgtgcatagttataattgacactgatgggtataaagcagttcacagggcttagaacagacaaaatttgaatcttctaggttccct

SEQ ID NO: 319058 - DNA, 201 bp, Homo sapiens
tgaagccaccacctgatctctacgttggcccctttcacccacagctgcagcagctgggatgcagggcaccaagtctctaggctgtacacagcacagggacmctgggcctgggccacaaaaccacattttcctcccaggcctccaggcctgtgatgggaggggcttccatgaagatctctgacttgacctggagacattttc

SEQ ID NO: 319059 - DNA, 201 bp, Homo sapiens
atgaaacaaatgcatttttacttcatatattacaaattcttcagtgaataattttgaaagcatagctagttatgaatgtttgttgtaagtattagcatcayattaggggaaatgattctttatagaaaatttccatagattttagttgacattgtgctgtatctcagaatggaacaccgactgtcttcaaaccaacataca

SEQ ID NO: 319060 - DNA, 201 bp, Homo sapiens
aatgcagggattacaggcattccctgcttaaatttttaaaaatttaaatgcataagatgataaagtagcaagctcagtgttagaatttagcttcgtggctaaaaaaaaaaaaaaaaaaaaaacttgttcttcccttctttctctctctcactactcactcagcaacatttattaagagcctgttttctgcaaagcactggg

SEQ ID NO: 319061 - DNA, 201 bp, Homo sapiens
atgcagggattacaggcattccctgcttaaatttttaaaaatttaaatgcataagatgataaagtagcaagctcagtgttagaatttagcttcgtggctaaaaaaaaaaaaaaaaaaaaaacttgttcttcccttctttctctctctcactactcactcagcaacatttattaagagcctgttttctgcaaagcactgggc

SEQ ID NO: 319062 - DNA, 201 bp, Homo sapiens
tgccatccaagaataatgtatccagcaaaattgtccttcaaatatgaaggaaagataaagtatttctcagaaaaacaaaagatgaaagaattcaccactamcagacctgtcatacaagaaatgcaagagagttcttcaatctgagagaaaaagacacatgcgaaaagaaaacttttcaaggtattagacctttgggaaaat

SEQ ID NO: 319063 - DNA, 201 bp, Homo sapiens
aggtgcagactacatcaatgccaactatattcctgtaagtagaaaaaaaaaatcaggcatcccaaagctaaccagccagagaaagactagcagggctatawggatgtgtcaaacagttcaaaagagagcctttcccaacccagcaattgaattctaaaaagtttgcattactccgtttcataataaagaatagaaagaaaa

SEQ ID NO: 319064 - DNA, 201 bp, Homo sapiens
agaaacattagttactgtttttggaggatctcctaaatatcggatccttggatggaaaatttgcatgtatggtttcatttgtccctaccccctaaaaaacwgtcataataagcttttagtatttccatgatttaccttaaataactgaggttcaaagaataaaagtgagagactgtcacttaagtgggatttgaacccaga

SEQ ID NO: 319065 - DNA, 201 bp, Homo sapiens
caggaggcaagatacagaatcaacttaagtgtccagcagagggtgaatggataaagaaaatatggtgtgtgtgtgtgtgtgtgtgtgtatatatatatatrtgtgtgtgtggaatatcattcagccttaaaataaaaaggtaattctgtcatttgcaaccacatagatgaacctgaaggacattatatcaagtgaaataac

SEQ ID NO: 319066 - DNA, 201 bp, Homo sapiens
tgtagtacaatagagtcacaaaatctgtagttataagaattgccttgagtactagctcctccacaatataatagggtagccttgagaaatccatttaattmtttgaacctcagtttcttcttctgtgaattgagacagtaacttaacggaatgttctgaggatcaaaggagaaaatatatttgaaagtgctttctaaaata

SEQ ID NO: 319067 - DNA, 201 bp, Homo sapiens
tgttattgaaattgaaattttttaaatgtaaagtttaaactaaggacatttctttaggtcagcctatagatgatgtccaagaattctctcaattctaaaastgtgaatcaaaaatttttttttctgtcaacctaaaatcgtcaaaagggtcagaatctcatttaaagagagttttatcaagcacaaagtgtgaggctggac

SEQ ID NO: 319068 - DNA, 201 bp, Homo sapiens
actagcaaagaatatatgagtatatgtgtatgtgtgtacgttcacacatatatacatattacatgcatatattgtgtgtatatatgtgtgtatatatatgkgtgtgtgtgtgtgtgtgtgtgtgtctatatgcatatgtgtgtgtcttcccaaatttgtgaaatgaagttcattgtagcattgtttgcaatagcaaaaaat

SEQ ID NO: 319069 - DNA, 201 bp, Homo sapiens
gcttctcaggttcaagcgattcttctgcctcagtctcctgaatagctgggattacaggcacgcaccactaggcctagttaatttttgtatttttagtagasacagggtttcaccatgttggccaggctggtctcgaactcctgaccttaagtaatctgcccacctcagcctcccaaagtgctgggactataggcgtgagtc

SEQ ID NO: 319070 - DNA, 201 bp, Homo sapiens
ctcagtctcctgaatagctgggattacaggcacgcaccactaggcctagttaatttttgtatttttagtagacacagggtttcaccatgttggccaggctkgtctcgaactcctgaccttaagtaatctgcccacctcagcctcccaaagtgctgggactataggcgtgagtcaccatgctcggcctccttgagatcgaat

SEQ ID NO: 319071 - DNA, 201 bp, Homo sapiens
gagaagccatcagattctggacatattttgaaaataggagcaacaggatttgctaataagttgatatggaatggaaatgaaaaaaggagttgaggctatamtcccagcactttgggaggctgagccaggtggatcacctgaagtcgggagttcgagaccagcctgacaaacatgaagaaaccctgtctctactgaaaatac

SEQ ID NO: 319072 - DNA, 201 bp, Homo sapiens
aaaccctgtctctactgaaaatacaaaattagctgggcgtggtggcacatgcctgtaatcccagctactcaggaggctgagacaggaggcagaggttgcgrtgagccgagattgcgccattgcactccagcctgggcaacaagagtgaaactccatctcaaaaaacaaataaacaaaaaaagagagttgaggctaactcct

SEQ ID NO: 319073 - DNA, 201 bp, Homo sapiens
atgatatccttgtatcatccatacctctgttttaagggttatatttataaattttatagtaatttaaaaacaatacagaaagtcacacctagtagtgcagytttattaagaatgtctcttaaaagcttagtcttcaccggaatcagtatatgtaaactgaccatttttattttctcacacaagctgctgtttagctgtcaa

SEQ ID NO: 319074 - DNA, 201 bp, Homo sapiens
gttctgcaaggatttctgactttcagaacttaagagtatgtttcctattgaaagaaatcatctaagttgaactagctatatctagattcagtgttaaatctttttttttttttttactgccataatgaccctcatgctgtactcaggtatttatctgcttgttctcaatcctaggcagttggcattttaagcaagaagtgg

SEQ ID NO: 319075 - DNA, 201 bp, Homo sapiens
gtaggtatgtctgatgggggttatttattgatttggaaaatcttttgcaatgaaaaggcgaaccctacatgtcacacaaaatcgtcactgtaacatgtgcacatacatattggctctttccagaatgtgcttaagttaaaattgctagcaaagccttaatttgcgtgaattttcccctggttttagtctcggaattagcac

SEQ ID NO: 319076 - DNA, 201 bp, Homo sapiens
taggtatgtctgatgggggttatttattgatttggaaaatcttttgcaatgaaaaggcgaaccctacatgtcacacaaaatcgtcactgtaacatgtgcacatacatattggctctttccagaatgtgcttaagttaaaattgctagcaaagccttaatttgcgtgaattttcccctggttttagtctcggaattagcaca

SEQ ID NO: 319077 - DNA, 201 bp, Homo sapiens
tgtctttggatttatcttatttggagctcttaggcttccttttttcctccagatttgggtaatttccaaccattatttctttgaataagctttctttccayttctgtctctcttcttgtgaaattcccataatgcatatataggccacttgatggtgccctataagtcccttaagtgagcttttatcactctttttcattt

SEQ ID NO: 319078 - DNA, 201 bp, Homo sapiens
gcagagcagcccaaggactgctggttgcccatttttatgtttatctattgattacatccttaacaagggggtggattattcatgagttttccaaaaagggkggacagttcccggaactgagggtttatgccccttttagaccatatagagtaacttcctgacattgccatggcatttgtaaactgtcatggcactggtggg

SEQ ID NO: 319079 - DNA, 201 bp, Homo sapiens
attggaagaatctgaaggagggacacatagggcaatgactgtgaagtctggcattgacctaaatacacaagcaagtgcccactctggaaaagttggtcttstaagcaaaggaatttttctggaggcctggtcatccccacttatatgcaactgactgggaaactcactgattgggaggaaaacaggtgtaataaggaccct

SEQ ID NO: 319080 - DNA, 201 bp, Homo sapiens
taaatacacaagcaagtgcccactctggaaaagttggtcttgtaagcaaaggaatttttctggaggcctggtcatccccacttatatgcaactgactgggwaactcactgattgggaggaaaacaggtgtaataaggacccttgattaggagtccagaggtgtggatcccagttcttgccctcacaaacaaattgtgttac

SEQ ID NO: 319081 - DNA, 201 bp, Homo sapiens
cacaagcaagtgcccactctggaaaagttggtcttgtaagcaaaggaatttttctggaggcctggtcatccccacttatatgcaactgactgggaaactcrctgattgggaggaaaacaggtgtaataaggacccttgattaggagtccagaggtgtggatcccagttcttgccctcacaaacaaattgtgttaccatagc

SEQ ID NO: 319082 - DNA, 201 bp, Homo sapiens
ccatagcaaagtaactcagaccctctgaattccagcttcctatctataaaatgagtctgggctagatgatcttttatgctccttcaacttttagaatttcrttccatacctgagttcagaataaaagcagcaagattaatgatgcaatgaaagtgctgatcttattctaagaattttgcaatatatgactcctaacaaaat

SEQ ID NO: 319083 - DNA, 201 bp, Homo sapiens
tgatgtagtatattttgagactgagtaacaatttcaaattcatgattggaccatgtaattttctgctatgttgcttaataatgtcatcataacttgtttakttttttccagagcatgtattctcatattaagcaattcagtttggggacaatgaactgatactcctatttaacctgctcaaattcaggtataggtctttgg

SEQ ID NO: 319084 - DNA, 201 bp, Homo sapiens
taaaaggaagcagaaactacaagaagcaaaaactcagaaccaagctagaggacatatttttaacacatctctcaaaaattaattaaagtctccattggcasaatcccaggatcagtagtgagtcctaaaaattaggaatggcatagacccaagaccttcaaagtttatagacataatgaacagatctactagttgaattaa

SEQ ID NO: 319085 - DNA, 201 bp, Homo sapiens
aattgctactagacctaagaaatgagatagacagcagcataataatggtgggagacttcaatattccactgacagcactagacaggtcattaagacagaamgtcaacaaagaaacaatggatttaaactataccctggaacaaatggacttaacaaatatttacagaacattctccccatcaaccacagaatatgcattct

SEQ ID NO: 319086 - DNA, 201 bp, Homo sapiens
tttaggaatacttttaactccatgtgattttttttcactttactcactgactttaatatctaatctcaaattaagatgtgactctactgtctatgttgacmtgtggaagaaaaactgatatctgtaagacagtagagtttatcactagcacaatataatggctcagcaaagtcccttttgcttgtgttctttagtgtaagt

SEQ ID NO: 319087 - DNA, 201 bp, Homo sapiens
aaaatatggaaagtgatggatatgttaaattgcttacctatagtaatcatttcattatggctatgtatagcaaaacctcatgttatacaccttacatttayacaatgaaaatagtattgtaccagtgttaatttcttagtttggcaaatgcaccatggtaatctaagatgttacagtagggcaaattgagtaaagaatgta

SEQ ID NO: 319088 - DNA, 201 bp, Homo sapiens
tgccaagtgacgtagattcaaagttatgagctatattaagaatacagctgaagtttgatgtttactctttaccttgtgataacaaaaatatttttaaaccmaaaaaagtaaacctcaatgatgtagtatattttgagactgagtaacaatttcaaattcatgattggaccatgtaattttctgctatgttgcttaataatg

SEQ ID NO: 319089 - DNA, 201 bp, Homo sapiens
tctcagaccatatttagtttgctttaacagtataatggtgcataccatggacagggaagaggaggaaatgaagagacataggtcaaagggagcaaacttgyggttatataggatgaacagaccaagagatctactgtacagtaggaggactatcattaataacattgtattgcaatactgaaaatttactgagagtagatg

SEQ ID NO: 319090 - DNA, 201 bp, Homo sapiens
cccgtagggctcgaattgacagactccacccagaatggcaaaatcacttgccttaatgccaagtgacgtagattcaaagttatgagctatattaagaatayagctgaagtttgatgtttactctttaccttgtgataacaaaaatatttttaaacccaaaaaagtaaacctcaatgatgtagtatattttgagactgagta

SEQ ID NO: 319091 - DNA, 201 bp, Homo sapiens
ttgccagcacagttgaaaccaagaacttctctagaacttgagtgtcaaaatgactcattcattatttactcctccacaggatgtttattttgtttattacrtgacactgtccacaaactggaagcagattttcagtggaaaaaaatcctcaaagtaaaaccctgagaagattattaatcctaagaaggataatctctttct

SEQ ID NO: 319092 - DNA, 201 bp, Homo sapiens
caaattcatcaggttcatttccaaaaataaaaatcccctgtatgagggaaattgtggatttcatgtcagtcttctcaggaaatatttattttatttcaaamtataattccagttgatctgcctagcagaaacaagtgaaattgcttctgttatcattgagatagagtgatttccattttcaaatattccaaatggcattta

SEQ ID NO: 319093 - DNA, 201 bp, Homo sapiens
aaaccaattccatggatgacttttcaggtattgtccataaatacatatttggagacttggagcaaagtttttaaaaagtccatcaaccgctgatcccctaracaccagcagatcctccatctggtctcttcctcactagcatagcttccttcatctttaagagattatgctggttaatctttaatgacaaggatcaacacc

SEQ ID NO: 319094 - DNA, 201 bp, Homo sapiens
atgtaacagaaacttaacagtcatgtgttatgtgttatatgacagactcagtgttaggacagtaagttaagagatgaagacaaatgaacatgtggaacaayaatgagactgattttttgtactggtgaccatgggcaagtgacttaatctttctgagcctcagtttcctcagctacaaagtgagattaaaagtaacgatac

SEQ ID NO: 319095 - DNA, 201 bp, Homo sapiens
aaattgtaatggcagattctaagttaggattttgattcataatgtttaaactttgacactttttaataatgaattctaaatttaaagttttgattgcttgwtgaaaagcatagttcaaacttgcaaattccatttttcttaatgcataccaacatttagtaaaatacctgtaggaatttcaatgaagattttagttagaca

SEQ ID NO: 319096 - DNA, 201 bp, Homo sapiens
taaaacttgcggtgcttgattttagtagcaccactaatatgaagcactattgtaggatggatggatagttgcatggatggatggatagatggatgggtggrtggatggatggatggatggatggatggatggatggaataatgaatggataaaataagcatatatctactaagtacccatcaccaatataagcaaaatcgt

SEQ ID NO: 319097 - DNA, 201 bp, Homo sapiens
aggagagataaatttttattagaagctcatggggcctagcacggtggctcatgcctgtaatcccagcactttgggaggccgaggcaggtggatcacctgasgtcaggagtttgagaccagcctagccaacgtggtgaaaccccatctctactaagtatacaaatattagccgggcatggtggctggtgcctgtaatcccag

SEQ ID NO: 319098 - DNA, 201 bp, Homo sapiens
tggctcatgcctgtaatcccagcactttgggaggccgaggcaggtggatcacctgacgtcaggagtttgagaccagcctagccaacgtggtgaaaccccayctctactaagtatacaaatattagccgggcatggtggctggtgcctgtaatcccagctactcgggagactgaggcaggagaactgcttgaacccaggagg

SEQ ID NO: 319099 - DNA, 201 bp, Homo sapiens
gagtaatttgttagaggcaaatgcccatatatcgtcaatttaatcagccattccttcactgatgtaacagaaacttaacagtcatgtgttatgtgttataygacagactcagtgttaggacagtaagttaagagatgaagacaaatgaacatgtggaacaataatgagactgattttttgtactggtgaccatgggcaagt

SEQ ID NO: 319100 - DNA, 201 bp, Homo sapiens
ccacagttttccaaagagaagctgatagtaaaatggaaaatacacagctgctgacatttccatatagctactatattatattttgcattgactaactcagsatctgaggttcattctttatattttagccactaacttaggaaagtagagccatgactttcaacaagtttgggtcatgatacctatctcaattgttgtttg

SEQ ID NO: 319101 - DNA, 201 bp, Homo sapiens
ttttttctttcagcacttttaatatatcatcctgctctctagtgacatgcaaggtttctgctgagaaatctgctgacagccttatgcagattccctgtatrtgataagtcatttttttcttgttgctttcaaaattctatttatctttggtttttgacaatttgattataatgcatctcagtgtggatgtctttggattta

SEQ ID NO: 319102 - DNA, 201 bp, Homo sapiens
cttttagtttattaagtatagtaataatacctgatttaaagtacttggctacatccaaaacctggattttctcttgaaaattagtcacattttcttggatmtttgtatattgactaattttggactatttcttgaatattgtgagtattatgttataaaggctgtaatatttatgtttcaggattaaactaatatttttgt

SEQ ID NO: 319103 - DNA, 201 bp, Homo sapiens
gttaagaaccactttaggaacataagagaacaaagctaaggatgggcacttctgtggagacattttatggtaaggatcctgttgtgttcctcaaattatcrcccaggttttagccagcttctttaattgagccagcctgttgtgtgtttcttctctaatataatcacagcctgccttttcgttctcactgttgccaaattc

SEQ ID NO: 319104 - DNA, 201 bp, Homo sapiens
aatcaatttgactatagaacaagcccttcctctagaggggcactcaaaccccaacatggaattggaagctctggggttaactgaggaagaaggggagaatygatagcacctcagccagcaggggagggggtctgcccttcattaatctgtaatcagccagctggacagacggcagcctgtgtttcaattgctcccatgtga

SEQ ID NO: 319105 - DNA, 201 bp, Homo sapiens
ctagtagcaaaggaataataagccctgatgaaatgccacattgccacgctcactctttgttaaaagagaagtaagttttctcaggtgaagaatttaccagratactctcacatgcacacgatgattgaagtggcacttttgtttctgctgttattgccgaggctgctgtttagatcaaggtgaggtcaaggagtagagggt

SEQ ID NO: 319106 - DNA, 201 bp, Homo sapiens
gcatcataactgaaggccctgagaacaaatcttcgtcagttgttttatggagtttcatactgaaagattttttgaagaagcagatcctaggtgtggtggaratggagagatttcttaagttttcagaagtctatatgaatctattattaatttcaccagtactttttcatctttcctccccacccactctgctgtttcttg

SEQ ID NO: 319107 - DNA, 201 bp, Homo sapiens
caaatcttcgtcagttgttttatggagtttcatactgaaagattttttgaagaagcagatcctaggtgtggtggagatggagagatttcttaagttttcaraagtctatatgaatctattattaatttcaccagtactttttcatctttcctccccacccactctgctgtttcttgaatgtaagatatcatcaagctattc

SEQ ID NO: 319108 - DNA, 201 bp, Homo sapiens
ataactaaaacagaatatttgagtttactcaacagcatatttgagttggcaaaagaaagatcaaaagaaagaaaggttagtgaactttaagacaggtcaaytgagattacctagtcagaagaatagaaagaaaaatgtatgaagacaaatgaatacagtctcagggacctgtgggacaccatcaagcatatcaacatacac

SEQ ID NO: 319109 - DNA, 201 bp, Homo sapiens
tgcatcttaaacattgtctcattccttcttaaaatgagtcatccatttgtaaactgatttctttgtggcattgtccccataaactttttataaagcatcartgatttcaccgttcttccactgaagcttcaccataaatgtgatgtttgttcttgccttaattttagcagaattcatgttgctttcacagggggtcttttc

SEQ ID NO: 319110 - DNA, 201 bp, Homo sapiens
gtttgaagcagttgaaaacaaataaataaacaaaaacaggtacttgatatgagtctgaagggtagaggagatggaaggcctggagatgtgaatgggatccmctagcagagagaaagggagtgaagggcagtgggccggaagggggtcttgagaggcaccgattgttaatttcaggcaaataaggaatttaagaagttgaag

SEQ ID NO: 319111 - DNA, 201 bp, Homo sapiens
ctatggattgatcattggttctgaccacacaactattatgacaagtgaaatagaataacaacaaacggctatgatttttgtctttgtggatggatttcatrggggggagggcagcagtagaaagtataaatgacatgaaagaaagaatattaagctccaaaattgtgcttaagtaaatctggaataaaaaactgcagcagg

SEQ ID NO: 319112 - DNA, 201 bp, Homo sapiens
atggcaacaacagacaatggggactactcaaggggagagggagagggtggggcaaggtttgaaaaactaactgttggctactgtgattaatacctaggtawtgggatcatttgtatcccaaacctcagcatcacacaatatatccagataacaaacctgtgtatgtacccccaaatcaaaactaaaaattgaaaaagaaaa

SEQ ID NO: 319113 - DNA, 201 bp, Homo sapiens
gaccggtggtctgagccacaccacccttccttgatgtatatggtggtacagagagggtctctgtgctccatgcccaagcagatttctaggcattcagagcrctcattcacctggttcagcagcctgagccacctaccctccttgtgcaaagactggtacagagggaccctctctgctacatgcccaggaagatctccaggc

SEQ ID NO: 319114 - DNA, 201 bp, Homo sapiens
aaatgtatttggatgtataatatggaataatttgcatctagaaagtttgctccagctgcaaatggggaatggaagaggggcaacactgtatgcagagactrctaccataggctgagtaagaaaggatgaggtctctgttttataatagcccccatttattggaacttggctatgtgtcagcaactataacaacactttaca

SEQ ID NO: 319115 - DNA, 201 bp, Homo sapiens
caatttatgttatacaggtaacaatctaagatcaatttttctttttaaggattacaaacctttgcgcatgtgtgtttaatttgggtatggggaagggagargaagcagttagagagttctgtttaccctattggcagaaaagggccaacaggcacaggtcacaaccacaggcaaaaggaggttagagtagcctattattaa

SEQ ID NO: 319116 - DNA, 201 bp, Homo sapiens
agctgctctgtgtttctgatggccaagaaaattgttccctacattctcaattcatttttcacacccactattgattcgacacccccttgggacactgacaragcaaagttggagggtatgggtacaagagcagactgcacatagggccatgaaccattaacaatgcaatacttctagatttggtgcaggaggctagaatgt

SEQ ID NO: 319117 - DNA, 201 bp, Homo sapiens
aatcacagtttcagagaggagcccctacagagatagcaggcagagagatgagaaaaaacaagaatctgggacttgaatctaaaaggcaggcagaagaaggktggcagaaggcagcaatggagactgaggagggtgggtgagaaggtagggatctgttgggagtttgtactatgatagaagccgagggattctaaagcacta

SEQ ID NO: 319118 - DNA, 201 bp, Homo sapiens
gagggcatcccatctacctttgaggcctggaacctctgggtgcatgggtatctcttgcacagctgtgacccaccaccacactatacactcatcaacaaatkttcctcacctggcacattgcccagggcttgctcttggactgctggcactgccctgctccaccaagcaggggacaaccatgactcagctgctctgtgtttc

SEQ ID NO: 319119 - DNA, 201 bp, Homo sapiens
caaatctggaacaccgagaaaatagcaagcctagagatacagatttgagaggtttttgcacataggtagttggtaactaaatcacagtttcagagaggagyccctacagagatagcaggcagagagatgagaaaaaacaagaatctgggacttgaatctaaaaggcaggcagaagaagggtggcagaaggcagcaatggag

SEQ ID NO: 319120 - DNA, 201 bp, Homo sapiens
atgacttcactagacagtcaagtgctcccgctgcactttgggtctgtccatcataagcacacattgtgctgatatcctccatggcaccatcagagggatgrgagggcatcccatctacctttgaggcctggaacctctgggtgcatgggtatctcttgcacagctgtgacccaccaccacactatacactcatcaacaaat

SEQ ID NO: 319121 - DNA, 201 bp, Homo sapiens
gaatattaataaaagctaagagactgttaagagggaaattatcacatgttctgagaatgtgtcacggaaggactttgccaagccagggcaggatgatgatratctaagaaggctttcctgagggcatgatacatgtgttcaaatccacaggatgaatgggaatatgcaaaggagaggctagagtaggaatatcaaagaagg

SEQ ID NO: 319122 - DNA, 201 bp, Homo sapiens
gttaaaagtaaaaggattttccatcagctctcggtgaatttgaaagcatatttataaccaggattccccattcactaagcatttaatgaataaacagccastgaccaccagcaaacttgcagctctggaggcaggactgtgttttggatccccagtacttagcaggctgtgtggttcttagtagattcttaatttgtatcg

SEQ ID NO: 319123 - DNA, 201 bp, Homo sapiens
tgctgggattacacacgtgagccactgttcccggtggtcattttcatttctataattagatattatatgcttctaagtgacaagagactaaagacatttcygtactgacctttgtatgtaatcagctgacaccacaatttagaatgtcaaactatcctcatggtattgctgatttgattatggttagaggctgatgtgtct

SEQ ID NO: 319124 - DNA, 201 bp, Homo sapiens
ctatttatatttgtggacagtaagatttattagtaaggatcattatttttaggtctttgagatacaaaaattctgagattccgaataagtcctaaagtacrtttagtataaaaaatgtatcatgaaaaatgaaacacactttggcaaattttccaataggttaaaagtaaaaggattttccatcagctctcggtgaatttg

SEQ ID NO: 319125 - DNA, 201 bp, Homo sapiens
ccattgctaagacattccttcttaactttctttttctaccccctgccctcttctttctagttcccacaggaataaaggatttaatgctctatcctttgggycctacggccgtggttctgagctggaccagaccttatttaggcgtgttcagaaaatacgtggttgaaatgttttatttcaaccctgctacaatgacatcag

SEQ ID NO: 319126 - DNA, 201 bp, Homo sapiens
acaatatgtatatgatttctatttatatttgtggacagtaagatttattagtaaggatcattatttttaggtctttgagatacaaaaattctgagattccraataagtcctaaagtacgtttagtataaaaaatgtatcatgaaaaatgaaacacactttggcaaattttccaataggttaaaagtaaaaggattttccat

SEQ ID NO: 319127 - DNA, 201 bp, Homo sapiens
ccatggtccatgtacacaggacacctttccaattgtttgtgtctttttctttcattaatgttttgtggtttttagtacaagtcatttaccactataattawgtttattcctaagtattttattctttttaatgttattgtaaatgggactgttgcttaatttccttttcagatattaaaaatgattcattattaatattta

SEQ ID NO: 319128 - DNA, 201 bp, Homo sapiens
ccttttgctgcctcggttagctggccccactggttatggaaagataagtaccaagaggcataaggatatatggatcctagaccttgtcctgacatcaattwgctgtgtgacatttgtaccgctgttctctcaagcgtaaaatgagaatgctggaccagagaaatcactacattaaatttgttatgtaaaggaaatctcagt

SEQ ID NO: 319129 - DNA, 201 bp, Homo sapiens
acacacaatacctgaaatctctgcctacctaaggcaggtttttcctgagttttttctcaatggtataacatttgggactttgataggaagtatgataaatytgcagattgcacaataagaagtaaggacatttgaacaatattaagtcttccggtccatggtccatgtacacaggacacctttccaattgtttgtgtcttt

SEQ ID NO: 319130 - DNA, 201 bp, Homo sapiens
gacttttagagttttgttttgtcttgttttaactattataaatctcatgtccttgctattgctttttcggaatgaattgcagtatggatggctttccaagwctgtcataaccatggctaatttatgcagaatgtatcttaactttttgaagtcattaggattttgaaccttacctaatataagtgaaagagaaaaaactaa

SEQ ID NO: 319131 - DNA, 201 bp, Homo sapiens
agaatatttgagtttactcaacagcatatttgagttggcaaaagaaagatcaaaagaaagaaaggttagtgaactttaagacaggtcaactgagattaccyagtcagaagaatagaaagaaaaatgtatgaagacaaatgaatacagtctcagggacctgtgggacaccatcaagcatatcaacatacacattatgtgagc

SEQ ID NO: 319132 - DNA, 201 bp, Homo sapiens
agctgaagcaggagaacggcttgaacacaggaggtggagattgcagtgagcccagatcgtgccattgcactccagcctaggtgacagagaaaagctccatstcaaaaaaaaaaaaaaaaaaaaaagatgaatggagagacaaatatgatttggtatatataatggaatatcatttggcaataaaaaatgaattactgatgc

SEQ ID NO: 319133 - DNA, 201 bp, Homo sapiens
aattaatggttgcctagatctgagaggctgaaagaaatgggggatgactggtaatgtaggtaaggtttctttttggggtgatgaaaatattctaaaattargttgtagtggtggttgcacaacccaggtaatatcctaaaatccactttagtatgtcatttaaagtaattgtgcacttaaaatgaataaatttcatgtaat

SEQ ID NO: 319134 - DNA, 201 bp, Homo sapiens
aactaggaacttatgctaggatttcttgtcaaaatatgcagtccattcttcttgtcatccactttttgctcctaccacaaagcaaaaagaaaagcagaagmacatttccagacacaaagccacaatagttctctaagaaccagaaacaagataaaaactcaaagcagggaaatgggctgaagtaatgggccctctgtgctc

SEQ ID NO: 319135 - DNA, 201 bp, Homo sapiens
atgctttacatattttgaagctctgttgttattaggtgcaaaagctttcaagattgctatgtcttcttgataaactgacccttttgactatatgtaatgtmcctctatattccaagcaatatgccttgtgttaatttcccttttgcctgatattaaaatagccatagttttcttttttaagtgtttgtgtggcatacctaa

SEQ ID NO: 319136 - DNA, 201 bp, Homo sapiens
aattgtctgcaaaaagcaaggcaaagcatagaggtcatgcatggtgttatttttcatttgtgggaggagaatacatgttcttattttgatattaaaattargaaagactagtggtcaaaattgaaagtatagagctttactgtgacataattcagtttcttataaggggatcatatataagagtaccccaaagtactttgt

SEQ ID NO: 319137 - DNA, 201 bp, Homo sapiens
aacaatttcaaattcatgattggaccatgtaattttctgctatgttgcttaataatgtcatcataacttgtttatttttttccagagcatgtattctcatrttaagcaattcagtttggggacaatgaactgatactcctatttaacctgctcaaattcaggtataggtctttggctgagagagagaaaaagatatattta

SEQ ID NO: 319138 - DNA, 201 bp, Homo sapiens
caggaagaaccagaaaagcaggggcactctcatgattgcaaaagcaagtgctcatctgggtggtacttttaagtgctttggcaaaggatgaggtaaaattmaaagacaacagcatcactgttttcagaacttcattcagagccattacgacaaataatttggttgcaagggtgtttgatacctgaaataacataaggattc

SEQ ID NO: 319139 - DNA, 201 bp, Homo sapiens
cttaattttaaattaagaatctttttaatatcttaaccttacatgtataaatttattaggtctgataattttattattagaccttcactaaaatgttaaaktttagctatcatggttttaatttcaaaattttttttcttgatcttaggttatttctttttcatagcaatttgttcttgctttatgacttttgagtttttt

SEQ ID NO: 319140 - DNA, 201 bp, Homo sapiens
taaaaggattttccatcagctctcggtgaatttgaaagcatatttataaccaggattccccattcactaagcatttaatgaataaacagccactgaccacsagcaaacttgcagctctggaggcaggactgtgttttggatccccagtacttagcaggctgtgtggttcttagtagattcttaatttgtatcgactagatg

SEQ ID NO: 319141 - DNA, 201 bp, Homo sapiens
cccacattaattttaatatgtatgcctgatgaatttattaaaaatttctacttttaatgagattgcaaattccaataaaatttctaattgtatcttgctgwtatatagaaaaactattaatgtttgcatgtctgtcttgtatataattgctatattaaattattttattaattctagtggttttttaattagttttcttgg

SEQ ID NO: 319142 - DNA, 201 bp, Homo sapiens
accaaatagcagatgacgctggtggagcgagggggcccggaggactcgggggccctgggatggggaaccacagtggctttcgtggaggttttggcagtggyatctgggctgtggtcacagccatggacagagctggggctgaggccacggagctcactgaggcaaggccgaggatgagtggatgcccgtcaccgagctgga

SEQ ID NO: 319143 - DNA, 201 bp, Homo sapiens
aattccctctagtcactgcacagaacaagaaaaatgaagtgagttaatctgtaatttgagaacagaagttataactatatgtgactcagatcacagttacrtcttttggggttccaacagcttttaaattttacttatgttcatttttcttttctttttttgttttttttttttttttttttgagatttcactcttgttgc

SEQ ID NO: 319144 - DNA, 201 bp, Homo sapiens
aaaatttttaattggatcctgctgatatacagaaaaactattaatgtttgcatgtctttcatgtatataattgctatattaaattatcttattaattctaktagtttttcaattagttatcttggaatttttcttagtcatatccgtgaaaattgttagctttatctcttcttttgcaatgtttacactttttaattatat

SEQ ID NO: 319145 - DNA, 201 bp, Homo sapiens
tacccagtcagacaccagccaagcacagcttccaggtctttaaacttctcagcacagtaggccctaaaactgttcccatggtaaccttccatcaaacaggygagctgtaaaacaggtgagctcaggctgtcatttgcagacaaaacaagaaaaagaaatactgactgctcttgttcgtgatgccacaaagagaagtaatac

SEQ ID NO: 319146 - DNA, 201 bp, Homo sapiens
caatgtttggtaagcttatttctaagtattttatcattgttttccacttttaatgagatttcaaattccattaaaatttttaattggatcctgctgatatmcagaaaaactattaatgtttgcatgtctttcatgtatataattgctatattaaattatcttattaattctagtagtttttcaattagttatcttggaatt

SEQ ID NO: 319147 - DNA, 201 bp, Homo sapiens
cacattatctttcaataagtgggacagctacattttcacaacttgctggggaaaaaccattttcaaactctaaataccagtaagcatggaaaagaaggatrgaaaataataaagtcaggcaaaatgatatttgtgggtgcttcattttatgaaaataaaacttgtttcagaggcagaatgaacctgttaggaacccctgtt

SEQ ID NO: 319148 - DNA, 201 bp, Homo sapiens
aagtgcccagaccccttttgctgcctcggttagctggccccactggttatggaaagataagtaccaagaggcataaggatatatggatcctagaccttgtyctgacatcaatttgctgtgtgacatttgtaccgctgttctctcaagcgtaaaatgagaatgctggaccagagaaatcactacattaaatttgttatgtaa

SEQ ID NO: 319149 - DNA, 201 bp, Homo sapiens
agtatttccttctatcccaagtggttagttaccaagtatttttccaataaaactttccacccccaataggaattctggagccagcaagtaacatcataaastttttgcttctattacagaaggtaaatcagatcatcccacacccctgctgaataacccataagtgtcttcccatcgcctttagcataaagcctctaactt

SEQ ID NO: 319150 - DNA, 201 bp, Homo sapiens
aaaagaaaaaacatatataaacaaatgagcacatagcctggcccagatgagggcattaatggacaatagtgctaaattttcagtgatggtgggagctttcyttcaattctgactagaacatatctctgacccgtttttgtccttgccccgcagcccaggaactcgtcctgtgttattctcctctttagtgccacccactct

SEQ ID NO: 319151 - DNA, 201 bp, Homo sapiens
atgtgcctctgctcacacctagcatgatgcctgttgcccggttgccacttagctcatgcttgtgtgttattgaattaacaaatggatagctctccagggcyctgtgaacaaaacatccggtgaacgtaattaccgaattctgtagtgtttggaagttagttaaacaaatgtttataaaaccgctataatttaaaagacatt

SEQ ID NO: 319152 - DNA, 201 bp, Homo sapiens
aggaagtggaagaaaatgctgatggctctcatttctttatgcaagggtgtttcaaaatcttgttttgaaaaaaatgctggctcatcttttgctgttgtacrgtagtacttgtcactagtctggccatgggtccaccaagttagcaacttctttgactcaagaataagttaatactaaatgtttcttagtgcggatagttgc

SEQ ID NO: 319153 - DNA, 201 bp, Homo sapiens
ttctgcattacaagagttcatgatttcctttggcctaaaaaatatccaaactccttagcaaggcgtgtcttggtcttgggtcaccagcactctattctgakcatcctccgttgatctaaacactctagaggtctctggatgctcttcccgcttaacaagtgccttttctgaaccagattcccctggcaaactcacgagcat

SEQ ID NO: 319154 - DNA, 201 bp, Homo sapiens
ccccgggactctgattttcctgaagaaactgaaaagaaagaatacccaggtggaaaaggtaccctggtagctggacaggatgtttagtggatgcattatgyaatgtctgcagagaatcatggccataagtgctatgtaagcaccaaacatcattaatattactatttaaaagaactgagcagcctattccttcctaggtgg

SEQ ID NO: 319155 - DNA, 201 bp, Homo sapiens
atacctgcttaactgctatccatcagatctctgctgaaaagtaattccttagaatgtttttcagtaacactgttcacctccccactgccccttcccccccmcacacacaatacctgaaatctctgcctacctaaggcaggtttttcctgagttttttctcaatggtataacatttgggactttgataggaagtatgataaa

SEQ ID NO: 319156 - DNA, 201 bp, Homo sapiens
gaatcgcagaaatttcagtgacttccccaagtgtcaaaattaagattataactcaggaatatttgataacaaaacccattttcatttagcctgccatgacycatgtccttgggttgattatcaagtcagtcataaggtaaaactattaaataattgaatttgttttgcttactccaacctccaccctctgtgcccccacta

SEQ ID NO: 319157 - DNA, 201 bp, Homo sapiens
cagagagtgctgggggcatgaacagcaccatggtactgtctcactctgaaaaaggctggatttttgtaccccacaattagtcagtcattagctgtgggctkccctcagcaggagaacgcaacctcttaggcattttctatcgaggcagctctgtgcagtggaaggcaactatcaagagataggtactgctgtgctgttagc

SEQ ID NO: 319158 - DNA, 201 bp, Homo sapiens
cgtgtatgtcttctttagaaaaaaatgtctatttaaggactttcccattttttaatctggttatttctatacttttgctaattaagttgaaagagttcctyatatattttggttattaaccccttatgagatacatggtttgcaaatattctcttccattacatagatcgtcttctcactataataatcatttcctttgct

SEQ ID NO: 319159 - DNA, 201 bp, Homo sapiens
ttatgtcatcatcatcatctttattatcatcattgctattattattggtcagacacaattctaggaagggcaaaggctcctaactcctgtcttcctctttrctcccaaatagagggtatccccagtgttctgctcagtttctgatgcatgcttgttgcccaaaatatatctgaggaatggctgcataaataatggaagact

SEQ ID NO: 319160 - DNA, 201 bp, Homo sapiens
catttagcctgccatgacccatgtccttgggttgattatcaagtcagtcataaggtaaaactattaaataattgaatttgttttgcttactccaacctccrccctctgtgcccccactacactagtactcttcagaacagtagtaacacttcacgtttatgtagttctctaacacatattatctcatttgatcccaacaac

SEQ ID NO: 319161 - DNA, 201 bp, Homo sapiens
tcttggcacttctttttggcagaacaatttcttttcacttaaaactggcaggttgaattctttcctcaagtgtgttttgtttaatctccaaaattaggagytgtgcagagcttccagcctgagttcattttagaagtcaggaaataattgctgcattattatatatattgaactgtcattttacacatgcacacatggcaa

SEQ ID NO: 319162 - DNA, 201 bp, Homo sapiens
aaaggagctctaaatcttgaaacaaatcctcaaaatacatcaaaacagaaccccctcaaagcataagtctcacaggacctataaaacaacaataaagaaaraaaaggtattcaggcaacaaatagcacaatgaatagaatggtacctcccatctcaatactaacattgaatgtaaacagcctaaatgctccacttaaaaga

SEQ ID NO: 319163 - DNA, 201 bp, Homo sapiens
ctgtgtctccaaaatttctgtttttttcatgatgctacactttttgaggatttatcaggcatattctagaagaagtcagtcacagtttgtgctgagggaayttgccaccaattaagtacagatatgaaaggtagcatttgggaaatcatcttggctccaggatcttacagtctggggactgtagtacaatagagtcacaaa

SEQ ID NO: 319164 - DNA, 201 bp, Homo sapiens
gaggattgcttgagcctgagaggtcaaggccatagtgagccatgatcgcactactgcactctagcctgggtaacagagttacatgctgtctcaaaaaaaawttttttttaaataaaaaaactaccaagccagcactacaagaactgctaaaaggagctctaaatcttgaaacaaatcctcaaaatacatcaaaacagaacc

SEQ ID NO: 319165 - DNA, 201 bp, Homo sapiens
aattttgttgttgctgatattaacaacccaacaagaaggggagttaaagggcagtgcttacaaaaggtcacaatatactgcctaaatatgctgtgagcttygtaagtaggctgcactcttgttagctatcatcaggatttaattaactggtgtcacagctgaattgacatttcatgcctgtggggaaatttgactgaactc

SEQ ID NO: 319166 - DNA, 201 bp, Homo sapiens; identical to SEQ ID NO: 66929

SEQ ID NO: 319167 - DNA, 201 bp, Homo sapiens
ctctacaaaaagtacaaaaattagctgggtgtgtcgtgtgtgccaatattcccagcaacttgggaggctggggtgggaggattgcttgagcctgagaggtyaaggccatagtgagccatgatcgcactactgcactctagcctgggtaacagagttacatgctgtctcaaaaaaaaattttttttaaataaaaaaactacc

SEQ ID NO: 319168 - DNA, 201 bp, Homo sapiens
ggagccagcaagtaacatcataaagtttttgcttctattacagaaggtaaatcagatcatcccacacccctgctgaataacccataagtgtcttcccatcrcctttagcataaagcctctaacttttttagaagggtctacaaagtttcccatgatgccacctctactggccattcaaatgttattttggtttctcatcca

SEQ ID NO: 319169 - DNA, 201 bp, Homo sapiens
ttcaaagattttccgagtggcaattagttcaaagagttaaggtttgctggtaaatatctcttattagatcttaaaaggtgtcagactctctggaaaagacytaataagggaaagagatgctctatagaatgtaaatttcccctacaagagatggctttgcaaaatcacttcaaaatacgtcaaagaaatctattttggggt

SEQ ID NO: 319170 - DNA, 201 bp, Homo sapiens
caaggtcaaggtgccagaccattcagttcctggtaagggtccttttgctggttttcagacagctgtcttcttgctatatactcacatggtgggataaaatragagtaagctatccagtctcttcttatgaggacactaattccatcaacgaaaaccctacccttatgaccttatctaaagtaccttctaaaggccccagtt

SEQ ID NO: 319171 - DNA, 201 bp, Homo sapiens
tttctagcccttcatcctgtgttggccaaaatgatttgactactttatagaaagctgtcgttttaccaagaacacaatttttaagcctttccatccataawtgtttcatttaattcttaaagtttaggccaggcatggtggctcatgcctgtaatcccagcacgttgggaggccaaggcaggcagattgtctgggctcagg

SEQ ID NO: 319172 - DNA, 201 bp, Homo sapiens
attatctccttctgtaattaaaacattttagtaggtgtgcaaccaaattgccaaactaagacagatcttgttattttaaaagaacattataatttcaattrttctaataattgttattattcgatagagcaaattatgaatgcaattttcaaagcaaatgaaaacataagaaattcatgatttttctatactgctacaaat

SEQ ID NO: 319173 - DNA, 201 bp, Homo sapiens
gatgtctggtttttgtttgcttgcctaggttcctcaattcaccccatcagtatttccttctatcccaagtggttagttaccaagtatttttccaataaaastttccacccccaataggaattctggagccagcaagtaacatcataaagtttttgcttctattacagaaggtaaatcagatcatcccacacccctgctgaa

SEQ ID NO: 319174 - DNA, 201 bp, Homo sapiens
tgccccttcttcatcccagcatcatatcatcttgggggctctcatcttataccctttttttattccagatttctttattctttattctttattcaaatccrttgtaatttgaatcccagtttggatgtctggtttttgtttgcttgcctaggttcctcaattcaccccatcagtatttccttctatcccaagtggttagtt

SEQ ID NO: 319175 - DNA, 201 bp, Homo sapiens
cttccacaaatactgcttctgtgccctaacacctccaggtgaaacccagccctttctacaagttccatggatgatccactcatacaaagcatttgtgaacrttgggactcagggtgacggagaactatttgctattcagaatgtgaactccccaatggtgcattagatatttccagtcttgaatgtcctctgccctcctca

SEQ ID NO: 319176 - DNA, 201 bp, Homo sapiens
taagaggatttgaactcaggtacccaaagcagagtgtagtgttcctctacccagggtgtcaaggagatgtgtcaatgtgtagcacatggtttatgttcctygggtttatttaaagcctctgagcctcatgtgtgtgttgctgtagtagtggaaaccactatcttgctaagaaggcttcacattggattgacagcaaattac

SEQ ID NO: 319177 - DNA, 201 bp, Homo sapiens
cttggatttcagtgatctttgatttacctgtttacacctttcacatatttgttgttgtttgcattttgacttgtagaagctctttacaaacatgagtagtsatcctttgtcatttttgttgtgctcatactcccacggtactttgctagttttgttattttgtctatgattttaccccatacacaaggtttattttataag

SEQ ID NO: 319178 - DNA, 201 bp, Homo sapiens
cacttcaacaagcataatattgtaagttaatatatttgaagtgtgactagtggtatgttgataggtatacatcatccacaaaatgttagaagtatgtatayggaaaaaaacacagcttatcttgatgtaaatttgtctgtgtatcagaagtaaaattaaattccacttttaaaaatctgcttgtgtacctgactcattaag

SEQ ID NO: 319179 - DNA, 201 bp, Homo sapiens
atcgtaaagtataagatttagtaaaaatgtaggctcaaaatttttaatcacaaagctggtaagaggatttgaactcaggtacccaaagcagagtgtagtgytcctctacccagggtgtcaaggagatgtgtcaatgtgtagcacatggtttatgttcctcgggtttatttaaagcctctgagcctcatgtgtgtgttgctg

SEQ ID NO: 319180 - DNA, 201 bp, Homo sapiens
tcccatctcatctgggagaaagagatggcttcctcaggcatcaagtgctttcttcttaaagctgcagttatttcaccgctatttaaatttgtgttttcccratggtcagagactacagtcagactgcctcttggatttcagtgatctttgatttacctgtttacacctttcacatatttgttgttgtttgcattttgactt

SEQ ID NO: 319181 - DNA, 201 bp, Homo sapiens
cataatgcatatataggccacttgatggtgccctataagtcccttaagtgagcttttatcactctttttcatttttttctttttgttcctctaactgaatwatttctaatgttgtgtctccaagtttgctgatcctttcttctgcttgatctagtctgctgttgaatccctctagtgaatttttttagttattgtattctt

SEQ ID NO: 319182 - DNA, 201 bp, Homo sapiens
gctgatgtatacacaaacaaataatgggtgcatgaaagagggtcaccttatctcttctgataaggttatgaaggtatcccagaagaaaaacatctgagctkagtcttaaaaatgcaagagaatattcccagatgaagaaaggggagcaggccatctcaagcagaggagacatcagttgattttcagcaagtatgtagagtg

SEQ ID NO: 319183 - DNA, 201 bp, Homo sapiens
tggcttcttttctccccagctcacagacagcctattgtgggtatttgccttttgatcatgtgagacaattctccctaataaactccctttcatatattcawgtatcctattagttctgttcctctggagaaccatgaataatacagcacataactggaacttgaggtttttaaaatccatttagctatttctaagtcttca

SEQ ID NO: 319184 - DNA, 201 bp, Homo sapiens
tattaagtctctgctatgtgccagtcctagagaaataaactagtgatggcctggatcgtttaggagcttacaatgttttgggagacatgcacatagaatgwttaaacgaatcaggagatggtgagttccacagctgatgtatacacaaacaaataatgggtgcatgaaagagggtcaccttatctcttctgataaggttat

SEQ ID NO: 319185 - DNA, 201 bp, Homo sapiens
agttcctatcacaaaaaggttaactccaattgtgtttgatctgcttaggaattttgtcagaaaaagcccttcaggattgagtctagacattcaacgtttcrtctctagccttctactaactctttattactgcccataacagtagttgaaggaaatattattttgtgaatgtttagccataattgtttcaaactttccaga

SEQ ID NO: 319186 - DNA, 201 bp, Homo sapiens
tgaattttatcaaatttcttttctacatttattgagatgattgtgtggtttttaccctttattctattaacatggtatatcacattagttgattttcatawgttgaatcatccttgcatcccagggataaatctcacttggtcatggtgtctgatccttttaatatgctgttgtatttggttggctagtattttgttgagg

SEQ ID NO: 319187 - DNA, 201 bp, Homo sapiens
tgagattgtcacatctatcaatttctatgtatgtattccattgtacatcctctctccctaaattttaaaaagttatgatcatgttgatatgcaaagggaayttatgtgtttgtttaactttttgaggagaaagtgagaaagagaaaatattttacattccaggagagaagcactttagagaaattgaagcaaaaactggga

SEQ ID NO: 319188 - DNA, 201 bp, Homo sapiens
ccaaattcaaatgtttgcacagggtagtagtcgaggctgatttgaatctcaaagtaattattcctagagatcaaagatcctagtagcaaaggaataataarccctgatgaaatgccacattgccacgctcactctttgttaaaagagaagtaagttttctcaggtgaagaatttaccaggatactctcacatgcacacgat

SEQ ID NO: 319189 - DNA, 201 bp, Homo sapiens
tatcatcaagttcaagacacttattataaattatgataccagccatttagtctgtccctaaagaactgaggctcctaagaatttaaccatgttgatgcagtttttttttttacattattaagtgaggaacaatggataccctttacagatttttttaacattcagaaacaaaaagaagtcagaatgagccaaatcaggacg

SEQ ID NO: 319190 - DNA, 201 bp, Homo sapiens
tgtttgcttgcctaggttcctcaattcaccccatcagtatttccttctatcccaagtggttagttaccaagtatttttccaataaaactttccacccccartaggaattctggagccagcaagtaacatcataaagtttttgcttctattacagaaggtaaatcagatcatcccacacccctgctgaataacccataagtg

SEQ ID NO: 319191 - DNA, 201 bp, Homo sapiens
tagaatttttatcataaaagggtattgaattttatcaaatttcttttctacatttattgagatgattgtgtggtttttaccctttattctattaacatggwatatcacattagttgattttcatatgttgaatcatccttgcatcccagggataaatctcacttggtcatggtgtctgatccttttaatatgctgttgtat

SEQ ID NO: 319192 - DNA, 201 bp, Homo sapiens
tgccattattgtttatttatctatttctctttggtctatttttcattaatgtagtattttaaagcaaattccagacattatcatcagtttccctttaaatkcttctctaaacaatgatgactttctacatagaaccacagttccttttacatccctatcttgcaaatacgtctaaataggatatttcatttaacttactta

SEQ ID NO: 319193 - DNA, 201 bp, Homo sapiens
cagggtagtagtcgaggctgatttgaatctcaaagtaattattcctagagatcaaagatcctagtagcaaaggaataataagccctgatgaaatgccacaytgccacgctcactctttgttaaaagagaagtaagttttctcaggtgaagaatttaccaggatactctcacatgcacacgatgattgaagtggcacttttg

SEQ ID NO: 319194 - DNA, 201 bp, Homo sapiens
ctacaagttccatggatgatccactcatacaaagcatttgtgaacattgggactcagggtgacggagaactatttgctattcagaatgtgaactccccaawggtgcattagatatttccagtcttgaatgtcctctgccctcctcaccatctggatgtttccattggcagattgccccttcttcatcccagcatcatatca

SEQ ID NO: 319195 - DNA, 201 bp, Homo sapiens
tttgtccttctatgactggcttatttcacttagcaaaatatcttcaagtttcattcatgtagttgcatatcgtaggacttcctccttttaaggctgaatartaacccattatatgcatataccacattttcttcatttattcatccatcagtggacatttcattgtttccatatcttggctattgtgaataacagctgcag

SEQ ID NO: 319196 - DNA, 201 bp, Homo sapiens
tcctagagatcaaagatcctagtagcaaaggaataataagccctgatgaaatgccacattgccacgctcactctttgttaaaagagaagtaagttttctcwggtgaagaatttaccaggatactctcacatgcacacgatgattgaagtggcacttttgtttctgctgttattgccgaggctgctgtttagatcaaggtga

SEQ ID NO: 319197 - DNA, 201 bp, Homo sapiens
agaataaggaatcatccgtggcacaaacctgaaatgcagggagtgtagaatctatgttaatacataggctttgggatcaaaggaatgtgagattaacgctyatatccaccatcttaaagctgtgtggccttggatgtattacttaatctttcagaggctcgactgctaatctgaaaagtgcaaatagtaatatctacttca

SEQ ID NO: 319198 - DNA, 201 bp, Homo sapiens
tgattttgaatactaaattgctctaaatccacctaatggttgtttaaacctatgacaccatggagaatgtgagaacaataccgtctatgaacctcttcaaraataagctcaaaaatgaactccaccaattgatgtggaaagtatttcatgcatgggacgttctaaccagggaaatgggaaagagctggcatagcaaaggtg

SEQ ID NO: 319199 - DNA, 201 bp, Homo sapiens
tctaagatagatgttggaaatttttaaacatcctgctcttgcagagcttgtaatctaatgagaacaatagataagtgaacatataatgactgcactgtatrgaataaggcctcagcttaaaatgaatgatgagagtccagaggagttcacggaagaaggagctgagcgtgagtaacatggatgaaggggaaagaggatttg

SEQ ID NO: 319200 - DNA, 201 bp, Homo sapiens
taatctcacaacaaccttgtgatgttggtgtccttctcccattttatagatgaagaacctaaggctgagagaaattctgtctgtatacgatgcaaccaacrttcatattcagccctatttgtctttaaatcactactgtttccactacagccaactgccctgtaactcctcatgtaataaaaacgactgatcttaaagtga

SEQ ID NO: 319201 - DNA, 201 bp, Homo sapiens
tcttttaattttcatttttactgtaaaagtaacgcattcttgctgaaaaaaaaaaaaacttaaaaatgtaaagaatataaagtaggctgggtgtgggggcwcacacctttaatcccagcactttggaaggccgaggcgggtggatcacctgaggtcaggagttcgagaccagcctggccaacatggtgaaaactcgtctct

SEQ ID NO: 319202 - DNA, 201 bp, Homo sapiens
tttgaaaagctaaacttgtgcaccaaaatattttcagctgaaatatttttaaacattatattttttctattattacttgagctttttaaacttagtaattyaaactaatcttggaacacttgcaaaatgtgatggaaatgaagaagaaataagctgtaaattcaagatggctgaagtttaatttctgtgccgaccttgggt

SEQ ID NO: 319203 - DNA, 201 bp, Homo sapiens
ctgttccactataatcctgttatgcttcataatctagtattttgaagaagataaaaatagaaaagattgagaatatgtcagagactattttaatagcgcargaagtaatcattctgattcagttatgtttgtcactagttcaagtaacggcaaatctgagttaccatggtttctgaaaaaatgcacattgaaaaattgtat

SEQ ID NO: 319204 - DNA, 201 bp, Homo sapiens
atctccctttctcttcagaggagggtcatgttctttttcattcattattcaagggaatttgctgagcatctatgatgtgccaggttctaagatagatgttrgaaatttttaaacatcctgctcttgcagagcttgtaatctaatgagaacaatagataagtgaacatataatgactgcactgtatggaataaggcctcagc

SEQ ID NO: 319205 - DNA, 201 bp, Homo sapiens
ggtgcaataagttgaatactgtctttttacagctgttcacaaagacaaagatatttttgagcttcatttataaaacataaatatcatattgttgttccagmcttcttgtaattcaaaatagcatcagtgctggctgaacatattactcatgcattggaaagttagaaatggtgacaatttgaagttaacattgtgaaatga

SEQ ID NO: 319206 - DNA, 201 bp, Homo sapiens
ttattctaaacattctaaataggcaaaatgggtgattaatgagctaggtcagcatttacacttatagtcagatgtctacaatgtgttaagtttaaatggakcaatgtttttttgtttgtttgtttttggggggtttattgagatggagtcttgctctgtcacccaggctggagtgcagtggcgtaatctcggctcactgca

SEQ ID NO: 319207 - DNA, 201 bp, Homo sapiens
aagtgctgggattacaggtatgagccaccgtgcccagctgactttatttagtctttattataaattgaataaaacctttgtaaatagagatattttgtttsttgtaacctgtgtggattattgtaaattagcatgatatacttgtttcagaccaccaataacagccatcttatgaacagaggctttcaaataataggcaaa

SEQ ID NO: 319208 - DNA, 201 bp, Homo sapiens
tgagatatttatattagtttccttctttgtcaggcattaaataattatacaggtaggagttataaccagaaaagatgcaaaatatcagtcttattctatcrccattatatcattcaatattactcttattcccaatttacaagctttcttcattgtctcctagctattctttgttgatattctttctctccatctgattcc

SEQ ID NO: 319209 - DNA, 201 bp, Homo sapiens
ttgggaggccgaggcaggtggatcacctgacgtcaggagtttgagaccagcctagccaacgtggtgaaaccccatctctactaagtatacaaatattagcygggcatggtggctggtgcctgtaatcccagctactcgggagactgaggcaggagaactgcttgaacccaggaggcggaggttgcagtgagccgagaccac

SEQ ID NO: 319210 - DNA, 201 bp, Homo sapiens
ctatatgaattcttgtcttctacttccattgttgattaaataataataagctctaaatattgctttaaggaataggcataattcactcaagacatgtagaraaattcctggcatatattattcacttaatgtatgctagctattacaattgttattattcttttctctctttaattacagcagtcagtatgggcttaatta

SEQ ID NO: 319211 - DNA, 201 bp, Homo sapiens
catcaacgaaaaccctacccttatgaccttatctaaagtaccttctaaaggccccagttccaataccattacattgggggctagagttcaacaaggaactktgggaggatgtaaacattcagtctataacacagcccatcccttgcaccattcagatccaaaatgccttttataaagtgcaagcaatcatagagttcccct

SEQ ID NO: 319212 - DNA, 201 bp, Homo sapiens
ctgtttattctattcatttccctcaccatttgtaacactttggctggcctagggttctttgctagttggacccagacttttacacttgagagatcccagcycttagttgagctgcatttgttatatttgtccactcacattttccctagacctggaaacacagatattcacccctcatgaacactgcgattccacacacac

SEQ ID NO: 319213 - DNA, 201 bp, Homo sapiens
ctgggaatgatagtgagatgagccaattctacttttgccccttggttctgggaccaatgtattttagctactccagacagcaccatataacagccatcgaytgagtgcatgtatcacatccaagagaacagcaacccaacccataaggtattatacccaagtttttgtcttcactggggcctctagtaaccattcaattat

SEQ ID NO: 319214 - DNA, 201 bp, Homo sapiens
ataaaaattagctggatatgaaggcctgtacctgtagtcctagctacttggtagactgaggcaggagggatgattgagcctgggaggtcgaggctgcagtragctgagattgcgccactgcactccagcttgcgtgacagattgagatcctgcctcaaaagtaaaaataaaataaaataaaagtaatttttttttttgagg

SEQ ID NO: 319215 - DNA, 201 bp, Homo sapiens
aaaattaaacaattatttgaactgaacaataatagtgacacaacctatgaaaacctctggggtacagcaaaggctgtgctgagagaaaacttcatagcctygaatgcctacatcaaagagtctgaaagagcacaaatagacaatctaaggtcacacctcaaggaactagagaaacaagaacaaaccaaactcaaacctagc

SEQ ID NO: 319216 - DNA, 201 bp, Homo sapiens
ttattattcgatagagcaaattatgaatgcaattttcaaagcaaatgaaaacataagaaattcatgatttttctatactgctacaaatttggataacttcraagtgattatcttacatttggcttttactttggaaaatattaatattagaaaaactgcaaaattttggaatctagattaaagaacgatagattatgatga

SEQ ID NO: 319217 - DNA, 201 bp, Homo sapiens
aactaagacagatcttgttattttaaaagaacattataatttcaattgttctaataattgttattattcgatagagcaaattatgaatgcaattttcaaarcaaatgaaaacataagaaattcatgatttttctatactgctacaaatttggataacttcaaagtgattatcttacatttggcttttactttggaaaatat

SEQ ID NO: 319218 - DNA, 201 bp, Homo sapiens
tttccatcagggacatttgcctggacaccaccatgttagattctaaaaatcaaacatgtgtcccaccctaactttgcctttagtccctgaaagaatggacstaggtttgagagaggagaacagtgagggtcatccctcttcatctcaggagcaattaactagttattttgctcactttgggaagaatttgccttcaaaaat

SEQ ID NO: 319219 - DNA, 201 bp, Homo sapiens
tgcaagactttgaaaccatcttctccagggacaaaagaaagtaattacctctcctccacatgacgtttaatcatgctctatttttcgaagaacagctgtgmaacactggctgggctacaaattaaacatacctccttcaacttgcttagatttaaaagataatgaatatgttgggtgacagaatctgaattcaaaaagact

SEQ ID NO: 319220 - DNA, 201 bp, Homo sapiens
aatgaatgaatgaatgaattaaaatatttggagcactctgaagctgaattcagaaataatgctaaagaagacttgactttgttaaagacagaatttttatrgaatatatggaaatagtaattattgcttaaaaactgtattcaatattttgatattgacctcaataaaaaaatgtgtaatcaatttttgaacttctagtca

SEQ ID NO: 319221 - DNA, 201 bp, Homo sapiens
aatatcacaattaggtacatcagaaaaatgactttagtaacttggcaggaccaaaaccagccaggtgcaatataacacaagataataatgagtaggtcatgctcatcttcaaagcagaagtcacagctcctaggcgacaaatatcacaaaaaaacttattcatgtttttctgttttgttccttgtgatatttccatatggt

SEQ ID NO: 319222 - DNA, 201 bp, Homo sapiens
ttatctctgaggtgtggaaatatgtcttatttcccattttaaaagtgatatataacaccgttagcttctcttagcctcggtatctttaaccgtaaaatgargtatagatataaacatttgtccaatctctccaactagattataaacctcaagagataatgaataataaataatgccactttgtatctctagtacttaaca

SEQ ID NO: 319223 - DNA, 201 bp, Homo sapiens
gcaagaatcaaatagcagtgcaagataataagaagcactacaaaaaggtacaaacaaatccccagtctaggatgactgagggaacccttacataaaggaargagtttaaaaattggcatgagcctgatgaatggaaaaaagagggaagaagatttcagaacaatgtgagcaaaatttcagatgcagcaaaatagaatcttg

SEQ ID NO: 319224 - DNA, 201 bp, Homo sapiens
aggtgatctgcccaccttggcctcccaaagtgctgggattacaggcgtgagccactgcgcccagcctggagcaatgttgataatataacacattatatggyttaatagcatattatttatgtgtatatgttagaagaaggtctagaagaaggcatatcaaaatgtcaggatttgtgggaggaggagaacaaacaagacttc

SEQ ID NO: 319225 - DNA, 201 bp, Homo sapiens
ccatgttaagaatatagataaatatgaagtttattcatgagctctggatttatcctctagataaatttctccaaactgtttattctctgcccatcatattygtttcttttaaaatatatctccttaattgttatattagatttcacattgagaatgttatatcacataattcctgtttacggctgaaactttaattgttgg

SEQ ID NO: 319226 - DNA, 201 bp, Homo sapiens
aaacttagccaggcgtggtggcaggcacctgtagtcccagctactcaggaggctgagacaggagaattgcttgaacccgggaagtggaggttgcagtgagmcgagatcgccccactccactccagcctgggcaacagagcaagactccatctcaaaaaaaattttaaaaatgtgtttcctcctcaaggaagtgtatgttat

SEQ ID NO: 319227 - DNA, 201 bp, Homo sapiens
tgagacaggagaattgcttgaacccgggaagtggaggttgcagtgagacgagatcgccccactccactccagcctgggcaacagagcaagactccatctcaaaaaaaattttaaaaatgtgtttcctcctcaaggaagtgtatgttatctcaattatatgacacatattttaacagaaggtttttgagtaaaattcttgca

SEQ ID NO: 319228 - DNA, 201 bp, Homo sapiens
attcaaatttaataaatgcattttattcatctatacgttctcactatttttctctatatggtatttgttacgtatccaaattttttttaaaaaaagcaggrccaagtgtggtggctcatgcctgtaatcctagcactttagaaggcccaggcacgtggatcacctgaggtcaggagtccagagaccagcctggccaacatg

SEQ ID NO: 319229 - DNA, 201 bp, Homo sapiens
ccctgttgctctgcattcttaaaatcccagcctcctttatgtctgaattaatcagtgaaatataccaaaaaaaggtagtaaatacagctgttaataccaayttcacatctgtcataaccaattcagtgaaaacaaatctgtaacccccaaataaattccaaagtgattaaagtcataattgcaaattaaaactgtaaaata

SEQ ID NO: 319230 - DNA, 201 bp, Homo sapiens
agaccaaagagtgccccagtccctcatctctgactgatgttgagcccctgtaccaggaggaagtgaaggcaaaggcagaatttaaaacttcctgagcattrctgaagttccccaacacacacaaagcctcttggcaaagggttgacttactggttcacagtattctaaaaaatatctgagcaatcactagctgaccactta

SEQ ID NO: 319231 - DNA, 201 bp, Homo sapiens
attggacttacagttccacgtggctggggaagcctcacaatcatgacagaaggcaaggaggagcaagtcatgtcttatacagatggcagcaagcaaagagmgcttgtgtaggaaaactccctcttataatagccatcagatctcatgagacttattcactatcacaagaacggcatgggagagacctgcccccaggattca

SEQ ID NO: 319232 - DNA, 201 bp, Homo sapiens
aactcaaccaattgtcaagcagaaaattttcaaatctacctgtaagctggaagcacaagctccaagttgccctgccattttggaccaaaccaatgtatttyttaaatgtatttgattgaagcctcatgtctccctaaaatgtataaaccaaggtgaaccacaaccaccttggacatatgtgctcagtgtctgccaagggct

SEQ ID NO: 319233 - DNA, 201 bp, Homo sapiens
gggttgacttactggttcacagtattctaaaaaatatctgagcaatcactagctgaccacttagctaatcagagacttcagttgttgcccaatagagtaartacagactttacagaattagccctagaaaatctctaaacaacaaacagcaacaataacaaaaatcaacaacaaaccctggggaaaacatctgactttcag

SEQ ID NO: 319234 - DNA, 201 bp, Homo sapiens
tacagttccacgtggctggggaagcctcacaatcatgacagaaggcaaggaggagcaagtcatgtcttatacagatggcagcaagcaaagagagcttgtgyaggaaaactccctcttataatagccatcagatctcatgagacttattcactatcacaagaacggcatgggagagacctgcccccaggattcagttacttc

SEQ ID NO: 319235 - DNA, 201 bp, Homo sapiens
taatcacttggccttaaacaagttacttgaatgttctcagatcctggaattttcacttaaaaatggaggaaataatacatcacaggggttttgagagaatrtattaagtaatggcacactttagatccctaatgaatattaatttccttcattccttccatcaggggccatacactcaagagaaaaataatagtcagggac

SEQ ID NO: 319236 - DNA, 201 bp, Homo sapiens
aactccctcttataatagccatcagatctcatgagacttattcactatcacaagaacggcatgggagagacctgcccccaggattcagttacttcccacasggtccctcgcacaacacttgggaattcaagatgagatttgggtgagaacacaaccaaaccatattattctgccccttgcccctcccaaatctcatgtcct

SEQ ID NO: 319237 - DNA, 201 bp, Homo sapiens
agtcaataaacaagaatgacttgttaaggctaggcttaccctagatggctcaggatcttgctggtggaactatttatgcctgcaaactatgaaataaaacytttgaaaactaaggccttgctaccagcatgtgtcttgtggatcagcagcattagcaccacatagaagcttattagaaatgtggaattgcaggccgtatcc

SEQ ID NO: 319238 - DNA, 201 bp, Homo sapiens
ggcgattctcctgccccagcctcccaattagctgggactacaggtgcacaccaccacacccagctaatttttgtatttttagttgagacggggtttcaccrtgctgaccaggatgatctcgatctcttgacctcatgatctgcccacctcggccttccaaagtggtgggattacaggcgtgagccaccgtgcccggctata

SEQ ID NO: 319239 - DNA, 201 bp, Homo sapiens
gctgacaaagacatacccaagactgggcaatttacaaaagaaggaggtttaattgggcttacagttccacgtggctggggaagccccacaatcatggcggraggcaaagaggagcaagccatgtcttacatggatggcaccaagcaagagagcttgtgcaggaaaactcccccttacaatagccatcagatttcatgagat

SEQ ID NO: 319240 - DNA, 201 bp, Homo sapiens
ggtttatgttcctcgggtttatttaaagcctctgagcctcatgtgtgtgttgctgtagtagtggaaaccactatcttgctaagaaggcttcacattggatkgacagcaaattaccttttccattcattcacctattttcatgctgaaaatacttctcaatatttttgagtcaataaacaagaatgacttgttaaggctagg

SEQ ID NO: 319241 - DNA, 201 bp, Homo sapiens
attaagtttgatttctggagattaatcttgtactttgttttggacatatttacctggttgtttttcccttggttcttcattttagtatatctggatgttawacaaaacagctacctcttccagccttcatggactggcctcaaacaaaagaagaccttcacctatcagcctgaccagagattctgggggcttctcaaatct

SEQ ID NO: 319242 - DNA, 201 bp, Homo sapiens; identical to SEQ ID NO: 66931

SEQ ID NO: 319243 - DNA, 201 bp, Homo sapiens
aatgggtataataataataaatacataataataaatacctcacagtatgtgtgagaattaaatcatgtaatgtaagtcactattataatagattattgtcwtttttatacttattttctaaacatattgaaaattctagtaggttttattttaaccttcttttttttttttttacttttactttaagttctgggatacatg

SEQ ID NO: 319244 - DNA, 201 bp, Homo sapiens
tggagattatgtttcaatatgagtttcagagggcacaaacactcaaaccacagccaacatagtgagccaacaggatgtgtttcagaatattaaaatgatgraagtcccaaagactgtttagtgacagaaagcaggagatttaacatagctctgagataaagcaataaatgtatattattcttcatctgtgtaagagtaatc

SEQ ID NO: 319245 - DNA, 201 bp, Homo sapiens
tttcctatgcggatgcttccttccatttctcctgcccttggacatcagactccaggttcttcagccttcggactcttggacttgcatcagtggtttgctcrgggctcttgggcctttggccacagactgaaggctgcactgtcggcttccctgcctttaaggcttttagcctctgactgagccaatactggcttcttttct

SEQ ID NO: 319246 - DNA, 201 bp, Homo sapiens
atgaaagtcccaaagactgtttagtgacagaaagcaggagatttaacatagctctgagataaagcaataaatgtatattattcttcatctgtgtaagagtmatctgctttatttctcttactgagagggactgagggatcacatccaccaaaccagtagtgccaagcagcggcataccaagtgccagaggctgagttgatc

SEQ ID NO: 319247 - DNA, 201 bp, Homo sapiens
atgacctttttcctatgcggatgcttccttccatttctcctgcccttggacatcagactccaggttcttcagccttcggactcttggacttgcatcagtgstttgctcggggctcttgggcctttggccacagactgaaggctgcactgtcggcttccctgcctttaaggcttttagcctctgactgagccaatactggct

SEQ ID NO: 319248 - DNA, 201 bp, Homo sapiens
tcccaaagtggtgggattacaggcgtgagccaccaggcccggccattaaatttaattttttaaaatacatactcttctcatcttcactcttcaccttcacyttcaccgcactgaatgtgcggaaagactccagggaggaacagaagatccccaacccctctattctagggatttcatatgtaaagcctgagacggtgagga

SEQ ID NO: 319249 - DNA, 201 bp, Homo sapiens
ataattgttcatagtagcctcatgattctttttatttctatggtatcaattacaatgtctctgcttctgttttcatttatttgtattctctcttttttccrcagttatactattggggaaagttatactaatatcttgttaatcttatcttttaaacaaaccaattcttttattaaattttaaattatttttctattatat

SEQ ID NO: 319250 - DNA, 201 bp, Homo sapiens
taagtatttaatagctgtgttaacctctgaaattccttttgccatgcagtacgatttctgattaccatctttgctgaaatgggacaaggtggggatgcagmttaaggagattttacttggcctttccaaatataatggctgctgcttcataatcaggtagtcagtgtaaggttcttccgtctatagagtatatttatccaa

SEQ ID NO: 319251 - DNA, 201 bp, Homo sapiens
cttacctaactggatatatgaatagatagatatatttaaaggcataagctgacatgtagcataaaggggattaaaaacaggatgccatgaaactagagaayaaagactaattctgaatgtgaaaataagcttcttgaaggttggcatttgaataatcttaaaaggataagaagagatgtgggattgcactgtaactacagt

SEQ ID NO: 319252 - DNA, 201 bp, Homo sapiens
gacgactgggcctgtagacacttccggatcaactatgtaagtcaccaggcagagagcaggtgctgtccctatgctgacacctgctgagaccagtttggtcrgggagaccctaacccagcggcgctagaggaattacagacacacacacaaaaatatcgagtgtggagtgggaaatcaggggtctcacagctttaagagctg

SEQ ID NO: 319253 - DNA, 201 bp, Homo sapiens
tgcttccttcaagaggaaaaatccattctcagtgtcattgtttcccatttcatcagtgatggtgtggatgatatggttggtctggagaggctgagaagacrcagtaaaaagtctgcactagttcatctcgaattagctcaagatcatagaagacactattaatcattgtttatgaggcatcattgaggacagaagtgttct

SEQ ID NO: 319254 - DNA, 201 bp, Homo sapiens
cccctttataaaaccatcagatctcatgaggcttattcactatcacgagaatagcatgggaaagacctgccacctcccagtgggtccctcccacaacacgmgggaattatgggagctacaattcaagataagatttgggtggagacacagccaaaccatatcacatgggtatcccacaccatggtaccagagaagtctcgt

SEQ ID NO: 319255 - DNA, 201 bp, Homo sapiens
cagaggagagtgaggggcaggcagagacggtgtgcaactcagtagtcctgtgagtggctagcagaaggaacgcatatgccagaccaaaccctagtgaaacygtgcaactggagcccagagtggaccttgctctcaaatgccctgagaacctggggcccagtcctatatttctaaattctggccttatgtttttacaaggtc

SEQ ID NO: 319256 - DNA, 201 bp, Homo sapiens; identical to SEQ ID NO: 66902

SEQ ID NO: 319257 - DNA, 201 bp, Homo sapiens
tatgccagaccaaaccctagtgaaaccgtgcaactggagcccagagtggaccttgctctcaaatgccctgagaacctggggcccagtcctatatttctaarttctggccttatgtttttacaaggtcaaatgtggtggttcttggtgtcttacaaacacattttcttccctaaaggcaaaaggaaaaaagtaattatcaat

SEQ ID NO: 319258 - DNA, 201 bp, Homo sapiens
gattattaatcctaagaaggataatctctttctgattttctttgtgtaactaaaatacctatgtaactctattttaagaaataaggcttaccataaacatractaatgtttatgatacacaacaatatgtaaaaattatcttagcataactttattgccaattatctgaatataacctccatctctttttattctgtttca

SEQ ID NO: 319259 - DNA, 201 bp, Homo sapiens
attttccctggactgaaaaacttaccattattcaatgatatgcttcaaaacaattctctcaaacttctttgtatctttctttcccattttcttattgtatrtgttcaaactgctttgaggcataaaagaaatagacactagcctccagaaatccattcgacatatagtgattatacttttattggcatcataattcagagt

SEQ ID NO: 319260 - DNA, 201 bp, Homo sapiens; identical to SEQ ID NO: 66933

SEQ ID NO: 319261 - DNA, 201 bp, Homo sapiens
aaaccaaagattatatataaattttatgtttttgccaatggaggggaaagataactaaatgaggcaaggagaagaagaaaaggtggatagggaaactgcaygaaaagagagagagaagtcagatgaacaagcacaatgaaatagactcaaagaataacaacttatgtaattttaaaagacatattgggccaaattaaatgg

SEQ ID NO: 319262 - DNA, 201 bp, Homo sapiens
tccctaggtttgcacgtagtagaaaaaatttcagagcacaaaatagggtctgttccattgcctattctgttgacaaagaagagtcacatagattattgctkggtcagtactatgcttcttgtccttggtcttaagtgatgacctatctttcaatgacaatcatgtgaaggacttgaaaaataggaataaaacattgaacag

SEQ ID NO: 319263 - DNA, 201 bp, Homo sapiens
aaatgaggcaaggagaagaagaaaaggtggatagggaaactgcacgaaaagagagagagaagtcagatgaacaagcacaatgaaatagactcaaagaatarcaacttatgtaattttaaaagacatattgggccaaattaaatggtatttggatcattctaattaaaattaaaaccaggctacatttgcttgttcagaaaa

SEQ ID NO: 319264 - DNA, 201 bp, Homo sapiens
ccaatttttaaatgaaaaaaatagagaagggtagagatgttaagggattcacacaagttcatgcaactagaacatggaggagttagtattcaaatccaggmatgccaatctgcaaagatcatgcccttaatatgtgatattatcctactccatcaaggattctgggtagttacaacatggacaaatacaaggtcaaattat

SEQ ID NO: 319265 - DNA, 201 bp, Homo sapiens
ctgcactatcaaattttttcttgcactaaaaatttaaagcttttttattgacttttcattgtattaattgtatgctaaagaaacttagaccaaaatatackttcatttgaatgagtttcaatcactggtcttagaaagaacattcaataatatttgataggattttaccgctgtgaatggattttttaaagaaggagacat

SEQ ID NO: 319266 - DNA, 201 bp, Homo sapiens
gccatgccaacctaagcaaataaatctacaatcccagacctactgccttggcccttgtgaattagaatgactagaatgaagaagtatatgtgtgcattcaygtgtgtttgtgtggagtgtgtgtctccctggaaaggaaaatgcttcataagctactaagtttctgtttagggcagatattgttgctgtcaatccactgta

SEQ ID NO: 319267 - DNA, 201 bp, Homo sapiens
tttctaaagctatgtatcagttcctacttctcatcattaatcccctgtcccttccaaacctcaactgttgctttaaaaaaaattaagaagacaacaataayctcttaatgacaccctgcagcagctttatggtggaaagggaaaggggtcatgtttactggcacatattttctttgagtgttttctccctttcgcagctcc

SEQ ID NO: 319268 - DNA, 201 bp, Homo sapiens
gtgacacagctctcaaatgaggctgtggtgtcaacaggcaaagcaggatcagatgctttggatttgaattttctgcaggctacttgatagctgcttgctaraggattggcccttagccaaggagttaaagttactgagtccaacctctaagagccaaaattctccctgctttctagcaaggaggccttcctttacacctca

SEQ ID NO: 319269 - DNA, 201 bp, Homo sapiens
tttgagtggtttaaaacctttttatttttgtgaatgctacaattaaaatatttctgcgtgcaaaaaattgtgagtttttcttgtatagagtaaaattttcygatcttaaaagcaagacctatgacaagtagaaaatattaatgaacgctgaaagcattatatccttgtcattttcagataagaaaactgtagttagtgatg

SEQ ID NO: 319270 - DNA, 201 bp, Homo sapiens
tgtgtgagaattaaatcatgtaatgtaagtcactattataatagattattgtcttttttatacttattttctaaacatattgaaaattctagtaggttttwttttaaccttcttttttttttttttacttttactttaagttctgggatacatgtacagaacatgcagtttgttacataggtatacatgtgccatggtggt

SEQ ID NO: 319271 - DNA, 201 bp, Homo sapiens
aattaaaatatttctgcgtgcaaaaaattgtgagtttttcttgtatagagtaaaattttctgatcttaaaagcaagacctatgacaagtagaaaatattamtgaacgctgaaagcattatatccttgtcattttcagataagaaaactgtagttagtgatgcttttcaaaattgttacatttgtgaaccagcaaatgtatg

SEQ ID NO: 319272 - DNA, 201 bp, Homo sapiens
tcccaacttgtttagaatttttatcataaaagggtattgaattttatcaaatttcttttctacatttattgagatgattgtgtggtttttaccctttattytattaacatggtatatcacattagttgattttcatatgttgaatcatccttgcatcccagggataaatctcacttggtcatggtgtctgatccttttaat

SEQ ID NO: 319273 - DNA, 201 bp, Homo sapiens
ctatgacaagtagaaaatattaatgaacgctgaaagcattatatccttgtcattttcagataagaaaactgtagttagtgatgcttttcaaaattgttacwtttgtgaaccagcaaatgtatgcacacaggattatctgagcctaaacatagtgtcataaccttaaattgaataagttagattaaattatttttaccagaa

SEQ ID NO: 319274 - DNA, 201 bp, Homo sapiens
taatgtagatgacaggttgatgggtgcagcaaaccaccatggtacgtgtatacctatgtaacaaacttgcacgttctgcacatgtaccccagaacttaaarcataatttaaaaagaagggtggtaaaagtgggcatctttgtcttgttctggattttagagaaaaaactttccattttcagcattgagtataatgttaact

SEQ ID NO: 319275 - DNA, 201 bp, Homo sapiens
ggtgaaaggcacatctcaaatggcggcagagaagagaagacagcttgtgcagggaaagtcccctttataaaaccatcagatctcatgaggcttattcactwtcacgagaatagcatgggaaagacctgccacctcccagtgggtccctcccacaacacgcgggaattatgggagctacaattcaagataagatttgggtgg

SEQ ID NO: 319276 - DNA, 201 bp, Homo sapiens
aaaagagtgtatgtttctttgaatgccagcattgtgtgtctgtaaatttagttttatgaactattgaaaaccactaagcaatcatttattgacacgtcaawtgtttgcataccagttgtctgttttaggctctggagataagacagtgaacaaaaattgaattcttcctttcatagagcttaccgtttaatctttaacagt

SEQ ID NO: 319277 - DNA, 201 bp, Homo sapiens
agaggagaagtacctaatgtagatgacaggttgatgggtgcagcaaaccaccatggtacgtgtatacctatgtaacaaacttgcacgttctgcacatgtaycccagaacttaaagcataatttaaaaagaagggtggtaaaagtgggcatctttgtcttgttctggattttagagaaaaaactttccattttcagcattga

SEQ ID NO: 319278 - DNA, 201 bp, Homo sapiens
tgaacaaaaattgaattcttcctttcatagagcttaccgtttaatctttaacagtgagatgtaagagctccaactattgatttcatttatatttagaattrtgatttgagctttttcttcaggatgccaaacattttcaagaaaactacaattaacgtgtttcccattttttcccatatatcaccgacacctaaagatttg

SEQ ID NO: 319279 - DNA, 201 bp, Homo sapiens
tgagatgagccaattctacttttgccccttggttctgggaccaatgtattttagctactccagacagcaccatataacagccatcgattgagtgcatgtaycacatccaagagaacagcaacccaacccataaggtattatacccaagtttttgtcttcactggggcctctagtaaccattcaattattctggttctaaat

SEQ ID NO: 319280 - DNA, 201 bp, Homo sapiens
gcctttactacacagagttgatcaacttcatctgctactttttctagctctaaatctgattcacaatcattacaacccaggaaacataataggtgcaacaytcttttctgactctttaatagattgtttccatttggaaaaaaatctcatttatttgttggatatggaagctgtttcataaattttccagatctgagtgag

SEQ ID NO: 319281 - DNA, 201 bp, Homo sapiens
cagcctgggtgacagagcaagactccatctcaaaaaaaaaaaaaaaaaaaaaagaagaagaagaaggacagatgctagatagatagatagatgatagatakattaaaaaagagatatagagataaaggtatatttctcagccttggttctgggtggaggtttaaaaataatatttccttgagattttgtaaatgtaaacta

SEQ ID NO: 319282 - DNA, 201 bp, Homo sapiens
agtgtttcttttggggaagggtacatttaacatttttttacacagagtgtaatagttatttataggttttctgtcatccagcctaagcaaagcaggacaasaaaggggggaagttaatctacaacaagggtcattaattaagaaggcaggagatttttgtccctgacatcatttaattccctctagtcactgcacagaaca

SEQ ID NO: 319283 - DNA, 201 bp, Homo sapiens
gtacgatttctgattaccatctttgctgaaatgggacaaggtggggatgcagattaaggagattttacttggcctttccaaatataatggctgctgcttcrtaatcaggtagtcagtgtaaggttcttccgtctatagagtatatttatccaaattatatatttaggtacctagggaattaactacagggcttgtctagtt

SEQ ID NO: 319284 - DNA, 201 bp, Homo sapiens
ttaacatttttttacacagagtgtaatagttatttataggttttctgtcatccagcctaagcaaagcaggacaacaaaggggggaagttaatctacaacawgggtcattaattaagaaggcaggagatttttgtccctgacatcatttaattccctctagtcactgcacagaacaagaaaaatgaagtgagttaatctgta

SEQ ID NO: 319285 - DNA, 201 bp, Homo sapiens
tcttctttatcccaaaagtctccattcttctaattagaagaatgttaatgataaaaaaaaaatcttcctatagtctctttcttgtattagaatcattggtytcttatattggctgttttcatgtcctatatcttaattttattttcttattgctggtggcttaatgtagtaaattttgcaaaactattaaattctagacta

SEQ ID NO: 319286 - DNA, 201 bp, Homo sapiens
actgctgacctgggtcatttacactgaagctgagggaaacataaaaaaaacatacaagcaagcattttaagacattctcttagtttaaagtttaagtagcytgttgcagaaaaaaaattggaaaataaaatatctgttctctaatcctcctgtctgtcttgaatttcaaagtttgaccgtggctttgatgtgcagacttcg

SEQ ID NO: 319287 - DNA, 201 bp, Homo sapiens
cagataaatgcaaataagtcaatgaaaagaatagctctctatcttcctcctaactcagccacttaagactaatattgcctctattaaagagatgaaagcaratgtggtatacattattgatattgctccacattgaaagttaaaacttttatatatgttctctcagattatataaaactcatataaaatttacttaatgaa

SEQ ID NO: 319288 - DNA, 201 bp, Homo sapiens
cagtaattcttgaattgaatactcctcagtgatgcttagacatcaacaggatttactgctgacctgggtcatttacactgaagctgagggaaacataaaamaaacatacaagcaagcattttaagacattctcttagtttaaagtttaagtagcttgttgcagaaaaaaaattggaaaataaaatatctgttctctaatcc

SEQ ID NO: 319289 - DNA, 201 bp, Homo sapiens
aacaaaggtttataagtgaaagataaataaaatattttccagacaaacaagtcctaggggaattcattaccactagaccagccttaagagagatccttaarggagttctaaacatggaaatgaaagaacgatacctgtaaccgcaaaaacacacttaagtacatagcctgcagaccatataaagcaactacacaatagaaa

SEQ ID NO: 319290 - DNA, 201 bp, Homo sapiens
tagagaacttaacacctatagctctgagttaaagaactgttaatagatagatttcagcaagaaaaaaggtgaatctagaggaaagtccaggacacaatttwaaaaaatgacaatgggaatatggtatatgacaaagattgtgttacaaattagcaggagaagatggaaaaagaaccccaaaacaggcaaaagaatttaaca

SEQ ID NO: 319291 - DNA, 201 bp, Homo sapiens; identical to SEQ ID NO: 66932

SEQ ID NO: 319292 - DNA, 201 bp, Homo sapiens
tcaaccacagaatatgcattctactcatcagcacatggaacattctccaagatagaccagatgataggccacaaaacaagtctcaataaatttaagaaaaytgaaattatatcaagcactctctcagaccacaatggaataaaattggaaatcaactccaaaaggaactttcaaaaccatgcaaatacatagaaattaaat

SEQ ID NO: 319293 - DNA, 201 bp, Homo sapiens
atctaaaatatgtcaatgtaatcatagatttctaatctttgaataaaaagctactatactattaccaaaggttataattaactgacttacccagatctagyagacatcagttattgctgacaagtgaccctatggcagaaaacagagtgaagacattctagtacagattatcagattattaaaggaaaatattgaaattca

SEQ ID NO: 319294 - DNA, 201 bp, Homo sapiens
cattggtctcttatattggctgttttcatgtcctatatcttaattttattttcttattgctggtggcttaatgtagtaaattttgcaaaactattaaattytagactacagcatgagagaagaaaggaatagtcacaattacctggcctaaattgaagctgttcaaatttgaattattattgcttttgaggagacagcagc

SEQ ID NO: 319295 - DNA, 201 bp, Homo sapiens
attcaaattctgctgccaggtcacaaaagttaacaaggaaagaacaaagtaaaaaaaggttattcttttcacatgtatcatcctagagtactcctttgacrctaatgattttcaagagaatgaaatggttctccacttgagctctgtttttatgtatataatcaacccacatagaccatatttcctcccatcactggtatc

SEQ ID NO: 319296 - DNA, 201 bp, Homo sapiens
tattaaggttataaatgaaagtaggtgtctaatttctgatgaatgcatttaccactgtgaacacagatcaccagtgtgcacaagcatacatctgtgtgtgyagtacactgtttttagaagatcccatattctatagaagttaatttcctttattgctttttattcatagagtgactctgaatgtgttctcatagaaataaa

SEQ ID NO: 319297 - DNA, 201 bp, Homo sapiens
gatagttttaaaataagaagattaacgtcaacataactacataaaactaaaaagaacctgtactgtcacagtcagtacaaaaatacacccaccaaatgcastgtagagtcagcaaagatcatctgccatgttaaggcaatgctgacaatttaaatcttgagctttttagttttatttgattggtaaattgtgttatattcc

SEQ ID NO: 319298 - DNA, 201 bp, Homo sapiens
gatacaatcatccccaaagctgtcgttagcatttggaagattagtccctttctctggatgattttattgcctatgaagcatcacgacacacattagacatrtatttcttaaacactttacaaaattgagtctatttactcttcttcttattatcacaaccaccttctgttattggctgctaaaacatagagaaagaattct

SEQ ID NO: 319299 - DNA, 201 bp, Homo sapiens
atattctggtaggaaaatacaacttactctctagggctctgttttaagtcacaggcttagactgtatgttttggactaacatttgctcaagcagtggcccrctggtccaatttacttccttcttcatttgacagacttcagatattaccagtcctcagtcccattctgccccctacatcctcagggtcagcgtcagggttt

SEQ ID NO: 319300 - DNA, 201 bp, Homo sapiens
ggtgtttggccaagcaactggacactatagcctagtcaagttgacgtctaaaattaaccattacaccacgattttaaagtctttaatattgttatttattmtgatgctctcttcatacatttctattcttagaacattattggtcatatatgtaattaattgggtggtaagtcctgacattatttacatattctggtagga

SEQ ID NO: 319301 - DNA, 201 bp, Homo sapiens
ccgcatttacttgttgatgcccttcgagagcataacatttcagtaggcactgtgtacacgagatacagcagaagaatacgtcaaagctagttctttggtgttttttttttcccagagaaaatagaggtaatccaacattagacagaatttgtcgagattactagatgtacattcaaaacatccattcaacaaaccaattga

SEQ ID NO: 319302 - DNA, 201 bp, Homo sapiens
accaggaagaggtcattgctggcttggggaacatgattgttactattattggtatcatcgtaagctcactgcccttaagactagatgaaaagcaatgaatkgttctgtttggttccctgtaagagaacctatgatgaaaatgcacaacttatctctttagttacagagatgaatcccaatgtggtagtgatctccgtgctg

SEQ ID NO: 319303 - DNA, 201 bp, Homo sapiens
tatatttctaaattctggccttatgtttttacaaggtcaaatgtggtggttcttggtgtcttacaaacacattttcttccctaaaggcaaaaggaaaaaartaattatcaattcgtgtggagtacgttggaaatgtaatgcacagaaaagatgtttgctgtatgacagcaatttgggatgtttccattcctcccaggaaaa

SEQ ID NO: 319304 - DNA, 201 bp, Homo sapiens
ctggccttatgtttttacaaggtcaaatgtggtggttcttggtgtcttacaaacacattttcttccctaaaggcaaaaggaaaaaagtaattatcaattcktgtggagtacgttggaaatgtaatgcacagaaaagatgtttgctgtatgacagcaatttgggatgtttccattcctcccaggaaaattaagcatttaatg

SEQ ID NO: 319305 - DNA, 201 bp, Homo sapiens
tttcccctacagaccttgacctagaactcaactgcttcaaggtacatttctccccttgccctacttaatgtacacattatatatctttcacataagaatamaaaggctaaaggtagagacagatattgtaaattatcaatgagccagaaaagactagtccaaatgtacttttacaatatcttctcaaaatgcaaataggaa

SEQ ID NO: 319306 - DNA, 201 bp, Homo sapiens
tatccagaaaaatataacgttttcacaagagtgaacattagctactgggaaggtaaagacttccggacaatgctatataaaggtaagcagcaaaaggaaarctgaatcaatgatgaccctcactttttacaaagcttttcccaaatgatgttctctcttactgcaaagaggttttataattcactatttgacctataaatg

SEQ ID NO: 319307 - DNA, 201 bp, Homo sapiens
ttctactaactctttattactgcccataacagtagttgaaggaaatattattttgtgaatgtttagccataattgtttcaaactttccagaagtgtgtgaygtttagaagaccatatttttcatgtaattgattttctcttcacagatttctttaagggaaaaacagtatttaatcactggctgccaggaatgtgttatag

SEQ ID NO: 319308 - DNA, 201 bp, Homo sapiens
gcccattcttcagtcttctgtatcataaaactagtctcctagactgagaaaatttagtgtaagaaaccatacaaatatatgtatcagatgtcttataagcmctaggacaataatgatattagcagtgaccccagaggaagaaaaggcaaatccgtatgagaaggtgtcaattcatgagaggattaatttctgctcctccag

SEQ ID NO: 319309 - DNA, 201 bp, Homo sapiens
ttctgtatcataaaactagtctcctagactgagaaaatttagtgtaagaaaccatacaaatatatgtatcagatgtcttataagccctaggacaataatgrtattagcagtgaccccagaggaagaaaaggcaaatccgtatgagaaggtgtcaattcatgagaggattaatttctgctcctccagggaaactgagtctaa

SEQ ID NO: 319310 - DNA, 201 bp, Homo sapiens
ttagtgtaagaaaccatacaaatatatgtatcagatgtcttataagccctaggacaataatgatattagcagtgaccccagaggaagaaaaggcaaatccrtatgagaaggtgtcaattcatgagaggattaatttctgctcctccagggaaactgagtctaatataatcaacctgccaccaactggctatagccatattc

SEQ ID NO: 319311 - DNA, 201 bp, Homo sapiens
ggaaataaattttggtatatggctccttttacttacacgcagaggaagttgtaccaattcagattacataatttctactgtgtataatcagtttccagtgygaaaaggtttaaaattcatatcatatcaccagttctgtatgaatccttaaaatcttaatgggactctaaaaaacaccttacagcatagataagctgtaaa

SEQ ID NO: 319312 - DNA, 201 bp, Homo sapiens
agataagctttaaagaaggggagcccaggccaggcatggtggctcatccctataatcccagcactttgggaggccaagatgggtggatgatttgagatgargagttcgagaccagactgaccaatatggtgaaactccatctctactaaaaatacaaaaattagccgggcatagtggcgcacacctgtaatcccagctact

SEQ ID NO: 319313 - DNA, 201 bp, Homo sapiens
aaaaaatacgatctttcctcaatttacccagtaattgcatttctccagaactcaatgcataggtcactgagtcttaaatttctttgtctcctatttgccawgacaaaagctaagtttttgtgctgaaatactttaaaattgtataggtaatttggaaatatgtgatgtgttgattagacactatggaagtaaaaattataa

SEQ ID NO: 319314 - DNA, 201 bp, Homo sapiens
tacagaaatacgtaggttcaggtataaatgaacatatttgggcatatatatttgtgtttgcatgtgaaaattaaggtttagtgacaagtgctgaactcaaytgtgttgcacttgtgtctttaaatataataaaacattttcttttaaatgttggaaaataattattaggcatgtatcattaactgataaaaacataaattt

SEQ ID NO: 319315 - DNA, 201 bp, Homo sapiens
aatatgtaagatatcaacattgggggaggcaggatcaaaagtacctggaactttcctgtatatttccttgcaacttcgtataaatctgtagttatctccargaaaaatgtttttaaaaactttattaggtttttcaaagcttgctttgttttgttttttgtatgtgtgtgtggcactctgctatgtattttaacagtggat

SEQ ID NO: 319316 - DNA, 201 bp, Homo sapiens
aggagggaacatttaaaacacctaattttttttcattaatcgacttgtctatacccagggcctttccaggtgtctattcatgtatcttctcttttttatawatgatttagagaactttactgaatatttgatggtggatgaagaagcacatgaatttgttgcagaactgaaggaacctgggaaatataagttatctgtgac

SEQ ID NO: 319317 - DNA, 201 bp, Homo sapiens
ccattaatactttgtctggtttgccttctgtatacatgtgcccattttcctagtaacaagatgaaagctagagttgttaaatccaactttaaggtcgatayactgcccaaagacaccagccagagagtgcagttctaagggggttcattccaggagaggagtcccaactttagcccattcttttggaaggataacaagttt

SEQ ID NO: 319318 - DNA, 201 bp, Homo sapiens
tttaagttcagaggtggtcttatcaaagtagcatttagtgggcctattggatacttcactgaaatttctatgtgacatcatggtcgaaggtgcctcaggartatgagtcaaagtcatgaactagtacaactgtatctacataggactgtgagttaaaaccatgatagtttcccaaacttatcaaaatgtttggagtctcca

SEQ ID NO: 319319 - DNA, 201 bp, Homo sapiens
gtaaaacaggagcggagtagaggaaaagaatggatgaagtattaatgtgaagatgaatacatgttcagatatttccaccagtcaatcatcaaacatgtatkaaggtaaacatgtaaggaaggcactgtgttcctcattttaagagtacaaaacaaagttattttgctaagaagtctgtaatacaagtgaaaataacaaaca

SEQ ID NO: 319320 - DNA, 201 bp, Homo sapiens
taaagaaaaatacaactttggcacagatttttcagagcatgtttgaatcagaatgccattgttaaagctggggccgtaactggttgggctaacctgcagtycaatttatctataatagaggcctctttagaatgcctctgaatgactcctgtgtcatggagggtaggttctacctctatagaaagaaaccaaactaccaat

SEQ ID NO: 319321 - DNA, 201 bp, Homo sapiens
aatgtaatgttacgtgctgatggggagaactggtgttttaaattcttttaaatctggagcttttatggtcaacgttagaagcaccatggcagacttatgcyctggctttagaagcctgtatgagattttgtgacttgctggctttatgagacttttacacctcagattggcctttccctccaagaaagataccaccagaca

SEQ ID NO: 319322 - DNA, 201 bp, Homo sapiens
ccattgttaaagctggggccgtaactggttgggctaacctgcagttcaatttatctataatagaggcctctttagaatgcctctgaatgactcctgtgtcrtggagggtaggttctacctctatagaaagaaaccaaactaccaatgagtccagtatcatataaattaatctaatgtgtcatgtgcaagggtagagagccc

SEQ ID NO: 319323 - DNA, 201 bp, Homo sapiens
acatttatagagcatcaattgtgtgccaaatactgtgctaatcattcagtgtctccttggatttcacttatctgtaggtaaaagtgattacatatttatartaataactccaattacagtgcagttggctcaaccagtacacacccaatatcagcctttttcctatgaagagccctcacaggtgttgctcagtgcccagtg

SEQ ID NO: 319324 - DNA, 201 bp, Homo sapiens
tttggtggtatgtgatgacaggtccctttgacagtcagtcattactatcttctagtcttggtgaatcaacctggatccctgggccaactttaagaggacaygttaagtctacataagataatcagtttcccaaccttaaaaaaaagaaaaagaaaggaaagaaaaaacaggaatgagacgtgttggacacatcacaaatag

SEQ ID NO: 319325 - DNA, 201 bp, Homo sapiens
tacctatcttctttgttctattatttttgaaattttgagtagtaaaggaatttgggagagggaggatgaagagagagagaaaggaagacagaatcacaccrattaagatgaatttagaaagtaagaccactacggctcacattggtggcatttccctatgtgtctttgcaatgctcttatctgacacaggtctcttaaagg

SEQ ID NO: 319326 - DNA, 201 bp, Homo sapiens
catttagggtgaagtaagaatcaaggattcttctttggatgtaaacaaatttaaaatgattattggatatcccggtgcagatgtgaaggccaggggagaaytctgggctggaaatataaatttggaagtgtctggatgaaatcaccaagtagtaagtaaagacagggaagaaaagagaagccctggatcaactctagagga

SEQ ID NO: 319327 - DNA, 201 bp, Homo sapiens
aatagtgcagtgctgtgcctacagttccacctaatcaggaggctgaggcaggaggatcccttgattccaggagttcaaatcaaggctggacaacatgatgwgaccctatctcaaaaaaaatttgcagaaataaaataaaaacatatagaataaacatgaataaattaaaatttttataaatgaaaacataattatttaaat

SEQ ID NO: 319328 - DNA, 201 bp, Homo sapiens
aaagtatacagttgtgctttctgacttcaaaatcatgggcgtaaaataagaggttgccaccctctaagcttgtgaaaatgttaaaaaacgataatgcatgrtaatgacttccacatttttagctttcaaatgaatttaaactgtggcacaggtattcttcattctttagtttccctatgtaagaatatcctgaatgttgta

SEQ ID NO: 319329 - DNA, 201 bp, Homo sapiens
agaatcaaggattcttctttggatgtaaacaaatttaaaatgattattggatatcccggtgcagatgtgaaggccaggggagaattctgggctggaaatayaaatttggaagtgtctggatgaaatcaccaagtagtaagtaaagacagggaagaaaagagaagccctggatcaactctagaggagccaccccagcagtta

SEQ ID NO: 319330 - DNA, 201 bp, Homo sapiens
attttttattaaagaaaaaactaggaacttatgctaggatttcttgtcaaaatatgcagtccattcttcttgtcatccactttttgctcctaccacaaagmaaaaagaaaagcagaagcacatttccagacacaaagccacaatagttctctaagaaccagaaacaagataaaaactcaaagcagggaaatgggctgaagt

SEQ ID NO: 319331 - DNA, 201 bp, Homo sapiens
gatgagattctgtaggcagaaggaaccacaggtgcccagctatggaagcatagtgttcctggcaagttcaaggaaaagtcaggcaggcagtgtggctgcartggaacaaacaaggtagagagccatagatacagggcagagaggtagcaagggaacagaccgtgtagggtcattgaaaagacactttcctgtgagtgagat

SEQ ID NO: 319332 - DNA, 201 bp, Homo sapiens
gatggtcaccacctcacttggactgtgggcagctggtgttgccagacctacctcgctggcctgctttgatgtagctgagatgccaggtcaggtctcaaatsatcatctatgcaccaaacagcagctctggcctcagtccagtctcttttccctgtgcctgccatcagaagtgagggtctaatcccagatcctctccctcaa

SEQ ID NO: 319333 - DNA, 201 bp, Homo sapiens
tacttatttgtctatttgtatatgttactgatttgaatgactttatcacaaaaataaaggcatcaatattctgtcataattctagaaaatatttttctttyccagtttgtggtttaccctgtgttttattctttttaactttttaaaatatacagtagattgagatttttatttgtaatgtattctactgctcttaatttt

SEQ ID NO: 319334 - DNA, 201 bp, Homo sapiens
agcaagggaacagaccgtgtagggtcattgaaaagacactttcctgtgagtgagatgattctccattgcatgctttaagcagaggcgcataacctaacggktttcactgggtcactctggtgataatagattgttcagggcaaggataagagcaggaaggagccaattaggtaatatgaccatacatccctgttgccttag

SEQ ID NO: 319335 - DNA, 201 bp, Homo sapiens
gtagtttgctcacttgatctgtcgtatcattataatatgtaatattgggataattagagtgcctacttggtgggggcattataaaataatataaagtaagygccttaacaaagcatgcagtataggatcaatcaagataagaagtatcaatggcattaaatagaaagttactcaaggtgtcagaagtgaaggagattgaga

SEQ ID NO: 319336 - DNA, 201 bp, Homo sapiens
accttcagtatattgcctgcccttcagagggaaggggtagtttctcagcacgtaaaaggatgcctggaatcagttccttggaaattgaggaaatgtcacayacacacagctgtgtcatgtgtcagtgaagttctacagatagtggctgtacacattaaagaatacacatagagacactctacaaatataatattctataca

SEQ ID NO: 319337 - DNA, 201 bp, Homo sapiens
tagcctctaatatgcaacattaaatcaaactattgtgtacaagaaccttaaagttcatttaatgtgattttaattcatgttataaattaaattatttgcartggaaatggagaaatgtcttatatcttagtttagacttgtcagctttccaggctaattttgtgcacagtaatactaactgtagacagacactgtacatga

SEQ ID NO: 319338 - DNA, 201 bp, Homo sapiens
gcaatgtattcttgtgcatgatttgagttagaaaccttctcaaatgttacattatttattgcagtaaccactgtttctctcatttatttgaaatgataaattattgcaaaatagattcatgcattttttgtaacttttttattatatttcactgttcaatttgttcattccttcactaataccatacattgctctaattac

SEQ ID NO: 319339 - DNA, 201 bp, Homo sapiens
cccatgataggctgccaggagtggtagtgggtatttctcagtgtttcagtttcaccctcagtatgcagcaagccctgaacaccggcaccacagaagagctyccccagcaatagactgctgttgcttttcactcattgctaactttttggtggggacagaggatgttcttcgttctcgtggtccagcctcaggcttaggcag

SEQ ID NO: 319340 - DNA, 201 bp, Homo sapiens
ctttttaaactatctgtggcaaaggatcaagatttttcccaccactcgatctaccgtgtaccaatatgttcatcatggaaactgaacaacctgctcctgawtgactactggatacataacgaaatgaaggcagaaataaagatgttctttgaaaccaacaagaacaaagacacaacataccagaatctttgggacacattc

SEQ ID NO: 319341 - DNA, 201 bp, Homo sapiens
tgatgtttttctttgacctgtagggcttacaagtgtgttgaatatccaaaaatttggaaattttgcagacatcttttttcactgattccttgaggaagtgytgttgtgatcagagaacatattttatatgatttcttttacttgaaaattgttgagatttgttttatgggtccaaatatggtctttcttgctgtgtattct

SEQ ID NO: 319342 - DNA, 201 bp, Homo sapiens
ccacttatatgcaactgactgggaaactcactgattgggaggaaaacaggtgtaataaggacccttgattaggagtccagaggtgtggatcccagttcttkccctcacaaacaaattgtgttaccatagcaaagtaactcagaccctctgaattccagcttcctatctataaaatgagtctgggctagatgatcttttatg

SEQ ID NO: 319343 - DNA, 201 bp, Homo sapiens
ctacagttccagctacttgggaggctgaggtgggaggactgcttgagcccagaagttgtttgttttttttgttttgtttgtctggttttttttttgttttktttttttttttttttggagacagagtctcgctctgtcacccaggttggaatgcagtggtgcaatctcagttccctgcaacttctgcctcccaggttcaag

SEQ ID NO: 319344 - DNA, 201 bp, Homo sapiens
cactgaaagtcattcaggactctggattcaccaggaactataaaagccaccagcaactactgagaaggcaatgcaattgaagtgtaactctggttggaaartaagtagggaattgggtgttgagtccctgcgtgttattcctggccaaatacatcagagctacatgtcaggttttgtccaaaagtgttgtatttgctttga

SEQ ID NO: 319345 - DNA, 201 bp, Homo sapiens
gttgcagctgggcagaggacctgaagagttgccagtccgaccgccaatctttctttgaatctcattgtaagggcaaaaagaaaacatgattttttaaaccrgaatcttttatctcaatcagtgtaacgtgcagcctcccctgtgttccaatttgaaatgtgcaggtccttcaggagagtggattgaagaactgaccgagaa

SEQ ID NO: 319346 - DNA, 201 bp, Homo sapiens
gttttggcagtggcatctgggctgtggtcacagccatggacagagctggggctgaggccacggagctcactgaggcaaggccgaggatgagtggatgcccrtcaccgagctggacctcctagtcaaggacatgaagatcaagtccctggaggagatctacctcttctccctgcccatcaaagaatcagatatcattgactt

SEQ ID NO: 319347 - DNA, 201 bp, Homo sapiens
aagtggcttgaagtgtagtgtaaatccagtaaagctccaaaataaataaaataaaataaaacgatattatagtatgcatattcaaatgtattaataaaatygtgtgaaacctttttttaaagaaatgtaaatctaagttaagtgttcttgctgttacagattaatagatccacaactttctaatttcaaatttgaaaagct

SEQ ID NO: 319348 - DNA, 201 bp, Homo sapiens
agagagggaagtaaaaaagagagaagggagagagttaaggagagagggaataggaagggctcacataacaaaataagacattaaacaaatgttgaccttaraataggcatagtacaactagtgcctgaataagcagtaagtaccaaatgctgtgatcctagagaggtgtctcagaaacctatgcatagccaagtttaattt

SEQ ID NO: 319349 - DNA, 201 bp, Homo sapiens
gggactacaatggccacatcggtctgggtgttaagtgctccaaggaggtggccactgccatctgcggggccatcatcctggccaagctctccattgtcccygtgtgcagaggctacaggggtaacaagatctgcaagccccacactgtcccttgcaaggtgacagaccgctgcagctctgtgctggtgcacctcatccctg

SEQ ID NO: 319350 - DNA, 201 bp, Homo sapiens
atttttgctaaagatggaaaatgctcagttcatctaggagagtttctatgttactattaaaggctttgtaaaaaaataaataaatattataccccaaatarttcaaatatttcttttagaatcatgaatgccctttggaaaggattgtgaagtgaattcttttggcctcaaataatttgatttgcaaacttgcaaaagatt

SEQ ID NO: 319351 - DNA, 201 bp, Homo sapiens
cctagaactcaactgcttcaaggtacatttctccccttgccctacttaatgtacacattatatatctttcacataagaatacaaaggctaaaggtagagayagatattgtaaattatcaatgagccagaaaagactagtccaaatgtacttttacaatatcttctcaaaatgcaaataggaaaacagaacatgaaatatcc

SEQ ID NO: 319352 - DNA, 201 bp, Homo sapiens
aaagcagttcacagggcttagaacagacaaaatttgaatcttctaggttcccttcaatgttcacataaactataaatcatcctaattttggaatctgacarcttcagtaaagccttctggatttcaaagtcatctgtgattccaaaaagagtctctgaatattataccagcctctgtgtaacattctgaaatcccagctct

SEQ ID NO: 319353 - DNA, 201 bp, Homo sapiens
tcaaagtcatctgtgattccaaaaagagtctctgaatattataccagcctctgtgtaacattctgaaatcccagctctaaataaatcttattgggtgtttkgtttaaaggtgaactcaagcaaacctattattgaaaatctggttcctggtgcccagtaccaggttgtaatatacctaaggaaaggccctttgattggacc

SEQ ID NO: 319354 - DNA, 201 bp, Homo sapiens
gaaaacagcttgtctgtagactaagcaaaatgatccaacaaaacagagaaaactgttgatgcagcatagttagaggtgagacttggtgtgatgtccttgaytggagcagaggagatggaacccggggatccagtggaaggattgggtctggatatatcttcaggaagacaatgacagacaaacagacagtatgggcattaa

SEQ ID NO: 319355 - DNA, 201 bp, Homo sapiens
ccttcactgttattgagaggtcctgaagttaccgggactatcgtgtgctgtgaattctaattcgctaagttgactctatatgggatttcatgctctgctgrtaagtactttatttatccatctattatactaaattgtgcctcgtttctcccttgtagccccagtggctccggaaatcacttctgtggaatatttcaacag

SEQ ID NO: 319356 - DNA, 201 bp, Homo sapiens
agatagaaagcaatcaaaatgcctttgatgtcattgtattccctatcatatgcaattgcctaattaatatttagccactatctactttaatcttgtgcttstgagaatggaaaacatgagtcatgtaaaccaggggtgtccagtcttttggcttttggcttccatgtgccacactggaagaagaattatcttgggccacac

SEQ ID NO: 319357 - DNA, 201 bp, Homo sapiens
tggtgcactgattcattcactaaaagtttaaacccttgattttgatgatcttgcaggtaacacgcaatgtcatgactgcaattctcagcttgcctccaggmgacatctataacctctcagtaactgcttgtactgaaagaggaagtaatacctccatgctccgccttgtcaagctaggtaagaagagtgcacagagatggg

SEQ ID NO: 319358 - DNA, 201 bp, Homo sapiens
ataataagggccacatgtataactttcaattttctagtagccacattaaaaattagtaaaaagaaacaggtaaaattgaattcgatatactttatgtaacmaaatatatccaaggtcatattgttccaacatataatcaatataaataattattaataagatattttattcttttctcacactaggtctttgacattctgt

SEQ ID NO: 319359 - DNA, 201 bp, Homo sapiens
aagagaacattaagatacaacctcagcgtgtctggtcttgcctggtgcttgaatcctcctcttttggttgatgaatcttgactcatgttttaaatcagccrataaataagattttttgagtacctataggtggctacttcaaatgaagacaaagtcatttataacacatgacccttgttcttaaagaatctaataggatct

SEQ ID NO: 319360 - DNA, 201 bp, Homo sapiens
tactcaggaggctgaggcaggagaattttttgaacccgggaggcagaggttgcagtgagccgagattgcaccaccactgcactccagcctggtgacagagygagactccatctcaaaaaaaaaaaaaaaaaaaaaaaagattaaaggaaaaggtaacgagtttttaaaagatatgctctctgggactgagaaataagggaa

SEQ ID NO: 319361 - DNA, 201 bp, Homo sapiens
tcagccaggcacggtggctcacacctgtaatcccaatactttgggaggccaaagtgggtggattgctggagcccaggagtttgagaccaacttgagcaacrtggcaaaactccatctctgcaaaaaatgcaaaaataagccaggtagtcccagttacttgggagtcgaggcaggaggatcacttgagccagggaagatgag

SEQ ID NO: 319362 - DNA, 201 bp, Homo sapiens
aatcccaatactttgggaggccaaagtgggtggattgctggagcccaggagtttgagaccaacttgagcaacatggcaaaactccatctctgcaaaaaatkcaaaaataagccaggtagtcccagttacttgggagtcgaggcaggaggatcacttgagccagggaagatgaggcttcagtgagctgtgttcgcactactg

SEQ ID NO: 319363 - DNA, 201 bp, Homo sapiens
agccaggtagtcccagttacttgggagtcgaggcaggaggatcacttgagccagggaagatgaggcttcagtgagctgtgttcgcactactgcactccagyctgggtgacagagtgagacccccgcctcaaaaaaaaaaaaaaatgatactatctgtttagctttatctttttaaattttgactaaattttcaagcagcca

SEQ ID NO: 319364 - DNA, 201 bp, Homo sapiens
agttaacttaagtaaggctaattatctgggcaaaataagaatcttctatttctttgagctatataaaatgaaaactgtttatttgctcttttgtgtttcastgatagaaattaacagcaggcttagaccaagcccaaaagttgttatgagaacttttatctttgtctgtatcacttgttcctaattcataagtcactccag

SEQ ID NO: 319365 - DNA, 201 bp, Homo sapiens
tgatgctgctttgcactgtattgaatataaatctgttgttcttttggcatttgggctaaggttggctaaattatcttagtaaataaattagcaaagcacctttttttttttctttttggcaatctctctctataattcctctttacctgtatcagtttttctcttttcctcatatttctcaaatatatatcaccattggtt

SEQ ID NO: 319366 - DNA, 201 bp, Homo sapiens
aaatcagctctgccaatacagaaagtagttttgagatttctcaaagaagttaaaacagaagtgtcatttgaccatgcagtctcattaatgagtatatatcaaaaaaaaaaaaaattctaccaaaaagacacatgtactcacatgttcatcacagcactatttgtgataacaacatcaaggaatcaacctaggggcctatca

SEQ ID NO: 319367 - DNA, 201 bp, Homo sapiens
ctagctaagaaggcttaagaattcatgaaaaagaaggagggaatggtgggcacaatatttggagagatgattatgagaatttccaagacttgaaaaatgayatgaattcacagactgacagagcattccaactaagtacctaatagagtaattcaaaactaaaactacgcctaaatatataatgctatattattgttatta

SEQ ID NO: 319368 - DNA, 201 bp, Homo sapiens
ttgccacaatcctatgccccatagctatgacttttcaccaaaaagcaaatttttaagagccaaatttgccatcgatgtgagtgggttgcatcttatagtctttgaacaaaaaggacaattataggtacattgagttcctggttccttggaaactaatggtttcattctctgcagattgatcacgtcaaattcatcaggttc

SEQ ID NO: 319369 - DNA, 201 bp, Homo sapiens
agacagatattgtaaattatcaatgagccagaaaagactagtccaaatgtacttttacaatatcttctcaaaatgcaaataggaaaacagaacatgaaatrtcctattcaggattataagcaagaagaccaatatttaaaggggagtgcaggaaagagaccaccatgctaggcatcatctcagttaccacaagaccttttt

SEQ ID NO: 319370 - DNA, 201 bp, Homo sapiens
taatatactaaagtcctttttaaggtttggggatggtttctgcttagctcatcaaagagtaagcagcacttacaaaattggagacttttagagttttgttytgtcttgttttaactattataaatctcatgtccttgctattgctttttcggaatgaattgcagtatggatggctttccaagactgtcataaccatggcta

SEQ ID NO: 319371 - DNA, 201 bp, Homo sapiens
aaccagttgctgtttcttcccatgtcgtgaccatctccagccttcttcctgccactgcctacaattgtagtgtcaccagctttagccatgacagccccagygtccctacgttcatagccgtctcaacaatgggtaattatacacattagtgtataattttctcactttttttgaatatatatatatatatgtatttgtatc

SEQ ID NO: 319372 - DNA, 201 bp, Homo sapiens
aggtatgtctgatgggggttatttattgatttggaaaatcttttgcaatgaaaaggcgaaccctacatgtcacacaaaatcgtcactgtaacatgtgcacatacatattggctctttccagaatgtgcttaagttaaaattgctagcaaagccttaatttgcgtgaattttcccctggttttagtctcggaattagcacag

SEQ ID NO: 319373 - DNA, 201 bp, Homo sapiens
ggtatgtctgatgggggttatttattgatttggaaaatcttttgcaatgaaaaggcgaaccctacatgtcacacaaaatcgtcactgtaacatgtgcacatacatattggctctttccagaatgtgcttaagttaaaattgctagcaaagccttaatttgcgtgaattttcccctggttttagtctcggaattagcacagc

SEQ ID NO: 319374 - DNA, 201 bp, Homo sapiens
ttagataccactggtttcaagttactaaaggcagtttcagcaaccggggcttacagagaattacattcctggaacaatgttatgcgttctgagtgctttcttttttttttttttttttttgagacggagtctcgttctgttgcccaggctggggtgcagtggcacgatctcagctcactgcaaacctctgcctcccaggtt

SEQ ID NO: 319375 - DNA, 201 bp, Homo sapiens
tagataccactggtttcaagttactaaaggcagtttcagcaaccggggcttacagagaattacattcctggaacaatgttatgcgttctgagtgctttcttttttttttttttttttttgagacggagtctcgttctgttgcccaggctggggtgcagtggcacgatctcagctcactgcaaacctctgcctcccaggttc

SEQ ID NO: 319376 - DNA, 201 bp, Homo sapiens
cttgcctccaggcgacatctataacctctcagtaactgcttgtactgaaagaggaagtaatacctccatgctccgccttgtcaagctaggtaagaagagtrcacagagatgggtgtgaaataatcactaatgtttgcatcattcgattcagcaagagctcctcaattcaatgaaataataacagaaaaatggctaattttt

SEQ ID NO: 319377 - DNA, 201 bp, Homo sapiens
ttgagccccgtaggtggaggttgcagtgagccaagattgtgccactacacttcagcctgggcaacaagagcaagactctatctccacacacacacacacamaaaaaaaaaatcaacaagaaaaatagtattttatgtgaaatgctatatgtaaattatgtgaaattcaaatttcaatgtccatatataacattttattaga

SEQ ID NO: 319378 - DNA, 201 bp, Homo sapiens
ttctttgtcatcttatacattttttactctgtcaatctattaccaactcaactatgaaatatatttttaaaaaatatagatgaagttaacctaaaatttaycttattttctgaaaccccaggaaccagttgctgtttcttcccatgtcgtgaccatctccagccttcttcctgccactgcctacaattgtagtgtcaccag

SEQ ID NO: 319379 - DNA, 201 bp, Homo sapiens
ctaaatgctagttgctaactcatctcatcttcttcagtaataggcacagtactcttatcaatccaatttcatctatttagccttggtcttcatctgtcacygatcagagaatgacataattgataactgggtcaaagcaagaaagtttccaatccagccaaaagtataagtgggaaaattagaggttaatgaaaggtctgg

SEQ ID NO: 319380 - DNA, 201 bp, Homo sapiens
tttgctcagaaccagctccacccaaatcactcttcgcagtgaacaaaacccagacttcagtgactttgctgtgggtggaagagggagtagctgatttcttygaagttttctgtcaacaagttggctccagtcagaaaaccaaacttcaggtactgtaccttttgatctaccttttctcagttaacttaagtaaggctaatt

SEQ ID NO: 319381 - DNA, 201 bp, Homo sapiens; identical to SEQ ID NO: 66940

SEQ ID NO: 319382 - DNA, 201 bp, Homo sapiens
acaaggatttgaagattatgatggtgcagaagcagacccacgtcggccagcacaccaagttcaaggtgtttgttgccattggggactacaatggccacatyggtctgggtgttaagtgctccaaggaggtggccactgccatctgcggggccatcatcctggccaagctctccattgtccctgtgtgcagaggctacaggg

SEQ ID NO: 319383 - DNA, 201 bp, Homo sapiens
gtacatagtagtatatatatatcctattagatattatatatagatatagtgtgtgtgtgtatatatatatatatctcctattatatattatacatagatayaggtatatgggagtttattaagtattaacttccacgatcacaaggccccacagtaggctgtctgcaagcttgaggagaaaggagagccagtctgaatctc

SEQ ID NO: 319384 - DNA, 201 bp, Homo sapiens
ttttatattatgtatcttttaaaatatttttataggtgtggttatgtcagtacttttctggcttttaacttttatcctgaaagtaaaagtaatttacacascaccattacagtattacagtgttctgttttgtctatatatttatcttcaccagaaatttttgtacttccctttccttttgttctgtcatttcacatcatt

SEQ ID NO: 319385 - DNA, 201 bp, Homo sapiens
ccttttcacatttttctgcctgctttatattcactggcagctggttagattgtgcccacccaattaagggtgggtctgcctttcccagcccactgactcawatgttaatctcctttggcaacaccttcacagacacacccaggatcaatactttgtgtccttcaatccaatcaagttgaccctcagtattaaccatcacag

SEQ ID NO: 319386 - DNA, 201 bp, Homo sapiens
ttcctttgtattttttaaaattttttatattgatattttatattgaaattttatattgatattttatgtaggtattatctttgtggttaccaaaggtttayataacacaacttttattatgttatctattttaagctgataacaacttattttcaatcacatacaaaaatccctgcccccacatactttgttatattattg

SEQ ID NO: 319387 - DNA, 201 bp, Homo sapiens
aagactaaaaatgcctcacttaccaaatagtttctttctgcaccagtacagatccaccgcacatgtgaacagcctccacgaaaactccacaacaattctgktctttctgacttttctcttctctgaattcctattctgtctcatagtagacagcacaaaacacataacttattagtgtgtggtatttttctagatttattt

SEQ ID NO: 319388 - DNA, 201 bp, Homo sapiens
ccgggctggagtgcaggatgatctcaactcactgcaatctctgcctcctgggctcaagtaatctttccacctcagcctcccgagtagctgggactacaggmgcgcaccaccaaatctggctaatttttagatatttgtagagatgaggtctcactatattgcccaggctggtctcgaactcctgggctgaagtgatcctcc

SEQ ID NO: 319389 - DNA, 201 bp, Homo sapiens
tatgaaaccattaaataaatactgagcaggcagttagataaaggagcttggattcagtgaagacttcaggactaaaaatataaatttgagtgtaggcaggygacagatgtgatgagttaacaaagactcaataaagaaaaaataatgctatccaggaactaagccctgggccactccaactttaagacatggagatggtga

SEQ ID NO: 319390 - DNA, 201 bp, Homo sapiens
tgaggcctccttgtttttataataatgctaactcagtgactattaaacagctgactatacgcaagcctctttgtatgattatctgatttaattttcccccrcaatcctgcagagagtattactagtcccattttagaaatgtggaaataggggcttacggagatttactgtcttagtagcacattccactatgtacagaat

SEQ ID NO: 319391 - DNA, 201 bp, Homo sapiens
tacaaaatcaacactgtaaccagcccacaactaatccattcttaagtcactcagtgctaagggatatgccttctaaattccccccaataccaccctagtcmtagtggccatcatttctctcctaactaatgcagtcatatccactgctgcctatactcaccaaccagttagccatactctaaccagagggaccttcctgcc

SEQ ID NO: 319392 - DNA, 201 bp, Homo sapiens; identical to SEQ ID NO: 66913

SEQ ID NO: 319393 - DNA, 201 bp, Homo sapiens
gcaagcctctttgtatgattatctgatttaattttcccccgcaatcctgcagagagtattactagtcccattttagaaatgtggaaataggggcttacggrgatttactgtcttagtagcacattccactatgtacagaatccaggttccaaactcaggtctctctgaaatctattctttcctctgtaaagagcagactcc

SEQ ID NO: 319394 - DNA, 201 bp, Homo sapiens
actatgtacagaatccaggttccaaactcaggtctctctgaaatctattctttcctctgtaaagagcagactcctttaatttcttattttcttaacttctrgatcattttaataatcaaatcttgaagtgttccttttgactttttaatatgtaatgataacagtaaccttgaattctgagactaaagaattaagaactct

SEQ ID NO: 319395 - DNA, 201 bp, Homo sapiens
ctgtaaagagcagactcctttaatttcttattttcttaacttctggatcattttaataatcaaatcttgaagtgttccttttgactttttaatatgtaatrataacagtaaccttgaattctgagactaaagaattaagaactctttcttttcctgtgctataagataaaaggtagcagtttccaggggaactgacaagaa

SEQ ID NO: 319396 - DNA, 201 bp, Homo sapiens
atgtccatattgtccaacatagtagtcactaatttttaattttaattagttttagttcatttaaaatttgatttaaatagctctatgtagctaatagctamcatattggacagagcaattctttgcatccatttagaccatactcagcctttatgaatccattaaactcggagctgctttcttcttatctgcttcgatgtt

SEQ ID NO: 319397 - DNA, 201 bp, Homo sapiens
ctctgtttgtgtctgtgtctcccagttagtctagaccagtggtgacctagaactttgggatgatggaaatgttctatgtccatattgtccaacatagtagycactaatttttaattttaattagttttagttcatttaaaatttgatttaaatagctctatgtagctaatagctaccatattggacagagcaattctttgc

SEQ ID NO: 319398 - DNA, 201 bp, Homo sapiens
gtctagatcaaacaaattaaagaatatgttgggctttattcactcgtgtcaccaaactgcacagtggctgagcctttggatgagtgtgaccaggacctcaraccaaatcagggagtctaccactagcaactatcttcatggggcagaaattacaaacacttcagctctgcattcatacatactgaaagccagaaaggaaca

SEQ ID NO: 319399 - DNA, 201 bp, Homo sapiens
tcggctcactgcaagctccacctcctgggttcaagggattctcctgcctcagcctcctaagtagctgggattacaggcacatgtcaccacgcccagctaattttttttttttttttgtatttttaatagaggggggtttcaccatcttggccaggcaggtctcctgacctcaagtgatctgcccaccttggcctccgaaag

SEQ ID NO: 319400 - DNA, 201 bp, Homo sapiens
ctaattttttttttttttttgtatttttaatagaggggggtttcaccatcttggccaggcaggtctcctgacctcaagtgatctgcccaccttggcctccsaaagtgctgggattacaggtatgagccaccgtgcccagctgactttatttagtctttattataaattgaataaaacctttgtaaatagagatattttgtt

SEQ ID NO: 319401 - DNA, 201 bp, Homo sapiens
tccaaaattaggagctgtgcagagcttccagcctgagttcattttagaagtcaggaaataattgctgcattattatatatattgaactgtcattttacacrtgcacacatggcaacttgatgagaaaatatcatttgtacttattttaaattaatgcttaattggtgacagactttagctatcacctacactctggttggg

SEQ ID NO: 319402 - DNA, 201 bp, Homo sapiens
attctagccaggtgtcagaaggaacctggcgagtgtagccccgggactctgattttcctgaagaaactgaaaagaaagaatacccaggtggaaaaggtacyctggtagctggacaggatgtttagtggatgcattatgtaatgtctgcagagaatcatggccataagtgctatgtaagcaccaaacatcattaatattact

SEQ ID NO: 319403 - DNA, 201 bp, Homo sapiens
tttttctgcccctccacaatacattaaggcttctcctttgtattcaggaaaggtccagggaagtaagttttcttgctgtcctcttagtggtttcaattatyatctgcacacctgtcacccccatacccccatccccagccccccagagggaggctctctctagtcccctatcctgcctctggtagtcctcatgagcatggg

SEQ ID NO: 319404 - DNA, 201 bp, Homo sapiens
ttcaatgtaagtagaaaaacattaattgagcaccttctacctggaagttgttctcagtactgagacatgaagacaaagactgatgagacaggatccttgtsctcaaaaattggtactcataatacacgaatggcactaacacaaggcagaatgagataaatattataacagaggtacaaagttatttaacaacacaaagga

SEQ ID NO: 319405 - DNA, 201 bp, Homo sapiens
aatatgtccaaataagcaatgtcagggggtctgagagcaggtaacagggaccccagcttaaaaccttgagttcaggcacagcactctgcatactgggggamctagagggaaagacaacatccaaaagacagggtcacaagcagaagaccaggagacattcaggaatggagaatgagacagcagatgactattagaattgag

SEQ ID NO: 319406 - DNA, 201 bp, Homo sapiens
tgtaatcccagcactttgggaggccgaggcaggtggatcacctgacgtcaggagtttgagaccagcctagccaacgtggtgaaaccccatctctactaagwatacaaatattagccgggcatggtggctggtgcctgtaatcccagctactcgggagactgaggcaggagaactgcttgaacccaggaggcggaggttgca

SEQ ID NO: 319407 - DNA, 201 bp, Homo sapiens
ttcctttattttatgtgaatgtaatatttttgtcacctgaatataaactatatcagaggaaagaagaaaaaactgtatatattaaataccttctatgtgcyggttttttaggcattttacatacgttatttcatttaatcctattttgctgcagttgacaagagttgttcaaaaaaaatggtaaattgggcacacagtgta

SEQ ID NO: 319408 - DNA, 201 bp, Homo sapiens
taagcccgcacatttatatttcacagaatggattaatatttaattgtaattaaggtgcttgtcatattaattaatcccaataggtaatttactgatatctrttcacagtttatattactaactcttgcaactttttcatctttccatctgttgtctattaatgcacacaggcgtaggagtatatttgctttcttaaccctg

SEQ ID NO: 319409 - DNA, 201 bp, Homo sapiens
ttttaaaaaatgaatctgaaattattattatcttctcatgtaaggaaaagtaaacaaacctgatatgtgtttaatgaaaattaaataaaactgaggtaccwgatgtaattatttaaagctgttcaagtttaattattatgttaatcaattcttctgcccagataaatttgtcttttcttttttaattatcaggagtaaaaa

SEQ ID NO: 319410 - DNA, 201 bp, Homo sapiens
tttttaatatgtaatgataacagtaaccttgaattctgagactaaagaattaagaactctttcttttcctgtgctataagataaaaggtagcagtttccargggaactgacaagaaaatcattgtccttaaatattaatacctagtgtttaggtactaaattatgtacagacagatccataaatgtggacaacttgaaaag

SEQ ID NO: 319411 - DNA, 201 bp, Homo sapiens
gaagctggatatatatgcccttcttttcaattgcaatatattaaggattggtaacttgaaccaaaaaaaaaaggtgagtgctaaccttagagaagtaaaayttctattttctccaagaagattaagaagtatgatattaaacaatatataatacctatcaacaagaattttaaaatgtatgtatatttctttgtgtttggc

SEQ ID NO: 319412 - DNA, 201 bp, Homo sapiens
tagaagaatcaccttgaaactgtaaatggttgtctccagttgagaagagaaggtaaaacatagagctgcatgctttctgtaacttcagtaaatttcacacrtatcaactagtaaaaacatactggatataaactatgttctcagcccttttgtacaatgccagatacaaaagaagtgaaattcatgctccccgctcgtgga

SEQ ID NO: 319413 - DNA, 201 bp, Homo sapiens
agaagcattgtcatgatgaagctttcctgggcatttttcctcaaaggctttggttaactctcaaaacactcataataggcagatgctattgttctttggcyatctggtatgtcaacaagcaacatgctctgagcattccaaaaaattgttgccatgaccattgcctttgactagtccacttttgctttgattgtaccattt

SEQ ID NO: 319414 - DNA, 201 bp, Homo sapiens
ctctccttctctagaagacatttcttgaaaggctttcctctcacctttttatttgccttctctaccatttctctttccctccaaatgccccaccactaccrtatccccctggttcccattttctatctccacttgtcttcattccatccttcctttccatcacctcctctttttctttttcctctgtagatatttgtcctt

SEQ ID NO: 319415 - DNA, 201 bp, Homo sapiens
tttcatctccggttacaattcttcaaaggaatgcttcagggtcttcatcccactcgtttccataaaagctatgctcttgtctgcagctgatctgggctcaytggttttggcatccatcaagtggaaagtttgttcaatttttttcagtcagagctgtgtaagctgaacaaactaagatgtctatggtgttggctattgttt

SEQ ID NO: 319416 - DNA, 201 bp, Homo sapiens
taccttctgtaatggaaagggcctgggaattggggggtttgtgttgcggtcatgtccctgctcactggcagtgcgtaacaaaaagggtattggcctggggrttgctgatctgctggtttagagcaagggttgtcaatccttgcttagtaggcaaggcctcaggtggcacaaatgagatgaggggaagaagagaataggtgc

SEQ ID NO: 319417 - DNA, 201 bp, Homo sapiens
ttcatctccggttacaattcttcaaaggaatgcttcagggtcttcatcccactcgtttccataaaagctatgctcttgtctgcagctgatctgggctcacyggttttggcatccatcaagtggaaagtttgttcaatttttttcagtcagagctgtgtaagctgaacaaactaagatgtctatggtgttggctattgtttg

SEQ ID NO: 319418 - DNA, 201 bp, Homo sapiens
tctaagcaaacatgaggcaaaactctgaaaaaataaatagctagatgattctaacgatgatagaaattatggtatagctacacttttaccttattaaagcmacattttcttaattccttcaagatggcatgcccttggtggcacagctggatcataacctctgctggcaactcacagtttatgtcttgaaacccaagcata

SEQ ID NO: 319419 - DNA, 201 bp, Homo sapiens
tctcaaagctccaaaatgatatcctttgactccgtgtctcacatccaggtcatgctgatgcaagaggtgggttcccatggtcttaggcagttccactcctrtggctttgcagcatatatcccccctcctggctgcattcacaggctggcattgagtgtctgcagcttttccaggtgcacagtgcaagctgtcagtggatct

SEQ ID NO: 319420 - DNA, 201 bp, Homo sapiens
ccttaagaacctagaaaaaggagagcaaactaaacctaaagcaagcaaaaagaaggaaattatttcaaaagttagagtaaatgtaaatgaaatggagaatwaaaaaaacagagaaaaatcaaagaaaccaaacttggtttttttgaaaagatcaacaaaatgtataaactgaagctagactgaccaagaaatagagcatac

SEQ ID NO: 319421 - DNA, 201 bp, Homo sapiens
aggctaatgggaaaagtggggattcaaaacataaggaaacatatttgaatattaataaaagctaagagactgttaagagggaaattatcacatgttctgaraatgtgtcacggaaggactttgccaagccagggcaggatgatgatgatctaagaaggctttcctgagggcatgatacatgtgttcaaatccacaggatga

SEQ ID NO: 319422 - DNA, 201 bp, Homo sapiens
caaggtgtttgttgccattggggactacaatggccacatcggtctgggtgttaagtgctccaaggaggtggccactgccatctgcggggccatcatcctgrccaagctctccattgtccctgtgtgcagaggctacaggggtaacaagatctgcaagccccacactgtcccttgcaaggtgacagaccgctgcagctctgt

SEQ ID NO: 319423 - DNA, 201 bp, Homo sapiens
accataactcaaacaggtctttggaatccattcctttgttattttccatatgccagagttttttagaagcaacacagatgggggtgtgtgtatacgagtaygcatatatatactactgtactgctacagtaagagccaagtggaaatctagagatttctcctatcaaggaagctggatatatatgcccttcttttcaattg

SEQ ID NO: 319424 - DNA, 201 bp, Homo sapiens
tatttgaagaggttgattctaagccaaatatgagaaccagggcttatgatacagcctcgggacatcttgagaacatgtgcccaaggtgattgggttacacyttaattttaaacatgttaggggcacagaagctacaggcaaagacataaatcaacatatgcaaaacatgcattgttttggcctagaaaagtgggacatctc

SEQ ID NO: 319425 - DNA, 201 bp, Homo sapiens
aacagctggggcagttctgcttcaggctgtgggtcagagtcaggtctgccctatgtgcctcctcattctcggactagcagcttccctgggcatgtcttttycagggtagatggcaggcacacaagagggcaaaccaaacaagcaagtgcattgaaagcttctgagtggacttgatttctatctaagatcattggccaaagc

SEQ ID NO: 319426 - DNA, 201 bp, Homo sapiens
tgaggcaggtgaatcccttgaacctgggaggtggaggttgcagtgagcagagatcgcactactgcactccagcctgggtgacagagcaagactccatctcaaaaaaaaaaaaaaaaaaaaaagaagaagaagaaggacagatgctagatagatagatagatgatagatagattaaaaaagagatatagagataaaggtata

SEQ ID NO: 319427 - DNA, 201 bp, Homo sapiens
ctatgtgcctcctcattctcggactagcagcttccctgggcatgtctttttcagggtagatggcaggcacacaagagggcaaaccaaacaagcaagtgcaytgaaagcttctgagtggacttgatttctatctaagatcattggccaaagcaagttgatgatagtggggtggagtaccttccacctctaaagggagctact

SEQ ID NO: 319428 - DNA, 201 bp, Homo sapiens
tcttttaaatgttggaaaataattattaggcatgtatcattaactgataaaaacataaatttcttaagaaatgctatagccttaaaagttactaaattacaaaaaaaattaaattggagttattgaaaaaaaattgctctaactcagccctcttttatagtaaagtattaactataaaacatgtgaatccaaaatattatt

SEQ ID NO: 319429 - DNA, 201 bp, Homo sapiens
ttaggcatgtatcattaactgataaaaacataaatttcttaagaaatgctatagccttaaaagttactaaattacaaaaaaaattaaattggagttattgaaaaaaaattgctctaactcagccctcttttatagtaaagtattaactataaaacatgtgaatccaaaatattattcttaaattgatgtgatattaatgta

SEQ ID NO: 319430 - DNA, 201 bp, Homo sapiens
tattgctctagctggcttgggacagaggagagaggagtgcatgtaaatcttctagtctctctgcttctcttgaaatgtggcagtctgagctccacgtttakattcccctatttcttctccctaatttcttacccagtgagtgctgagtgggtgcccgcaagcattgctgtatggcacccaggcctccagtgagcaatcctt

SEQ ID NO: 319431 - DNA, 201 bp, Homo sapiens
gctggcttgggacagaggagagaggagtgcatgtaaatcttctagtctctctgcttctcttgaaatgtggcagtctgagctccacgtttatattcccctakttcttctccctaatttcttacccagtgagtgctgagtgggtgcccgcaagcattgctgtatggcacccaggcctccagtgagcaatccttaaagcccagt

SEQ ID NO: 319432 - DNA, 201 bp, Homo sapiens
ttattctttcaaaaatgatgcttatgagtactgcaactgcattctatagattgacaagaaaggtaagaaatttggaggtaatattttcttacttttaagasttggaattctggagagcagttttcttaattttctttttttatttttggtaaagcccaatagcacactgttttatgctgtaagtgaagtatgccatcgttt

SEQ ID NO: 319433 - DNA, 201 bp, Homo sapiens
aaaatgatgcttatgagtactgcaactgcattctatagattgacaagaaaggtaagaaatttggaggtaatattttcttacttttaagagttggaattctkgagagcagttttcttaattttctttttttatttttggtaaagcccaatagcacactgttttatgctgtaagtgaagtatgccatcgtttggcacagatgg

SEQ ID NO: 319434 - DNA, 201 bp, Homo sapiens
gtgttcgtgtcccagcttggcagcttaacaactctaattccctttttcttcttttgtgaaatgggtatagttatgacaattgtaatagattaacaaagttkatgaaagtagtgtacataatgtacatagtatagttgaacacatagcaagctctaataaagctaagtatatatgtatgtggtttttaatcacattcaccag

SEQ ID NO: 319435 - DNA, 201 bp, Homo sapiens
gccttaggaacgctttgtggtgtaattgacagaaaagaccacgagctcaggagggaaaagtccgaaacccatgagttggctctgtgtgcatgaacacgcaygcgtgcgcgcgcacacacatacacacacacacacacaccctgctctggagttgggcaactgacttatgctgtctgatctgcagtttcctcaaactttaca

SEQ ID NO: 319436 - DNA, 201 bp, Homo sapiens
aacaaaccactgtgcaaacatgattgatcattgtaaatattttctataattcataaccaaattagtgtttttccctgcttacttttctttgattatttctscttcattccttgaatcctcaaaccacttaacatttcatcctgttatttattattatacaggaccactcttctccctcctgacaacctttcctggtaaaag

SEQ ID NO: 319437 - DNA, 201 bp, Homo sapiens
gcctgatcgttcctctggaggttttgtctcagaggagtacccggccgtgtgaggtgtcagtccgcccctactgggggggtgcctcccagttaggctattcrgggatcagggacccacttgaggaggcagtctgcccgttctcagatctcaagctgtgtgctgggagaaccactactctcttcaaagctgtcagacagggac

SEQ ID NO: 319438 - DNA, 201 bp, Homo sapiens
cttggccttaggaacgctttgtggtgtaattgacagaaaagaccacgagctcaggagggaaaagtccgaaacccatgagttggctctgtgtgcatgaacaygcacgcgtgcgcgcgcacacacatacacacacacacacacaccctgctctggagttgggcaactgacttatgctgtctgatctgcagtttcctcaaactt

SEQ ID NO: 319439 - DNA, 201 bp, Homo sapiens
acaaaccactgtgcaaacatgattgatcattgtaaatattttctataattcataaccaaattagtgtttttccctgcttacttttctttgattatttctcsttcattccttgaatcctcaaaccacttaacatttcatcctgttatttattattatacaggaccactcttctccctcctgacaacctttcctggtaaaagg

SEQ ID NO: 319440 - DNA, 201 bp, Homo sapiens
tgtctatgaatccctgagattggaaaaggaggtcaggtcagcacagagaaaggccttaccccaccactctcccgagaggcaccagcatttcacctgcagcytctgggctctgaaccccactttgcatgagaccacatagtgggctgagtctgcagccaccacgatgccttcaggaaatgctagaattcatctagagttcca

SEQ ID NO: 319441 - DNA, 201 bp, Homo sapiens
ttcttaccttaactgctcattacctggctcttgggtacctgtgaaggggaagatgttaccctggagagatggttcattgactcatcaggtgtgtgtcagakgcttggtgctggccagtctcccaaacccacagacttgaggagttaagccacattcttcgtgattgagaaactctgtgtgaagtgcacagtgtgttgttca

SEQ ID NO: 319442 - DNA, 201 bp, Homo sapiens
atgttatgatttgtaacattcacacaacacctcacttttgaatctataaaagaattgcacgtatgagaaacctatatttcaatactgctgaaacagacatkaaataaagaatttaaagaatgattttgtttggttttatttttcccaacattttattttcaaaagtttcaaacctagggtaaagttgaaaaatagtacaaa

SEQ ID NO: 319443 - DNA, 201 bp, Homo sapiens
tcaaacaactaactcagcaatggtgggcgcccctcccccagcctcgctgctgccttgcagtttgatctcggactgctgtgctagcaatgagcgagactccstgggcatgggaccctccgagccaggtgcgagatataatctcctggtgtgccttgttttaagcccattggaaaagcacagtattagagtgggagagacctg

SEQ ID NO: 319444 - DNA, 201 bp, Homo sapiens
cttactttgaaatttaaggatccattagtgctcagatttagtttttagaagagagagaaaaaaggatacatatctagtattttgaaattagtgtctttaayagttatctttttccacagagcccacctgaatgaccttgaaaatattattccatttcttggaattggcctcctgtattccttgagtggtcccgacccctct

SEQ ID NO: 319445 - DNA, 201 bp, Homo sapiens; identical to SEQ ID NO: 66961

SEQ ID NO: 319446 - DNA, 201 bp, Homo sapiens
gcttttatgaaggaaggtggatgaaggggaaagctatttactggtctagtctctcctgaaacaaggattccccacctgactacaagacagaattggctctrgagtgaagtctgtgtgctaagtgactttaacttgtgataggactcaggtggaatggtacagcttgccttaacactattacttatgaggaataggatgggt

SEQ ID NO: 319447 - DNA, 201 bp, Homo sapiens
ttggaacgcagcagtacttacttatttttatatttcctgcaactgcttttgtgtcacaatggcagagtggcgtagttgaattgttgcagtggagaccacayggctcacaaaaccaaaaatatttactctctggtgttttacagaaagttttctgattcttgctccagtaggttagcctgactgtgctatcacagcatagga

SEQ ID NO: 319448 - DNA, 201 bp, Homo sapiens
agcttatagcctttattaatgaggtcaagctcaatttgagttaaatagcattttgtgggtttaatgtctcagaataataatctttaattttctctgaatcrccaatgtgatgtcaccaaaatgaaatgattgttacttttccgaaaaattcaataaatgcattgaattacctccatttaataattttcttctattaattct

SEQ ID NO: 319449 - DNA, 201 bp, Homo sapiens
ctgaagagggtaagctcgagctggaaagatagtttctgtttcttgagtttaaattaaatccttgacattataaagcattacggatacattaccattgtcgrttttgtcctgttcatatgtttttgctattgcattattcagaatcaagttaaaaattcttttttattgtgtttgaatgtttctaggatgtggacagatcaa

SEQ ID NO: 319450 - DNA, 201 bp, Homo sapiens
aaatgtggcagtctgagctccacgtttatattcccctatttcttctccctaatttcttacccagtgagtgctgagtgggtgcccgcaagcattgctgtatrgcacccaggcctccagtgagcaatccttaaagcccagttttcctggggtcccagcctgctgtgagtcccagcctacacctaccttttgcatatgcttttc

SEQ ID NO: 319451 - DNA, 201 bp, Homo sapiens
tgtactttcctaccaacagtcctgggaggctgccatttttttctctactctttcaatactgattttcaatgagggggaaaaaaaagttctctggacttttrttccatcaatacataaatttcattctgggaacattagtagaggcctatagagaatgttttagttttaaaattattgttaagtagcaactttctatttgat

SEQ ID NO: 319452 - DNA, 201 bp, Homo sapiens
gtgcgattatctttggtaatttaaaaaaaaaaaaaaaaaggcaaatcagtccaaatttggatattaccctctctggcagacgagtaaaatttttctaccgstttgttttagagtggtgtctatgaatccctgagattggaaaaggaggtcaggtcagcacagagaaaggccttaccccaccactctcccgagaggcaccag

SEQ ID NO: 319453 - DNA, 201 bp, Homo sapiens
ggggggaggggtagaaaacaggaatgagatttgacaaggaaaggcctccagaagaccagagctgttgagaattcttagccttgatggtgggtagcccagargtaaacacttgagaaaactaagttgcagtcttggtctctccactgtgaatttgggtcatattactcactacttttctgggccttaatttccttacatact

SEQ ID NO: 319454 - DNA, 201 bp, Homo sapiens
agaattaaagagttgagagcagaattaatcaagcctcttgaaagagagagtatagtgtagtaaccgtatggggtgttcgtgtcccagcttggcagcttaayaactctaattccctttttcttcttttgtgaaatgggtatagttatgacaattgtaatagattaacaaagttgatgaaagtagtgtacataatgtacatag

SEQ ID NO: 319455 - DNA, 201 bp, Homo sapiens
aatgaatggagaatataatgagcaaacaaaccactgtgcaaacatgattgatcattgtaaatattttctataattcataaccaaattagtgtttttccctrcttacttttctttgattatttctccttcattccttgaatcctcaaaccacttaacatttcatcctgttatttattattatacaggaccactcttctccct

SEQ ID NO: 319456 - DNA, 201 bp, Homo sapiens
atagtgtagtaaccgtatggggtgttcgtgtcccagcttggcagcttaacaactctaattccctttttcttcttttgtgaaatgggtatagttatgacaaktgtaatagattaacaaagttgatgaaagtagtgtacataatgtacatagtatagttgaacacatagcaagctctaataaagctaagtatatatgtatgtg

SEQ ID NO: 319457 - DNA, 201 bp, Homo sapiens
taatcatgacaaaaatccccatgaggtaggtacaatgattatctctagtttacagaagggaaaaatgtggtatagagaggtaaaataacttattgaaggatgtgtgtgtgtgtgtgtgtgtgtgtgatatatatgccatctatctcatttcatttaatactcaataattttattcggtagggattattatttcttccttag

SEQ ID NO: 319458 - DNA, 201 bp, Homo sapiens
aagtgttcctcctgccttggcctcccaaagtgccgggattgaaggagtgagccactgcaccctgactgttcttatgttttaaaatcaatgaaaagacagamcataaagtttggaaaaaatagttaactatagagggaaggaggcaatagaataaaatgaaaagagatagaaactatttttaaaagtatcttgttttaaaga

SEQ ID NO: 319459 - DNA, 201 bp, Homo sapiens
atcatgacaaaaatccccatgaggtaggtacaatgattatctctagtttacagaagggaaaaatgtggtatagagaggtaaaataacttattgaaggatgkgtgtgtgtgtgtgtgtgtgtgtgatatatatgccatctatctcatttcatttaatactcaataattttattcggtagggattattatttcttccttagag

SEQ ID NO: 319460 - DNA, 201 bp, Homo sapiens
tagatagcagggctgataaaagaacaagaggaggttacaaagaataatggcagaggactggaaatgtacattttaagctttaccctaagttcctacctgtyttgacttcagtatcaccagtgtgtcttggccttcctcttcagcacattcccaattatacttccaattccagacacagataactacattcctctactcaac

SEQ ID NO: 319461 - DNA, 201 bp, Homo sapiens
gcaagtcttcatggtgttcacaggaaaagtcccgtcactgttaacatggcacaccctatttacagatctcatttgaagcaagaagcaattcattttttttwaaatcaggataggagctttaaagtctatcgttatatttccaatcctctttgaataagagaacagaagaaaaggattttgctcttacaaaaagatggcaga

SEQ ID NO: 319462 - DNA, 201 bp, Homo sapiens
aattattctttcaaaaatgatgcttatgagtactgcaactgcattctatagattgacaagaaaggtaagaaatttggaggtaatattttcttacttttaasagttggaattctggagagcagttttcttaattttctttttttatttttggtaaagcccaatagcacactgttttatgctgtaagtgaagtatgccatcgt

SEQ ID NO: 319463 - DNA, 201 bp, Homo sapiens
gctagtagttgatggtgggacaaatagaatgcttggaagtaaatgaaacagggttccttggtctaatcattattctgggttcccagaatcttgactctatraattagttaggttctacctagtccaaatgtgtacagataaaataaaagaaaaatgtttattcatttcttcataaagaaatatttattgaaggactcatat

SEQ ID NO: 319464 - DNA, 201 bp, Homo sapiens; identical to SEQ ID NO: 66977

SEQ ID NO: 319465 - DNA, 201 bp, Homo sapiens
ctttatgttgatgctggtgcaaaccaacctactgggttgcaagtcatagaaaagcgaacaagtaatgtcctaggccttcgcattcactgcccactcactcrctgactcacccacagtgacttccaatcctgcaagctccattcatgataaatgccctatacaggtataccattttttttttttttgagatggagtcttgct

SEQ ID NO: 319466 - DNA, 201 bp, Homo sapiens
aatcatgacaaaaatccccatgaggtaggtacaatgattatctctagtttacagaagggaaaaatgtggtatagagaggtaaaataacttattgaaggatgtgtgtgtgtgtgtgtgtgtgtgtgatatatatgccatctatctcatttcatttaatactcaataattttattcggtagggattattatttcttccttaga

SEQ ID NO: 319467 - DNA, 201 bp, Homo sapiens
ccttgaccttccttccctctaccctcatggtcctcttactgtccttgactttcttctctgctttaacattccattctatttgtcaactgcgtaacacaggygtagaagtggacattgttttccagagagtctcctttttatagtttcttcctcaaccttaaaatgtctgtccttttggcatgttgtgaaggagaacactaa

SEQ ID NO: 319468 - DNA, 201 bp, Homo sapiens; identical to SEQ ID NO: 66959

SEQ ID NO: 319469 - DNA, 201 bp, Homo sapiens
gtattctgttatttagatataagagcatgagagtcttgatattaaattggtaaattaattattggcaacctagtggtttgggttggcaaggattctgtcartaatcatttggtagagtagcagaagcaaaggaggtgtcttaagaaaaatcaacaccaaaagggttttcttccttcgggagaaagaatttttataaaaaga

SEQ ID NO: 319470 - DNA, 201 bp, Homo sapiens
aaaaaaggaagtagaccttgcaacaggtggtgagtgtctgagatatagcactaggagagaaataatatagattgaaaacagaaatccttaaacatttctcrtataaacccatgaaagatagatccataaatattgtggggactatggggactaggaagcttggaagtatccctaatctagatagtgatggtaggctaaata

SEQ ID NO: 319471 - DNA, 201 bp, Homo sapiens
atagttgaacacatagcaagctctaataaagctaagtatatatgtatgtggtttttaatcacattcaccagcaacacaaagatggctatatgaccaataawgatacatataaatgtatagattactggtaagatggatagaaagattgcagctgatagatgtcaggctaataaggacacaatgcaggggttgagctttaaa

SEQ ID NO: 319472 - DNA, 201 bp, Homo sapiens
agcagggctgataaaagaacaagaggaggttacaaagaataatggcagaggactggaaatgtacattttaagctttaccctaagttcctacctgttttgayttcagtatcaccagtgtgtcttggccttcctcttcagcacattcccaattatacttccaattccagacacagataactacattcctctactcaacggctt

SEQ ID NO: 319473 - DNA, 201 bp, Homo sapiens
tcacattcaccagcaacacaaagatggctatatgaccaataatgatacatataaatgtatagattactggtaagatggatagaaagattgcagctgatagrtgtcaggctaataaggacacaatgcaggggttgagctttaaaggcaggaatgaacatcatctagaagagacagtactacatgccaagcaggataaatagc

SEQ ID NO: 319474 - DNA, 201 bp, Homo sapiens
gaaaagttgtgtgtgttctgtggaagagagagaagtagatagcagggctgataaaagaacaagaggaggttacaaagaataatggcagaggactggaaatktacattttaagctttaccctaagttcctacctgttttgacttcagtatcaccagtgtgtcttggccttcctcttcagcacattcccaattatacttccaa

SEQ ID NO: 319475 - DNA, 201 bp, Homo sapiens
gcagaggactggaaatgtacattttaagctttaccctaagttcctacctgttttgacttcagtatcaccagtgtgtcttggccttcctcttcagcacattyccaattatacttccaattccagacacagataactacattcctctactcaacggcttttagttgaatgtaactttggaatgtgaaatgactcaaggatcat

SEQ ID NO: 319476 - DNA, 201 bp, Homo sapiens
cttggtttgtttgttttcttttttttgaggcagggtcttgctctgtcacccagactagattgtagtggtgcaatcacagctcactgcagcctcaacctcthgggctcaggtgatcctccaacctcaacctcctgagtagctaggaccacaggcatgcatgtggcccactaccatgcaaaattttttttaaaaaaatttgta

SEQ ID NO: 319477 - DNA, 201 bp, Homo sapiens
tgagtagctaggaccacaggcatgcatgtggcccactaccatgcaaaattttttttaaaaaaatttgtagatatggggactccctatgttgcccaggctgrtcttgaattcttgggctcaagcaatcctgcctcagcctcacaaagcgctggaattacaggtgtgagctattgctcctggccagtatttgaaataagtttt

SEQ ID NO: 319478 - DNA, 201 bp, Homo sapiens
taaggaggccttgccaccagcgcaggggaggtgaagtctaagggaaggtaatattgtcaatgcctgctaattagttctaccctggagattttaactttctrcgaagtttttaaaaacaacttccaaaactctgctgatcctgaaatgttcgagaattcagagttcctagacaatggctactgtcccccttcccactgatta

SEQ ID NO: 319479 - DNA, 201 bp, Homo sapiens
gacctggccaaaattcattcctttttttttttttttttttttttttttttacagctgtgtagtattccatggtgtatacgtaccacattgtctttatccarttcatattgatggacacctaggttgcattagcccttttttgattctctgtgaaagtctgaagcccctcccaagatttctgcagattcccttatggcatat

SEQ ID NO: 319480 - DNA, 201 bp, Homo sapiens
cccccttcccactgattaggggagttggcatttcaggaaccagagtttctaagggcgccaaatagaagggctcaaagggaatcagcaggcgatggttactstgggcgggtaaatcaggtgatttagaggaggggtttggcgaggttggggtcgggctttaaacgtgggagggctaattaacaggagattaactggagaggg

SEQ ID NO: 319481 - DNA, 201 bp, Homo sapiens
ctctgggcgggtaaatcaggtgatttagaggaggggtttggcgaggttggggtcgggctttaaacgtgggagggctaattaacaggagattaactggagargggcggtgcctgcgtccggcccgcgcggccacagtccctgcattgcgcgcgacccggcggcgggacaggcttgctgcttcctcctcctcggcctcaccgt

SEQ ID NO: 319482 - DNA, 201 bp, Homo sapiens
aaaaatgatgcttatgagtactgcaactgcattctatagattgacaagaaaggtaagaaatttggaggtaatattttcttacttttaagagttggaattcyggagagcagttttcttaattttctttttttatttttggtaaagcccaatagcacactgttttatgctgtaagtgaagtatgccatcgtttggcacagatg

SEQ ID NO: 319483 - DNA, 201 bp, Homo sapiens
agtgtgtcttggccttcctcttcagcacattcccaattatacttccaattccagacacagataactacattcctctactcaacggcttttagttgaatgtractttggaatgtgaaatgactcaaggatcatgtaaagctaattctccttccctattacacccatgaaagtaccatatatggtaattccttaccttgcatt

SEQ ID NO: 319484 - DNA, 201 bp, Homo sapiens
tgtcaactgcgtaacacaggcgtagaagtggacattgttttccagagagtctcctttttatagtttcttcctcaaccttaaaatgtctgtccttttggcaygttgtgaaggagaacactaacgtgcctaagattggaggtgacgatatctctgtgatgctgggggagaaatcacaggggcaaaacaaatactctaggtgtc

SEQ ID NO: 319485 - DNA, 201 bp, Homo sapiens
gctgtgctaagttcttgtttgagctacccaatttataacttgatagtgaaaggaatataatttcctttgtaactcatctttcatgacaatacagttagagkctggatcctagaattgattctaataatagttttgccactgatacacatgagaaacccaggcaagtcacctacttatgctctattcatttcttcacattta

SEQ ID NO: 319486 - DNA, 201 bp, Homo sapiens
ttagattataatatgattgtatcaagatattatatgtatcccgtgtgataactgttatgtatccgtatccataagaataaaaataaataaaaatttttaaraagaaaaataaaataaagtatttactctggccttttacaaagtttgtcaactcctgatctatacaattgaataaaaagcatataaatggatactgaaatt

SEQ ID NO: 319487 - DNA, 201 bp, Homo sapiens
accccgtctctactaaaaatacaaaaaattagccaggcgtgatggcaggtgcctgtgatcccagctacttgggatgctgaggcaggataacggtgtgaacycgggaggcggagcttgcagtgagctgagatcgcgccactgcactccagcctgggctacacaggcagactccgtctcaaaaaaaaaaaaaaaaaaatgtta

SEQ ID NO: 319488 - DNA, 201 bp, Homo sapiens
gaacattagtagaggcctatagagaatgttttagttttaaaattattgttaagtagcaactttctatttgataaacttaccttaattttaaaaaacttcamacgcttgctgtatttcttcacatctttgtacagaggcctgggacttagggatcctttcttaagctaattactttacctacactctgaaggatagtgcagt

SEQ ID NO: 319489 - DNA, 201 bp, Homo sapiens
atttttattcactggtttttgttcaagttcttatttatgcttctctttttacaactttgcattgttaataaaaattcagttttaactatagatgccttctkctcctcttgtgtttgatttattgctccaaatgggccaacctggatgtctatatttcttccactaaaatgcaaataacttactaggtagaatatccccatg

SEQ ID NO: 319490 - DNA, 201 bp, Homo sapiens
gtgatcctccaacctcaacctcctgagtagctaggaccacaggcatgcatgtggcccactaccatgcaaaattttttttaaaaaaatttgtagatatgggkactccctatgttgcccaggctgatcttgaattcttgggctcaagcaatcctgcctcagcctcacaaagcgctggaattacaggtgtgagctattgctcct

SEQ ID NO: 319491 - DNA, 201 bp, Homo sapiens
agaaagtggactcttaggaagactgatgtccacctggtgatagattttggcagctgtccataaatggcactaacgtgaaggaagctgccgctccaggaagsagtctgtcgttggagaagaggggagggttaggacggaagggtgatagtgcactgcagcaggtgctcacagggaaagctggggaactgtttgcctggaaca

SEQ ID NO: 319492 - DNA, 201 bp, Homo sapiens
aggaataggatgggtttgttttcatgtttctgctacttaatttgaaaacaaagattgtggttatctttctatctgcatgcatatctgtgtgtacacacacmcacacacacacacacacacacacacacatacacacacacatactaccatcatcggttctaaccattatggatgcttagtaattagataacattgttactt

SEQ ID NO: 319493 - DNA, 201 bp, Homo sapiens
tgaacggcagagccagaatggggctacaaatgaagtgaaaagtatgctttaccgtgtgcaacaattgtgaaagttaatacatacacatatggaacaattamctaaaaacttaaggtaatatgtgttgaaataccaagatatgtgacttaaagtcagttatttgagttctggaaagacagaaaccagtgatggttagaaagc

SEQ ID NO: 319494 - DNA, 201 bp, Homo sapiens
ctgtatgttggcttgtgtggccaaacagcatgtttggtgagtgtgggtttaaaccaaacagagttagaggaatcaaatattaaatggcttaagactaagayaatctgacacatccatcattcacttcaagatggagatgatctctcttcagtgaaacttaaaacctcagtctattggccacagcaccccacattcaattca

SEQ ID NO: 319495 - DNA, 201 bp, Homo sapiens
tagaaaggtaaaggaacccctgccccttgaccttccttccctctaccctcatggtcctcttactgtccttgactttcttctctgctttaacattccattckatttgtcaactgcgtaacacaggcgtagaagtggacattgttttccagagagtctcctttttatagtttcttcctcaaccttaaaatgtctgtccttttg

SEQ ID NO: 319496 - DNA, 201 bp, Homo sapiens
tccctttaaaggtagagaataacccttcactgagagtgttccatggagtctaagtgacacttgctggggactctgtcatgagactggagcataggctaggsgttgaactggatgatgtccctcgtggccccagtgtatgaacacacatatatggagagattattgtgtatgtatcactgtcatttcttctattgggatgct

SEQ ID NO: 319497 - DNA, 201 bp, Homo sapiens
acgatatctctgtgatgctgggggagaaatcacaggggcaaaacaaatactctaggtgtcattgacaaagtgggcccttctttaatagaaaatggtattcytgtcttttctttcccatctcattctcagtagtacttgtattgctccatgaaagagagggcacaggaacactcacaccatcctctctttgcttttattctg

SEQ ID NO: 319498 - DNA, 201 bp, Homo sapiens
caagtaagtctcctgtgtgaaagcgtaacaaaagatattttatttggggattttagattcctccctactattctttccgaccttccacccttactccctgmccgtgggattgtacttttagaggaaaacgacgttatctaaattgatccgctagtcaggttgcaaatgaatgttagaaagaacaattgaccccagttctgt

SEQ ID NO: 319499 - DNA, 201 bp, Homo sapiens
ttcctttttttttttttttttttttttttttttacagctgtgtagtattccatggtgtatacgtaccacattgtctttatccagttcatattgatggacamctaggttgcattagcccttttttgattctctgtgaaagtctgaagcccctcccaagatttctgcagattcccttatggcatatcatctccaggttaactc

SEQ ID NO: 319500 - DNA, 201 bp, Homo sapiens
aaatagacttgagtaagtggaagtgcagaggcgtttacactgtggcagcacaaacattttaagttgtatgttatttctctgtcagacaatggccttcagcrtcctctctttgcagaatatgccccgtacctgtacctccttcacgcaagcaatgcccagtgttacaccatttttgaggctctcctctagccccacagactc

SEQ ID NO: 319501 - DNA, 201 bp, Homo sapiens
gatgaggaaactgggacctagtggagttaaataacctgcctcacgtcgtctcacactgacttctgttgatagccaccttcttccactaactattgaactgrattggttccttccggtgggttcttggtctcgctgacttcaagaatgaagccgaactgaatatggcagttctgaatatatggtagaactgaaattcaaccc

SEQ ID NO: 319502 - DNA, 201 bp, Homo sapiens
aatgtgaacacatggctggctatgtgctgagggtgaagagctttggctgagatgagggcgtcaggaaaagcctgctgtgcagctccttttgtagttgttcwcagcctgacaatccccagaagcatgtagcaatggcagtccaggtcaggtggatgctgggatccaagtaattctgatctgagggaaggaggcgtggctgtg

SEQ ID NO: 319503 - DNA, 201 bp, Homo sapiens
attgagggtttttcttgggccagtccatattttatctccattacattagacaataacccattaagttagaagctattactatttcaatttttttttttggrgggggagacagagtctcactctgtcacccaggctagagtgcagtggtgccatcttggctcactgcaagctctgcctcctgggttcatgctattctcctgc

SEQ ID NO: 319504 - DNA, 201 bp, Homo sapiens
acctacactctgaaggatagtgcagtttattcatgactttcaccccttcaatactagaacaagcagacacattaaatgttaccaaaaatattatattgcaytgagagctaatctaacatactgtgctttcaagactagagacttatggaggttgattaatttgctatctaggggattttttaaaaaccttgcgcatgtagt

SEQ ID NO: 319505 - DNA, 201 bp, Homo sapiens
tgggattaacaggtataagccactgcgttcagcccctatttactttgacattttaaaaactaaacaatcatttcttctgcaaatagtccaagatatttttragaacagtataattaatgctgcaatataagaacatcaaatgatcttccagttattttgggtatttatgtctgctttttcccattttatttaaatcttttt

SEQ ID NO: 319506 - DNA, 201 bp, Homo sapiens
ttaaaatggtgcaattgcaattaatcaatgcaaataaaaagctctcaaggtctttttacctatacatatcaaatatgtaacttttattaaattaaaaattrtataacatgatgagtaatgaatatgcataaggaaatgacccaggttcttcaagtcatttgtaggtcaatattacagtattttacttttatggatccctat

SEQ ID NO: 319507 - DNA, 201 bp, Homo sapiens
tactctgcctcctcctcacatctaaatatagctaaccggttggagtgtctaagacagatagtgaagctgtatttttaaaatggtgcaattgcaattaatcratgcaaataaaaagctctcaaggtctttttacctatacatatcaaatatgtaacttttattaaattaaaaattgtataacatgatgagtaatgaatatgc

SEQ ID NO: 319508 - DNA, 201 bp, Homo sapiens
tatttgaaaggctagttatgtattctgttatttagatataagagcatgagagtcttgatattaaattggtaaattaattattggcaacctagtggtttggrttggcaaggattctgtcagtaatcatttggtagagtagcagaagcaaaggaggtgtcttaagaaaaatcaacaccaaaagggttttcttccttcgggaga

SEQ ID NO: 319509 - DNA, 201 bp, Homo sapiens
gtccctgcattgcgcgcgacccggcggcgggacaggcttgctgcttcctcctcctcggcctcaccgtgcgtactgggaggggagaaggggaccgcatgcaragggtggcaggcagggagggccagggtgggtggcagatggaagacttgggggggtctctgccagctggaagtgcttggctccacttagcagctaaactta

SEQ ID NO: 319510 - DNA, 201 bp, Homo sapiens
gtcttttcatgcttgagtgatgatttccaaacttagccttttcaagtcaaagtaacctcctgtttgaaagggtcccttgaactctggggaaggaggaaaargcacgtgtagtaatggaggaaatgcctgtagtttgaacgactgctgttctccccaagagtgcaaaagcctgcgatgtctcaggtttcatgggcatagtgg

SEQ ID NO: 319511 - DNA, 201 bp, Homo sapiens
aatggagaatataatgagcaaacaaaccactgtgcaaacatgattgatcattgtaaatattttctataattcataaccaaattagtgtttttccctgcttrcttttctttgattatttctccttcattccttgaatcctcaaaccacttaacatttcatcctgttatttattattatacaggaccactcttctccctcctg

SEQ ID NO: 319512 - DNA, 201 bp, Homo sapiens
cgtggtcttgctgacttcagaagtgaagctgcagaccttcgcagtgagtgttacagctcataaatgtagtgcggacccacagagtgagcagcagcaagatytattgtgaagaaggaaagaacaaagcctccacagcgtggaagaggagccgagtagattgcccctgctggcgccagtggccagcttttattcccttttttg

SEQ ID NO: 319513 - DNA, 201 bp, Homo sapiens
gatgatttccaaacttagccttttcaagtcaaagtaacctcctgtttgaaagggtcccttgaactctggggaaggaggaaaaggcacgtgtagtaatggargaaatgcctgtagtttgaacgactgctgttctccccaagagtgcaaaagcctgcgatgtctcaggtttcatgggcatagtggcctttatgcctattgtaa

SEQ ID NO: 319514 - DNA, 201 bp, Homo sapiens
attagatatacctgtgggccacctaattatatgagtcaataaatccattttagttgaatttgtattgggtattctcatatctgcaatatagaatgttttamcaaatatacagagagaagtcaggcagggaaagatcccaacgtctttgagatcagcttcaggatgcaggtagttaccatggtctttcatattcggaccatg

SEQ ID NO: 319515 - DNA, 201 bp, Homo sapiens
gtttttgtcaggtttgtcaaagatcagatagttgtagatatgtggcattatttctgagggctctgttctgttccattggtctatgtttctgttttggtacsagtaccatgctgttttggttactgtagccttgtagtatagtttgaagtcaggtagcatgatgcctccagctttgttcttttggcttaggattgacttggc

SEQ ID NO: 319516 - DNA, 201 bp, Homo sapiens
acacacgtaaggaaaagtgcaaaagtctagggattacccagttcagtttctaaatttaagtataagttgtaaaaacaatttagaatagtttctaactatamttttactcccaagagaagctttagatacagggggatttattagtgaaactgcttttatgaaggaaggtggatgaaggggaaagctatttactggtctagt

SEQ ID NO: 319517 - DNA, 201 bp, Homo sapiens
acgctttgtggtgtaattgacagaaaagaccacgagctcaggagggaaaagtccgaaacccatgagttggctctgtgtgcatgaacacgcacgcgtgcgcrcgcacacacatacacacacacacacacaccctgctctggagttgggcaactgacttatgctgtctgatctgcagtttcctcaaactttacaagatttttt

SEQ ID NO: 319518 - DNA, 201 bp, Homo sapiens
taggtacaatgattatctctagtttacagaagggaaaaatgtggtatagagaggtaaaataacttattgaaggatgtgtgtgtgtgtgtgtgtgtgtgtgrtatatatgccatctatctcatttcatttaatactcaataattttattcggtagggattattatttcttccttagagatgaggaaactgggacctagtgga

SEQ ID NO: 319519 - DNA, 201 bp, Homo sapiens
tttgttgaaccattatcacgtctttcatcgttttcttaaattttcttctcacttggtgatgcttctctgagtagaagcagaatggattgtggttattgtarcagttatccatttagctactaatatttgatattcattagtagacaattattaggggaaaaggacgtttaaattttatattctcagaggtataggaactat

SEQ ID NO: 319520 - DNA, 201 bp, Homo sapiens
gaacgctttgtggtgtaattgacagaaaagaccacgagctcaggagggaaaagtccgaaacccatgagttggctctgtgtgcatgaacacgcacgcgtgcrcgcgcacacacatacacacacacacacacaccctgctctggagttgggcaactgacttatgctgtctgatctgcagtttcctcaaactttacaagatttt

SEQ ID NO: 319521 - DNA, 201 bp, Homo sapiens
tatgcatgtatatatgtatatgtgtgtgtgcgtatgtttagtttttcagcaaacttagggccatggtttatattcaagagtgagttaggatggtctagtakgagtgttaaaattacaaaagtaatcaaattacaagataaagtaaacatgtcataaaataggtaaatataatttgctacaaaagttcagcagagaatgaca

SEQ ID NO: 319522 - DNA, 201 bp, Homo sapiens
aattgatccctttaccattatgtagtggccttctttgtctcttttgatctttgttggtttaaagtctgttttatctgagactaggattgcaatccctgccwtttttcttttccattcgcttggtagctcttcctccatccctttattttgagcctatgtgtgtctctgcatgtgagatgcacctgaatacagcacactgat

SEQ ID NO: 319523 - DNA, 201 bp, Homo sapiens
tggatatgaaattctgggttgaaaattcttttctttaagaatgttgaatattggtccccactctcttctggcttgtagagtttctgccgagagatcagctrttagtctgatgggcttccctttgtgggtaacccgacctttctctctggctgctcttaacattttttccttcatttcaactttggtgaatctcacaattat

SEQ ID NO: 319524 - DNA, 201 bp, Homo sapiens
gggtgttcgtgtcccagcttggcagcttaacaactctaattccctttttcttcttttgtgaaatgggtatagttatgacaattgtaatagattaacaaagktgatgaaagtagtgtacataatgtacatagtatagttgaacacatagcaagctctaataaagctaagtatatatgtatgtggtttttaatcacattcacc

SEQ ID NO: 319525 - DNA, 201 bp, Homo sapiens
tgaaattctgggttgaaaattcttttctttaagaatgttgaatattggtccccactctcttctggcttgtagagtttctgccgagagatcagctattagtstgatgggcttccctttgtgggtaacccgacctttctctctggctgctcttaacattttttccttcatttcaactttggtgaatctcacaattatgtgtct

SEQ ID NO: 319526 - DNA, 201 bp, Homo sapiens
acaccaatcagatgtagatttggtcttttcacatagtcccatatttcttggaggctttgttcatttctttttattcttttttctctaaacttctcttctcrcttcgtttcattcatttcatcttccatcactgataccctttcttccagttgatcgcatcagctactgaggcttctgcattcttcacatagctctcgtgcc

SEQ ID NO: 319527 - DNA, 201 bp, Homo sapiens
tagatttggtcttttcacatagtcccatatttcttggaggctttgttcatttctttttattcttttttctctaaacttctcttctcgcttcgtttcattcrtttcatcttccatcactgataccctttcttccagttgatcgcatcagctactgaggcttctgcattcttcacatagctctcgtgccttggttttcagctc

SEQ ID NO: 319528 - DNA, 201 bp, Homo sapiens
agtgtgtattggtgaaccgcaaatgctgctgcctgatcgttcctctggaggttttgtctcagaggagtacccggccgtgtgaggtgtcagtccgcccctaytgggggggtgcctcccagttaggctattcggggatcagggacccacttgaggaggcagtctgcccgttctcagatctcaagctgtgtgctgggagaacca

SEQ ID NO: 319529 - DNA, 201 bp, Homo sapiens
aatacataaatttcattctgggaacattagtagaggcctatagagaatgttttagttttaaaattattgttaagtagcaactttctatttgataaacttaycttaattttaaaaaacttcacacgcttgctgtatttcttcacatctttgtacagaggcctgggacttagggatcctttcttaagctaattactttaccta

SEQ ID NO: 319530 - DNA, 201 bp, Homo sapiens
aggactgaagcagtgtggtatagtgaatagatcctggatttgaaaaacacctatatctgtgtcttgagtctcgaggctttctggctgcctgagataatgaytgaggctttatgccccatccttaattctaaagtggcaaaattaatactttacctactgtattaatagccacaataattctgcatgataagtcatcctatg

SEQ ID NO: 319531 - DNA, 201 bp, Homo sapiens
gcctttagaatacaagcgtctctaccccattcttaaaactcttcccaggtttcccaattgataggtgactaagattcacttccatccctgcctctccaggwaggctcatctagtgtaagacattcagtgcatttcatctaatttcagtgatagatatcagatccaattaagacaaattagggccaagaaggtttaattctg

SEQ ID NO: 319532 - DNA, 201 bp, Homo sapiens
gatataccacgaagagatctgtattagtaacttcaagaaaataatccaaataatccaaactttaagccagacataatttttaatgacccaaaactaagagrgacatcagtggagagttagaggttgcctaaagttcttagtcttttagcctaagtcattcgtatctatacctatatctttatagaagcaaaaccacccaaa

SEQ ID NO: 319533 - DNA, 201 bp, Homo sapiens
tacagcttggtatcacggaacagttcattattcatggcaatgactcaggaaggcatctgccttgtattgtcgtgaaagatacctgtcttttgctcactttyctggctccaaatgaaagctcaggcaaatgagagaggttccaggcttctattattacctagttcaggctaaccaaagcagagaactgggagattttctaat

SEQ ID NO: 319534 - DNA, 201 bp, Homo sapiens
gatatttatatcacagatgagaaaactgaggcataaagacattaaggaacttgccgaagatcacacagttaataagtgttgatctgggctcaaatcccagscatctaggctctaggatctgagctcctaaccactaggctgcactccctgtgatccctgccatcaaagagtttacagtacattttagtgcaagagataaac

SEQ ID NO: 319535 - DNA, 201 bp, Homo sapiens
gaacactttattaaatgaggaagccttcttctggttgagttttcctattattttcatatttctatataattgatgaattatacagttctttagtgataacrtcaatatggagcgtttatttactcaaacaccaaatattgtattgatgaactttttgggttgggctgctttttggacatatttttcttgttccccttctaa

SEQ ID NO: 319536 - DNA, 201 bp, Homo sapiens
aatggaaataataagtgctctatctacttcacaatgggcagtaagataacatatgtgagaacactttattaaatgaggaagccttcttctggttgagtttwcctattattttcatatttctatataattgatgaattatacagttctttagtgataacgtcaatatggagcgtttatttactcaaacaccaaatattgtat

SEQ ID NO: 319537 - DNA, 201 bp, Homo sapiens
cataaggtgatagctacttacactcatcctggaaatatttcagtatttcaacaacaggaatggctgtgccagtgtgactgactgatagtggccttgtatcyataagtgcagttactgataagaaaagaatgctggatttgtagatgggaaacttgtgcatgattcctagctctggcaaccactagttttggaaccgggcaa

SEQ ID NO: 319538 - DNA, 201 bp, Homo sapiens
ggctcgtggactcttctttgcatcactccaacctcttgcttccattgtcacatctccttctctgactctgacccttctgcctccctctgataaggactcttatgattatattggccccacccgaattatctaggacagtctctccatctcaagatccttaagttaataacatctgcaaagtctcttttgccatgtaaggtc

SEQ ID NO: 319539 - DNA, 201 bp, Homo sapiens
tgttcactctgctatttctgtaggaataagccatataaacgttagtggattagttaagtctatttccactcttatctctgcctctcatctccccaaatgcrtagttcagatattccagaaaaggttcacctgctgtgattttgtcctctttccaagaaggatgggtctggtgcagcagctggaagtatatttccttctttg

SEQ ID NO: 319540 - DNA, 201 bp, Homo sapiens
cttagcctaccacaatctccccctattgccacttatggcttcatgacatgtggtaaatctgtccttttcctttctgttctactgctatcatccaaattgakgtcctcatcattttataaccttgatgcctatattttcttcccttaactctcctgcccactgcccataaatgttactttctaaaatattacttttttttct

SEQ ID NO: 319541 - DNA, 201 bp, Homo sapiens
atgaactgcatgaggactgtagttaataatatcatattacataagggaaatttgttactaaattttatgtgctcttactacacacacacacacacacacayagacacacgcacacgcatgtgcacatataactatatgagaagaaagatatattaatgaacttgaatgtagtaatcatttcactattacagtaaatcctca

SEQ ID NO: 319542 - DNA, 201 bp, Homo sapiens
taacaaacatttactgggagacaactacatgcttggattgtctgggaatgagacagcattcctgcccttccaggtgaatggtgaagacaatggttagcatscagacagacagacagacagggaatatggtgtcaggtgtaagtgcttccatgaagtgctaataagtgctgtgaagacaaatagagcatggcaaggagatgg

SEQ ID NO: 319543 - DNA, 201 bp, Homo sapiens
ctcagcaggcacattcaatttgggtgagcttgtgaatattctactcagctctatcagagagacagagaattttctccttttacatggagtggtgttgattytaaccttctattctcatcgaagcagagaagggcattttttttttttttttaccctcctcttcctgcttatactgccaagtactacatgatgtcaaaacaa

SEQ ID NO: 319544 - DNA, 201 bp, Homo sapiens
agacaactacatgcttggattgtctgggaatgagacagcattcctgcccttccaggtgaatggtgaagacaatggttagcatacagacagacagacagacsgggaatatggtgtcaggtgtaagtgcttccatgaagtgctaataagtgctgtgaagacaaatagagcatggcaaggagatggagagtcctgggtgctatt

SEQ ID NO: 319545 - DNA, 201 bp, Homo sapiens
ttacaagccctttattttttgtgggtttcatatcattcgtattttttttttttttttttttttttttttagacagagtctcactctgtcaggtgtagtggkgcaatctcagctcacggcaacctctgcctcctggattcaagcaattctcctgcctcagcctcctcagtagctggggttacaggcgtgcaacaccataccc

SEQ ID NO: 319546 - DNA, 201 bp, Homo sapiens
acggcaacctctgcctcctggattcaagcaattctcctgcctcagcctcctcagtagctggggttacaggcgtgcaacaccatacccagctaattttttgkgtttttagtagagacggggttttgctatattggccaggctggtcttgaactcctgacctcaggtgatccatctgcctcgacctcctaaagtgctgggatt

SEQ ID NO: 319547 - DNA, 201 bp, Homo sapiens
gaaagcagtcctccttcaaccctgggtcctgtggatcaggaatggagagtcaggcagagagagaaagagagagagagagagacagacagacagacacacasagagagagagagacagagagagagagagaaagagagagatagcacaaaccctggcaactagcagtgtgtgggccccttaaggttcatggtgagatgtctc

SEQ ID NO: 319548 - DNA, 201 bp, Homo sapiens
tgtggatcaggaatggagagtcaggcagagagagaaagagagagagagagagacagacagacagacacacagagagagagagagacagagagagagagagaaagagagagatagcacaaaccctggcaactagcagtgtgtgggccccttaaggttcatggtgagatgtctcagtggtctgtttaaaaggcaaagtgaggg

SEQ ID NO: 319549 - DNA, 201 bp, Homo sapiens
gattttcaatgcattctcttactacattgtttaataatgtaagagatggctgggtgcggtggctcacgcctgtaatcctagcactttgggaggctgagacrggcagatcacctgaggtcacgagtttgagaccagcctggcccaacatgataaaaacccgtctctactaaaaatacaaaaaaattagccaggggtggtggc

SEQ ID NO: 319550 - DNA, 201 bp, Homo sapiens
ctttgtgtgtttctttcttccaggtcattctgccacatgccagcttaacttagagatcattaattcatttaccgtttatttattaatccagtgcttattargctcttgttatctttcagacaatagtctagatcagttgttctcaaccaaggatgatgttgctcttctgggaacatttgccaatgtctgaagacatttttg

SEQ ID NO: 319551 - DNA, 201 bp, Homo sapiens
cctttgtgtgtttctttcttccaggtcattctgccacatgccagcttaacttagagatcattaattcatttaccgtttatttattaatccagtgcttattrggctcttgttatctttcagacaatagtctagatcagttgttctcaaccaaggatgatgttgctcttctgggaacatttgccaatgtctgaagacattttt

SEQ ID NO: 319552 - DNA, 201 bp, Homo sapiens
gtttaattggctcgcggttctgcaggctgcacaggaagcatagtggcatctgtttctgggggacctcaggaagcttccaatcatgatggaagacaaaaagrgaacacttcacatggcgaagggaggaatgagagagagagttggagggtgtgggccacacacttttaaacgaccagatctcgggagaactcactcactatc

SEQ ID NO: 319553 - DNA, 201 bp, Homo sapiens
gtgtcaggtgttgtaagtgcaatataaattaggaaaatcagccaaaggcacactaagaagatactgtgacattctagttttcctccattttagacttttakttctccattatttggttgtgaaggaaaattatgcatctattaattttttatctagaaactttaaaatgtgacagatgttgatgtcaagctccttaaaatc

SEQ ID NO: 319554 - DNA, 201 bp, Homo sapiens
cctctctcagctcccagtatgactgtcggcaagccatttaacctccctgtgtgagagatgatgaaataacactttgatctttggagagaaaaaagctttakaaaaataccaaataagtccacccttactcggcacctcttaaattcatgtggagggataatgtgcctcataaaattccagtgcgtccttagttacaaggcc

SEQ ID NO: 319555 - DNA, 201 bp, Homo sapiens
tagtgagctgagatcacgccactgcactccagcctgggtgacagagtgggactctgtctcaaaacaaacaaatgaacaaacaaacaaaactattctcactkttggggtgtacaaaaacaggcagtgggctggatttggcctccaggtgatagtttgctgatctctgttttacacgctcaagtctgaacagctcagcctcaa

SEQ ID NO: 319556 - DNA, 201 bp, Homo sapiens
ggaaaccgtcatttgagagtgattttagtcatcagaagcaccaaacatgatagctgttaacagtatatgtcacttagttgtcaagaggtttatgaccttgrttactttgtttctggatcttccttataaatagtagaagctcctgcttgggccctcaagtcttgctgggttaatatttagttggctttttctgttgccttt

SEQ ID NO: 319557 - DNA, 201 bp, Homo sapiens
ccaatttaatgaggttttactgtaagcacaatttgtttctgtctgtgtcatcaagatggccatcctaggataagatttacatatgaattgaacactcagayaccacagtgattttcttttaggtcttctgcagctaattttcagcactttgttaaataacttaatcttttttgtgtttaagggatttaaggacaatgtcta

SEQ ID NO: 319558 - DNA, 201 bp, Homo sapiens
gttaaacaaacctgtcatctcttcactttaacttttgcagaaagcaggtgtgaaccattttaaacactcaccaactctgtaggctttaaatgccaacactratgtttgacatctgggtataattgtaaaataatgagacctgtgagccacatgccaagtgctacgtttacaccattgtttccagctccaccaagacaaaga

SEQ ID NO: 319559 - DNA, 201 bp, Homo sapiens
gttaataaaacaactggaaagcatttggcaagagtaaatgcttaattccagaaatagaaatgctgtattaaatcatccggatcaatgcctggacactaaakgattttttgataacctcctatttccaaatgctccccttagtctagtttgaaaattactcaacctggagaaaggagttcagccattttaatggaacaacca

SEQ ID NO: 319560 - DNA, 201 bp, Homo sapiens
cttccagcttatgaatgacatgtatgggaaaaatctaattacggaggattctggaaccctaactaatattttgttttattatgcttcgacattcctgaagstaaataaacctaactctggcaaaaatgacgacaaaggcaacaagggaagcagcaaacgtgaagctgctaccgaaagtggcaagacagcagttgttttctc

SEQ ID NO: 319561 - DNA, 201 bp, Homo sapiens
aagaatttgggatggagtaggggtgggtgtttgcctcaccatggttttgactgattcactcatttctcttttcttgatattgcttgagctcccaccccaamtcactctgactttctgtctctcatgacccttccagttccaaattttcccaattctataggctgcccgtttacttcgaatagtgttttgcagaccaaagag

SEQ ID NO: 319562 - DNA, 201 bp, Homo sapiens
tatttgctttgttaaaaagtatgtactgaatgatgatattttatggataatgttgaatattagtgactttcctctaggagaaatcaggcaactgtcagagrcgtttggaccagagcaactccttcttgaataggggctgggtagaatcaggctgagacttattgggctgcattcacaggaggtaaggcattctaagtcaca

SEQ ID NO: 319563 - DNA, 201 bp, Homo sapiens
ttcaaatcaaagagcaaactttcagcattgaggaataattcagggcaccagtgactaatattgcaacttatattgccgtaatacaatgaaatacatttgtrttaaggaacatcttttttgttgcagttgaccagtttagtggcaattaatgttatttttaaatataactgtttaaaggctttgcagtcaggtgatttttct

SEQ ID NO: 319564 - DNA, 201 bp, Homo sapiens
cgagatcaggctactgcactccagcctgggtgataagagtgaaactccatctcaataaaagaaaaaataatataagagagaagaaatcttacaatctccaytttatagatgagaaaacactatgtctgtgctgtccaatatggtgagatgtggttatctacatttattaattaaaattaaataaaagtacacatttggttc

SEQ ID NO: 319565 - DNA, 201 bp, Homo sapiens
agcataaggtgatagctacttacactcatcctggaaatatttcagtatttcaacaacaggaatggctgtgccagtgtgactgactgatagtggccttgtayccataagtgcagttactgataagaaaagaatgctggatttgtagatgggaaacttgtgcatgattcctagctctggcaaccactagttttggaaccgggc

SEQ ID NO: 319566 - DNA, 201 bp, Homo sapiens
caatcacccatttattcttgaaagcaacccaaaagatataggaaacaatagttaagaaacacacagaaaaattcagactaaaacagtgctgctgaaaatcrcctatgtcgacatattcttcaataaaagttgttttctgctgacactttttttttcttccacggatgtccctcttatatttgatgatcaattttccacaag

SEQ ID NO: 319567 - DNA, 201 bp, Homo sapiens
gagccaaactctgtcaattgctttgttatggagatgttgcactgaggctcatgcactatttctaaggtccaatgagtgagactgctgaatataaaactagyttttgatttgtgaaaggcaaaatacctgcaggtccagaaggaataaaatatgcctgtttgtattaataaaaccaatttttaaagagccatggaattttgt

SEQ ID NO: 319568 - DNA, 201 bp, Homo sapiens
gcggtggctcacgcctgtaatcctagcactttgggaggctgagacaggcagatcacctgaggtcacgagtttgagaccagcctggcccaacatgataaaamcccgtctctactaaaaatacaaaaaaattagccaggggtggtggcgggtgcctgtaatcccagctactcggcgggctgaggcaggagaatcgcttgaacc

SEQ ID NO: 319569 - DNA, 201 bp, Homo sapiens
gagccgagatcaggctactgcactccagcctgggtgataagagtgaaactccatctcaataaaagaaaaaataatataagagagaagaaatcttacaatcyccattttatagatgagaaaacactatgtctgtgctgtccaatatggtgagatgtggttatctacatttattaattaaaattaaataaaagtacacatttg

SEQ ID NO: 319570 - DNA, 201 bp, Homo sapiens
atgatggaagacaaaaagagaacacttcacatggcgaagggaggaatgagagagagagttggagggtgtgggccacacacttttaaacgaccagatctcgrgagaactcactcactatcccgaggacagcaccaagaggatggtgctaaatcattaaagagaaatccacccccgtgatccagtcacctcccaccaggcccc

SEQ ID NO: 319571 - DNA, 201 bp, Homo sapiens
cagaatttccattgcactctttctgtggtccctctaagaactggaaattgtttctttttatgcatcaggaaagtttgtacttgctatttgattgccttttyctggaaccagatggtgacttttgctaggagttattctaagattatgccttatttacttttaagccacatttcctaatatagcacctggtacaaataggca

SEQ ID NO: 319572 - DNA, 201 bp, Homo sapiens
cctcccaggcctccagacactctcccagggactgtcggtcccctgctctgaagtggtggcagcacctggaggcctggatcctgctgcccagtaagggtccsgttgggaaagaaagtgccctactccacttctcgcaggtgcgctctcagggagcagcctgctgtcttgactttgagaggaggaaagaaactgccctttccc

SEQ ID NO: 319573 - DNA, 201 bp, Homo sapiens
ttagcctgtgtgctgtggtttgctgactctcacagaaatattagtaatagtaaaaggtatacatatatgataaagtaggggttgcacctgaaactctctckgattattctaggtggttgtagtcagacataatttgagtcaacaagcaataagacactgaggctcaacaattattctaagtacaaaaccaggaaaagattt

SEQ ID NO: 319574 - DNA, 201 bp, Homo sapiens
taaggaatgtgacaatgttctcctcactttttggaaatttatagcttatatcgacaaaacagattttttaagaggatagtttgtactgaatctttaaagatgagaaaagatagtcaagtggagaagagtgaaagagggaatagaggaatagttttagtcagaataatttctctggtttggcagggctgtgttcctttatgg

SEQ ID NO: 319575 - DNA, 201 bp, Homo sapiens
ccctgaaatgtacctgcttttttgcaaaagccaatttaagctaccaggcattctttaaatggctaaaggatcctaggtaccatgaggtagggacagggggaaaaaaagaggtggtagtttcttcaagaaagtcacagtctagtaccccaaaatacaaaaaacccagagtcagtattattttttatttatatacatgagtag

SEQ ID NO: 319576 - DNA, 201 bp, Homo sapiens
aagaggaggctaatgcagggtgactcagggacttctttactgagggggctttaaagtctttacaaaaacctcttttcctctttcttattaaaaagataacatatatttattgtagaaaaaatttaaaacatagataaggaaggaaaataaagatcatctgcactatcacagcagcaataaacactcttaacattttggcat

SEQ ID NO: 319577 - DNA, 201 bp, Homo sapiens
agaggaggctaatgcagggtgactcagggacttctttactgagggggctttaaagtctttacaaaaacctcttttcctctttcttattaaaaagataacatatatttattgtagaaaaaatttaaaacatagataaggaaggaaaataaagatcatctgcactatcacagcagcaataaacactcttaacattttggcata

SEQ ID NO: 319578 - DNA, 201 bp, Homo sapiens
taaactttagcctgaattgccacacatcctaaattagtatagccccaatttaatgaggttttactgtaagcacaatttgtttctgtctgtgtcatcaagawggccatcctaggataagatttacatatgaattgaacactcagacaccacagtgattttcttttaggtcttctgcagctaattttcagcactttgttaaat

SEQ ID NO: 319579 - DNA, 201 bp, Homo sapiens
ttttggatgcttttgaatttgatagcacattttttccacgagctcttctatattcaatgttaaggctccaaggatttcgtgtcaggtgttgtaagtgcaayataaattaggaaaatcagccaaaggcacactaagaagatactgtgacattctagttttcctccattttagacttttatttctccattatttggttgtgaa

SEQ ID NO: 319580 - DNA, 201 bp, Homo sapiens
catgtgcttaataggctgacccaaacgctcctgtagctggctctgaacgtgtattttggatgcttttgaatttgatagcacattttttccacgagctcttmtatattcaatgttaaggctccaaggatttcgtgtcaggtgttgtaagtgcaatataaattaggaaaatcagccaaaggcacactaagaagatactgtgac

SEQ ID NO: 319581 - DNA, 201 bp, Homo sapiens
ttagcgtgttttggttcagatcataaatgtgaccatgaattatgtatgcattgattcagcataaaaaaattaaacatgtgcttaataggctgacccaaackctcctgtagctggctctgaacgtgtattttggatgcttttgaatttgatagcacattttttccacgagctcttctatattcaatgttaaggctccaagga

SEQ ID NO: 319582 - DNA, 201 bp, Homo sapiens
tatcatatttctttgagtgctttaaaatatgtaacaaacatttactgggagacaactacatgcttggattgtctgggaatgagacagcattcctgcccttycaggtgaatggtgaagacaatggttagcatacagacagacagacagacagggaatatggtgtcaggtgtaagtgcttccatgaagtgctaataagtgctg

SEQ ID NO: 319583 - DNA, 201 bp, Homo sapiens
ttgctgtgttgttcccattccacacatctcttcttttctgccggcatcacttttcaaatcaaagagcaaactttcagcattgaggaataattcagggcacmagtgactaatattgcaacttatattgccgtaatacaatgaaatacatttgtgttaaggaacatcttttttgttgcagttgaccagtttagtggcaattaa

SEQ ID NO: 319584 - DNA, 201 bp, Homo sapiens
aggcagagagagaaagagagagagagagagacagacagacagacacacagagagagagagagacagagagagagagagaaagagagagatagcacaaaccmtggcaactagcagtgtgtgggccccttaaggttcatggtgagatgtctcagtggtctgtttaaaaggcaaagtgagggcccagtctgcaaggtaggaacg

SEQ ID NO: 319585 - DNA, 201 bp, Homo sapiens
cttcattaataaaaacttaaaatagaagactgctcagtgcaatggagtggcaagaatgactctccctgccaaacatacctttctcgtcagttttcagacaygaaatcatcttccaggattctctgtcttgcctggaaagaaataggcgagaaagtgcaagctccttagacctaatgtctaggagggtgttgcttttagtaa

SEQ ID NO: 319586 - DNA, 201 bp, Homo sapiens
tagattgagattcagaaaccgttgacctgtaattaagcccatgcttgcctaatcagaatgtaatttctttgcagaatcagaatcctgagatgggatgagtyagccacacagataatgctgttccttattgtcccagggcagggaatcttaacctgagttatagctcttacgtttatttagcatctgacatatgttcattca

SEQ ID NO: 319587 - DNA, 201 bp, Homo sapiens
ccctgtaaggagatggttggcttcagctgctggggaatttctctagaatgtggagtccttacgtaactttagttttggaccagagcgtagttgtaggatgttggaatatgacttctgttatatatatacattacaacataggcccatagaaagatgcataacgggccggaagcggctggctcacgcctgtaatcccagcac

SEQ ID NO: 319588 - DNA, 201 bp, Homo sapiens
gtaaatggaagttctggcattggaaaaaggagcatcgaggtttgcatccatttatcaaacacttgtgctgtcaggaaagtctttatcttttatatctacasaggaaagaataaattgggtatattctagaaatagggggtttgtaactttcaatcaactaagttccgaagtgttttagagaacattagctgtggctgataa

SEQ ID NO: 319589 - DNA, 201 bp, Homo sapiens
tgtgtgtgtatgcctgcatcttgcttatagtgtaaaaaattacctatatttacacatcagaggatatcacatgacatccagattcttagcttctctcaaamacaaaaacagaaacaaaaacaaaaccagcttctctggcagtcagattgctttataccagtggccaattgatcagagctgagttgctgttgttcccttaga

SEQ ID NO: 319590 - DNA, 201 bp, Homo sapiens
tgggtttcatatcattcgtattttttttttttttttttttttttttttagacagagtctcactctgtcaggtgtagtggtgcaatctcagctcacggcaayctctgcctcctggattcaagcaattctcctgcctcagcctcctcagtagctggggttacaggcgtgcaacaccatacccagctaattttttgtgttttta

SEQ ID NO: 319591 - DNA, 201 bp, Homo sapiens
tgtatgcctgcatcttgcttatagtgtaaaaaattacctatatttacacatcagaggatatcacatgacatccagattcttagcttctctcaaaaacaaamacagaaacaaaaacaaaaccagcttctctggcagtcagattgctttataccagtggccaattgatcagagctgagttgctgttgttcccttagatggggt

SEQ ID NO: 319592 - DNA, 201 bp, Homo sapiens
cctgcatcttgcttatagtgtaaaaaattacctatatttacacatcagaggatatcacatgacatccagattcttagcttctctcaaaaacaaaaacagamacaaaaacaaaaccagcttctctggcagtcagattgctttataccagtggccaattgatcagagctgagttgctgttgttcccttagatggggttcatga

SEQ ID NO: 319593 - DNA, 201 bp, Homo sapiens
acaccacattgggtcccacataaatgtctagactttgctgggcattagacttcatgttcacgtgaacctcaaatttcagaggacgtatgtccaggctcccygtggtacaccatcctcccaggcctccagacactctcccagggactgtcggtcccctgctctgaagtggtggcagcacctggaggcctggatcctgctgcc

SEQ ID NO: 319594 - DNA, 201 bp, Homo sapiens
aaaaattacctatatttacacatcagaggatatcacatgacatccagattcttagcttctctcaaaaacaaaaacagaaacaaaaacaaaaccagcttctstggcagtcagattgctttataccagtggccaattgatcagagctgagttgctgttgttcccttagatggggttcatgatcctcccctggaaagtggaact

SEQ ID NO: 319595 - DNA, 201 bp, Homo sapiens
gcattatatgacataatccatgtaatgaactattatagtattgttattgtcacagtgaaatgggtgggtgaataaatgaatgctgttattaatttgcacargaccatgagctgtaggataatcacgcttcttcatctatcactctgaaaaagatagggcctagtagttagctgtgttctgtctctttcaaacaaggtgcaa

SEQ ID NO: 319596 - DNA, 201 bp, Homo sapiens
gggataagcattatatgacataatccatgtaatgaactattatagtattgttattgtcacagtgaaatgggtgggtgaataaatgaatgctgttattaatytgcacaggaccatgagctgtaggataatcacgcttcttcatctatcactctgaaaaagatagggcctagtagttagctgtgttctgtctctttcaaacaa

SEQ ID NO: 319597 - DNA, 201 bp, Homo sapiens
gtctcactctgtcaggtgtagtggtgcaatctcagctcacggcaacctctgcctcctggattcaagcaattctcctgcctcagcctcctcagtagctgggrttacaggcgtgcaacaccatacccagctaattttttgtgtttttagtagagacggggttttgctatattggccaggctggtcttgaactcctgacctcag

SEQ ID NO: 319598 - DNA, 201 bp, Homo sapiens
catctgcctcgacctcctaaagtgctgggattacaggccattcatttggtttttaaaattattactttatgaataggtaatacatatgcataattcagaawttaaagttcactaaaaggtatatactgtgaacagtgagtttctttccatcctctgcccccttgatacccagtgcatcctctccagaggcaaccactgcta

SEQ ID NO: 319599 - DNA, 201 bp, Homo sapiens
cagattgtcactcagactttcttctgcttaatgactgcatgtatgtaaatgcctctgctattcttccataaaagaggtctgagctatcatttctgttttgktttttaatgattatatgtaattatatccaaataaaatatttataaataattacatgtcattaatagtatgtaaaatttggaattcatgaacaccagcttt

SEQ ID NO: 319600 - DNA, 201 bp, Homo sapiens
gtttggaagctacgtaactaagctttgttagaactgtgtacaagataaagataactagggtctgaggacctgagggagtatcttataagtgaagtacaccmaatttagcctataactttttgttatgtttggcacatctcaaaccaatctcaaatccatcttaaaagggcccttttaagttctctttgataacttcttgct

SEQ ID NO: 319601 - DNA, 201 bp, Homo sapiens
agtcttggagatgggagtatcttagatggatcttgccagagttttaagtgtgggccaactccttgggtggcaccaatgtcagatgaatgcatgacattccygttagtccttaagtgaaaggaagagattggggtatatttcttttttcttctttttttttattttggaaaataccattaaaggctggtataggaagtagtg

SEQ ID NO: 319602 - DNA, 201 bp, Homo sapiens
cagaataaatcggcctctggcccagttggaatttttcctccacaagagttttaggtgatccattctgttctgtcaaccctgaatcatgtttaccttcactytctgattgaaagatttgttactggatctcagtaatgctgatgagagaagagtcttggctaagggtaatgagggagtaaggagtctttcccagaaccggtt

SEQ ID NO: 319603 - DNA, 201 bp, Homo sapiens
catttatcaaacacttgtgctgtcaggaaagtctttatcttttatatctacagaggaaagaataaattgggtatattctagaaatagggggtttgtaactytcaatcaactaagttccgaagtgttttagagaacattagctgtggctgataagttttgtttgcttttccttctttgttttgagaaaaaattgagcacata

SEQ ID NO: 319604 - DNA, 201 bp, Homo sapiens
tatgcatgcatatttaatttttttttcgtggggatggtggtagttatttcaatccatcttattctcttggaaagaggccctgagctcctactttaattatkccactcttgtttgcttaaattgattttgaatattattgtgattgtgttttattatgaatgtacctactcctggttgaaagtaaggtagcccatgaacctc

SEQ ID NO: 319605 - DNA, 201 bp, Homo sapiens
ggaaagtctttatcttttatatctacagaggaaagaataaattgggtatattctagaaatagggggtttgtaactttcaatcaactaagttccgaagtgtkttagagaacattagctgtggctgataagttttgtttgcttttccttctttgttttgagaaaaaattgagcacataccactttttaattaaagaattgttt

SEQ ID NO: 319606 - DNA, 201 bp, Homo sapiens
ctgggattacaggccattcatttggtttttaaaattattactttatgaataggtaatacatatgcataattcagaatttaaagttcactaaaaggtatatwctgtgaacagtgagtttctttccatcctctgcccccttgatacccagtgcatcctctccagaggcaaccactgctactagtttccatttcatccttccag

SEQ ID NO: 319607 - DNA, 201 bp, Homo sapiens
tttttgtctcaaatgtcatctttcaattgaagatattcttctactgcccaatgttgaataaagagtaaaggagacggcatactttaatgatgtacatatgrcattatctacgtcatacccaggtctggaaatacttcttctcatcattacctaaaaaattctaactgcaccaaaggaggtgtgttattggatatctaattt

SEQ ID NO: 319608 - DNA, 201 bp, Homo sapiens
tgaactgttgtagtggaggctgcgctaatgagacaaaggtgagcactgaagacccaggtagaaatgagcatgaagcaacaaaaaatacattatctgaaaaragaattttattttccctttcagtctggtagaatgtattttgccatcagagctttcaacacacattggattttaaacatatcttcgacttctttttacatt

SEQ ID NO: 319609 - DNA, 201 bp, Homo sapiens
tgtgtgtgtgtgtgtgtgtgtgtgtgtgtgtgtatgtgtgtataacatccgccccactgctttccaatttatattagatcaacttacagtttttttttttracttcatgatggtgtgaaagtgatatgcattcagtagaaaacacacttcaaatttggaatttcgatcttttcaacactttattatgaaataggctttgtg

SEQ ID NO: 319610 - DNA, 201 bp, Homo sapiens
aaattccagtgcgtccttagttacaaggccacgttcctagacctggactcccaagttttcaatcataatattgtgtctagttttgtgaagtgcctaaagcaaaaataacccctgagatttcttatagagccttttgtctaaagagcttaagcattctaacaatatacattccatttttaaaaaatcatatacattatttaa

SEQ ID NO: 319611 - DNA, 201 bp, Homo sapiens
tagatgattttgctcaactgtagactaatgtaagtgttctgagcactgttaaggtaggctaggctaagctaggatgttcagcaggttagatgtattaaacrcattttcaacttaggatattattttcaacttattgggtttattgaaatgtaaacctattgtaagtcgagcagcatgtacatacacaaatacatatataaa

SEQ ID NO: 319612 - DNA, 201 bp, Homo sapiens
tccaacttatttttccacatttgcataaactgatttatgtcactgaaacaaaatttggtaaatatatagcatattgttacggaggtatcattgtgatatawttattcatttctacatctgtgttttttgtttttaaaatgattgcaggggatataatttgactcatagggcttctgaattcaggaagcgtaagactcttag

SEQ ID NO: 319613 - DNA, 201 bp, Homo sapiens
ttttgtttttaaaatgattgcaggggatataatttgactcatagggcttctgaattcaggaagcgtaagactcttagtagttaatacttttttcatatacrttcaacctagggagagaatactgagcaagagaatagatttcaataaatgttcttgatttaaatgtatttaaattgataatattgaagaaattatgcacag

SEQ ID NO: 319614 - DNA, 201 bp, Homo sapiens
aactcattgaccagttcactgaatatgtgttcgtttttcttcagtgctatttcttcacaatcgagtttggcctttgcaagcaagaagggcaactgcgggcwtatggagcaggactcctttcctccattggagaattaaaggtatgaagctgtgaatgaaaatacccttcccatgcaaactggttcaaggtcagggaaaata

SEQ ID NO: 319615 - DNA, 201 bp, Homo sapiens
tcctcctacccaaagcctgaccctcgtgagatacagaatgaatggaaataaacacagctgggctgaggcttgaaaatcaattgccagggatgtgtcactcyggtttttactagttgctagcttatctatttcttgatttttttatttataaaattgcaccctttgtgattcatttgctctgagtgtaagtacacagctaaa

SEQ ID NO: 319616 - DNA, 201 bp, Homo sapiens
ttattctccttacagaattctcagcatatttgaaatgcaccatccttgtaagtatttaatacacttagaattttatggactcagaactcaaaccagtcctrtgacactgcaaacctgtttctcgcaggttgttggggacatctgccagggtctggcatggcagaaccatgtctccattctgtgtggtgatttttccctctc

SEQ ID NO: 319617 - DNA, 201 bp, Homo sapiens
cattatgagttctgtaaaaggagggacccatgggcaaatgtatttggacaacactagcttaaataaacagctttgtgttctttttttttttttttgagacrgagttctctctcgttgcccaggccaaagtgcaatggcgtgatctcagctcactgtaacctccgcctcccaggttcaggtgattctcctgcctcagccccc

SEQ ID NO: 319618 - DNA, 201 bp, Homo sapiens
ttttgttcctactggtgtggacagaatcgtctggaaatggaaatcagccagaaatacgtaccaagaagggcattgttcacagaataccttcttgctctggkccattacctctagtcattaacattcttccattctccaatttctatacctcaacacccctaagattgctacactggaccatttttacaattcagaaatact

SEQ ID NO: 319619 - DNA, 201 bp, Homo sapiens
ccatttcatttctttatgacactttttaactgctctcccacagtgggagctaatgtgctatctgtacaactaatccctatgaaagaagaggtagcatggtrtagcagaagatgtggcagaatgtataggatttggagctagacagaattaggtttgaattcccgctctaccacttaaaagctctgtggtcatgggcagtga

SEQ ID NO: 319620 - DNA, 201 bp, Homo sapiens
gtaattaatatagtttccataggattcaacgaggctaagagatcaaattttgtgctgtaaaataatcctagaaaggcaggaatttttcatatatgatattkcaggcgttacgacagtcaggtttttgttgctattaaagtgaagcaaatctgatccccttttaatttcaaccactagatgatgtcttagaccattggaaaa

SEQ ID NO: 319621 - DNA, 201 bp, Homo sapiens
tagactttattgcattcttactttgtttcctcttaccataagccaatagagcaagcagggctttggtgtacctcttcaaatcatgataatttatataacawcacagaaaacaatatagagtgaaggagttagcgggtattggcaatagaaagcctcagtatgaactgatttgaagatgctagtgaagggggtgcttagctg

SEQ ID NO: 319622 - DNA, 201 bp, Homo sapiens
gccatatcagaaagcactcatgtccaggaaaggcccctggagagtttcttactttcttctgtgaccttgggtaatcctctaactttcaacaactcacgttyccccttctgaagtgcagactatgcagtttatattacaaaatggttttagatggagatagcatgctactttgcaatgtaaagtgttttaaccataaataat

SEQ ID NO: 319623 - DNA, 201 bp, Homo sapiens
aaatgtcatctttcaattgaagatattcttctactgcccaatgttgaataaagagtaaaggagacggcatactttaatgatgtacatatgacattatctaygtcatacccaggtctggaaatacttcttctcatcattacctaaaaaattctaactgcaccaaaggaggtgtgttattggatatctaattttaaagtcatt

SEQ ID NO: 319624 - DNA, 201 bp, Homo sapiens
acagggttctgtttgtactttccttgattaaaacaaataatttatttgttccaagtaaaagaatttgcattgattggggcttttggtggtcatgaatcacrtgtatttgaattttcaggataaccagtactttctcatgctgagagttgtaatgaaatgtacagtcagtcttaaactaataatcaactataatttatgtta

SEQ ID NO: 319625 - DNA, 201 bp, Homo sapiens
cacaaagaaacaaattatattacctctttttgtctcaaatgtcatctttcaattgaagatattcttctactgcccaatgttgaataaagagtaaaggagayggcatactttaatgatgtacatatgacattatctacgtcatacccaggtctggaaatacttcttctcatcattacctaaaaaattctaactgcaccaaag

SEQ ID NO: 319626 - DNA, 201 bp, Homo sapiens
ctggatacctgagcccacgagactttctggcaggactggcctacagagtgttccactgtacccagtacatccggcatggctcagatcccctctacaccccrgaaccgtgagtacctacattaaagcccaggccaccacaccataaagtggtcaatgatccctttacttgaaaatgacttaggccctgttttacctccaaac

SEQ ID NO: 319627 - DNA, 201 bp, Homo sapiens
attccaagaaacacattttaggagatataaatctagaatgttttttgaaagggcgaaattcattgtgaacatgaccagaccatcacctattttattttactttttttttttttgcaggaaagaagtgtcaggaaattaataatacagggttctgtttgtactttccttgattaaaacaaataatttatttgttccaagtaa

SEQ ID NO: 319628 - DNA, 201 bp, Homo sapiens
cttcttttctgccggcatcacttttcaaatcaaagagcaaactttcagcattgaggaataattcagggcaccagtgactaatattgcaacttatattgccrtaatacaatgaaatacatttgtgttaaggaacatcttttttgttgcagttgaccagtttagtggcaattaatgttatttttaaatataactgtttaaagg

SEQ ID NO: 319629 - DNA, 201 bp, Homo sapiens
ggagcatcgaggtttgcatccatttatcaaacacttgtgctgtcaggaaagtctttatcttttatatctacagaggaaagaataaattgggtatattctakaaatagggggtttgtaactttcaatcaactaagttccgaagtgttttagagaacattagctgtggctgataagttttgtttgcttttccttctttgtttt

SEQ ID NO: 319630 - DNA, 201 bp, Homo sapiens
ttttctttcccaacttttcctccttgttcccactcgagaggttctgggacttgggccctggctgttgttggtgtttttaatatcaggccttgctgaagtcktctcagcatggtcttcctgcagagctgggaggataaaccagagctttacggagtttaacctgcatgcccacgagctgtgtttagcttaaacttgttcttt

SEQ ID NO: 319631 - DNA, 201 bp, Homo sapiens
tgcctctcctcccccgcccaaataaaataaattctagtataaacaggaaaaaagtaccccatgattagataatgtgatgtgcatatagacttgcagttcasaggaaatggaagtgtgtggggggcagatagcctgtggaggaagaggaaattatgactgcgatgtagtagttgttaggtttgtctgaaactgtccagtttt

SEQ ID NO: 319632 - DNA, 201 bp, Homo sapiens
gctgctcaggattgcagtgcagcattattactggtgattcttggaaaatggcatgttcccagaaagccggtcatctggcctacctttcctgctttgtaacyggtgcacataccctcagtttggtagccatgctctcccttaggagaagtccggtttgggctataccgagggccagttaagatgttagaggccccaagacct

SEQ ID NO: 319633 - DNA, 201 bp, Homo sapiens
tctaccagtggtaatttaaagcttcttatttaacacgtctttgtgatgtcttttttgtcagagacacatgccatgaactcttgggacatgttccactactwgcggatcctaagtttgctcagttttcacaagaaataggtctggcgtctctgggagcatcagatgaagatgttcagaaactagccacggtgagttcatttt

SEQ ID NO: 319634 - DNA, 201 bp, Homo sapiens
gtttactgttaatagcaccagacactattttaagtgtaatgtatggatggactcacctaatactacaacactttgagttgttatattattattctgagttwatagatgaggaaataagacacagaaaggttaagtacattgcccaaggtaacacagctggtaagtacgtgagtcagggtttgaacttcaggagtaatgcca

SEQ ID NO: 319635 - DNA, 201 bp, Homo sapiens
ctgttaagtgtcaaaagtcagagctgcactgcctggggtgaatcccagctttaccatttactaactgagtgacctgggcaaattgtttaaatcttctgtayctcagtttccttatctgtaaaatgaggataactctagtactactttataggattgttatgtggattacatgagcgaatatagtaacaaaacttagaacac

SEQ ID NO: 319636 - DNA, 201 bp, Homo sapiens
aaaagcagttttagccaacccattacctacagggaccagtcagttagcctagtgagcaaaaccaccaagggatgaaaaatgcgatcttaaattgtatgtaytcagcacaggtacaccacagtggcatatttgatatgcaggaatattcttcatttccacccagaaataagttttctcctagatttcttaaaaacacacaga

SEQ ID NO: 319637 - DNA, 201 bp, Homo sapiens
ggtttactcagacccctgacaacataaaggccttggctgcttttcctgtttttctttagatctgagaggcagcgtgtgaagctgttaagtgtcaaaagtcrgagctgcactgcctggggtgaatcccagctttaccatttactaactgagtgacctgggcaaattgtttaaatcttctgtatctcagtttccttatctgta

SEQ ID NO: 319638 - DNA, 201 bp, Homo sapiens
actgtcctgtgaggcgaatttttcactggtgaaagtttagaacattacgtgtgttatagagggtctcagtgtgggctttgtttataaaaagggatttgacmcatggtgcttaagacagatgagaagattcttcatcccacctctcactgggcatccctagcttcctttgatgcttaggtgctcttcccttcatcctcccaa

SEQ ID NO: 319639 - DNA, 201 bp, Homo sapiens
cattttcttgaatgttttgttctcctggaaaccgtcatttgagagtgattttagtcatcagaagcaccaaacatgatagctgttaacagtatatgtcactyagttgtcaagaggtttatgaccttgattactttgtttctggatcttccttataaatagtagaagctcctgcttgggccctcaagtcttgctgggttaata

SEQ ID NO: 319640 - DNA, 201 bp, Homo sapiens
taacattagctactattattgtcattagttcatttgccttatttaaacttgcttctcctattagctgattagagctgacccttacagaaaatgtaagccarataatattttcagaattagatcaattaataattatgtctcttcaagactccagaaacaattaaacttcagtcaatattagttcatcccgacttgttttga

SEQ ID NO: 319641 - DNA, 201 bp, Homo sapiens
aaagttcttagtcatctctgagtaacataatccaccagagagttttccctgttttcaagttgacatccccatggtgaccattttagcttctttctagtacygccgtcgctgaacactggttccatatcgatgctcatacaatcttagtttgccattctttgacaagaaggcagaatctacagtgaatggaaactactgaaa

SEQ ID NO: 319642 - DNA, 201 bp, Homo sapiens
ataaattctagtataaacaggaaaaaagtaccccatgattagataatgtgatgtgcatatagacttgcagttcagaggaaatggaagtgtgtggggggcasatagcctgtggaggaagaggaaattatgactgcgatgtagtagttgttaggtttgtctgaaactgtccagttttctctctttagtgccttcatatttgaa

SEQ ID NO: 319643 - DNA, 201 bp, Homo sapiens
acaactagtcaataaatcaatcaactaattgatcaatactttacattataatttgtgtgtcagggattgtacttgttgctgatgttacactagtgaacccratgaatcatacagtgacatcatttcacactctctgtgggtcccttcactgacaacacctccttggaacaatagctgggaaataggcttgtgaggggttgg

SEQ ID NO: 319644 - DNA, 201 bp, Homo sapiens
ccaccatgctttgcacacacttcattttatccatgcagaagcaccatagtcaacagctgggatctctcagcactcatcccagctcaatgaagatgctattygggatgtttgatgtacagtatgtggtgtggtgcaatgtggtgaaaagaatctgaacttgaagttagcacagctgggtttgagtgttagatttgttacttc

SEQ ID NO: 319645 - DNA, 201 bp, Homo sapiens
gcccttttctctctcttctttcaagtgcagtagttccaaaagcaaaaacttcattgcctgctctctttcctggaacttgctttcttgcttgtcttctcagwttctatcagtactgttttttctaaactcatcaggcttgcctctaaggactcccctgaattcctacccactttatcccccaatcccatactcagtccttct

SEQ ID NO: 319646 - DNA, 201 bp, Homo sapiens
atgagaaacaaagcaacacaatcctattttagatatttggaaactcataaagatagaactaccttggtaactctttattctctgttcatgtgctgagttgrgtgctgaacccaccatgctttgcacacacttcattttatccatgcagaagcaccatagtcaacagctgggatctctcagcactcatcccagctcaatgaa

SEQ ID NO: 319647 - DNA, 201 bp, Homo sapiens
tgagatttcttatagagccttttgtctaaagagcttaagcattctaacaatatacattccatttttaaaaaatcatatacattatttaaaatgtgcagttwgaaaccaaaattgtgtctaactgtctgctggagccctgtttttgttcttttagactgttttctgtagtgacttgggataaagcttcaatacttcagccac

SEQ ID NO: 319648 - DNA, 201 bp, Homo sapiens
ctcaaattctttaactagtcacatagaccttaacttctgtcctttttcactattttcaccactaccttatcttggtcttcctttttctacctgggtgctcygaggctacactttctgctgactaattctctcctgagaactttgatattgtagcccaggctgttttgttctactcatatgtgcatgtttcctttatgatat

SEQ ID NO: 319649 - DNA, 201 bp, Homo sapiens
agactgttttctgtagtgacttgggataaagcttcaatacttcagccacccttcttttttttttttttttttagcagattcaaagcaggattccttatgtsactctcccctacccctgcacccagttctgttttccttgtgcggagcccataatccaaaattagcacttagaagcacctggcccaaatcaaaatttatatt

SEQ ID NO: 319650 - DNA, 201 bp, Homo sapiens
aaagcttcaatacttcagccacccttcttttttttttttttttttagcagattcaaagcaggattccttatgtcactctcccctacccctgcacccagttytgttttccttgtgcggagcccataatccaaaattagcacttagaagcacctggcccaaatcaaaatttatattccttcagcactctgtagtcagggagag

SEQ ID NO: 319651 - DNA, 201 bp, Homo sapiens
attcctacctaacaggattgctgggacgacataatatgagtgaaagtgctttgtaaagtgtacaactatgaggcattattatgatgcctctatgatgatcrtagcaggggaattagaagcctgatttggcaaataatttctttttctcttttgacctcgaagaaaggatcaggcaccataaacagtggtaatggaaatctg

SEQ ID NO: 319652 - DNA, 201 bp, Homo sapiens
aatgatactaaaactgctattgacttcaagagccacataccatccatcagttaaaaacaaagtgaatagaaaattgccagaagatagtcttgaaaaaaaamcccacagattccaaccagccaatttcaaagtaagccctggaataaataacctgttggataccatgcatgttaatgaacctcaaaccatatactgaaacta

SEQ ID NO: 319653 - DNA, 201 bp, Homo sapiens
atcatcaacatctgcaaaggtaacatattcacaggttctggggattaggccatcaaaatctttatgggatcattattctttgtttctacttttacactttstgggaaaaatgaatactcataccttgaaatctattttactaggccaacaaatttgtaggatgagtaagttttctttaggagcttgcattccttaggataa

SEQ ID NO: 319654 - DNA, 201 bp, Homo sapiens
gctctggggtatgagccgttttgttgctttttccaccttcttgaggccgtctgcattccttggctcatggctttcttcattcctctttaaagccagcaacrctgcatctctttgatcttgtttctgtcatcacatctctctctctcactgaccaagactgggaaaagtcctgtgcttctaacggcttctatgattagattg

SEQ ID NO: 319655 - DNA, 201 bp, Homo sapiens
taccagtggtaatttaaagcttcttatttaacacgtctttgtgatgtcttttttgtcagagacacatgccatgaactcttgggacatgttccactacttgyggatcctaagtttgctcagttttcacaagaaataggtctggcgtctctgggagcatcagatgaagatgttcagaaactagccacggtgagttcattttca

SEQ ID NO: 319656 - DNA, 201 bp, Homo sapiens
ttttgtttgcttttccttctttgttttgagaaaaaattgagcacataccactttttaattaaagaattgttttccacacatatttcctcaatcttcaaatwttcctttagttctgtccccattagtgagagctattttcatccagtctaatcaatactcgcccctttcattgttctcattttgagtttagatcataaacat

SEQ ID NO: 319657 - DNA, 201 bp, Homo sapiens
aaatatcatgaatatttggatgagatattacaatgaagagttttgaagtcataattaactgctagaaggaaaacaaagtaagctcagggtaatggttaatrtatgacccttttatataaaaaatgctacttctgtatgcaagatctgtgtgttgtgtggtgaggaggaggcagatgttaagaacactgagacatttgagct

SEQ ID NO: 319658 - DNA, 201 bp, Homo sapiens
atcaatttctggataatgtggtgaaagattcaaaggaaccaaacttcgtgaggctttaaaaggggagttgtctgtcaagcaatgaaataagcagaattgcytaagctgtggcttattaatgcagagttagctggttaggaactctgaagactattgccaggttaggaggtcagtacttcaaaaacgtgagcttcacacctg

SEQ ID NO: 319659 - DNA, 201 bp, Homo sapiens
gccttatttaaacttgcttctcctattagctgattagagctgacccttacagaaaatgtaagccaaataatattttcagaattagatcaattaataattaygtctcttcaagactccagaaacaattaaacttcagtcaatattagttcatcccgacttgttttgaaattttttttctatatagacaagcagtgccagcac

SEQ ID NO: 319660 - DNA, 201 bp, Homo sapiens
ggcaggccaattcaattagacagctgggtgcagtggataaattcctggagaaggagttagcagccctgagttttcactctgccatcagctagtcacggggycttagctaagccatttaacccatctggacctcagttcccctaaaaacatctactctgcttcaaccaaaggtcattaaaagcccaacgtgacacaatgtat

SEQ ID NO: 319661 - DNA, 201 bp, Homo sapiens
ctggctgctagggttgccagatttagcaaataaatatctaggatgcccagttaaatttgagtttcagataaataaggagtagttttgtggtataagtatgycccatgcaatacttggaacatatttatactaaaaagattatttgttgtttatctgaaattcaaatttaactgagtgccctgtgttttatccggtaaccct

SEQ ID NO: 319662 - DNA, 201 bp, Homo sapiens
caagtactttctagcatgactgcatctaccctctccagcaggagacctttttaaagggcacagatctatttgtgaatgtggtaactatttattttattttwttattattattattattttttaccaaatacccaaacttcaaggactgtggtaagtattttgtaaaattttttatatagacattttaggacttcacaagcc

SEQ ID NO: 319663 - DNA, 201 bp, Homo sapiens
tttttcgtggggatggtggtagttatttcaatccatcttattctcttggaaagaggccctgagctcctactttaattattccactcttgtttgcttaaatwgattttgaatattattgtgattgtgttttattatgaatgtacctactcctggttgaaagtaaggtagcccatgaacctcatgttcttctcatggggctgc

SEQ ID NO: 319664 - DNA, 201 bp, Homo sapiens
gccttcaatattctcaaagaaagttcttagtcatctctgagtaacataatccaccagagagttttccctgttttcaagttgacatccccatggtgaccatyttagcttctttctagtactgccgtcgctgaacactggttccatatcgatgctcatacaatcttagtttgccattctttgacaagaaggcagaatctacag

SEQ ID NO: 319665 - DNA, 201 bp, Homo sapiens
agtctttatcttttatatctacagaggaaagaataaattgggtatattctagaaatagggggtttgtaactttcaatcaactaagttccgaagtgttttakagaacattagctgtggctgataagttttgtttgcttttccttctttgttttgagaaaaaattgagcacataccactttttaattaaagaattgttttcca

SEQ ID NO: 319666 - DNA, 201 bp, Homo sapiens
aggccctgagctcctactttaattattccactcttgtttgcttaaattgattttgaatattattgtgattgtgttttattatgaatgtacctactcctggktgaaagtaaggtagcccatgaacctcatgttcttctcatggggctgcttcctctttgatttatttatttttatccatggaatctgaaatgtaaataggca

SEQ ID NO: 319667 - DNA, 201 bp, Homo sapiens
ttgccagcatctgttatttttttgacttgtaaataataaacattctgactggtgtgagatggtctcagtgtggttttgatttgcatttctctaatgatcastgatgttgagctatttttcatatgattattggctgcatgtatgccttcttttgaaaatgttcatgtcctttgctcactttttaatgaggttgtttttctc

SEQ ID NO: 319668 - DNA, 201 bp, Homo sapiens
gtgcatgtgtgtgtgtgtgtatgcctgcatcttgcttatagtgtaaaaaattacctatatttacacatcagaggatatcacatgacatccagattcttagyttctctcaaaaacaaaaacagaaacaaaaacaaaaccagcttctctggcagtcagattgctttataccagtggccaattgatcagagctgagttgctgtt

SEQ ID NO: 319669 - DNA, 201 bp, Homo sapiens
caggatctggtcccagtttggagggctgggaagtgctaaggttcaaggggcctggctgttggtaactgaatgttcaggaagccaagagagccaggaaatgrccaattcatcattttatagtgagaaacaaccctcataggactcacaaaatgatccttatagtcatgatagcagaggaggccagattataaccttaggcta

SEQ ID NO: 319670 - DNA, 201 bp, Homo sapiens
ttgtgttttattatgaatgtacctactcctggttgaaagtaaggtagcccatgaacctcatgttcttctcatggggctgcttcctctttgatttatttatwtttatccatggaatctgaaatgtaaataggcaactacaactgtcaataggtaaggtaaacaagagagtttcaacatgttagaatttccaactctaattta

SEQ ID NO: 319671 - DNA, 201 bp, Homo sapiens
actcctggttgaaagtaaggtagcccatgaacctcatgttcttctcatggggctgcttcctctttgatttatttatttttatccatggaatctgaaatgtraataggcaactacaactgtcaataggtaaggtaaacaagagagtttcaacatgttagaatttccaactctaatttaggttagagttggacaattccttaa

SEQ ID NO: 319672 - DNA, 201 bp, Homo sapiens
tgtctcagccagaataaggttggaggataagctcgcaacagggctatgttggactcatccctgaatggctcattttggtaaaaatgttcattatgttgacytctcagctaacactttcagattgtattaggttccttttcttagatcctgcactgtgttaaacgtgtcacttgattttctgtcatttaaccacacaacgag

SEQ ID NO: 319673 - DNA, 201 bp, Homo sapiens
acatttccaagttttattcaaagaacaaagagattgtctcttcctcttgtgtgggtacttggcaccttgcttaagatgtgaacaagaaaagctcatggcaytccttttattgtccctgaaggtgattttcagatgctcgtgtttccacaggaaaaacgtgtcaacatggttcatattgaatccaggaaatctcggcgaaga

SEQ ID NO: 319674 - DNA, 201 bp, Homo sapiens
tggaaataatggttggaaacatttccaagttttattcaaagaacaaagagattgtctcttcctcttgtgtgggtacttggcaccttgcttaagatgtgaamaagaaaagctcatggcattccttttattgtccctgaaggtgattttcagatgctcgtgtttccacaggaaaaacgtgtcaacatggttcatattgaatcc

SEQ ID NO: 319675 - DNA, 201 bp, Homo sapiens
tagaaatagggggtttgtaactttcaatcaactaagttccgaagtgttttagagaacattagctgtggctgataagttttgtttgcttttccttctttgtkttgagaaaaaattgagcacataccactttttaattaaagaattgttttccacacatatttcctcaatcttcaaattttcctttagttctgtccccattag

SEQ ID NO: 319676 - DNA, 201 bp, Homo sapiens
ttatgcatctattaattttttatctagaaactttaaaatgtgacagatgttgatgtcaagctccttaaaatcctgagctctagatctcttaaatgtcaccrtctagactgctcctgggtaaatcacttcatcttcctcaacttgaattttccttttggtaaaataggagagctgaacatcccagatacttccaagcctttg

SEQ ID NO: 319677 - DNA, 201 bp, Homo sapiens
ttacattatttatcttggttcttctcctaagggctctgcgatatttacttctcccaaccccctgccatccctagcccaagtcatactcgtgttcactcacyactcttgtgtgccactgccatctagctggtctgtttccactcacttttgctcccctacaatctattttccatgcagtacctccatgaccttttgaaagct

SEQ ID NO: 319678 - DNA, 201 bp, Homo sapiens
gatggggaatctttggatgctgaaagacttatgcacagctgtagttctttctgaacatggatgacattaaaaatgaccactttagtatctctacagaaagsttgaaataagcctcaggcttatttattccatgtagagtctttgaactatttcagctgtttggatcattttatacaaagctgacaaagggctggggggaat

SEQ ID NO: 319679 - DNA, 201 bp, Homo sapiens
agacatagatgttgttctttagagctggccaagtacttccgagtggtatacctatagttcagataactttcattttttcctcttattttttgacaatactwattctttttgaagatagaaacaaaataaatatggaaaagcttgtaaaagttagcataaatcttacaaccataaacactactttttcccccacagcaatgg

SEQ ID NO: 319680 - DNA, 201 bp, Homo sapiens
gtggtctctttttaggaaatgcatattagcatgccaagcttttagaattccaagaaacacattttaggagatataaatctagaatgttttttgaaagggcraaattcattgtgaacatgaccagaccatcacctattttattttactttttttttttttgcaggaaagaagtgtcaggaaattaataatacagggttctgt

SEQ ID NO: 319681 - DNA, 201 bp, Homo sapiens
agcagggctcagactagaacttggatccctttgtgtgtttctttcttccaggtcattctgccacatgccagcttaacttagagatcattaattcatttacygtttatttattaatccagtgcttattaggctcttgttatctttcagacaatagtctagatcagttgttctcaaccaaggatgatgttgctcttctgggaa

SEQ ID NO: 319682 - DNA, 201 bp, Homo sapiens
aagacacactgggtgagagatttatctttgaatctttagttgtattgatgcagacctaccttttaattcctaccttaaactaggatggtttgccaaatctrtgtgaagactgtgtctatggcacaccagattttttcagaggctctcttagcgtgttttggttcagatcataaatgtgaccatgaattatgtatgcattga

SEQ ID NO: 319683 - DNA, 201 bp, Homo sapiens
tgtttaaaagacattagtggccaagaatctgcaattttcttttacaggtgttcttacaagtctcagcatatttttatttttttgttttcttgataataggyaggattattcatttggtaaatctctagggaatatattatagatccacatctggagaattatctgaggaaaccaaattatattttcttaaacgttcatgaa

SEQ ID NO: 319684 - DNA, 201 bp, Homo sapiens
tccataaaagaggtctgagctatcatttctgttttgttttttaatgattatatgtaattatatccaaataaaatatttataaataattacatgtcattaayagtatgtaaaatttggaattcatgaacaccagctttgatgaaagatacccttcaatttgggaggtgttagtcttagtattattatttgtttctgtttaaa

SEQ ID NO: 319685 - DNA, 201 bp, Homo sapiens
tcattttaatctaatttatgaacattcaaggaccctcaggaagaggctatgtaattatttcaaggagggatgcagagggagtgagaggagggaggcaaaarggcccttcagtagggaaatgggaatagtaaatttctttcccatcaagtgttctttgacaaagtcatacatctctttaattgtgaccttagcaagaacttc

SEQ ID NO: 319686 - DNA, 201 bp, Homo sapiens
ccaggagagacaaacagaacagttgacaacatacatgaccactcatattcccaagactgcgaggctggaagttcattattaagtaacagacctgtataacwctttcttcctatcctaatttacacttgatctcattctgcctgttgaatattcaggtcccctctgaagtgctgcatgtttgcagattgatgttgaagggaa

SEQ ID NO: 319687 - DNA, 201 bp, Homo sapiens
ttggttgaggacagcaggaaaccaaagggaaaggtagatagggaatgagcagatggcactatgtaaggccagagtttctggaaggactcccagatgaggtmtggggccagagagcattctaagtgatgggaaggaagagcacaggggctcttttcctctgaggttgctctgattctagaagcacattaaccaaagacacac

SEQ ID NO: 319688 - DNA, 201 bp, Homo sapiens
ccaggatctggtcccagtttggagggctgggaagtgctaaggttcaaggggcctggctgttggtaactgaatgttcaggaagccaagagagccaggaaatrgccaattcatcattttatagtgagaaacaaccctcataggactcacaaaatgatccttatagtcatgatagcagaggaggccagattataaccttaggct

SEQ ID NO: 319689 - DNA, 201 bp, Homo sapiens
caggagagacaaacagaacagttgacaacatacatgaccactcatattcccaagactgcgaggctggaagttcattattaagtaacagacctgtataactmtttcttcctatcctaatttacacttgatctcattctgcctgttgaatattcaggtcccctctgaagtgctgcatgtttgcagattgatgttgaagggaaa

SEQ ID NO: 319690 - DNA, 201 bp, Homo sapiens
ctaatttacacttgatctcattctgcctgttgaatattcaggtcccctctgaagtgctgcatgtttgcagattgatgttgaagggaaaattttgacctaaygattcttctcaagtggcttctcaatatttcctttattgtctcagcctcattgctttcctaccttctgatcatgcacagcccttattagctttactggctt

SEQ ID NO: 319691 - DNA, 201 bp, Homo sapiens
tcctagaaaactcatgaataatccattccttgtttagcatataatcaagaagtaaccataaaaatgggcaaccagcgatccattccacagctctgcctatrgagtaatcattcttttattccttgactttcttaataaacttgctttcactttacggactcactcactttgaattctttgcgtgagatccaagaatcctca

SEQ ID NO: 319692 - DNA, 201 bp, Homo sapiens
tatatttattgaggagtgcaacaaaggcatctgaaaaatcaagaaggaacaagagaccactagccttgatgttcccataatctttcttcaaaggccctgtmtaaatctttttttttttaaaggattctgtggttttattgattcaacaccataagttacactttagaaattaaggtatagtttacatacagtaaaattata

SEQ ID NO: 319693 - DNA, 201 bp, Homo sapiens
accataaaaatgggcaaccagcgatccattccacagctctgcctatagagtaatcattcttttattccttgactttcttaataaacttgctttcactttayggactcactcactttgaattctttgcgtgagatccaagaatcctcacttggggtctggaatgggacccctttctggtcacacaactagtcaataaatcaa

SEQ ID NO: 319694 - DNA, 201 bp, Homo sapiens
taaactcatcaggcttgcctctaaggactcccctgaattcctacccactttatcccccaatcccatactcagtccttctttgtgttagtgtccaattatakctgtaacaacacattaccacaaactttgtgacttaaaacaacacgagttatctcacagctctggagctaagaagtctaaaatcagggtgttgacagggct

SEQ ID NO: 319695 - DNA, 201 bp, Homo sapiens
tggctcgtggactcttctttgcatcactccaacctcttgcttccattgtcacatctccttctctgactctgacccttctgcctccctctgataaggactcttatgattatattggccccacccgaattatctaggacagtctctccatctcaagatccttaagttaataacatctgcaaagtctcttttgccatgtaaggt

SEQ ID NO: 319696 - DNA, 201 bp, Homo sapiens
taacttgcatggtaatgctgctgaaaatgagtgcagacatagcaatcttgatttgaagtggcattggaaagtataatttgattcacccagccaaatgattwctgcaagtacagatcatcagcatggcccactccaggacatttgaattgctgatgagctgacagctaattgccagactgagtctgcctcttgagcttctgc

SEQ ID NO: 319697 - DNA, 201 bp, Homo sapiens
ttcagaaatactttctatgtgaaatatcttctgagttttcacagagaatacgtaacacaagatgctttccctagcatctcttcccccacattctccttgcyctgcttgtgaaagtacccagagccctctcaaagcacttctgagtacttttaacctttatttgaatgaaaaaatgatagtcctggacccatgtagggataa

SEQ ID NO: 319698 - DNA, 201 bp, Homo sapiens
gtgcatttcaaacttgccttgaaattttctggtttcagtctttgactcccttctgcctatacccttgatcacggagcaagatatatcgctcacttgtctgrccttgaatagccataaactgatacttaatggccaggctgtgtggagctgatgtgtgtgtgtgtgtgcatgtgtgcatgtgaacatgggcatctaaataga

SEQ ID NO: 319699 - DNA, 201 bp, Homo sapiens
gctcagttttcacaagaaataggtctggcgtctctgggagcatcagatgaagatgttcagaaactagccacggtgagttcattttcaacttaaaaccagtkctatttatgtccatttgtaaggtaaagaaagcttcaggattattgactatgagttataggtaaatgttctggagaaaacatggtgaatttaccttttcct

SEQ ID NO: 319700 - DNA, 201 bp, Homo sapiens
atatttcatgacagactagtaactgagcagctctgtaggattaccgagctatcaaatgtgttgtaaaaatgtgatgtcatggagcttcggaagtctcattrcagagtttaacaggttttgtggtatattttgcagcacgccctttctgacaaggcatgtgtgaaagcctttgacccaaagacaacttgcttacaggaatgc

SEQ ID NO: 319701 - DNA, 201 bp, Homo sapiens
aagaagccaaagaaaagatgaggtaaacttttttttcctcctagctagagaaaataactttttatttttctgtctctattccttccttttatctatccctygtaccaatgagggttgatcacatctctttctacttctgtttattctgcagggactttgcaaagtcaattacccgtcccttctcagtatacttcaatccct

SEQ ID NO: 319702 - DNA, 201 bp, Homo sapiens
agatgttcagaaactagccacggtgagttcattttcaacttaaaaccagttctatttatgtccatttgtaaggtaaagaaagcttcaggattattgactaygagttataggtaaatgttctggagaaaacatggtgaatttaccttttcctatgttgtattcttttgaagcacaatgagttatcagcttattgaccaccaa

SEQ ID NO: 319703 - DNA, 201 bp, Homo sapiens
tacaaaaatgcaaaaattagctaggcatgatggcgggtacctgtaatcccagctacttgggaggctgaggcaagcacttgaacccaggaggcggaggttgyagtgagccgagatcgcgccactgcattccagcctgggaacagaggagactctgacagaaaaaaaaaaaaaaagaaaataatgataacagccagaacaagc

SEQ ID NO: 319704 - DNA, 201 bp, Homo sapiens
atgtatacgaagtaacctgaggatcatgttaaaatgcagattctgatggagtgggtctagagtgaggcctgagacttggcattcctgacagatctcacatsatgctgctgctgcaggttcaaggaccacatttcagtagcaggaatggtgggtggcattttagacatgcagatccattagacaataggagagtatgtcttt

SEQ ID NO: 319705 - DNA, 201 bp, Homo sapiens
gtgcttctcaaaatgtgatgtatacgaagtaacctgaggatcatgttaaaatgcagattctgatggagtgggtctagagtgaggcctgagacttggcattyctgacagatctcacatcatgctgctgctgcaggttcaaggaccacatttcagtagcaggaatggtgggtggcattttagacatgcagatccattagacaa

SEQ ID NO: 319706 - DNA, 201 bp, Homo sapiens
gaacatgccaatgagctgctaatttctaatgagttgcaaagttgatgcatttaagctcttctttgttttctccaaccgccaggtagaaatgtcaatcaagrcagaaacaccaaaggtggggaaggaaagaaaagatgagagggacagtctattccaggcagataaacatctcttgaataagtgaggcatctcctgccctaa

SEQ ID NO: 319707 - DNA, 201 bp, Homo sapiens
cattgtttgcgtgtaccaccttttgtttatctgtttattcattgacagacacttgggttgatttcatcttttggctattgtgaataatgctgcagtgaatrtggatgtgcaaatatccctttgagaccccgatttcagttctttggggcttatgccaataagtacgattgcttcatcaaatggtaattgtgttgttcattt

SEQ ID NO: 319708 - DNA, 201 bp, Homo sapiens
gtctcctgacctcgtgatccgcccacctcagcctcccaaagtgctgggattacagacttgagccaccgcgcccggccttcctagtatttctttaccaaatygtaggtttgcgggccagccccaggctctgagagattggtaacagaaagtgtaagtcagactggtctcactcttcctaggttaccacattctcatctggag

SEQ ID NO: 319709 - DNA, 201 bp, Homo sapiens
ttggattttttttcatgtcttccatttctctcctcatatttattatttcctcttctttcttttttgagatgaggtctcactctctcttccaggctggagtrcactggcatgagatctcagctcactgcaacctccacctcccaggttcaagcgacccttctgcctcagcctcctgagtagctgggattacaagtgtgcacc

SEQ ID NO: 319710 - DNA, 201 bp, Homo sapiens
gattacagacttgagccaccgcgcccggccttcctagtatttctttaccaaattgtaggtttgcgggccagccccaggctctgagagattggtaacagaargtgtaagtcagactggtctcactcttcctaggttaccacattctcatctggagccaggaggaagccaggacacggaagtgagagacactaaagaaggtgt

SEQ ID NO: 319711 - DNA, 201 bp, Homo sapiens; identical to SEQ ID NO: 66983

SEQ ID NO: 319712 - DNA, 201 bp, Homo sapiens
cctcccttcgttcctttctctctcttctcttcctcttccttttctcttctctttcttgcctgtgcagagcagggctgctccataggcaaagtagcccagcrtatttttcatttcagatactgtatatcccctctagaagtttaatttggattttttttcatgtcttccatttctctcctcatatttattatttcctcttct

SEQ ID NO: 319713 - DNA, 201 bp, Homo sapiens
ggagtttgagaccagcctggccaacatggtgaaaccccgtctctactaaaaatacaaaaattagctgggtgtggtggcaggcgcctataatcccagctackcaggaggctgaggcaggagaattgcttgaacccgggaggcagaggttgcagtgagccaagattgcaccattacactccagcctgggcaacaagagtgaaa

SEQ ID NO: 319714 - DNA, 201 bp, Homo sapiens
tgtacaattccatgagttttgacatatgtgtacaactgtgaagccatcaccacaattaaaataactcccatttccccaccctttgttgaatatttggagastgatagatagatgagttatctatgcccctttgtaatccacccctctctacccaatatcttattcactgtaaactgctgatctattttttatttttagaaa

SEQ ID NO: 319715 - DNA, 201 bp, Homo sapiens
tttggcatcaaggacaaacccaccttcatcaaaggggtgagcagttccccatgccaggtcgtgctaaagaagtgtttgttggctgggtgcagtggttcgcrcctgtaatcccagcactttgggaggccaaggtgggtggatcacctgaggtatggagtttgagaccagcctggccaacatggtgaaaccccgtctctacta

SEQ ID NO: 319716 - DNA, 201 bp, Homo sapiens
tttctcaaacaaagacacaaatcctcattttttaaatgtcatatatcttgagttttaaaaaaaattgtaaaatacacgtaacataaaatgtatcaccttawccatttaaaagtgttttttttttgaggcggactctcgctctgtcacccaggctggagtgcagtggcgcaatcttggctcactgcaagctccgcctcccgg

SEQ ID NO: 319717 - DNA, 201 bp, Homo sapiens
gtttcaccatattggccaggctggtctcgaactcctgacctcaagtgatccgcccgcctcggcctcccaaaatgctgggattacaggcacgagccactgcrcccggcctgggtttttaaaattatatctttattgaggtatagtggacataaactgcagctatttcaagtgtacaatttggctattctcagcctatggggt

SEQ ID NO: 319718 - DNA, 201 bp, Homo sapiens
cagtagctgagattataggcgcacaccaccatgcccggctaatttttgtattttcagtagagacgggttttgccacgttggccaggctggtcttgaactcscgacctcaggtgattcatttgccttggcctcccaaattgctgggattacaagtgtgagccaccatgctcggccttttctgtttttttgatagtggccatc

SEQ ID NO: 319719 - DNA, 201 bp, Homo sapiens
tggcacccaccaccacgcccagctggcccgattgatttttaatagttaaaccaactttgcattcttggaataagttcatcctggccataacatatttatcrtttttaaatattactggattgagctggcaaatattttaagatctttgcatttgtgttcatgtgtaaaattggccaaatccttgtcacatttgtgtatcaa

SEQ ID NO: 319720 - DNA, 201 bp, Homo sapiens
ggcaaatattttaagatctttgcatttgtgttcatgtgtaaaattggccaaatccttgtcacatttgtgtatcaagattatgctgatttctggccaggcgyggtggatcacgcctgtaattccagcactttgggaggccgaggcggtcggattatgaggtcaggagatggagaccatcctggccaacatggtgaaaccccg

SEQ ID NO: 319721 - DNA, 201 bp, Homo sapiens
ttgaggcaagagaatcgtttgaacttgggaagtggaggttgcagtgaggtgagatcgtaccactgcactccagcctggcaacagagtgaggctctgtctcaaaaaaaaaaaaaaaaaaaaaagattatgctgatttctgtgaattgcttgagcccaggaggcagaggttgtagtaagctgagtgcaccactgcagtccagc

SEQ ID NO: 319722 - DNA, 201 bp, Homo sapiens
tgaggctggagaattgtttaaacccaggaggcggaggttgcagtgacctgagatggcaccattgcactccagcctgggctacagagtgagactccatctcaaaaaaaaaaaaaaaaaaaagaaatatctatctatctatctatctatctatctatctatctatctatctatctatcttcctctttcttcatcttctttttc

SEQ ID NO: 319723 - DNA, 201 bp, Homo sapiens
gaggctgaggcaggaggatcactggaatccaggaggtggaggctgcagtgagctgaggttgtgccaccgcacttcagcctgggcgacagagcaagccttcwtctcaaaaaaaaaaaaaaaaaaaaaaaaacacacaaagaaaatccccccaaaaaaccagcgcctagtacatagtaagcacttaataaggttaagccattg

SEQ ID NO: 319724 - DNA, 201 bp, Homo sapiens
aactcactgcagcctcgacctccaggcttccgtcatcttcccacctcagccttctgagtagctagaaccacatgcacctaccaccatgtctaaattttttktgtgtgtgtagagatggggtctccctatattgcttaggctggtcttgaactcctggcctcaagcaatccccccgcctcagtctccccaggtgttgggatt

SEQ ID NO: 319725 - DNA, 201 bp, Homo sapiens; identical to SEQ ID NO: 66998

SEQ ID NO: 319726 - DNA, 201 bp, Homo sapiens
catggtttggggtgaggcccagggcggcaggcgcagcccgtgcgtttgctgtgtatcgcagcaggcaggttagcgccccaggcctaggccagcctctccasggggcagctctcttccctagtgggaaggtgcctgtgtgtgtgagggagggagaggggagagaggcagaggggctggaaccagtagacatggcaggcggtg

SEQ ID NO: 319727 - DNA, 201 bp, Homo sapiens
tgactggcctactgggcactcagccaggtaaaaaatgtcttatgttgtaaaggtcccagctggaatgcactctgccccttttgctttccaagattattcgwtcgtgtacattgcaaatattttcatgcacagggcaggcagttagctttcctttggtgggaggacttggatctagggctcatccatgaaggaggcagagat

SEQ ID NO: 319728 - DNA, 201 bp, Homo sapiens
gagaccccagcccagctgagggagagcagtttcctgattcgtgtgacaagcaactcccttcccaccactccccactccctcccaagtacagacaaccttcygtcctgctccagttgaaggggtgacaacgattcctgaagcattctgtctgagtctaatggtggctctagccagacacagggaaatgtggctggctggctg

SEQ ID NO: 319729 - DNA, 201 bp, Homo sapiens
agggcttgtggttccttcagctcaggggcttttcactttgccagcttgtttcagtcccgatggagcccggctcctgaccacggaccagaagagcgagatcygagtttactctgcttcccagtgggactgccccctgggcctgatcccgcaccctcaccgtcacttccagcacctcacacccatcaaggtgagtggcggtgg

SEQ ID NO: 319730 - DNA, 201 bp, Homo sapiens
cctttttgcacactctggattcttaccggatattacaaaaggctgccccctttgacaggagggctacatccttggcgtggcacccaactcaccccagcacygtggctgtgggttccaaagggggagatatcatgctctggaattttggcatcaaggacaaacccaccttcatcaaaggggtgagcagttccccatgccagg

SEQ ID NO: 319731 - DNA, 201 bp, Homo sapiens
agcctgagcgacagagcacaactctgtctcaaaaaaaaaaaaaattatgctgccctctttagcttgggaattattccctctttttctagtctgtggagacrgagggtttaagatcaatatctggctgggtgcggtggctcactcctgtaatctcagcactttgggtggccaaggtgggcagatcacctgaggtcaggagtt

SEQ ID NO: 319732 - DNA, 201 bp, Homo sapiens
gctgcagtgaatatggatgtgcaaatatccctttgagaccccgatttcagttctttggggcttatgccaataagtacgattgcttcatcaaatggtaattktgttgttcattttttgaggaaccgctatattgttttccatactggctataccatctcatgttcccatcagcagtgtacaaatgtcccaacttctctactt

SEQ ID NO: 319733 - DNA, 201 bp, Homo sapiens
ttaataattttttatagaggctggacccagtgggtcatgcctgtaacagcactttgggacgttgaggtggaaggattgcttgagcccaggaatttgagacyggcctgagttacatagtgagaccctgtctctaaaaaaaaaaaaaaaaaaaaattggtgacacacacctatagcctatagcaccagctacttgggaggctg

SEQ ID NO: 319734 - DNA, 201 bp, Homo sapiens
taagattcatccatgttgtagcatgtggcagaatttccttttttaaggctgaataatgttccattgtttgcgtgtaccaccttttgtttatctgtttattmattgacagacacttgggttgatttcatcttttggctattgtgaataatgctgcagtgaatatggatgtgcaaatatccctttgagaccccgatttcagtt

SEQ ID NO: 319735 - DNA, 201 bp, Homo sapiens
ggaatgcagtggcaggatcatagctaactacagccttgaactcctgggctcaagtcaccatcccacctcagcctctcgaatagctatgagcacaggtgtgsaccatcactcccagctaatttttaataattttttatagaggctggacccagtgggtcatgcctgtaacagcactttgggacgttgaggtggaaggattgc

SEQ ID NO: 319736 - DNA, 201 bp, Homo sapiens
tcatgcctgtaatcttagcactttgggaagccgtggcagggggatcgcttgagcttaggagttcaagaccagcttgggcaacgtgacaaaaccccatcttaaaaaaaaaaaatacaaaaattagctgggcatggtggcacgcacttgggaggctgaggtgggaggatcgcttgagcccaggagattgaggctgcagtgagc

SEQ ID NO: 319737 - DNA, 201 bp, Homo sapiens; identical to SEQ ID NO: 67002

SEQ ID NO: 319738 - DNA, 201 bp, Homo sapiens
ttagcactttgggaagccgtggcagggggatcgcttgagcttaggagttcaagaccagcttgggcaacgtgacaaaaccccatcttaaaaaaaaaaaatasaaaaattagctgggcatggtggcacgcacttgggaggctgaggtgggaggatcgcttgagcccaggagattgaggctgcagtgagccgtgtttgtgccac

SEQ ID NO: 319739 - DNA, 201 bp, Homo sapiens
gttcattacagccttgatctcccaggctcaagcgatcctcctgcctcactttttttttttttgtagagacagggtattcttgtgttacccaggctgatccytttttttttttttttttttttttcttgaaacggtcttgctctgtcacccaggctggagtgcagtggcacaaacatagctcactgcagcctcaacctcctg

SEQ ID NO: 319740 - DNA, 201 bp, Homo sapiens
atatttgtttttgatgtcccccttgatcatgttctgtgtttaccctcatggccggcctctccatctcctaggcagcctggcatcctcgctacaacctcatygttgtgggccgatacccagatcctaatttcaaaagttgtaccccttatgaattgaggacgatcgacgtgttcgatggaaactcagggaagatgatgtgtc

SEQ ID NO: 319741 - DNA, 201 bp, Homo sapiens
ccactgagaaattcctgagggtcgacaggaggcaacatgggagctgctcagcctgcccatcatggggtccttgggctgccccgagccacctcccgagggcycccctccagaggacactgctagctccactcacccagaatcttcctggtacagttcaaatatgtggcaggaggcgtagggggcttgttcaccattgtagac

SEQ ID NO: 319742 - DNA, 201 bp, Homo sapiens
ttttagtagggacggggtttcaccatgttagccaggatggtctcgatctcctgacctcgtgatccgcctgcctcagcctcccaaagtgttgagattacagstgtgagccactgcactcagcccaaagaatacttttgatgttcctctttgttcatatttgtttttgatgtcccccttgatcatgttctgtgtttaccctca

SEQ ID NO: 319743 - DNA, 201 bp, Homo sapiens
gtggctgtccccatcagctgctgagtttccagaatttttttgttgttgttcacagcccagattcacctcttcctttccgctcctgtctagagaggagtggragggagagtacccctgcaggagaaggcctgcaaggccaggaccacagagggcttgtggttccttcagctcaggggcttttcactttgccagcttgtttca

SEQ ID NO: 319744 - DNA, 201 bp, Homo sapiens
tttaggaaaatcccatccaattctgccattttaataactgccagatttgtttttagtggggtgatctggggaatgtgggtttccttctcttttttagccaytagcaattttacactcagctcttagttattcgtgttgatggagacaggatgacagtggggctcctccagaactcaagtcctgttagggtttggtcaccag

SEQ ID NO: 319745 - DNA, 201 bp, Homo sapiens; identical to SEQ ID NO: 66987

SEQ ID NO: 319746 - DNA, 201 bp, Homo sapiens
tcctgggcccagccgtaaccagacagatttctgagccccattatcccatcccctctgtctggacggtagagcagtctgaatgttcctcactaggaatccayggcaagacagttattcattcattcaacaaatatttattgaatgcccgctgtgggttagtcaccggagcggcaacagtgagtaaataggactatctctgtc

SEQ ID NO: 319747 - DNA, 201 bp, Homo sapiens
atgcacaaaaagaaagtgacgcatgtggccctgaacccatgctgtgattggttcctggccacagcctccgtagatcaaacagtgaaaatttgggacctgcrccaggttagagggaaagccagcttcctctactcgctgccgcacaggcatcctgtcaacgcaggtgtgatatcccagacctcatctctcctgcagaccctg

SEQ ID NO: 319748 - DNA, 201 bp, Homo sapiens
cactgagaaattcctgagggtcgacaggaggcaacatgggagctgctcagcctgcccatcatggggtccttgggctgccccgagccacctcccgagggccyccctccagaggacactgctagctccactcacccagaatcttcctggtacagttcaaatatgtggcaggaggcgtagggggcttgttcaccattgtagaca

SEQ ID NO: 319749 - DNA, 201 bp, Homo sapiens
aagatcaatatctcttcctcagccaggtccggtggctcatgactgttgggaggccgaggcaggcggatcacttgaagtcaggagttcgagaccagcctggycaacatgatgaaactccatctctcctaaaaatacataacttagctaagcgtggtggcgtgagcctgtaatcccaggtacttgggaagctgaggctggaga

SEQ ID NO: 319750 - DNA, 201 bp, Homo sapiens
acaaggagattaatcaaatatgtaagtatattgagtaaaatgggaaccacatttttcactgtcaaagaagggaattataaacatggaaagagagaaactcraatcaactctgtggtgttgactttgaattgaagacattgatacaaatttaaggttttcagtatacaaagtaagacagttgtgaagcaatctgattgcaga

SEQ ID NO: 319751 - DNA, 201 bp, Homo sapiens
acaaagaaaatccccccaaaaaaccagcgcctagtacatagtaagcacttaataaggttaagccattgatattctcatgattattttcatcatcattttcwggaatgtttggaagaataggaaggggcacagatctgactcctgccctcctaactcagccactgctctgagctgaagctcttctaaagagagcactgtggg

SEQ ID NO: 319752 - DNA, 201 bp, Homo sapiens
taggggatggcaaaaggcagtgtagcatggatttgagagtttgagagaaaaactgtgagctgagctcttctggctgaatagcaggatccctgaagcacccycctagtcagcctcccagtccagtggtttgagggaccagaagagctcctggttgtgttttttcccccagtgttcagaagggggcagaagtgcttttctagc

SEQ ID NO: 319753 - DNA, 201 bp, Homo sapiens
atgggagctgctcagcctgcccatcatggggtccttgggctgccccgagccacctcccgagggcccccctccagaggacactgctagctccactcacccaraatcttcctggtacagttcaaatatgtggcaggaggcgtagggggcttgttcaccattgtagacatccagtgccatttgcagggcaaccagggtagtgtc

SEQ ID NO: 319754 - DNA, 201 bp, Homo sapiens; identical to SEQ ID NO: 67001

SEQ ID NO: 319755 - DNA, 201 bp, Homo sapiens
acccggggtgtggggggcaggcgtgcctcagggcttgctttatggtataagctttgtctgcttcagggacttttaggagctggggatcctgggcccagccrtaaccagacagatttctgagccccattatcccatcccctctgtctggacggtagagcagtctgaatgttcctcactaggaatccacggcaagacagttat

SEQ ID NO: 319756 - DNA, 201 bp, Homo sapiens
cacaacctgcatgtagctcaggtccctggagaccccagcccagctgagggagagcagtttcctgattcgtgtgacaagcaactcccttcccaccactcccyactccctcccaagtacagacaaccttccgtcctgctccagttgaaggggtgacaacgattcctgaagcattctgtctgagtctaatggtggctctagcca

SEQ ID NO: 319757 - DNA, 201 bp, Homo sapiens
cctggtacagttcaaatatgtggcaggaggcgtagggggcttgttcaccattgtagacatccagtgccatttgcagggcaaccagggtagtgtcgtgctgygggggagaggggctgcccgtcagcattgttccccacacccgcaggaaccgaacagagaagaaatccagctccttgcctgacacagcacgctagggagcgc

SEQ ID NO: 319758 - DNA, 201 bp, Homo sapiens
tgtctgggaacctttgtggctgtggctgtccccatcagctgctgagtttccagaatttttttgttgttgttcacagcccagattcacctcttcctttccgytcctgtctagagaggagtgggagggagagtacccctgcaggagaaggcctgcaaggccaggaccacagagggcttgtggttccttcagctcaggggcttt

SEQ ID NO: 319759 - DNA, 201 bp, Homo sapiens; identical to SEQ ID NO: 66999

SEQ ID NO: 319760 - DNA, 201 bp, Homo sapiens
tggaatgcagtggcaggatcatagctaactacagccttgaactcctgggctcaagtcaccatcccacctcagcctctcgaatagctatgagcacaggtgtscaccatcactcccagctaatttttaataattttttatagaggctggacccagtgggtcatgcctgtaacagcactttgggacgttgaggtggaaggattg

SEQ ID NO: 319761 - DNA, 201 bp, Homo sapiens
ggagagaaaagaaggaaagacatagtgtgactgggtgaggtttggcacagagttcttgggaatggtctttgttgtgctagagtttatcatccattgctgargggtgagtgtgtcgtcccctctaggacctttagccagcccagctggtggctgacattggagggctgtgctgtgaaaagtgacactgggtttagagcagga

SEQ ID NO: 319762 - DNA, 201 bp, Homo sapiens
tagtgggtggaggaaaggcccagcaatgcctgagtaagcccaactcctgcctgcctcttcgcagaaactagggtgcatccaaactgtctcttctcaggctrggcaggacagcgcggcctcacctgtgaaccttcaagacttggactttggctgaagcgagggcgtaggagttctaagtaccgctggctgcacgccctctgg

SEQ ID NO: 319763 - DNA, 201 bp, Homo sapiens
caccatcaagtgagtagtttaactagcaggggaaagggcttctaagcttaggtgtagttccggcaagagcatccagatcccatttccttaacccaacctgrcccagggaagaaaggaaagatgtcagccactttccgcccttctttctctttctcaaactgctccttggctgccctcactttggtccaggtgggttactgc

SEQ ID NO: 319764 - DNA, 201 bp, Homo sapiens
aggcctcttaggtcagtatctgggtcaggctgatgttaaaacgtttaccagttggtatgatcttaggaaatgcaaatgagggagaaggcctgaaggtgccytaagggccagggaggccagctagggattaaaaatgtgcaatggcagaggcacacacaacctaaaaccattcttgtagttttctgtaagacttatctccat

SEQ ID NO: 319765 - DNA, 201 bp, Homo sapiens
tcaaataatgatgggaggaagcagggattcaacctaccttattgaccaaaagtgaccagaaatcaggtgtctctgctaataccttcaccctctcctcatgytgacactcttgtctctgcagcttaatgaattcaatcccatgggggacacgctggcctctgcaatgggtgagtaggaggagaatgtctctgacttgccaag

SEQ ID NO: 319766 - DNA, 201 bp, Homo sapiens
tgggttcacgccattctcctgcctcaacctctcgagtagctaggactacaggtgcccgctaccacgcccagctaattttttgtatttttagtagagacagsgtttcaccgtgttagccaggatggtctcggtctcctgacctcgtgatccgcccacctcagcctcccaaagtgctgggattacagacttgagccaccgcgc

SEQ ID NO: 319767 - DNA, 201 bp, Homo sapiens
tacatctccactgagaaattcctgagggtcgacaggaggcaacatgggagctgctcagcctgcccatcatggggtccttgggctgccccgagccacctccygagggcccccctccagaggacactgctagctccactcacccagaatcttcctggtacagttcaaatatgtggcaggaggcgtagggggcttgttcaccat

SEQ ID NO: 319768 - DNA, 201 bp, Homo sapiens
caaagaaaatccccccaaaaaaccagcgcctagtacatagtaagcacttaataaggttaagccattgatattctcatgattattttcatcatcattttctkgaatgtttggaagaataggaaggggcacagatctgactcctgccctcctaactcagccactgctctgagctgaagctcttctaaagagagcactgtggga

SEQ ID NO: 319769 - DNA, 201 bp, Homo sapiens
gctggctggctgttgggtgatccagttccttgggagccaatgtttgtacccctggtattagctgtttttcccactaaaataagcactgagaggcaagaccrtgtccctctgagctatttgccgaagacttcaggctggaggaaaaagaacagggcttgatagaagtgcaaggtggatccagcaccaactctgccattttct

SEQ ID NO: 319770 - DNA, 201 bp, Homo sapiens
agaaatgaaggggccagacaaagcggctcatgcctgtaatcttagcactttgggaagccgtggcagggggatcgcttgagcttaggagttcaagaccagcytgggcaacgtgacaaaaccccatcttaaaaaaaaaaaatacaaaaattagctgggcatggtggcacgcacttgggaggctgaggtgggaggatcgcttga

SEQ ID NO: 319771 - DNA, 201 bp, Homo sapiens
gctactcaggaggctgaggcaggagaattgcttgaacccgggaggcagaggttgcagtgagccaagattgcaccattacactccagcctgggcaacaagartgaaactccatctcaaaataataataataataataataaaagaaaataaaaataaggagtgtttgttgaaggcatgaaaggaatattgatgtcatccagt

SEQ ID NO: 319772 - DNA, 201 bp, Homo sapiens
ttggccaaatccttgtcacatttgtgtatcaagattatgctgatttctggccaggcgcggtggatcacgcctgtaattccagcactttgggaggccgaggsggtcggattatgaggtcaggagatggagaccatcctggccaacatggtgaaaccccgtctctactaaatatgcaaaaattagctgggcgtggtggcgcac

SEQ ID NO: 319773 - DNA, 201 bp, Homo sapiens
atagttcaagtaaattgcttgcacacagtgttttcaatacatttagctattaatattttactgattatctactgtttgccagactctgggatggagagagwaataacatgaagtatttgtcctccaggagtcccctacactctagtgaaggagaaagacacctaaacagcttactgtagtaacatataatacaaaggatat

SEQ ID NO: 319774 - DNA, 201 bp, Homo sapiens
tatctgcctcacctggtttgcctcttcactctagcacctgatgatccttaccttatccatttgatccccaagtaacaagaaaagctgtgtcaaatgtactrctttagatctggactgtgaatatgccaagggcaccgggcctgaggttgtgtatctgccagtttaggtttactcttttcagccaccgactactccctaatc

SEQ ID NO: 319775 - DNA, 201 bp, Homo sapiens
aattcacagccatagtctgtgaatccaactgtccaactcagggagggaaaaggaagaagtgagagcaaagtgggtccagattggccttagtcctggccctrtccatgatgtccctgacgctatcctttaaccaaatctgggttcgttatccccagtggcgcccctccgctaatgatataaataaaagttccaactctgggt

SEQ ID NO: 319776 - DNA, 201 bp, Homo sapiens
gggatatccgtgggtcttacatttgctctcttctgagctgcttcccccacacttccccgctcgctcgaaagactccctatggctgcgtcccagaacttgartccatccgcccccaggccggggcactgggaggcccatcaccctgtgcaatgtccccgctccaccttgagtcgtcttggaaacggtcgccagggaaaccgt

SEQ ID NO: 319777 - DNA, 201 bp, Homo sapiens
tagcgtagaacccagaacgcccgccccctcccctcctctcacccgcctggttcttcagcgtcctcgccttctctctaggctctgccacaaggagctaggaycacgctcacctcacgatttccctacctgcctgtctcgctttctcacctgcgttccctcctttcatcccggagcccggaacctccgcttccggctccacgt

SEQ ID NO: 319778 - DNA, 201 bp, Homo sapiens; identical to SEQ ID NO: 67003

SEQ ID NO: 319779 - DNA, 201 bp, Homo sapiens
ggcatgagccaccatgcccggcccttgtttaatctttctgagctttcattttcttaccgggaaaataaatataaagctgtccttatcttatagaatggttrtaaggatccaatgagatagttcaagtaaattgcttgcacacagtgttttcaatacatttagctattaatattttactgattatctactgtttgccagact

SEQ ID NO: 319780 - DNA, 201 bp, Homo sapiens
aactgttttggccacttacactgatggagtcatcttctgcacagtgcaaggacacagccaacgagtgggtacgagatgactctttcccaatcaggtaaatrtgcacattctccccaatttcctattggcaaaattaaaattatatgacagctgttaaattctaggctaaggctcagctaagacacatatccttaagatcct

SEQ ID NO: 319781 - DNA, 201 bp, Homo sapiens
gcggtagccaggctgtggtggcgcgggatcttgggggcctcggcgctgaccaggggtgagcacgggcagccagctgagaccggggtcaggcgcagcggcgygcccagtgcagagagctcctcagggctcatcccgcgcgtctgtgccttttatctccctgtgcagggactgggcgaccctccgttctgttgctgccggtga

SEQ ID NO: 319782 - DNA, 201 bp, Homo sapiens
agtctgtgagggatcttcaagcccttaagttcttagcttgagaacctggtataaacttgcgtgctaaggagctacagagaggcaaaagttcagttcccatyctcaaacagctcttagtctgacaggagaactgagactactgctttagcagaaatgcaggcaatgtgagggaagaactgtggagtaattttgagaagaggt

SEQ ID NO: 319783 - DNA, 201 bp, Homo sapiens
tcctcttagcacttgggactttgaacatctgctcctcacaggcctgtcctgcgtctaccggctccacgcagctagtgaggctgaggaacggggccgctggrcccaggtcttcgctctcctggcacaggaaacactctgggacctgtgcaaaggtttctgcccccaggaccggcccccttccctggggtcctgggcctccat

SEQ ID NO: 319784 - DNA, 201 bp, Homo sapiens; identical to SEQ ID NO: 67004

SEQ ID NO: 319785 - DNA, 201 bp, Homo sapiens
cccttccctacgtcctcctggcaaatcttggagatctgacttgcagtggtcttcaccctgcatgcagaatcgagccctccctgtgcccttaggcctgttayggccctgattgttccttgtccatttcaatcatcccctttttgtctgattaaactgtcagctctttgaaagcaagcaatataacctttaggcctcagagcc

SEQ ID NO: 319786 - DNA, 201 bp, Homo sapiens
agaggtgaacaccccagctgctatagtaagagtctttctgaggaccgtgtagttaaggtggcactttccccaagttttcatcactgtattccctagaaggraaacctttcacatgcacctttctcaaggtgcttcagggagtctttcctggatttgacatcccttacaagcctaagagactgcatgcagggctggcttttg

SEQ ID NO: 319787 - DNA, 201 bp, Homo sapiens
tgcacctttctcaaggtgcttcagggagtctttcctggatttgacatcccttacaagcctaagagactgcatgcagggctggcttttgccttctccatttyttttttaaatatgccttttccttccagccactgtcagaccacggaatgatgtggcccacaagcagctctcagcttttggagagtatgtggctgaaatctt

SEQ ID NO: 319788 - DNA, 201 bp, Homo sapiens
gtctctgtgttcaaggcagccaactggtatgaaagggaggtgagttaccggatatggtggacctgcctctgggccacagttgcagaactggttcagactaygggatgcagtgtagccccttccccctgttgttagtcttgatggattggctgtttgaggtggtctctttcctagatctgggacatgtttggagtcttcttt

SEQ ID NO: 319789 - DNA, 201 bp, Homo sapiens; identical to SEQ ID NO: 67005

SEQ ID NO: 319790 - DNA, 201 bp, Homo sapiens
ggaccgtgtagttaaggtggcactttccccaagttttcatcactgtattccctagaagggaaacctttcacatgcacctttctcaaggtgcttcagggagyctttcctggatttgacatcccttacaagcctaagagactgcatgcagggctggcttttgccttctccatttcttttttaaatatgccttttccttccagc

SEQ ID NO: 319791 - DNA, 201 bp, Homo sapiens
aggctgtggtggcgcgggatcttgggggcctcggcgctgaccaggggtgagcacgggcagccagctgagaccggggtcaggcgcagcggcgtgcccagtgyagagagctcctcagggctcatcccgcgcgtctgtgccttttatctccctgtgcagggactgggcgaccctccgttctgttgctgccggtgaggcgggaga

SEQ ID NO: 319792 - DNA, 201 bp, Homo sapiens
gcatgagcaaacacaggcatgctgacatgctaagctacagctgtggcctgggcctttggaagtagttgtaagcataggagaatcttgaggttttgaggttyagaatagaaggcagggtcacagggcagaactctcccaatcagggactcccatctcagccctccagatccttctgttctccctagattgtctacaacctgt

SEQ ID NO: 319793 - DNA, 201 bp, Homo sapiens
gcgggcagcgctcttctctgaactatcggcggggccccttagatgcctgtccttgccctaggatgcccttccctacgtcctcctggcaaatcttggagatstgacttgcagtggtcttcaccctgcatgcagaatcgagccctccctgtgcccttaggcctgttatggccctgattgttccttgtccatttcaatcatccc

SEQ ID NO: 319794 - DNA, 201 bp, Homo sapiens
gtagctccggccccgccgttccgacccccgccgccgtcgccgccatgacggggctagcactgctctactccggggtcttcgtggccttctgggcctgcgcsctggccgtgggtgaggccgggtcctggcgggcgggagcagcatcgcggccgagctggccgggtcggaactcggcggggaagtggcctgcggggaatactg

SEQ ID NO: 319795 - DNA, 201 bp, Homo sapiens
tagtctcctggggatgagggagctcctgctttgccaggctccaacctcaacactacctccttctcttccagaggctttggctactctcctgcgcccacggkacctggacctgctagtctccagcccagcttttccccaaccagtgggttccctgagtccagagcctatgcccctagagcgttttgggcgccgcttccccct

SEQ ID NO: 319796 - DNA, 201 bp, Homo sapiens
ggctgagagcagtcctgcaggtaaatgtacaagtctccactcccagctgagctttttctccagatgcagcgcactcagactgagccccctccctctacagyctcattccttagttcccggagctggcaagggctggagccccgcctgggtcagacgccagtgacagaagctgtgagtggaagacgagggattgccatcgcc

SEQ ID NO: 319797 - DNA, 201 bp, Homo sapiens
caacactacctccttctcttccagaggctttggctactctcctgcgcccacggtacctggacctgctagtctccagcccagcttttccccaaccagtgggktccctgagtccagagcctatgcccctagagcgttttgggcgccgcttcccccttgccccagggaggcgtctagaagagtatggtgccttctatgtagggg

SEQ ID NO: 319798 - DNA, 201 bp, Homo sapiens
agcagcccgtaaccccctttttctccctcactgctgcaggagtctgctacaccatttttgatttgggcttccgctttgatgtggcatggtaagggagggcrgggggaggattccccttgaagcttcttccctgcagcctctcttcttttctctggtctgagtccctcccccacaccactgcctgcctgggacatggacctt

SEQ ID NO: 319799 - DNA, 201 bp, Homo sapiens
tgagccaactgctttatgccttaatttccccatttccatataccatccatagaactcttgatatgggcttggccccagcctactgggtcatatttagtctyctggggatgagggagctcctgctttgccaggctccaacctcaacactacctccttctcttccagaggctttggctactctcctgcgcccacggtacctgg

SEQ ID NO: 319800 - DNA, 201 bp, Homo sapiens
tgattacttttcttcttccctcagcctttcagtgccacagaccccaaggccatcggccatcggaactaccatgcaggtgggtggatgggcgtatgaatgcmaaatgctgggacttcatgcctgcttccactctcccccatcccagcttgggccatcattttgatattctctcacctactttttctgctttgcagagtgggg

SEQ ID NO: 319801 - DNA, 201 bp, Homo sapiens
gtttgtgactaaggatcagcctgagggtctgagtgtgactgtgggtgcttgactgagttgattcttagtgactagctttatccatatgccacttctctccrtctgtcccacagcgtaactctgtggttgtctgtccctgtctgccttgtctgtcacagtgtgtccatcctggttagtcatatatctcttgtggtctgtcca

SEQ ID NO: 319802 - DNA, 201 bp, Homo sapiens; identical to SEQ ID NO: 67007

SEQ ID NO: 319803 - DNA, 201 bp, Homo sapiens
cgcaggtgcttggtctgggaggtggttttagcgagggaatggcagaaaatggaggcctaagcagaggaatctgtctacacagctgtactgtcacctggggrcagcctgaggacgccccttcagggaggtggcccttcagctcggcagctactttaggttgaagaacttctctctaccgagcagcccgtaaccccctttttc

SEQ ID NO: 319804 - DNA, 201 bp, Homo sapiens
ctctgtccctgcctgatttctcctgttctttttttgcagacctccagagtgaagatgggtgactagatgatatgtgtgggtggggccgtgcctcacttttwtttattgctggttttcctgggacagctggagctgtgtcccttagcctttcagaggcttggtgttcagggccctccctgcactcccctcttgctgcgtgtt

SEQ ID NO: 319805 - DNA, 201 bp, Homo sapiens
tattcctctgtccctgcctgatttctcctgttctttttttgcagacctccagagtgaagatgggtgactagatgatatgtgtgggtggggccgtgcctcamttttatttattgctggttttcctgggacagctggagctgtgtcccttagcctttcagaggcttggtgttcagggccctccctgcactcccctcttgctgc

SEQ ID NO: 319806 - DNA, 201 bp, Homo sapiens
tcgtggagatctttggcagcgccattggcctctttggggtcatcgtcgcaattcttcaggtgatgaatccccttgggaagcctctgtgtccttgtccccarcctagccttaccctccttctggagaagctgaagtgctctccttctctacctataactatagattcccccaaacagcttccacctcctcatttccatcttc

SEQ ID NO: 319807 - DNA, 201 bp, Homo sapiens
actgccttacctattcctctgtccctgcctgatttctcctgttctttttttgcagacctccagagtgaagatgggtgactagatgatatgtgtgggtgggrccgtgcctcacttttatttattgctggttttcctgggacagctggagctgtgtcccttagcctttcagaggcttggtgttcagggccctccctgcactcc

SEQ ID NO: 319808 - DNA, 201 bp, Homo sapiens
cctgcagcctctcttcttttctctggtctgagtccctcccccacaccactgcctgcctgggacatggacctttgggaaatacgcggtcagttgttgcctgyagaactggtggtggggttgaagggggtttgaggggttaagattttgtgctccgcttccctgctagagctgaactgctttcttctctgcttccacaacagg

SEQ ID NO: 319809 - DNA, 201 bp, Homo sapiens
cagaaaatggaggcctaagcagaggaatctgtctacacagctgtactgtcacctgggggcagcctgaggacgccccttcagggaggtggcccttcagctckgcagctactttaggttgaagaacttctctctaccgagcagcccgtaaccccctttttctccctcactgctgcaggagtctgctacaccatttttgatttg

SEQ ID NO: 319810 - DNA, 201 bp, Homo sapiens
acccggaagtaacctccccggtagtcccacgtgtagcggagaaacagtagttaggatggctgaaggggatactcaccggctgaaggccgactgtgattccycctacccccacaaggcgattttgaccccctgagggctgctctagaggactcaggccccgaagctgtcccagggaggtccccgctgcatcccaccacccaa

SEQ ID NO: 319811 - DNA, 201 bp, Homo sapiens
cctcgaggccagtcggctacccaccgctggggacggcagcttcagtgcagccccagggaagggccagcttccacacccatgtccagtgcagcaccccaagycccagcctgaagggctggtcaccgagtaggctctggcttctgccacagcgcacctgtctgccgctgccgcctcagctgctttggcccagccagcttcaga

SEQ ID NO: 319812 - DNA, 201 bp, Homo sapiens
ggctttgctggtggagaagagggcctttctctccgctcattccagaaaggccactcaccgatcccctctccaggaacctttctggttctagcctggagackgcaggttggggcaggggctcaggggtcagcgcctcccactgaatgctccctgctagtcctagtccagagtctggtgcttaggcctgcatggccaggaccc

SEQ ID NO: 319813 - DNA, 201 bp, Homo sapiens
tggggttctttgcccttcctggagcctgttccagtctgtccgtccccatcctcaggatctccctgactgggatgaagatctcacgcccagacatccgaatyggccgctaccgcatgatcaagcacgaccgcgacaagcataacgaacctaaccctcagaggtgaccccagcaccctcaccccttactccccagaggcaact

SEQ ID NO: 319814 - DNA, 201 bp, Homo sapiens
gatcccccagtgggggacctccaagcatccttgactccaaaaaggtgactcccagtgccactgattccctgatgtgatccaaggcccctcaggactgctgkcacccctgatcgttgtcccccaacccccagcccagcctcagcccaatatctctgacctctggcctgattcctagaggtgaccagaatttaatgtcagggc

SEQ ID NO: 319815 - DNA, 201 bp, Homo sapiens
tgtggattctggccaatgccctgattcctgacactgtcctgtctgcagtgggcagactgctgatcgagttcacctcacccatgcccctggagcgggtgcasagggagaacccaggcgtgctcatgggcggccgatacacaccgcccgactgcaccccagcccagacggtggcggtcatcatcccctttagacaccgggaac

SEQ ID NO: 319816 - DNA, 201 bp, Homo sapiens; identical to SEQ ID NO: 67007

SEQ ID NO: 319817 - DNA, 201 bp, Homo sapiens
aagccttaacaggcactttgagggagggaggagtgagataggaattttagttgaatggattggtcaacaggttactggaggagctacgaatatttacggarggggtcctgacatatgcatatcgaacaaacatgcatgttatataccatccatgttcaccttggggtggagacttaatatttaaatatatcgcagttaggc

SEQ ID NO: 319818 - DNA, 201 bp, Homo sapiens
tgtgaggtgtctgttctcaggggcacaggggcacatgggggtctataggtaaacatgtctccatgcttaggtacaaaccagtgtggttagagttcacgtgyctgtgttcctgggaatgcgtgagtgtgtgtgtagagttgtgcaataagggtgagtgcctgagtgtgtgtgtcagtgaggtggaggaaggtaaatgtatgt

SEQ ID NO: 319819 - DNA, 201 bp, Homo sapiens
cccatgccctccacccagctgctagcagcagcagcagcagcagcaactgctcccggcccaacgccaccgcctctagctccgggctccctgaggtccccagkgccctgcccggtcccacggctcccacgctgccaccctgtcctgactcgccacctggtcttggtgagcctggagggtagggcctgcctgtggggaaacagg

SEQ ID NO: 319820 - DNA, 201 bp, Homo sapiens
gtctgcagtgggcagactgctgatcgagttcacctcacccatgcccctggagcgggtgcagagggagaacccaggcgtgctcatgggcggccgatacacaycgcccgactgcaccccagcccagacggtggcggtcatcatcccctttagacaccgggaacaccacctgcgctactggctccactatctacaccccatctt

SEQ ID NO: 319821 - DNA, 201 bp, Homo sapiens
tatgtggcttagtagtggggtgtgcttgaggatgtgagtactgagttgccgggaactgtgcctgggtgtctgtttggaggtaagttcttgagtctgtgagygtgaaagggtatgagcaggtcagtgtgaggtgtggcccacgagtgtgagcagctgagtgggaggtaggtgggcagccttgcctgtcctgccctgacctgc

SEQ ID NO: 319822 - DNA, 201 bp, Homo sapiens; identical to SEQ ID NO: 319804

SEQ ID NO: 319823 - DNA, 201 bp, Homo sapiens
ggctagggctggccactaggtcccagaagggacctctgatgcaggcccccccgcccccgccgaccacagagacctcctagacttggacatgggtccctccygtatgatgggacacaagtggaggtggagcagggggccgtgggagcacagagggccccagtccagccctggggttgggaagcagttgctgagatgggtctt

SEQ ID NO: 319824 - DNA, 201 bp, Homo sapiens
tctagcctggagactgcaggttggggcaggggctcaggggtcagcgcctcccactgaatgctccctgctagtcctagtccagagtctggtgcttaggcctrcatggccaggacccctgcagccccaattctcaggggaccccaggcttgctgggctgtgactgcctatagaccctatgcttgtcattttgttggagagaca

SEQ ID NO: 319825 - DNA, 201 bp, Homo sapiens; identical to SEQ ID NO: 319807

SEQ ID NO: 319826 - DNA, 201 bp, Homo sapiens
ttttatttttagtttacagttgttagccctgatgtggaccatttccatcctatctaggtttaccaagattcaaaacacgaagctgaccatgaagcgggacsgcattgggtcagtgcggtaccaggtcttggaggtgtctcggcaaccactcttcaccaatatcacagtggacattgggcggcctccgtcgtggccccctcg

SEQ ID NO: 319827 - DNA, 201 bp, Homo sapiens
caccgcccgactgcaccccagcccagacggtggcggtcatcatcccctttagacaccgggaacaccacctgcgctactggctccactatctacaccccatyttgaggcggcagcggctgcgctacggcgtctatgtcatcaaccaggtgcccatgcgggggtccatgtgcctgttggtgtatatatgtgggttgggggcgt

SEQ ID NO: 319828 - DNA, 201 bp, Homo sapiens
taaagaacgaggaacagagaaaatggcacaggcgtggggagtaaaaatgatgcatctgattgcgcttgaagtgcctgtgggatgcctggtctcaggcttaraaaggtctgagctgacctcacaccgtggctcatgtctgtaatcccagcactttgggagactgaggcaggcagatcacttgaggttaggagctcgagacca

SEQ ID NO: 319829 - DNA, 201 bp, Homo sapiens
agctaatattctgcttttccacgtgccccattcaggtttagccactcagctgtgcaaaatcttattcccaatttagggtcaccatgtgctctgacctctayctggagtgctttgcccctgcccttagctcagtgtcacatatgccctcttgtctctcttagcactccgatgttttctctgttacctgcctcccctagagaa

SEQ ID NO: 319830 - DNA, 201 bp, Homo sapiens
ccgcccaaacgcacccctcagcctggccgccagcctgacccagaacccctgcgccggagggagggtgggaatgtctgcacgtgggtctgggtgtgagctgyctgagagtctggatgtatggctgtggaagtccaggagcagtggccttgtttgtgagtgtgggacttagtgtgttactgtcacccgggtgtgtctgtgact

SEQ ID NO: 319831 - DNA, 201 bp, Homo sapiens; identical to SEQ ID NO: 319805

SEQ ID NO: 319832 - DNA, 201 bp, Homo sapiens; identical to SEQ ID NO: 67023

SEQ ID NO: 319833 - DNA, 201 bp, Homo sapiens
ccgggaacaccacctgcgctactggctccactatctacaccccatcttgaggcggcagcggctgcgctacggcgtctatgtcatcaaccaggtgcccatgygggggtccatgtgcctgttggtgtatatatgtgggttgggggcgtttgtgggtccttgtctgcccgtgtggatatgtggatggacctgggcgtgggtagt

SEQ ID NO: 319834 - DNA, 201 bp, Homo sapiens
cacatgggggtctataggtaaacatgtctccatgcttaggtacaaaccagtgtggttagagttcacgtgtctgtgttcctgggaatgcgtgagtgtgtgtrtagagttgtgcaataagggtgagtgcctgagtgtgtgtgtcagtgaggtggaggaaggtaaatgtatgtggcttagtagtggggtgtgcttgaggatgtg

SEQ ID NO: 319835 - DNA, 201 bp, Homo sapiens
atggctcctggaaggactaaatgaagtcatgagtataaagtgctcctgcatggtaggtgcacagtattccgtctcttccctcttccccaagccatgagttstgggttaaggatgctgccatgtgaggtgtctgttctcaggggcacaggggcacatgggggtctataggtaaacatgtctccatgcttaggtacaaaccag

SEQ ID NO: 319836 - DNA, 201 bp, Homo sapiens
gctgctgctccctcatgtcccaggggccttctggaggaggagtgtcacaccttggagagggagatcctcatcctgcaggtgagccgcagccctgggccctyccccgagcctcactgctgagcgtagactctcacctgggtgagacccatgtacctgtgtgcatacataggtgcatgtacaggctatgtgagtcctgcatcc

SEQ ID NO: 319837 - DNA, 201 bp, Homo sapiens
ttcagccgcttcagtgcccgaggccctgcccatgccctccacccagctgctagcagcagcagcagcagcagcaactgctcccggcccaacgccaccgcctytagctccgggctccctgaggtccccagtgccctgcccggtcccacggctcccacgctgccaccctgtcctgactcgccacctggtcttggtgagcctgga

SEQ ID NO: 319838 - DNA, 201 bp, Homo sapiens; identical to SEQ ID NO: 319798

SEQ ID NO: 319839 - DNA, 201 bp, Homo sapiens; identical to SEQ ID NO: 67017

SEQ ID NO: 319840 - DNA, 201 bp, Homo sapiens
aatcccagcactttgggagactgaggcaggcagatcacttgaggttaggagctcgagaccagcctggccgacatagtgaaaccttgtctctaccaaaaatmcaaaaaaaaaaaaaaaaaaagacggggcacggtggctcatgcctgtaatccctgcactttgggaggccaatgtgggcagatcacctgaggtcagtagttc

SEQ ID NO: 319841 - DNA, 201 bp, Homo sapiens
tcttggcgagctctcgccaggaccccaaggctgttggtctgtctggcccttgccccacccccttgccagatccctggtgtctggagctgagtggccgggcrtcggtcccaagcatcaaagcctttggcctttctcctcccaggcctccacaaaggcctggcagacagaggtctcattccagcctgactcttgtcccctggg

SEQ ID NO: 319842 - DNA, 201 bp, Homo sapiens; identical to SEQ ID NO: 67025

SEQ ID NO: 319843 - DNA, 201 bp, Homo sapiens
ggttggtgcctgggagaagcatgaggcactggggaggcacagggagctgatgaaaaagtggttctgatgaaaactatggtcagcaggaaacaggtaagagmccaagaggagaggggcttcagggcatctggggaggagtggagctccacagtacacgccaggagccttggtcctgtttcaggagtagcctgcctgagtgcc

SEQ ID NO: 319844 - DNA, 201 bp, Homo sapiens
gcccctcaggactgctggcacccctgatcgttgtcccccaacccccagcccagcctcagcccaatatctctgacctctggcctgattcctagaggtgaccrgaatttaatgtcagggcctaaatagtcattgagtagattgcattcctattggtgccctcgaagacctcacttgtgcacctgtgggacccctgccggggca

SEQ ID NO: 319845 - DNA, 201 bp, Homo sapiens
agctgctacagaaaaagaaaatcctcgcggcagttagagcatagtctcttctttaagtgcagaggtgcaagacttaacccttgcctggcatggccttagakcctatttataattaggtatcttattgacacaaacaatgcattctgtcagtcttgtgatctctgctttgacgttaatgctggtcatttgttgtgtctaagc

SEQ ID NO: 319846 - DNA, 201 bp, Homo sapiens
agagcctccagccaaagccttaacaggcactttgagggagggaggagtgagataggaattttagttgaatggattggtcaacaggttactggaggagctaygaatatttacggaaggggtcctgacatatgcatatcgaacaaacatgcatgttatataccatccatgttcaccttggggtggagacttaatatttaaata

SEQ ID NO: 319847 - DNA, 201 bp, Homo sapiens
tggacctggtccccatggatgaccgcaacctataccgctgcggcgaccaaccccgccactttgccattgccatggacaagtttggcttccggtgagggctstcttctcagctggacccagccctcctgcccccaccagacgcaggcccacttccagcccccgagccccgcttgctcctggctgtggcccagaccccactgg

SEQ ID NO: 319848 - DNA, 201 bp, Homo sapiens
agcatgtttatgagccatgtgggagagacacagggctcctggctggtgagaggtcagaaggagtgctgctgagctgggaggaaagcgatggtctctccaarggctgggggaagaggaggtgcaggagagggagagaagagagctggcagggctgggcaggtcagggttcccgaggggagcagctcccacctcttctggcag

SEQ ID NO: 319849 - DNA, 201 bp, Homo sapiens
gtggaggaaggtaaatgtatgtggcttagtagtggggtgtgcttgaggatgtgagtactgagttgccgggaactgtgcctgggtgtctgtttggaggtaarttcttgagtctgtgagtgtgaaagggtatgagcaggtcagtgtgaggtgtggcccacgagtgtgagcagctgagtgggaggtaggtgggcagccttgcct

SEQ ID NO: 319850 - DNA, 201 bp, Homo sapiens; identical to SEQ ID NO: 67020

SEQ ID NO: 319851 - DNA, 201 bp, Homo sapiens
gtgtctaagctgcaaaagggcgtgggcataacatggcatgtttgacgtcccttcccatcatagctggaaaccctgtttttaaggttccctggggtcccctyggccaaaagggggtccatttagttggttggggggtgtaggattttatttttagtttacagttgttagccctgatgtggaccatttccatcctatctaggt

SEQ ID NO: 319852 - DNA, 201 bp, Homo sapiens
tgactacaactaccacaatccccagcgcctgcggttccagcgtcgccttgctctagacgggcggcggcgctgcgcggggaaccggcgtggggtcacgtggyaccggcgcatcacgtgggcgagttaggtgacgctgcggggcgggcggacagactgcgggacggacggtggacgctgggacgcgtttgtagctccggcccc

SEQ ID NO: 319853 - DNA, 201 bp, Homo sapiens
tatatggtttgtgcagtatgctgctttcctaaaatctgaacactttgggattctaatactatctagtttgagggggctcagataagaaattttgaactttrtgttactctttttacagatgaggaaattaaggctcagcaagatttaagtaggttgcccaaagttacatagtgggaaaaacagtggagcccggattagcac

SEQ ID NO: 319854 - DNA, 201 bp, Homo sapiens
agtcatctctgaagagctcaattcctgctgcaccttctccctcttcctcacttcccttcccttcagacttcgtctcctcctccccaagcctgtcccctccstgcccattccaagaagagtaagacttgcctgttctttcaccccagctcagcatcacttcaccctccttctctcgcctttgcccccatctcctctccaggc

SEQ ID NO: 319855 - DNA, 201 bp, Homo sapiens
gcctcccagatagctgggactacagtctctgtatagcaggagaaaggcagtctacaaagcaatctacaaaataatataggaaaaggaaaatcagtttcaakgtataccataaggttaattatctctgtgttgtacagttatgggtatttttattttttatgtgtgcttgtctgtattttttccaaaattaacacgatacag

SEQ ID NO: 319856 - DNA, 201 bp, Homo sapiens
tctaggtttcagcaacaagactgccaggtggttgggttctgcctttagcctggaccaaagggaagtgaggcccaaggagcttacccaagctgtggcagccrtcccaggccacccccatggaagcaataaagctcttccctgagcctggcctctttttgccttctctgactttcctggaagaaacaggaacctaaagcctta

SEQ ID NO: 319857 - DNA, 201 bp, Homo sapiens
ggagtggaagccagattgcagtagtgaacagtgagtagacggcacctacatctgtggttagagaccacagatgttgctcgtggtaagggatctctcaggaygcttggaagagaagggagtagagagactgggcagtagctagaggatgacgtggcttcatacgggaatctgtcacacagcagagaagtccaggctggaagt

SEQ ID NO: 319858 - DNA, 201 bp, Homo sapiens
aaatagaacatgaagaaattgcattcagagagtattggagattaatattttcaaagtgatgaagagtttcagaatgtggctgtgggactgagtgcctgacrtggagtgaagatgagagggtcactggagtcaagtaagtcatcttcgaggccagagttgtagtaggcattgaagtttctgaaaataattgagcaagaattg

SEQ ID NO: 319859 - DNA, 201 bp, Homo sapiens
ctcttgccctgggcttccgcaactcctaagcaatcccgccccttgaatgcagcaaagaacgagtaagaaccttcaaaggaaacattaatgacccaaagccraaatcacccaatggcaaccagggggcaaagaggtcaggagattgcccgggttactggccaaactccaggagccaatatgcctgaaacctgctacctgctt

SEQ ID NO: 319860 - DNA, 201 bp, Homo sapiens
taagcatatgaaaagatgtttgcattatatgtcattaaggaaatgcaaattaaaacaacagtgaaatactatcacacctattagaatgactaaaaaaaaamcaaaaaacctgacagtctcaaatgctgacaaggatgtggagcagtaggaacgctcattcactgctggtgggaatggtttggccactttggagcacagttt

SEQ ID NO: 319861 - DNA, 201 bp, Homo sapiens
ttccactggcagacacagataacccacgcacataaagtgtcacgccatttttagagcacctaccgtgtgccagacactgtatttcattacttcatttagcytttacaatgggagccgatcataattccaaaagacacaatcatgaacaccatagtcccaaatgctgaaatcctaaaagatcagccaggcgcagtggctcac

SEQ ID NO: 319862 - DNA, 201 bp, Homo sapiens
aagaagaaaaatcatataatcatatccatagatgtaaaaaaaccatttgatacaatccaatacctattcatgatttttaaaaaaactatcagcaaactatragtagaggggaacttcttcaatttgatcaaaaaacctatagctaacatcttgcttaatgagacactggattcttttcccctaagattgagataaaaccaa

SEQ ID NO: 319863 - DNA, 201 bp, Homo sapiens
agagctcaggccattcatcttctaatacccaagcctcttgctagaggaggatggtgacagacggccctctgcctacagtgagaagctgattgttctttccrgaggtttagagaagagttgggagtgggaacagcttcctttgcctttagggtctcagtgcaatttggtttaactccacagctctttcccaagcaaggccaa

SEQ ID NO: 319864 - DNA, 201 bp, Homo sapiens
tggtattggatgaaggctggagacaccccatccactgtccagaggacggagccctggggtctggagaggacaggacatgtgagaggcagagcctcccatcyccatccctcaggccctgccctcttgcctctgccagcctcccccactgcgcctcagcaggccacagaagcccctgggaactgccttccaaccccgtttgct

SEQ ID NO: 319865 - DNA, 201 bp, Homo sapiens
aaaacatcaaatatattaatttacttagattttatatacttggcacaagaaatatgcattacccttttacatggggtggtagtgggagtgcactgactcakttgctgggacccaactcagagctcccaagtgttgacatcttcctagcaagagtgatgggggagggagcaggattccaagttttctgcctctttcaagttc

SEQ ID NO: 319866 - DNA, 201 bp, Homo sapiens
actgtcgctgtgtcgggctcccagttctccagtgcagggctccctgggatcgtgacctaaaacagggctccttccccagggtcccaacatgactctcagcygctgctggccgagtaagaaccgagggcagtaagacctcagcgcagtgagccacgaagggcagaggcagaggtggcctgctccaaggaggaggccctgccc

SEQ ID NO: 319867 - DNA, 201 bp, Homo sapiens
gtatggaagcctagctggccctcctgggagtggctcaggcctgagtgtagctgaggggatggaaaagcccaccctgcttggaatctgcaggcttggcagaytctgcccccttgtggccacaggaagccatgacccaggccccatgttttcagagggcccattagctcccaccatcccccggctctgtggtcatcgagggac

SEQ ID NO: 319868 - DNA, 201 bp, Homo sapiens
agaaaaggacttgataaagctctttttgatgtgttaattttgagatgatctacaaaaactattaaatcttaccttttttaactttttaagaaattagtttsagttcaaatatttttgaaatataaaaattgtatttttaaagctataattcttatagacattcagtggttaaaaatttgattgtgcttattaaaaatggtc

SEQ ID NO: 319869 - DNA, 201 bp, Homo sapiens
aggataattttttaaattttttgtagagacagggtttcgccatgttgctcaggctgatctcaaactcctgggctcaagcaatccgcccgcctcggcctccyaaagtactgggattacaggcatgagccactgcgcccagcttagaatttctcttcactttatttttgactgagcctatagttgaacagggagatatctgtc

SEQ ID NO: 319870 - DNA, 201 bp, Homo sapiens
gaattgcagtaagaatataaggaagtaaaggacagtgaaaagacggtcaaaccaatggcttgatgatttcagtgtgttgaggattgtacgagtttagctaygacagcaggtgagctatagatacatggaggcagtcagggagtgagcttgagactgacattagagagggctttagttattagcagcgacctagtttaacat

SEQ ID NO: 319871 - DNA, 201 bp, Homo sapiens
gtgggctaccttaggcacatcacctaacctccttagatttagtgtcattgatacagtggatgagtagtgctgtgcatctttcagggtttttttaaaattarataagatgaaatctagaagcatctagcatagagaacttaactatgttctcagtctatagcaaatagtaatgttatgttattttatttttttatcactggt

SEQ ID NO: 319872 - DNA, 201 bp, Homo sapiens
caggaatggaagttagagaggggctgccatttgagattgggaaagaccttcatgggaaggtgacatttaagtaaaaacctaaaggaaatcagggaaggccmtgctgatatcttggggaagagccttccaggcagaggaaacagccagtgcaaaagctctgaggtgggatccaaatgcaggaaagatgcctgtgttaaagaa

SEQ ID NO: 319873 - DNA, 201 bp, Homo sapiens
ttaaaaatatatacaccggaggaaaaaatgagttccctttgcaaagagatgcacctaactagccgaagtgttagaggagagctggctgaatcattcaaggmatagaaagagcagctacagaaagaaaatccaaagccaaaggcctgataaaagagagagacgaagtggaaagtgtttgaggctgagcatggtggctcacgc

SEQ ID NO: 319874 - DNA, 201 bp, Homo sapiens
aaagaaaaggtgaagaaaagccacaggatagtcttagaagaggtaaagagaggcctttgttagtcatatggaactagataaaattggatctggtctttaarccaaccagaatagaccagagatttaaatgtaaaacatgaaaacacacaagtactaaaaaagtatggatgaatttctctataacctggggatgagaaaaac

SEQ ID NO: 319875 - DNA, 201 bp, Homo sapiens
tgaagtatagatgaaagagcagcctcctttgcagagggctgtaaaaatggcgttttcccgagagacccaggtttctatgaaagcaaaaatggaaggaacaktcaccgaagagtttgaggatataaaggaacacagttttatgccacataattgaaagttagaatgtggactgtgccaggggagaagtaggaaattggacca

SEQ ID NO: 319876 - DNA, 201 bp, Homo sapiens
ctgcggttcccccagtatgggtaatgcccatgccactgccttgctcctcacttctgcagctcctggaaatcccagcatctacctgttgcttctgttggccragggcctgtcaaccctccaggcagatcttctggaaaggacctgaaacgagcccacaacagctccttcatgcattagtttttgccacagattctgggagtg

SEQ ID NO: 319877 - DNA, 201 bp, Homo sapiens
ttgtgagtgttctgatgacccctttccattttaggggcctcttctctgcggttcccccagtatgggtaatgcccatgccactgccttgctcctcacttctgcagctcctggaaatcccagcatctacctgttgcttctgttggccgagggcctgtcaaccctccaggcagatcttctggaaaggacctgaaacgagcccac

SEQ ID NO: 319878 - DNA, 201 bp, Homo sapiens
gaacagctcaacaatggctgatgggcgctcctggtgttgatagagatggaacttggacttggaggcctctccacgctgtcccactgcccctggcctaggcrgcaggtgagtggttctcccagtgactcctacctggtactgaggaaaggcggcttgactggtgagggagagcagggcttggcttgggcagcggttaggtgt

SEQ ID NO: 319879 - DNA, 201 bp, Homo sapiens
ttgaacccgggaggtggcggttgcagtgagctgagatcacgccactgcactccagcccaggcgacagtgtgagactccatctcaaaaaaaaaaaaaaaaaagtggagctcaggagagaaggctgagcaggaatgagagatttggtttgggcgcaatggaaagataattgggcaggctgaactgagtgttgagcaaggtgag

SEQ ID NO: 319880 - DNA, 201 bp, Homo sapiens
agtcccagttactcgggctgaggtgggaggatcacttgggcccagcagtttgaatccagcctgggcagcatagcaagatcccacctcaaaaaaaaaaaaaaggaatgtgcattcaccatttgttggatgtaaggttctctgtatgtctgttagtttaaatttagtaattgttctgttcaaatcttctgaattctcacagac

SEQ ID NO: 319881 - DNA, 201 bp, Homo sapiens
ctcccgggttcaaatgattctcctgcctcagcctcccaagtagctgggactacaggcacgtgccaccacacctggctaatttttgtatttttagtagagayggggtttcactgtattggccaggctggtcttgaactcctgaccttgtgatccgcccgcgttggcctcccaaaatgctggaattacaggcatgagccacca

SEQ ID NO: 319882 - DNA, 201 bp, Homo sapiens
tgccagtgaatgccagggagactgctggcctgttgagggcagttaattcattttgccgtccttagatatggtagattgatgattcacaaaacagccatgarggtcaggcagttgtagtagagtggacaagaggaaagacattcagagaatatgatcacagccaccactatttactgagggtctgcctgttttactgtgtgc

SEQ ID NO: 319883 - DNA, 201 bp, Homo sapiens
gcacctctagtcccagcagcattgcgcctttagtccaaactactcaggaggctgagatgggagggtcacctgagcccaggaggtcaagagtgggacgatcygagtttgcaccactgcactccagcctgggtgacagagtgagaccctgtgtcaaacaaacaaacaaacaaacaaaccaaaaagaactatgatgagcaaaat

SEQ ID NO: 319884 - DNA, 201 bp, Homo sapiens
tccaattaccacatttatacaggaaggaagacagttgtataccaacataggactggctgccctagaatgcataggaaatacctggcattgaacttggtccwtcacaaaacaggtgttcagctggtgttttgtggtttatgtatttagttacgttctttgaagcagttgaattgtgttcttttccaagggtggtctgtccct

SEQ ID NO: 319885 - DNA, 201 bp, Homo sapiens
acactccattgcatgtttacatgcacaccccatatattcaaatacagacctcttccaggagaggagtaccacactgtactgtgtactcatgccaaaatgcwtgtaggtggacacactccttctcttccctgtttacagtgcaggacacacagatcagcacacctgccccaaattcacccagacccagtggagcctggctct

SEQ ID NO: 319886 - DNA, 201 bp, Homo sapiens
taggaagtaatacttatgtgctatactaggacaaataggagaggacttggagttgtctacatagggcattgtgaaaacatttgtgatttttttttttttttaatattacagaactgtgatgaacaggccaggtatggtggctcacacctgtaatcccagcactttgggaggccaaagcaggaggatcagttgagcccagga

SEQ ID NO: 319887 - DNA, 201 bp, Homo sapiens
taaccagtccttctctaaaaaagtatgtcttcagtttttcttagcatgcctccttccttcaaactatttgcttatttacttgcacactgtcaatctccccyactaaaatgtaggcttcattttggccaaggacttggtctgttttgttcatcactgtatcgccggtatttagaatgcgtctggcacataataggtgctaag

SEQ ID NO: 319888 - DNA, 201 bp, Homo sapiens
ctgtttttaaaagcaggggttggaggagtcagtcttctcaatgagaggagataaatgtgagaaatgctgataaagaagtagaattggccaggcatgatggytcgtgcctgtaatcccaacattttgggaggtcaaagcaggaggatcacttgaggccaggaatttgaaagcagcctgggcaatatggcaagatgctcatct

SEQ ID NO: 319889 - DNA, 201 bp, Homo sapiens
tggatgctatattatttgtcccacaggtcactgatgctctgggtttttgtttttcaatcttctttctctctctgcttcattttggatagtttatattgctrtgtcttcacatttatagctttttcttttgtagcatttaatcacttgttaatcccaccatgtatattattatgtcaaatactgtgtttttaatctctgtag

SEQ ID NO: 319890 - DNA, 201 bp, Homo sapiens
tgaggccaggtttggacccctgaaccttcacaggacaagcacacttcaggactgattggaactgatgggagtcaatacccagaatggattttacctccaasttgtaaaatatcactcagataacatcacctttgaaagaaagcaagaatatttactagcttatttcttagttgaataaacatattgaccactttgtatgta

SEQ ID NO: 319891 - DNA, 201 bp, Homo sapiens
tgccgaatccagcatttagtcctgtggccacaccttactggacctccacagtgtgtgacgcagttggtctctgcgtccttcctaagacacttcgttgaccrcagcctcacactctcctgctctttcagcctcctgcagtgctactcctcatctcccaaatgctgatccttcagacacacgtcagccagggcaccctcccac

SEQ ID NO: 319892 - DNA, 201 bp, Homo sapiens
gggcagtcagctcctcagaattccattcccaatcttcttcaggggaatgtgatctctcgcctggaaaactcttaggatgcttttcttattcctcctctgcrgagactctttgtgtgagcactcattttcctagggtgaggccaggtttggacccctgaaccttcacaggacaagcacacttcaggactgattggaactgat

SEQ ID NO: 319893 - DNA, 201 bp, Homo sapiens
ttacacaaaacatgaatatgtcaccaacttcctctgaaaatttctgccctctcacttgcctcttctgaagtttaaaaatgtgtgatcgtaagagcattccrctaccattggaaataatatttgcaaagactttgactctttccagtagactgtcacctgtttgatgcttacccttatcactttatttttatcttaagtgct

SEQ ID NO: 319894 - DNA, 201 bp, Homo sapiens
agctggagcctgggatgactgaagtaaaaatgacatatttgctagcctgagagggagaagtctggatattcttgctctgttccttgcaaagcaaacttctyaatttgttgaatactaagttttcccgttagctgtcaaagtggtttataactaaaataatcttacgtcctttagaataaatcacaaataatgaatggccaa

SEQ ID NO: 319895 - DNA, 201 bp, Homo sapiens
tgaacaaagtcatgtgcagcaaggctgtgctgtactttggtctggaattcagtttggtcacttgtatggcaggccacatggctgcctctggcctgggagcyaggaacagctggagcctgggatgactgaagtaaaaatgacatatttgctagcctgagagggagaagtctggatattcttgctctgttccttgcaaagcaa

SEQ ID NO: 319896 - DNA, 201 bp, Homo sapiens
agtttttcttaatggtcttttaaaatctcagccaattgaagaacttcctatacattatattgactaatttatctcttccttatctataattgaaataaatrtatgtgtaaagatgtaagatttgtcttttctatgctgccaaactccaggagacctgagggtggaacttgagaagtctggaggaatgggcagagaccaaat

SEQ ID NO: 319897 - DNA, 201 bp, Homo sapiens
ctggtggcaggttcacctcacacagccatccagaaggtagaggcctggatggtgctggaaggtgaggtgaggccgctcagactgcagacagcttcaatgtmgcaagagacatgaagagtattaactataggcaaggccttctgggaactgaagaaaaaccaaacctcaaggcctcatggaaagatgatccatgggatagct

SEQ ID NO: 319898 - DNA, 201 bp, Homo sapiens
gatgccacatatgttttatttacttgtttattgtctgtctccatctactagagtgtttcttctgttttgttccctactattttctaacaccaaaaccagtrtctactgtattacttagtgatcaattaataaatatttgttgcatggataaatggtggacaactctgtgaagtagatggtatttaaatgcattttaacaaa

SEQ ID NO: 319899 - DNA, 201 bp, Homo sapiens
cctgtttctagagcagctgtactaaaacttttcccatcccctgagctccaaaccttatataccatcttactctcagtttcagcagcacatgcctagttccrtattcattccacctgcttgagtcgtacacacaggggtttgtaagcagtgccacccttacactgcccccaccccccgcagtcttagagggcagcagctggt

SEQ ID NO: 319900 - DNA, 201 bp, Homo sapiens
taatttgtttagggtaatgacttacagctgcatctatcaacatcatttttcatagaagtagagaaaaccattctaaaatgtatacgaaaccaaaaaagagscagaatagccaaagcaattctaagcaaaaagaacagagctggaggtatcacattactagacttcaaactctactataaggatatagtaactaaacatgat

SEQ ID NO: 319901 - DNA, 201 bp, Homo sapiens
tcttggagagctgtgtctctggagggtgggggtgggagctggttgacatgaggctgaatctcaggccaggacctgtggtttgtgcatgtgaactgttcccrggagagcctgtgatgggaagacgataggcttgaagctagggggagacatggccatggagtgaagtgggtgtctgcagagaggcaaagtggaatgtttgca

SEQ ID NO: 319902 - DNA, 201 bp, Homo sapiens
acaggcagttagcagggctgttcaccagcttctgtctctcagaccaccctccctgtagccaaatccacctggaagggcagttgccttatgcttccctagamcttgttatggtccgcatgtggtatctgagagctccaggcaaggactcatgccctaaagaagagccacaaagtctagaaggagcatttaccccagagtcag

SEQ ID NO: 319903 - DNA, 201 bp, Homo sapiens
agaaacacacagaggccacattcaggaccccagagatagcaaacaagcagataggtctccccttagtctgtgacttggatgctcttcattgaagaaaagasagatggaataggtttaggggaagataatgggctccttttttgatgtgttgagcctaggtgccagtaggagatcttggacaagatactccaggtgcagttg

SEQ ID NO: 319904 - DNA, 201 bp, Homo sapiens
ctccagctctctgccacccagttcttagcaaacacatggttgtgagaaaaaaatatcgatgaaagagtgtctgaagatttgtgattcattcatttttctgyacattgttattcagcaaatattgagtgccaggtgtagcagtgaataaagcagatttggtgtctgcctttatgaaacttacaacctagcagtgggaacaga

SEQ ID NO: 319905 - DNA, 201 bp, Homo sapiens
gattccttgctctggaaaggcaaaaaagggtaaaacaatttcatgtgcatgtgtgtgtctgtgtgtgtctgtgtgtgtgtgtgtgtgtgtgtgtgtgtgtycgcgcgcgcgcgcgtccgcgcgtccgcgtgcgctttttttttagtggtataggagaagattgagaagcttctgatcctgccatgtagctgtaaaaacaag

SEQ ID NO: 319906 - DNA, 201 bp, Homo sapiens
tggtcttgttctgccacccaggctggagtgcagtggtgcaattatagttcactgcaacctcaaagtcctgggctcaggcaatcctcccacctcagtctccygggtagctaggactacagaagtgtgcctctatacctggctaatgtttttaaattttttgtagagacagggttttgctatattgcccaggctggtcttgaa

SEQ ID NO: 319907 - DNA, 201 bp, Homo sapiens
gatgctcctcataatgcctcacacccaaaagatggtattttcttcaatggtcatgtcccactgaccataagcctattcttgacatgctcttgccaagctcrctcccttcccactcagcacgtatgatggaatgtgtgggtccaaaccaagcgtggcaaggtagctgtcattctggagtattttggatcctctttgttctcc

SEQ ID NO: 319908 - DNA, 201 bp, Homo sapiens
aaattataagtggttagtgtttatttacaaaaatattctcactgttttttaaagaaatacaaagtataaaagaatgatggtacgtaattgttattttattyttccatattggcagtacctttcatgctggcaaagagtttagaattataatgccctgtacatgcataagtaaaccattatttttatataatataagtgggt

SEQ ID NO: 319909 - DNA, 201 bp, Homo sapiens
aagagcatcgcttgaacccaggaggcggatattgcagtgagccgagatcatgccactgcactccagtctgggtgacagagtgagactccatctcaaacaarcaaaccagccagaggcagagatacctggggtgaaggatggggaaacgggcccagggcttccatgctgtctccaggcatgccactctccagcacctccacg

SEQ ID NO: 319910 - DNA, 201 bp, Homo sapiens
gcagtcagccgccccacgcagggaccggcttacccctcgctccccgccctcactcactttctcccgccctcggcccggcctcccagctctctacttcgcgwgtctacaaactcaactcccggtttccgtgcctctccaccgctcgagttctctactctccatatccgaggggcccctcccagcatctacccccctcccaac

SEQ ID NO: 319911 - DNA, 201 bp, Homo sapiens
gaaaatccacatggtggaggctgtcaccccaagctgctcctgtctcttgcagcccacaggcatttacggagcacctgctgtgtacttggctgagagctagsggtgccacaaagtctgctggggaactgggcaataacattagcatgtgttaagtgctaaaaggtcagtgtgacttaccatggtgactgtcccaaatctttc

SEQ ID NO: 319912 - DNA, 201 bp, Homo sapiens
tcaaaaaaaaaaaaaagatttttacatgtttaaagggttgctaagcaaaacaaaacaaaaaaacagaaggatatgtgacagagactgtggcctacaacgcytaaaatatttactgtccacttacagagaaagtttttcaacccccaactgaaatctcctatttcaaactggaaggctagttccttccctcccaatttccac

SEQ ID NO: 319913 - DNA, 201 bp, Homo sapiens
gatttcacacttaattgatagtcttgctgcgtatagaattctaggttggaaaccattttccctcagtattttgaagatactgcccccattgtattctaggmttttggtgttcctcttgaggagtcttaatgctattctgatttttaattatttatataaaacctgtttgtagttgttctctctggaaatttgaaatttcat

SEQ ID NO: 319914 - DNA, 201 bp, Homo sapiens
gtcttgaagtccctgtcaccatcctcttgtggtatatctcatttcctgggccccatatttttttacttcttcatttaatggaacacatcttgtactgattycctgagaaaggatacatgagaggtaattttttgagaacatacctgaaaatgtctttattctgatttcacacttaattgatagtcttgctgcgtatagaat

SEQ ID NO: 319915 - DNA, 201 bp, Homo sapiens
gaacctcaaaccatgagttcagtttaaggtattccagactggcagtgcctccaagcacctggcagaaataaatgcagactttccatagaggaagacatacrcattcctcacaaataacttttcaaggaaatgagcagctcacagtaaaaaataactaaacacacaaggaaacaagcttctgttgaagcttgttctcatggt

SEQ ID NO: 319916 - DNA, 201 bp, Homo sapiens
gacatgttagattgtctatcagcttcattttcttgaagaactctctttgggagcctctgacatgctctctttggatggtttgctctctgtgtagctgcacrtctgtggtcttgaagtccctgtcaccatcctcttgtggtatatctcatttcctgggccccatatttttttacttcttcatttaatggaacacatcttgta

SEQ ID NO: 319917 - DNA, 201 bp, Homo sapiens
tctgaaattctggttaaattttagaccttctcattatattaacttattttccatattttttatcttttaatcactttcacattaactggaaccccaaaggrctcagcataaggataaactagaactattaataaacctacacccccaaagcaggctgcaagaacaattaccaaagtgctgagtatgtcatggcagtagaac

SEQ ID NO: 319918 - DNA, 201 bp, Homo sapiens
cagaacttaaaagctgatgggaaaaataaaaagccttttcatagcactttggatctgggtccaaacaaggtccacacatttggggtttttttaaacttatytttcattctagattaattcttttcaatcatatttagacaaagaaaacaattacaaaataatatgagtatttagtaagatattcaataggatatgatcaaa

SEQ ID NO: 319919 - DNA, 201 bp, Homo sapiens
ccataaaaaggaatgagatcatgtcctctgcagggacatggttggagctggaagccattatcctcagaaagctgatacaggaacagaaaaccaaaaaccgyatgttctcatttacaagtgggagctgaaccatgagaacacatggacacatggtgagaacaacacatactggggcctggtgcggggaaggagagcatcagg

SEQ ID NO: 319920 - DNA, 201 bp, Homo sapiens
gacatttgagtttgcaaccatgagggaaacattctctggcctctctggaaggaatccgcctaagtatggattaattgtctaagggagtcttagctcaggtytgaggagcacggcatgagagttcccccagggttttcaccatacagggaaaaagtaacaggtatttggcaagctgaggcttcctttttatggaatggtaag

SEQ ID NO: 319921 - DNA, 201 bp, Homo sapiens
aacaagcaatggggaatgatgctgggagaactggctagccatatgcagaaaattgaaactggaccccttccttacacattatacaaaaattaactcaagayggattaaagacttaaatgcaaaacccaaaactataaaaatgctagaagaaaatctaggcaataccattcaggacataggcacaggaaaagatttcgggat

SEQ ID NO: 319922 - DNA, 201 bp, Homo sapiens
ttttactatacagaaaatatatgggaggaaaaacagtgaattgaaaagaaaagacattgcaacaggatttgttttttaatgcaactaaaatgagtagtgtragccgctgtataagagtattacattctcctacttccctcatttgtgttatgctcttgcttggcccctgacatttgagtttgcaaccatgagggaaacatt

SEQ ID NO: 319923 - DNA, 201 bp, Homo sapiens
ttttcttgaatccatttgccaatgtttataaacttagaaattttaccttaaaaatccagattcctggcttgaaaaaaatctgaagatgtggtaatgcgggscctgcgttgctgcctggcacagttagcaggagctggtgggagccgcccttcagcagggcacacactctccagatggactcagttccctctgggctctgac

SEQ ID NO: 319924 - DNA, 201 bp, Homo sapiens
tattcatgttcctatttctcctctaagagctggaataaaaaatccagtggaggaaattacaaggaaatagtcattcaaatagccctgacagctccttgccmggattcacatgaataccacccaagtagcccttaagtcagaggaagagaggccaagggagagatatcaatgacttcttctgtcagtctatgaggattactg

SEQ ID NO: 319925 - DNA, 201 bp, Homo sapiens
atccttcagaggctggagtgagagacaggtacccatcctgccctgttcataacacagctccccacaaagacgttttttgaaatcctctttcccttcatctytagcaaccgattgctatttatatttgatgtagggaaggcctttagaattacgtgataagtattaagagatttcctttgaaaatccgcatcttagtctagc

SEQ ID NO: 319926 - DNA, 201 bp, Homo sapiens
tttaaaagcaggggttggaggagtcagtcttctcaatgagaggagataaatgtgagaaatgctgataaagaagtagaattggccaggcatgatggctcgtscctgtaatcccaacattttgggaggtcaaagcaggaggatcacttgaggccaggaatttgaaagcagcctgggcaatatggcaagatgctcatctctaaa

SEQ ID NO: 319927 - DNA, 201 bp, Homo sapiens
cagttgatgctgtgaataggattaaattcactgcagtactcagccctagatatctgctattttcccaagacagaagagagatagatgggtgcagtgacatytttggctgctgtgggagggggcttccagggctccttctgtagcctgtgattctcttacctggggccaaggacatgtcatgctcccttggcccccagtatg

SEQ ID NO: 319928 - DNA, 201 bp, Homo sapiens
tcccagttctttatatcatagccttctcaggattcataagtgccctgggttaggagggctgcagctgggttgaaggatgctcaggcacaccctcctgctgkacctggaagggctgtactccctcccgcccagatcctgctcctgccttggtctactctcaggtaacttactgtctcctctctctccagtccagccaccttc

SEQ ID NO: 319929 - DNA, 201 bp, Homo sapiens
agagacaaaactcatgtataataggaattgtgtttgtttgctttttgagacggaatcttgctctgtcacccaggctggagtggtgcagtggcacagtcccrgctcactgcatcctctgcctcctaggttcaaggaattctcttgcctcagcctcccgagtagctgagattgcaggcaccaagcaccccatccggctaattt

SEQ ID NO: 319930 - DNA, 201 bp, Homo sapiens
attaaaaactagagcttgtttcggtgttcataaatttttattcaggagttttgtctgggaaggcttcacataactcctgtcaaggctttttaatgatactstcttaaaaaatactcagttatcatcaaaaactcacacaaataactgacaaaaatataaaatcatttttatacttattcagatgtttacagcagttgaaat

SEQ ID NO: 319931 - DNA, 201 bp, Homo sapiens
agctttagtcccataggctggcactcaggactgaaaaatggcaaagtcattcctgggagaacccttcaaaactagcagtttgtttaaaccctgggcatacscaaagcagggcacctactgggcagttcttcctggaaaggagcagttaggaacagtatcttcctgacccttacccccttgagtctacatatctcttctggg

SEQ ID NO: 319932 - DNA, 201 bp, Homo sapiens
ctcacacctgtaatccctgcactataaggctgaggcaggccgatcacttgagccctgtagtttgaggccagcctgggcaacatgctgaaaccccatctctrctaaaaatagaaacaaaaaaatttagccacatgtggtggtgtgcacccatagtcccagctactcgagaggctgaggtgggaggatcccctaagcccaaga

SEQ ID NO: 319933 - DNA, 201 bp, Homo sapiens
ctcagggaaaaaaaacaaagaaagaaactgagtgggcagtgtggttactgtagcaacagagcaagcacaaggagctgtgtgtgctctgataagggcccctraccaaactgcaggcaggagaggcttcctagagatggggacacctgtgctgcctattggaggacagttagaaactggccaggtagagaatctagggaaggg

SEQ ID NO: 319934 - DNA, 201 bp, Homo sapiens
gagatactggaggtcaagtcctgttggggtgaaagcaatgccaggaacgctgatggtccagccctaccagtagaaagatctcattaacactttgttaacamccctggcgtccagctgagaccccagacaggccatgccttatgaataaagatcttacccaagagtaagatctaccgtagacccgccctaacaaggcctaaa

SEQ ID NO: 319935 - DNA, 201 bp, Homo sapiens
aagaggtcactgtgcacaaagaacactgatgacccagaggagggtttggtcagccctgtgtggctcagggaagacctcagagaggtagagatgctgcagtycagtcttgaggaatgagcagaagttcagcatgtgaatgataaggagacgagaaccccaggcagagggaacagtggtatagaggcatggaggcgttaaaga

SEQ ID NO: 319936 - DNA, 201 bp, Homo sapiens
gggttcacgccattctcctgcctcagcctcccgagtagctggggctacaggcgcccgccaccatgcccggctaattttaatttttttttttttttttttttagtagagatggggtttcactgtgttagccaggatggtctcgatctcttgacctcgtgatccgcccacctcggcctcccaaagtgctgggattgtaggcgt

SEQ ID NO: 319937 - DNA, 201 bp, Homo sapiens
acatcatagttagacttctgaaatctaaaaataaggagaggctgctgctggtgctgctgatgagctcatttggtgtggacatggtgcctctttagtgaagyagcaactgatatctctggtgttccctgtggcccatgaaatgccaagagaggtgtcaacacttaagagcaacgatcatactaatttgaaggtggtggggca

SEQ ID NO: 319938 - DNA, 201 bp, Homo sapiens
cattcttcctcacacattgctccacctgcctgggtggaactagagggcagagttacaagggtgcggggtggggagggtgccaggctgaagttcctctgccrttgatgggggctacttccctcctccagcctcagcattctctctccttatcttgaagggacagttacttatggttctcttctcttctgtgcctttgtctta

SEQ ID NO: 319939 - DNA, 201 bp, Homo sapiens
aataagccagacttggtggcacatgcctgtagtcctagctacgcaggaggctgaggtggaaggaatgcttgagcccaagagtttgaggttgtagtaaacamagatcacaccactgtactttagcctgggcaatagagcaagagcctatctcaaaaaaaaattatagttaaaattttaggtgtgataatgttttaagaaaag

SEQ ID NO: 319940 - DNA, 201 bp, Homo sapiens
atttttgtatttttagtagagacaaggtttcaccatgttggccaggctggtctcaaacccctgacatcaggtgatctgcctgccttggcctcccaaagtgktgggattacaggcgtgagccaccacaccaggcctcttacctgcttctaaagggagtacctggccagtgacaaagtatttttcagctttactcttctgttc

SEQ ID NO: 319941 - DNA, 201 bp, Homo sapiens
aggtgatctgcctgccttggcctcccaaagtgttgggattagaggcgtgaaccaccacgcccggctctatcattaaatcttttttttttttttttttttttgaggcagagtcttgctctgtcgcccaggctggagtgcagtggcgcgatcttggctcactgcaagctatccctccctggttcacgccattctcctgcctca

SEQ ID NO: 319942 - DNA, 201 bp, Homo sapiens
catgcctactacacaagagtcataaaatatttatgcaggatgaaggttagaatgaggtaagactggacggaaggatagttacgctggtgcaacatgtgagsggcatgtctgtgtgcttcctagggctagatgagcagcagaccaggatttcagtcatagcctggccagtttctattgtgtcaccttggataggcttcagaa

SEQ ID NO: 319943 - DNA, 201 bp, Homo sapiens
aagataaggactattttttaaattattacacctaaaaacatgaacagtaattccttaatatcatcaaatgtccagtcctctgctgaccttttaaccctcartgactcctagtgggtgctgttgaccctgacccatcaaattcgttactacttctccagaggagtgatgaggacgagggataagtaaagaggcaaacgagtt

SEQ ID NO: 319944 - DNA, 201 bp, Homo sapiens
tgcatccatagtaccatgcctactacacaagagtcataaaatatttatgcaggatgaaggttagaatgaggtaagactggacggaaggatagttacgctgstgcaacatgtgagcggcatgtctgtgtgcttcctagggctagatgagcagcagaccaggatttcagtcatagcctggccagtttctattgtgtcaccttg

SEQ ID NO: 319945 - DNA, 201 bp, Homo sapiens
agggttcaggagtgagaagctcattgtgggtctgggacagttctagaactgcctcaccatcaccgtggccccgaaagtcttccatccctgccatgcttcaygtgccttcttgctgctttgtccacagccagcgcccacttcagattgccctcacagcttttatcagcctcctggcttctacgtttacttatatctttggtc

SEQ ID NO: 319946 - DNA, 201 bp, Homo sapiens
tatccacagagccgtgctaacagcaccacaattacaaacatcaccacaattcattttaaacattttcattaccccaaaaagaaatcctgcagccatttgcygtcagggcccattttccctcagtcacccgtatccctagggcaaccactgatctgctttctgtcaccgtagatttgcatgtcctggacattccatataaat

SEQ ID NO: 319947 - DNA, 201 bp, Homo sapiens
gttcattcattaatttctcactcagcaaatacatattgagtgtctgctgtgtgtcaggtactgtgccaagtgaaagggattatggaaaagacattatgtgwcacctcaagttttcaatctagacagggaaaccaacattaaacacaggtaaaccttcagttacatccgcggtaagtaaaagcagggagcgtgagaatacca

SEQ ID NO: 319948 - DNA, 201 bp, Homo sapiens
aggtactttgccaagtacccaggatattatgtctggtgaagttcaatctctgagccagaagaaagttctgagccctgatctctatcagataatccagaacrtcctctcatggcctacaaggcccttcatattctgatctctgactgtctttacagctttatcttccaaagtaacaaagatagctatcattgattgagttta

SEQ ID NO: 319949 - DNA, 201 bp, Homo sapiens
aagcacttggagaacttagtggggagcatccctccagctaagaggaaataaattacaaggctctggagacaaatgtaacctggagttaatgtcagctccasaatcactgatcaaataggaaggtggcctggtttgatgaaaaggtattgcagtgcctagcagcaagagcagaaaggcagggcctccggagctgagaaatac

SEQ ID NO: 319950 - DNA, 201 bp, Homo sapiens
ctgcttcctcctctaccatccctcctgtgcctctgccattcatggtcagttctctcctgtcctggatgccatctcccttcaccttctcaggactgtcttcrttcctttgtctcctttctcacctctttgccgggtcctcctctcacatctatgaatgtatttggatctctttcaccttaaaaataaaagccctctctttag

SEQ ID NO: 319951 - DNA, 201 bp, Homo sapiens
tggtacatgcctgcagtcctagctactccaggtggctgaagcaggagactcacttgagcccaggtgttcaaggctgcagtcagatatgatcacactactgyactccagtctgggcaacagagcaagaccccatctctaaaaataaaaaataaatttttcaaaattaaaattgacagacttctggcaagactgattgtggag

SEQ ID NO: 319952 - DNA, 201 bp, Homo sapiens
ttagcagtggggcaaaattagtaatagtgcaaaattagccttagactagcctttaaaggatcaaactgtttccaagtgacttaattgtatctcaaaaatayttaaggaatgcacaggtatcctgtccccaacaaggtaaaattcacatggttggcagccaatcagaaattacaaggcaattcggaaaagcatgaaaataca

SEQ ID NO: 319953 - DNA, 201 bp, Homo sapiens
acagcatgtgtgtcccctccaaatgtgctccctcaccacatcctgatgcgattcttggaattacatggtttccactgcacatggggaagttgaaaatcagmttttccatcacttgcttgtcagtgtcctctgtgacagtttctgattccagatctgatgctttttccatttatgacccattgcttggcctgattccttaaa

SEQ ID NO: 319954 - DNA, 201 bp, Homo sapiens
cgtgtttacccatgtaacaaacctgcacgttctgcacatgtatcccagaacttaaagtataattaaaaaaaaaaaaagaaaatatcaaaacttgtcaaaayttgtatgatgctactataacctataagcatagagggaagtttgtagactttaatgcatgttagaaaaataaccgaaggttgaaaaaaattagtaatctaa

SEQ ID NO: 319955 - DNA, 201 bp, Homo sapiens
ttgaggagaccagggcaactagaattcacagatcatcagagaggagagacctgcacagagagagagctcaggggatttgttacagttcccccttggacttstcagctgatgagtacatgtggatgggaaaactaccagaatctggggaaagaaccactggaagggggcagccaggataatccctagcagtcacacaggact

SEQ ID NO: 319956 - DNA, 201 bp, Homo sapiens
tgggaagggaagacaggagacagggaggagtcctctgaattactgtgggccttccttggctccaaagtgaaagataatttggacctttagagtgagctgcyagaggaatgccggggttgcccgtggcctcacctctcccatctctcagagtggacctgcccaggccctttggctgcccaagggacctcttctttagtgtcc

SEQ ID NO: 319957 - DNA, 201 bp, Homo sapiens
aaatggcaaagtcattcctgggagaacccttcaaaactagcagtttgtttaaaccctgggcatacccaaagcagggcacctactgggcagttcttcctggraaggagcagttaggaacagtatcttcctgacccttacccccttgagtctacatatctcttctgggataaaacccttcccagggctctgggtacaagtttc

SEQ ID NO: 319958 - DNA, 201 bp, Homo sapiens
aaacttcatgttactgtaatctattctagactgctgacctttgtcagtggctttctccctctttgacctgatgaaagttcctcctgcttctaatgagctgytctttctgaagggattcccctagctgggcctctggtatcccagttctttatatcatagccttctcaggattcataagtgccctgggttaggagggctgca

SEQ ID NO: 319959 - DNA, 201 bp, Homo sapiens
tcacatctttgagtttcattttcctcatctataaaatggaaatcatgaaagcttccctgcatagctacctgttattctgctataagaactagtaggacaawgcacaggacaacagtgacacactgtgctcatctgcaatgacagtcaccttctgagaagtgagaatgggcacaagaaatattgcctgcccactgggcagaa

SEQ ID NO: 319960 - DNA, 201 bp, Homo sapiens
agggaaaatactttaaataaagagaaagatatgttcaaaggcctggagatgataaagttatgttggagaaagataaaacagttcagcctcgcaggaacatygaatatggcaggggtgatgctgggaatcaagaagtgaagtaggaggctgggcacggtggctcacgcctgtaatctcagcactttgggaggttgaggcagg

SEQ ID NO: 319961 - DNA, 201 bp, Homo sapiens
ggctttgtctcccagatcccaggagccgtggccaagccagcaagcaggtgtaggagttcccagcaggctgtgtgctcagggcagctcagaagagcaccagyggatgggcaagcacagcacggaagctgaggcttggaggaagggtggagccagggacatgggggtgcagcctccagctccggtgcaggtcttctcagaggt

SEQ ID NO: 319962 - DNA, 201 bp, Homo sapiens
caccaataccctgtgtatacaagaatcagatttataatacttccccttttttgttacgtatgaacactataaaccaaattattttgaaaactggtgcatcmccttgtccttagcaataaaatgtgttgagcagaggattggctgtctgccccaaggagcccacgtggcccacgtcaggctggggggtgtatctagagtcat

SEQ ID NO: 319963 - DNA, 201 bp, Homo sapiens
ttttgctcctcaagaatttgtttgcctgggcccaggattggagggcttcacaccaataccctgtgtatacaagaatcagatttataatacttccccttttwtgttacgtatgaacactataaaccaaattattttgaaaactggtgcatcaccttgtccttagcaataaaatgtgttgagcagaggattggctgtctgccc

SEQ ID NO: 319964 - DNA, 201 bp, Homo sapiens
tgcaaaatggcacaatccctgtggaggggaatttggcagtatagagcaaaatcagagatacacactttccctttgatccagcaaacccacttttaggaatstatttcaaagatacattggcaaatagaaaagacatatgcattaaattattcattgtaatcactactagtagcacctactttacaaaagactggaaacaac

SEQ ID NO: 319965 - DNA, 201 bp, Homo sapiens
atgaggaggggcaagtgcagatggcagagtataatgacaggagccttgaaggggccggagggctttagggagtctgagggacaacggggtgtaaggaagaygcttcccgccttcagaggctgtggagtgtggaatgtgagggaagaaacggtcaccacttgagagggggtatgggggcactctccttcagggcagctgggt

SEQ ID NO: 319966 - DNA, 201 bp, Homo sapiens
agtcctgggcatgcgctgtttgagcttcgggggagagcccagcactggtccccggaaaggtgcctagaagaacaaggtgcaggaccccgtggtgagtagcrggctggtggatggggaggcaagggccagagaaccaaatggccctagaccacaaggaggtaggaggcagggcctgagctgccctcaagagacctgctcccg

SEQ ID NO: 319967 - DNA, 201 bp, Homo sapiens
cctgctcctcttcctgccactcttcctcctgttcctcttcccgccactcttcctcctcctcctgttcctcttcctgccactcttcctcctcctcctgctcytcttcctgccactcttccccctcctcctcctgctcctcttcccgccactcttcctcctcctgttcctctccttgctgcttttccttccttttgttctcct

SEQ ID NO: 319968 - DNA, 201 bp, Homo sapiens
tttacatgtttaaagggttgctaagcaaaacaaaacaaaaaaacagaaggatatgtgacagagactgtggcctacaacgcctaaaatatttactgtccacytacagagaaagtttttcaacccccaactgaaatctcctatttcaaactggaaggctagttccttccctcccaatttccacatgcaatgatcacctcccat

SEQ ID NO: 319969 - DNA, 201 bp, Homo sapiens
taagcagtgccacccttacactgcccccaccccccgcagtcttagagggcagcagctggtagaattccagctactcccagacttcctgatgtccctgtgarcgctgttgccctaggggatgtcctgcccctgatctgcacccaggtaccttttgtctcctggcatgacatagcagtttcttcctcaatttcatggtgactc

SEQ ID NO: 319970 - DNA, 201 bp, Homo sapiens
tgtcattatcccagaaacaactctctagtacttggagaaaggcatcctcatgaggaaggtagaagatggaattgaagaattccctcctctgtggatggaamgagctctgtgtagagaggctcatctgcacgctcatgcatgtccccctagcatggtaacactggctttgattaagctgctgggttgttaggcagtgtgcta

SEQ ID NO: 319971 - DNA, 201 bp, Homo sapiens
ttccaggctcccctgcaaattacttagtgaactatactccttacagtgttaacctctctcagagcttgaatatgcaagacagtagaggcattacaacatartggaacataagagttgaggctttggaatccaccccacctaacgttgagtcctggctatgtgactttgggtcatttcttaactgtcatttattcaatgaga

SEQ ID NO: 319972 - DNA, 201 bp, Homo sapiens
ctctgccattcatggtcagttctctcctgtcctggatgccatctcccttcaccttctcaggactgtcttcattcctttgtctcctttctcacctctttgcygggtcctcctctcacatctatgaatgtatttggatctctttcaccttaaaaataaaagccctctctttagcttatgttcacctctcttcttttctctttc

SEQ ID NO: 319973 - DNA, 201 bp, Homo sapiens
ctctcaggagcctggtggggaaagtgctttcttcccagatgttttccccattgctcctggatgttctgacaagagcagaacaggttgcatcagcaggagtytggcagcttcacacaggggagctgggtccagacttgactgaggcagggacattcctgaaggaggagggatttgacaaggaatgcagcccacagctggcct

SEQ ID NO: 319974 - DNA, 201 bp, Homo sapiens
tctggctttcaagtgaagactagaattctgaaaaacttacatctgctgccataagcctgacatctcaatatttaaacacttgtctgatacagtcagtagakatattaacaaatgagattttttgatattttataacgaatgtgaaatcattggaagatgtgtataactcagtgaacccataatgcgcaaatgactactgtt

SEQ ID NO: 319975 - DNA, 201 bp, Homo sapiens
cagcctgagcaacatagtgagaacccatctcaaaaaaaatgtggtgatgaaatgggaaaaatacgcataaaacactaccactgcacactgaagctttattkttgccccaaggaaaagccctcatggtatggattgtttgtactacaagctgaactagctgctcttttgggggtaccatttttacttgaaagaaatgataga

SEQ ID NO: 319976 - DNA, 201 bp, Homo sapiens
actgccacacgtggtaggaaataaaatgaagccaattttacttaaaaatgttattgacgaaacatttaatttcatgaaatctcaatttttggatatgcgtygtttcactcaaaaacgaatgtctactcaggaggttgagacagaaggatcacttgaggccagcctgagcaacatagtgagaacccatctcaaaaaaaatgt

SEQ ID NO: 319977 - DNA, 201 bp, Homo sapiens
ttaaatttttagttgttctcagtgggaagtttggacaagatatatagttccttgtgtagttagaaatacaagtttctgatttctttttcttttctttttttctttcttttcttttctttcttttttttttttttttttagacagagtcttgctctgttgcccaggcgggggtgtagtgatgtcataatggcttactgtaac

SEQ ID NO: 319978 - DNA, 201 bp, Homo sapiens
attcagaccatttcagtgagtatttatgccctatctatcccatgaggtggtaagctccatgaagtttaagatacaaactgcagagtgagccattttttccyatttcctgtaccagcagctgttttgacatgctgtccctcctaatcctcctgcagcttagtgcaagatgccctgggatggcccggacacagttgatgctgt

SEQ ID NO: 319979 - DNA, 201 bp, Homo sapiens
ggcaaagcagaagatgtttgcctacaggttgctggtggtcacattgcctcatttacgaagaaagctcaccaggagagagtacaggcaatagagggaggccsgatggcctccctctattccagtcactttcggtcacccctgagaccctctgcactctggccccttcctatgttttggttatgtgaaccactaaatccattt

SEQ ID NO: 319980 - DNA, 201 bp, Homo sapiens
ctaaaaatacaaaaattagctgggcgtggtggcatgtgcctgtaatcccagctattcgggaggctaaggtgggagaatcgcttgaacctgggaggtggagrttgcagtgagctgagatcacgccactgcattccatcctgggtgacagagcgagactccatctcaaaaaaacaaacaaacaaaaaacaaatgttgagggaa

SEQ ID NO: 319981 - DNA, 201 bp, Homo sapiens
cttaaatttttagttgttctcagtgggaagtttggacaagatatatagttccttgtgtagttagaaatacaagtttctgatttctttttcttttctttttttctttcttttcttttctttcttttttttttttttttttagacagagtcttgctctgttgcccaggcgggggtgtagtgatgtcataatggcttactgtaa

SEQ ID NO: 319982 - DNA, 201 bp, Homo sapiens
cactaaaacctacaaaagattactgtgggaaattaaagaatattgaaatcgacataccatgttcatgggtcagaagacctattaatgttactaaatctccycaatgtgttttattttattttttgagacagggtctcgctctgtcacccaggctgaagtgcagtggcgtgatctcagctcactgcaacctctgcctcccgg

SEQ ID NO: 319983 - DNA, 201 bp, Homo sapiens
acttaaatttttagttgttctcagtgggaagtttggacaagatatatagttccttgtgtagttagaaatacaagtttctgatttctttttcttttctttttttctttcttttcttttctttcttttttttttttttttttagacagagtcttgctctgttgcccaggcgggggtgtagtgatgtcataatggcttactgta

SEQ ID NO: 319984 - DNA, 201 bp, Homo sapiens
aacttaaatttttagttgttctcagtgggaagtttggacaagatatatagttccttgtgtagttagaaatacaagtttctgatttctttttcttttctttttttctttcttttcttttctttcttttttttttttttttttagacagagtcttgctctgttgcccaggcgggggtgtagtgatgtcataatggcttactgt

SEQ ID NO: 319985 - DNA, 201 bp, Homo sapiens
cttacaacttaaatttttagttgttctcagtgggaagtttggacaagatatatagttccttgtgtagttagaaatacaagtttctgatttctttttcttttctttttttctttcttttcttttctttcttttttttttttttttttagacagagtcttgctctgttgcccaggcgggggtgtagtgatgtcataatggctt

SEQ ID NO: 319986 - DNA, 201 bp, Homo sapiens
acttacaacttaaatttttagttgttctcagtgggaagtttggacaagatatatagttccttgtgtagttagaaatacaagtttctgatttctttttcttttctttttttctttcttttcttttctttcttttttttttttttttttagacagagtcttgctctgttgcccaggcgggggtgtagtgatgtcataatggct

SEQ ID NO: 319987 - DNA, 201 bp, Homo sapiens
actacttacaacttaaatttttagttgttctcagtgggaagtttggacaagatatatagttccttgtgtagttagaaatacaagtttctgatttctttttcttttctttttttctttcttttcttttctttcttttttttttttttttttagacagagtcttgctctgttgcccaggcgggggtgtagtgatgtcataatg

SEQ ID NO: 319988 - DNA, 201 bp, Homo sapiens
tccaaaagacacaatcatgaacaccatagtcccaaatgctgaaatcctaaaagatcagccaggcgcagtggctcacgcctgtgatcccatcactttggccrgccaaggcgggtggatcacctgacgtcaagagttcgagaccagcctgaccaacatggcgaaaccccatttatactaaaaatacagaaattagccagtcat

SEQ ID NO: 319989 - DNA, 201 bp, Homo sapiens
ttgtgcgcagactacttacaacttaaatttttagttgttctcagtgggaagtttggacaagatatatagttccttgtgtagttagaaatacaagtttctgatttctttttcttttctttttttctttcttttcttttctttcttttttttttttttttttagacagagtcttgctctgttgcccaggcgggggtgtagtga

SEQ ID NO: 319990 - DNA, 201 bp, Homo sapiens
tttgtgcgcagactacttacaacttaaatttttagttgttctcagtgggaagtttggacaagatatatagttccttgtgtagttagaaatacaagtttctgatttctttttcttttctttttttctttcttttcttttctttcttttttttttttttttttagacagagtcttgctctgttgcccaggcgggggtgtagtg

SEQ ID NO: 319991 - DNA, 201 bp, Homo sapiens
tatacacacaaatgtacacacactatcctcactatatttatttttatgtctttgtatatataacacacatatatacacatatgtatacacacatatgtacrtatacacacacacacatatatatttctgtattattgttcgttttgagacagagtctctctttgtcgcccaggctggagtgcagttgcatgttctcagctc

SEQ ID NO: 319992 - DNA, 201 bp, Homo sapiens
tgctgaaggggaagtggtccaagtgagatggacagacggccaagtctatggagccaagtttgtggcctcccaccctatccaaatgtaccaggtatccaaarttctacctttctagggagtggggggtgcttgattaattctgtgcttcctgttgggccagaggcgagtctttgctcttaggagaactaataggttggtaac

SEQ ID NO: 319993 - DNA, 201 bp, Homo sapiens
ctgtcttgcataagaccttttccacagttgactctgatgacgatggccacacctacgtacaagacatcaaaccaggggctggttggttttcccactgaatrgtctggcgtctggcttcttggctctggtgcctcatactatgagttcaggcattgtaaatctcccaacttttacacattatgaaggcaactatgaaggaaa

SEQ ID NO: 319994 - DNA, 201 bp, Homo sapiens
gtgacattgccagccttgtggttgcctgagaattgaccccgtcttccccaggggttgggcactcaggctgctacgtgcaggcagccacaacctgatttaakgatacctccaaggaggcacatctgctctctgaaaggggtctactgtggtctggctcaaagttgagggcctcgaaaagtctcaggggtaaaggctcttgcc

SEQ ID NO: 319995 - DNA, 201 bp, Homo sapiens
cagcatctctaatccttacagctatctgggaagtaggtcttctcagccctattgtatgcacaaggaacttgaggcttaaagagaggacacaatgtgcccckggtcacagagatgtggagctgggattaagcctctgtttttcacactcccaaagctgcagtggtacacagatgttctgtgtatgtgcctgtggacgttttt

SEQ ID NO: 319996 - DNA, 201 bp, Homo sapiens
tgccactggactccagcctggagtggtttgggagatacaggcagcccatcgtaggcactcattaatgctcgctgaataagtgaatagaattgtacaattaygtattgtgtaccatttatgtttcagttttatgtttcagttactctactgggctttggagtgttcagcagtcaaaaagacagacactgtaaatggccagtc

SEQ ID NO: 319997 - DNA, 201 bp, Homo sapiens
caggcatgagccactgcacccggccggcatctctttttctaaggcccacaagagaaagttctctctgatcactgtacagtatttgcttttatgttttggtmtttcagttgctctggagcaccagactccattttgcctcaggtcttcacacatggccttccctctgctttgaatgtcctattccattcttgttgggtttga

SEQ ID NO: 319998 - DNA, 201 bp, Homo sapiens
agtctcaagaagcctttctagagactttatggtcagggaagcagaagagggacatatccagagaacttttccagttactttaaaagtgcacagaggagttrcagtagatgctccctcttcattcagagttgtcaagagtcacataaaaggatgtctgttttctgtgcatatatcctgtctcagaaggtggggcagagggca

SEQ ID NO: 319999 - DNA, 201 bp, Homo sapiens
ttaaattgatgcagtttattatatgtaaattattcctttataaagttgataagaaaaagcacatgatataaaacataaatgtattaagagaacataaactrtatatgtattgtatacacacacacacacacgcacgcacacattaaacaaaatagaacggttgcctttgcaggaggagagacatagtgaaaagggagaata

SEQ ID NO: 320000 - DNA, 201 bp, Homo sapiens
ggctgtggaccatactttgagaatcaccacttgttctgagagggtatgtgatggtgggaggaatgcagacaggtctcagttccctccctgctgctctctaytactttttccatccttgctgatgtcatgttctaaacttcatgttactgtaatctattctagactgctgacctttgtcagtggctttctccctctttgacc

SEQ ID NO: 320001 - DNA, 201 bp, Homo sapiens
acacactttccctttgatccagcaaacccacttttaggaatctatttcaaagatacattggcaaatagaaaagacatatgcattaaattattcattgtaaycactactagtagcacctactttacaaaagactggaaacaacccaggagattgattgaataaaataaggtacataatcaatcatgggagtattattgagta

SEQ ID NO: 320002 - DNA, 201 bp, Homo sapiens
ctttagcctggaccaaagggaagtgaggcccaaggagcttacccaagctgtggcagccgtcccaggccacccccatggaagcaataaagctcttccctgarcctggcctctttttgccttctctgactttcctggaagaaacaggaacctaaagccttagcaactatgccaaaccctcgggccctctctccagtccacaga

SEQ ID NO: 320003 - DNA, 201 bp, Homo sapiens
gagtgagactttgtctcaagaaaaaaaaaaagctatcttttattaaaacttctgttttaaaaaattctctagaaattctaagcaaagttaagatgaacaayaagccaggaaaaatatttttggtatatatgacagagagatgatattcttaatatatataaagagcttgtataaattggaaaaaccaacacttaaatagaa

SEQ ID NO: 320004 - DNA, 201 bp, Homo sapiens
ttgttatagcacacagagtggattaagacacacctcaaaagattcatcatcattagacgtcagggaaagcaaattaaaacctcagtgaaatgccacttcayacccattagaattgctgaaatttaaagattagcatgcttcaacttagcaactctcttgtgttttcaaatggagtgtaaaatggtacaaccactgtggaaa

SEQ ID NO: 320005 - DNA, 201 bp, Homo sapiens
tttaaaaaaaattatatgtgtgtatacacacaaatgtacacacactatcctcactatatttatttttatgtctttgtatatataacacacatatatacacwtatgtatacacacatatgtacatatacacacacacacatatatatttctgtattattgttcgttttgagacagagtctctctttgtcgcccaggctggag

SEQ ID NO: 320006 - DNA, 201 bp, Homo sapiens
acagatatttcatacaaaaaaaattacaaatgactgataagcaccttgctatggtttgaatgttcttgtcccttccagaaattcttgtgttagaaactcartccccagtgcaacagtgttgggagatgggaccctttgggaagtgattgggtcatgagtgctctgccctcataaatgaatgaatgccattataaaaagggc

SEQ ID NO: 320007 - DNA, 201 bp, Homo sapiens
ttcttgcttcaaacataactttgaaaaatcatttatgctgtctttagcctcatcccttccccaaacttcacattgttctgggttttaggtgtctcaaaaawtttttttttctcccggaagacccatgactcctcttgaatattaagtgcctttttctatctgtgtcctaaaccttttttaaaaaaataatttcaactttta

SEQ ID NO: 320008 - DNA, 201 bp, Homo sapiens
gaataaggaggcaaacaacctagttaaggagttgacagagtacttttgggagaccaggtgggagggtcacttgagcccaggagttcaagatcagcctggamaacacagtgataccccatcttaaacaaacaaacaaaaaaatgaacaacaaaaagaaactgacaaaggacttgaacagatatttcatacaaaaaaaattac

SEQ ID NO: 320009 - DNA, 201 bp, Homo sapiens
cctagaacttttgccatgaagggatgaaagagaggctggtagctaaagcgggtacatggccaggacgctttgtcgaatttgtttgtttgtttgtttgtttkttttcacaggggagagacctgagccttattgtgtgcataaagagaaacaaacagaaatggaatccatagcatgatagaaagatctactttggtgtcatag

SEQ ID NO: 320010 - DNA, 201 bp, Homo sapiens
gctaattttgtagttttagtagagacggggtttctctgtgttggtcaggctggtctcgaactcccgacctcaggtgatccgcccgcctcagcctcccaaaktgctgggattacaggcatgagccactgtgcctggctctttttttgttttgttttgagacagagtttcgctcttgtccaggctggagtgcgatggtgtgac

SEQ ID NO: 320011 - DNA, 201 bp, Homo sapiens
tgaaatgtccctttttcttattgatagtcaaataattattgttccaaaatcttccttgtctgatattaataaaccactctggcctttataaaaataagctrtatcatggtgtatgttttccatccttttatttggttggtgcaaaagtaattggggtttttgcaattacttttgtttgtgggaaggagcatgtttatattt

SEQ ID NO: 320012 - DNA, 201 bp, Homo sapiens
tttttttttttaatgagacggagtttccctcttgttgcccaggctggagtgcaatggcatgaccttggcttactgcaacctccacctcccaggttcaagcrattctcctgcctcagcctcccaagtagctgggattataggcgtgtgccaccccacccagctaattttgtagttttagtagagacggggtttctctgtgtt

SEQ ID NO: 320013 - DNA, 201 bp, Homo sapiens
ttggctagactgttcagtgcagtattaaataggtgaggtgagagtgaacagccttgcctgttcccagtcttaggaggaaaagatctagtctttcaccattrtggtgttagctgtaggtttttcatagataccattttttaggtagaggaagttctcttctgttcctagtttcttgagagtgtttatcatgaatagatgttg

SEQ ID NO: 320014 - DNA, 201 bp, Homo sapiens
tatggtggcatatgcctgtaatcccagctactctggagggtgaggcaggagaatcacttgaaactgagaggcggaggtttcagtgagccgagatcatgccmctgcattccagcctgagcaacagagcaagactctgtctcagaaaaaaaaaaaaaaaaaaaaaaaaaaaaagaataagcagtggctcacacctataatccc

SEQ ID NO: 320015 - DNA, 201 bp, Homo sapiens
gatttgggcagggacaaatattcaaactgtatcattttgtccctggcctccacaaatcttatgtccttctcacatttcaacatacagtcatcccttctcartagtccctgcgaaatcttaactcattctagcattaactcaaaagtcctactgtggtcctgtgatctcgccctgcttccacttgccttgtgatattctatt

SEQ ID NO: 320016 - DNA, 201 bp, Homo sapiens
gtttctatgaaagcaaaaatggaaggaacattcaccgaagagtttgaggatataaaggaacacagttttatgccacataattgaaagttagaatgtggacygtgccaggggagaagtaggaaattggaccaagaagaagcagagagcagtgacttgaggataagaaaactgagaagaatatggtttggagagaaacaggaa

SEQ ID NO: 320017 - DNA, 201 bp, Homo sapiens
cggtggctcacgcctataatcccagcactttgggaggctgaagtagggggatcacttgagctcaggagtttgagaccagcctgggcaacatagtgaaactycatatctaccaaaaatacaaaaaaattagccaggtgtggtagcacatgcctctggtaccccctacttgggaggctgaggtgggaggattgcctgagcctg

SEQ ID NO: 320018 - DNA, 201 bp, Homo sapiens
ggggctctgagtatcaaagcctgagtagctgtattctgtgaactccaagcaccactcccccgggtattggagccttgatagagctcctcgtttccttggtwtcaggcttcctgcaaagaattatgagtttgagctgggcacagtggctcaatgcctgtaatcccaacactttgggaggccaaggcgagaggatcgcttgaa

SEQ ID NO: 320019 - DNA, 201 bp, Homo sapiens
aggtgggcggattgcctgagttcaggagttccagaacagcctgggcaacacggtgaaaccccgtctctactaaaatacaaaaaaaaaaaaaaaaaaaaaaattagctgggcatggcagcgtgcacctgtagtcccagctgctctggaggctgaggcaggagaattgcttgaacctgggaggcggaggttgcagtgagccga

SEQ ID NO: 320020 - DNA, 201 bp, Homo sapiens
tggagagaataaaagcagatgaggctggccatgtaggaacatacaaggaaggtggaaaggccaggggctctgagtatcaaagcctgagtagctgtattctrtgaactccaagcaccactcccccgggtattggagccttgatagagctcctcgtttccttggtatcaggcttcctgcaaagaattatgagtttgagctggg

SEQ ID NO: 320021 - DNA, 201 bp, Homo sapiens
ctagcacctagacagtattggcgtatgtttgtcaggtgcccgttaaacactgaatgcttggttggatggatggatggatggatggatggatggatggatgwatggatggatggatgatggtaggatgactgcgtactttcctatttgacaagcatgccttgagttgcagctctctctactctgtgtgttcatgtccctgca

SEQ ID NO: 320022 - DNA, 201 bp, Homo sapiens
gttcatggtaggtgatcactagtcttaaatctcactacctaaagatgccaacgttgtgggatttttttttttttttttttttgagaaaagtactcactctrtcacccaggctggagtgcactggcatgatatgatcacgattcactgcagcctcaacctcccaggctcaggtggtcctcccacctcagcctcccagatagc

SEQ ID NO: 320023 - DNA, 201 bp, Homo sapiens
atctttagtatattacctggttcatggtaggtgatcactagtcttaaatctcactacctaaagatgccaacgttgtgggatttttttttttttttttttttgagaaaagtactcactctatcacccaggctggagtgcactggcatgatatgatcacgattcactgcagcctcaacctcccaggctcaggtggtcctccca

SEQ ID NO: 320024 - DNA, 201 bp, Homo sapiens
ctgttaactcttctccatgccaggccctggacgatgtggtttatatgcatcatctcagccagccatctccacaaccctacaaggcagatactatgagtagyagtaagcagtagagccgcattttggaccgaaggtgtttcactttaaccattgcactataacacctcccatttattcattgattcagcaaatccaaagcaa

SEQ ID NO: 320025 - DNA, 201 bp, Homo sapiens
atatgaaatttttgaagaaacaatggctaaaacgtcccaaatttggtgaccaagtgtggtttatcctgggaatggaaggctggttcaacaatgaaaaaatsaatataatccaccgtattaactgtctaaagaaaaaaaactgcatggtcttattaattgatgaagaaaacgcatttgacagaattcaacatctatttatga

SEQ ID NO: 320026 - DNA, 201 bp, Homo sapiens
gattcatgtgtggtatggccagggccttctgacatcaccctggggcaggagatgggaggtaatagtacatcattgctgtcatggaaactgtgctgctaatrtgagggtctgcttttcttgtttcctctgagagtcattgtgggcataacgtaaaggaaagaatcagccctgggttggttccacggcatccctgctagccta

SEQ ID NO: 320027 - DNA, 201 bp, Homo sapiens
ccctcacacctgacccagctcccatcaaggtcaccacctcaaggtggccaattccagtggacacaacgtcatctttcctgatctctcagaaacacttttcrtgttggccactccttcttctttgaacttctgagtcagtaatttccaacattcctcttatttcactcaccattctctcacattctctttctcagcatcatc

SEQ ID NO: 320028 - DNA, 201 bp, Homo sapiens; identical to SEQ ID NO: 67082

SEQ ID NO: 320029 - DNA, 201 bp, Homo sapiens
tcttgtttcctctgagagtcattgtgggcataacgtaaaggaaagaatcagccctgggttggttccacggcatccctgctagcctacttcatgattggggratcttgaacatatctcccctgtctaaacctctctttcctcatctgtaaaatatagtacctgcctcatggggctgtataggtgacagtactgagaacagca

SEQ ID NO: 320030 - DNA, 201 bp, Homo sapiens
tgattcctcagtaagcctcatttatgtttccttcacgtatgaggaaggagtgaaacctgataactgaatgtaattaattgagggaaggaccagtgaaggcrgctattacctcagaaagtaaaatactcaaacttttcagtggatgtactgtgaattatagatagctggacattaaggtaggaaaaaactcttattaggtta

SEQ ID NO: 320031 - DNA, 201 bp, Homo sapiens
ctgccttgagacgtctctccctctggcaggaggcaaggggtactgggctgggcagggtctcctggctcagtggatgggtgggcatgggcctgggaggctgsgctgttcgactgagttcccttccagttgactctgctttgagggagggtttgggcagagccagtgggagcttgcttttttattataagaaggagaaagaaa

SEQ ID NO: 320032 - DNA, 201 bp, Homo sapiens
tagaacaactacttaaataacacaacaaaaagagacaaacagtcatacactgcatagcagcattttggtcagtgacagaccacatatgcaaaagtggttcygtaagattataatatcatatttttactgtagcttttctatgtttagatatgtttgattgattgattgagacagaatctcactctgtagcccaggccagag

SEQ ID NO: 320033 - DNA, 201 bp, Homo sapiens
tcagacttttcttttctctgtttgtccgcaggaatctcatttactcaggttttgtttgggattggggttgggagggaagaaattgagggactaagactagkgggggttagatccctccaggatctaaacagttgagagactaaaaaacaagaaacaggtggcgacgtgaacattgaggtatcagttctgttaacagactgc

SEQ ID NO: 320034 - DNA, 201 bp, Homo sapiens
tcctgctcctcttcctgccactcttcctcctgttcctcttcccgccactcttcctcctcctcctgttcctcttcctgccactcttcctcctcctcctgctsttcttcctgccactcttccccctcctcctcctgctcctcttcccgccactcttcctcctcctgttcctctccttgctgcttttccttccttttgttctcc

SEQ ID NO: 320035 - DNA, 201 bp, Homo sapiens
ttttggacatatgtagaggtaaaagatatgtcaacacttgcataagggatgggggatgggtaaatgtaattttactgtacaaggttatatttgtgaaaaargaagtaagtgggaaacaagaatgttttatataaagtgagaaaaggaaagggtaaagtaataaatatgaaatgtcagatttgaagaggtattatactgact

SEQ ID NO: 320036 - DNA, 201 bp, Homo sapiens
aatatccacagtggctaatgttcaaaaaaagttactaagacatgcaaagaaacaggagaatatccatattcaagaagaaaaatctatggataagatggcckcagtgttgcacttagcagacaaagtaactattatgaatatatttaaataattaaaggaaaatacagtagtgaacaatgagtagtctcagcagagaaatgg

SEQ ID NO: 320037 - DNA, 201 bp, Homo sapiens
ctagtcagaatgcacttgcctgcccattcttcctcacacattgctccacctgcctgggtggaactagagggcagagttacaagggtgcggggtggggaggstgccaggctgaagttcctctgccattgatgggggctacttccctcctccagcctcagcattctctctccttatcttgaagggacagttacttatggttct

SEQ ID NO: 320038 - DNA, 201 bp, Homo sapiens
gctcttagctgtcaggtataaaagattcagtccatagaggccatcgtaaggtactgtggcaggaaaggctagagatttgggcctgagtcagtaatgtggarctgctgaagatcttccaatgaagggacaagataggctgggacttgcttatctccataactttaccaggtaatggcagtactatggcctggaaaggtgtca

SEQ ID NO: 320039 - DNA, 201 bp, Homo sapiens
ttcaaagtttgggtcttatcaagagaggtcaaaaatgccatgggctttcctcagatccacactcatgatgcataaaatcaagaccacacaaattcagggcygtcaggtagtcattgaaccatctgctaaaatacaaattgacactcttcataggaagataacagtattcatagtttttatgtgtaatatccacagtggcta

SEQ ID NO: 320040 - DNA, 201 bp, Homo sapiens
agaatggaagaatgactgagctgataacatatatgattgccaggaagcataagggcctcactggtattttgagtgagaccagccagcaaccagcatggttkttctccagccagacatattcagctgtgtaggtacatccccagagtaggtaggaatttcgatttaatcaaagctgtgtttcccccaaatgagaaaggaaca

SEQ ID NO: 320041 - DNA, 201 bp, Homo sapiens
accaccacacccggctaatttttgtatttttagtagaaacggggtttcaccgtgttggtcaggctggtctttaactcctgaccttgtgatccgcccacctyggcctcccaaagtgctgggattacaggcgtgaaccaccgtgcccggcaaggaatacttttctaaaagagggccttcgaactagggtctaaagaatgagca

SEQ ID NO: 320042 - DNA, 201 bp, Homo sapiens
aaatttcagttcctaagagaaggaaaactcgaggtgagcgccacatttgctcagttttctgtctgaggacggtttcccaaccctgttctgtgagtggagtytaaacaggctgtgatgatttcccctgagctgaagaggcagaggtcagagtttgggcagctgaagcagttggaatctgtggggtggaccatcatagggtag

SEQ ID NO: 320043 - DNA, 201 bp, Homo sapiens
aaactccagctcagatgtcacctcctctgtgaagcttttcctgccctggagctcccccagctctgtgtgcacctctatctgtaacagttctgtgtataccrcattataattccctcctgagaccttgtctaatttttacctctatcttaccctccatcaccacttggtgactgactaaactggggacagctcccatttctc

SEQ ID NO: 320044 - DNA, 201 bp, Homo sapiens
agtggggaaggggaatccatttcagaaccagactggatgagacacctgggctccacagtgtccagtccacctccccaaaggggaggaaagggccaggcagyagagtgatgatttggccttagccaggcccaacttcaagcaggcccactgcccacacagaccaggtaaataacagcggttccaggagtaccctactgtttt

SEQ ID NO: 320045 - DNA, 201 bp, Homo sapiens
cctctggtttagccagttctgcctgtagcctagtcattttgggggcaaaatgaagaagagtgcaagaggcagtagggtagagcacagcaaaccgtgacccrcactcaaggctgtggggaaagatagctcatccaggaggcctgggctcctgacgcagccctgtctccagtgggcctgctccaggaaagttgctaactctca

SEQ ID NO: 320046 - DNA, 201 bp, Homo sapiens
gtgtgtctgggccacaggccaattgccagttgcggaacttgctctaagaagcaaatgcccaaatggagcaagtcctccaaatggggcaaggcatgtgcttraggcctgagctcagaaaccagctctgatgagggctggctctgtacctgctgtctccactggccttgctcccatgtgtccaaggtgactatgatcagtgag

SEQ ID NO: 320047 - DNA, 201 bp, Homo sapiens
atgttattaagatgctctccattgtggtgataccagtttactttatttttaggtctttgtgtacgttattttatatcttcctaacaactccacaaaatagraattactttcattttagagatgaggaaactaaagctcaaagaaaggaaatgatttatataaggtcacagagcacagccagtatttgactccaaagccaat

SEQ ID NO: 320048 - DNA, 201 bp, Homo sapiens
tgttttgttttgtttttgtttttgagacagagtctcactctgtcgcccagtgcaatggcgccatctcggctcactgcagcctccacctcccgggttcaaaygattctcctgcctcagcctcccaagtagctgggactacaggcacgtgccaccacacctggctaatttttgtatttttagtagagacggggtttcactgta

SEQ ID NO: 320049 - DNA, 201 bp, Homo sapiens
cgggttcaagtgattctcctacctcagcctcccaagtagctgggattacagacgcccatcactgtgcctggctaatttttgtattttcagtagagacaggrtttcaccatgttggccaggctggtcttgaactcccgacctcaggtgatccacccgcctcagcctcccaaagtgttgggattacaggcgtgagccaccacg

SEQ ID NO: 320050 - DNA, 201 bp, Homo sapiens
atagattgaaaggagatgaagatttggagactgaaagttctcacagctttctcacttcacaggctatgtgatcttggaaaagtctgagccttatttcactyattagtcaagagaatgaaatgaaaggatgtgtcctggggccataaatgttagatcatttcaacaacatttaatgttagacacttaattaagtgaattctg

SEQ ID NO: 320051 - DNA, 201 bp, Homo sapiens
atgtattttcactacatatttatatatttattaaaaatatagtaccgctcttacatgtctttagactttacaaatggtgtcattatatgtacatgtatttrtgtatatgtgtatgtatattcttcatatttttttaatgtgtttttgagatttatctatattggtacatacagctgtaggtcattgatttttttttttaat

SEQ ID NO: 320052 - DNA, 201 bp, Homo sapiens
tggtctattcatggctgccaacacctagcagagcctttagcacacagtagacacttggtattggttttgtgagtggaaattaatttctgccctccagagaytgagagtgtaaggatgtgggaaatgttgataagacactcttttagtggaaagagtttctgaagaaaactaattattgtgacatattccaatatatgatag

SEQ ID NO: 320053 - DNA, 201 bp, Homo sapiens
gagccaccatgcccggcttcttctttaatggaatatttacacagagcccaccactttgccaggggttaagtatacaacagtgaagtagacagattgtttcctctcctcaaaaagctccagtatagcggagattcagatattcaagagtgcagagttctggtgagggcagtacaaggagctgtgagaacacagaaaaggtgt

SEQ ID NO: 320054 - DNA, 201 bp, Homo sapiens
gaagtgtacatcctaccagaaaaacacaagcaataaacaactaagaagtaaaatatttagtaaattaccacaagataaatgccatgggaagaaagaaaatrtggcaaggtgacaggagcaagttgcattattaaataggatggtgagggttggcctcaagggaaatgagagatttgagtaaagactggaaggaggcgagga

SEQ ID NO: 320055 - DNA, 201 bp, Homo sapiens
cagtagagacctagagtgtttgcactctctggacctgacaaatagttaaagctgactctggtggggtgcttttgtgagtgttctgatgacccctttccatyttaggggcctcttctctgcggttcccccagtatgggtaatgcccatgccactgccttgctcctcacttctgcagctcctggaaatcccagcatctacctg

SEQ ID NO: 320056 - DNA, 201 bp, Homo sapiens
aaaggttatttctctcctgtcacaatctggtgcagttctatattggtggggaggaattctgctctacctaattcatttagggccacagacttcatctagtractcccccaggccctagggcctggagtccttcactggattctctaaaccagctcccagaggagaaatggacaggaacatggagaactgtgcaggtctcag

SEQ ID NO: 320057 - DNA, 201 bp, Homo sapiens
accccaattattaaaaatgcctttttgagctcatatagccaagacaatcctaagcaaaaagaacaaagctggaggcatcatactacccaacttcaaactayacttcaaggctacggtaaccaaaacagcttggtactggtacaaaaacagacacatagaccaatggaacacaataaagaactcagaaataagaccacacac

SEQ ID NO: 320058 - DNA, 201 bp, Homo sapiens
ccaaggagcttacccaagctgtggcagccgtcccaggccacccccatggaagcaataaagctcttccctgagcctggcctctttttgccttctctgacttycctggaagaaacaggaacctaaagccttagcaactatgccaaaccctcgggccctctctccagtccacagagtcctgggtccctttcacttcttgtgtca

SEQ ID NO: 320059 - DNA, 201 bp, Homo sapiens
tgagtgggcctgctctctgtagactgaattcagcaccagtgaaaggctttgagaaggacgtgggcagcaaaacgacactgcgcatcacctaccccgagggygccatgcagcggcctgagcagtacgagcgcgattctctctttgtcctcgccggcttcaagtggcaggactttaagtggttgaaatacatcgtctacaagg

SEQ ID NO: 320060 - DNA, 201 bp, Homo sapiens
tttcactctagcccctagggacttgtgtcttccagtaggattatcagtaaacattttatagaaaggtaagtgaccctgtaacagaaacctctctcctctgyctgcagacaatctgatcaaagccatcttgtcagtcaccaaagagtaccgcctgacccctgccttggacaggtgagccacacactgtgcagcctcctaccc

SEQ ID NO: 320061 - DNA, 201 bp, Homo sapiens
tgactatttgatgaatgcctgcacaaccttccagagagcttccagctctgagaaattgatccttgctgaacaaatcttgtctctccactcctacagctagscaaataaagactgaccaggcctactccctcagactcaggctccactgaacaagatctgtcaaacccctcgacagctacccagtgaacaggctgggtggag

SEQ ID NO: 320062 - DNA, 201 bp, Homo sapiens
tgggtgcagcaaaccgccatggcacgtgtttacccatgtaacaaacctgcacgttctgcacatgtatcccagaacttaaagtataattaaaaaaaaaaaaagaaaatatcaaaacttgtcaaaacttgtatgatgctactataacctataagcatagagggaagtttgtagactttaatgcatgttagaaaaataaccgaa

SEQ ID NO: 320063 - DNA, 201 bp, Homo sapiens
agggcagtcttcttggccaatgttacattttacatttaaggtgtacctgctatgcatccttttacatcaaaggatgcatagcaggtacagtagcagggtgrgtgaattccagacagaccttgaggatagaaacaaggcagcattcaatgaatagaaagtacaatgactagagcatagggcacaaatgaggttgagagaagc

SEQ ID NO: 320064 - DNA, 201 bp, Homo sapiens
catcaaaaactcacacaaataactgacaaaaatataaaatcatttttatacttattcagatgtttacagcagttgaaattatattttaaaaatccaacagytcttccttttccttaatcaaaattgtaaggttgaaatttcttcagttagaacaaatggatttcaaatctaatctcacttttttgtatcaggtatttcaaa

SEQ ID NO: 320065 - DNA, 201 bp, Homo sapiens
ttttgtagagataggatctcatcatgttgcctaggctggcctcaaactccagggctcaagcagttctcctgcctcagcctaccaaagttctgggattatakgcgtgagccactgtgcccagcccacctaacattttctaattggttattgctggtatggtttttaagaatgtgttgatttttgtaaattaatcttataatc

SEQ ID NO: 320066 - DNA, 201 bp, Homo sapiens
gagcaaaatgaaacacaaagtattaagaaatttattaaatattgaattgctataccataaaaatcttttcaagtttttaattaaaaactagagcttgtttyggtgttcataaatttttattcaggagttttgtctgggaaggcttcacataactcctgtcaaggctttttaatgatactctcttaaaaaatactcagttat

SEQ ID NO: 320067 - DNA, 201 bp, Homo sapiens
catgtacatgtcctttttaatatttgttggagtattgtttgagaaaaaagtcataggaatagaaagactgggctaaggtatatgaatattataaatttcartagatacttctaaattgttcccaaaggagtctaccaatttacatttctacaatgtgttgtttgatttttttaatagtaaaaaattaatggaggcagtact

SEQ ID NO: 320068 - DNA, 201 bp, Homo sapiens
ctatttgcttatttacttgcacactgtcaatctcccctactaaaatgtaggcttcattttggccaaggacttggtctgttttgttcatcactgtatcgccrgtatttagaatgcgtctggcacataataggtgctaagtaggtgttaaataaataggtgttaaagaatagaaaattaggaacaacaatattcactaattaa

SEQ ID NO: 320069 - DNA, 201 bp, Homo sapiens
gtgcctagcctcagtcccacgccgccaccagtgccaccagagtcccagacccgctgacccaatgccctgtacactgccacgcaccagcaacgtgactggcygcaccaaccccaaatcccaaacttggtgcgggactgctagtgctctgctaggtgcaccccttgcaccaggcttaggcttggcctaaatcttaccttttta

SEQ ID NO: 320070 - DNA, 201 bp, Homo sapiens
gagcagttgaaaaccaaaatttaaaacacatagcagcttcccgaaaccaaatacttatgtgtaaatgcttatatataaatctgatgaaacatatataggasctgtatgctgaaactagttcctctcccactttttcttccccatctacccaactgaaagttcaggctgcaaacctagaatcaccctgattgttcctcttcc

SEQ ID NO: 320071 - DNA, 201 bp, Homo sapiens
ctacaaaaacattcctagaactaataactgagtttagcaagatgacaggatacgaggtcaaaacacagaagttcatcatgtttttaagtactagcaatgarcagttgaaaaccaaaatttaaaacacatagcagcttcccgaaaccaaatacttatgtgtaaatgcttatatataaatctgatgaaacatatataggagct

SEQ ID NO: 320072 - DNA, 201 bp, Homo sapiens
gacatcggccatctacaaaaacctacagcaaacatcatactttatggtaaaagactgctctccccctaacatcaggaaatacttctggaaggtctagtcamtgtaataaagcaataaaaaggatacagaatggaaaggaagaaacaaaattaaccgttttcatagatgacatgattgcctacataggaaatcccaaggaat

SEQ ID NO: 320073 - DNA, 201 bp, Homo sapiens
tatgagatatagcccttccactgggctcacataagtgctaggatgctagtttataacaagttcctgcacatagatgatggaattgttttagtggccctccstttctgtcccctgaagtctcttgacctccctgcccaataggcatacatttatggacagccagttgaatgagagagaagaatccaaataagaaaaataaat

SEQ ID NO: 320074 - DNA, 201 bp, Homo sapiens
ttagcaattcctcctctaggtatattatctgcagaaatggatgcttatacataacaggacatatatatgcaagatatgtgtataagaatgtttataagaasattgttcataattgtcaaaaaccaaaaacaatccaaatacctaacaacagtagaatgactatgcaaattgtattatattcatagggaacagtaaaaatga

SEQ ID NO: 320075 - DNA, 201 bp, Homo sapiens
ctgctttttgataaaagaatacacaaaaaatactgcacctgatgataattgctttagaatttctcttcttcttcttcttcttcttcttcttcttcttcttmttattattattattattattatttttgagacagggtctcactctgtcatctaggctggagtacagtagtgtgatcttggttcactgcagcctcgacattc

SEQ ID NO: 320076 - DNA, 201 bp, Homo sapiens
atacctatcatatagggctgtttaaggattaacaataatgtaaataaaaataaaaacaaaaccccagatactgctgaataattgttagttacattcctccrctctctattattttgcttcccaaatatatcttacaaatattcttcctgtctatatccactgttaccccttcagccaggtctcctcatttctctcttggac

SEQ ID NO: 320077 - DNA, 201 bp, Homo sapiens
agcactgtgctgagtgcttgatacacctctcagctatctcttacaatcgctttttatttttattttttttatttttaatgtttatgggtacatagtgggtrtatatatttatagggtacatgagatgttttgatacaggcatacaatgagtaataatcacatcagggcaaatggggtatccattatctgaagcatttacgg

SEQ ID NO: 320078 - DNA, 201 bp, Homo sapiens
cactttgggagcttgaggcaggcagatcacctgaggtcaggagttcaagaccagcctggccaacatggcaaaaccccgtctctactaaaaatacagaaatyagccgggcatggtggcgcatgcctgtaatcccagctacttgagaggctgaggcagagaatcattttgacctgggagacggaggttgcagtgagctgagct

SEQ ID NO: 320079 - DNA, 201 bp, Homo sapiens
tctgtacctgctgtctccactggccttgctcccatgtgtccaaggtgactatgatcagtgaggttctggccaggttaagggctgtctccaccacattcccygtctccatcacccatcctcatgtgtacctcaagaccagcaagagggattaagggcaggactctgccagctatatgttcacccttaggccgcttctgacca

SEQ ID NO: 320080 - DNA, 201 bp, Homo sapiens
aaaacaagccacaaactggggaaaaaattgcaaacacatacctgattaaggacttgtattcagaatatacaaagaactcttaaaactcaacattaagaaarcaaccaacccaattaaaaaaatgggcaaaagaaccaaaaagacaccctttccagatggtcaaaaaagatatgcagatggaaataagcatatgaaaagatg

SEQ ID NO: 320081 - DNA, 201 bp, Homo sapiens
cccaacctggagtgcttctccatattctttgccttaagaactactgctttggccgggcacagtggctcacgcctgtaatcccggcactttgggaggccagrgcaggcggatcacctgaagtcaggagttcgagaccagcctggtcaacatggagaaaccccgtctctactaaaaatacaaaattagccgggcgtgttggca

SEQ ID NO: 320082 - DNA, 201 bp, Homo sapiens
gcctgaactatgctgggaaaggtggggcttcggcagcaagaccagacacactggtgggggcagcttcctcctttgcagaccagttccaggctccagcctargagcaggaactgtagggatgcttagaagcacagtccctggtgagagcaggcaggctggctgcattcctgtggtatttgaggattgatcttgtcagattag

SEQ ID NO: 320083 - DNA, 201 bp, Homo sapiens
ttttggccttgactgcatattggaatcacctggagagcctaaaaaattactgatgcctgcatcccaccctctagagattttgaagtcactgagcgaggacrcagcctttgcattaggatttttaaagctgcccaggtgagtctaatatgcagccaaattgagaaccactgctttaataaaagattctgtttcctgtctcag

SEQ ID NO: 320084 - DNA, 201 bp, Homo sapiens
aatacaaaggaagatgctcaataaatagtagttcctctcagtcccttcattctgcaagcctgacagcccatttggaactattgccaacttcttcctccacycaagccatggcatatattacatatgtttaatataccccatgacttttttttagagattgtacagtgacatttcttaagaaatgatagagctgttttggct

SEQ ID NO: 320085 - DNA, 201 bp, Homo sapiens
tttgttaccaaaaaaaacccaaaaaaaccaaacttttaaaaatggagcttatattttatatgtgtatttccctccttccttccttccttccttccttcctyccctcttccttccttccttccttccctcctccttccctccctccctcccttccttcctttccttccttctttctttccttcctcccttccttccttcctt

SEQ ID NO: 320086 - DNA, 201 bp, Homo sapiens
gtacagtggtgaggactgtcaggtggccccttcctttatctaaccctgactttccccatctcctggagagactgtcacttgaagaacttctgccaccatcwtgctgacttcagatggccagcttctctttaatgccttaaaaaaaaaaaaaagaggaaaggggtgtgtgtgtggtgggagggatactttctcttggcttct

SEQ ID NO: 320087 - DNA, 201 bp, Homo sapiens
aactgataaacagtgaaatctcccttgttactgtttttcccacggctgtgtcttgtgtttagctttatatgtatttttattttacctgttaggttgtgagmtacttgagggaacaattttcttttagttcatttttacgtctctcaggcttacacatggtaattggctgaagataagtataccccaaaaggtagctcattt

SEQ ID NO: 320088 - DNA, 201 bp, Homo sapiens
atatctcccctgtctaaacctctctttcctcatctgtaaaatatagtacctgcctcatggggctgtataggtgacagtactgagaacagcatgaatacaarggaagatgctcaataaatagtagttcctctcagtcccttcattctgcaagcctgacagcccatttggaactattgccaacttcttcctccacccaagcca

SEQ ID NO: 320089 - DNA, 201 bp, Homo sapiens
catcattctggaaaaaataatttttaaaatttttaaaaatatatttatttacattcttaaaaggggatttatttgataaacataaaaacattacagaacacttcataggccactttacacaatgaaacgggcattaataacatacacattttattgcctagcataaacaggtatactaacgacaggcatgaacaggttact

SEQ ID NO: 320090 - DNA, 201 bp, Homo sapiens
gtgagtttaacacttctaaaacagcctgtcaagttccctagggctgcaaggggaaagcatttattgagcacctactatatgcccagtggtgcactaggtastttctatgttacctgttcccacaacatttgcttagataatctaatccggtatcatggctttaaatatcatctatatgctgatgactcctatatttatatc

SEQ ID NO: 320091 - DNA, 201 bp, Homo sapiens
ctgcctgggtctaagggaggtactactttgtagaggattgttgtaaagctgaattagatcattagatccgctgtctggtgcctggtttgtgctcagtgaaygttacttctcttgtgtctttcactaccacccagaaagaggatgtgtttttatttttaaggaaataaagtgtggaagcaaaattgaattggagagtcacag

SEQ ID NO: 320092 - DNA, 201 bp, Homo sapiens
cagaattgggggaagtctcaagaagcctttctagagactttatggtcagggaagcagaagagggacatatccagagaacttttccagttactttaaaagtkcacagaggagttgcagtagatgctccctcttcattcagagttgtcaagagtcacataaaaggatgtctgttttctgtgcatatatcctgtctcagaaggt

SEQ ID NO: 320093 - DNA, 201 bp, Homo sapiens
agagggctgtaaaaatggcgttttcccgagagacccaggtttctatgaaagcaaaaatggaaggaacattcaccgaagagtttgaggatataaaggaacayagttttatgccacataattgaaagttagaatgtggactgtgccaggggagaagtaggaaattggaccaagaagaagcagagagcagtgacttgaggataa

SEQ ID NO: 320094 - DNA, 201 bp, Homo sapiens
cccctcagagtatttgttatttaagcaagagcctagggcctccaaaactgcccagctggcgaaattctccgaggtaatcagctccaatccagccctctgcyggtactctccttaatgatgttgtaaacctcaacatcgctgtctttgaggggctgcgccagcatcttgtcatgtgaggaccacaggtcagcatccttgtgg

SEQ ID NO: 320095 - DNA, 201 bp, Homo sapiens
aggatagagaccatgctttttctgtttgctgctgtatctcagtcatagtatagtatcttgcacatagcagttgcccagtgcatatttattggacatttgawtgaatgaatgaatgaatgaatgaatgaatgccttgtgggtactgaatcttgtaaccattcatttccttttttctttggctgtttgaaggctcaggccctg

SEQ ID NO: 320096 - DNA, 201 bp, Homo sapiens
cctgttgactggcattgctattgcatgggtccgaagctgccggaacacagccccgcacatgtgcctagcctcagtcccacgccgccaccagtgccaccagmgtcccagacccgctgacccaatgccctgtacactgccacgcaccagcaacgtgactggctgcaccaaccccaaatcccaaacttggtgcgggactgctag

SEQ ID NO: 320097 - DNA, 201 bp, Homo sapiens
atctcataccagcttaagtactatctcctccatatcttcccagtttctcccagccaaaaattctccttgcatctaaacgacaggccaggcgtggtggctcrtgcctgtaatcccagcactttgggaggccgaggtgggtggatcatttgaggtcaggagttcgagaccagcctggccaacatggtgaaaccccgtctgtac

SEQ ID NO: 320098 - DNA, 201 bp, Homo sapiens
cttgttctcatggttttatgagaaccatgtaaaacaactggtaacagaggagtactcacaaagatttctgaaattggaattaccacacatcatttataaarcaattaaatatactgtatttaaagaaataagagacagtactgaactatatgcatagaatagggaactatgaaaaacaaaataccagatctgaaaaaaaca

SEQ ID NO: 320099 - DNA, 201 bp, Homo sapiens
tattttatgaaacagccacaaccaatatccaagggctttgaaatcagaaagctctatattcaaatcttcctcctgccatttcctagttgaatttctttatwtctttgttcataaaatgggaagaataatacctatcatatagggctgtttaaggattaacaataatgtaaataaaaataaaaacaaaaccccagatactgc

SEQ ID NO: 320100 - DNA, 201 bp, Homo sapiens
gggtcagagcctgtcatgggtgttatcacatgttccttccaagaacaccaatgtcagttaattcaaggttcttaaaattcatccaagggagtaaggaaagraagaagaaaaggaaggaagccagctagagtcggagaactcactatactcaggctactcaggaagcagacagcagggccttgcttttcccaggaagctgag

SEQ ID NO: 320101 - DNA, 201 bp, Homo sapiens
ctataaaatggaaatcatgaaagcttccctgcatagctacctgttattctgctataagaactagtaggacaatgcacaggacaacagtgacacactgtgckcatctgcaatgacagtcaccttctgagaagtgagaatgggcacaagaaatattgcctgcccactgggcagaaacccagaccacaggataaggagtgagag

SEQ ID NO: 320102 - DNA, 201 bp, Homo sapiens
tgaggcaaaagtggtcttactgtacttagactgtcatctgttggcactgcggtgaggctggtcggaggacgaggggtacatctttaccacctggcctcacygctgtttcaccgatccctgtggcttgaccttgtgtgcctgtgccaggttcacagcatctccttcatgctttctcagcaaagatggaatacagctgggagc

SEQ ID NO: 320103 - DNA, 201 bp, Homo sapiens
gtgggtgccaccatgcctggctaatttttgtatttttagtaatatggggtttccccatgttggccaggctggtctcgaactcctgacctcaaatgatccgyctgcctcggcctcccaaagtgctgggattacaggtgtaagccattgtttctggccctgtatcccatttcttgtaaaacttgtatgcattaattttagcat

SEQ ID NO: 320104 - DNA, 201 bp, Homo sapiens
gaatagtcaaaccattttgaaaaagaacaaagttggagggtttacattacctgctttcaaaacttatcataaagccagcagcaatcaagatagagtggtaytggtataaagatagatatatagatcaatgagacagaaaacagagcccagaaatagacccacacatatatggccgattgatttttcacaaaggggcccagg

SEQ ID NO: 320105 - DNA, 201 bp, Homo sapiens
aagtaatccgcctacctcagcctctcaaagtgctgggattacaggcatgaagcaccgcacctggcccccaatgtgttttaaaatgcagcacattctctcartcaaaatcccagaaggcttgggtttttttgtctttaaaaaatttttgctttggtagaaattgaaaactgattttaaaacttatatagaaatatagagatt

SEQ ID NO: 320106 - DNA, 201 bp, Homo sapiens
gttgggagttgctgcactttgggcaagagatggtaactcctgaaccagatctttggctgagacaatgagaggtgatgagagaggcgatgagccagatcttyggctaaggcgattagtcagaggcaagaagtccaggctggaagtataaggtgatgagacagactcaagaaataggattttaactcagtaagacctagggat

SEQ ID NO: 320107 - DNA, 201 bp, Homo sapiens
atgtccctctctcccctttcaccccaggcatgtgtgactctccctaaagcctactggtttttagattatttagaaaggaagggatagagggacctcatttygtttatggatgcatagtacctattttgtgtatgtaccatagttgattcaacccttgttgaaggacatttggagtacattgaatcttactctgttacgtta

SEQ ID NO: 320108 - DNA, 201 bp, Homo sapiens
ggtcaatcccaaatcacctgttgccacaacctagacccctcacatggactaatgtccctctctcccctttcaccccaggcatgtgtgactctccctaaagmctactggtttttagattatttagaaaggaagggatagagggacctcattttgtttatggatgcatagtacctattttgtgtatgtaccatagttgattca

SEQ ID NO: 320109 - DNA, 201 bp, Homo sapiens
tcttaccttttttaactttttaagaaattagtttcagttcaaatatttttgaaatataaaaattgtatttttaaagctataattcttatagacattcagtrgttaaaaatttgattgtgcttattaaaaatggtcgtatatgttttgcacttcagctatgtgaaaataaagtttctttgggaaggtgacatttggtttcct

SEQ ID NO: 320110 - DNA, 201 bp, Homo sapiens
ggggtttcaccatgttagccaggctggtctcaaactcctgacctcaggtgatccacatgcctcggcctcccaaagtgctaggattacaggtgtgagccacygtgcctggctgtggttttctttatatttatttggcttggagtttatttaactcctcagatctgtaggttcatagttttcttgtttgtttgttttgtttta

SEQ ID NO: 320111 - DNA, 201 bp, Homo sapiens
agggcaggtcccctgatactaagtcccaaatctaaattcttatctggaaatgagttcctttcacctatgagactgtaaaatcaaaacaagttgcttacttycgagatacaatgggggtataggcattgggtaaacatcccattccaaaaaggggtaatcagccataagaaaggggctatacgccccatgcaagtttgaaac

SEQ ID NO: 320112 - DNA, 201 bp, Homo sapiens
ggcatcacggatcctaccaacgtgtgatgtctcccccggatgcccagctttaaaatttctctcttttgtactccgtccctttatttctcaagctggccgaygcttaggaaaaatagaaaagaacctacgtgattatcagggcaggtcccctgatactaagtcccaaatctaaattcttatctggaaatgagttcctttcac

SEQ ID NO: 320113 - DNA, 201 bp, Homo sapiens
aatcacttgaacccaggaggcagaggttgcagtgagctgagatcacgacactgcactccagcctgggtggcagagcaagactgtctcaaaaaaaaaaaaaagatttttacatgtttaaagggttgctaagcaaaacaaaacaaaaaaacagaaggatatgtgacagagactgtggcctacaacgcctaaaatatttactgt

SEQ ID NO: 320114 - DNA, 201 bp, Homo sapiens
tgaatcacactgatgaacaaaaggcatgttctctaggacatactacagtatttaaactgtcttcagcagtgaaaggaggaggatgaggaggacgctcatcycctgctgtcctgacagttgggtcctgcagagtaggctgttgtgtagctttctgttgtgtatcaggccagttctttgaactatgtgagttaacttggtctt

SEQ ID NO: 320115 - DNA, 201 bp, Homo sapiens
aaggctctgggctaggcccgaggggtctgtggtgaatcagacatgacacacactaggcagtggcatcatcatttctggtaccaccaccccacacccacccagtccagaccctgcagaaggcagcctggagggtaggcttgccacagggccccagcacagtagagcagctgggcaccagagttttggcagcaggcccaaggg

SEQ ID NO: 320116 - DNA, 201 bp, Homo sapiens
ctcgtcctcccaaagcgctgggattacaggcgtgagccactgcgcccggccattctttttttttcagacagagttttgctcttgtcatccaggctggagtrcaatggcgtgatctcggctcactgcaacctccacctcccagttcaagtgattctccttcctcaacctcccgagtagatgggattacaggcacctgccagc

SEQ ID NO: 320117 - DNA, 201 bp, Homo sapiens
ctagggaatggggtatttgattgtggtagaaagccataggcttcactcttagaaaatccttaatttagtactctggaaaaaaacaaatcaagtataagccrtaagcaagtgaaatgccaccagaacggaagagatagagtaattaccaagttgaatcacactgatgaacaaaaggcatgttctctaggacatactacagta

SEQ ID NO: 320118 - DNA, 201 bp, Homo sapiens
taatatgagtatttagtaagatattcaataggatatgatcaaatgtgaggcatccagatttcttttctttttttcttttttttttttttttttttgagacrgagtctcgctctgtcgcccaggctggagtgcagtggcacgatctcggctcactgcaagctccgcctcccgggttcacgccattctcctgcctcagcctcc

SEQ ID NO: 320119 - DNA, 201 bp, Homo sapiens
tagatcctttccccctccgccttctcacaggcattctcccccaacctggccaacatggtgaaaccttgtctctactaaaaatgcaaaaattagccgggcgyggtggcaggcgcctgtaacctcagcttctcgggaggctgaggcaggagaatcacttggacctcggaggtggaggttgcagtgagccgagatcatgccacc

SEQ ID NO: 320120 - DNA, 201 bp, Homo sapiens
attataaggaatatgacacaacgagccaggaatgtgcccattagtccaggagagagatgagtcatctggattccttgaaggagccagatcctggtgtccamgtgtgactttcctgagccgacgtgggccttctgggagcagatttaattaaatggaagtttcatctatttctgctgggtgtgggcaggtgctctgtgctct

SEQ ID NO: 320121 - DNA, 201 bp, Homo sapiens
acaaaataatatgagtatttagtaagatattcaataggatatgatcaaatgtgaggcatccagatttcttttctttttttcttttttttttttttttttttgagacagagtctcgctctgtcgcccaggctggagtgcagtggcacgatctcggctcactgcaagctccgcctcccgggttcacgccattctcctgcctca

SEQ ID NO: 320122 - DNA, 201 bp, Homo sapiens
aagtcttagtgaatggggaggaagcgaatgagaacaggaagggagggtaaagggtagtattgctggatagcatgagcaacagacaagtttttggttgtttstttttttataataagcatgacatattggtgatttggaagcattaatggagtacaaaaaggataaccagggatcccaaggtccatgaagtatagatgaaag

SEQ ID NO: 320123 - DNA, 201 bp, Homo sapiens
tacaaaataatatgagtatttagtaagatattcaataggatatgatcaaatgtgaggcatccagatttcttttctttttttcttttttttttttttttttttgagacagagtctcgctctgtcgcccaggctggagtgcagtggcacgatctcggctcactgcaagctccgcctcccgggttcacgccattctcctgcctc

SEQ ID NO: 320124 - DNA, 201 bp, Homo sapiens
ttttaattttatatgtattttttttagacggagtttcattcttgttgcccaggctggagtgtaatggtgcaatcttgtctcactgcaacctccgcctcccyggttcaagcgattctcctgcctcagcctcccgagtagctgggattacaggcatgtgccaccacacctggctaattttgtatatttagtagagctggggtt

SEQ ID NO: 320125 - DNA, 201 bp, Homo sapiens
ggattccttgctctggaaaggcaaaaaagggtaaaacaatttcatgtgcatgtgtgtgtctgtgtgtgtctgtgtgtgtgtgtgtgtgtgtgtgtgtgtgygcgcgcgcgcgcgcgtccgcgcgtccgcgtgcgctttttttttagtggtataggagaagattgagaagcttctgatcctgccatgtagctgtaaaaacaa

SEQ ID NO: 320126 - DNA, 201 bp, Homo sapiens
aacatgaaagcatccatatatagtacatagatgaatgagtatggctgtatttcaataaaactttatttatggaccctgaaattttaattttatatgtattytttttagacggagtttcattcttgttgcccaggctggagtgtaatggtgcaatcttgtctcactgcaacctccgcctccccggttcaagcgattctcctg

SEQ ID NO: 320127 - DNA, 201 bp, Homo sapiens
aaaaaaaaaaaaaaaaaaaaaattcaggctgggcttggtggctcatacctgcaatcccagcactttgggaggccaaggcaggaggttcacttgagcccagmagtttgagaccagactggggaacatagtgagacctcgtctctaccgaaaataaaaatgaaaaatcagtcggatgtggtggcacgtgcctatagtcccagc

SEQ ID NO: 320128 - DNA, 201 bp, Homo sapiens
tctcagcatcaaattagtattaaatgcgaattaaaaccacaataagacactactcttatactatactatactccattggctgcataccacccccccccccaaaaaaaaggcagtatcatccaatcaatatttggcattataaaaacagaagaatggaactatactaccagttagtaatttaaaaacaatttttttaagaca

SEQ ID NO: 320129 - DNA, 201 bp, Homo sapiens
tattcctttataaagttgataagaaaaagcacatgatataaaacataaatgtattaagagaacataaactatatatgtattgtatacacacacacacacamgcacgcacacattaaacaaaatagaacggttgcctttgcaggaggagagacatagtgaaaagggagaataaaagtgaagacttgatttatattatttcca

SEQ ID NO: 320130 - DNA, 201 bp, Homo sapiens
agcacttcactgtggtgtctgaaatgtatcaccttatagacccggctaaaattttctttctagcatcctgttacactaatttgatttggacttgagactgytgtgaccaaataatcccgataacagtcaacaaatatttattgagcatctactgtgagcagccacagccctcatgagctgtcagtccacataatctttaca

SEQ ID NO: 320131 - DNA, 201 bp, Homo sapiens
ttattcctttataaagttgataagaaaaagcacatgatataaaacataaatgtattaagagaacataaactatatatgtattgtatacacacacacacacrcgcacgcacacattaaacaaaatagaacggttgcctttgcaggaggagagacatagtgaaaagggagaataaaagtgaagacttgatttatattatttcc

SEQ ID NO: 320132 - DNA, 201 bp, Homo sapiens
ttcaggtttccacagtcacggagtattggagagtggtgacgaagaaggcaccgagccctggaaggggcagtaaaggtttgagcaaaggcccaactgatcayttcatctctcctttcagtcctggacgcacaatatccagcgagagaaagagtttctgcggaagctggtgaaagctcgcgtcatcactgatctaagcagtgg

SEQ ID NO: 320133 - DNA, 201 bp, Homo sapiens
gcacacccaacgcacccctgcactactatgagaccgttcgcatggcagccatcaaagaggttcggggctgggtgtgggggcaatccctgggtggggatgasggggaggtgcataaatgagtagtaaagggaggagccagtggctggtctggctgcccagaactccccagaaggtcctgacaccaagcatcctacgtgccct

SEQ ID NO: 320134 - DNA, 201 bp, Homo sapiens
atgctgtatcagagatgaaactaaacctattcctcatcttttcttcttgcttcaaacataactttgaaaaatcatttatgctgtctttagcctcatccctkccccaaacttcacattgttctgggttttaggtgtctcaaaaattttttttttctcccggaagacccatgactcctcttgaatattaagtgcctttttcta

SEQ ID NO: 320135 - DNA, 201 bp, Homo sapiens
ctctataccattaaaaaatttttttaagtttatgcagccatttaaagtggctgcataaactctcatttagatgtttatttgaacatttagtttaaaattcytttccctttttaacttttcattttgaaataacttcttatttacaaaagagttgtagaaatattacaaagaactcccatatgtccccttcagctagcttat

SEQ ID NO: 320136 - DNA, 201 bp, Homo sapiens; identical to SEQ ID NO: 67095

SEQ ID NO: 320137 - DNA, 201 bp, Homo sapiens
ttatagcaaagcaaatggactaagagtcagcataatggtggtaaacgaagtcacagaagaggatgacattgctttggggatatctgcagaatgagaatgtragaaagcctaagatagcaccctgagctgctctctatatttaaaattgttgtgtgtatatgtaatatatgtatgcatatatatatatgcattcaaattata

SEQ ID NO: 320138 - DNA, 201 bp, Homo sapiens
gaaatttgatccccagtgttggaggtggagcctagtgggaggtctttgggtcatgggggcggatccctcatgaactgcttggtgcagtccctgcataatgrgtgacttctccctcagagctggttatttaagagggtagcaaccctcccctctctctcttccctcctttttttttttttgagatggagtctcgttctattg

SEQ ID NO: 320139 - DNA, 201 bp, Homo sapiens
gaggagtctagtgtcaaggctaatttccaggtttcttacagaagcatctgtgaaagggttgactttgattgagatagtaaatgctggaggaagagtaattmctcggggtgaaacatctagatgatgaggtatagcaagaagttacatacttggacttggaactcagaagggatatctaggctgaatatgtaaaatttagga

SEQ ID NO: 320140 - DNA, 201 bp, Homo sapiens
tgagagtgaggaggagtctagtgtcaaggctaatttccaggtttcttacagaagcatctgtgaaagggttgactttgattgagatagtaaatgctggaggmagagtaattcctcggggtgaaacatctagatgatgaggtatagcaagaagttacatacttggacttggaactcagaagggatatctaggctgaatatgta

SEQ ID NO: 320141 - DNA, 201 bp, Homo sapiens
tcttccttcttctccttctccttcttcttcttctccttcttccttcttcttccttcttcttctccttcttccttctccttctcctccttctcctcctcccytctccttctcctcctcccttctcctcctccttctcctcctcctccttctccttcttctccttcttccttctccttccttcttcttctccttcttccttct

SEQ ID NO: 320142 - DNA, 201 bp, Homo sapiens
caacatgactctcagccgctgctggccgagtaagaaccgagggcagtaagacctcagcgcagtgagccacgaagggcagaggcagaggtggcctgctccarggaggaggccctgcccagctcacccaccgccatgcagaggcagcaactcaggaagggctgcctttgtgggagagaattttcacctcacaccagtaatcgt

SEQ ID NO: 320143 - DNA, 201 bp, Homo sapiens
ttcaagaccagcctgggaaacataatgagacccttgtctctacaaaagtaaaaaatcagccaggtgtggtagtgcatacctgtagtttcagctacttgggwggttgaggtgggaggatcacttgagcccagtagttggaggctgcagtgtgatatgatcgtaccactgcactctagcctgtgcaacagagcaagaccctgt

SEQ ID NO: 320144 - DNA, 201 bp, Homo sapiens
tgggattcatttagcttgctgcttcttcttcttccttcttccttcttccttcttcttcttcttccttcttctccttcttctccttcttctcctccttcttytccttcttctcctccttctccttcttccttctccttcttctttcttctttcttcttctccttctccttgttcttcttctccttctcctcctttttccttc

SEQ ID NO: 320145 - DNA, 201 bp, Homo sapiens
cattaggcttcacctcccagcactgttgtattggagattaagtttccaacacatgcttttttgggggacatgttcaaaccacagctctagttacatacccwcttccactcttaggtatatgcccaagagtatgtccatacaaaaatgtatacgtgaatgttcatagcagcgttattcagccaaaaagtagaaacaacccag

SEQ ID NO: 320146 - DNA, 201 bp, Homo sapiens
gattgggattcatttagcttgctgcttcttcttcttccttcttccttcttccttcttcttcttcttccttcttctccttcttctccttcttctcctccttyttctccttcttctcctccttctccttcttccttctccttcttctttcttctttcttcttctccttctccttgttcttcttctccttctcctcctttttcc

SEQ ID NO: 320147 - DNA, 201 bp, Homo sapiens
catgcttgtaatactagcactttgggaggccgagatgagcggattgcctgagctcaggagttcgagaccagcctgggcaacatgttgaaacctcgtctctrctaaaatacaaaaacaaatcaggcgggtgtggtggcgggtgcctgtaatcccagctacatgggaggccgaggcacgagaattgcttgaacctgggaggct

SEQ ID NO: 320148 - DNA, 201 bp, Homo sapiens
gagtgcaatggtgcaatctcggctcactgcaagctccgcctcctgggttcatgccattctcctgcctcagcctcccgagtagctgagactacaggagcccrccaccacatctggctaattttttgtatttttagtagagatggggtttcaccatgttggccaggatggtctcaatctcctgaccttgtgattcacctgcct

SEQ ID NO: 320149 - DNA, 201 bp, Homo sapiens
ttctgttttatcctcagattgagccaggccagctaagaactgcattcataggccactttattttttggctagacacacacacacacacacacacacacacrcgcgcgcgcacacacacacacacacacacacacacactgcaactatggagcagagccataagaaataatcccatgacacttcatatcattttccttatac

SEQ ID NO: 320150 - DNA, 201 bp, Homo sapiens
agttctagggctgcatggtggtaatggatgtacaacagtgtgaatgtacttgatgccacagatgtgtaaacttaaaatggtaattttttttttttttttttgagatggagtctcactctgtcacccaggctggagtgcaatggtgcaatctcggctcactgcaagctccgcctcctgggttcatgccattctcctgcctca

SEQ ID NO: 320151 - DNA, 201 bp, Homo sapiens
ctctactaaaaatacaaaacttagccaggcgtggtgttgcatgcttgtaatcccagctactcgggaggctgaggcaggagaatctattgaacccgggaggyggaggttgcagtgagccgggattgcaccactgtactccaacctgggccacagagtgagaccctgtctcaaaaaaaaaaaaaaaaagaaagaaagaaaaaa

SEQ ID NO: 320152 - DNA, 201 bp, Homo sapiens
cgcttgaactcgggagacagaggttgcagtgagccaagatcgtgccactgcattccaggctgggtgacagagtgaaactgtgtttgaaaaaaaagaaaaaagaaagaaagaaagaaagaaaaataggctcatgcctgtaatcccaacactttgggagggctgacttaaggtcaggagtttgaaatcagcctggccaactgg

SEQ ID NO: 320153 - DNA, 201 bp, Homo sapiens
aaataaataaataaataaataaataaagtaggaatgatatctataggccaggtcttgggggatcttgtaggtgaagagattgggatttgttctgagaacartagaatccaaccaaatgttttaagcaggattgtgatatggccatatttatcttacagaaagatagctctgattacagcacagagcatctattagacaggg

SEQ ID NO: 320154 - DNA, 201 bp, Homo sapiens
tcgcttgaactcgggagacagaggttgcagtgagccaagatcgtgccactgcattccaggctgggtgacagagtgaaactgtgtttgaaaaaaaagaaaaaagaaagaaagaaagaaagaaaaataggctcatgcctgtaatcccaacactttgggagggctgacttaaggtcaggagtttgaaatcagcctggccaactg

SEQ ID NO: 320155 - DNA, 201 bp, Homo sapiens
atcgcttgaactcgggagacagaggttgcagtgagccaagatcgtgccactgcattccaggctgggtgacagagtgaaactgtgtttgaaaaaaaagaaaaaagaaagaaagaaagaaagaaaaataggctcatgcctgtaatcccaacactttgggagggctgacttaaggtcaggagtttgaaatcagcctggccaact

SEQ ID NO: 320156 - DNA, 201 bp, Homo sapiens
aatcgcttgaactcgggagacagaggttgcagtgagccaagatcgtgccactgcattccaggctgggtgacagagtgaaactgtgtttgaaaaaaaagaaaaaagaaagaaagaaagaaagaaaaataggctcatgcctgtaatcccaacactttgggagggctgacttaaggtcaggagtttgaaatcagcctggccaac

SEQ ID NO: 320157 - DNA, 201 bp, Homo sapiens
gagaatcgcttgaactcgggagacagaggttgcagtgagccaagatcgtgccactgcattccaggctgggtgacagagtgaaactgtgtttgaaaaaaaagaaaaaagaaagaaagaaagaaagaaaaataggctcatgcctgtaatcccaacactttgggagggctgacttaaggtcaggagtttgaaatcagcctggcc

SEQ ID NO: 320158 - DNA, 201 bp, Homo sapiens
taaaactatccaattggaacaacagagaaaatcttttaaaagttgaacagagcctagtgacttgtggcacaatactagaagatttatcattcgtgtcttcrgagttccatatgaaatttttgaagaaacaatggctaaaacgtcccaaatttggtgaccaagtgtggtttatcctgggaatggaaggctggttcaacaatg

SEQ ID NO: 320159 - DNA, 201 bp, Homo sapiens
agagcaacaatacattctcagttagaaaactgcaatttggttctgccacatcctgactactacagtatagtattctctattctttcattccccccccccccattcctatattacatgtagagtaagtggtgtgtgtacacacgcatattgtacttttaagaaaacaaaatggccaatggtatgttttgattaccatcaaat

SEQ ID NO: 320160 - DNA, 201 bp, Homo sapiens
tgtagagatggggtttctccacgttgcctaggctggtctcaaactcctgagctcaagtggtcttctcacctcagcctcccaaagtgctgggattacaggcrtgagccactgcacttggcctgaggctagagtttttattattatattattcattcagtaagcagtatgttcttattatggtccatgtactgttctgggtaa

SEQ ID NO: 320161 - DNA, 201 bp, Homo sapiens
ccaagtagctgggactacaggtgtgcaccaccacgcccaactaatttttcaaaatttttttgtagagatggggtttctccacgttgcctaggctggtctcraactcctgagctcaagtggtcttctcacctcagcctcccaaagtgctgggattacaggcatgagccactgcacttggcctgaggctagagtttttattat

SEQ ID NO: 320162 - DNA, 201 bp, Homo sapiens
cacgaactgaattcagccaacggcctgagtgagcatggaagtggattcttctccagggcctccagaagggaacacagccctaccagcaccttggttttggycttgtgcgactctaagcaaggatccagctgagcctcaccatatccagattttggccttcagaactctgagataattttgtgttgttttaaactgctaagt

SEQ ID NO: 320163 - DNA, 201 bp, Homo sapiens
gggtcatgggggcggatccctcatgaactgcttggtgcagtccctgcataatgagtgacttctccctcagagctggttatttaagagggtagcaaccctcycctctctctcttccctcctttttttttttttgagatggagtctcgttctattgcccaggctggagtgcagtggcatgaagtgggctcactgtaacctcag

SEQ ID NO: 320164 - DNA, 201 bp, Homo sapiens
atttttacggaactaaccatattgatgtcatctgtactacatgaaccgtactacattaggacgtgaatgagtgaatggcggtaccacacactctacactgyggaattttcacacttcctgaggagtcttcctgaacctcatgtgcgacagacatctgacttagggactgcatgaggaggccggtgtccatgaaattaaaca

SEQ ID NO: 320165 - DNA, 201 bp, Homo sapiens
ggttcccctggatttccccaccttttttctcccttggacagcatccctacgatctcttattttcacatttttcatattttatgtgagtgtatacatttctktctctcctactagaccaggtgctctcatcatccacaaatgtgtactgaacataagctctgccaggctctgtgctaggtggtggcttgataggtatgaagg

SEQ ID NO: 320166 - DNA, 201 bp, Homo sapiens
tctgttgcccaggccagagtgcagtggtgcagtcatagctcactgtagcctcaacctgccaggctcaagcgatcctcctacctcaacctctcgaagtagcygggaccacagactcacaccaccattcctggctaatttttgtgtcttttgtagagatggggtttagtcatgttgcccaggctggtctcaaactcctgggct

SEQ ID NO: 320167 - DNA, 201 bp, Homo sapiens
ctgcagtgatatgtcttctcttaaaatagttttatttttactaacatctaccagataccagtatagaactcacttgagaagagagtcagtctctaggtacraggtgaaagtgagctgcagtgagtgggaagaagcaacgggcaattggcctgctgttgttctaagaccctaacatgggaagtattacagtgaagtagctca

SEQ ID NO: 320168 - DNA, 201 bp, Homo sapiens
tacatagtgttttccacatagcctgaatcccactggtttggtttctgtttacctgatgtggcctgtgttttggttctaggcttgcagttgaagggcttacrttgatcagcaccagcctttgcacattgttttcttggctgtagcttgaaatatcacacagtgaccatagtggttttctttttggttattttgtctgactgt

SEQ ID NO: 320169 - DNA, 201 bp, Homo sapiens
aatttacatttctacaatgtgttgtttgatttttttaatagtaaaaaattaatggaggcagtacttgtgacttcataaaaaatacttttttttttttttttaagagacagcatctctctgttgcccaggctgatgtgcagtagcatgatcatagctcactgcagcctcgaactcctcaagcagtcttgaggcgggctcaag

SEQ ID NO: 320170 - DNA, 201 bp, Homo sapiens
tgctgggttcaagcgattcccctgcctcagcgtcccaagtagctgggactacaggtgcgtgccaccgcacccagctaatttttttttttttttttttttttgagatggagtcttgctctgtcactcgggctggagtgcagtggcgcgatctaggctcactgcaagctccacctcccgggttcacgccattctcctgcctca

SEQ ID NO: 320171 - DNA, 201 bp, Homo sapiens
actctgagaaaccgagaaaaggagaaatccatgtgtttgaggaaggtttcacagggaagctgaggcttgaattgggtcatgaagagtgggtagccggctgkatgaaggggaagaagtgagcagatgagaaagtgaggatgacaaaggtgcaggggaacctgagatgctcatgggtggttccagggggtttcttagcagaaa

SEQ ID NO: 320172 - DNA, 201 bp, Homo sapiens
atccacagagccgtgctaacagcaccacaattacaaacatcaccacaattcattttaaacattttcattaccccaaaaagaaatcctgcagccatttgccrtcagggcccattttccctcagtcacccgtatccctagggcaaccactgatctgctttctgtcaccgtagatttgcatgtcctggacattccatataaata

SEQ ID NO: 320173 - DNA, 201 bp, Homo sapiens
gcgcccatgcagcccagcgcgttgtgggctcccgccggggtcccccgcggctgtcgccgccgcctacgccgctgcctccgccttcctgccccgcgtcgggycgggcgccacctcccccctgcctccctctccgctgtggtaagggcctgcccagtgcgcttcggggcgcgatggctgaccgcgaataacggtcgccgctcc

SEQ ID NO: 320174 - DNA, 201 bp, Homo sapiens
actgtaacctcaaacttatgggctcaagcaatcctcctacctcagcctctcaaatagctaggactacaggcccatgccaccatgcctggctgatttttaawttttttctggagacaggatcttactatgttgcacaggctggtctcaaattcctggcctctcaaagtgctaggattacaggcatgaaccaccatgcctagc

SEQ ID NO: 320175 - DNA, 201 bp, Homo sapiens
tagttgttctcagtgggaagtttggacaagatatatagttccttgtgtagttagaaatacaagtttctgatttctttttcttttctttttttctttcttttcttttctttcttttttttttttttttttagacagagtcttgctctgttgcccaggcgggggtgtagtgatgtcataatggcttactgtaacctcaaactt

SEQ ID NO: 320176 - DNA, 201 bp, Homo sapiens
ttagttgttctcagtgggaagtttggacaagatatatagttccttgtgtagttagaaatacaagtttctgatttctttttcttttctttttttctttcttttcttttctttcttttttttttttttttttagacagagtcttgctctgttgcccaggcgggggtgtagtgatgtcataatggcttactgtaacctcaaact

SEQ ID NO: 320177 - DNA, 201 bp, Homo sapiens
tttagttgttctcagtgggaagtttggacaagatatatagttccttgtgtagttagaaatacaagtttctgatttctttttcttttctttttttctttcttttcttttctttcttttttttttttttttttagacagagtcttgctctgttgcccaggcgggggtgtagtgatgtcataatggcttactgtaacctcaaac

SEQ ID NO: 320178 - DNA, 201 bp, Homo sapiens
ggcctcatgggccggggggtgagatatctgggccctgggagagggaggaggaaagctgggtcagaagtgccttggaaggaagggtgggtggtgggtggggyagtgcttctgcaaaatagctttctggggaagagggctcagtccttgggcatggaggctagctctagggagcttggctgaagtctcagctgtcccagccct

SEQ ID NO: 320179 - DNA, 201 bp, Homo sapiens
tttttagttgttctcagtgggaagtttggacaagatatatagttccttgtgtagttagaaatacaagtttctgatttctttttcttttctttttttctttcttttcttttctttcttttttttttttttttttagacagagtcttgctctgttgcccaggcgggggtgtagtgatgtcataatggcttactgtaacctcaa

SEQ ID NO: 320180 - DNA, 201 bp, Homo sapiens
gggggacagacctagaccagctcccagggtggctcagctctcagagaccaggctggtatggaagcctagctggccctcctgggagtggctcaggcctgagwgtagctgaggggatggaaaagcccaccctgcttggaatctgcaggcttggcagactctgcccccttgtggccacaggaagccatgacccaggccccatgt

SEQ ID NO: 320181 - DNA, 201 bp, Homo sapiens
tttatcagttctagccaagaacacttgaacctagtctttttttaaatttgagatggagtctcgctctgtcgcccaggctgtagtgcagtggcgtgatctcrgctcactgcaacctctacctcccaggttcaagcaactctcctgcctcagcgtcccaagacgctgggactaccagcgtgcccaccacgcctggctaatttt

SEQ ID NO: 320182 - DNA, 201 bp, Homo sapiens
atttagaatatgtttagtgattgtattaacaggacttgctgatgaattggatgagaggcagccaagaaaaagagatgagtcaagaatgactccaagggatrccatccagttggcaagagagagatttgtttgtaaaataggtgttgctctttgtgaggatctgggaatatgggactaaaagagaaaaaagaatgactccta

SEQ ID NO: 320183 - DNA, 201 bp, Homo sapiens; identical to SEQ ID NO: 67081

SEQ ID NO: 320184 - DNA, 201 bp, Homo sapiens
tgttttctggtcatattaaatgtatcatttgacattttatagtgtaaacagaacagtgcatcttctaaccatggcttctcctggactccttcagccccatmtgcctgggtctaagggaggtactactttgtagaggattgttgtaaagctgaattagatcattagatccgctgtctggtgcctggtttgtgctcagtgaat

SEQ ID NO: 320185 - DNA, 201 bp, Homo sapiens
tcattctgtgacaaaatagaaatttaaaaagcaaaaccaaccgatccctcttcacagatggtttgagaagtgtcggactacagtggaaagaacaggttttygaagtgaatagggctgggttgctcaacctttctgagcctcaccttcctcatctgtacctatcttccccagagctaagagaaatggtgcatggagacaaaa

SEQ ID NO: 320186 - DNA, 201 bp, Homo sapiens
acctccctgggctctggtaatcctcccacctcagtctccctagtaactggggctataggtgcacacccaccacacctgactaatatttctttttctttttyttttttttttgtagagatggggttttgcacaaggcttcttatggtatgggatgggaccggcgtgggaggtgggccagaccaccatggtccagcacaacag

SEQ ID NO: 320187 - DNA, 201 bp, Homo sapiens
ctctgaaccatggacctagaggggaatgcagattccttttgtttggagaatgttttaaatattttcagtaggtacctgctgtgttgaaatccttgggtacrgacctttctgggaagagcagagtgctctataactaaagcttctctgcagagtgtctaagagtagcctgcatgggctagacaacctcaatgcctgtccatg

SEQ ID NO: 320188 - DNA, 201 bp, Homo sapiens
aagctcagtgtatccaacgcaccgaatttccaacaaatctaatcagcctatgttcttatttcaggaaatggcaccactatccattctcacccaaacaagamatctgggagtaattcttttcccttcccctcttaaccagatatctaatgagtcgtcaagtcctggcacttgtgtactgtcttctttccgaggtcagttcct

SEQ ID NO: 320189 - DNA, 201 bp, Homo sapiens
gcagagccctaatccaagccacgtccatgctgcagagtgatactagcagcagtgacagtgatagctcacacctactgatgtttactttggatcaggtcccrtgctgagattttttcatattttttctgttttaattctcccaacaatcatataatgagactaacccttgttagtccagttctaaatatgaggaaataaagg

SEQ ID NO: 320190 - DNA, 201 bp, Homo sapiens
gtgtgcgtaaattaacaaacacaaacagaacagattttaaaagcactgacataggagggaaggaagggtcaacctcattatgacttgttgagatgggactrgtgacaaaaacaggatgataaaaagataggacatttcaaagactacatttaaaggagaaaaagaagcaagctgtcctggaggcaagactaggggtgaaaa

SEQ ID NO: 320191 - DNA, 201 bp, Homo sapiens
agtctttgtggagagggttaaatttcaggcctttatacatgatgggagggaactaccttggcaaactgggagttcttaaaagggaaccccaaagcaaaacycagaaaatagaaggtgtgaagggcattaaataaacagtgtggcagacagttagttgcgcctaagaagagccagaggaggctcgctgtgggcaggtgacag

SEQ ID NO: 320192 - DNA, 201 bp, Homo sapiens
cagagaaaacaagagaagatgacatgttagagaatgactgcggcaggaaacccactttagacagaagagtcagagaagacgtccctgaggaggtgacattycaacagaaatctgaatgaaaacatagaaccagccttggaaagatgcagagccgttgtggaaaggtccagactcagaaaaaggcttgtatttaaggactgg

SEQ ID NO: 320193 - DNA, 201 bp, Homo sapiens
atctgatgactgtttcctattgctgcagtaaattattttatccattctaagtttagttgattcttttaggttttctttcttttctttcctttctttgtttyttttttttttttttttttttttttttgagacagagtctcgctctgtcgcccaggctggagtgcagtggtgcaatgtcggctcactgcaacctccacctcc

SEQ ID NO: 320194 - DNA, 201 bp, Homo sapiens
cagataacccacgcacataaagtgtcacgccatttttagagcacctaccgtgtgccagacactgtatttcattacttcatttagcttttacaatgggagcsgatcataattccaaaagacacaatcatgaacaccatagtcccaaatgctgaaatcctaaaagatcagccaggcgcagtggctcacgcctgtgatcccatc

SEQ ID NO: 320195 - DNA, 201 bp, Homo sapiens
cctagttctgccttattcatgctctcatggaatatttgcaagaggccaatagttttgctatctcctgctttgcatcaagcctaaaagggaatggtaaccargcaagagctgggtagaggtcttcacagtggccactttactgttttatttggagagaatttacaaagcgctgggcataccacatcgccaaaaacgttttag

SEQ ID NO: 320196 - DNA, 201 bp, Homo sapiens
tattcatgctctcatggaatatttgcaagaggccaatagttttgctatctcctgctttgcatcaagcctaaaagggaatggtaaccaggcaagagctgggyagaggtcttcacagtggccactttactgttttatttggagagaatttacaaagcgctgggcataccacatcgccaaaaacgttttagaactttagcagga

SEQ ID NO: 320197 - DNA, 201 bp, Homo sapiens
tcgtctgtgtgtggtcaaatctctctccacctctctcctctaaggattcacaatggtgttagggctcacctagataatccaggattatatcctcatctcaraatcttactttaggaagtgtacatcctaccagaaaaacacaagcaataaacaactaagaagtaaaatatttagtaaattaccacaagataaatgccatgg

SEQ ID NO: 320198 - DNA, 201 bp, Homo sapiens
caggtgcttggcagaggagaggaaaagcagcctcccctggagagcctcaagaaaagcctcgtagggtctgccaggcttcagctgtggcaggaggtagagaygggtaggccgggtggttggaatcgtgagtcagagggcattatgagaagggtttgacagaggactgaggttgagagaaatggggtccgtggctcattgtag

SEQ ID NO: 320199 - DNA, 201 bp, Homo sapiens
tctttcatccattcgcctgcgttagagcaaaaccagaattattttgaggaaagactttcacttgctcaaggccattctcttgggaggcaagccttacattsagttgtgtgtcctagttgatatcttcaattttaagaagaggatttattctctcttcacagctcagatgattttgaaagcaatgagtctggccttaattgg

SEQ ID NO: 320200 - DNA, 201 bp, Homo sapiens
actatggagcagagccataagaaataatcccatgacacttcatatcattttccttatacaaatgtttttgaggacacaggaaatttccctcaagtcttagyatcaagaatagctgtgattctcctggtttattttctggatactgctgaaccatgaaatcagtgctttgcgcttagttttagctatggaaaatcttgggga

SEQ ID NO: 320201 - DNA, 201 bp, Homo sapiens
cgtatgtttgtcaggtgcccgttaaacactgaatgcttggttggatggatggatggatggatggatggatggatggatggatggatggatggatgatggtwggatgactgcgtactttcctatttgacaagcatgccttgagttgcagctctctctactctgtgtgttcatgtccctgcaagcctgctcacatggccgatg

SEQ ID NO: 320202 - DNA, 201 bp, Homo sapiens
cagtcgcaggatttggctatgacatgagcacacccaacgcacccctgcactactatgagaccgttcgcatggcagccatcaaagaggttcggggctgggtrtgggggcaatccctgggtggggatgagggggaggtgcataaatgagtagtaaagggaggagccagtggctggtctggctgcccagaactccccagaaggt

SEQ ID NO: 320203 - DNA, 201 bp, Homo sapiens
acataggactggctgccctagaatgcataggaaatacctggcattgaacttggtccttcacaaaacaggtgttcagctggtgttttgtggtttatgtattkagttacgttctttgaagcagttgaattgtgttcttttccaagggtggtctgtccctgtggtctaggtctgggggatgcaatatgctagtatcatcagtga

SEQ ID NO: 320204 - DNA, 201 bp, Homo sapiens
ataagacactactcttatactatactatactccattggctgcataccacccccccccccaaaaaaaaggcagtatcatccaatcaatatttggcattataraaacagaagaatggaactatactaccagttagtaatttaaaaacaatttttttaagacatggtcttgttctgccacccaggctggagtgcagtggtgcaa

SEQ ID NO: 320205 - DNA, 201 bp, Homo sapiens
ctccaatccagccctctgccggtactctccttaatgatgttgtaaacctcaacatcgctgtctttgaggggctgcgccagcatcttgtcatgtgaggaccrcaggtcagcatccttgtgggccctgttgactggcattgctattgcatgggtccgaagctgccggaacacagccccgcacatgtgcctagcctcagtccca

SEQ ID NO: 320206 - DNA, 201 bp, Homo sapiens
aacgcatagaacaaaatataggagagaaatgttagtgattttgagtttggtaaagatttcttaaatagggcagaaaagcataaaaaaaaacattgaacttyatcaaaagtaaaaacttttgctctttaaacaacactgttacaaatatttaaaggcaagccacagcctgggagaaaatattgtgaaacatctacaacaaag

SEQ ID NO: 320207 - DNA, 201 bp, Homo sapiens
gttgtacagaatctctttgccagtcttgggatccatactttgccctcctttcctgtagaagatcgtgcggacttggcagcctctcaggttcttgtgagtgktggtggcagtgttcaaatggggagggcaccacgccagctgccaccagcctgctgatatgtgccatgtccaccatgagatacaccccattctcatctgcag

SEQ ID NO: 320208 - DNA, 201 bp, Homo sapiens
gaatgcagctaaaggcctgttcagaatgcatttaatagcagtttgaggactctgaaacataaatagtagcagacagataggggaagaataccagaattcartgtattactgaactggcagtgagtttcctattttcccttcagtgtcccatgtcttggactcaaggcaccccaaaccccagcaatggacaccaaggcacaa

SEQ ID NO: 320209 - DNA, 201 bp, Homo sapiens
tgagcagatctgaagttaaatcctaggaccaaggatctgaactccatattttaccacctcttgaaggtcagatgtcagttctgccttggggtggagggggygaggaaagacatgaaggagaggcagctgctgagtcttagaaaatggatgggtcatgtggatagaggtgggaaggatgttagagacaaggagcagcatcag

SEQ ID NO: 320210 - DNA, 201 bp, Homo sapiens
tcttgtaaagacattgtctcactatattgcccaggctggtattgaattcctgggctcaagtaatcctctcacctcagcctgccaaagtgctaggattacargcatgagccagccaccgcacctggcccaaaattcttagaagatatcattttgataactgtgacattcttttacataaatgtatcatttaatgaaacctct

SEQ ID NO: 320211 - DNA, 201 bp, Homo sapiens
acctagatatgttttgatacgcaaataccattgtgttacaattgcctacagtatttcagtacaatcacatttctaaatacactctatgatatttgcacaaygacgaaattgcctaacagcgcagttcttagaatatatccctgtcgttaagtgatgcatgactatatctgagaagctatcagaagaaataaaatggaatac

SEQ ID NO: 320212 - DNA, 201 bp, Homo sapiens
tactggtttttagattatttagaaaggaagggatagagggacctcattttgtttatggatgcatagtacctattttgtgtatgtaccatagttgattcaayccttgttgaaggacatttggagtacattgaatcttactctgttacgttacaaatagtgctacaataagtggccattcacataagactttttgtatttttg

SEQ ID NO: 320213 - DNA, 201 bp, Homo sapiens
ttttttttcatatattccttagcgtcaggtgttgggacctcctctgggaactaatccatgttctgcttttaaattaattccacatcttgtctgagcttacygcctcctccattattcaaggaatttagcctgccagttccctataatggtataccccgtctctttcctctttgctctatcttccaattctcataggtggag

SEQ ID NO: 320214 - DNA, 201 bp, Homo sapiens
ctaggaccttctcagcccttctgccatctgtgcctttgattgaatggagatccacgaggatcaaatgtttatcagaacaacctgtgactgtttggtagccsagctccgtcagtgcctcagacagagctctgcagttggccaccacatggtgctgataaacttcaaattccagagtcatagcttgcttcagggccacagcaa

SEQ ID NO: 320215 - DNA, 201 bp, Homo sapiens
aggtgcagactaaggagcaggcagtgtaaaggaaggggtgctgatgtgcccacccgtccagaccagagtcctgcttctctgggaagccagcctgtttgctstcacacttttgtactctctgctgggaagtcctcctttcctccctcgagtattgctcacttggatacatcttcctctaattagagagatggggaggggatg

SEQ ID NO: 320216 - DNA, 201 bp, Homo sapiens
tggaaaatctgaacccttctgaactccgcttgccacacttctgctttgaccaccagccttccactgatcccagcctgaaacctggaaatcttgggccagtkcttcaacagcttctctgctgctacatctgggtgatgggaggttgttggagggaacctcccatctgtgcagattcctgtttctgtaagtctgggggctctg

SEQ ID NO: 320217 - DNA, 201 bp, Homo sapiens
agctctgggcctacagggacatccgtgaacttgtccaggcccactcccccacaaccagctgtcaccagcagccccaggggtggggtactgcagagctcagrccattcatcttctaatacccaagcctcttgctagaggaggatggtgacagacggccctctgcctacagtgagaagctgattgttctttccggaggtttag

SEQ ID NO: 320218 - DNA, 201 bp, Homo sapiens
agcaattaaggcaagttttcaggctgtaaggttaatacacaaaaggcaattgcttttctatataccagcaagaagcaattggaatttaaaatttaaaacayggtgtcatttacattagtgccaaaaaaaaagggaaatacttagggataaatctgataaaatatgtgtaaatgtgtttgtgcatagatccatatatgaatg

SEQ ID NO: 320219 - DNA, 201 bp, Homo sapiens
cccctacttgccactgttatttaccaatccccagaagaggattcactgagaatgttggtgcccgggtttagaatccctctgttacctggggtgtctcacawggaccattcaacaccttggcttctcctcacttcacctgcatttgccttgatcagctcactctgcaggcccagcaggagtgtgtgggatgtggagacacat

SEQ ID NO: 320220 - DNA, 201 bp, Homo sapiens
acagtgtccagtccacctccccaaaggggaggaaagggccaggcagcagagtgatgatttggccttagccaggcccaacttcaagcaggcccactgcccayacagaccaggtaaataacagcggttccaggagtaccctactgttttcagaaccctggggactgagacactagtgttttcagagtccctctctttgccttg

SEQ ID NO: 320221 - DNA, 201 bp, Homo sapiens
atcagctcactctgcaggcccagcaggagtgtgtgggatgtggagacacatggaccaaggattgaatgccggggatatggaagggatgtcaagggaatccwtaaaggagacagaggaatcaggaaggtgccacatcgtggaggccaaaggagcagcattccaggaagagcatctacaatgtggtgctgggaaacccagtaa

SEQ ID NO: 320222 - DNA, 201 bp, Homo sapiens
tctgtgaggatggtaagaactactgttaactcttctccatgccaggccctggacgatgtggtttatatgcatcatctcagccagccatctccacaaccctrcaaggcagatactatgagtagtagtaagcagtagagccgcattttggaccgaaggtgtttcactttaaccattgcactataacacctcccatttattcat

SEQ ID NO: 320223 - DNA, 201 bp, Homo sapiens
ggaagggatgtcaagggaatccataaaggagacagaggaatcaggaaggtgccacatcgtggaggccaaaggagcagcattccaggaagagcatctacaaygtggtgctgggaaacccagtaagatgagggctgagaggtggccgtcggatgtagctgttaggagttaactgctgactgtggtgagaacagtttcaaagga

SEQ ID NO: 320224 - DNA, 201 bp, Homo sapiens
ttcattttctctaaaagataaggactattttttaaattattacacctaaaaacatgaacagtaattccttaatatcatcaaatgtccagtcctctgctgaycttttaaccctcaatgactcctagtgggtgctgttgaccctgacccatcaaattcgttactacttctccagaggagtgatgaggacgagggataagtaaa

SEQ ID NO: 320225 - DNA, 201 bp, Homo sapiens
caaacagttcatcagcaaacactcttgcatgtctcctggagcaagtgtgtgactttttcaacgctccacgcctaggagcatagttgtaggatcttagtgtmtgcacatcttcgtggttatttgatgttattaagatgctctccattgtggtgataccagtttactttatttttaggtctttgtgtacgttattttatatct

SEQ ID NO: 320226 - DNA, 201 bp, Homo sapiens; identical to SEQ ID NO: 67096

SEQ ID NO: 320227 - DNA, 201 bp, Homo sapiens; identical to SEQ ID NO: 67087

SEQ ID NO: 320228 - DNA, 201 bp, Homo sapiens
gcgggggcaggtgaagggggcaaggcttaagtccagaaggcagtgacagctcccaaaccaacagaccctagagcaggaagccccagggtcagggatgggasaagcaagatgggtaagctctctagtggctgctgggagccttgagtcctagagcctcctgtcccgttccccttttcttgctttcctggtatagccccaagc

SEQ ID NO: 320229 - DNA, 201 bp, Homo sapiens
ggactttaagtggttgaaatacatcgtctacaaggagagagtggtaagctctcctggcaccagcttcttcccctcttgccctgggcttccgcaactcctargcaatcccgccccttgaatgcagcaaagaacgagtaagaaccttcaaaggaaacattaatgacccaaagccaaaatcacccaatggcaaccagggggcaa

SEQ ID NO: 320230 - DNA, 201 bp, Homo sapiens
cccatcaaattcgttactacttctccagaggagtgatgaggacgagggataagtaaagaggcaaacgagtttccacatctgcttgaatcctggccttgtcwttcctccaagtctctgttttccctgtaaaacctaatttcattcaacaaatattgaggcacctactctgtgcctaacagtccctaccctcaaagagagaca

SEQ ID NO: 320231 - DNA, 201 bp, Homo sapiens
ctaaaaatacagaaattagccagtcatggtggtgggcacctgtaatcccaactactcgggaggctgaggcaggagaatcgcttgaacctgggaggcggagkttatagtgagccgagatcacaccattgcattccagcctgagcgacagagcaagactctgtctcaaaaaaaaaaattaaattaaatttaaaaaaaaaggaa

SEQ ID NO: 320232 - DNA, 201 bp, Homo sapiens
cctggtggtagctaatgaggtgctgatgtagaaatggttctcttacccagctctacagaggaaaaccacacctctcttgagatgcattttgttttaggaargctggggtgtgtggtgtgtatctgtgactgtgcgtctgtgattcacatactgctaaggaatcattgctatggtccaagctggctgagtttccagagtgca

SEQ ID NO: 320233 - DNA, 201 bp, Homo sapiens
tgaacccaagtccacatatttaacaaccgccttctacttcctctcacagctgctgtttcatgggcaggctggctagtggccaaggtaccgaggtctaccaratgcctggtggtagctaatgaggtgctgatgtagaaatggttctcttacccagctctacagaggaaaaccacacctctcttgagatgcattttgttttag

SEQ ID NO: 320234 - DNA, 201 bp, Homo sapiens
gcatgactatatctgagaagctatcagaagaaataaaatggaatactaaaaaatatttagtcagtcccaaagaaggaaggaaattttgacacatgctgcarcatgggtggaccttgaaggcatcatgttaaatgcgtaagccagtaacaaaaggacaaatactgtaagattcctcttatacgaggttcctagagtagtcaa

SEQ ID NO: 320235 - DNA, 201 bp, Homo sapiens
tcaattaataaattaaattaataatttaagctgatgcttcctggtgccgtaacccctacatgccaatgccttactaacccatagtcttttatgcctttgtkctgtgcctgctagtcccccaacctggagtgcttctccatattctttgccttaagaactactgctttggccgggcacagtggctcacgcctgtaatcccgg

SEQ ID NO: 320236 - DNA, 201 bp, Homo sapiens
cctttgtgctgtgcctgctagtcccccaacctggagtgcttctccatattctttgccttaagaactactgctttggccgggcacagtggctcacgcctgtwatcccggcactttgggaggccagggcaggcggatcacctgaagtcaggagttcgagaccagcctggtcaacatggagaaaccccgtctctactaaaaata

SEQ ID NO: 320237 - DNA, 201 bp, Homo sapiens
tatttcataaacatttattgaaaccctgccaatatgtaagccctgtaagtgacataagtaggaatcccatgagccctgttgaattttgatccagcaggagrtctgcttaggccgccaggccgtcacaatcacaggccatgctgggagcagggaagcccaggtctggggaggggaacctgggacagcgcagagcacaggctt

SEQ ID NO: 320238 - DNA, 201 bp, Homo sapiens
tgagtacactgctcttgtactggaggtaaagcagtgagcaaaactgaccaacagtcttgccttcatggggctcatattctagtgggaagcaggcaaagaamcgatatagaaataaggtgtacagtattttagatggtgggaaatactagagaaaaataaagcaggaatggaagttagagaggggctgccatttgagattgg

SEQ ID NO: 320239 - DNA, 201 bp, Homo sapiens
ccccaggttgcccttcctggctggttagcctgacccttatgcttaatcatagtcctctttcagtctacaggtctgcgagcagggcagcctcctggctcctkaggttccatctatgctgtgagagacacaggggtcagatccacactcagcatgtactctcccagggcccaaaacccccaaactactaggctgtaggatcta

SEQ ID NO: 320240 - DNA, 201 bp, Homo sapiens
gagaaatagggagagacttgtcaaattatacaaaatcacagctagataggaggaataaattctagcgttccatgacactctggggtgattgtagttaacartaatatatagtttcaaatagctagaaggaagatattgaatgttctcaacacaaagaaatgataaatgttggccgggtgcagtggctcatgcctgtcatcc

SEQ ID NO: 320241 - DNA, 201 bp, Homo sapiens
agaggagtaaaatctagattgcattagattggagggtgactaggagatgaggaagtggagacaggatatccactgctcttcctagaacttttgccatgaarggatgaaagagaggctggtagctaaagcgggtacatggccaggacgctttgtcgaatttgtttgtttgtttgtttgtttgttttcacaggggagagacct

SEQ ID NO: 320242 - DNA, 201 bp, Homo sapiens; identical to SEQ ID NO: 67088

SEQ ID NO: 320243 - DNA, 201 bp, Homo sapiens; identical to SEQ ID NO: 67089

SEQ ID NO: 320244 - DNA, 201 bp, Homo sapiens
tgggactgaggctaggcacatgtgcggggctgtgttccggcagcttcggacccatgcaatagcaatgccagtcaacagggcccacaaggatgctgacctgyggtcctcacatgacaagatgctggcgcagcccctcaaagacagcgatgttgaggtttacaacatcattaaggagagtaccggcagagggctggattggag

SEQ ID NO: 320245 - DNA, 201 bp, Homo sapiens
cctttatttcctcatatttagaactggactaacaagggttagtctcattatatgattgttgggagaattaaaacagaaaaaatatgaaaaaatctcagcaygggacctgatccaaagtaaacatcagtaggtgtgagctatcactgtcactgctgctagtatcactctgcagcatggacgtggcttggattagggctctgc

SEQ ID NO: 320246 - DNA, 201 bp, Homo sapiens; identical to SEQ ID NO: 67120

SEQ ID NO: 320247 - DNA, 201 bp, Homo sapiens
gaccatttttaataagcacaatcaaatttttaaccactgaatgtctataagaattatagctttaaaaatacaatttttatatttcaaaaatatttgaactsaaactaatttcttaaaaagttaaaaaaggtaagatttaatagtttttgtagatcatctcaaaattaacacatcaaaaagagctttatcaagtccttttct

SEQ ID NO: 320248 - DNA, 201 bp, Homo sapiens; identical to SEQ ID NO: 67121

SEQ ID NO: 320249 - DNA, 201 bp, Homo sapiens; identical to SEQ ID NO: 67122

SEQ ID NO: 320250 - DNA, 201 bp, Homo sapiens
atgttctttgctgggagcgagtggacagtgtgctttctggaagtccaagttcccagcagagaggaacctggggactgttttggggtttccaatctctgctrtgctcacagcctaggggtgactaaagctggccaccttgccctttcctgagaacacactgggtctggtatacatgtgcccagaaggggccctgagagcccc

SEQ ID NO: 320251 - DNA, 201 bp, Homo sapiens
ttagtaactatgcctctgaccctcatttgctccatctgtaaatggatataatgcctaccacccaagctggtttggaagattgaatgctgtgtatgaagcgcttcccaggagtgtggtggtggttgctgtggggctggaagctgtacatcttgaggcctcaccacgtgagctgaaggtggttggcctccgtgctgcgtggca

SEQ ID NO: 320252 - DNA, 201 bp, Homo sapiens
gaagcgcttcccaggagtgtggtggtggttgctgtggggctggaagctgtacatcttgaggcctcaccacgtgagctgaaggtggttggcctccgtgctgygtggcatcatccgggtgatgcagctccactgcctgctcccacggggggacatacctgtgcaataggaactcagagaacaggccctgggccagcatcactg

SEQ ID NO: 320253 - DNA, 201 bp, Homo sapiens
cgtgacctgggggcaagtatttcaatgctgcccagtcctcctattggcagctgtcctagcagggagccatctgccctgccctggcatttgggaggtggctgaaggaccagaggccccagagggcttcttttcaggctctcagattggggaacagggcctccttgttagtattgaaagaggagtccttcaaaagcgcctaag

SEQ ID NO: 320254 - DNA, 201 bp, Homo sapiens
agacgttggaccgggaggtctctgaagttgcttctagctctagttctgtgatttggggctgtgtgagcagcatagtctggtgcttatagtggagatgctcyttatgtggtgctgtggggtctttgcatgcctgggccccccagcgagggtcctcagagaccagtgctctcagcagtgctcttgggtactgactagcctgct

SEQ ID NO: 320255 - DNA, 201 bp, Homo sapiens
gcgtaagcaaaacaaggaagtcctgtgttacaaatctgaaaagtgtagtagatttggtgctgggcagggctagatccaggtacttaaacaggttggccagkcatttgtctgtctgtttctgagctctcctctcctctgtcgacatctttgttctcaagcagcttttcctgtgtgttgggagaagccatccccagctgctct

SEQ ID NO: 320256 - DNA, 201 bp, Homo sapiens
gcttcccttcccatgaagaggaggagacagggcacccactggccgagaggacaggagagatttagttcattaaggctgctcctctgtgctgcccccacccygcttctgtggcaggcctggacctgatctgcaaacagacttgcctgcctgtgcctgtccctgaggcccatctccagagcagagggagggcatgcaccgctg

SEQ ID NO: 320257 - DNA, 201 bp, Homo sapiens
actcctactacgtatataaacttggtcatgtggcttggttttaaaacagttcccttgactgtaattggcaggtgatagcatctacagcatggaaacctgcrcctagtaggtgcttaagcatagcttcccttcccatgaagaggaggagacagggcacccactggccgagaggacaggagagatttagttcattaaggctgc

SEQ ID NO: 320258 - DNA, 201 bp, Homo sapiens
catctgtgggctcctcactcctctggggaaggcagtggttgcacagggggcttgagcctcagagaaggtacctgttggggatgaaacccgctcaaatctcytaataggcctggatatggagggtgaacgcctggccctctgggttaccaaccctcagggttatgaggtgctagacaggaaaagggtgggccctgatctctg

SEQ ID NO: 320259 - DNA, 201 bp, Homo sapiens
tctgccgtcccttctctgctggatcaacaccttttccctctctgctggctcccatcagtatttaaacattgcctttcatatctgtcttcaagaaaaaaagaaaaaaaaattcacaaacctcccttcccgcctcatcctttccagctgctggctgtatagtcacctgtacttccctctctccctcatcgcctcccagtcatt

SEQ ID NO: 320260 - DNA, 201 bp, Homo sapiens
gtgaacgcctggccctctgggttaccaaccctcagggttatgaggtgctagacaggaaaagggtgggccctgatctctgcctctcgccagccaggccaaaktggggaagttcagtagtcccccagtttttagcagggttgagtgggctttctagggactctgtctctgggctgtgagtttgctgagtcctgctgcccgttc

SEQ ID NO: 320261 - DNA, 201 bp, Homo sapiens
gcacaggaagaaggagaaagcaattcagcatgagtctggagaggtttggagggcagattacacaggatctggctgagaaatgaacactctcctagggacayaggaagccacaaacaaggcgggggtgacatgatcagaccccagccacaactgattcatcagtctgaatgtgtttatgttttcaaaatatagcatcgattg

SEQ ID NO: 320262 - DNA, 201 bp, Homo sapiens
gactgggtcccagggctgttgtaagaatccaagggaactgtgtggcagtgcatcgtcagcagtggcagtcacttcccttgtgactgacactgctgtgtgcytggttccagcttgcagtcagggccctaccctcgagaagctcgtggtccttgggggagcaggttgcaccatgggattgcaaaagcaattcagttacctgtc

SEQ ID NO: 320263 - DNA, 201 bp, Homo sapiens
cagaccccagccacaactgattcatcagtctgaatgtgtttatgttttcaaaatatagcatcgattgttgcttgcttttttttcttttctttctttctttytttttttttttttgagatgcagtctcactcttgttgcccaggctggagtgcaatggtgtgatctcagctcactgcaacctctgcctcccgggttcaagcg

SEQ ID NO: 320264 - DNA, 201 bp, Homo sapiens
tgacagtgtgtgtgtgagacaccatgagagactgtgtatttactgtgagagactgtgtgagagacacgtgtgagacactgtgtatatgacactatgtataygtgagactgtgagacactatgtgtatgtgacactgtatatgtgtgagaccgtatgagacagtgtatatgacactgtatatgtgtgagactgtgtgtgtga

SEQ ID NO: 320265 - DNA, 201 bp, Homo sapiens
tttggggggttttttagttttgtttgagacagagtctcactctgttgccaggctggagtgcagtggtgagatctcggctcactgcaacctccacctcccgrgttcaagtgattgtcctgcctcagcctcccaagtagctgggactactggcaggtgccaccacgcccagctaatgtttgtatttttagtagagacggggtt

SEQ ID NO: 320266 - DNA, 201 bp, Homo sapiens
gccgtgcggcaggctacctgtgtttatatcgggtagtgtgtgtgtgtttatgtgcagcaagggtgtgcagtaggtgtgcagtagactgtgtgcagcaggcdtgtgtgtgtgtacagcaggtggtgtgcagcaggcagtgtgtgtatgtatcaggcggggtgtggtgtgtgtttatgtgcagcatgcggcgagtactttgtg

SEQ ID NO: 320267 - DNA, 201 bp, Homo sapiens
ggtatgtacagcagatggtgtgcagcaggcagtgtgtgtgtgtgtgtgtgtacaataggtggcatgcagtgggcagtgcatttgtgtgcatgcagcaggckgtggtgtgtacagcaggtggtgtgcagcagactgtgtgtttgtatgcatcaggccgtgtgtgtgtgcagcaggcagtgtgtgtgtgtgtacatgcgcaca

SEQ ID NO: 320268 - DNA, 201 bp, Homo sapiens
ccatagcgcaagctcaggcagggccttggtgatgtgtgacctccatcccactgtggccttgcaggcgtcattgtggtctcagccacctcagctctgggatygtggagcagatccatccccagcttggtgtaaatggggctggacacctatcaacgttcttacttgaagaactggtgtaaatgaaggctggacacccttcac

SEQ ID NO: 320269 - DNA, 201 bp, Homo sapiens
ttgggtgtgggttttttgtttgtttgtttgttttgagatagagcttcactcttgtcgcctaggctggagtgcctcctgggttcaagcaattctccttcctyagcctcccgagtagctgggattacaggcgtctgccactgcgcctagccaattttcgtatttttagtagagacagggtttcaccatattggccaggctggt

SEQ ID NO: 320270 - DNA, 201 bp, Homo sapiens
tgggttcaagcaattctccttcctcagcctcccgagtagctgggattacaggcgtctgccactgcgcctagccaattttcgtatttttagtagagacaggstttcaccatattggccaggctggtctcgaactcctgacctcaggtgatccgcctgcctcagtctcccagagtgctgagaatacaggtgttagccactgtg

SEQ ID NO: 320271 - DNA, 201 bp, Homo sapiens
gggctgtcttaccccactggcggccatgggtccgtggttgctgcaaagctctgtgagtagccaagtagagtgttgccctgctcctggccctgcagggaackattcagcccctgatgttcaccctcaagagctaggcctgctggccagcctcacacctccctctgtgcacatctgtcttcctgggaggatggtcctgccctt

SEQ ID NO: 320272 - DNA, 201 bp, Homo sapiens
cgaggactatgtaagtaacaggtgtgcgaacgcggacaagacatgggtcaagctgggctcgtgggacgctcctcctctccctcctttcctgctagcctgcrctgccaagatccacagggctctagccacatcaggagaaaattggcgtttagacacaagcactgagctgagcagcgattggcatttcctctaatccttact

SEQ ID NO: 320273 - DNA, 201 bp, Homo sapiens
ggaaattgtctataaaatgtcagcactaaggatgcacagggaacggtaatatactggcattgttggagcctaagattagaccctgagtgcatttttcccakctccagtttttctttccctgctgttgcttctgtcaatagactgtccagggtgaggcctgttcctttttggaggccctgtgcctgcagcagtgggtggagg

SEQ ID NO: 320274 - DNA, 201 bp, Homo sapiens
cctcagcatcaggtcattcagtcctgagtctatggcaggtaggctcctagtcgccagtatgtccccactttgtcccccagagtggctccagtgagaagcgygagctgcgtcagtttcagttcatggcctggccagaccatggagttcctgagtacccaactcccatcctggccttcctacgacgggtcaaggcctgcaacc

SEQ ID NO: 320275 - DNA, 201 bp, Homo sapiens
gagaccctccagctgtggcaggaggggtccatgagggggtggtggcagctgcaggggccccactcaaggccagagctggagggataccagggttgatgacrgctctgttcccactgcacggtggtccctgccctgcttcccactcttctctctgtgtggtgtggcttgacctcccatggtgtttctccgcatgtccagaga

SEQ ID NO: 320276 - DNA, 201 bp, Homo sapiens
ccccacctttgcacccaggccgggccagctgtctgatccaggcggtgctcaggaatggttgtggggggctgtggtcagagagaggtgtaagacctgtagcrctttgtgtgcacctgtgggacctttcaccgccctcctcgcctagagacccaggctcagccgaaactactggaacattaaggcgagaggctagagcaggct

SEQ ID NO: 320277 - DNA, 201 bp, Homo sapiens
ctgagatttcttggttcaaggacttccttcctgtagaccctgccacgagcaacggccgcatcaagcagctgcgttcaggtgagcagagggcaggggtcaargggccatgcagacctcagaacaagcgtcttgtcagatcccagcacagcctactcccttgggcctgggcacctccagggctgagcggagggtacctggtgg

SEQ ID NO: 320278 - DNA, 201 bp, Homo sapiens
taggatacagatcaggatcctcactgtggtctcccagggccactggcttcccaccctgtcacgcgccagctgtccagacacatgctgctttccgtttgccrtgctccttgcctggccccttctgtcactggctccatgtacccttccaggcctcagcttggtgatgctttccttccctcatcaccgcatccaaggagattc

SEQ ID NO: 320279 - DNA, 201 bp, Homo sapiens
cctctggctcctgtccagtccaggcagggggggcccggcagcttctgtccatgtcctgtgtgggtgtgattgtccatcagcctgggccctgggaaggtggrggctgtcaggttaggctggctgttctgtgcaggaggtggttttgtcagactgtgtcctgtgggggttcttaactgttggaccgtcctgtgtgggtgtaat

SEQ ID NO: 320280 - DNA, 201 bp, Homo sapiens
tctgtcttcctgggaggatggtcctgcccttgagcttggggtgaggtccctggggtattctgaacactggttgctattcagatgaagaacttggaatgctggggggttatgagagtggtatggaattattcagcaagtaggtggctgctgcgcttggatgagaagccatgtctgtggacccctaggaaagggccacagttg

SEQ ID NO: 320281 - DNA, 201 bp, Homo sapiens
ctatcgatggtgagccaagggggtgcccctcccatccccttgctctcccccttgctagctagggcaacatgtcattctacagaggatgtccacgagtctcrggggtgcactgaggcatggtgggctgggctggggaccctgtagtaatgccctcccacctcctttcttatccataggcgtccccgggagtgactacatcaa

SEQ ID NO: 320282 - DNA, 201 bp, Homo sapiens
ctggaggtgaacaagcccaagaaccgctatgcgaatgtcatcgcctacgaccactctcgagtcatccttacctctatcgatggtgagccaagggggtgccyctcccatccccttgctctcccccttgctagctagggcaacatgtcattctacagaggatgtccacgagtctcaggggtgcactgaggcatggtgggctgg

SEQ ID NO: 320283 - DNA, 201 bp, Homo sapiens
atcttgggagaggagttgggaggcttcctggaagaggggagccctgaagggtgagtggacatttgctaatgggggggtattgcataatgaggtggggttgsggggaagaagcacgaatgtggctgggcttctctgtggaattcatgggagagccacagtgagaacccgacagcatgggacagaggtggggtccgaagacca

SEQ ID NO: 320284 - DNA, 201 bp, Homo sapiens
tcacacagacctactcctactacgtatataaacttggtcatgtggcttggttttaaaacagttcccttgactgtaattggcaggtgatagcatctacagcmtggaaacctgcacctagtaggtgcttaagcatagcttcccttcccatgaagaggaggagacagggcacccactggccgagaggacaggagagatttagtt

SEQ ID NO: 320285 - DNA, 201 bp, Homo sapiens
tgccctacaggggcctaggcctgtgcctggctggtgggggtgggcagcagagtagggccagcctagaagaccagagagggctgggtagagcagtgaggacytcctggaggaggggtgatctgagcagggccccaaggggctaggcagcctaaggggagactctaggggcagcagcacctccagcatgtccagtcttatgtc

SEQ ID NO: 320286 - DNA, 201 bp, Homo sapiens
agatgacccccacccccacaggaagcctggcctgaccaatccctgcctctcaatagttgctggccagctccaaggcccacacgtcccgcttcatcagcgcyaacctgccctgcaacaagttcaagaaccggctggtgaacatcatgccctacgaattgacccgtgtgtgtctgcagcccatccgtggtgtggagggctctg

SEQ ID NO: 320287 - DNA, 201 bp, Homo sapiens
gtgaaacttagcctgtcccccggcttccctagacagaagagcttcccttgaggttgaggagtgtgaccaagccttgccttttctcttgacagtctcttttggggggacctcaattattacttgactttccctttagtatcccggctctgtaccgtggtagaatgaggatcatcccttcagcctggcaaggattaggaggaa

SEQ ID NO: 320288 - DNA, 201 bp, Homo sapiens
ttctgggtcttttttcaggcctgtcagctagggctcgaaagggtgacagtttttcatcacacagacctactcctactacgtatataaacttggtcatgtgrcttggttttaaaacagttcccttgactgtaattggcaggtgatagcatctacagcatggaaacctgcacctagtaggtgcttaagcatagcttcccttcc

SEQ ID NO: 320289 - DNA, 201 bp, Homo sapiens
cagagccttctgggtcttttttcaggcctgtcagctagggctcgaaagggtgacagtttttcatcacacagacctactcctactacgtatataaacttggycatgtggcttggttttaaaacagttcccttgactgtaattggcaggtgatagcatctacagcatggaaacctgcacctagtaggtgcttaagcatagctt

SEQ ID NO: 320290 - DNA, 201 bp, Homo sapiens
taggccccatgattccaccaccgactggggtcaagcctgcaatcatgacctctccctggcacaggctgtctaaacccatccttacgcccgctggagcagcrtcctctcctgccagcctctgctaattctgatgcttctccccagagccttctgggtcttttttcaggcctgtcagctagggctcgaaagggtgacagtttt

SEQ ID NO: 320291 - DNA, 201 bp, Homo sapiens
tgttggagcctaagattagaccctgagtgcatttttcccagctccagtttttctttccctgctgttgcttctgtcaatagactgtccagggtgaggcctgytcctttttggaggccctgtgcctgcagcagtgggtggaggatggttggggctgctgcagtgagatgccagccactccagctgttggcatgggggtggctg

SEQ ID NO: 320292 - DNA, 201 bp, Homo sapiens
gatcatcatgtatgaactggtgtactgggcggcagaggacgaagaccaacaggtgtgcagcgggcagagaagcactgagggggtctcctggtccctgaggktctgtgatgggcttaacccaggagggtattttctggattctgtggcttatgtgggcacagcctctaaggtttctgctggaggcttagtggtgcatgcgtg

SEQ ID NO: 320293 - DNA, 201 bp, Homo sapiens
tgtcaccatctggctccagttctgctcagctaggccttgcagggagggcctgggtctgatcacacttggtgaggtcagctgtaggacaggtcttctctgagcccttgtcaagtgaatgatttcatgaacttgacctttggcacttgtccctgtaggctaatatctgctctaatgttcactcctccttctgctttccaggtc

SEQ ID NO: 320294 - DNA, 201 bp, Homo sapiens
gtcaccatctggctccagttctgctcagctaggccttgcagggagggcctgggtctgatcacacttggtgaggtcagctgtaggacaggtcttctctgagcccttgtcaagtgaatgatttcatgaacttgacctttggcacttgtccctgtaggctaatatctgctctaatgttcactcctccttctgctttccaggtcc

SEQ ID NO: 320295 - DNA, 201 bp, Homo sapiens
tatcagagaacctcaaagagggtttgcttgtgtgggttcttttttttttttttttttttttttttttttttttttgagacagagtttcgctcttggtaccyaggctggagtgcaatggcgcgatctcggctcatcgcaacctctgcctcccaggttcaagcaattctcctgcctcatactcctgagtagctgggattacaa

SEQ ID NO: 320296 - DNA, 201 bp, Homo sapiens
atgagtcaccacgcctgggtaattttgtatttttagtagagacagggtttcaccatgttggtcagactggtcttgaactccgaacctcgggtgatccgccygcctcagcctcccaaagtgctgggattacaggggtgagccaccgtgcccagccattgtgtgggttatttctattgatgtttaccatattagatattaaga

SEQ ID NO: 320297 - DNA, 201 bp, Homo sapiens
ctgtaagcctagcgctttgggaggccaagttggaaggattgcttgagctcaggagtttgagaccagcccagttaacgtagtgagacccccatctctacgaaaaaaaaaaaaaaaaaaaaactgggcatggtggcacacacctgtggcccagctacttgggagggctgagacaggaggatcacttgagcccaggagggtgag

SEQ ID NO: 320298 - DNA, 201 bp, Homo sapiens
tgtaagcctagcgctttgggaggccaagttggaaggattgcttgagctcaggagtttgagaccagcccagttaacgtagtgagacccccatctctacgaaaaaaaaaaaaaaaaaaaaactgggcatggtggcacacacctgtggcccagctacttgggagggctgagacaggaggatcacttgagcccaggagggtgagg

SEQ ID NO: 320299 - DNA, 201 bp, Homo sapiens
actatgtatacgtgagactgtgagacactatgtgtatgtgacactgtatatgtgtgagaccgtatgagacagtgtatatgacactgtatatgtgtgagactgtgtgtgtgaaacactatatgacactgtatatgtgtgacactgtatatgacactatatgtggagactatgtgtgagacactatgtatatgtgacactatg

SEQ ID NO: 320300 - DNA, 201 bp, Homo sapiens
gcccaggtctccccgcaggcaaggagactggaagggacgtgggcccagccacaccctataaagtggccatgcactaaggacctgtccagagtctcctctcrtattctgttccatgcttcttgcaaggactttccaacagagtgtcccaggacaggaggaacttaggccacccagcatggaggccagtggacagaggccaga

SEQ ID NO: 320301 - DNA, 201 bp, Homo sapiens
gtcaggaggggtagcctccttcgtgtgccaagctacaggagaacccaagccgcgcatcacatggatgaagaaggggaagaaagtcagctcccagcgcttcraggtgcgtctgtggtgggaaggggtcggcagggctcagggtctgcccacactctctcctttcagtgtccctcctcatggaccttttggaggtgggaggac

SEQ ID NO: 320302 - DNA, 201 bp, Homo sapiens
gcgcacacgcaacaggcactatatttgtgcagcaggccatgtgtgtggtgcatacagcaggtggtgtgcagcaggctgtgtgcttgtacatgcagcacatrgtgtatgtgtgttgatgtcagacaatgcatgtgcatgtgtgtggagtgtacagcaggtgatgtgcagcaggctgtgtgtgtaggtgtgcctcgggagtgt

SEQ ID NO: 320303 - DNA, 201 bp, Homo sapiens
ctatgtatacgtgagactgtgagacactatgtgtatgtgacactgtatatgtgtgagaccgtatgagacagtgtatatgacactgtatatgtgtgagactgtgtgtgtgaaacactatatgacactgtatatgtgtgacactgtatatgacactatatgtggagactatgtgtgagacactatgtatatgtgacactatgt

SEQ ID NO: 320304 - DNA, 201 bp, Homo sapiens
gaggggtccatgagggggtggtggcagctgcaggggccccactcaaggccagagctggagggataccagggttgatgacggctctgttcccactgcacggtggtccctgccctgcttcccactcttctctctgtgtggtgtggcttgacctcccatggtgtttctccgcatgtccagagatgatgcctttgctgcagatgg

SEQ ID NO: 320305 - DNA, 201 bp, Homo sapiens
tggcacggtgggctgccgggctgaggcgtgggaagagccagccagccctgatcctgtcctgggcccatgtgcatttggcagaaaggaggactggccacctyggggtcagtgaaagtcagtggtggacagggatagtcattggatctggcctggattgtgcggcttatgctgaggccagccatgtggggcatgatgcctttg

SEQ ID NO: 320306 - DNA, 201 bp, Homo sapiens
aggcactatatttgtgcagcaggccatgtgtgtggtgcatacagcaggtggtgtgcagcaggctgtgtgcttgtacatgcagcacatagtgtatgtgtgtkgatgtcagacaatgcatgtgcatgtgtgtggagtgtacagcaggtgatgtgcagcaggctgtgtgtgtaggtgtgcctcgggagtgtgtgggggtgggag

SEQ ID NO: 320307 - DNA, 201 bp, Homo sapiens
tatgtatacgtgagactgtgagacactatgtgtatgtgacactgtatatgtgtgagaccgtatgagacagtgtatatgacactgtatatgtgtgagactgtgtgtgtgaaacactatatgacactgtatatgtgtgacactgtatatgacactatatgtggagactatgtgtgagacactatgtatatgtgacactatgta

SEQ ID NO: 320308 - DNA, 201 bp, Homo sapiens
catgcactggtgtccacaggcagccttacgcctgcttatgcaggagctgtaggctgtgtgcgtgtggctgccaagagccacgcaaggtgctgggtgcgtgygaggctgtgccctgttgatatcctcagtctccgttcacagcacagtggagtgagggaaacagtctggccctttgttcttgtctgaaaagaataatgagct

SEQ ID NO: 320309 - DNA, 201 bp, Homo sapiens
atgtatacgtgagactgtgagacactatgtgtatgtgacactgtatatgtgtgagaccgtatgagacagtgtatatgacactgtatatgtgtgagactgtgtgtgtgaaacactatatgacactgtatatgtgtgacactgtatatgacactatatgtggagactatgtgtgagacactatgtatatgtgacactatgtat

SEQ ID NO: 320310 - DNA, 201 bp, Homo sapiens
atgcaggagctgtaggctgtgtgcgtgtggctgccaagagccacgcaaggtgctgggtgcgtgcgaggctgtgccctgttgatatcctcagtctccgttcwcagcacagtggagtgagggaaacagtctggccctttgttcttgtctgaaaagaataatgagctgtctgccccaggcgtgcggctcctgggatgggcgggg

SEQ ID NO: 320311 - DNA, 201 bp, Homo sapiens
ctgacctctggcgactgtgatccaccagcctctggtgtgtgacctccaatctctcatgactgtgaccactaacctctagtgaatgggcaccacattcttgrtgcctgacctctgctgtccttaacctactgacctctgctgtatgaccttctgatctcttgtgaccttgacccactgatctcttttgactgtgtcactatt

SEQ ID NO: 320312 - DNA, 201 bp, Homo sapiens
ttgccaagaacttccgggtggcggctgcaatgaagacgtctgtgctgctcagctgggaggttcccgactcctataagtcagctgtgccctttaaggtgagtaagggccacggccagctgagcctggcacacacacaggcctgctgggtgctgtctttccagtcctaacccatgtgcatccggctgtggagcaggaatgtgg

SEQ ID NO: 320313 - DNA, 201 bp, Homo sapiens
agcttacacacagggctgcttctcatgggctggtggggaggagtggcttcacggtgtctgttactctgtaggggcagtgggttgggcaggtgtgggctctkacacggaaggtgagccttgatctcggcccagggagctgacatcccaggccacagccccagggctggccggcatgctccaaggcccctcatgacccccatg

SEQ ID NO: 320314 - DNA, 201 bp, Homo sapiens; identical to SEQ ID NO: 67129

SEQ ID NO: 320315 - DNA, 201 bp, Homo sapiens
ttcgccggccctcatggccctgcctccgtgtgtacatgtgtatgtgtattccatgggaaaggcacaaaatagcagtcagtctctccatagaagagccttgwtggtggcccagtttgactctccctggggctggacccctacagcctccctgggaggtggttgcagcccccttcctccagccagttccacttactcctttct

SEQ ID NO: 320316 - DNA, 201 bp, Homo sapiens
cagaacgtctgaagccatatgtggctgctcaactggatgtgctcccggagacctttaccttgggggacaagaagaactaccggggcttctacaaccggccyctgtctccggacttgagctaccagtgctttgtgcttgcctccttgaaggaacccatggaccaggtctgcctgagccggcttggctgtcagcaccctgatt

SEQ ID NO: 320317 - DNA, 201 bp, Homo sapiens
cagcccccttcctccagccagttccacttactcctttcttaggccacttcctcccaccctgcatgggcttggtggctcgagaatgttgccgtccatacccygggagctgtgctgaaagggctgtgcggcccccgaccactgtgtgtgtcagggagggggcacgctctcgtggggtgtcaggccaggtggcggtgggtaact

SEQ ID NO: 320318 - DNA, 201 bp, Homo sapiens
ttcttgttgaatgcctgtgaaatgaacacacagacaaatgaaggaatgagtgaactaatgcatacacacagggtttgtgtatgtatgagctggttattctrcatgtcaaattaccccaaaacttagtggcttaaaacaacaataattatgtattatctgtcacagtttttgtgaggcaggaattcagacaggggcacagca

SEQ ID NO: 320319 - DNA, 201 bp, Homo sapiens
tggctgggcgtggtggctcatgcctgtgatcccagcactttgggaggctgagccgggtggatcacctgaggtcaggagttcgagaccagctaatgaaatcycatctctactaaaagtacaaaaattagccaggtgtgtggcccctgtcatcccagctactcaggaggctgaggcaggagaatcacttgaacccaggaggta

SEQ ID NO: 320320 - DNA, 201 bp, Homo sapiens
caaaacaaacgttgcaacgtgtcacctgggggaaattactgatggcttcccactgccattgtctccacccatctgactctcttcacctgtgtccactggcygcaaggcttcgtctcctcatcagacttggcttcggtgtctacctcacatctcccttctgtcccccaaattctcagggctcccagtgtcgctctctgaggc

SEQ ID NO: 320321 - DNA, 201 bp, Homo sapiens; identical to SEQ ID NO: 67132

SEQ ID NO: 320322 - DNA, 201 bp, Homo sapiens
ctccatggtcacacatgttcacatgtgcacatacatgcgttggggctttctctgccacactgctcaagcctcacactaatgctgcctgtgtatgccctacytcccctaggtatgcgagaccacccacccatccccatcaccgacctggcggacaacatcgagcgcctcaaagccaacgatggcctcaagttctcccaggag

SEQ ID NO: 320323 - DNA, 201 bp, Homo sapiens
gtagggcactcctatggcctgtgtgcccccagcccagacctagcaggcctgtgggtccgttctgcaggtctcagggtcgccactgaagttcctgggccgcrtgcacttgttcctgctccttttcttcctttctgcccttctccctgtgctcatccactttggttggaatgactggggagcccccatatcctgcagctggac

SEQ ID NO: 320324 - DNA, 201 bp, Homo sapiens
acaccgtggtgttccgagacatcaacagccaacaggagctgcagaacatcacgacagacacccgctttacccttactggcctcaagccagacaccacttaygacatcaaggtccgcgcatggaccagcaaaggctctggcccactcagccccagcatccagtcccggaccatgccggtggagcaaggtgtgtgctgtggac

SEQ ID NO: 320325 - DNA, 201 bp, Homo sapiens
gtaaaatggtggcttgtctattcacatcattttctctccagttctctcagtgtctgggcacatctagaccttcagagctcaggaccaggatggtctcaggsaagagcagctgccttcctgggtgctatcttgcccatcacccggaggctggctcttgcttcacctgggagccccccaatccccctgcccatctactcagcc

SEQ ID NO: 320326 - DNA, 201 bp, Homo sapiens
gcaccgagacctgtggccttattcaggtgaccctgttggacacagtggagctggccacatacactgtgcgcaccttcgcactccacaaggtatagcctttycccagtgcatatctcttacccagacactgtaaggacagtggcctgggtgtggtgtgctgggtcggggggaagctggagcctgggtgttggagggtcggag

SEQ ID NO: 320327 - DNA, 201 bp, Homo sapiens
tttctgccccaagcctgtggcaccagccaccaggtctccctcaccccacccacacccccctgcctcactcaggtgaccttagggcagcctcgacccctcakcggcctgaacccgacctgcttgaaggaacattttctgtactagtgtccatccatcccatcagcatgacctgttgggtgcccatcagggctgctcttaaag

SEQ ID NO: 320328 - DNA, 201 bp, Homo sapiens
cttaaaggagatggtatttggcatgtgcactgggccctggtgctccctggcatctggtggggagggctgaggccagcaccaaagaggcaggctggtcctgygtcctgcattggtggcctcccctcttccttcacctccagctgccagccccctgggggttcccagtccctcctgctgccctgggttagatggtggaagagg

SEQ ID NO: 320329 - DNA, 201 bp, Homo sapiens
gcatacagcaggtggtgtgcagcaggctgtgtgcttgtacatgcagcacatagtgtatgtgtgttgatgtcagacaatgcatgtgcatgtgtgtggagtgyacagcaggtgatgtgcagcaggctgtgtgtgtaggtgtgcctcgggagtgtgtgggggtgggagtggacagcaggtggtgtgtgccttacaacctgtgtg

SEQ ID NO: 320330 - DNA, 201 bp, Homo sapiens
aggtgcgcaccaccactcgtgactaatttttgtatttttagtaaagacggggtttcaccatattgaacaggctggtctggaactcctgacctcgtgatccrcccaccttggcctcccaaagtgctgggattacaggcgtgagccaccacgtccagcctgtatcattatccttaatggctatgggtaagctgtcacatgcaa

SEQ ID NO: 320331 - DNA, 201 bp, Homo sapiens
ggagactatgtgtgagacactatgtatatgtgacactatgtatgtgtgtgacactgtgagagacactgtgagacaccaagacagtatatgtatgagacacyctgtgtgtgtgacacagcgtgtgactgtgtgagacgtgtgtgaggcactgagactgacactgtgtgtgaggctgtgtgagagtcagtgtgtgtgataact

SEQ ID NO: 320332 - DNA, 201 bp, Homo sapiens
atgggaatgggtaggacgagggtggccaggcagggcagcagcagcttgtcaagagcacgtcctggtgagcactgaggggttgtggctttggctggaagccyctgatacctggagcctgtcttctgctaacaagcctgtgttcaggggcctgtgctcagcgtgctcgtggagtctggcctcccaccttctccctccctgctg

SEQ ID NO: 320333 - DNA, 201 bp, Homo sapiens
cctgaggcactgcgtccagtgtcggttactgttttgcatctgtgtcttgtatgagtccgtgggctctacaagcttagaggagccatagaggacagtggttmagactctggaccactcacttctcgtgtgtctttgggttagtaactatgcctctgaccctcatttgctccatctgtaaatggatataatgcctaccaccca

SEQ ID NO: 320334 - DNA, 201 bp, Homo sapiens
ccgcccaccttggcctcccaaagtgctgggattacaggcgtgagccaccacgtccagcctgtatcattatccttaatggctatgggtaagctgtcacatgsaagtaccctaatttatttagccattcccttattgttggacacatatgttctcagttttttcgtttctataaataaggtgccatacacgtcgttgcagatg

SEQ ID NO: 320335 - DNA, 201 bp, Homo sapiens
gcggcagaggacgaagaccaacaggtgtgcagcgggcagagaagcactgagggggtctcctggtccctgagggtctgtgatgggcttaacccaggagggtrttttctggattctgtggcttatgtgggcacagcctctaaggtttctgctggaggcttagtggtgcatgcgtgtcatgtggcccgcacagcctgtatgaat

SEQ ID NO: 320336 - DNA, 201 bp, Homo sapiens
tatgtatgtgtgtgacactgtgagagacactgtgagacaccaagacagtatatgtatgagacaccctgtgtgtgtgacacagcgtgtgactgtgtgagacrtgtgtgaggcactgagactgacactgtgtgtgaggctgtgtgagagtcagtgtgtgtgataactgtgtgtgtatcaccgtgtgtgtgtgtgagagaggga

SEQ ID NO: 320337 - DNA, 201 bp, Homo sapiens
atccagtggttggtttggtgagagctggaaacatgttggttttcccttcccaagtataacaaggcctgtttccgcctccgcggccgctgctgcagtgccaygcggtgaactgtccaggacatgacaaaagggctcggttagctgcccgctggttagaagatgaacggctcagagctctccctgccgacaggctcttccctt

SEQ ID NO: 320338 - DNA, 201 bp, Homo sapiens
gagagtttgagaccagcctggccaccgtggcgaaactgcatctctactataaatacaaaaattagccagctgtggtggcacatgcctgtagtcccagctayttgtgagggctgaggcaggagaatcgtttgaacccgggaggcggaggttgcgttgagccaaggtcatgccattgcgctccagcctgggtgacagagtgag

SEQ ID NO: 320339 - DNA, 201 bp, Homo sapiens
catgtgcccagaaggggccctgagagccccttctaccctcatactgtcccctcacctagccttcttgtacagatggatgtcattaaaagttaaactgttgrccgggtgtggtggctcacgcctgtaatcccagcactttgggaggctgaggcaggcagatcacgaggtcaggagatcgagaccatcctggccaacatggtg

SEQ ID NO: 320340 - DNA, 201 bp, Homo sapiens
gtgcagtggcgtgatctcggctcagtgcaagctctgcctcctgggttcacgccattctcctgcctcagcctcccgagtagctgggactacaggtgcccgcyaccacacccggctaattttttttatttttagtagagatggggtttcaccgtgttagccaggatggtctcgatctcctgacctcgtgatccgcccaccttg

SEQ ID NO: 320341 - DNA, 201 bp, Homo sapiens; identical to SEQ ID NO: 67139

SEQ ID NO: 320342 - DNA, 201 bp, Homo sapiens
tgtctccttttacgtcagattccatctccctgcctccctttttcccctctcgtggcctgcatttctctctccttcttggagtctctgtttttgtcttgctstttctcttctctctcctccttccttccctcctccccctgccattcctctgacccctttccttcatctccatttggtttcatcctccgtccttcccttctt

SEQ ID NO: 320343 - DNA, 201 bp, Homo sapiens
catctctactaaaagtacaaaaattagccaggtgtgtggcccctgtcatcccagctactcaggaggctgaggcaggagaatcacttgaacccaggaggtaraggttgcgtgagccaagatcgtaccatcgcattccagcctgggtgacaagagcaaaaccccatctcaaaaataaacaaataaataaaattctactggaac

SEQ ID NO: 320344 - DNA, 201 bp, Homo sapiens
catctcaaaaataaacaaataaataaaattctactggaacagacacacccatttatttatatgctacctacctatggttgcttttgcactgtaaaggcacyattaaatagatgcagtagataccagatgtccacaaagcctaaactatttacgctctggcctgttatggataccaagtttgccaacccctggactctaaag

SEQ ID NO: 320345 - DNA, 201 bp, Homo sapiens
tggggtttcaccgtgttagccaggatggtcttgacctcctgacctcatgatccacccgcctcagcctcccaaagtgctgggattataggcgtgagccaccgcgcctggccctgagaggacttttttgaaacggagtctcactctgccacccaggctggagtgcagtggcgtgatctcggctcactgcaacctctgcctcct

SEQ ID NO: 320346 - DNA, 201 bp, Homo sapiens
gagacacatgccctcagggaacccagtcgtggggagcatgtgcagacagataatcagcattgaatatgtgactctgacagcatgccctggtgttgaatagkaccgacaggcgtgcaaaaggtgggctgacagcaccagagcagcctgaggggtggggtgtgctgcggggtctcacggaagcagtgacgcggtcctgtggag

SEQ ID NO: 320347 - DNA, 201 bp, Homo sapiens
agacctgcctgcaggaggtcttgggaccctttcctctccctcccctaccccaccaagcccacagtcccttctgtctgttcccacctggcctcagtgtccakccagcaccataccacctatgccatgcgggccagggaatccaggtgtctcgatggagtgcctggtgttgccagccttggagcaggctctggggaagggctg

SEQ ID NO: 320348 - DNA, 201 bp, Homo sapiens
taatcagcattgaatatgtgactctgacagcatgccctggtgttgaataggaccgacaggcgtgcaaaaggtgggctgacagcaccagagcagcctgaggkgtggggtgtgctgcggggtctcacggaagcagtgacgcggtcctgtggagagtaatgaggctggggacaacatatggaggacattgcgtgctatgctgag

SEQ ID NO: 320349 - DNA, 201 bp, Homo sapiens
ctgcggggtctcacggaagcagtgacgcggtcctgtggagagtaatgaggctggggacaacatatggaggacattgcgtgctatgctgagaacttcagatmgtatccatctggaaaatgtgaagataataatggaacctatctcgtatgagaatttgaggagggaatacatgcaaagtgctcacagcggtgccaggcacac

SEQ ID NO: 320350 - DNA, 201 bp, Homo sapiens
gagtaatgaggctggggacaacatatggaggacattgcgtgctatgctgagaacttcagatcgtatccatctggaaaatgtgaagataataatggaacctrtctcgtatgagaatttgaggagggaatacatgcaaagtgctcacagcggtgccaggcacactgtgggtcctcactaacgcttcgctattatcattattgc

SEQ ID NO: 320351 - DNA, 201 bp, Homo sapiens
agtgggacaagaggaaagaggcaggaagaggctgagcctcaattggggtggcctggcccagggcagtggcagcaggttggagagagctgagggggtggggragcaccagaacctggtgactggcagggcggggttggtggaggccggaggaattttgagcttgacttctaggttctggcctggcactgaggggtgagggtg

SEQ ID NO: 320352 - DNA, 201 bp, Homo sapiens
aagcaccagaacctggtgactggcagggcggggttggtggaggccggaggaattttgagcttgacttctaggttctggcctggcactgaggggtgagggtkcctttcgctaaggtgtagtcccagcagcagcgccaggtttggaggggaagctgatgaactcagctttgaaaggactgcggttgaaggacctcccggtgga

SEQ ID NO: 320353 - DNA, 201 bp, Homo sapiens
gtccccagtccatcacttttctgataggtgatgtggcaacctgtgagctccatggctggcaccacgagatagagggcctggctgtggcctgtggagtgaargcaggatgtgagcatcaccgggaaggctgggtcccctgcaggagaagcaggtcaaccttggctcttaccccaccccacccgctttctccattctctgcag

SEQ ID NO: 320354 - DNA, 201 bp, Homo sapiens
ctatgtaagtaacaggtgtgcgaacgcggacaagacatgggtcaagctgggctcgtgggacgctcctcctctccctcctttcctgctagcctgcactgccragatccacagggctctagccacatcaggagaaaattggcgtttagacacaagcactgagctgagcagcgattggcatttcctctaatccttacttcttgc

SEQ ID NO: 320355 - DNA, 201 bp, Homo sapiens
caggagaaaattggcgtttagacacaagcactgagctgagcagcgattggcatttcctctaatccttacttcttgcctgtcgagcagcaatttgaggccartgttcatgatcgaccagggcctggcccctgccccggccagacagggatggagttaaatccaatcctgatcgttaggccttattgatccctggagtgaaaa

SEQ ID NO: 320356 - DNA, 201 bp, Homo sapiens
cgagtggccctggagatgaagcttggtgcatggtaggaccaaagctggtggatgtttcatgaggcctgtgtgggtgctgagaatgtggaggcagcaagccyagacgttgccagaaagtgtagctctgaacaaggggaccactatggctagagagggccgtggagctgagggtgggattttgttttgttttgttttgttttg

SEQ ID NO: 320357 - DNA, 201 bp, Homo sapiens
tggggtggcagggtgagcacagaccagcatgcacaagctcccttttggggcccagatatgtccctcttcccctgcctgccctcagcagtgctgtgactgcstttccttggttgtgagacccgagatgctttgcagcatcaggggttaggctggggttttttgggtgtgggttttttgtttgtttgtttgttttgagataga

SEQ ID NO: 320358 - DNA, 201 bp, Homo sapiens
gacacgtgtctgcctcctaattcccaaagaagctgttgagtgagggcacctctgttggtgggtactttttctccacgccaggggctgttggccttcatgtycggcctcctgttggtgattacctgtggcactggcaaagagactgtttccaggcaggcacaggtgaaggctgccttatgccaaaagggccactggggccac

SEQ ID NO: 320359 - DNA, 201 bp, Homo sapiens
agagctaggcctgctggccagcctcacacctccctctgtgcacatctgtcttcctgggaggatggtcctgcccttgagcttggggtgaggtccctggggtrttctgaacactggttgctattcagatgaagaacttggaatgctggggggttatgagagtggtatggaattattcagcaagtaggtggctgctgcgcttgg

SEQ ID NO: 320360 - DNA, 201 bp, Homo sapiens
tggcatcacctacagcctgcgcgtgcttgccttcaccgccgtgggcgatggccctcccagccccaccatccaggtcaagacgcagcagggaggtaggtggrggcatgccggctgggcagccaacagcagagaaggggaggctgaggttgtggcggtgcctttccccctccctcggctgtgaggctgggggctcttgggagg

SEQ ID NO: 320361 - DNA, 201 bp, Homo sapiens; identical to SEQ ID NO: 67131

SEQ ID NO: 320362 - DNA, 201 bp, Homo sapiens
ctcacacccccctcctggtctctgcttctctctctattgtgtctgtacttcatgaccactccatctacacacttggtgcccgggatgacgatggctgtgartctcccatggtgactgccaccggtgaggggcaggagggctgtctgcaggcagatgcgatggagcccagctcctgtcacgtctgctgccaccgacctgggc

SEQ ID NO: 320363 - DNA, 201 bp, Homo sapiens
tgagcttcgacatctggtcaacatcagccacagatgctgtcgagacctctcaccgtgttccaggccacactcgacatgggccgtgcctgacctctcgcttygtgtacccacaggtgccttgcagatagagagcagtgaggaatccgaccaaggcaagtacgagtgtgtggcgaccaactcggcaggcacacgttactcagc

SEQ ID NO: 320364 - DNA, 201 bp, Homo sapiens
gcttgtaccacatgggtgtctattctgggagttttacccccatgatggctctcctgggagctctgcccccaccatgaagtctgtaacagcacgttacaccyctgctaatgtatggggagttgcacccctgtaatgtccttatcaggcagctgcactccatgatgtctgtaccctctgtgtccgcccacgtgatgtctagac

SEQ ID NO: 320365 - DNA, 201 bp, Homo sapiens
gtgaggtttgaattctagggtctaacaccccattcctggccactgaggcctccctgtggtttctctgtgaagtaggaaggtgccatgggaatgggtaggaygagggtggccaggcagggcagcagcagcttgtcaagagcacgtcctggtgagcactgaggggttgtggctttggctggaagcctctgatacctggagcct

SEQ ID NO: 320366 - DNA, 201 bp, Homo sapiens
gtgaaggcaggatgtgagcatcaccgggaaggctgggtcccctgcaggagaagcaggtcaaccttggctcttaccccaccccacccgctttctccattctytgcagtccatcgaccctggacagcagttcacgtgggagaattcaaacctggaggtgaacaagcccaagaaccgctatgcgaatgtcatcgcctacgacca

SEQ ID NO: 320367 - DNA, 201 bp, Homo sapiens
caagcaggactcctgacccaactgtgtttctgagcagtgctggcgtgggccgcaccggggtgttcatcactctgagcatcgtcctggagcgcatgcgctaygagggcgtggtcgacatgtttcagaccgtgaagaccctgcgtacacagcgtcctgccatggtgcagacagaggtaacgcagaccaggctgcagggccagg

SEQ ID NO: 320368 - DNA, 201 bp, Homo sapiens
agggagaaagctcaaggtcaaggctgcagtaacgaataggtcaaggtcaggatcggagttagaaggggatcattggtagggctgggggtgccccgggtcakggctagagaccaggcggtgacctggggctctgccatgtgatagagctgaaggctggatgaagggaacactgtgtgtgcggacaggggagagggggctgga

SEQ ID NO: 320369 - DNA, 201 bp, Homo sapiens
ccccatcaccgacctggcggacaacatcgagcgcctcaaagccaacgatggcctcaagttctcccaggagtatgaggtgagatgttcccgccccctaccaygtgcctggcccaggcctacccaaaccagctcctgtcctgtcctaggtcccagctgtggtgggtgaggaagcaggggtccagctttttcaggagcacagag

SEQ ID NO: 320370 - DNA, 201 bp, Homo sapiens
agggaacactgtgtgtgcggacaggggagagggggctggacagcacagaggccttcaggctgagctgtggctgttggatgctgcgcgagctccctgctagcccccccccccaccccctgcagccccagcattcatgcagtgctttctgctgtgaccagcagagcattgattctcgttcttctcagggcctggagagataag

SEQ ID NO: 320371 - DNA, 201 bp, Homo sapiens
actttggcttctgtgtctgtttccactccttacttttgtttaccccatcgcctccatccttccttgaattcttctctccccttccctttcttctcccccartcccactgtctcctaacctttttccttccctaccctcccctctgcccaccttgcttcctccaggcctgttttctctcccaccggccccgtctctgttctg

SEQ ID NO: 320372 - DNA, 201 bp, Homo sapiens
agatgtgggggcctgagagaatgacaggagagagatgagccttcagaggctctttcaggctcccccgcacactgcctgatgtagctgccagggtccagcayctgctcttggccagcagaggctaactccatggctgcagtgtgagtgtcagctgtgtagtgggggtgtccactggcgcgacccacactgaccagcccccta

SEQ ID NO: 320373 - DNA, 201 bp, Homo sapiens
tgaataataatgcatgcccaaggaaaacaaatcaatctgtgtttgcgtatttatgatgaggactcaggaatgatcccagctgttctccagccagggaagcscccatcacatggtcccttgggcccccacagaggctggcagggtggttagggtgggctgcatggaggtgacatggcttctgtgttttgcaacgtgaatctt

SEQ ID NO: 320374 - DNA, 201 bp, Homo sapiens
gctgacgccttcagtctgaggcgttgcctctcagacctggaaactccctgacagggcaggggtgggccccactgcagcctctgccctgccaaagagacttrggaccctggttcctcaaatcggggtatgcttcatgcttagaagtcaaggaaaggggaggggagtcttgagggccctggccaacctgcagttggggaggtt

SEQ ID NO: 320375 - DNA, 201 bp, Homo sapiens
cccctcaccgccccctcctcttctccgccagcccctcgcaagcccgctcggcacctccactgtgtgtgatggtgctgtaagcagaaaaagttaacgggctytcttttcttgccccgttgtttttttcgtttgtttgtttgtttttttctctgcaggttccagtgtccccagttgcccgaatacctcaagttagttttcaaa

SEQ ID NO: 320376 - DNA, 201 bp, Homo sapiens
cacctccattgagtccttcaccgcgttctagtattggcagccatctccttgggggctgtgagtgactgaggcctggcaccaagtctcttctgggtatcccyagcacctaggtcggtgcctggcatatttctattcagaaaaaaggcaccatcattacatgactgttgatgttagaaaatttgattaacttttgctaaataa

SEQ ID NO: 320377 - DNA, 201 bp, Homo sapiens
tgacggaacttgtccgcagccccagcccctcaccgccccctcctcttctccgccagcccctcgcaagcccgctcggcacctccactgtgtgtgatggtgcwgtaagcagaaaaagttaacgggctctcttttcttgccccgttgtttttttcgtttgtttgtttgtttttttctctgcaggttccagtgtccccagttgcc

SEQ ID NO: 320378 - DNA, 201 bp, Homo sapiens
tacagctgctggggccagggtggagccctgccctcctcagagcctggcctacctgtgccaggactaccagccttccccctttctctagggacctggctgcsgggccacagctgtctaaaacagggacagtgcctttttccccacaggtgcccagacatgctccttacaccggtggtgtgtgtgggggtggcttctagtggc

SEQ ID NO: 320379 - DNA, 201 bp, Homo sapiens
ctgtgtggtcagaggagactcacctgtccattgggttttgggggttcaggatagcagtgtaggacaggctgagcctcagggagcaaacccaggccatcctygttccctctgccacatcctccgtggcttgagtttcctctgtgagggtgagggagccggtcgagaggagggctatagcctaggctcagatatcagccctga

SEQ ID NO: 320380 - DNA, 201 bp, Homo sapiens
tctggtgtgctgatgggagggtccagtgaatcccacagttgatatgtgtacatactaaatgacccaaggccctgggtggggcactgacaggcctggccacygtccctcacttgtgccttcagaggtcaccataagcttttccagccatttttcaaggtaggctgtgggtatcagccacactcaggtgaccccaccagatat

SEQ ID NO: 320381 - DNA, 201 bp, Homo sapiens
gaggtaacgcagaccaggctgcagggccagggccttggcagcagcgctgctgggaaccctaggctttagcaacagtttgatgcccacaggcatgtgcattyattcatgctgccaacctttcacgtggcctgcgataggcatggtggtgtgtgcttatggtcctacctacttgggaggttgatgtgggagaatcacttgagg

SEQ ID NO: 320382 - DNA, 201 bp, Homo sapiens
agacggcttgatgtgggctctagccctgaacttctcagccgcagcactgttgacattttgggctggacgattcttagttgtgaggggccatcctgtgcatyggagggtgtttagcagcatctctagctcactagatgccagtggcacccctcagtcaaaacaaacgttgcaacgtgtcacctgggggaaattactgatggc

SEQ ID NO: 320383 - DNA, 201 bp, Homo sapiens
cacccaggccgggccagctgtctgatccaggcggtgctcaggaatggttgtggggggctgtggtcagagagaggtgtaagacctgtagcgctttgtgtgcrcctgtgggacctttcaccgccctcctcgcctagagacccaggctcagccgaaactactggaacattaaggcgagaggctagagcaggctgtcctcccagt

SEQ ID NO: 320384 - DNA, 201 bp, Homo sapiens
gccatctatgagtgtacagctactaacagcctgggtgagatcaacactagtgccaagctctcagtgctcgaaggtacgtgctagggagacgtggcacggtrggctgccgggctgaggcgtgggaagagccagccagccctgatcctgtcctgggcccatgtgcatttggcagaaaggaggactggccaccttggggtcagt

SEQ ID NO: 320385 - DNA, 201 bp, Homo sapiens
gtttcctaggctctgtggctcatatgactggcagagccctgaagtttccccagaagccatgcgtcccagatggctcctgtggtccatgtggtctgtgaggygtctgtggcatgggctaagccctgagttccttttgtgctccatgtggccttatggtgtggagccagtcctggagccgtggtgggtccagaggtgtcacat

SEQ ID NO: 320386 - DNA, 201 bp, Homo sapiens
tgtgtgtgagacaccatgagagactgtgtatttactgtgagagactgtgtgagagacacgtgtgagacactgtgtatatgacactatgtatacgtgagackgtgagacactatgtgtatgtgacactgtatatgtgtgagaccgtatgagacagtgtatatgacactgtatatgtgtgagactgtgtgtgtgaaacactat

SEQ ID NO: 320387 - DNA, 201 bp, Homo sapiens
atactttggcttctgtgtctgtttccactccttacttttgtttaccccatcgcctccatccttccttgaattcttctctccccttccctttcttctccccmaatcccactgtctcctaacctttttccttccctaccctcccctctgcccaccttgcttcctccaggcctgttttctctcccaccggccccgtctctgttc

SEQ ID NO: 320388 - DNA, 201 bp, Homo sapiens
tgtagtatcagagtttggtctgtctatgttcattattggggttcgggttcaatattgaggttccggtcggtttcgacttggcgttgggttgtggcctgtcwgggcctcagcggctccgcggctctacgagcgagagtgcacgaggggaggggcgccgccgggggcgcgcacggcaggggcaggggcgcgggcgcgagcgcg

SEQ ID NO: 320389 - DNA, 201 bp, Homo sapiens
ggtggtcaggtctgctggccaaaccgaactctggcctgggctctgagtctgggcctcgggagagggccaggtaagtgcctcccagtctgtccagtccaggyggctgctgccctccctgctccctgcccagcctcctgcccctcctcccgcccatgccccacacactgcccaggtaagttctgtgtctgtgcctcatctccg

SEQ ID NO: 320390 - DNA, 201 bp, Homo sapiens
attaacctgggaggagagtggtgctggcgtagaatgggaaatggggcagaggcaggtgtgaaaactacagctggtctcagacacccaagttcaagatgccrtgtgccatctacatggcagtgctcggcaggctgtgggaatccagggctgggctggagctaaaggaccctgagaagaaagactgcagatgagaggaaatca

SEQ ID NO: 320391 - DNA, 201 bp, Homo sapiens
ggggtagcctccttcgtgtgccaagctacaggagaacccaagccgcgcatcacatggatgaagaaggggaagaaagtcagctcccagcgcttcgaggtgcrtctgtggtgggaaggggtcggcagggctcagggtctgcccacactctctcctttcagtgtccctcctcatggaccttttggaggtgggaggacaactgac

SEQ ID NO: 320392 - DNA, 201 bp, Homo sapiens
tgtcaggaggggtagcctccttcgtgtgccaagctacaggagaacccaagccgcgcatcacatggatgaagaaggggaagaaagtcagctcccagcgcttygaggtgcgtctgtggtgggaaggggtcggcagggctcagggtctgcccacactctctcctttcagtgtccctcctcatggaccttttggaggtgggagga

SEQ ID NO: 320393 - DNA, 201 bp, Homo sapiens
acctgaccagctggctgtgcagcacctgtgtatgtgcatcagtggatcttgggcatgacccttgtctttgtgggcgactctggcctgatcctgtaaccgtrtttgtgggtctcggtagccccccagacagtagactgtgtgtgtgtgtgactctgtggttgctgctgggcgtcctgtgtgtggtcacacagccacagtcag

SEQ ID NO: 320394 - DNA, 201 bp, Homo sapiens
tgagtacaacatgccccagtatatcctgcgtgagttcaaggtcacggatgcccgggtgagtgagtgcattgagtgtgtccataacgctgcctgtccacacrctgggtggatggctgcctgcatggtaccttagctcaagcttcagaaatctgaggcggtgggtgggtattagggtgtgagcacatctccccctgtggcctc

SEQ ID NO: 320395 - DNA, 201 bp, Homo sapiens
ggctgtggaagagatgggtctggcctgggtaggggaaggaaatgtgtatgtcctgggtgtctcctggggtccagaccctacgtttggtgagatgggcactrgggttatgtagagggtgcagcaagaggggctgtgtcacaggctggaaaggtcagatggggagggtgggtgtagggacactatgtgtccctttgcctctcc

SEQ ID NO: 320396 - DNA, 201 bp, Homo sapiens
cagagggcaggggtcaaggggccatgcagacctcagaacaagcgtcttgtcagatcccagcacagcctactcccttgggcctgggcacctccagggctgagcggagggtacctggtggggtgggctgggtcttactgcaggtgtgcctggctcagggaagagagctcgtggttggctgtgccgttaccttcttcggattgt

SEQ ID NO: 320397 - DNA, 201 bp, Homo sapiens
acagggcagatttagccaatctgcaggctgagggggaggggcgaggtcggagccaaggtccctgggggaaggggccgttcccagcctgtccagagcccagrggtgatccagggccaaccctggggtcagcccacgggtcaccaggccatagggctcccccacctgcctccgtatctctgggtacagatctctccccttgcc

SEQ ID NO: 320398 - DNA, 201 bp, Homo sapiens
gaggagactgtcagaaggcaataactaagtcgggggggagggatgggagaggcagatttacaggaaagcattcacctgggaagatatccagagagacttakgaactggactgtctaggcctttgggactgctgctggtatgtgggggctgggagagagggaggagtctcggttcctggccggagccccggggtggatggtg

SEQ ID NO: 320399 - DNA, 201 bp, Homo sapiens
cctctagcgcaggacagggtccatgtgatgtgagaacctccacgccaaggcttggttgggacagcccaggtctccccgcaggcaaggagactggaagggaygtgggcccagccacaccctataaagtggccatgcactaaggacctgtccagagtctcctctcatattctgttccatgcttcttgcaaggactttccaaca

SEQ ID NO: 320400 - DNA, 201 bp, Homo sapiens
gatgccatcgtgcaggagggaggtgtcaccccattgatcgatctgcctgtgaggctcctgccaggataattgattcagtttttgtgggaacagagcaggcrggaaaagaggctcagaatcagcttggctgcattctgcatctgctgccagcacggcctggaccaatagtctttgcttcagaagccctcctgctagctatgg

SEQ ID NO: 320401 - DNA, 201 bp, Homo sapiens
accttttccctctctgctggctcccatcagtatttaaacattgcctttcatatctgtcttcaagaaaaaaagaaaaaaaaattcacaaacctcccttcccrcctcatcctttccagctgctggctgtatagtcacctgtacttccctctctccctcatcgcctcccagtcattctttggccttctttggtctggctttggc

SEQ ID NO: 320402 - DNA, 201 bp, Homo sapiens
ctgacctcacgcagatgaggctgacctgcctggtgtggggtgttgcagtgcctgcccagcccgcggacttccaggccgaggtggagtcggacaccaggatycagctctcgtggctgctgccccctcaggagcggatcatcatgtatgaactggtgtactgggcggcagaggacgaagaccaacaggtgtgcagcgggcaga

SEQ ID NO: 320403 - DNA, 201 bp, Homo sapiens
gactggctgctcaggctgtacaagtcccgcttggagccctccacacgttcatcttgttctggacttaactcctaggagcctgctgggggctgagccttcargagtctgagggtttcccacccacagatggtgtcggggtgactctgagcatccccaggctgcccatctaggaaggggatttgttagagaaggaggtgattt

SEQ ID NO: 320404 - DNA, 201 bp, Homo sapiens
ctggattcatctagggcttggcagcggccaggaaggagcatggaaagatcaggaggcgagggaccttgcgatattggtgagagtgtggtaggtggtagacygtggaagctgaacatggagggtgggaaggacaaggttgatggacaggcatcctgaggagctggcgagcaggctcagtgcccggggcctggagtgactgag

SEQ ID NO: 320405 - DNA, 201 bp, Homo sapiens
tgaaaatcgccaagggcaaattttggtatcaaaaggggcagggctggtttggacttaagtatttagtcatagagccccccaaggctgccgagccaccaggstttagaagtgctcgcctctgggggtgggacacccagtctgtattaactgggagacagaaggagccttgacggaacttgtccgcagccccagcccctcacc

SEQ ID NO: 320406 - DNA, 201 bp, Homo sapiens
ctgtgtgagagtcagtgtgtgtgataactgtgtgtgtatcaccgtgtgtgtgtgtgagagagggaaggagagagagggaggcaggtcagagggagtcaggygtccttggcgagagtggcagcagcctgcctggagggaccctgggatggccatttcagcacctaaggggtagcctgcccgggtgagtctccagtccactgt

SEQ ID NO: 320407 - DNA, 201 bp, Homo sapiens
ttcaaagatcctgggaagatacctgggaaggaggcaatgagcagggcacagtgggagagtagagggtgtgggatctgagaaggagggctcttttttccaaygtggaaatcatctgaaaatcgccaagggcaaattttggtatcaaaaggggcagggctggtttggacttaagtatttagtcatagagccccccaaggctgc

SEQ ID NO: 320408 - DNA, 201 bp, Homo sapiens
ggaggccggaggaattttgagcttgacttctaggttctggcctggcactgaggggtgagggtgcctttcgctaaggtgtagtcccagcagcagcgccaggyttggaggggaagctgatgaactcagctttgaaaggactgcggttgaaggacctcccggtggaggtgtcagagaggctgctgggtactcggggaagagctc

SEQ ID NO: 320409 - DNA, 201 bp, Homo sapiens
aaaataagattagaaagagtagaggcctgcctggctacctgtaggattggggaggtgcaaggctccaggttcctggctctggggctgggtaggtgggggtrccatttctaagattcatgtactagaggaggaccaggtttgaggaggcgagttggtgagtccagttagaaatctgttgagccaggtgtgcgcaggcatcca

SEQ ID NO: 320410 - DNA, 201 bp, Homo sapiens
tcaagaaatgccaagagaaaaaagtgtgcgaaggaggaggagtggtcagcagggcggggtgctgccgagaggcccggcatgtgtccttaacagttagttcsgtggagccattgttggctttggtgttgggagacagcagggctgagaagtgagagggaggctatcagtgtctgtagtgactggaagggcccgaacctaggg

SEQ ID NO: 320411 - DNA, 201 bp, Homo sapiens
acacgaggtatcgggggaggcggggcagggctggaggtaaccagcagtgacagtcctgattcctgccctgcccacccaggtggttctacattgttgtggtrcccattgaccgtgtgggcgggagcatgctgacgccaaggtggagcacacccgaggaactggagctggacgaggtacctggggaggggatggggacactga

SEQ ID NO: 320412 - DNA, 201 bp, Homo sapiens
agcgggaaagcctagtgggaggattccctggagctgaggagccggggcctgggaaggggcgcagaggctccacccaggcgggggcgggaagggcggtgccrgggcggacagcggacgcgcgcgcctgcacggactcgggcacacgcagcccttccgcggcagcgcccgccgctccaccgtcgccatggctaccggctggcc

SEQ ID NO: 320413 - DNA, 201 bp, Homo sapiens
atggagggcttagtgagccttatagccaggagtccctgaatgtttgaaatccttcagtcctttctcatagccagtgtggcaacagcctggttagggtgggkcagcttacacacagggctgcttctcatgggctggtggggaggagtggcttcacggtgtctgttactctgtaggggcagtgggttgggcaggtgtgggctc

SEQ ID NO: 320414 - DNA, 201 bp, Homo sapiens
aaacctagctaggctaagtcaagatcaacattccagggttggtaatgttggatgatgaaacattcatttttaccttgtggatgctagtgctgtagagttcmctgttgtacacagtctgttttctatttgttaagaaaaactacagcatcattgcataattcttgatggtaataaatttgaataatcagatttcttacaaac

SEQ ID NO: 320415 - DNA, 201 bp, Homo sapiens
cctgaatgtttgaaatccttcagtcctttctcatagccagtgtggcaacagcctggttagggtggggcagcttacacacagggctgcttctcatgggctgrtggggaggagtggcttcacggtgtctgttactctgtaggggcagtgggttgggcaggtgtgggctcttacacggaaggtgagccttgatctcggcccagg

SEQ ID NO: 320416 - DNA, 201 bp, Homo sapiens
ctgttactctgtaggggcagtgggttgggcaggtgtgggctcttacacggaaggtgagccttgatctcggcccagggagctgacatcccaggccacagccycagggctggccggcatgctccaaggcccctcatgacccccatgctctgctctgccagcttctagaagccatcgagcaaggcggagaggagcagcggcggc

SEQ ID NO: 320417 - DNA, 201 bp, Homo sapiens
ctaatgtggctccagggacccagtcctgccaggtccaccttgtagggtctgggagaccaggcccagggtaacccagacccagagccctttctccaggattrataggcagagggtggggggttctcacgctgagctcacagcctgctgttctccaccgggccacagaagcgctatgcctccagcccctactcggatgagatc

SEQ ID NO: 320418 - DNA, 201 bp, Homo sapiens
cgagagacagtctcgcacagagcaaagagcagtcactgtgtggaacagcagagaggcatgtccttgtacccacctgagcacactcactcaaattcttcttyccgaagcacatgcgtctgcagaccacaagtagcctctggctatttgttggcagctgaatcctatggtctgtctctgaccctgtccttgtagatgggaaaa

SEQ ID NO: 320419 - DNA, 201 bp, Homo sapiens
cgctcagagatcctgggaagaggtggggcagtaggaggacagagccgtggacatgggggctccttggcagccagccatgccatgtgtcactgtctcagcckggacctcaggttctcaccagcctcccttctgtctctctaggaaaaggacccactctccgtcctctaaggatgagcagtcgatcggactgaaggactcctt

SEQ ID NO: 320420 - DNA, 201 bp, Homo sapiens; identical to SEQ ID NO: 67123

SEQ ID NO: 320421 - DNA, 201 bp, Homo sapiens
ggacatttgctaatgggggggtattgcataatgaggtggggttggggggaagaagcacgaatgtggctgggcttctctgtggaattcatgggagagccacrgtgagaacccgacagcatgggacagaggtggggtccgaagaccaggtgggagtgagaccctggttatggcccatttacccagaatcctaggagctcagag

SEQ ID NO: 320422 - DNA, 201 bp, Homo sapiens
gacagggccactgcagaagatagggtaggcaccccagagaattgacagctggggcagtgaagcgcggagtggacaaatgtgtttcaataggcctcttaacragacaaatgaatgggggccctggcctctgaggggagtggagggaagcgggtggagaagcagctgccaagagttagcccagaggccccagtgtcagtgccg

SEQ ID NO: 320423 - DNA, 201 bp, Homo sapiens
ttcccagtagtaattggtaggggcaagggggaacagtttttaaagcagagaacctccatgctggttccttaggaaccaaagcccaaacaccaggtcttgayggtagaaagcagctgaagaagctgaaatcctgccttcttcaggtagggggttcaggggactcaggccttctcccaggcagagagccatggggcaggagcc

SEQ ID NO: 320424 - DNA, 201 bp, Homo sapiens
ctatcaacctcatccctcgctgtccctccacccaccccactcacccaccacgctgacttctttcagtggttcaccaattcccagtagtaattggtaggggyaagggggaacagtttttaaagcagagaacctccatgctggttccttaggaaccaaagcccaaacaccaggtcttgacggtagaaagcagctgaagaagct

SEQ ID NO: 320425 - DNA, 201 bp, Homo sapiens
gtgtttgtggccgctgcccagcgcagcacagcggccagcacggttcggctcctctgcattttctcatagttcctccaggcaggctccccaagcagccagaygctcctccctgctggcctgggcccctccacagaaccacatggacttgtctggcagcagctctgggaaggctcgctcacacattggttcatctagtattta

SEQ ID NO: 320426 - DNA, 201 bp, Homo sapiens
tcctggtgtgctctggtggcaccctgttgacccagtctcagaagttgtgttccgaccctcactgaacaccagctgtgggtcaggcacggggcagagtagtycaagtagcttggtttgctgcctgcctggggacctgacactgtgggatctggtcagtgctgggatgggaagctctgggcacctcaggccatgggacacaga

SEQ ID NO: 320427 - DNA, 201 bp, Homo sapiens
gcaattcagagacgagcttgagtgccccagtgctccggccttgtttttatctcggttgttgaaagcccaggctcacccagccatgctggtgaagtgggtgytctgctgtgaacaccgttgcatggattcacaagatgctcaacctcgcaaccgcagtcaggctagcagcagccctgccccttgttcctctcccaccttctc

SEQ ID NO: 320428 - DNA, 201 bp, Homo sapiens
aggagttacagtaagcagtgagtgagtcaatggcagtcaaaccttgagttgatggcctggcctctggtaagggcttcatggagctctttctactttctgtrcccttgaccctcctaacactgagctgtgctgacccgtccttggtccttgcccacctccggccctctgctcaccttccggctgctccacttgaaaacctcc

SEQ ID NO: 320429 - DNA, 201 bp, Homo sapiens
atttgcctccagagttagtctcctgctgaccctttgccgcctccaagtctctgcgacactcctcctaatctccccctccactcctcagtgagatggagaarctgagagctgcaacagggtgggactcagtccagctggtgggagccccgataccagccgtgggagggagggctgttcctggctctgctcacggattctggc

SEQ ID NO: 320430 - DNA, 201 bp, Homo sapiens
acgccaagtgcttagcgcggcttcctgaggggtgtcgtctgactctccacccagtgcacgtggtgggtgatggcggtggcctgtccgactctttggggccrtgtggtcagacttgcttactcagagcagagagaattaggctgtcaaggctgtcaaccaaaatacacttatcaaggagttgctgtctgtcatgggagaggg

SEQ ID NO: 320431 - DNA, 201 bp, Homo sapiens
ccacccccagcctggaagtgtggagccagacctgtctccttttacgtcagattccatctccctgcctccctttttcccctctcgtggcctgcatttctctmtccttcttggagtctctgtttttgtcttgctctttctcttctctctcctccttccttccctcctccccctgccattcctctgacccctttccttcatctc

SEQ ID NO: 320432 - DNA, 201 bp, Homo sapiens
aatacaatttccaaaagtactcaagagccagacatggggttggcaattttttattttgccaagtaaaggcattataaaaaaacaactgctatctgctgtcyccatcatttcatacaggaaagaacattttaacaccaaggacaatatttgagaataaagcaagaaagggcagttggcagctttacactgacgtagcaaagg

SEQ ID NO: 320433 - DNA, 201 bp, Homo sapiens
ctgacccccacccccacccaggatggtacccacgctggtggggactcaataatggctctagaaggaaggggctgggctctgtcgctgcatgtgtgccagcrgaggaggcatccaggggcacgccttcattttaaaaattatagagtagagaaagtcaaaaataaatattgcttctgaagcttctttgaagactggcatgta

SEQ ID NO: 320434 - DNA, 201 bp, Homo sapiens
cctgtaggctaatatctgctctaatgttcactcctccttctgctttccaggtccaaggaagacttccttatttgtcttcctgccacctggaagttgtgacytcagggtcgtgggcccagggtccagctcctgggatggagccagatggcacctaaggggcctcaaccatcccacctctgcagtaataactgggctctctcc

SEQ ID NO: 320435 - DNA, 201 bp, Homo sapiens
tgacggcatgcgctgcccagatgtgagctctgctcagcaggccttttcttctctgtagtgatgtgacatgctgccaaaaccacctcctggagaattggaayttgagaccggggtaggcccaggaggaacaggaacaagcttatagagtggaaatggagttgtgagcaggggctcagagcccctgctgggtcctgagaggag

SEQ ID NO: 320436 - DNA, 201 bp, Homo sapiens
tccagcttcaggcctcaaagaggcccctttctccctgagtctcaatttcactccctgtaaaatggggtagctaatccaacccggactgggtcccagggctkttgtaagaatccaagggaactgtgtggcagtgcatcgtcagcagtggcagtcacttcccttgtgactgacactgctgtgtgcttggttccagcttgcagt

SEQ ID NO: 320437 - DNA, 201 bp, Homo sapiens
ctgctgtggcctgaacatatgagctgccatcctttgtcgtagaggacagcctaactcactaagtccatgtgctcatccagagagcagtctcttccccaccmccagcaccctgaggcgaaacctgggggtcttaagaagagatgcagcatctggctgcaggaggaggcccgtgggtgggacgcagagggcttgcagcccctc

SEQ ID NO: 320438 - DNA, 201 bp, Homo sapiens
tgagtcaaagggcacatgcatttttaagccttttgatatttccagaagattgtgtcaattcatactcctgccaagcagggcagaagagggcctctttcctkcacatcttccccactgttgggaaatatcttcaaaaaaatattttttgccaagttaataggcaaaaaatggcatctcaatttaatttgcatttctttgatt

SEQ ID NO: 320439 - DNA, 201 bp, Homo sapiens; identical to SEQ ID NO: 67135

SEQ ID NO: 320440 - DNA, 201 bp, Homo sapiens
acagcctgtatgaatctggagtcattgtcaccctgtgctaggggcaaagtccccagggtctgccttgggtttcctaggctctgtggctcatatgactggcwgagccctgaagtttccccagaagccatgcgtcccagatggctcctgtggtccatgtggtctgtgaggtgtctgtggcatgggctaagccctgagttcctt

SEQ ID NO: 320441 - DNA, 201 bp, Homo sapiens
ggctggccccagctctggctggaagagcctgtccccaccccactctgctctgccatctgcggggcctgccaggaaggcacactgccagtgcatgctcacartttccctttggcccagagctccctggcacctcttggacacgaatacacccctaaggatgctgacttctgggccccttcagtcccccacacccatcttgtg

SEQ ID NO: 320442 - DNA, 201 bp, Homo sapiens
tgtcacattgcagcccatgttggggaacaacctgtgagtgactttgagctcagagctgtcagtgagtgctccctgctcttcccagcacaaggtgaccttcracccaacctcctcctacacactagaggacctgaagcctgacacactctaccgcttccagctggctgcacgctcggatatgggggtgggcgtcttcacccc

SEQ ID NO: 320443 - DNA, 201 bp, Homo sapiens
gccaggaaggcacactgccagtgcatgctcacaatttccctttggcccagagctccctggcacctcttggacacgaatacacccctaaggatgctgacttytgggccccttcagtcccccacacccatcttgtgaaatggaaaagtcagattctctgtttggtggggaaattactgttagattctttcagaataggttagg

SEQ ID NO: 320444 - DNA, 201 bp, Homo sapiens
ctctgcctcccaggttcaagcaattctcctgcctcatactcctgagtagctgggattacaagcatgagtcaccacgcctgggtaattttgtatttttagtrgagacagggtttcaccatgttggtcagactggtcttgaactccgaacctcgggtgatccgcccgcctcagcctcccaaagtgctgggattacaggggtga

SEQ ID NO: 320445 - DNA, 201 bp, Homo sapiens
tctgaccctgtggagatgcggaggctcaactaccagaccccaggtagggcactcctatggcctgtgtgcccccagcccagacctagcaggcctgtgggtcygttctgcaggtctcagggtcgccactgaagttcctgggccgcatgcacttgttcctgctccttttcttcctttctgcccttctccctgtgctcatccact

SEQ ID NO: 320446 - DNA, 201 bp, Homo sapiens
agccacttagccactgccttgtcttcagtcaaggcctctgaatatgggctgaggacctcccagagcccacgtctctgccacagggtggccagtgtctggcscacgctctgacgcctccacatgaaagaggggcatgttagcagtgggagatgcctcaccagacatctgtggggagatgaagtgcctgcacctgagccttcc

SEQ ID NO: 320447 - DNA, 201 bp, Homo sapiens
gcagattccgttgctttctctctctgggcctgttttcctattgcacaatggggataatcactcctacctggaaaggttaactgaggtcacatggatgaggygcctggaacctagtatgtattccccttatctgaggccatgacctggggctcttgctctgtccctgggaaccaggcttgtctctgagtgggctccaggggg

SEQ ID NO: 320448 - DNA, 201 bp, Homo sapiens
cccgccgctccaccgtcgccatggctaccggctggcctggagcggggaggggcccttcctccccttcggcgccaacaggaggcgatttgaggggactcagygtgactggtgcatcccggggttggaaaatgggtgggtgcttgcgactgtccacgtgtgggggaccctggggttcgctttgcggtagatgcaaacgccgcg

SEQ ID NO: 320449 - DNA, 201 bp, Homo sapiens
gtgcttgcgactgtccacgtgtgggggaccctggggttcgctttgcggtagatgcaaacgccgcggcgcgtgtgcggggctctgcagtggagcctgagccstgccggccgaggcgtggtgtgggggaggctgccggccctctcgcgcgcggggtgttcacgcctagagcgctggggctgggggcctaccacccggtctcct

SEQ ID NO: 320450 - DNA, 201 bp, Homo sapiens
tggagggtcggaggctcaggtgtgtgagtgatgtgatgatccatgttatgggaacagtgctaggagcttcaggctactctgtgtggcttctgagtcccatkgggaagtggcgggtatggcctcagcatcaggtcattcagtcctgagtctatggcaggtaggctcctagtcgccagtatgtccccactttgtcccccagag

SEQ ID NO: 320451 - DNA, 201 bp, Homo sapiens
gaaaattggtggtttgggatggggcctggtggctcacagctgtaatcccagcactttgggaggccgaggcgggtagatcaccagaggtcagaagttcgagmccagcctggccaacatggtgaaaccccgtctctactaaaaatacaaaatttgccgggcgtggtggtgggcgcttgtaatcccagctactcgggaggctga

SEQ ID NO: 320452 - DNA, 201 bp, Homo sapiens
gcgtccccgggagtgactacatcaatgccaactacatcgatggctaccgcaagcagaatgcctacatcgccacgcagggccccctgcccgagaccatgggygatttctggagaatggtgtgggaacagcgcacggccactgtggtcatgatgacacggctggaggagaagtcccgggtgaggctgcagggccctgccagga

SEQ ID NO: 320453 - DNA, 201 bp, Homo sapiens
gtgactacatcaatgccaactacatcgatggctaccgcaagcagaatgcctacatcgccacgcagggccccctgcccgagaccatgggcgatttctggagratggtgtgggaacagcgcacggccactgtggtcatgatgacacggctggaggagaagtcccgggtgaggctgcagggccctgccaggaggcgggtgggaa

SEQ ID NO: 320454 - DNA, 201 bp, Homo sapiens; identical to SEQ ID NO: 67130

SEQ ID NO: 320455 - DNA, 201 bp, Homo sapiens
ctagtgggttccttaagatgttaatatgtttcaccaaatgctgtcattttcggagaatgttaatgtgttccccagttgctggcgtgttcccggggtattcrtgtgttccccagatgctggagtgttcctggggcattaacacatctcctaagttaattagtggaaagagctgctgttatctgtttttggactgcaaagcat

SEQ ID NO: 320456 - DNA, 201 bp, Homo sapiens
cctttgacaccccagctgcttgtcagcatggcctcaggcgcccgttattactacctgaggcatctgtcccagaatcctgtgaagcctggcacccctccccyattccttctcacctgattatgggggcccgaccctctgtccacaggagaaatgccaccagtactggccagcagagcgctctgctcgctaccagtactttgt

SEQ ID NO: 320457 - DNA, 201 bp, Homo sapiens
ggggaatgacatacagctcgtcagctactgtaggtgtgaaataggcttccgggtgatgtcctgggacttacaccaggatctttcttctgcttctccattcrccacgtttctgtagaaaagactgttcccatcgactgtaggttgtcgtagaaagagcttggtgcctgcaggatctgggcatgtcctctgcatctctttgat

SEQ ID NO: 320458 - DNA, 201 bp, Homo sapiens
agcaggcccaggcatgctgggtgggccagagcctttctccttcaccacctgactctccctgagtgactcattctctccttccatctacagctctctgggtrtacagctgctggggccagggtggagccctgccctcctcagagcctggcctacctgtgccaggactaccagccttccccctttctctagggacctggctgc

SEQ ID NO: 320459 - DNA, 201 bp, Homo sapiens
tgtaggacaggctgagcctcagggagcaaacccaggccatcctcgttccctctgccacatcctccgtggcttgagtttcctctgtgagggtgagggagccrgtcgagaggagggctatagcctaggctcagatatcagccctgagcatccatccatatgcacagctgagcactggggcatttctgttacaccattttgctg

SEQ ID NO: 320460 - DNA, 201 bp, Homo sapiens
gagcaaacccaggccatcctcgttccctctgccacatcctccgtggcttgagtttcctctgtgagggtgagggagccggtcgagaggagggctatagcctmggctcagatatcagccctgagcatccatccatatgcacagctgagcactggggcatttctgttacaccattttgctgaccgggcagatctgcgagggcgt

SEQ ID NO: 320461 - DNA, 201 bp, Homo sapiens
cggaaactagctacacatcttttactgggaagtgtatggatacgcagcaaaatactagccctggcagtttgggcacagtccacccttttttccatcagccygaactatgggagtctagctttgagggtcctccctgggggcggggaggaggggacccagacctcctgcagtagaggggttgtgatacacaccacggctcct

SEQ ID NO: 320462 - DNA, 201 bp, Homo sapiens
ttaaaagttacagctgaaatataatccagaaatggcagggccctgttttggaaattgtctataaaatgtcagcactaaggatgcacagggaacggtaatakactggcattgttggagcctaagattagaccctgagtgcatttttcccagctccagtttttctttccctgctgttgcttctgtcaatagactgtccagggt

SEQ ID NO: 320463 - DNA, 201 bp, Homo sapiens
acaaggctgccaagagaggagggggtggttgggtgttggtgaaggaatttggcggggcagagttagactgcagcaaacggaaactagctacacatcttttrctgggaagtgtatggatacgcagcaaaatactagccctggcagtttgggcacagtccacccttttttccatcagcctgaactatgggagtctagctttga

SEQ ID NO: 320464 - DNA, 201 bp, Homo sapiens
gtccctggcctgccctgacccctgcccctccccagtcctcctgagggcagcccttttgcttgggttcccaggttgtgccctgagcatggctgagaccctgrcaggcggccctgctgcttgccttatttcttcccctcaggccatggcctggaggtggaggcagtgactccacggcaggtggctgtgtccctctggactggc

SEQ ID NO: 320465 - DNA, 201 bp, Homo sapiens
aggacctggacaaagggtgagcagtgagtgggagctgacatctggctctctcctcaccctgcaccctggggctggaacacagcagacacacaatgaccacrtggtgccactcggccttcacagatgagcacaaggacatccctccccgccaggcccaggagcagggcagcagggcagccccacgtggaccccgtgctcaca

SEQ ID NO: 320466 - DNA, 201 bp, Homo sapiens
ttctctctgccctgatacctggggacaggcacacatgtattacacatatgtcacatatatgtaaccgattctggccaggcacggtggctcattcctgtaakcctagcgctttgggaggccaagttggaaggattgcttgagctcaggagtttgagaccagcccagttaacgtagtgagacccccatctctacgaaaaaaaa

SEQ ID NO: 320467 - DNA, 201 bp, Homo sapiens
tttcttccccctagatgccagtagcatctccccgctttccccagtctcgacaatcaaaaatgtctccagtcgttgcgtaatgtcccatgggggcaaaattrccctgaattgagaacctctggtctacagcctcttgctgctttcactatactgtacaaacctggaaaattggggagggtcagtggggaagatggatagtga

SEQ ID NO: 320468 - DNA, 201 bp, Homo sapiens
gagtaagatgtgttctttcattcggcagctctctgctgagccccagtggtgtgcctggctctgggcaaggttgcacagagcaatccttatggggtgcccastcaggagcagagaaacatgattgggatggcagatggaaggcaggtagatgtgggggcctgagagaatgacaggagagagatgagccttcagaggctcttt

SEQ ID NO: 320469 - DNA, 201 bp, Homo sapiens
tcggcagctctctgctgagccccagtggtgtgcctggctctgggcaaggttgcacagagcaatccttatggggtgcccagtcaggagcagagaaacatgaytgggatggcagatggaaggcaggtagatgtgggggcctgagagaatgacaggagagagatgagccttcagaggctctttcaggctcccccgcacactgcc

SEQ ID NO: 320470 - DNA, 201 bp, Homo sapiens
cgggtggcggctgcaatgaagacgtctgtgctgctcagctgggaggttcccgactcctataagtcagctgtgccctttaaggtgagtaagggccacggccrgctgagcctggcacacacacaggcctgctgggtgctgtctttccagtcctaacccatgtgcatccggctgtggagcaggaatgtggttgtgtatccgtgc

SEQ ID NO: 320471 - DNA, 201 bp, Homo sapiens
catgtggtctgtgaggtgtctgtggcatgggctaagccctgagttccttttgtgctccatgtggccttatggtgtggagccagtcctggagccgtggtggrtccagaggtgtcacattgcagcccatgttggggaacaacctgtgagtgactttgagctcagagctgtcagtgagtgctccctgctcttcccagcacaagg

SEQ ID NO: 320472 - DNA, 201 bp, Homo sapiens
ccaggaagacaaaatgctgacttatcctgctggtctgtataaccttggccagcattgggcttgacagaaaggcgtgccgcaggagggccagagggaagcarcccagagggtgaacacccgccccctgccccgcctcaccccacccctcccctccctcctaggaggatcaagaaagctgggtgcctgcaggaactgggtgaa

SEQ ID NO: 320473 - DNA, 201 bp, Homo sapiens
agtggaaaagggagttcccgactctagtctcaatacctgtctgccccagtggctcagcccttactagttacaccagctaatattcactgggagtgaattcygcatcagatgctccgcaacaccttgcatgcatgatcagatacagacctcacagtagccttaccatcaaggtgggcacttgaaccctgtgtacagataaag

SEQ ID NO: 320474 - DNA, 201 bp, Homo sapiens
gtccataccctgggagctgtgctgaaagggctgtgcggcccccgaccactgtgtgtgtcagggagggggcacgctctcgtggggtgtcaggccaggtggcrgtgggtaactggcagaaaggccctcctggtgtgctctggtggcaccctgttgacccagtctcagaagttgtgttccgaccctcactgaacaccagctgtg

SEQ ID NO: 320475 - DNA, 201 bp, Homo sapiens
gtgtcctgcgggtggaggtggattggagggaagcggagggcgaggcctggttgaggggcggggcctgcctgtctggtcccccgggctgccttgggccagcytggcctagtctgttgggtgggcgggcagggtgcaggctcctctccagcctccaagggaggggagttgttctgcctcctcgatagccccaggccttgggca

SEQ ID NO: 320476 - DNA, 201 bp, Homo sapiens
gagacagggaatctgacattttccctcaccagggagggggagccctgggggaggggagggaggcaggcctggattcctggcctttccctccaggaggttgrggggcagtgaaggtcttggagctcagtctgtaagtcatggattcacctggggccgcagatttcaggcctggaaggactggccgggaaagcccaggaggcc

SEQ ID NO: 320477 - DNA, 201 bp, Homo sapiens
cctgtaagcctagcgctttgggaggccaagttggaaggattgcttgagctcaggagtttgagaccagcccagttaacgtagtgagacccccatctctacgraaaaaaaaaaaaaaaaaaaactgggcatggtggcacacacctgtggcccagctacttgggagggctgagacaggaggatcacttgagcccaggagggtga

SEQ ID NO: 320478 - DNA, 201 bp, Homo sapiens
aggccgccggtgacccacacctggctctcctccccggcgtctcctctccgcttctttgtttggagcggaggccccgccccaccccgcccccaggcgcactsgcccggccattccggttcagccggttccagcccccagtttctgccgctgcaggtcccggcaggagctggaggggcactttctccctgggtttctcttccc

SEQ ID NO: 320479 - DNA, 201 bp, Homo sapiens
gcagggaacatgacgttgctctttagaggagccaaagctggggctctggggagagcagctgggtcagaccccgcggctttgtctgccataacaggtgtttkgagagtgattcggcaggtctttggagggttttgatagggcggggtgtcgggggaggctgtcagctcactctggacactgagtagagaacagacgggaggc

SEQ ID NO: 320480 - DNA, 201 bp, Homo sapiens
gcttgccttcaccgccgtgggcgatggccctcccagccccaccatccaggtcaagacgcagcagggaggtaggtgggggcatgccggctgggcagccaacrgcagagaaggggaggctgaggttgtggcggtgcctttccccctccctcggctgtgaggctgggggctcttgggaggatcaaggtgccgtattccatagat

SEQ ID NO: 320481 - DNA, 201 bp, Homo sapiens
tagaggacctgaagcctgacacactctaccgcttccagctggctgcacgctcggatatgggggtgggcgtcttcacccccaccattgaggcccgcacagcmcagtccagtaagtgtctcccaagtccgctgcctgttacacctgggctgggacacacacacacacatgcacacacatccttccccctcgaccaggcaggtg

SEQ ID NO: 320482 - DNA, 201 bp, Homo sapiens
gctgctgaagtccccatggcagggggtggtgacagaacttgaagaggaaacctgtgcattgcagcagagtcctcggtgggcgtggagtctggacacatcaytggacacaaggagacacgtgtctgcctcctaattcccaaagaagctgttgagtgagggcacctctgttggtgggtactttttctccacgccaggggctgt

SEQ ID NO: 320483 - DNA, 201 bp, Homo sapiens
tacacatactttccaccaggtgggctcaggtgacctgcagaggcacatagctgctacccagtctgggtgtctttcatctacatgggactgcaagggtcacrtcacctccaggtctgtttgttagatgagtctggtgtgctgatgggagggtccagtgaatcccacagttgatatgtgtacatactaaatgacccaaggccc

SEQ ID NO: 320484 - DNA, 201 bp, Homo sapiens
tgaagtccccatggcagggggtggtgacagaacttgaagaggaaacctgtgcattgcagcagagtcctcggtgggcgtggagtctggacacatcactggayacaaggagacacgtgtctgcctcctaattcccaaagaagctgttgagtgagggcacctctgttggtgggtactttttctccacgccaggggctgttggcc

SEQ ID NO: 320485 - DNA, 201 bp, Homo sapiens
tgccttatgccaaaagggccactggggccactcttcctcggaagagcagaaccgtgggcacagcagatgtgaagcagttctccatatgtggctgtgtgtgygggtggcagtgggatggccacgtgcttgtgtgtatgtgatatcgtgtatgttttgtgtgagacagcatatgtgtgggagagacctcgtgtgagagatgct

SEQ ID NO: 320486 - DNA, 201 bp, Homo sapiens
tgtggctgtgtgtgcgggtggcagtgggatggccacgtgcttgtgtgtatgtgatatcgtgtatgttttgtgtgagacagcatatgtgtgggagagacctygtgtgagagatgctgtgtcagaactctaagacattgtgtgtgagagtgtgtgtcagatgccatgtgtgagacaccaagacacgggtatgtgatactctgt

SEQ ID NO: 320487 - DNA, 201 bp, Homo sapiens
tgtgcgagacagcctatgtatgtgacagtgtgtgtgtgagacaccatgagagactgtgtatttactgtgagagactgtgtgagagacacgtgtgagacacygtgtatatgacactatgtatacgtgagactgtgagacactatgtgtatgtgacactgtatatgtgtgagaccgtatgagacagtgtatatgacactgtat

SEQ ID NO: 320488 - DNA, 201 bp, Homo sapiens
tgagcactgaggggttgtggctttggctggaagcctctgatacctggagcctgtcttctgctaacaagcctgtgttcaggggcctgtgctcagcgtgctcrtggagtctggcctcccaccttctccctccctgctggggagaggaggggcaacagaattctaccagggagactccagagtcagttggctttgcccctcact

SEQ ID NO: 320489 - DNA, 201 bp, Homo sapiens
tcagagcctggcctacctgtgccaggactaccagccttccccctttctctagggacctggctgcggggccacagctgtctaaaacagggacagtgcctttytccccacaggtgcccagacatgctccttacaccggtggtgtgtgtgggggtggcttctagtggctcctgtaccttggcaggtttgtgggctgggtgggcc

SEQ ID NO: 320490 - DNA, 201 bp, Homo sapiens
tgtctgcagaggaacagctgccccctgggttcccttccatcgacatggggcctcagctgaaggtggtggagaaggcacgcacagccaccatgctatgtgcygcaggcggaaatccagaccctgagatttcttggttcaaggacttccttcctgtagaccctgccacgagcaacggccgcatcaagcagctgcgttcaggtg

SEQ ID NO: 320491 - DNA, 201 bp, Homo sapiens
ctgtactcttgcattttctctccctcctctcacccacagcctcttgatgaaccggaggaagtttctttaccaattcaaaaatgtccgctgggctaagggtyggcgtgagacctacctgtgctacgtagtgaagaggcgtgacagtgctacatccttttcactggactttggttatcttcgcaataaggtatcaattaaagt

SEQ ID NO: 320492 - DNA, 201 bp, Homo sapiens
gtcctctctgtctctccagaacggctgccacgtggaattgctcttcctccgctacatctcggactgggacctagaccctggccgctgctaccgcgtcaccyggttcacctcctggagcccctgctacgactgtgcccgacatgtggccgactttctgcgagggaaccccaacctcagtctgaggatcttcaccgcgcgcct

SEQ ID NO: 320493 - DNA, 201 bp, Homo sapiens
aggtagttgaacaatgggggtgggtctttcccatgctgttctcatgatagtgaataagtctcacaagatctgatggttttataaagggatttccccctgcrtgagctctctcttgcctaccaccatgtaagatgtcccttgctcttctgccatgattgtgaggcctccccagccatgtggaactgtgagtcaactaaacct

SEQ ID NO: 320494 - DNA, 201 bp, Homo sapiens
ggacccaaaaatccacccaaagtcctttatctatgccacatccttcttatctatacttccaggacactttttcttccttatgataaggctctctctctctccacacacacacacacacacacacacacacacacacacacacacacaaacacacaccccgccaaccaaggtgcatgtaaaaagatgtagattcctctgcct

SEQ ID NO: 320495 - DNA, 201 bp, Homo sapiens
caagtgaacaaataaacaaaatgtgctatatccatgcaatggaataccaccctgcagtacaaaggaagaagctacttggggatgaatcccaaagtcatgaygctaaatgaaagagtcagacatgaaggaggagataatgtatgccatacgaaattctagaaaatgaaagtaacttatagttacagaaagcaaatcagggca

SEQ ID NO: 320496 - DNA, 201 bp, Homo sapiens
aagcaaaaattttaaatgtgaaaaacaaattgtgtcttaagcatttttgaaaattaaggaagaagaatttgggaaaaaattaacggtggctcaattctgtyttccaaatgatttcttttccctcctactcacatgggtcgtaggccagtgaatacattcaacatggtgatccccagaaaactcagagaagcctcggctgat

SEQ ID NO: 320497 - DNA, 201 bp, Homo sapiens; identical to SEQ ID NO: 67218

SEQ ID NO: 320498 - DNA, 201 bp, Homo sapiens
aaaaatccacccaaagtcctttatctatgccacatccttcttatctatacttccaggacactttttcttccttatgataaggctctctctctctccacacacacacacacacacacacacacacacacacacacacacacaaacacacaccccgccaaccaaggtgcatgtaaaaagatgtagattcctctgcctttctca

SEQ ID NO: 320499 - DNA, 201 bp, Homo sapiens
tgatgattaattaaattgatctttcggctacccgagagaattacatttccaagagacttcttcaccaaaatccagatgggtttacataaacttctgcccaygggtatctcctctctcctaacacgctgtgacgtctgggcttggtggaatctcagggaagcatccgtggggtggaaggtcatcgtctggctcgttgtttga

SEQ ID NO: 320500 - DNA, 201 bp, Homo sapiens
tacagaaagcaaatcagggcaggcatagaggctcacacctgtaatcccagcactttgagaggccacgtgggaagattgctagaactcaggagttcaagacmagcctgggcaacacagtgaaactccattctccacaaaaatgggaaaaaaagaaagcaaatcagtggttgtcctgtggggaggggaaggactgcaaagagg

SEQ ID NO: 320501 - DNA, 201 bp, Homo sapiens
gcaattttctttgcctacatttgtattgaatacatcccaatctccttcctattcggtgacatgacacattctatttcagaaggctttgattttatcaagcmctttcatttacttctcatggcagtgcctattacttctcttacaatacccatctgtctgctttaccaaaatctatttccccttttcagatcctcccaaatg

SEQ ID NO: 320502 - DNA, 201 bp, Homo sapiens
ttcggtgacatgacacattctatttcagaaggctttgattttatcaagcactttcatttacttctcatggcagtgcctattacttctcttacaatacccayctgtctgctttaccaaaatctatttccccttttcagatcctcccaaatggtcctcataaactgtcctgcctccacctagtggtccaggtatatttccaca

SEQ ID NO: 320503 - DNA, 201 bp, Homo sapiens
cacctggttcacctcctggagcccctgctacgactgtgcccgacatgtggccgactttctgcgagggaaccccaacctcagtctgaggatcttcaccgcgygcctctacttctgtgaggaccgcaaggctgagcccgaggggctgcggcggctgcaccgcgccggggtgcaaatagccatcatgaccttcaaaggtgcgaa

SEQ ID NO: 320504 - DNA, 201 bp, Homo sapiens
actcttgcattttctctccctcctctcacccacagcctcttgatgaaccggaggaagtttctttaccaattcaaaaatgtccgctgggctaagggtcggcrtgagacctacctgtgctacgtagtgaagaggcgtgacagtgctacatccttttcactggactttggttatcttcgcaataaggtatcaattaaagtcggc

SEQ ID NO: 320505 - DNA, 201 bp, Homo sapiens
acctggttcacctcctggagcccctgctacgactgtgcccgacatgtggccgactttctgcgagggaaccccaacctcagtctgaggatcttcaccgcgcrcctctacttctgtgaggaccgcaaggctgagcccgaggggctgcggcggctgcaccgcgccggggtgcaaatagccatcatgaccttcaaaggtgcgaaa

SEQ ID NO: 320506 - DNA, 201 bp, Homo sapiens
ttcctcgctttttaaattttctttctttctctacagtcttttttggagtttcgtatatttcttatattttcttattgttcaatcactctcagttttcatckgatgaaaactttatttctcctccacatcagctttttcttctgctgtttcaccattcagagccctctgctaaggttccttttccctcccttttctttcttt

SEQ ID NO: 320507 - DNA, 201 bp, Homo sapiens
gctttcatatcaaccacgctgtacagcttgtgttgctgtctgcagctgcaatggggactcttgatttctttaaggaaacttgggttaccagagtatttccmcaaatgctattcaaattagtgcttatgatatgcaagacactgtgctaggagccagaaaacaaagaggaggagaaatcagtcattatgtgggaacaacata

SEQ ID NO: 320508 - DNA, 201 bp, Homo sapiens
cagagccgcaataaaagtcagtgaattttagcgtggtcctctctgtctctccagaacggctgccacgtggaattgctcttcctccgctacatctcggactrggacctagaccctggccgctgctaccgcgtcacctggttcacctcctggagcccctgctacgactgtgcccgacatgtggccgactttctgcgagggaac

SEQ ID NO: 320509 - DNA, 201 bp, Homo sapiens; identical to SEQ ID NO: 67220

SEQ ID NO: 320510 - DNA, 201 bp, Homo sapiens
gcgtgagacctacctgtgctacgtagtgaagaggcgtgacagtgctacatccttttcactggactttggttatcttcgcaataaggtatcaattaaagtcrgctttgcaagcagtttaatggtcaactgtgagtgcttttagagccacctgctgatggtattacttccatccttttttggcatttgtgtctctatcacatt

SEQ ID NO: 320511 - DNA, 201 bp, Homo sapiens
gtggtggctcacgcctgtaatcccagcactctgggaggctgaggtgggtggatcgcttgagccctggagttcaagaccagcctgagcaacatggcaaaacsctgtttctataacaaaaattagccgggcatggtggcatgtgcctgtggtcccagctactagggggctgaggcaggagaatctttggagcccaggaggtca

SEQ ID NO: 320512 - DNA, 201 bp, Homo sapiens
caaggccgttggggtacctggtgggggtgatgctgtcaggggaggagcccaaaagggcaagctcaaatttgaatgtgaagggccaatgcactgtcagactragacagagaaccatcattaattgaagtgagatttttctggcctgagacttgcagggaggcaagaagacactctggacaccactatggacaggtaaagagg

SEQ ID NO: 320513 - DNA, 201 bp, Homo sapiens
tgagcaacatggcaaaaccctgtttctataacaaaaattagccgggcatggtggcatgtgcctgtggtcccagctactagggggctgaggcaggagaatckttggagcccaggaggtcaaggctgcactgagcagtgcttgcgccactgcactccagcctgggtgacaggaccagaccttgcctcaaaaaaataagaagaa

SEQ ID NO: 320514 - DNA, 201 bp, Homo sapiens
accattaggtgacagcactagctccacaaattggataaatgcatttctggaaaagactagggacaaaatccaggcatcacttgtgctttcatatcaaccaygctgtacagcttgtgttgctgtctgcagctgcaatggggactcttgatttctttaaggaaacttgggttaccagagtatttccacaaatgctattcaaat

SEQ ID NO: 320515 - DNA, 201 bp, Homo sapiens
tgatatttgagatttaaaaaatctttaatattttaaaatttagagctcttctatttttccatagtattcaagtttgacaatgatcaagtattactctttcyttttttttttttttttttttttttgagatggagttttggtcttgttgcccatgctggagtggaatggcatgaccatagctcactgcaacctccacctcct

SEQ ID NO: 320516 - DNA, 201 bp, Homo sapiens
ttacatccaaaaatattcgtagaattatgcatcttaaatgggtggagtttactgtatgtaaattatacctcaatgtaagaaaaaataatgtgtaagaaaastttcaattctcttgccagcaaacgttattcaaattcctgagccctttacttcgcaaattctctgcacttctgccccgtaccattaggtgacagcactagc

SEQ ID NO: 320517 - DNA, 201 bp, Homo sapiens; identical to SEQ ID NO: 67217

SEQ ID NO: 320518 - DNA, 201 bp, Homo sapiens
tgtaaatattcaacagtaaaacaacttgaagacacactttcctagggaggcgttactgaaataatttagctatagtaagaaaatttgtaattttagaaatrccaagcattctaaattaattgcttgaaagtcactatgattgtgtccattataaggagacaaattcattcaagcaagttatttaatgttaaaggcccaatt

SEQ ID NO: 320519 - DNA, 201 bp, Homo sapiens
tctgaggatcttcaccgcgcgcctctacttctgtgaggaccgcaaggctgagcccgaggggctgcggcggctgcaccgcgccggggtgcaaatagccatcrtgaccttcaaaggtgcgaaagggccttccgcgcaggcgcagtgcagcagcccgcattcgggattgcgatgcggaatgaatgagttagtggggaagctcga

SEQ ID NO: 320520 - DNA, 201 bp, Homo sapiens
agggttgcttctttcccctcgatttggaacctgaactgtcttctacccccatatccccgcctttttttcctttttttttttttgaagattatttttactgmtggaatacttttgtagaaaaccacgaaagaactttcaaagcctgggaagggctgcatgaaaattcagttcgtctctccagacagcttcggcgcatccttt

SEQ ID NO: 320521 - DNA, 201 bp, Homo sapiens
tcagcttgtccaagcaaaaattttaaatgtgaaaaacaaattgtgtcttaagcatttttgaaaattaaggaagaagaatttgggaaaaaattaacggtggytcaattctgtcttccaaatgatttcttttccctcctactcacatgggtcgtaggccagtgaatacattcaacatggtgatccccagaaaactcagagaag

SEQ ID NO: 320522 - DNA, 201 bp, Homo sapiens
tgcactggccttcctctcagagcaaatctgagtaatgagactggtagctatccctttctctcatgtaactgtctgactgataagatcagcttgatcaataygcatatatattttttgatctgtctccttttcttctattcagatcttatacgctgtcagcccaattctttctgtttcagacttctcttgatttccctcttt

SEQ ID NO: 320523 - DNA, 201 bp, Homo sapiens
cagggaagcatccgtggggtggaaggtcatcgtctggctcgttgtttgatggttatattaccatgcaattttctttgcctacatttgtattgaatacatcscaatctccttcctattcggtgacatgacacattctatttcagaaggctttgattttatcaagcactttcatttacttctcatggcagtgcctattacttc

SEQ ID NO: 320524 - DNA, 201 bp, Homo sapiens
tggaacctgaactgtcttctacccccatatccccgcctttttttcctttttttttttttgaagattatttttactgctggaatacttttgtagaaaaccaygaaagaactttcaaagcctgggaagggctgcatgaaaattcagttcgtctctccagacagcttcggcgcatccttttggtaaggggcttcctcgcttttt

SEQ ID NO: 320525 - DNA, 201 bp, Homo sapiens
ctccagaacggctgccacgtggaattgctcttcctccgctacatctcggactgggacctagaccctggccgctgctaccgcgtcacctggttcacctcctrgagcccctgctacgactgtgcccgacatgtggccgactttctgcgagggaaccccaacctcagtctgaggatcttcaccgcgcgcctctacttctgtgag

SEQ ID NO: 320526 - DNA, 201 bp, Homo sapiens
gagccactgcatctggcctaggatccatttagattaaaatatgcattttaaattttaaaataatatggctaatttttaccttatgtaatgtgtatactggyaataaatctagtttgctgcctaaagtttaaagtgctttccaataagcttcatgtacgtgaggggagacatttaaagtgaaacagacagccaggtgtggtg

SEQ ID NO: 320527 - DNA, 201 bp, Homo sapiens
gcattttaaattttaaaataatatggctaatttttaccttatgtaatgtgtatactggtaataaatctagtttgctgcctaaagtttaaagtgctttccartaagcttcatgtacgtgaggggagacatttaaagtgaaacagacagccaggtgtggtggctcacgcctgtaatcccagcactctgggaggctgaggtggg

SEQ ID NO: 320528 - DNA, 201 bp, Homo sapiens; identical to SEQ ID NO: 67224

SEQ ID NO: 320529 - DNA, 201 bp, Homo sapiens
agaatagaattctgtatgtttttccaaattataatgaccttttcagattcatgattaatttctagcaaatatttgggctgaattttccgtatctgagtctmctaaatatatatgtatataaaacttacttgaaaatgaagtcatgtgcatttttgcatgtcccaggtttcatcacacaaccccagacagtaaaacacacag

SEQ ID NO: 320530 - DNA, 201 bp, Homo sapiens
acacagtggtgaaaaatacaccgatcctttcaaactcggttggagagacttgaaaggtctgtatgaggacattagaaaggtgagttttttattctgctgtratgtaatgttttagcttaccaaaacttactaaaattttattttattttttattcttataattattattattttttgagctggagtctcactctgttgccc

SEQ ID NO: 320531 - DNA, 201 bp, Homo sapiens
atctgcctgtccaaatgtatgtcgtatatcacggtaagtttacagtccatactgcaactactaaaattatccatttttaaatttattattgtttaaaaatwtttttttgtagcgatggggagctcactgtgttgcccaggctggtcttgaactgctggcctcaagctatcctcccaccctcaggttcccaaagtgctggga

SEQ ID NO: 320532 - DNA, 201 bp, Homo sapiens
catcatctagacacttagtttcatttttgttgtttcttgttatttcctattgttacaaactagtgttagaacacttgtttctcccaagagaaataaatagattttctcagattttctctctttttttgttagttcccagaaatgaatgctatgatcatgcgacggttcagtttgcctggagatgtagacagagctcgacag

SEQ ID NO: 320533 - DNA, 201 bp, Homo sapiens
acatcatctagacacttagtttcatttttgttgtttcttgttatttcctattgttacaaactagtgttagaacacttgtttctcccaagagaaataaatagattttctcagattttctctctttttttgttagttcccagaaatgaatgctatgatcatgcgacggttcagtttgcctggagatgtagacagagctcgaca

SEQ ID NO: 320534 - DNA, 201 bp, Homo sapiens
aaattagccgggcctggtggtgcatgcctgtaatcccagctactcgggaggccaaggaaggagaatccttgaacctgggaggcagaggttgcagtgagccragactgcactccagcctgggtgacagagtgagactccgtctcaaaaaaaaaaaaaaaaaaaaaaaaaaaaaggctggttaaaaaaagcaagcaaaaggaa

SEQ ID NO: 320535 - DNA, 201 bp, Homo sapiens
gccatcaccagcccctgcaccagctgcacaggccttatgctatcgtggtgactagttggtgccttagtgttacccagtttcgtttgggtagactcatactsatcaccttagcagtttagtttatggatgggtttcacagagttacaacccgatttatccacaggtggttttcctactcttaaaaacagcacctgagcaaac

SEQ ID NO: 320536 - DNA, 201 bp, Homo sapiens
aacgctttgggaggtggaggtgggaggatcacgagcccaggagtttgaggccagcctagacaacatggtgagactccatctctatgaaaaaattaaaaatyagctgggtgtggttgcgcgtgcctgtagtcccagctactcaggagactgaggcggaaggaacccttgagcccaggagttcaaggttacagtgagctatga

SEQ ID NO: 320537 - DNA, 201 bp, Homo sapiens
ccacacattttaatccattaaaatgttcactaacagatttttaggccgggcacggtggctcacgcctgtaatcccagcactttgggaggctgaggcaggcrgatcacctgaggtcaggagttcgagaccagcctgaaaccccgtctctactaaaaatacaaaaattagctgggcgtggtggcatacggaggttgaggcagg

SEQ ID NO: 320538 - DNA, 201 bp, Homo sapiens
aaagacattaatgtagctccaaaagtcagaactatacaatacagtaactctcccttttgccctgttttcttcccctacccccttgtaggtaagcagtctcrttcacttctggttcctccttcctgggtttcgtttagcacaaacaggcagacacaagtatgctatcttcccttctttctcacagcaagaagtagtacccta

SEQ ID NO: 320539 - DNA, 201 bp, Homo sapiens
gcagtgagctgtgatcacaccactgcactccagcctggcaacagagtgagactctgtctaaaaaaataataataataaaaaaaataaaagacattaatgtrgctccaaaagtcagaactatacaatacagtaactctcccttttgccctgttttcttcccctacccccttgtaggtaagcagtctcgttcacttctggttc

SEQ ID NO: 320540 - DNA, 201 bp, Homo sapiens
actgaagaacctaagacaataagtacctaaatagttatgttgaaaattctgtgaactctagcctttataactaattactacagaatgtaacacttacggcygggtgtggtggctcacgcctgtaatcctagcactttgggaggccgaggcagttggatcacttggggccaggagttcgagaccagcctggccaacatggtg

SEQ ID NO: 320541 - DNA, 201 bp, Homo sapiens
cctgggaggtcgaggctgcagtgagctgtgatcacaccactgcactccagcctggcaacagagtgagactctgtctaaaaaaataataataataaaaaaaataaaagacattaatgtagctccaaaagtcagaactatacaatacagtaactctcccttttgccctgttttcttcccctacccccttgtaggtaagcagtc

SEQ ID NO: 320542 - DNA, 201 bp, Homo sapiens
aagattcgatccaggttatgaatatttggcaggaataccacaagagcggtgctgtcctcagctcctcataccaggaggcgcgtgctgtcttgtctgtcccrttactggtgatgcatgcctggatcgcttgattaggatactgtcgggccgggcacagtggctcacgcctgtaatcccagcactttggaaggccgaggtggg

SEQ ID NO: 320543 - DNA, 201 bp, Homo sapiens
ttgtttctccttctccttcttccaccatgattctaagtttctgaggcctccccagccattcagaactgtgagtcaattaaacctctttcctataattatarattgcccagtcatgggtaatttctttatagcagtgtgagaatggaccaatacagataattggtaccaaagtagttggcattgatataagatacctgagaa

SEQ ID NO: 320544 - DNA, 201 bp, Homo sapiens
aggctgaggtgggtggatcacctgaggtcaggagttcgagaccagcctggccaacaaggcaaaaccctgtcactactaaaaaaacacaaaaattagccagygtacacctgtaatctcagctactcaggaggcttaggcaggagaatcgcttgaacctgggagagggaggttgcagtgagccaatatcacactactgcactc

SEQ ID NO: 320545 - DNA, 201 bp, Homo sapiens
ggcttccatgtgctgctgagcctgcaaggtgcacagaagacaacaatttgggaacttctgcctagatttcagaggatgtatggaaatgcctcaatgcccargcagaagtctgctgaaggggggagaaccctcatggagaacctctgttaggacagtgcagaaaggaaatgtggggttgcagcccccacacggagtccctgc

SEQ ID NO: 320546 - DNA, 201 bp, Homo sapiens
ctggacctttggtctctaggatctccccggccaggtgaagaaggaactaaaggccaaaggatcccgagccttgagctgctaatgatgtaggggctgggtcrgggaatgtaagtgggtacctatatatcataatttgtaaaatgactttataggcatatacttacatcaggatgtcttacataatatgtatattatataaag

SEQ ID NO: 320547 - DNA, 201 bp, Homo sapiens
ttggtaaacacaatgaacatcactgtttagatactgaagaacctaagacaataagtacctaaatagttatgttgaaaattctgtgaactctagcctttatractaattactacagaatgtaacacttacggccgggtgtggtggctcacgcctgtaatcctagcactttgggaggccgaggcagttggatcacttggggcc

SEQ ID NO: 320548 - DNA, 201 bp, Homo sapiens
tcttgaggcctccctagccgtttggaactgtgagtcagttacacctctttcttttataaattacccagtcttgggtatttctttatagcaatgtgaaaacrtactaatacacctcgtttctaaaaatcagctacgcattgtggcatgttcctgtagtcccagctactcagtaggctgaggtgggaagatagcttgagccca

SEQ ID NO: 320549 - DNA, 201 bp, Homo sapiens
caggagttcgagaccagcctggccaacatggtgaaaccccatctctagtaaaaatacaaaaatacctgggcgtggtggtgtacgcttgtagtcccagctaytcatgaggctgaggtggggggattgcttgaacccaggaggaagagtctgcagtgagccgaggtcatgccactgtactcaagcctgggcaacagagcaaga

SEQ ID NO: 320550 - DNA, 201 bp, Homo sapiens
gtattaattagctgtgtaattttaatccttcaacccagattaggggtctataactgaataactaaaaagttattcagttagaatagttcagttagttattwactaatcatagttatttggtcaagcgcagtgactcacgtctgtaattccagcacttggggaggctgtggcaggaggatttctaataatagtaactattac

SEQ ID NO: 320551 - DNA, 201 bp, Homo sapiens
agacatccatcacagtctaaagaagactggaaatatgttgattgcttagtgttcaatggaaaaacttttttttttttttgtctaggaatgaggggcagtgycacatagtacaaaaagcatttcacttggagccaaaattctttggtttaatttttattgaaaataacatgtatcgtgccatgctctggggtgtgctcagta

SEQ ID NO: 320552 - DNA, 201 bp, Homo sapiens
attgaaatcttttttcctctgaccaatcttagttaaatggaaggaaattgttttaaaactaattttcaggtctggaaagatagatatgaatatggaaatgrctttctttgggggaagggatggactgaagatggtttttattttctccttttttcttatttatgttttctgcaatgacaagtattttgtaataacaaaagg

SEQ ID NO: 320553 - DNA, 201 bp, Homo sapiens
aagataatgcacaggaattcttttataaagatatgcacctcattcttcaaagattagcagctgaacgaacagtgaacatgttaacgtggctggacccttawtaaaaatgaaatgtttcatgctgcccactagggggcatgctggcatcgtcccagcactacctccttttcatgtggtttattcctaaactccacagctctt

SEQ ID NO: 320554 - DNA, 201 bp, Homo sapiens
taaatgggtgattagaagataaagattataattatgggggttttatcatccaatgttacagtttttcaggaatattcttacaagtttcttgacatttttattttatagataccctatattaatcttgtgaagcatttaacatctgcctgtccaaatgtatgtcgtatatcacggtaagtttacagtccatactgcaactac

SEQ ID NO: 320555 - DNA, 201 bp, Homo sapiens
agaaccgcttgaacccgggaggtggaggttgcagtgagccaagatcactccactgcattccagcctgggcaatagagcgagagtctctcaaaaaaaaaaamacaaaccagaattcatgttattatcaaaagatgacttatttatttacatacttactcacttgcaaaatacattttgtactcatgcaaaatacattttgta

SEQ ID NO: 320556 - DNA, 201 bp, Homo sapiens
ctcataccaggaggcgcgtgctgtcttgtctgtcccgttactggtgatgcatgcctggatcgcttgattaggatactgtcgggccgggcacagtggctcaygcctgtaatcccagcactttggaaggccgaggtgggcagattacctgaggtcaagagttcaagaccagcctggccaacatggtaaaaccccatctctact

SEQ ID NO: 320557 - DNA, 201 bp, Homo sapiens
aaaaatctaaagcaaaaaagacgtttggagaccaagtggcagctgggcaactagacaatgctagagagtaaagagaacagaatatggggggtgaggggcaygtgggagaagaggcttagaggaggaaggtaggctttgctgtgatccatttcaggactgttctctccagacttcagatatttctagttccacagaagaagc

SEQ ID NO: 320558 - DNA, 201 bp, Homo sapiens
acctcaggtgacctacccaccttggcctcccaaagtgctgggattacaaaaaaacagtgcaggttttcagatctgtacaatgcagtttgcaatcttgattsacgtatggtcaagtttcaaatgtttcttgagaagaatacatatgacccagtgccaggcaatatgaagaatgcaatatgtatttatgtccagaaagaggtt

SEQ ID NO: 320559 - DNA, 201 bp, Homo sapiens
gacattagaaaggtgagttttttattctgctgtgatgtaatgttttagcttaccaaaacttactaaaattttattttattttttattcttataattattaytattttttgagctggagtctcactctgttgcccaggcttgagtgcagcggtgcaatctaagctcactgcaacccttgcctcccaggttcatgcaattctc

SEQ ID NO: 320560 - DNA, 201 bp, Homo sapiens
aaagttcttactggtttaatgaatatgtaatgctgtgggggaaagaatgaaactcaggccaactactttgactggtgtctggcaaagtcaactttcattgycattttaatatggcgccgggcgcggtggctcacgcctgtaatcccagcactttgggaggccaaggcgggcggatcatgaggtcaggagatcgagaccatc

SEQ ID NO: 320561 - DNA, 201 bp, Homo sapiens
tggagaccttggagactcaattcacgttaagacacctaagtacgagtcctccaggtaaatattacacaaatgggaagcatcttgaatttttaagtatattkcaatacataaatttttatgcatgctttaaacaaacagtattttttttaaatgagagaatctaacaaaaaaagtctgaccagcaccagcatttaaattttc

SEQ ID NO: 320562 - DNA, 201 bp, Homo sapiens
acctgtgccgagctgaggttcattgactcccactgcatccaggggataaactctgacttagtcttggagtggcagatacaagcgacacacacccgtcagcyggaaggctcttgtcctctttgtgaatcagaaccctgtttaggcttctaatcccacatcaaagcccatctcctccatgaaatactcagtttttctagcctg

SEQ ID NO: 320563 - DNA, 201 bp, Homo sapiens
tgggaggctgaggtgggaggatcacctgagccctgggaggtcgaggctgcagtgagctgtgatcacaccactgcactccagcctggcaacagagtgagacyctgtctaaaaaaataataataataaaaaaaataaaagacattaatgtagctccaaaagtcagaactatacaatacagtaactctcccttttgccctgttt

SEQ ID NO: 320564 - DNA, 201 bp, Homo sapiens
agcctcccgagtagctgggattacaggtgcacaccaccacatgccacacctggcctcttttttttttacaatattcatatctatctataggcctcattcaratcttgccagttgtgaactgttataacgaaagggaaaacatatttttctgttccagcatccagtccaggatttcacgttgcattttgctgtcatgactct

SEQ ID NO: 320565 - DNA, 201 bp, Homo sapiens
cactgcaacctccacctcccaggttcaagtgattctcccacctcagcctcccgagtagctgggattacaggtgcacaccaccacatgccacacctggcctyttttttttttacaatattcatatctatctataggcctcattcagatcttgccagttgtgaactgttataacgaaagggaaaacatatttttctgttccag

SEQ ID NO: 320566 - DNA, 201 bp, Homo sapiens
tcctgcctcagcttccctagtagctgggaccacaggtgtgcgccatcacacccagctaatttttgtatttttcatagggatgggggtttgccatgttggcygggctggtctcaaactcctgccctcaagtgatccacccaccttggccctgcaaagtactgggattacaggcatgagccattgcacctggccaatacattg

SEQ ID NO: 320567 - DNA, 201 bp, Homo sapiens
tgtgatgtaatgttttagcttaccaaaacttactaaaattttattttattttttattcttataattattattattttttgagctggagtctcactctgttrcccaggcttgagtgcagcggtgcaatctaagctcactgcaacccttgcctcccaggttcatgcaattctcctgcctcagcctcctgagtagctgagatta

SEQ ID NO: 320568 - DNA, 201 bp, Homo sapiens
tcatgcctgtaatcccagcactttgggaggctgaggtgggtggatcacctgaggtcaggagttcgagaccagcctggccaacaaggcaaaaccctgtcacyactaaaaaaacacaaaaattagccagtgtacacctgtaatctcagctactcaggaggcttaggcaggagaatcgcttgaacctgggagagggaggttgca

SEQ ID NO: 320569 - DNA, 201 bp, Homo sapiens
tgggagaatcacttgaacctgggaggcgaaggttgtgagccaatattgcaccactgcactccagcctgggtgacagagcgagaccctgtctcaaaaacaaraaagacagtattaaaagccttgaacattgagacagttgagtctttaaaatacttttaaaaaatgcttctcacctatcttccctatccaccccaaaattta

SEQ ID NO: 320570 - DNA, 201 bp, Homo sapiens
tgaacccgggaggcagaggttgtagtgagccgagatcacaccattgcactccagcctgggcaataagagtgaaattccatctcaaaaaaaaaaaaaaaaaaggaatgagtagcactgtagacatgatttccaggctgagagcagttgaaagggtctagggtttagttctaaggctgctggtaagaggagccagcgtgacat

SEQ ID NO: 320571 - DNA, 201 bp, Homo sapiens
acaaaaaagtggtcacttatgctagaaaatggtgtcaaaactggctcaatgaatagcaaagatactggatactagaaggcagtggaggaaggtcttccaartgaggatgaaacattttaaacctaggatccattaaatccgaaggcaaaagaaagtcaccacacatcaggactaaaatgttgacttcccataaacactatt

SEQ ID NO: 320572 - DNA, 201 bp, Homo sapiens
ccagctgtctcttccttatctaattctgaatgtcattgccagtgtgccccaaatatggctttcttcattcaactctttttcctgaaaactttcagtagttyccaacctcacgtggttgggcaccgtggctcgtgcctgtaatcccaccaatttaggaggccaaagcaagaggactgcttaagcccaggagtttgaggctgc

SEQ ID NO: 320573 - DNA, 201 bp, Homo sapiens
cgaccaattattgtggcgctaatggcccgagcatgcaatattcatcataacaactcccggtgagctctttttttcattcctttcttgtttttatatttggsaagtctttcttcccggggttacttactgtttcatttcccatttaagaattagcatataccggctgggcatggtggctcatgcctataatcccagcattct

SEQ ID NO: 320574 - DNA, 201 bp, Homo sapiens
cctcggcctcccagagtgctgggattacaggcgtgtgccaccacgcctggccagaaccatgttgttttaaagatgtactttattcctcctgcctctcttaactcagtgttggactaggataaaacatcagaataaacaaggactaatgtcttctcctcccatacaccaccacagtgcctaggcatagacggtggatgtctc

SEQ ID NO: 320575 - DNA, 201 bp, Homo sapiens
aaggcattcagataagagatcacaggtctgcatttgatcctggctgagtgagatgttggggctggtcatttcaccttgctaagactgtttccttatctgtraaattgagaagatcacctttctcccagggtggttgtgaggattagctaagatcctatttgagatctttgtgtcttgtggtgtgccataggcatttgaggt

SEQ ID NO: 320576 - DNA, 201 bp, Homo sapiens
gtggcttgtaaggatgtgatgcaaggtgtgaaccttccccagaaagaagtgcatacgcacagcacagcctggctgcagcatctgcttcaaacaaaacagtyagccgagctccactttctttgacttaatcattcttcatgctccacccatttccggaaagatgtgaggcatccctctgatgctgagcgcaagtctgtgcac

SEQ ID NO: 320577 - DNA, 201 bp, Homo sapiens
gccattgcactccagcctgagtgagagagcaagacattttttctgtctttagaaaaaaattggctgggcacggtggatcacacctataatcctagcacttygagaggacaccacttcctgtttcacagacagtaggggctgtggaggaagaactccttcagctcctgctctgtcgcaattggccagcttgcctgcgccttc

SEQ ID NO: 320578 - DNA, 201 bp, Homo sapiens
ttcccaggggaggctgacgttctgggtggctggaccaggctactttggcagcttgctaaggctatgaatggagatgttggggtactcggtaggaacacccrccctcattattacaaggcttccatcctctcaaactttggaggctgaggtaagaagtgaaaggtatgctgtaaataggtcctctctcccaatgaggcttac

SEQ ID NO: 320579 - DNA, 201 bp, Homo sapiens
gcagacatcctgcaggcacggggtggggcggcaccaaattggagctagcacagaaattcactcagtgatggaagcttacaaagggtccaaagaaatggacytgagtcatgatagagaggtttccttgtggtcactgttttctgtttaagaagccaaagataatgcacaggaattcttttataaagatatgcacctcattct

SEQ ID NO: 320580 - DNA, 201 bp, Homo sapiens
ctctgtcgcaattggccagcttgcctgcgccttctctggcgattgcctgctctcctcccacccgtggaagtcatgtcccttccctctctaggggcagtccyttagccaacctccctagtttcttaggaactcccccagacatggcctctccctctgtctgcaaactttcattggcatggtcttccatatccattgggtgtt

SEQ ID NO: 320581 - DNA, 201 bp, Homo sapiens
tcctctgaagctggttttgcttgggtcactgatagcttccctgtgctaaatccaatggatgtgttaccagcagcaaatttgtacaggtctgcagcaacctyaattcttgcctcctcagaagaaagaattcgactgaggggcctaaggcagaaggagagacggaggcaagttttagagcaggagagaaagtttattattaag

SEQ ID NO: 320582 - DNA, 201 bp, Homo sapiens
gttgttttaaagatgtactttattcctcctgcctctcttaactcagtgttggactaggataaaacatcagaataaacaaggactaatgtcttctcctcccrtacaccaccacagtgcctaggcatagacggtggatgtctcttagctcagcttttgttgccacagtttactgctcccccacatcatctagacacttagttt

SEQ ID NO: 320583 - DNA, 201 bp, Homo sapiens
agagcacacctggatggggctggaatgacactggaaggagaaaggcccgaggccgtcaggaggagagaaaccctggagtcatctaaagtcagaatctcagygatagcccattctttcagggtctcctctgctgcctttgggttccgatctcctttttctccctttctggtcagtttagcccctgtaaatggacactgtgag

SEQ ID NO: 320584 - DNA, 201 bp, Homo sapiens
gttttagagcaggagagaaagtttattattaagtgtagagtaggaagggaaggaagtaaagtacacttgtaagagggccaagctggtgacctgagagaaaktgtggtttgaccttggaatttgggttttagatgttggcatacttccagggacttgcatcccgatctccccggtttcttcccttggggtgggctgcccgca

SEQ ID NO: 320585 - DNA, 201 bp, Homo sapiens
aggaaatagaattatagtatatgacttgattctgcaataaatatttttacatcatagaaatgatactttattagtatttggcttttagaaagaaccaataytttaaaacatggttatagaataggatgtaaatatctatagtctaacaaacagtatagttaaaggaaaggacaagagctcatagaagataaaatctgaagt

SEQ ID NO: 320586 - DNA, 201 bp, Homo sapiens
gcacaccctagagggtgtttcaggctgttgattccagctcagcttctcctgctacccagtcctgtatcctctccccctccctcaggtgtcagtaatcccargggataatcccgaataaacatcctgtcctttaaacttcatctcagagtctgcctcctgcagaacctaacttgcaacagagctcagcaaaacccaagctca

SEQ ID NO: 320587 - DNA, 201 bp, Homo sapiens; identical to SEQ ID NO: 67225

SEQ ID NO: 320588 - DNA, 201 bp, Homo sapiens
atgtatattatataaagtggtgattaattggtaaacacaatgaacatcactgtttagatactgaagaacctaagacaataagtacctaaatagttatgttraaaattctgtgaactctagcctttataactaattactacagaatgtaacacttacggccgggtgtggtggctcacgcctgtaatcctagcactttgggag

SEQ ID NO: 320589 - DNA, 201 bp, Homo sapiens
ggaaaaaatgtaggaatagcttttcaggttagtatgctttttatttgtaagaatggtggcgtagtgatacagtcagcattctcccctagtgtgtaatcgtmaaaatagtaagaacgatggcagcagtgttggcatggcggtgctccttacatcccatttttccttttgccagctaatagatgatgtattggacttcacctc

SEQ ID NO: 320590 - DNA, 201 bp, Homo sapiens
ctgaagtaggggcgccctacacggggttgcagaaagcggtgtcctggggaccccgggagcgttttggggggtggagaaagcggtgggatccgtgtcctggsggaagcgcaggagcgatcagattgaccgctgctatatggacaaggttaattaagcctggagagcgactgcagctatttactttggagttagaggaagaca

SEQ ID NO: 320591 - DNA, 201 bp, Homo sapiens
ataattgttaggccacttggtggtaaaaagcgtcccctgtattaattagctgtgtaattttaatccttcaacccagattaggggtctataactgaataacyaaaaagttattcagttagaatagttcagttagttattaactaatcatagttatttggtcaagcgcagtgactcacgtctgtaattccagcacttggggag

SEQ ID NO: 320592 - DNA, 201 bp, Homo sapiens
atttaacatctgcctgtccaaatgtatgtcgtatatcacggtaagtttacagtccatactgcaactactaaaattatccatttttaaatttattattgttwaaaaatttttttttgtagcgatggggagctcactgtgttgcccaggctggtcttgaactgctggcctcaagctatcctcccaccctcaggttcccaaagt

SEQ ID NO: 320593 - DNA, 201 bp, Homo sapiens
gaataaaacaaaacacccccacaatccgattcattccagaataactacttttaacaccctggtttgtgtgctttcaaactctgttctcccatttccaaagkatgttgaggaacacgaacttaaaatagacagtgtttgtataaatataaattccttccttgctattgaaatcttttttcctctgaccaatcttagttaaat

SEQ ID NO: 320594 - DNA, 201 bp, Homo sapiens
agcatttaacatctgcctgtccaaatgtatgtcgtatatcacggtaagtttacagtccatactgcaactactaaaattatccatttttaaatttattattrtttaaaaatttttttttgtagcgatggggagctcactgtgttgcccaggctggtcttgaactgctggcctcaagctatcctcccaccctcaggttcccaa

SEQ ID NO: 320595 - DNA, 201 bp, Homo sapiens
tgtggaatacactgtaaaacaagagattcttagcaagaaatgtgtcaaaagatatatgggactaagattaattcaggtaaaaacaagttccaaaaataacrtaagaatatgcaatatctccacttaatgaaaatgtgtttttagtttacaaaggattctttcatacattatctctaatctcacaactcctctttgtggtag

SEQ ID NO: 320596 - DNA, 201 bp, Homo sapiens
gcgccatcacacctgggtaatttttgtatttttagtgaagacggggttttgctatgttggccaggctggtcttgaactcctgacctcaggtgacctacccrccttggcctcccaaagtgctgggattacaaaaaaacagtgcaggttttcagatctgtacaatgcagtttgcaatcttgattcacgtatggtcaagtttca

SEQ ID NO: 320597 - DNA, 201 bp, Homo sapiens
tcatgcgacggttcagtttgcctggagatgtagacagagctcgacagtatgtactacaggtaagactgtttttttaaaaaaaaggcagcagcaggaacaaygtggcaaaatcctttaatccaaaaatgtaacattaactaaacattaaattatagatacaagactgtttggtcaactcttgatgtgacaaaaactgagaag

SEQ ID NO: 320598 - DNA, 201 bp, Homo sapiens
caccctacccatcacaccccacccgcctgacctgcttcacaggctcccgacggccactggcttccaccttccccatctttctcttcccgcctccatctttyaagctgcgaaccagcccctgttcctttcactgtccagctgtcaatgagcccagagtcccttagccacctagtgctttcttccccctcctgctgtctcttg

SEQ ID NO: 320599 - DNA, 201 bp, Homo sapiens
acctgcttcacaggctcccgacggccactggcttccaccttccccatctttctcttcccgcctccatcttttaagctgcgaaccagcccctgttcctttcrctgtccagctgtcaatgagcccagagtcccttagccacctagtgctttcttccccctcctgctgtctcttggggtcttctggtgtctgattctgtcagcg

SEQ ID NO: 320600 - DNA, 201 bp, Homo sapiens
tcacaggctcccgacggccactggcttccaccttccccatctttctcttcccgcctccatcttttaagctgcgaaccagcccctgttcctttcactgtccrgctgtcaatgagcccagagtcccttagccacctagtgctttcttccccctcctgctgtctcttggggtcttctggtgtctgattctgtcagcggggcagg

SEQ ID NO: 320601 - DNA, 201 bp, Homo sapiens
ttcccgcctccatcttttaagctgcgaaccagcccctgttcctttcactgtccagctgtcaatgagcccagagtcccttagccacctagtgctttcttccmcctcctgctgtctcttggggtcttctggtgtctgattctgtcagcggggcaggtggcagtacctgttctagcattcaggccacttggggctgatccacgc

SEQ ID NO: 320602 - DNA, 201 bp, Homo sapiens
cttggggctgatccacgcattgtttatgttctagcctgcaggacagccaggtggatggccctgcagcgtgggagccttgcccacggagtgttgaatttctyaattgaaatgaatacacttaaattaaaccaaagttttgtagaagaaatcctggccaggcacggtggctcacgcctgtaatcccaacactttgggaggccg

SEQ ID NO: 320603 - DNA, 201 bp, Homo sapiens
gcgggtggatcacctgatgtcaggagtttaagaccagcctggccaacgtggtgaaatcccgtctctactaaaaatacaaaaaattagccaggcattgtggygggtgcttgtaatcccagctgcttgcggggctgaggcaggagaatcgcatgaacccgggaggcggaggttacaatgagctgagatcgttccattgcactc

SEQ ID NO: 320604 - DNA, 201 bp, Homo sapiens
ctggccaacatggtaaaaccccatctctactaaaattataaaaaattagctgggcatggtggcgggcacctgtaatctcagcactttgggaggccgaggcrggtagatcacctgaggtcaagagtttgacaagcgtggccaacatagtgaaaccatgtctctactaaaaatacaaaaattagccgggcgtagtggcaggcg

SEQ ID NO: 320605 - DNA, 201 bp, Homo sapiens
gggtgaatttaggggtaattgcacatgtggttttgttaggcaccaccagatttccctctgttgggtctgtaccagtatgtgtttccaccagcagcttttcrgaacctcttttcccacagccttactaactaaatgtgccattacacgcttgagtttttgccagtccagtagaggagaatgtattgcagtggagttttaatt

SEQ ID NO: 320606 - DNA, 201 bp, Homo sapiens
aatcctgtacagactccaatatctcccgggctgggtacacgcaggttcacacccaggtgtgagcaagattgccaaactatacctataaggcgtttggaggrgagagtccaaaagtcacgagacccggctaatttagctactatttcacaacaaccctgatcgtggtcggacttgtttctaggaagatgcgatgggctggaa

SEQ ID NO: 320607 - DNA, 201 bp, Homo sapiens
gtccccacagggacatttttgctatgactgcaggcgtggccagtctccctgcacagcttccgggaagaggtggggataggaggctcgccccggggaaggtyacgctcggggtccccagaccaggtctccgcacgcccctgccccgtcgcctcccgggagcggctgcagtccccgttggctgcagacgggcagacacccgaa

SEQ ID NO: 320608 - DNA, 201 bp, Homo sapiens
cactgttacttaagtttatttgaatttagtactcttttaattcagatttggtatactttatgtgtccgtgttctcatcaaacatcatttcccagtatgaartatataacacttataaatatctactttgtaccaaagtagatgcgtatcacaaattatccaaaacaaggcttgggccaggcacagtggctcacacctgtaa

SEQ ID NO: 320609 - DNA, 201 bp, Homo sapiens
ttctgccatgaaaattctgtcttttgaaatagaagttctgtaattgggtttggttcatatatgtatatattaaagcatatttctatattattagcattggkaatatgggaaacagggacttggtttgaggatgcatagatcctgggttgaaggatgagaataaagttgaacagatgagaatgaaaatgcacaggcatccat

SEQ ID NO: 320610 - DNA, 201 bp, Homo sapiens
caacagtttgggaggccgaggcaggagaatccctttagctcaggagttcgagaccagcctgggccacttagtgagacctcctgatacggtttggctctgtrtgcccacccacatctatctcgaattgtaatccccaattacatttggggaccagggagggtcaagggagggaccaggtggaggtaattggatcatgggggt

SEQ ID NO: 320611 - DNA, 201 bp, Homo sapiens
ggaccagggagggtcaagggagggaccaggtggaggtaattggatcatgggggtggattcccccatgctgttctcatgatagggagttctcacaagatctsctggttttataagtgtttggtagttcctcctgtgttcattctgtctcctgccgccttgtgaagaaggtgcttgtttctccttctccttcttccaccatga

SEQ ID NO: 320612 - DNA, 201 bp, Homo sapiens
gtatttggcttttagaaagaaccaatattttaaaacatggttatagaataggatgtaaatatctatagtctaacaaacagtatagttaaaggaaaggacargagctcatagaagataaaatctgaagttgatgctacctaacagaagtaatcaacaaaacaactaaagacagcagtgtgatgatgaggcggcacattgtgg

SEQ ID NO: 320613 - DNA, 201 bp, Homo sapiens
caaagtagttggcattgatataagatacctgagaatgtggaaattactttggaactgggtaacaagcagaggttggaatagtttggagggctcagaagaasaaaggaagatgtaggaaagtttggaaattcctagagtcttgttgaatggctttgaccaaaatgctgaaagtgatatggatgatgaagtccaggctgaggt

SEQ ID NO: 320614 - DNA, 201 bp, Homo sapiens
tgcaagttctcgaagaggaaaacacacagttaataagatctggggtgaaaagaaggtatggttttttggtttttttaaaatctctcttactgaatcacacrcttttcggaccgcatttgtttctcagatttgtctcattaaaaatatgcttgctcaaatgtaatgtggtcttctgaatttcaaaaaagtattcatgtcttg

SEQ ID NO: 320615 - DNA, 201 bp, Homo sapiens
gtttggagggctcagaagaacaaaggaagatgtaggaaagtttggaaattcctagagtcttgttgaatggctttgaccaaaatgctgaaagtgatatggaygatgaagtccaggctgaggtggtctcagatggagatgaggagcttcctgggaactgggcaaaggtcactcttgctatgctttagcaaagagactggtggc

SEQ ID NO: 320616 - DNA, 201 bp, Homo sapiens
tcctagtctgagctcccactccactccaccctccccactgccctgggagcatagagactagagcatcactgactggtacgcaaggtgtgatggtcgcagcrtgcatgggtgttgtacacgcacaaaagggaggcatctgaccagactgagggatcggggggaacttcttagaggtggcatctgaaccaattatgcaaataa

SEQ ID NO: 320617 - DNA, 201 bp, Homo sapiens
agggccaagctggtgacctgagagaaagtgtggtttgaccttggaatttgggttttagatgttggcatacttccagggacttgcatcccgatctccccggwttcttcccttggggtgggctgcccgcatgcgcagtggcccgccagtgttggggaggggagcatgctcagtgtgtttaccggagttttgcgcatgctcacg

SEQ ID NO: 320618 - DNA, 201 bp, Homo sapiens
gagtcttgttgaatggctttgaccaaaatgctgaaagtgatatggatgatgaagtccaggctgaggtggtctcagatggagatgaggagcttcctgggaaytgggcaaaggtcactcttgctatgctttagcaaagagactggtggcattttgccccaccctagagatctgtggaactttgagcctgagagagatgatctg

SEQ ID NO: 320619 - DNA, 201 bp, Homo sapiens
atgcctgtacccccattgtatcttggatgtaactaacttgtttttgattttacaggttcataggcggaagggacttgacttgtctcaggtaagactttggrcttggacttttgagttaatgctagaatgagttaagacttttgaggactgttcggaaggaatgattggttttgaaaaatgaggatatgagatttgggagga

SEQ ID NO: 320620 - DNA, 201 bp, Homo sapiens
gatactgaagaacctaagacaataagtacctaaatagttatgttgaaaattctgtgaactctagcctttataactaattactacagaatgtaacacttacrgccgggtgtggtggctcacgcctgtaatcctagcactttgggaggccgaggcagttggatcacttggggccaggagttcgagaccagcctggccaacatg

SEQ ID NO: 320621 - DNA, 201 bp, Homo sapiens
caggagttcgagaccagcctgggccacttagtgagacctcctgatacggtttggctctgtatgcccacccacatctatctcgaattgtaatccccaattayatttggggaccagggagggtcaagggagggaccaggtggaggtaattggatcatgggggtggattcccccatgctgttctcatgatagggagttctcaca

SEQ ID NO: 320622 - DNA, 201 bp, Homo sapiens
gagctcactgtgttgcccaggctggtcttgaactgctggcctcaagctatcctcccaccctcaggttcccaaagtgctgggattgcagacataagcacccsgcctaaaattattaattatattgcctgtaaatttctattctaaattgtagatctctgcctattcaaaaaacaggaatataataaagtttgagctcaaccc

SEQ ID NO: 320623 - DNA, 201 bp, Homo sapiens
gagaatccctttagctcaggagttcgagaccagcctgggccacttagtgagacctcctgatacggtttggctctgtatgcccacccacatctatctcgaaytgtaatccccaattacatttggggaccagggagggtcaagggagggaccaggtggaggtaattggatcatgggggtggattcccccatgctgttctcatg

SEQ ID NO: 320624 - DNA, 201 bp, Homo sapiens
tcatctagacacttagtttcatttttgttgtttcttgttatttcctattgttacaaactagtgttagaacacttgtttctcccaagagaaataaatagattttctcagattttctctctttttttgttagttcccagaaatgaatgctatgatcatgcgacggttcagtttgcctggagatgtagacagagctcgacagta

SEQ ID NO: 320625 - DNA, 201 bp, Homo sapiens
atcatctagacacttagtttcatttttgttgtttcttgttatttcctattgttacaaactagtgttagaacacttgtttctcccaagagaaataaatagattttctcagattttctctctttttttgttagttcccagaaatgaatgctatgatcatgcgacggttcagtttgcctggagatgtagacagagctcgacagt

SEQ ID NO: 320626 - DNA, 201 bp, Homo sapiens
tttttttgtagcgatggggagctcactgtgttgcccaggctggtcttgaactgctggcctcaagctatcctcccaccctcaggttcccaaagtgctgggaytgcagacataagcacccggcctaaaattattaattatattgcctgtaaatttctattctaaattgtagatctctgcctattcaaaaaacaggaatataat

SEQ ID NO: 320627 - DNA, 201 bp, Homo sapiens
gcttgtccaatgagttatcccacctttcctcttaaaacccaccacctcccagtgactccagctgtctcttccttatctaattctgaatgtcattgccagtstgccccaaatatggctttcttcattcaactctttttcctgaaaactttcagtagttcccaacctcacgtggttgggcaccgtggctcgtgcctgtaatcc

SEQ ID NO: 320628 - DNA, 201 bp, Homo sapiens
gcggaatgaatgggagcggggagcacgtgcgtcgcgacgcgggggcgcgcggggtagctccggggtagctccggggtgggactccggagctgaggggtgcycgcggtgggacggagccgcgcgttggactgaagtaggggcgccctacacggggttgcagaaagcggtgtcctggggaccccgggagcgttttggggggtg

SEQ ID NO: 320629 - DNA, 201 bp, Homo sapiens
agaaatgaatgctatgatcatgcgacggttcagtttgcctggagatgtagacagagctcgacagtatgtactacaggtaagactgtttttttaaaaaaaasgcagcagcaggaacaacgtggcaaaatcctttaatccaaaaatgtaacattaactaaacattaaattatagatacaagactgtttggtcaactcttgatg

SEQ ID NO: 320630 - DNA, 201 bp, Homo sapiens
attattttaatactcaattatccaacgtatggccagtaggggaggccctttaacctggctctgtgtcctccatcattttttcagcaccccatttctggcakgagatattcagccctgttattcactgttctccaaggagcccacattccttttggtggaaaatggtgttaagaaaccagaatttgagtactgggtgtcatc

SEQ ID NO: 320631 - DNA, 201 bp, Homo sapiens
gggaccccgggagcgttttggggggtggagaaagcggtgggatccgtgtcctgggggaagcgcaggagcgatcagattgaccgctgctatatggacaaggttaattaagcctggagagcgactgcagctatttactttggagttagaggaagacagatcttgcctgaaattttagagccaaagtgctcagagctctctccg

SEQ ID NO: 320632 - DNA, 201 bp, Homo sapiens
ggaccccgggagcgttttggggggtggagaaagcggtgggatccgtgtcctgggggaagcgcaggagcgatcagattgaccgctgctatatggacaaggttaattaagcctggagagcgactgcagctatttactttggagttagaggaagacagatcttgcctgaaattttagagccaaagtgctcagagctctctccga

SEQ ID NO: 320633 - DNA, 201 bp, Homo sapiens
catcatttcccagtatgaagtatataacacttataaatatctactttgtaccaaagtagatgcgtatcacaaattatccaaaacaaggcttgggccaggcrcagtggctcacacctgtaatcccagcactttgggaggctgaggtgggagaatcggttgaggccaggagtttgggaccagcctaggcaacatagcaagact

SEQ ID NO: 320634 - DNA, 201 bp, Homo sapiens
gaccccgggagcgttttggggggtggagaaagcggtgggatccgtgtcctgggggaagcgcaggagcgatcagattgaccgctgctatatggacaaggttaattaagcctggagagcgactgcagctatttactttggagttagaggaagacagatcttgcctgaaattttagagccaaagtgctcagagctctctccgag

SEQ ID NO: 320635 - DNA, 201 bp, Homo sapiens
cagatcccccgtcagtgcacgactctgccccagctgctgtaccaggtatggttggtacctgttggccttcatttcttagcctcttcaaggattgccttggytacaaagagtcctctcaccttaggctgtgccccttcgggaggcagcccacatccagggactgatagatgaagggccattctacctgcacaccctagaggg

SEQ ID NO: 320636 - DNA, 201 bp, Homo sapiens
accccgggagcgttttggggggtggagaaagcggtgggatccgtgtcctgggggaagcgcaggagcgatcagattgaccgctgctatatggacaaggttaattaagcctggagagcgactgcagctatttactttggagttagaggaagacagatcttgcctgaaattttagagccaaagtgctcagagctctctccgaga

SEQ ID NO: 320637 - DNA, 201 bp, Homo sapiens
aacggaggatcgaatcggcctcggaatagtccgaaaaggtcttgtggagaatgcagggctggtgctagggtggaccggaccttagttgtccagcagtggcytcgggaggagagcacacctggatggggctggaatgacactggaaggagaaaggcccgaggccgtcaggaggagagaaaccctggagtcatctaaagtcag

SEQ ID NO: 320638 - DNA, 201 bp, Homo sapiens
ttctttcagggtctcctctgctgcctttgggttccgatctcctttttctccctttctggtcagtttagcccctgtaaatggacactgtgagcccttctgcrctttgtaatgattctcagtgtgccatggggtaggcccatgctattagcataaccgtgcaaaatctatggactcactgttacttaagtttatttgaattta

SEQ ID NO: 320639 - DNA, 201 bp, Homo sapiens
tggcctccccgtctgcatgacgacaaggaggaattctgtggactcatgatgccaagatcatgtatttctgatgtgtgtgtcagtgatgcctttcactataygttaatatgttagcattctggtgtctgcctcaggcatgtgtattttggttacttcaagtctcttagggcctgatagtccttggggacacagaactacaat

SEQ ID NO: 320640 - DNA, 201 bp, Homo sapiens
agctactcatggaggctgaagtgggagaatcacttgaacctgggaggcgaaggttgtgagccaatattgcaccactgcactccagcctgggtgacagagcragaccctgtctcaaaaacaagaaagacagtattaaaagccttgaacattgagacagttgagtctttaaaatacttttaaaaaatgcttctcacctatctt

SEQ ID NO: 320641 - DNA, 201 bp, Homo sapiens
acattcttctgacttcactagtagtgtgaacaaatattgtaatacaataaaaaccagtgtgcatgtgatcgtgccaaatcacttctcaatatatctttgattttttttttttaatttatttttttagagacggggactttttgtgttggccaggttggtcttgaactcttggactcaagccattcccccctcccccccacc

SEQ ID NO: 320642 - DNA, 201 bp, Homo sapiens
cacgcctgtaatcccaacagtttgggaggccgaggcaggagaatccctttagctcaggagttcgagaccagcctgggccacttagtgagacctcctgatayggtttggctctgtatgcccacccacatctatctcgaattgtaatccccaattacatttggggaccagggagggtcaagggagggaccaggtggaggtaat

SEQ ID NO: 320643 - DNA, 201 bp, Homo sapiens
aaactcatttttctgattttttattttcatttctcttctagactacttacgaaatgttttgttttaactggtcttaggtaaggcacagacattaatatctkttaaaaggtacctaagtgattgtggtgaactgttagtgttgaaacccagtggtgtggaaccagccttccctgtgtccatcaacagaatcactgggccccc

SEQ ID NO: 320644 - DNA, 201 bp, Homo sapiens
atggaaggaaattgttttaaaactaattttcaggtctggaaagatagatatgaatatggaaatggctttctttgggggaagggatggactgaagatggttwttattttctccttttttcttatttatgttttctgcaatgacaagtattttgtaataacaaaaggaaactttaaaattattcttcctctaaagtttgcaat

SEQ ID NO: 320645 - DNA, 201 bp, Homo sapiens
tgaagcatttaacatctgcctgtccaaatgtatgtcgtatatcacggtaagtttacagtccatactgcaactactaaaattatccatttttaaatttattrttgtttaaaaatttttttttgtagcgatggggagctcactgtgttgcccaggctggtcttgaactgctggcctcaagctatcctcccaccctcaggttcc

SEQ ID NO: 320646 - DNA, 201 bp, Homo sapiens
catctgcctgtccaaatgtatgtcgtatatcacggtaagtttacagtccatactgcaactactaaaattatccatttttaaatttattattgtttaaaaawttttttttgtagcgatggggagctcactgtgttgcccaggctggtcttgaactgctggcctcaagctatcctcccaccctcaggttcccaaagtgctggg

SEQ ID NO: 320647 - DNA, 201 bp, Homo sapiens
ccggcctaaaattattaattatattgcctgtaaatttctattctaaattgtagatctctgcctattcaaaaaacaggaatataataaagtttgagctcaamccagagcacaatgaacatagtttagtttttctttgattttgtgggttctcaaggccctatttataaaagtgatctattgatctgtcatttagcaagaata

SEQ ID NO: 320648 - DNA, 201 bp, Homo sapiens
taaaattattaattatattgcctgtaaatttctattctaaattgtagatctctgcctattcaaaaaacaggaatataataaagtttgagctcaacccagarcacaatgaacatagtttagtttttctttgattttgtgggttctcaaggccctatttataaaagtgatctattgatctgtcatttagcaagaatagaattc

SEQ ID NO: 320649 - DNA, 201 bp, Homo sapiens
ttaaaaaaagcaagcaaaaggaaaaaaaaagattactgtacccgaagccatggttttatgtgtgctttgctgggaaatcccagtcatgaggcacctactcrtgctcaccagacagcagtgttctcatctgcccataaggcagtgagttgaaaaggcacattgcagcctcagaaaagggaacacagaatggagtccaagcag

SEQ ID NO: 320650 - DNA, 201 bp, Homo sapiens
gaaagaacaccctcacggcacggcgttttccttaacggtcaggcgttttcccgggcagcttacctgctcggcctgggtctttctggacagcaggcgctggrggtgcgcgtcactgtccgccgccgtgtccgcggctgcgccagacagtgtagaacctgcggcctcgatgtccttctcccgtgccctattgtgggctcggct

SEQ ID NO: 320651 - DNA, 201 bp, Homo sapiens
ggacagcaggcgctggaggtgcgcgtcactgtccgccgccgtgtccgcggctgcgccagacagtgtagaacctgcggcctcgatgtccttctcccgtgccytattgtgggctcggctcccggcggggcgccaggctggccaccgggcagccatctgctctgcccttcgtccccactttgggccctttcccggggttctggg

SEQ ID NO: 320652 - DNA, 201 bp, Homo sapiens
agatgcaattggcatgggacttaatttgtaagtaatttgtttttaataagatgaatatttggtgagttaaatggtggtttttttgtttttcagttttctamttggcattaatgaccaaacgctatgatttgggagaataaatattataggctagatttgaggtttgtcttgcctacacctattgagggaaataaaaagaaa

SEQ ID NO: 320653 - DNA, 201 bp, Homo sapiens; identical to SEQ ID NO: 67232

SEQ ID NO: 320654 - DNA, 201 bp, Homo sapiens
taatgctgtagtattttaacatatacaaccataatacaatctcagcttgattagtttaaaatacttttacctctaagattattgattcatagtggcatgtyatctcccaatagcatagacatttctctgccgtcacccttgacagtcatctaacccttgcttgagtaattccattggcaaggagctctcacttttcactgt

SEQ ID NO: 320655 - DNA, 201 bp, Homo sapiens
aaatgcaccaatcagctctctgtggctagctagagatttgtaaaatggaccaatcagtgctctgtaaaatggaccaatcagcactctgtaaaatgggccamtcagcaggacatgggtgggggacaaataagggaataacagctggctgccaccccccaaccccagcccccagccagcagcagcaacccgcttgggtcccct

SEQ ID NO: 320656 - DNA, 201 bp, Homo sapiens
gtgcagtgggcccatctcggctcactgcaagctccgcctcccgggttcatgccattctcctgcctcagcctcctgggtagctgggactacaggcgcccaayaacaggcccagctaatttttgtatttttagtagagacggggtttcaccatgttagccaggatggtctctatctcctgacctcgtgatccgcccacctcag

SEQ ID NO: 320657 - DNA, 201 bp, Homo sapiens
aagacattcaaaccatagcagagaatgtgttattttaataatgtaattatactattatttatttttaaattataaaaatacataaaatttactcttttaarcttttttttagtttttttttctttacttttttttttttagagacagggtcttgctctgttacccaagctggagtatagtggtatgatcatagctcactgt

SEQ ID NO: 320658 - DNA, 201 bp, Homo sapiens
gcctggtgaaggcttgaggctgcctctcatcccagagtgcattgctcattcctctatggtataacagggtgctgcattatttgactcgatcatttttctctttttttttttttttgagacggagactcgctctgtctcctaggctggagtgcagtgggcccatctcggctcactgcaagctccgcctcccgggttcatgcc

SEQ ID NO: 320659 - DNA, 201 bp, Homo sapiens
actcttttaggcaattcactggtatcttaccttgatccggattgagtgtggttttaggttttattagggcagatctagaatagccctgacttaaggatgtygtccttaagtgtaagctatggccttcctggtgttttagctgagcgcctgggtgttaatgagttctttccaccatggctggaactgcaacatcacctagca

SEQ ID NO: 320660 - DNA, 201 bp, Homo sapiens
agccatactgcacggcagaggagctgcagctgcggccttccttcatgctgtgctaggacttcagttttagcccagatcataataaaccagctgtactgccaaaaaaaaaaaaaaaaaaagaaaaaaaaagactctttgatgagtttggtgtggtgtgtctgtgtgctttttaaaatgagaactacaccttacatcttttca

SEQ ID NO: 320661 - DNA, 201 bp, Homo sapiens
tccactgaaacccttggtaggctgctcattcctagaccctgccgattcttaccttgtacatggttagcccagcccttggccaggaattcgcagggaacccycacacagacttctgggctctccttctatgcacccttctcttccacagtctattcttcacattttagctgctgaagcagctctgaacttaatctctgctgc

SEQ ID NO: 320662 - DNA, 201 bp, Homo sapiens
cggggtttcaccatgttgggcaggatggtctcaatctcctgacctcgtgatccgcccaccttggcctcccaaagtgctgggattacaggcatgagccaccrcacccagcccataaaatcattttttgtacactgccagatcatcataggttttagaaatataactaaaatgtaagcaaaagactaatttctcagtggccat

SEQ ID NO: 320663 - DNA, 201 bp, Homo sapiens
gacaaaacaggatcccagaaaaggataaggcctgtaacctcaggacttttctacttttttttttcttttcttcctttttttttttttttttttttttttgkgacacggtctcactctgtcacccaggctctggagtgcagtggctcagtctcagctcagtgtgtagcctcaacctcctgggctcaagccatccttccaggt

SEQ ID NO: 320664 - DNA, 201 bp, Homo sapiens
cctgagtagctgggattacaggcgtgtgctaccacacctggttaatttttgtatttttaatagatacgggggctcaccatgttggccaggctggtctcgarctcctgacctcaagtgatcctcctgccttgacctcccaaagtgctgggattacaggcgtgagccaccatgcctcgcctgtacttgtttttagtgggaggg

SEQ ID NO: 320665 - DNA, 201 bp, Homo sapiens
ttttatatacagttaagaaagaaaaagatgctaccaactgactctgacatgctatcaattcttttttttttttttttttgagatggagtctcgctttgtcrcccaggctggagtgcagtggtgcgatcttggctcactgcaagctccgcctctcgggttcatgccattctcttgcctcagcctccccagtagctgggacta

SEQ ID NO: 320666 - DNA, 201 bp, Homo sapiens
caaaactgaaaggactgaagccctgtagtctgaggcatcattttcactaaatgggctacattttggttcattgttttattatgactttataatgtgagttyaaccagttttggtaggtaatttgcattctctttttttttttctgaacagtttgagcaatttacatacataatacctctttatctgtaaatacttgagaat

SEQ ID NO: 320667 - DNA, 201 bp, Homo sapiens
ttaaaatctagaaaaagaagagaataagtatgacaaacgtgcgatcctgccaccactgacaaatgcctgcacctgaagttctttccctttttctcttaaargagctgaaatgttaataagcataattgaaatttcctttgtaccactctccagtttaattcctctctcctcttttgttctaactggtaacagatatttggt

SEQ ID NO: 320668 - DNA, 201 bp, Homo sapiens
gggttcttgctgtgttgcccggactggtctctaattcctggccttgtgtggtcctcccacctaggtctcccaaagcagtgggattacaggtataacccacygcacctggccttaacatttaagtgaaaattaactttttccttattatgtaagcaatcatatcttcattattgaaaatataaaaatgtaagcaagcaaaca

SEQ ID NO: 320669 - DNA, 201 bp, Homo sapiens
gctgagcagattgaaatgtttgcctaccatctccctgatgcaacactgtccaatctcattgtaagtggaaactccctttcacatctcccctaaaaatgttratatgtcaggtgattactggttaacctcatgagcatgaatggatagtctgcctttgagaagttgctatttataaaatttattttacaagtgaaaattttt

SEQ ID NO: 320670 - DNA, 201 bp, Homo sapiens
gtaagcctttatctttaagctattttgagttccttctggttgatgcaggttccccaaacagtactttgttattcaaaataaaataattacaagagtattcwgtaatatgagagactttgtaaaaacttaaataggggttaatagtagcaacagtgttcagttttcttaagtgtaaagcactgagccaggggttactgtctt

SEQ ID NO: 320671 - DNA, 201 bp, Homo sapiens
gacctctgcctccccagttcaagcgattctcctgcctcagcctcccaagtagccgggattacaggtgcccgccaccacacccggctaatttttgtattttyactagagacggggtttctccatgttggtcaggctggtctcaaactcccgacctcaggtgatctgcccacctcggcctcccaaagtactgggattacaggc

SEQ ID NO: 320672 - DNA, 201 bp, Homo sapiens
atcagagtctattgaggtatagtgctgacccaccctcaggatgacatattcctccgatatttgggggcagaaatcaaggttgagcaaaggcactgaagagrgtttgcaaaaagaacatttagaatttatcaatgtcatgatgtaggtgtgccattgagagttgtccagtgactgcgataagagctgttgctataatgctaa

SEQ ID NO: 320673 - DNA, 201 bp, Homo sapiens
gaggcatcattttcactaaatgggctacattttggttcattgttttattatgactttataatgtgagtttaaccagttttggtaggtaatttgcattctctttttttttttctgaacagtttgagcaatttacatacataatacctctttatctgtaaatacttgagaatatgtttcctcagaacagacttttacgtaacc

SEQ ID NO: 320674 - DNA, 201 bp, Homo sapiens
agtaatatattgtacagttgcacagaagtttataaatcagaatttcttctctatgtcttctcttctagtcttgtttgtacatatccagatcacgaagtagtttttttttttttttttttgagacagggtctcactcctgtcgttcaggtgggagtgcagtggcacgatgacagcttattgcagtcgtgacctcctgggctc

SEQ ID NO: 320675 - DNA, 201 bp, Homo sapiens
ctgcctcagcctccagagtagctgggactacaggcgcacgccaccatgcccggctaatttttgtatctttagtggagacggggtttcaccatattggccargatggtctcgatctcctgacattgtgatccacccgcctcgacctcccaagaaaatgtttttaaaattagctggtcatggtgctgcgtgcctgtagtccca

SEQ ID NO: 320676 - DNA, 201 bp, Homo sapiens
atagtttttaaaaaatcaatacattataaagtaatatattgtacagttgcacagaagtttataaatcagaatttcttctctatgtcttctcttctagtctygtttgtacatatccagatcacgaagtagtttttttttttttttttttgagacagggtctcactcctgtcgttcaggtgggagtgcagtggcacgatgaca

SEQ ID NO: 320677 - DNA, 201 bp, Homo sapiens
caggtgtccgagtgcctattatgcacatggggctagttattatctctaaatgataacaatgttaagcctaaatattatttatttatgtatttatttatttytgagacagagtctcactctgtgccccacgccggagtacagtggtgtgatcatggctcaccgcagcttcaaactcctgggctcaagcggtcttcgtgcctc

SEQ ID NO: 320678 - DNA, 201 bp, Homo sapiens
caggctgatcttgaactactgtcctcaagtaatcctcccaccttggcctcccaaagtgttgggattacaggcatgagccactgcacctggccgtaaaatctttttttttttttttagacggagtcttgctctgtcgccaggctggagtgcagtggcgcgatctcggctcactgcaagctctgcctgctgggttcaagtgat

SEQ ID NO: 320679 - DNA, 201 bp, Homo sapiens
tttttttttttttgagacagggtctcactcctgtcgttcaggtgggagtgcagtggcacgatgacagcttattgcagtcgtgacctcctgggctcaaacartcctcctgcctcacttttaaatttttcttttgtagagaagaggtctcactttgttgcccaggctggcctcgaactcccgggctcaagcagtccgcctcgc

SEQ ID NO: 320680 - DNA, 201 bp, Homo sapiens
gtatctttgcagactgtttttcattgcgtttgcctatgtgcatgttcatgtggaaacactagatttgttgtgagggtgcatttccccataaaaaattatcttttttttttttttgagacagagtctcactctgtcgctgaggctggagtacagttgtgtcatctcagctcactgcaacctctgcctcctgggttcaagcga

SEQ ID NO: 320681 - DNA, 201 bp, Homo sapiens
tcctgcctcacttttaaatttttcttttgtagagaagaggtctcactttgttgcccaggctggcctcgaactcccgggctcaagcagtccgcctcgcctcrgcctcccaaagtgctgggattacaggcatgagccaccatgtccagcctcaataagtaatttttaatctgatgattgttcaatataaaattagctttcttt

SEQ ID NO: 320682 - DNA, 201 bp, Homo sapiens
atcctgaacaacagtgagaccctgtatctaaattaaaaagaaaaaaaaaagagtatagactttggagctagatggcctgggtttgaatttcatctctgcayttaactgtataacttaaggcaagtaacttaatttctctgggcctctgactttttctgtcaaatggagatagtgataatacttaacctcatagatttgttg

SEQ ID NO: 320683 - DNA, 201 bp, Homo sapiens
caaactgaacacaacaaagaaaaaacagagtctgggactcatccaaaagggacgagaagaaagaagaaggaacctgattcggactagttttctgttcctgtttttttttttttatttaattttgcaaataaaaatttattttgaatcctttttcctcatatgcatttactccctcctctagtattgtggctatctggtact

SEQ ID NO: 320684 - DNA, 201 bp, Homo sapiens
taattgatgaaattcaaatgattagagatccagccagaggatgggcctggaccagagcacttctaggttggtggtcgtaatgctataaaacccgtgctttrtgacatctgcgctgagatgcatttttatctgcttgccattgccaaccaaatagagtcacctagaacctttctttttgacacaaaaaagtaaactaagtat

SEQ ID NO: 320685 - DNA, 201 bp, Homo sapiens
gaggccgaggctggccgattgcttgaggcaaggaattcaagaccagcttggccaacatggcgaaaccctgtctctactaaaaatataaaaattagccaggygtggtggcgcatgcctgtaacccagctactccagaggctgaggcacaagaatcacttgagcctggaaaggagatattgcagtgaaccacagtgaaccgag

SEQ ID NO: 320686 - DNA, 201 bp, Homo sapiens
ggtgcaatcacaactcactgcagtctcagcctcctggactcaagtgatcctcccacttcagcctcccaaatagctgggactacaggtgtttgccaccatgsccatctaattttttattttttgagcagagggcatctcactgtgttaccaaggctggtctcgaactccagtgctcaagcaattctcccaccttggcctccc

SEQ ID NO: 320687 - DNA, 201 bp, Homo sapiens
aagtgatcctcccacttcagcctcccaaatagctgggactacaggtgtttgccaccatgcccatctaattttttattttttgagcagagggcatctcactrtgttaccaaggctggtctcgaactccagtgctcaagcaattctcccaccttggcctcccaaagtgctgggattataagcataagccaaggaaatagtttt

SEQ ID NO: 320688 - DNA, 201 bp, Homo sapiens
agacttgcaaaatgtgcctcagacattaattttttattgggctcagttttactattttataaaatggaaatagcagttaataacctttctgaacttaacasattgccgtgaaaatgaaatatatgagaaaaagctttgaaaacaggtgaaacactctgtttcatcttattaatttagagatgccaatgagaagtgatggta

SEQ ID NO: 320689 - DNA, 201 bp, Homo sapiens
ccctattactaataacgctgcagtaaaaatctttgtggccaaagctttttattttttgagacagggtcttgctctgatgcccaggttggagtgtgatggcrcagttgtggctcactgcagccttgacctcctgggctcaagcagtcctcccatctcagtctcccgagcagctgggaccacagctgtttgccaacatgcccc

SEQ ID NO: 320690 - DNA, 201 bp, Homo sapiens
attattttaataatgggaaatctattttttcctgtgctaaaactagcataaccatgtaattaaagttaaaatgttcaaatctcatatttacacaactacartttatgttttggtgtgtttcatgctagtcttttcttttttgtatgtgcatatggtgttttgagaacattagttttgtatcttgctgtttttcatgtgaca

SEQ ID NO: 320691 - DNA, 201 bp, Homo sapiens
atgctgtttaagaaactatggtttggtatttttaattttttttttttttcaagacagagtcttgctctgttgtccaggctggaatgcaatggtactatctyggctcactgcgacctctgcctccccagttcaagcgattctcctgcctcagcctcccaagtagccgggattacaggtgcccgccaccacacccggctaatt

SEQ ID NO: 320692 - DNA, 201 bp, Homo sapiens
tagatgaagtaaagaaggtcttagacaaattttacaagaggaaagaaattcagaaactgggtgctgattatggacttgatggtaaggcccaaaacatcttyatagaggtattttattacctcttacggtacagcttggtcaggactgtacgacccctcatgtgacctggctgttgtagtctggagacacgtccctgctctt

SEQ ID NO: 320693 - DNA, 201 bp, Homo sapiens
ttttgtatttttactagagacggggtttctccatgttggtcaggctggtctcaaactcccgacctcaggtgatctgcccacctcggcctcccaaagtactkggattacaggcgtgagccactgcgcctgaccatggtatttttaattttaaaatacacttgaacatgtgaaatacgatttttttgtgtgaagaaaaaattt

SEQ ID NO: 320694 - DNA, 201 bp, Homo sapiens
aggccagtgattctcaaaggaggggcatgtccctctccaggagtatatcagagtctattgaggtatagtgctgacccaccctcaggatgacatattcctcsgatatttgggggcagaaatcaaggttgagcaaaggcactgaagagagtttgcaaaaagaacatttagaatttatcaatgtcatgatgtaggtgtgccatt

SEQ ID NO: 320695 - DNA, 201 bp, Homo sapiens
gcctgggtctttctggacagcaggcgctggaggtgcgcgtcactgtccgccgccgtgtccgcggctgcgccagacagtgtagaacctgcggcctcgatgtycttctcccgtgccctattgtgggctcggctcccggcggggcgccaggctggccaccgggcagccatctgctctgcccttcgtccccactttgggcccttt

SEQ ID NO: 320696 - DNA, 201 bp, Homo sapiens
gtcattatttttttttattgtattctagataacaaattataaggagtctggattaggttgttttcctaaaataaaaagaggcagttaactcttttaggcarttcactggtatcttaccttgatccggattgagtgtggttttaggttttattagggcagatctagaatagccctgacttaaggatgtcgtccttaagtgta

SEQ ID NO: 320697 - DNA, 201 bp, Homo sapiens
aagaatgatatttattctgtgagtcggcagattgaaattcggggattagaatcagctgttatatatggcagtctcccacctggtaattattgactttcctygtgacaagatatgaaatctcctatctttgcaatttatgttgagatatatataaaaaaatggtaaacaatattgaattaagctgcttgatgtattggtaat

SEQ ID NO: 320698 - DNA, 201 bp, Homo sapiens
cgctggagtgcagtgatcaaattgtagctcagtgcagtcttgaactcctgggcccaagtgatcctcctgcctcagcctccagagtagctgggaccacaggygcacaccacaaagcctggttattttctttttttttgggtagtgacaaggtcttaccctgttgcccaagctagtctctaactcctggcctccagtgatctt

SEQ ID NO: 320699 - DNA, 201 bp, Homo sapiens
ctaggacgtttgaatgctgcccaccactactgctaacctattgtactacgtcactttactttcagtttctcagtcaggtgtccgagtgcctattatgcacrtggggctagttattatctctaaatgataacaatgttaagcctaaatattatttatttatgtatttatttatttttgagacagagtctcactctgtgcccc

SEQ ID NO: 320700 - DNA, 201 bp, Homo sapiens
tttatttttgagacagagtctcactctgtgccccacgccggagtacagtggtgtgatcatggctcaccgcagcttcaaactcctgggctcaagcggtcttygtgcctcagccccccgagtactagagcaacaggcacacaccactgaacctagctgatgtttttaattttttgtagagacttgggtcttgctatgttgccc

SEQ ID NO: 320701 - DNA, 201 bp, Homo sapiens
cacagagttctttgatcagagaatggtatgcaagtgaaggtccagattgacaaagtttagtgagcctgatttgcctttacttccttccggaatctagcagygggaaggaacagggagaaaagcagtttcttcagctgagcacacagagctacattagtggactgaaaaatgaccagaagcctgaatatagacgaaaccttg

SEQ ID NO: 320702 - DNA, 201 bp, Homo sapiens
gcacagctcctatcaacaagaagcagccttttgtgtgttcttcactgttacaggtaagcctttatctttaagctattttgagttccttctggttgatgcasgttccccaaacagtactttgttattcaaaataaaataattacaagagtattcagtaatatgagagactttgtaaaaacttaaataggggttaatagtagc

SEQ ID NO: 320703 - DNA, 201 bp, Homo sapiens
tagatgaaggggagtatagacatgagatcatacagggagaagcatgcagggagagaagcttccaggggaaggctgtgctggaatcatttctgtaacttctyagcagtacagttaggttcgtggttggctcctgtgacctccctgcttccctcctgggcacctcatgtcttggactcttcttccctcccttatgactaattt

SEQ ID NO: 320704 - DNA, 201 bp, Homo sapiens
gactaatttctcttgcctcttttcttctgtctttttcattcactttctctctctgtttcatacttcattccttatactttcctgtggccatgtcctaacgstgtaatgtgtagctaaagagaactcacttccagtttaaaaatgttctcatgtctttctagatgtatatatctatgttagttttattgccttggttaaagt

SEQ ID NO: 320705 - DNA, 201 bp, Homo sapiens
ttgttgcccaggctgatcttgaactactgtcctcaagtaatcctcccaccttggcctcccaaagtgttgggattacaggcatgagccactgcacctggccrtaaaatctttttttttttttttagacggagtcttgctctgtcgccaggctggagtgcagtggcgcgatctcggctcactgcaagctctgcctgctgggtt

SEQ ID NO: 320706 - DNA, 201 bp, Homo sapiens
aaagaaggtcttagacaaattttacaagaggaaagaaattcagaaactgggtgctgattatggacttgatggtaaggcccaaaacatcttcatagaggtaytttattacctcttacggtacagcttggtcaggactgtacgacccctcatgtgacctggctgttgtagtctggagacacgtccctgctctttgcttctggc

SEQ ID NO: 320707 - DNA, 201 bp, Homo sapiens
atcccagaaaaggataaggcctgtaacctcaggacttttctacttttttttttcttttcttcctttttttttttttttttttttttttgtgacacggtctyactctgtcacccaggctctggagtgcagtggctcagtctcagctcagtgtgtagcctcaacctcctgggctcaagccatccttccaggtcagctttccaa

SEQ ID NO: 320708 - DNA, 201 bp, Homo sapiens
tcaaatggcctttacttccacctaagaatattaaagacctcatggatcttgaagctgtccacgatgtcttggatctttacttgtggctaaggtaccaacakttttcctttatgtgctctcatttttctagtaggacaaattaaaggttttatgaatttgtttttctatttcaaattatggacatatttgcaagatgctcta

SEQ ID NO: 320709 - DNA, 201 bp, Homo sapiens
ccaaaataccaaacacgtccttgttcgtgcccctgactgtgaaacctcagggccccagcgccgacggcgacgtcggggccgagctaacccggcctctggayaagagtgagtgcgggaactactgagggcggcagagggtggtgtctgctgggccgaggctggttgggaggaagctacatccccttcccctggggatccgag

SEQ ID NO: 320710 - DNA, 201 bp, Homo sapiens; identical to SEQ ID NO: 67231

SEQ ID NO: 320711 - DNA, 201 bp, Homo sapiens
taaagcaaaagtacttacgtaatacaaggggtttaatagtgcaacaatatttcttagcaacatttctgaggggcatatcaagttattatcgctaacgttaycatatcaggaaatgacggttaacaatgcaagaaacttttgggaaatgctatttagtgtttgagtccgcaagacatactcgtaccctgagcattcgcagtt

SEQ ID NO: 320712 - DNA, 201 bp, Homo sapiens
taggtggacgcccgctctttcttgcattctttgtttctctcccacccccgaatgggatgtggcagtgaaaagccagcggagactccttttaggattctttrtcattgaggaggcgccgactcataccacgctgttaggctgtgtggtggttgccaagaggaaccagactcagatccagatcccctcttaagaaacgtaacg

SEQ ID NO: 320713 - DNA, 201 bp, Homo sapiens
agtttcgggatgattagggaggtaagggagtttcctctgaccatatgaaactgggagattgaggaaatgctatccagaattgtctccaggaataggaggaraaatgtctcacttcaacaagcgacattggtgcctcctattgtaaatctaaaatatagactacaatatgtttttcagagcagaagtacagtactttcacta

SEQ ID NO: 320714 - DNA, 201 bp, Homo sapiens
gcaattaaatttcaatatgagtcttggagaagacattcaaaccatagcagagaatgtgttattttaataatgtaattatactattatttatttttaaattrtaaaaatacataaaatttactcttttaagcttttttttagtttttttttctttacttttttttttttagagacagggtcttgctctgttacccaagctgg

SEQ ID NO: 320715 - DNA, 201 bp, Homo sapiens
agcctaggagttcgagaacatctccagcaacatagcaagactctgccctttaaaaaaaaaattacataaataatacatacattctctttatacaaaatgaraacattacagatagcttaaatgtggctccctccccaatcttagtcctctgaaataactacttgtgtaagtttgtgtgtatctttgcagactgtttttcat

SEQ ID NO: 320716 - DNA, 201 bp, Homo sapiens
gatgcatgcctgtaatcccagctacttgggaggctgaggcaggagaatctcttgagcccgaaaggcggaggttgcagtgagctgagatcgcgccattgccytccagcctgggcaacaagagtgaaacactgtctccaagaaaaaaagaaactgttgttcctacccggcacaaagtaacagagacccagaaatctgcctgtg

SEQ ID NO: 320717 - DNA, 201 bp, Homo sapiens
atcttccatgtccagatgtttacctagaaaatatgtttcttagagctggcatttgtgaaaaacttagctagcataaggttgaagtttatggaacagtcttraactgctgtaaactgacctgagtggaactcagtcccatggccttggcaccattcacaccatcctttaaacagctattctagtgaatagaagctctttact

SEQ ID NO: 320718 - DNA, 201 bp, Homo sapiens
gatcatggcgcactgcagccttgacctccctgggctcagtaatcctccacctcagcttcctgaggagtagatggaatcacaggcacacaccaccatgcccrgctaattctttgtgttttttgtatggatggggtttctccatgttgccccagctggtctcgaactcctgggctcaagtgatctacccgcttcagactccca

SEQ ID NO: 320719 - DNA, 201 bp, Homo sapiens
gtgattctcaaaggaggggcatgtccctctccaggagtatatcagagtctattgaggtatagtgctgacccaccctcaggatgacatattcctccgatatktgggggcagaaatcaaggttgagcaaaggcactgaagagagtttgcaaaaagaacatttagaatttatcaatgtcatgatgtaggtgtgccattgagagt

SEQ ID NO: 320720 - DNA, 201 bp, Homo sapiens; identical to SEQ ID NO: 67227

SEQ ID NO: 320721 - DNA, 201 bp, Homo sapiens
ggacttgatggtaaggcccaaaacatcttcatagaggtattttattacctcttacggtacagcttggtcaggactgtacgacccctcatgtgacctggctkttgtagtctggagacacgtccctgctctttgcttctggctgagtgggagactggcgaggctcacctggtgagccatactgcacggcagaggagctgcagc

SEQ ID NO: 320722 - DNA, 201 bp, Homo sapiens
tggaaactccctttcacatctcccctaaaaatgttgatatgtcaggtgattactggttaacctcatgagcatgaatggatagtctgcctttgagaagttgstatttataaaatttattttacaagtgaaaattttttctcaaaatcttttgggactttagccctgaggaatttcctctcagtatttcaggtggggaaggat

SEQ ID NO: 320723 - DNA, 201 bp, Homo sapiens
tttagaaaatgagatgagacactactttttgccatagcgatggatttaaaacccctaaggatgagcatgactgaggcccaaggaattattccttccacttyactttctgctcctgagagctgcctggtttcctgtggtagagatgcttcattagtaaatgaagggctgtcacctccttgttctggaacttgccttcttctt

SEQ ID NO: 320724 - DNA, 201 bp, Homo sapiens
atcagcttatgattgttttttcttttactaaaaggcagctggtcttcatccaactgctgagcagattgaaatgtttgcctaccatctccctgatgcaacaytgtccaatctcattgtaagtggaaactccctttcacatctcccctaaaaatgttgatatgtcaggtgattactggttaacctcatgagcatgaatggata

SEQ ID NO: 320725 - DNA, 201 bp, Homo sapiens
aacagggatttttgaagaaagccagcctgtgcatctctccccgctctgtccctggagacagggatgttgtcatagcctatgagagcagaagttagggagarctgccacacggcggcgctgtggtgcaggaaaaaagcccgagggctggtccagagtcagagacctgcattcggcttgggctctatccttcactcgcggtga

SEQ ID NO: 320726 - DNA, 201 bp, Homo sapiens
aagaggcatgtttgctgcatagccttccagcctttttttctttaaagctgggatcttattgttttatagcctgcattttcccttattgttttcattttactttttttttttttttttttagagatgaggtcctgctgtgttgcccaggctggcagtgcctggcactccatcctcgaattcctaggctcaaatgatcctccc

SEQ ID NO: 320727 - DNA, 201 bp, Homo sapiens
ggtggtgcctgggactttaccacagaagtggaggccaaggaaagcagcctggcctcacgcaggctcaagatgcctgcccggggcccgggcactgtgcaggrtggcccccacgaccctctggtctatgaggcccaggagtgcaggccctgggtccgctctgctccgacgtctcctcttcctcccaatgccccgacacaagtc

SEQ ID NO: 320728 - DNA, 201 bp, Homo sapiens
gtagtacagatgtggccaacttggatgaacccacagagccttggtaggcggggcttgcaccaatccctattgaaaggtggccagctcatccctgggcctcyccagcagccacagccctctccggaggtcttggttagatctgatgctgtgtgtaggccccacacgccctcctctctgaggctgaaaagatcatatactttc

SEQ ID NO: 320729 - DNA, 201 bp, Homo sapiens
ttctttctttttttctttttccttttttttttttttttgagatggagtctcactctctagcccaggctgaagtgcggtggcacgatcttggctcgctgcarcctccaccttccaggctcaagcaatcctcccacctcagtctccagaggagttgggactacgggcatgggccaccatgcctggctaatttttgtatttttt

SEQ ID NO: 320730 - DNA, 201 bp, Homo sapiens
gtaagaagaaggctagtattctttctaaatctgttggcctttgttaacccaaggcatttgcagtaaaaacaaaacaaataaacaaacaaaaacacaaaaarcctacattaggttatgtgtgtgcacttatgtgtgtgtagatgagaacatgagtgtaccccccccgacccccagatcctgaccccaggaactttgttttag

SEQ ID NO: 320731 - DNA, 201 bp, Homo sapiens
gccatccccctggagatcatgcagggcactggtgaggaggtaagtgccaggcaaggcctttgggctccgaggtgccagcctgccaccctgcatcgatgtcygcctggtgtgaatgccgctctctctctctctgcagctctttgatcacattgtgcagtgcatcgccgacttcctggactacatgggcctcaagggagcctc

SEQ ID NO: 320732 - DNA, 201 bp, Homo sapiens
gtgtatatgtgtgtatgagtgtaattttaaaaataaaaatagaataattcactatctgtatttgtttgacgtgctttcaattaacagtgtgtggaaaacayctttctctcacatcaaatgttctcttacagtgtaattctttatgggtgtatatcatgtcccatatcgaggtacaggatgatagatccatactgttggagt

SEQ ID NO: 320733 - DNA, 201 bp, Homo sapiens
ctagaactcaggaggtggaggttgcagtgagctgagattacaccactgcactccagcctgggcgacagagaagactcagtctcaaaaagagaaaaaaaaawtttttttaaccattttcttattgtggtaaaatacacataacataaatttcccactgtgactattttttaaatgcacacttctatgacatgaaatacatcc

SEQ ID NO: 320734 - DNA, 201 bp, Homo sapiens
gacaccgtggggaccatgatgacctgtgcctatgacgacccctactgcgaagttggtgtcatcatcggtaactcaattggactggttttttgagggtaggkgagaagggactgtttgggagtttcatttcagcgagctctgagtgaattcggcgggaagggcactgcactatttaggagaagcaacatagggacatgaaaa

SEQ ID NO: 320735 - DNA, 201 bp, Homo sapiens
cggaccaggggcatcttcgaaaccaagttcctgtcccagatcgaaaggtgacctgtgatcaagttcatcatgaggctctgactggcatatgctgccaccaygctggggttgggccaatttgaggtttaaaaataaaaacagaaaggccctggctgggtaagggattgcctcctggggctgctcttctctttccaactgatt

SEQ ID NO: 320736 - DNA, 201 bp, Homo sapiens
agaggccctgggacactgcactgggaaaggccctgtgccctcacttgtgggtaggtgcttgggatggacagtgccctgtcctggaaggacgttgagcttcrgagagagacagccctactttgaaatcttggctctgtccttgccacagcttgacgagagtactgggacgtgtccttgacagggcatctggggcccctggga

SEQ ID NO: 320737 - DNA, 201 bp, Homo sapiens
tttgcgatttcagacacgaaactcaggaaacaccatttgtaagcaatgattggtaatgcaaattgagaaccatttttctttctttctctttattaagagaygaggtctcgctatgttgcccaggcaggcctggaactcctggcctcaagtgatccacctgcctcaggctcccaagtagctgggactacaggtacgggccac

SEQ ID NO: 320738 - DNA, 201 bp, Homo sapiens
tcttgctccatgcgtagctccaaagcctggccttctcacatcatgtggtcttctgcattgcaggtctgccccaaccttatccttcttctccaaacagataygagaaaatgaccagtgggatgtacttgggggagattgtgcggcagatcctgatcgacctgaccaagcagggtctcctcttccgagggcagatttcagagc

SEQ ID NO: 320739 - DNA, 201 bp, Homo sapiens
tccatcgtgggaatttgccatcatctatacaggggacaggctgagttttactttttcattcttttataaagaaaggactgagaaaaataatataaagaagsttccaggggcctggcgtggtggcttttgcctataatcccagcaccctgggaggctgaggcgggaggattgcttgagccagggagtccaggctgcagtggg

SEQ ID NO: 320740 - DNA, 201 bp, Homo sapiens
tgtccaagcccatctcacaagcacagcatctttctctcttggacagaagcttgatgtaggagtgggaagcatctgagtgtgaaatttgacttgtcgcatcrtgtttgagtgattttgggaaaatacccaaagtctgtgaaattgagagtccctatgctcgatgtgagaatggtacccatggccagggtgatttgagacaaa

SEQ ID NO: 320741 - DNA, 201 bp, Homo sapiens
gaggtctcactatattgcccaagctggtctcaaactcctgggtttaagtaatctgcctgcctctgcctcccaaagcgttgggattacaggcatgggccatygtgtcccaccttgttttctcatttgtaaagcagggataataacatctgcttgttgggctgaggtgaagcttaggcaaagcatttgtaaagcatccaacac

SEQ ID NO: 320742 - DNA, 201 bp, Homo sapiens
acaaacaaaaaacaacaacaagcaaacaaaaaacaaacaaaaaagtttccagggaatgtttgggtgagaccaagtggagctggctggcagagaaaggtccyaggagtgagtagatgtgtatgtcagggggttgggaatcagggccctggctggatcctgtagtgcaggtggtggagtgagagtgtgccagctgctcttatt

SEQ ID NO: 320743 - DNA, 201 bp, Homo sapiens
tctgctggttgagaggccctgggacactgcactgggaaaggccctgtgccctcacttgtgggtaggtgcttgggatggacagtgccctgtcctggaaggaygttgagcttcggagagagacagccctactttgaaatcttggctctgtccttgccacagcttgacgagagtactgggacgtgtccttgacagggcatctgg

SEQ ID NO: 320744 - DNA, 201 bp, Homo sapiens
tgctggttgagaggccctgggacactgcactgggaaaggccctgtgccctcacttgtgggtaggtgcttgggatggacagtgccctgtcctggaaggacgytgagcttcggagagagacagccctactttgaaatcttggctctgtccttgccacagcttgacgagagtactgggacgtgtccttgacagggcatctgggg

SEQ ID NO: 320745 - DNA, 201 bp, Homo sapiens
ctttccctggatctcggagggtccaagttccgagtgctgaaggtgcaagtcgctgaagaggggaagcgacacgtgcagatggagagtcagttctacccaaygcccaatgaaatcatccgcgggaacggcacagaggtacctggcaggtggctcctgtgaccgcagggaaggcggtggcatccgtgtgtggggaaaccacac

SEQ ID NO: 320746 - DNA, 201 bp, Homo sapiens
gggagcaccagctctctcttcccagtgatggcatcccaggatgggctccaccgtcgaggccacctctcataccaccgcaagggctgtgctcacatttgccytctccagttgacatgcacattcctacagcatgagccagtgggttgggctcaggctgcagagtcaggctgacttagttcacatctcagctctgcgccttac

SEQ ID NO: 320747 - DNA, 201 bp, Homo sapiens
ggtctatgaggcccaggagtgcaggccctgggtccgctctgctccgacgtctcctcttcctcccaatgccccgacacaagtccctgtcatggaatgcagcygctgctttctccatcacagagaaaggaaagtttctcgccctggatcttgggggaaccaacttccgggtcctcctggtgaagatcagaagtggacggaggt

SEQ ID NO: 320748 - DNA, 201 bp, Homo sapiens
tagccaacatcatgagcataagaattaaaggaagtcacttggttttttattcttgtttttgagggaacagaaagtcttaaccaaagagaaatttctttgtstgtgtgtgtgtgtgtgtgtgtgtgtgtgtgtgtgtgttttctgataataaaataaatggtaatacttttttcaaggtttaaaaaaagagagagagaagga

SEQ ID NO: 320749 - DNA, 201 bp, Homo sapiens
gaaggggtccagggagggggcactgggggaaccctatagccgagtggtgtccggatgaggtgagtgaaggctgagagtcggaggccattcaagtgagaggsagaggacagactgggcagattgcacaggatgtgcacacagtcactgtaaggtcaccggcttatcccctgagggagactggaaggcactgggggactctgg

SEQ ID NO: 320750 - DNA, 201 bp, Homo sapiens
caaagtgctgggattacaggcatgagccaccatgcatggccccattacaacaaatttataaggcattgcttgtatttcagtttcatctgacaaatgaggaratagaagccaaggacattgaaagatttccctaagtcataaccctaataaccctaattctaattcagtcagtatttgtgggttacgtatgtgcatgatagg

SEQ ID NO: 320751 - DNA, 201 bp, Homo sapiens
ttcgtggacaaaaaagtttaaggcacgaggagttcaggacacggatgtggtgagccgtctgaccaaagccatgagaagacacaaggtgaggaattcacctyggtgtgggaggctctcccagccctagctcctttctcttgggttggtggggctgggggtgaggtgagggggtcacatatggtgcctgcatggagggagaat

SEQ ID NO: 320752 - DNA, 201 bp, Homo sapiens
agacctaagggggtaccatagacagcatagctttgtgtgcttattacagctgtcgaatgtcagtgaaatatcctattggaacaaaagaaaaatatgatgasaaggttgcaacaggtaaaggggaaaagtccctttttctaattaccataaggccccataaggtctagtggtggttctggaagtgaggcagaggctgccagc

SEQ ID NO: 320753 - DNA, 201 bp, Homo sapiens
agcattttagagttttacaaacgtcacagctcctttctcacccgagtcaccctctgcgggcactcaggtttcagtgtttcctctactaagcaattacttcygtgagcttcctgtcttccagaattatgttaagatctcttatcagtcactgtttcctttctttttgtccttgtaggttaatgccgtgtttaaccagaagtc

SEQ ID NO: 320754 - DNA, 201 bp, Homo sapiens
ggcccccacgaccctctggtctatgaggcccaggagtgcaggccctgggtccgctctgctccgacgtctcctcttcctcccaatgccccgacacaagtccstgtcatggaatgcagccgctgctttctccatcacagagaaaggaaagtttctcgccctggatcttgggggaaccaacttccgggtcctcctggtgaagat

SEQ ID NO: 320755 - DNA, 201 bp, Homo sapiens
agaactcaggaggtggaggttgcagtgagctgagattacaccactgcactccagcctgggcgacagagaagactcagtctcaaaaagagaaaaaaaaaatktttttaaccattttcttattgtggtaaaatacacataacataaatttcccactgtgactattttttaaatgcacacttctatgacatgaaatacatccac

SEQ ID NO: 320756 - DNA, 201 bp, Homo sapiens
ttaagagtcctaagccaaggtcatcctttctattgaggaaggataatgacacaggaagaagagatttttaaataaggaccttggggccaattgtcatgggrgggggaaggagactacagttggatcatcttggcctggggctgagggagctattatagattttcactctggctccaatgtgtgcctcttctgttctctgaa

SEQ ID NO: 320757 - DNA, 201 bp, Homo sapiens
cgacatcattgcactccaacctgggcaacaagagtgaaactccgcctcaaaaagaagagaattacctgtaatcctcccaatgtctgaatagatttccttckgtgtgtgtgtgtgtgtgtgtgtgtgtgtgtgtgtgtgtgtgtgtctttttttaatctgggcaagggcaaacattaaaacaaaaagccagcatcatacagt

SEQ ID NO: 320758 - DNA, 201 bp, Homo sapiens
ggcattctgctccagcctagccattgcctgggtcaatttctcctccctcctgtaagggcatctaagaatggggaggctgtgggtcacactgggcacatccyggggtcctgggaagcaggtcctgactccctgctctattgcctgcagcgatcggctggcccttctccaggtcaggaggattctgcagcagctgggcctgga

SEQ ID NO: 320759 - DNA, 201 bp, Homo sapiens
ccagagaagtcctgagtttgcctactcccatcaggacctatctgcgagggagtcacctgtttgagccttagttaccacccagccttttggtcagggggctkcagtggtctgttctgacaggatcaagtgccttaaaagtgctgtgttaatactggagccttctctgccagtcatggaaggggcatgggaagcatgagggtg

SEQ ID NO: 320760 - DNA, 201 bp, Homo sapiens
atgctcagggaagccatcaagaggagaaacgtaggatgtggtgttgaggctcatgcctgctcttgctgccttccccaggcccctctgctctgccatcctcygcccagttcctatgactctggcctctgtctgccttgggataacatgcccctcctaaacctgtttggcttgcacattcaactcatagtaaagctgggtttt

SEQ ID NO: 320761 - DNA, 201 bp, Homo sapiens
tgacaccgtggggaccatgatgacctgtgcctatgacgacccctactgcgaagttggtgtcatcatcggtaactcaattggactggttttttgagggtagrggagaagggactgtttgggagtttcatttcagcgagctctgagtgaattcggcgggaagggcactgcactatttaggagaagcaacatagggacatgaaa

SEQ ID NO: 320762 - DNA, 201 bp, Homo sapiens
cattgcattactgtcctgaaccttacacttcactcggaacttcctggcaggtattggatgcggaagcgggtgaggagggtgtttggaaagcttgaagaggrttgtgtttgctgtaagggatgtttgctcggaaaggccacaaaggcgaggagaatcattttcaaagaagttttaagaactgttggagcagaaggctgggcg

SEQ ID NO: 320763 - DNA, 201 bp, Homo sapiens
tgggcctggtggcgggcgcctgtaatcccagctactcgggaggctgaggcaggagaatcacttgaacccacaaggtggaggttgtggtgagctgagatcaygccactgcattccagcctgggtgacagcgcgagactctgtcagaaacaaacaaacaaacaaaaaacaacaacaagcaaacaaaaaacaaacaaaaaagtt

SEQ ID NO: 320764 - DNA, 201 bp, Homo sapiens
ttccaatgtctccttttggagtggctctggcctaaaaaaatcagcatccttggcacctcaagggccattgtttagtccctgtctcctctcccctccaggartgttttccctctgcccataggatcatcggctgcaggaggctggctgctcctcgccgcacatcctgtcttccccctcatacctttatccgagtttccccag

SEQ ID NO: 320765 - DNA, 201 bp, Homo sapiens
cagccttgggggaacaggaagcccttaatgaagcctgacctggttccatcctgtttctcaaatatgctgaaagctcaattgtccttttttgctaatggctstctgatgattttctggtctttctctggcccccgagtccccggagccatggtaccatttcagtgtcttgggtctgttcgttgtcacgagactgagctgggt

SEQ ID NO: 320766 - DNA, 201 bp, Homo sapiens
tgctactctaactatggtctacagaccagcaacagcagcaacatcaccaagttggccaggctgttcttgaactgctgacctcaggtgatctgcccgtctcrgcctcccaaaatgctgggattacaggcatgagccactgtgcccagcccccacctttcaattaatggcatctgtcttgggctgggctgggttgtgttccaa

SEQ ID NO: 320767 - DNA, 201 bp, Homo sapiens
gttcttggtttttagaaacttgggttcacgtctctaatggagggcaagagtaagaagaaggctagtattctttctaaatctgttggcctttgttaacccarggcatttgcagtaaaaacaaaacaaataaacaaacaaaaacacaaaaagcctacattaggttatgtgtgtgcacttatgtgtgtgtagatgagaacatga

SEQ ID NO: 320768 - DNA, 201 bp, Homo sapiens
cctttgctactctaactatggtctacagaccagcaacagcagcaacatcaccaagttggccaggctgttcttgaactgctgacctcaggtgatctgcccgyctcggcctcccaaaatgctgggattacaggcatgagccactgtgcccagcccccacctttcaattaatggcatctgtcttgggctgggctgggttgtgtt

SEQ ID NO: 320769 - DNA, 201 bp, Homo sapiens
catgtggatggcgtgctttaacatctctaaaatcttgtcccaagtcctcctagctcttgtgagctggtggtataatttcatgattaccgacaaaaaacaarcaaaactctcctaattccttatggtgtccgtttcagaaatgtatgcagcttccagagaagtcctgagtttgcctactcccatcaggacctatctgcgagg

SEQ ID NO: 320770 - DNA, 201 bp, Homo sapiens
ctactcaaggtccaacagctgtacttgggatctcttaactgagagcagtaaaagacactgtttattttatttttatttttattttttttgagacggagtcycgctctgtcacccaggctggagtgcagtagcgtgatctccgctcactgcaagctccgcctcccaggttcacaccattctcctgcctcagcctcccgagta

SEQ ID NO: 320771 - DNA, 201 bp, Homo sapiens
tcctgacttcgtgatccacccgcctcggcctcccaaagtgctgggattacaggcgtgagccaccgcgccagaccggaggccccttgagtataagaatcatkcatttccttgactggatgccctgtaccgttccttggggctcccgagaaggctgtcagtcagtgaagctgaaagagccttcagaggttcagtctcctgatt

SEQ ID NO: 320772 - DNA, 201 bp, Homo sapiens
agcgtttggaagtctctacattggttttcttattatggaagtttgctctcccacacagtttctgattcttttgcagcaagtggaataccagcaggtcacaytgatttatgttatgacgatttaactttggacttaccattaaaaagaatacagggcagaattcaagagctgttttctttagtaacaggaatagaatttcca

SEQ ID NO: 320773 - DNA, 201 bp, Homo sapiens
ctctctctctgcagctctttgatcacattgtgcagtgcatcgccgacttcctggactacatgggcctcaagggagcctccctacctttgggcttcacattytcatttccctgcaggcagatgagcattgacaaggtaagatagccccaccaggctcacggccagcccagtgggcttccttcctcttctgggaccatctcca

SEQ ID NO: 320774 - DNA, 201 bp, Homo sapiens
aaagatttttaattgggaagctaagacacaggaaggtcagtattgtgtgttttttgcatggtttttttggtaaactagcttgaccaagaggtagagcttasaagtggggactagacactgggctaagctcttagactccccagagctccagtgggtcatggggcctcggcctggagctgacagtgggtgagtgaggctggg

SEQ ID NO: 320775 - DNA, 201 bp, Homo sapiens
agatggagggagacagtttgcagcctctgccagtgcccacacagaaagcctccgggcagggacatgtccttctgcaggggcttgggagcaggcccagatgwggccacacagagaggcccagtgtccttcctaaggtcagaaaacacagtgttcgagagcacaggctctggggttatgggctcctgttttgcaaacctgtct

SEQ ID NO: 320776 - DNA, 201 bp, Homo sapiens
ggacatgaggaacatcgagatggtggaggggggtgaagggaagatgtgcatcaatacagagtggggaggatttggagacaatggctgcatagatgacatcyggacccgatacgacacggaggtggatgaggggtccttgaatcctggcaagcagaggtgaagagggtggatgtgtgcatttatgtgggttgtgtagtgaac

SEQ ID NO: 320777 - DNA, 201 bp, Homo sapiens
gggcagggacatgtccttctgcaggggcttgggagcaggcccagatgaggccacacagagaggcccagtgtccttcctaaggtcagaaaacacagtgttcragagcacaggctctggggttatgggctcctgttttgcaaacctgtctctactgtttcccatatgaataaccttgagcagattatttaacttctctgaggc

SEQ ID NO: 320778 - DNA, 201 bp, Homo sapiens
gaccttgggcaagtcatttaatctccctgttccttggtttcctcatctgaaaatgattacaaaaatagaactcattttataggtgtgttttgtggttttawtttcgtgcaattatattcaaggaatattttgctcagtgaaggaatgtggcacatccatataaatggcctggaaggatctggaagatacattattgaatta

SEQ ID NO: 320779 - DNA, 201 bp, Homo sapiens
gcagctctgaaggtgtcgtgaagacacagtgaagaaggaggggagacccgtgggcagctaaaagtaaagatacccatggttggggagaaaaaagagagacrtcaaaaaatagattagttttgtgtaattgcaatcagtaagagaggtttcccagttgggagtgtctctctaatgttctacacataccaaccaggaaaggag

SEQ ID NO: 320780 - DNA, 201 bp, Homo sapiens
catttgccctctccagttgacatgcacattcctacagcatgagccagtgggttgggctcaggctgcagagtcaggctgacttagttcacatctcagctctkcgccttacctcgagggctctgagaaatggccagagtcctcagccttggcaaatgagcataatgatacctagtggctgtgatttgaagacgttgattatat

SEQ ID NO: 320781 - DNA, 201 bp, Homo sapiens
cctcggctgagtgggcttggcagagccccggcttgagagggttgcttagcaatgagatttggtggcacccaattctcaagtagtcaagcaacccatcaatwccctgcttccccctccactaaacctcagctaccatccagagcctcctattagacaatcaagtgtgtgccagagggagggaccaaaggggtggggtggggg

SEQ ID NO: 320782 - DNA, 201 bp, Homo sapiens
tacctgctgcctctgtggggaaggagggagggaaacacctccttcccacccgctgattccctctggccttgtgttcggcaggacatggacgtggacatccyggccctggtcaatgacaccgtggggaccatgatgacctgtgcctatgacgacccctactgcgaagttggtgtcatcatcggtaactcaattggactggtt

SEQ ID NO: 320783 - DNA, 201 bp, Homo sapiens
tgggtgtggtggcgggcacctgtaatcccatctactcgggaggctgaggcaggagaatcgcttgaacccaggtggtggaggttgcagtgagccgagatcgygccattgcactccagcctaggggacaagagtgagacttcatctaaaaaaaaagaactgttggggcagatctgtttgttcatgtatttgaaagcatataaa

SEQ ID NO: 320784 - DNA, 201 bp, Homo sapiens
tctaactgctaagttcaaatctcggctctagcccttactagctgtgtagccaaggacaagttactcaacctttctgcactcacatctctcatctgtacgayagggtaatgacggtgcctcccgcaggatttttgtgggcgttgaaggagttactatgtgtaaaatccttagacaagtacctggctcatggtgactgctcag

SEQ ID NO: 320785 - DNA, 201 bp, Homo sapiens
tttcccagttgggagtgtctctctaatgttctacacataccaaccaggaaaggagccagccaggggtccagtttcccaagaactatggagggaaggagggrgactggggcttgtgggctaacagcctcagggtgaggcggcatccagccacggggctgacggcactgccatcagattttctcactgcctttcctgtcccag

SEQ ID NO: 320786 - DNA, 201 bp, Homo sapiens
ggttaaaggttgccaagggtcaacaggagggaaccagggttctttccaggcagctaaaatgagcccagtctgctactctggccacaccggctggctgtcayggccctgggcaaaaagcatctctcaaagtgcagatgacagaagtcctcctagcaggaggacttagccaaggtcaccaagtatttaggatggaatgaggat

SEQ ID NO: 320787 - DNA, 201 bp, Homo sapiens
tctccacctgctcccatcaggaactggctttgaatgtggtgatgtgaggccttacacacaggtccctcgcatggagctggctggtgaaggctgcaggtgamggcggctggccccggtgtgactgcattgccgtccagcacatctgagggtcctgctcctcaggcttagaaatcttggcatcgccttgactttgtgatcagt

SEQ ID NO: 320788 - DNA, 201 bp, Homo sapiens
ctggcgatagtgtaggtggtgcctgggactttaccacagaagtggaggccaaggaaagcagcctggcctcacgcaggctcaagatgcctgcccggggcccrggcactgtgcagggtggcccccacgaccctctggtctatgaggcccaggagtgcaggccctgggtccgctctgctccgacgtctcctcttcctcccaatg

SEQ ID NO: 320789 - DNA, 201 bp, Homo sapiens
tgtaaaaattagccggtcatggtggtgtgtgcctacagtcccaactactcgggaggctgcggtggcaggatggcttgagcccgggagactgcgctactgcrctccagcctgggtgacagagtgagaccctgtctgaaaaaaaaaggaaagaaaagaaaaaaaaaggccaaggatggtggctcatacctataatcccagcac

SEQ ID NO: 320790 - DNA, 201 bp, Homo sapiens
caaggatggtggctcatacctataatcccagcactttgggaggccaaggtgggtggatcacctgaggtcaggaggttgagaccaccctggccaacatggtraaaccccgtctctactaaaaatttaaaaattagctgggcgtggtggagtgcgcctgtaatcccaactactcagaaggctgaggcaggagaatcccttgaa

SEQ ID NO: 320791 - DNA, 201 bp, Homo sapiens; identical to SEQ ID NO: 67253

SEQ ID NO: 320792 - DNA, 201 bp, Homo sapiens
attagaaaaggctgcagaagcaatgttttaaaaaaattggggtgattcagcttagagaagagaaggccatgggggatgcacgtaggcatgaagtttctgcrgctcagttgcacatctcagcacgtctttcattcaaactggacctgaaatcttctcccagggtgtcctactttcgtggacaaaaaagtttaaggcacgagg

SEQ ID NO: 320793 - DNA, 201 bp, Homo sapiens
agggctggagagccaatgccatgtattatagctgggccctggaatcaaacttccaggattgaccccttgctgtcctgtttatggctttgtgatcacgtaayctttctgggcctcaattttttcatctataaaataagagtgggccgggagcagtggctcatgcctgtaattccaacactttgggaggctgaggtgggtaaa

SEQ ID NO: 320794 - DNA, 201 bp, Homo sapiens
gcatttcagaataccaacaattccacctggtttggggcactgaatggtttggggaactaaaggttcatctttgtttgcttgtgtaataaaggagcaagctraaagtcatagtctgagggtaaattgactgaaaaggatggggatcctcaatctgggagacagttttaatatgcttatatcaatctgaataaagcatctgga

SEQ ID NO: 320795 - DNA, 201 bp, Homo sapiens
tgacctcctaaatgtttttttgaatgtatgtacattaaagttcattctttgtgctgtcaaattctatgggttttgaaagtgtgtcatgtatttgccgttasagtgtcatacagaatagtttcactgccctaaaaacgcccttgcgtttcacttattcagcatcccccacctttccaaatccctggccactactgacttgtt

SEQ ID NO: 320796 - DNA, 201 bp, Homo sapiens
tctctagccctctctctgctgtcccaccctccctgcccctctctgcttcagtcctgctgaatccctcttgcagttctgcagttctgcagccccaggcaccktggcttctctgcccatcgtggcctcacacatttgctccctctcctcctggagcatctccatgttcttccctggtgagtatcaacgtggcttttccgtctc

SEQ ID NO: 320797 - DNA, 201 bp, Homo sapiens
cacctcacctctcacctggggacaagaactttggccttacgtggctgcctcaaagggatgctgtggcgatgagaagaggtgatgtacatggacgcactctrtagacagtagcacgtgttcttcaccctggataaaatgccctttcaccgggaatgtgcctgggatggagcctcctgtcacctggagggtggagagtgctca

SEQ ID NO: 320798 - DNA, 201 bp, Homo sapiens
cagcatcccccacctttccaaatccctggccactactgacttgtttactgtctctatagttttcccttttccatacctgtgggtttgggtttttttggggttttttttttttccgctgagatggagtctgggtctgtcgcccaagcttgagtgcagtggtgcaatctcagctcattgcaaaatctgttccccaggttcaag

SEQ ID NO: 320799 - DNA, 201 bp, Homo sapiens
tctgcagccctctcacctcacctctcacctggggacaagaactttggccttacgtggctgcctcaaagggatgctgtggcgatgagaagaggtgatgtacrtggacgcactctgtagacagtagcacgtgttcttcaccctggataaaatgccctttcaccgggaatgtgcctgggatggagcctcctgtcacctggaggg

SEQ ID NO: 320800 - DNA, 201 bp, Homo sapiens
agcatcccccacctttccaaatccctggccactactgacttgtttactgtctctatagttttcccttttccatacctgtgggtttgggtttttttggggttttttttttttccgctgagatggagtctgggtctgtcgcccaagcttgagtgcagtggtgcaatctcagctcattgcaaaatctgttccccaggttcaagc

SEQ ID NO: 320801 - DNA, 201 bp, Homo sapiens
acagctctgcagccctctcacctcacctctcacctggggacaagaactttggccttacgtggctgcctcaaagggatgctgtggcgatgagaagaggtgaygtacatggacgcactctgtagacagtagcacgtgttcttcaccctggataaaatgccctttcaccgggaatgtgcctgggatggagcctcctgtcacctg

SEQ ID NO: 320802 - DNA, 201 bp, Homo sapiens
catggcaaaaccctatctctacaaaaatacaaaaattagctgggcatggtgccacgtgcctgtagccccagctaccctggggattgagatgggaggatcacctgagcccagaaggctgatgttgcagcgagtcatgattccacgactgcattccagcctgggggatgaatgagaccctgtctaaaaaataataataacaag

SEQ ID NO: 320803 - DNA, 201 bp, Homo sapiens
ctaagggggtaccatagacagcatagctttgtgtgcttattacagctgtcgaatgtcagtgaaatatcctattggaacaaaagaaaaatatgatgacaagkttgcaacaggtaaaggggaaaagtccctttttctaattaccataaggccccataaggtctagtggtggttctggaagtgaggcagaggctgccagcatgt

SEQ ID NO: 320804 - DNA, 201 bp, Homo sapiens
cttagtgcctgggacgtgtgtccctggttacacataccccacatgacttgtttggattgaaaataggtgctttttgtcccaacatatgtttcacttttccmttctaacaactgttcctggtgctgtggcagatacagaagatcaaaaggaaactgttgctgagttgacattctttctgtcataacctcaacttattgaaag

SEQ ID NO: 320805 - DNA, 201 bp, Homo sapiens
cctggctttctagatgatggagtgcgaggctagactaactcctgcctcaggctaacaatgtaactttgggcttccttttgagaattaaaaatactactttygggctgggcacatcggctcacccctgtaatctcagcaatttgggaggccgaggagggtggatcacttgaggtcaggagttcaagaccagcctggccaaca

SEQ ID NO: 320806 - DNA, 201 bp, Homo sapiens
tgctgcctgccatccacgcccccacaaatgagtctccctggagcagggccccagtgtcttctggactatcctgcctatctggggtctggaaccaacaaccyctcttgttggttctgagattacaagggaaaaggtgaatccagggcctgcattcatctagctggctgggttgcttttggggattactcttaaagaaatatt

SEQ ID NO: 320807 - DNA, 201 bp, Homo sapiens
gaatggcgtgaacccgggaggcggagcttgcagtgagccgagattgtgccactgcactccagcctgggtgacagagcaagactccgtctcaaaaaaaaaaaaaaaaaaaaaaaaaaggaatgggggcactggaggagtgagaatgtcctggagcagacacagagcctgggatacacagtctcaactgtgtcaccagctagg

SEQ ID NO: 320808 - DNA, 201 bp, Homo sapiens
tgtcccatatcgaggtacaggatgatagatccatactgttggagttttaggatacctctagtttttcactgtgaaacatgctttgataaacatttggtagytttgcctttgatcacattgtaatctgtccttgactaagttagaagtaggatcatggccagatgtggtgactcatgcctgtaattccagcacttttggagg

SEQ ID NO: 320809 - DNA, 201 bp, Homo sapiens
aatggcgtgaacccgggaggcggagcttgcagtgagccgagattgtgccactgcactccagcctgggtgacagagcaagactccgtctcaaaaaaaaaaaaaaaaaaaaaaaaaaggaatgggggcactggaggagtgagaatgtcctggagcagacacagagcctgggatacacagtctcaactgtgtcaccagctaggc

SEQ ID NO: 320810 - DNA, 201 bp, Homo sapiens
acgtggtggacatgctcagggaagccatcaagaggagaaacgtaggatgtggtgttgaggctcatgcctgctcttgctgccttccccaggcccctctgctstgccatcctctgcccagttcctatgactctggcctctgtctgccttgggataacatgcccctcctaaacctgtttggcttgcacattcaactcatagtaa

SEQ ID NO: 320811 - DNA, 201 bp, Homo sapiens
tggaaggacagtcagcctttttcaatgcctggagctgacctccctctccctgtgggaggcgagaaagttggaagcacttttatagccaccttaagcaagtrccccaggaagtctctggggtagtgtgggagactggtttatggctgctgggctgagtcatggttctgagaacactcctcccaacacgtggtggaaacacac

SEQ ID NO: 320812 - DNA, 201 bp, Homo sapiens
aaagagtatttcaccatgggcgcagtgtttttttttttaaagtagtttcaatttccatcaccatcagttatgtacaaatgtgtcagtttcactgctttttrtgctagcactggatgttatctgatgctttgtgtttggattttctctccatttgtgttcattcatttaattctcttggtctttatggtcagatgcccacaa

SEQ ID NO: 320813 - DNA, 201 bp, Homo sapiens
agagtcagttctacccaacgcccaatgaaatcatccgcgggaacggcacagaggtacctggcaggtggctcctgtgaccgcagggaaggcggtggcatccrtgtgtggggaaaccacaccttagcccatgtactttgctttctcttctctgcagctgtttgaatatgtagctgactgtctggcagatttcatgaagaccaa

SEQ ID NO: 320814 - DNA, 201 bp, Homo sapiens
cacctggtcaaaaggcacagctcgtttctctgcggtcaggcagtgagtccccttcttcgtctctgtgcttcctgcctctagaattgtccagatcctgggcyagcggtgcctgcaagggttactactgagaccctggaacaatttctaaaaatcttcccataccagcatggaaacaaaaataaaacaaaatgaaaaaaacga

SEQ ID NO: 320815 - DNA, 201 bp, Homo sapiens
ctagaacaactcagttaaaccaaaatggacatttatggctgggtgaggtggctcacgcctgtaatcccagcactttgggaggccgaggcgtgtggatcacytgaggtctggagttcaagaacagcctggccaacatggcgaaaccccatctctactaaaaataaaaaaaaaaaaaaattagtcgggcctggtggcacctgc

SEQ ID NO: 320816 - DNA, 201 bp, Homo sapiens; identical to SEQ ID NO: 67246

SEQ ID NO: 320817 - DNA, 201 bp, Homo sapiens
cagcactttgggaggccgaggcgtgtggatcacctgaggtctggagttcaagaacagcctggccaacatggcgaaaccccatctctactaaaaataaaaawaaaaaaaaattagtcgggcctggtggcacctgcctgtaatactagctactcagaaggctgaggcaggaggatggcttgaacctgggaggtggaggctgca

SEQ ID NO: 320818 - DNA, 201 bp, Homo sapiens; identical to SEQ ID NO: 67247

SEQ ID NO: 320819 - DNA, 201 bp, Homo sapiens
cagcaccctgtaggattttgttccttattaagtgtgtgccatgtggtggggtgctgtctggggcatctgtttttcattttgcctgtggtttgtgttgcagstgttgatagttgttttaaggattgttaggtataggaaatccagtaaattaataaaaaaattttgattttccaataaactttgcatgaagtggtgatattt

SEQ ID NO: 320820 - DNA, 201 bp, Homo sapiens
tcatgcagggcactggtgaggaggtaagtgccaggcaaggcctttgggctccgaggtgccagcctgccaccctgcatcgatgtccgcctggtgtgaatgcsgctctctctctctctgcagctctttgatcacattgtgcagtgcatcgccgacttcctggactacatgggcctcaagggagcctccctacctttgggcttc

SEQ ID NO: 320821 - DNA, 201 bp, Homo sapiens
ttcgagaggccacctgcatccttgaggcatgcccctttctgttctcaaagccagcagtgtagcctcttcaggtccctctctgacctgaccttctgcctccyttcaacatttaaagatcctgtgatcacgttagtcatgcttagataatccaggataatctcccaacttcaaggtcagctgatgagcaattttgatcccatc

SEQ ID NO: 320822 - DNA, 201 bp, Homo sapiens
atgctcgagaccagcctggccaacatggtgaaactccacctctactaaaaatacaacaattagccaggtgtgatggcatgcacctgtaatcccagctactygggaggctgaggcaggagaatcacttgaacctgcaaggcagaggttgcagtgagccgagattgcgccactgcactccagcctgggtgacagagcgagacg

SEQ ID NO: 320823 - DNA, 201 bp, Homo sapiens
cacgtaggcatgaagtttctgcagctcagttgcacatctcagcacgtctttcattcaaactggacctgaaatcttctcccagggtgtcctactttcgtggrcaaaaaagtttaaggcacgaggagttcaggacacggatgtggtgagccgtctgaccaaagccatgagaagacacaaggtgaggaattcacctcggtgtgg

SEQ ID NO: 320824 - DNA, 201 bp, Homo sapiens
catggtgaaactccacctctactaaaaatacaacaattagccaggtgtgatggcatgcacctgtaatcccagctactcgggaggctgaggcaggagaatcrcttgaacctgcaaggcagaggttgcagtgagccgagattgcgccactgcactccagcctgggtgacagagcgagacgccatcaaaaaagaaagaaagaaa

SEQ ID NO: 320825 - DNA, 201 bp, Homo sapiens
agggcactggtgaggaggtaagtgccaggcaaggcctttgggctccgaggtgccagcctgccaccctgcatcgatgtccgcctggtgtgaatgccgctctytctctctctgcagctctttgatcacattgtgcagtgcatcgccgacttcctggactacatgggcctcaagggagcctccctacctttgggcttcacattc

SEQ ID NO: 320826 - DNA, 201 bp, Homo sapiens
gtggatagcttttccaaatccttccaaatttaacctgagagccaccttccaacctcatttctgtgacagctgccctcctttggcaaaagcacactcactcytagcggatgctttctcattcctttgcccgtggttcctctccctgggacccccgctcccggcagcctggcagcctgactcctgctcacccttcaacactca

SEQ ID NO: 320827 - DNA, 201 bp, Homo sapiens
gaaggagggaatcttagctcagccctctcccatgtgctccttcctgtgggcagtggctcctggtcttcgggaaatgatgcagcttaatcaaaggggctgcrtccacagatctgttcaccaacctgcaggttcgagaagatgatcagtggcctgtacctgggggagcttgtcaggcttatcttgctgaagatggccaaggct

SEQ ID NO: 320828 - DNA, 201 bp, Homo sapiens
gatagcttttccaaatccttccaaatttaacctgagagccaccttccaacctcatttctgtgacagctgccctcctttggcaaaagcacactcactcttakcggatgctttctcattcctttgcccgtggttcctctccctgggacccccgctcccggcagcctggcagcctgactcctgctcacccttcaacactcagct

SEQ ID NO: 320829 - DNA, 201 bp, Homo sapiens
aatccttccaaatttaacctgagagccaccttccaacctcatttctgtgacagctgccctcctttggcaaaagcacactcactcttagcggatgctttctyattcctttgcccgtggttcctctccctgggacccccgctcccggcagcctggcagcctgactcctgctcacccttcaacactcagctctgtgtcccctcc

SEQ ID NO: 320830 - DNA, 201 bp, Homo sapiens
caggctgacttagttcacatctcagctctgcgccttacctcgagggctctgagaaatggccagagtcctcagccttggcaaatgagcataatgatacctartggctgtgatttgaagacgttgattatatgtccaacctctaatgcagagcttgccatatctgtagtagaccctcaataaatggaaactgaatttgtttct

SEQ ID NO: 320831 - DNA, 201 bp, Homo sapiens
cgagtgctgaaggtgcaagtcgctgaagaggggaagcgacacgtgcagatggagagtcagttctacccaacgcccaatgaaatcatccgcgggaacggcayagaggtacctggcaggtggctcctgtgaccgcagggaaggcggtggcatccgtgtgtggggaaaccacaccttagcccatgtactttgctttctcttctc

SEQ ID NO: 320832 - DNA, 201 bp, Homo sapiens
accaaagatttaaagcataagaaattgccccttggcctaactttttctttcccctgtcgacagactaaactggaagaggtaaggcgcggagggaagcagcwgtgcaggaattggggcttggggaatgtgggcacgggtgggagtcaggctgcacgcaggagagaacagcaggagctttcttgtttgtctttttcttttctt

SEQ ID NO: 320833 - DNA, 201 bp, Homo sapiens
taactttttctttcccctgtcgacagactaaactggaagaggtaaggcgcggagggaagcagcagtgcaggaattggggcttggggaatgtgggcacgggwgggagtcaggctgcacgcaggagagaacagcaggagctttcttgtttgtctttttcttttctttttgttcatgatgaggtggcagcgtgaggcagagaac

SEQ ID NO: 320834 - DNA, 201 bp, Homo sapiens
caggtggacaggttcctgtatcacatgcggctctccgatgacacccttttggacatcatgaggcggttccgggctgagatggagaagggcctggcaaaggrcaccaaccccacggctgcagtgaagatgttgcccaccttcgtcagggccattcccgatggttccggtgagtgcagttgtccgctgccagggtccctggct

SEQ ID NO: 320835 - DNA, 201 bp, Homo sapiens
gacagactaaactggaagaggtaaggcgcggagggaagcagcagtgcaggaattggggcttggggaatgtgggcacgggtgggagtcaggctgcacgcagragagaacagcaggagctttcttgtttgtctttttcttttctttttgttcatgatgaggtggcagcgtgaggcagagaacttgttaacgcaatggccttga

SEQ ID NO: 320836 - DNA, 201 bp, Homo sapiens
agattgtgccactgcactccagcctgggtgacagagcaagactccgtctcaaaaaaaaaaaaaaaaaaaaaaaaaaggaatgggggcactggaggagtgasaatgtcctggagcagacacagagcctgggatacacagtctcaactgtgtcaccagctaggccggggttcctggtaactcatctctgtgtgtctcagtttt

SEQ ID NO: 320837 - DNA, 201 bp, Homo sapiens
atcctaggcctttattccgcgtaatcatggccagggaacatgatttgacccttgaggagtatgaattgctgcaatgattccactcagtgatagaccttgtytgagtgttgtgctctgtgatgctgctgtgcccagggttagggttgtggaggtggaggcatagtcaaaagcacacgtacttgacaagcagccagctatagt

SEQ ID NO: 320838 - DNA, 201 bp, Homo sapiens
ctccgtctcaaaaaaaaaaaaaaaaaaaaaaaaaaggaatgggggcactggaggagtgagaatgtcctggagcagacacagagcctgggatacacagtctsaactgtgtcaccagctaggccggggttcctggtaactcatctctgtgtgtctcagttttcaatctgtaagcaggaggaagctaacccaatcttatgtgaa

SEQ ID NO: 320839 - DNA, 201 bp, Homo sapiens
gttgacagtcacatggacctccttgggatgtgcttgatattgttggcttgagtcacttattggtgtggaatagtgaaagggaatgagctttcatgttccayacacatggctttgaatcatggttcaggacaaattgtgtccccttggaccagttccttaatttcatgagcctcttgttttctctttgagaaaattttattt

SEQ ID NO: 320840 - DNA, 201 bp, Homo sapiens
ctaaatattttgccatcacccctgcttcaggtacccaaaacgcctgcacaaggtggtgaggaaactggtcccaagctgtgatgtccgcttcctcctgtcasagagtggcagcaccaagggggccgccatggtgaccgcggtggcctcccgcgtgcaggcccagcggaagcagatcgacagggtgctggctttgttccagct

SEQ ID NO: 320841 - DNA, 201 bp, Homo sapiens
aggatgtggtgttgaggctcatgcctgctcttgctgccttccccaggcccctctgctctgccatcctctgcccagttcctatgactctggcctctgtctgycttgggataacatgcccctcctaaacctgtttggcttgcacattcaactcatagtaaagctgggttttttttgtttttgtttttgtttttaggagtttga

SEQ ID NO: 320842 - DNA, 201 bp, Homo sapiens
aagctggaatcgcatccagttgtatctgactccaagcttaaattcttatttgctgcactctgccacctttctaaaacctggtgatgtctttgaagactaargttccttcacaattccttctaggaacaggcagcaacatgtgctacatggaggacatgaggaacatcgagatggtggaggggggtgaagggaagatgtgca

SEQ ID NO: 320843 - DNA, 201 bp, Homo sapiens
atggcgtgaacccgggaggcggagcttgcagtgagccgagattgtgccactgcactccagcctgggtgacagagcaagactccgtctcaaaaaaaaaaaaaaaaaaaaaaaaaaggaatgggggcactggaggagtgagaatgtcctggagcagacacagagcctgggatacacagtctcaactgtgtcaccagctaggcc

SEQ ID NO: 320844 - DNA, 201 bp, Homo sapiens
ggaggttgtggtgagctgagatcacgccactgcattccagcctgggtgacagcgcgagactctgtcagaaacaaacaaacaaacaaaaaacaacaacaagcaaacaaaaaacaaacaaaaaagtttccagggaatgtttgggtgagaccaagtggagctggctggcagagaaaggtcctaggagtgagtagatgtgtatgt

SEQ ID NO: 320845 - DNA, 201 bp, Homo sapiens
gaggttgtggtgagctgagatcacgccactgcattccagcctgggtgacagcgcgagactctgtcagaaacaaacaaacaaacaaaaaacaacaacaagcaaacaaaaaacaaacaaaaaagtttccagggaatgtttgggtgagaccaagtggagctggctggcagagaaaggtcctaggagtgagtagatgtgtatgtc

SEQ ID NO: 320846 - DNA, 201 bp, Homo sapiens
aggttgtggtgagctgagatcacgccactgcattccagcctgggtgacagcgcgagactctgtcagaaacaaacaaacaaacaaaaaacaacaacaagcaaacaaaaaacaaacaaaaaagtttccagggaatgtttgggtgagaccaagtggagctggctggcagagaaaggtcctaggagtgagtagatgtgtatgtca

SEQ ID NO: 320847 - DNA, 201 bp, Homo sapiens
ggttgtggtgagctgagatcacgccactgcattccagcctgggtgacagcgcgagactctgtcagaaacaaacaaacaaacaaaaaacaacaacaagcaaacaaaaaacaaacaaaaaagtttccagggaatgtttgggtgagaccaagtggagctggctggcagagaaaggtcctaggagtgagtagatgtgtatgtcag

SEQ ID NO: 320848 - DNA, 201 bp, Homo sapiens
gcagtgcttgctcacatcaagcagctagtatgtggcagagctaggatctggatcttgctccatgcgtagctccaaagcctggccttctcacatcatgtggycttctgcattgcaggtctgccccaaccttatccttcttctccaaacagatacgagaaaatgaccagtgggatgtacttgggggagattgtgcggcagatc

SEQ ID NO: 320849 - DNA, 201 bp, Homo sapiens
catagccaacatcatgagcataagaattaaaggaagtcacttggttttttattcttgtttttgagggaacagaaagtcttaaccaaagagaaatttctttktgtgtgtgtgtgtgtgtgtgtgtgtgtgtgtgtgtgtgttttctgataataaaataaatggtaatacttttttcaaggtttaaaaaaagagagagagaag

SEQ ID NO: 320850 - DNA, 201 bp, Homo sapiens; identical to SEQ ID NO: 67255

SEQ ID NO: 320851 - DNA, 201 bp, Homo sapiens; identical to SEQ ID NO: 67268

SEQ ID NO: 320852 - DNA, 201 bp, Homo sapiens; identical to SEQ ID NO: 67270

SEQ ID NO: 320853 - DNA, 201 bp, Homo sapiens
ttgatgagagatggtgtgacctaaaacattgttctgggttgaatttggccttgttgcctggactgtcaatattgtggtgtttatcctcttagggaagagarctccaaagaccaggtcatctccttaatttgcttctctcaccaggtgtgggaatccagattgccccaaaatcttgagctgttaaggctgggaagagcctga

SEQ ID NO: 320854 - DNA, 201 bp, Homo sapiens; identical to SEQ ID NO: 67272

SEQ ID NO: 320855 - DNA, 201 bp, Homo sapiens; identical to SEQ ID NO: 67279

SEQ ID NO: 320856 - DNA, 201 bp, Homo sapiens; identical to SEQ ID NO: 67278

SEQ ID NO: 320857 - DNA, 201 bp, Homo sapiens; identical to SEQ ID NO: 67280

SEQ ID NO: 320858 - DNA, 201 bp, Homo sapiens
atggtgaaaccccatctctactaaaaatacaaaaattgaggtgccgctgttgctgctcgtgttaaatctagaaccgtagccagacatgggactggaggacragcaaaagatgcttaccgaatccggagatcctgaggaggaggaagaggaagaggaggaattagtggatcccctaacaacagtgagagagcaatgcgagca

SEQ ID NO: 320859 - DNA, 201 bp, Homo sapiens; identical to SEQ ID NO: 67282

SEQ ID NO: 320860 - DNA, 201 bp, Homo sapiens; identical to SEQ ID NO: 67274

SEQ ID NO: 320861 - DNA, 201 bp, Homo sapiens
gagaagccacaggacatttacctgaaagcctgaacgatgacagtgccgaagaggatgaagagggcagagaagatcagggacagcaggggcatcatttccckcctaaaaccaaattaacaaactattagctcaagttaaaatttcttctctccagctaaaaaaagataaaataaaaatcccaaaccaaaaactcttcacacc

SEQ ID NO: 320862 - DNA, 201 bp, Homo sapiens
ttttaatccctggggagagaatatttcacgtgtgtgtgtatgtgtgtgtgtgagacagtctcactctgttacccagactggagtgcagtggtgcaatctcrgcacattgcaacctccacttcctgggttcaagcaattctcctgcctcagcctcccaagtagctgggattacaggcgcccaccaccatgcctggctaattt

SEQ ID NO: 320863 - DNA, 201 bp, Homo sapiens
tgtatttttggtagagtcggggttttgccatgttggccaggctggtcttgaactcctgacctcaagtgatccgcccaccttggcctcccaaagtgctgggrttacaggcatgagccaccgcgcctggccaagatgatgtttctaatgactttatttgcgaggagaactgcaaagagggtgtttttgtcctgctcagggtct

SEQ ID NO: 320864 - DNA, 201 bp, Homo sapiens
cttggatccctacagatacaaccggagccaggtgacagaccgaatgccccccacccttgcccctcaaaatgtcttcctctccgttgcctcaccagtggcarccagggattgagcgggggctttactaatcaagtctgaagcagggatacaaggctgagtttgcatcatcaggggcataaggagcataggagtgaggaagtt

SEQ ID NO: 320865 - DNA, 201 bp, Homo sapiens
agaaaattgtagcagctggctgtattcctctgaccttgggtaatgtcagtctgcaagagccagagtagttccctgcactcagggtttacttatcctgtactcaggggcttgagtacagctacttctcccctgcaagccactgcaaatgtgcagacagtaggaaagagagcattgtaatttatttattttaatccctgggga

SEQ ID NO: 320866 - DNA, 201 bp, Homo sapiens
gagaaaattgtagcagctggctgtattcctctgaccttgggtaatgtcagtctgcaagagccagagtagttccctgcactcagggtttacttatcctgtactcaggggcttgagtacagctacttctcccctgcaagccactgcaaatgtgcagacagtaggaaagagagcattgtaatttatttattttaatccctgggg

SEQ ID NO: 320867 - DNA, 201 bp, Homo sapiens; identical to SEQ ID NO: 67289

SEQ ID NO: 320868 - DNA, 201 bp, Homo sapiens
atgagaaaattgtagcagctggctgtattcctctgaccttgggtaatgtcagtctgcaagagccagagtagttccctgcactcagggtttacttatcctgtactcaggggcttgagtacagctacttctcccctgcaagccactgcaaatgtgcagacagtaggaaagagagcattgtaatttatttattttaatccctgg

SEQ ID NO: 320869 - DNA, 201 bp, Homo sapiens
tatgagaaaattgtagcagctggctgtattcctctgaccttgggtaatgtcagtctgcaagagccagagtagttccctgcactcagggtttacttatcctgtactcaggggcttgagtacagctacttctcccctgcaagccactgcaaatgtgcagacagtaggaaagagagcattgtaatttatttattttaatccctg

SEQ ID NO: 320870 - DNA, 201 bp, Homo sapiens
ctatgagaaaattgtagcagctggctgtattcctctgaccttgggtaatgtcagtctgcaagagccagagtagttccctgcactcagggtttacttatcctgtactcaggggcttgagtacagctacttctcccctgcaagccactgcaaatgtgcagacagtaggaaagagagcattgtaatttatttattttaatccct

SEQ ID NO: 320871 - DNA, 201 bp, Homo sapiens
cctatgagaaaattgtagcagctggctgtattcctctgaccttgggtaatgtcagtctgcaagagccagagtagttccctgcactcagggtttacttatcctgtactcaggggcttgagtacagctacttctcccctgcaagccactgcaaatgtgcagacagtaggaaagagagcattgtaatttatttattttaatccc

SEQ ID NO: 320872 - DNA, 201 bp, Homo sapiens
gcagccggtagcttaaattacacgaagctagttaataagtagaaaatggggccaggcatggtggcccaagcctgtaatcccagcactttgggaggccaagrtgggcagctcacctgaggtcaggagttcaagaccaatttggccaacatggcgaaaccccatctctctaaagatataaaaattagccaggtgtggtggcac

SEQ ID NO: 320873 - DNA, 201 bp, Homo sapiens
atgcttgatggaggcagagagcctgggcaagcgtgttcacagctggcgggcaccctagaggggtgcacaagacagggctctggaaaaggaggcacaagggraagagaaagctgaggagtcccaaggcttggctcagcgggtcgtctgcagggtattcatgtgaggttttactttttcttagggaacacagccctgctggcg

SEQ ID NO: 320874 - DNA, 201 bp, Homo sapiens
tgtgcagacagtaggaaagagagcattgtaatttatttattttaatccctggggagagaatatttcacgtgtgtgtgtatgtgtgtgtgtgagacagtctsactctgttacccagactggagtgcagtggtgcaatctcggcacattgcaacctccacttcctgggttcaagcaattctcctgcctcagcctcccaagtag

SEQ ID NO: 320875 - DNA, 201 bp, Homo sapiens
ttgccatgttggccaggctggtcttgaactcctgacctcaagtgatccgcccaccttggcctcccaaagtgctggggttacaggcatgagccaccgcgccyggccaagatgatgtttctaatgactttatttgcgaggagaactgcaaagagggtgtttttgtcctgctcagggtctacatcaacctatagggcagctttc

SEQ ID NO: 320876 - DNA, 201 bp, Homo sapiens
tttcaccacattggccaggctggtcttgaactcctgacctaaggtgatccgcccgcctcagcctccttaaagtgctgggattacaggcatgagccaccgcrcccagccgctttttaaaattttgatgatctgcttcctagagtattgagtatcttcctttaaactacagctcctcctcggacgctgcagtgagctgagatc

SEQ ID NO: 320877 - DNA, 201 bp, Homo sapiens
gtgggcacccccagcctgactctatttgccagaggctgaagtccagaggggttgaggggagagcacggcaggtcctggggcccctcccccgccttgatccyagggcgcccctgacctttgagccggctcgggttccggctctggcgcgtgcacactcgcctcgccgttcgggaccagccagatcgcggcggcctcgcgggc

SEQ ID NO: 320878 - DNA, 201 bp, Homo sapiens
accaacatggtgaaactccgtctctactaaaaatacaaaattagccaggtatggtggtacacacctgtaatcccagctactcgggaggctgaggcaggagratcgcttgaacctgggaggcagaggttgcagtgagccgagattgtgccattgaactccagcctggacaacagagcaaaactacatctcaaaaaaaaaaaa

SEQ ID NO: 320879 - DNA, 201 bp, Homo sapiens
tccggggacatttggcagtatctggaggcgttttgggttgttacaccttggaggaagggtgctactggcacctagtgagtacaggccgggatgctgctaarcattccattatgcaatgccgcgacacggaatcatctggccccaaattgctgaggctgagaagccctggcctaagcaaagcctgaaatctctgcagatgat

SEQ ID NO: 320880 - DNA, 201 bp, Homo sapiens
tgaggctgagaagccctggcctaagcaaagcctgaaatctctgcagatgatggctgacaggatgattcttccttctgcagattcggacctcgccgcatccrggaagaatcagtgatgcttgggacagtcaatcctagcacgggggccctccccttccagtccctcatggttgcagacctaggcgatgtgaatgtcaatctt

SEQ ID NO: 320881 - DNA, 201 bp, Homo sapiens
gtatctggaggcgttttgggttgttacaccttggaggaagggtgctactggcacctagtgagtacaggccgggatgctgctaagcattccattatgcaatrccgcgacacggaatcatctggccccaaattgctgaggctgagaagccctggcctaagcaaagcctgaaatctctgcagatgatggctgacaggatgattc

SEQ ID NO: 320882 - DNA, 201 bp, Homo sapiens
acggaatcatctggccccaaattgctgaggctgagaagccctggcctaagcaaagcctgaaatctctgcagatgatggctgacaggatgattcttccttcygcagattcggacctcgccgcatccgggaagaatcagtgatgcttgggacagtcaatcctagcacgggggccctccccttccagtccctcatggttgcaga

SEQ ID NO: 320883 - DNA, 201 bp, Homo sapiens
tttagaggatcatatggaagaatgaagcctggcagtgatttattttttaataaagctacagactccatgaaaactacaggaattcctggccttaaataatwtattacttaccaatgtagctcaagatttaaattattcaggatccaagtggcttagtttaaagcattaagattaaagaaatactaacttagccgggagtgg

SEQ ID NO: 320884 - DNA, 201 bp, Homo sapiens
cccaagcctgtaatcccagcactttgggaggccaaggtgggcagctcacctgaggtcaggagttcaagaccaatttggccaacatggcgaaaccccatctytctaaagatataaaaattagccaggtgtggtggcacacacctgtaatcccaggtactcaggaggctaaggcaggagaatcgcttagaacctaggaggcgg

SEQ ID NO: 320885 - DNA, 201 bp, Homo sapiens
ctgcctggcctatcccttgaactgggtatttccaccttggggaagccttacccacctctccaggctattacctatgctgataccattctgggcttgctttycttgaagcccttggtgcatgacattgaaacgattggtttccttgtctccatcaccacaccatgcagccctgaggagcagggactgtgtacgcattatctg

SEQ ID NO: 320886 - DNA, 201 bp, Homo sapiens
gctggcgggcaccctagaggggtgcacaagacagggctctggaaaaggaggcacaaggggaagagaaagctgaggagtcccaaggcttggctcagcgggtygtctgcagggtattcatgtgaggttttactttttcttagggaacacagccctgctggcggctaacctgctgtttgagatgctatgtgctctccccaaagt

SEQ ID NO: 320887 - DNA, 201 bp, Homo sapiens
gcctatcccttgaactgggtatttccaccttggggaagccttacccacctctccaggctattacctatgctgataccattctgggcttgctttccttgaakcccttggtgcatgacattgaaacgattggtttccttgtctccatcaccacaccatgcagccctgaggagcagggactgtgtacgcattatctgtttctct

SEQ ID NO: 320888 - DNA, 201 bp, Homo sapiens
atcaggggcataaggagcataggagtgaggaagttggtttatgggccatgggaagtctatcgctgggcgggggagacaagcagaaatcgaccaacccctcrgacggtgctggcttagaagaggggaggaggccgggcacagtggctcacacctgtaatcccagcactttgggaggctaaggtgggtggatcacctgaggtc

SEQ ID NO: 320889 - DNA, 201 bp, Homo sapiens
caaacaggaaatgccctgtaaatgctgccagacagaaacctcagtccctgtctctgcagggcttccgggtagtcctggctgaagactgctggatgaagtcrctggttcctctgatgggggaagtcaggcagcagatgggaggcaaacccatttatatcagctttgatattgacgctctggatcctgcctatgcgccaggga

SEQ ID NO: 320890 - DNA, 201 bp, Homo sapiens
tttttgcaaagacggggtcttaatgtattacccaggtggaccttgaattcctgggctcaggcgatctgcttgtcttggcctcccaaggtgtgagccactgygcctggtctatttttatttttattttttagagacgtggtcttgctgtgttgcccaggctggtctcaaacttctaggctcaagctatttatttatttattt

SEQ ID NO: 320891 - DNA, 201 bp, Homo sapiens
ctccgttgcctcaccagtggcagccagggattgagcgggggctttactaatcaagtctgaagcagggatacaaggctgagtttgcatcatcaggggcatawggagcataggagtgaggaagttggtttatgggccatgggaagtctatcgctgggcgggggagacaagcagaaatcgaccaacccctcggacggtgctggc

SEQ ID NO: 320892 - DNA, 201 bp, Homo sapiens
tctactgggtgcttttcactgtaaatgattaccactgtggacaactcagtcttgatcttgaataggctctggagatcatcaggggttgtcaaggcctgaaygtgatgggctgtgatcttgtcgaagtttcaccaccgtatgatctttctggtgagtaagcaaagagactgagatccatgggcagccggtagcttaaattac

SEQ ID NO: 320893 - DNA, 201 bp, Homo sapiens
gctgcgttatcagatgacaggatctggggggcaggtgccggggaggtgagtctggtgttttgttagagaaacctgctgttttctttggtgaagcttggctyagttttcccagtcttctcttgggcttcctctttttctggagggcttgactctcgctcatcattagagtcgctaaagtaagaaaaaaggagttttacaaaa

SEQ ID NO: 320894 - DNA, 201 bp, Homo sapiens
tttctttcaagattatctaaacattagaaacatgacatttaaaaaaactatgaaataatactgtataagcattccatatttctatatcttccttttaaacwtttttttttttgagatagagttttgcttgtcacccaggctggagtgcaatggcatgatctcggttcattgcaacctccgcctcccgagttcaatcgattc

SEQ ID NO: 320895 - DNA, 201 bp, Homo sapiens
tgcgctaccatgcccggctaattttgtattttcagtagagacggggtttctccatgttggtcaggctggtcttgaactcccaacatcaggtgacctgcccrccttggcctcccaaactgctgggattacaggcatgagccaccgtgcccagcaagctattcatttttttgagatagtgtcttactctgtcgcccaggttgg

SEQ ID NO: 320896 - DNA, 201 bp, Homo sapiens
agttttgctcttgttgtcccgcttggctcacggcaacctccgcctcctgggtccaagtgattctcctgcctcagcctcctgaatagctgggattacaggcrcgtgccaccacgcccagctaatttgttgcatttttagtagaaatagggtttcaacatgttggcaaggctggtctcgaactcctgacctcaggtgatccgc

SEQ ID NO: 320897 - DNA, 201 bp, Homo sapiens
aaaattgtagcagctggctgtattcctctgaccttgggtaatgtcagtctgcaagagccagagtagttccctgcactcagggtttacttatcctgtactcaggggcttgagtacagctacttctcccctgcaagccactgcaaatgtgcagacagtaggaaagagagcattgtaatttatttattttaatccctggggaga

SEQ ID NO: 320898 - DNA, 201 bp, Homo sapiens
gaaaattgtagcagctggctgtattcctctgaccttgggtaatgtcagtctgcaagagccagagtagttccctgcactcagggtttacttatcctgtactcaggggcttgagtacagctacttctcccctgcaagccactgcaaatgtgcagacagtaggaaagagagcattgtaatttatttattttaatccctggggag

SEQ ID NO: 320899 - DNA, 201 bp, Homo sapiens
tgctagggccccacagggagggttggcctctgagctgccctgttgtcatcaggcatggcccagtggggctgctgcacgtggatgcgcacacggacacgacygacaaggccctaggagagaagctctaccacggggcgcccttccgccggtgtgtggatgagggtctcctggactgtaagcgtgtggtgcagattggcatcc

SEQ ID NO: 320900 - DNA, 201 bp, Homo sapiens
ccaatcccatcactaccttcatttcctagtgcaaatggaaggtgcagctgtttgaaggtgctttttaaaagatcaaaagatgacttgaagagataaaaatrtttaaaaatgaacaaatctggcatggtggctcatattgataatcccagcactttgggaggccaaggtggaaggactgcttgaggccaggagtttgggacc

SEQ ID NO: 320901 - DNA, 201 bp, Homo sapiens
cagggtttacttatcctgtactcaggggcttgagtacagctacttctcccctgcaagccactgcaaatgtgcagacagtaggaaagagagcattgtaattyatttattttaatccctggggagagaatatttcacgtgtgtgtgtatgtgtgtgtgtgagacagtctcactctgttacccagactggagtgcagtggtgca

SEQ ID NO: 320902 - DNA, 201 bp, Homo sapiens
tggatagtggctaccatatgggccagtgcagatagaacattgtcatcatcatagaaggttctattgaacagagctattctaggcattttcctagaatactstgaaaaggcaattcctagagtagctcttaacttgtctaatttcctcttttatttatttatttttgagacacggtctcactctgtcacccaggctggagtg

SEQ ID NO: 320903 - DNA, 201 bp, Homo sapiens
tgatccgccgcctcagcttcccaaaatgctgggattacaggcgtgagccaccacgcccggcctaaattcaaattaattaaaataaaatattcagtttcttagtcatattagctacatgtatgtcacatgtgtgtcacatgtggatagtggctaccatatgggccagtgcagatagaacattgtcatcatcatagaaggttc

SEQ ID NO: 320904 - DNA, 201 bp, Homo sapiens
ctaagcaaagcctgaaatctctgcagatgatggctgacaggatgattcttccttctgcagattcggacctcgccgcatccgggaagaatcagtgatgcttsggacagtcaatcctagcacgggggccctccccttccagtccctcatggttgcagacctaggcgatgtgaatgtcaatctttacaaccttcaggacagctg

SEQ ID NO: 320905 - DNA, 201 bp, Homo sapiens
tagtagaaatagggtttcaacatgttggcaaggctggtctcgaactcctgacctcaggtgatccgccgcctcagcttcccaaaatgctgggattacaggcrtgagccaccacgcccggcctaaattcaaattaattaaaataaaatattcagtttcttagtcatattagctacatgtatgtcacatgtgtgtcacatgtgg

SEQ ID NO: 320906 - DNA, 201 bp, Homo sapiens
gtcaatcctagcacgggggccctccccttccagtccctcatggttgcagacctaggcgatgtgaatgtcaatctttacaaccttcaggacagctgccggcraattcaagaggcctatgagaaaattgtagcagctggctgtattcctctgaccttgggtaatgtcagtctgcaagagccagagtagttccctgcactcagg

SEQ ID NO: 320907 - DNA, 201 bp, Homo sapiens
tttctcttgttcacaaatacttaaaatgacagggatcttttcctaaatatccaaattcatttttgccaagttagagagcctagcctgcatggcatagtggsaggagtgtggtttcccgatggcatggtttgaagtctcagctgcacttctccctagcaatgttgctgtataccgtgcttgatgcttcacaccctcacctgt

SEQ ID NO: 320908 - DNA, 201 bp, Homo sapiens
ctaatttgttgcatttttagtagaaatagggtttcaacatgttggcaaggctggtctcgaactcctgacctcaggtgatccgccgcctcagcttcccaaartgctgggattacaggcgtgagccaccacgcccggcctaaattcaaattaattaaaataaaatattcagtttcttagtcatattagctacatgtatgtcac

SEQ ID NO: 320909 - DNA, 201 bp, Homo sapiens
acgcccagctaatttgttgcatttttagtagaaatagggtttcaacatgttggcaaggctggtctcgaactcctgacctcaggtgatccgccgcctcagcktcccaaaatgctgggattacaggcgtgagccaccacgcccggcctaaattcaaattaattaaaataaaatattcagtttcttagtcatattagctacatg

SEQ ID NO: 320910 - DNA, 201 bp, Homo sapiens
cgcgtgccaccacgcccagctaatttgttgcatttttagtagaaatagggtttcaacatgttggcaaggctggtctcgaactcctgacctcaggtgatccrccgcctcagcttcccaaaatgctgggattacaggcgtgagccaccacgcccggcctaaattcaaattaattaaaataaaatattcagtttcttagtcata

SEQ ID NO: 320911 - DNA, 201 bp, Homo sapiens
cacagtcctcctattgagggtcccccacttcccagggctcagcggtgaaggatccaggggtctcacctgcacccacaaagcagccgttctaacacttcacmctcccctgagcccatgggcgttttcttaggctttgggaatagaaaaccctactctggcttatttcatattctaccttatctgacatccacaccccgagac

SEQ ID NO: 320912 - DNA, 201 bp, Homo sapiens
ttttgaatttacagtgaaaactaataccatgagaaattaaatgaaaaaataaaggctattgcattttgtattagaaatctctattagatttaggaaaatgatgtctttacttttattcagcttaaataaaatatttgagacattgaatatttttaaaagtattattctactaggtaaagtcagacttaatgtttacttttg

SEQ ID NO: 320913 - DNA, 201 bp, Homo sapiens
gagaactaagtgaattttaatgacattcctcccattatatgtaatatgagtggatgggaatctcttgtaatttatagtaatgaccctcaggacacacttargtttaggcaatagtagattattatcatgcccatatgaaatagttttcagaatctcagggaaaagatgaaggggataccccgaaagcaactgactacaagt

SEQ ID NO: 320914 - DNA, 201 bp, Homo sapiens
ttcccattaaatgaggaatcacattcaaactctagaaagtacattttctagaacttatgaatctgaaagattctgcacattttccctttgggctactgtayggctaatggccaattttatggaaaggaaatcaacaggcaaattggatatgttcacattatttcctcatttttctcacttgattttctattacaagtaaac

SEQ ID NO: 320915 - DNA, 201 bp, Homo sapiens
cagttcataaagacttttgtagcctgtttaatttgcaatcgacatttctgggataagaggaaccataaccagagagcataaagactaacagtggtgagacygcagaagtcaaagtctagtttattccttctattcattattttaacaaatcaacacatccttttttcagtggctgctctttgccagcctctgttctcagtg

SEQ ID NO: 320916 - DNA, 201 bp, Homo sapiens
gttgtttttctaatcaagataattccttcctaatatgttcccttttttatacttatgactttctcttgttttagggagattttcctgtgcacacctataarcttcttttctccctccacttttgtattctgtcaactctcacccaccactgaaaccttcctagaaggaagtgaacatctgcagcccataagatctgcattc

SEQ ID NO: 320917 - DNA, 201 bp, Homo sapiens
ttttacatcctatgtattgattattatttttgttattgttgttttggtcttaccctcaaccaaattctaattccttgagagcatgaaacatgacttatacyatattggtattttcatatgatatctagtgcaatgctagacatatatcatatgtaaaaattgtattgacttttttactttctgtaaattgggcactctttc

SEQ ID NO: 320918 - DNA, 201 bp, Homo sapiens
cagcatcttccttatagctaggtctgaagaagaaaaggaacttgcaaaatgcttctgttttctgcattgggcctggcactgagtaaaatgcgagagtgaarggtacatcaatttcgtattccccaaaagcgtcgagaggcacagagagaggtctgggttttcaaggaagggtgaaattattcccggtcacaatggatttga

SEQ ID NO: 320919 - DNA, 201 bp, Homo sapiens
ttaaaatttaattgaccattttaggaatcagcttgctaaatttaaaaagatgacatacttatatttataatatgcttcctagaatggttaccttcaaagtrggtataatctgtataaaataaccccagcattaatttttcacaaattaaaaagcatgctaggcaattaaagcagaataatagatgtaacattacataaaag

SEQ ID NO: 320920 - DNA, 201 bp, Homo sapiens
atgagcatggaatgttcttccatttgtttgtatcctcttttatttcattgagcagtggtttgtagttctccttgaagaggtccttcacatcccttgtaagytggattcctaggtattttattctctttgaagcaattgtgaatgggagttcactcgtgatttggctctctgtctgttattggtgtataagaatgcttgtga

SEQ ID NO: 320921 - DNA, 201 bp, Homo sapiens
tgctgtgcagaagctctttagtttaattagatcccatttgtcaattttgtcttttattgccattgctttttgtgttttggacatgaagtccttgctcatgyctatgtcgtgaatggtattgcctaggttttcgtctagggtttttatggttttaggtctaacatgtaagtctttaatccatcttgaattaatttttgtata

SEQ ID NO: 320922 - DNA, 201 bp, Homo sapiens
aaaaagatctttgtacatttgctgctacgtgctagtgcttttatttctgtggaacagattcccaaacgtgaggttgctattttttttttttttttttttttgagatggagtctcactctgtcactgggctggagtgcagtggcccgatctccgctaactgcaacctcctcctcctgggttcaagcgattcccctgcctcag

SEQ ID NO: 320923 - DNA, 201 bp, Homo sapiens
tctaaactcgatagatctatgatacaccatattctctccttccttcatgcttttgtatgtgttgtttcatctacatacctttcgtttgttttttttttttkttttttttttttttaagacggagtcttgctctgtctcccaggctggagtgcagtggtgcatctcggctcactgcaagctctgcctcccgagttcatgcca

SEQ ID NO: 320924 - DNA, 201 bp, Homo sapiens
ccttgggcagtatggccattttcaccatattgattcttcctacccgtgagcatggaatgttcttccatttgtttgtatcctcttttatttcattcagcagyggtttgtagttccttcacatcccttgtaagttggattcctaggtattttattctctttgaagcaattgtgaatgggcatgttaatggtaattgtaatacc

SEQ ID NO: 320925 - DNA, 201 bp, Homo sapiens
ggttactgtagccttgtagtatagtttgaagtcaggtagtgtgatgcctccagctttgttcttttggcttaggatggacttggcaatgcaggctctttttkggttccatatgaactttgaagtagtttttttccaattctgtgaagaaagtcattggtagcttgatggggatggcattgaatctataaattaccttgggca

SEQ ID NO: 320926 - DNA, 201 bp, Homo sapiens
gagatggtatctcattgtggttttgatttgcatttctctgatggccagtgatgatgagcattttttcatgtgtcttttcgctgcataaatgtcttcttttsagaagtgtctgttcatatcctttgccccctttttgatggggttgtttgtttttttcttgtaaatttgtttgagttcattgtagattctggatattagccc

SEQ ID NO: 320927 - DNA, 201 bp, Homo sapiens
ccagactgttcaggttttataccactttctgtgttctctgttctccatgttaggttaaagtgtcatatgttcaatacagcctttcctttgcattttctgcracatccaacaccatgccttgtatacagtgatgctcattaaatgcttattaaataggtgagaacttcctggaatgttaaggttgatctttctaccagcatt

SEQ ID NO: 320928 - DNA, 201 bp, Homo sapiens
aaagatcaataatcaatttatatgaatcatgagatgaagacttataaaagcttaaaaatatgttataaaaagagttgtgatatgttttctagcccaaaaayagcaggattgctacaataccagctgtaacgtgggagccactttgccttacgttgttattttatatccattgcttcttcccccaatttattgaagactttt

SEQ ID NO: 320929 - DNA, 201 bp, Homo sapiens
atgcccagcccttcccaccctcttctcacctttcccactatcaccgttccatttgcacctcactgcttctctccacaccctattagcactattccatttcyggattaattggaggaaaggtgttaacaaaatttcagctttcttctcagtaataatctaggattttgataacactgatatttctcttgctttcctacccct

SEQ ID NO: 320930 - DNA, 201 bp, Homo sapiens
acagtgttatataggaatggtatgggtgccttgtccttgtcttagaaggggaagattcagtttttcactattaagcataatgtgtactgtggggtttggtrtaggtaccttttatcaggttgagaacattctcttctatttctaggttacttaattttttcttactatgaatagacatgaattttgtcaaatagttttttc

SEQ ID NO: 320931 - DNA, 201 bp, Homo sapiens
atattgtgaccttgctaaactgacctgtcagttctaggaagattttggtaaattccttgggattttttatatagacaatcatgtcatctgcaaatagaacrgttttatgtcttttgctccttttctttgtctcattgcactgactaggactcttaatacagtgttatataggaatggtatgggtgccttgtccttgtctta

SEQ ID NO: 320932 - DNA, 201 bp, Homo sapiens
tatttattttagagccaaggtctctctctgctgcccaggctggagtacagtggcaccatcacggctcactgcagcctcaaccccccgggctcaaatgattmtctcacctcagcctccctagtagctgagactacaagtgtgggtcaccacatccagctactttttgtatgttttgtagagacagggttttaccatgttgcc

SEQ ID NO: 320933 - DNA, 201 bp, Homo sapiens
tgaactcctgaactcaggcaatccacccacctcagcctcccaaagtgctgggattgcagtcatgaactacctcatctggccccagaagccattttttaggkattcactcagaagatatagatatagatatagcttttcctaatttttttttacttaatttttcacttaatattattagccaacctatgatttctgtaataa

SEQ ID NO: 320934 - DNA, 201 bp, Homo sapiens
aaacggtagtggattgacatttgtcatttccaggcaggagctttaacagccaaggcacagctaaccatactcctttgccctgccttttatgtatttatttyaagtatttattgagtgcctattatggcagcatgtcaaggtggagcctccctcagactggggcagtgagcagaactccctgtggacatggagtgcgtgagt

SEQ ID NO: 320935 - DNA, 201 bp, Homo sapiens
atgcttgtacagcctgcagaacatcagccaaatctcttttctttataaattacccagtctcaggtattcctttgtggccacacaaaatggactaacacacygcccatgttctgttctcaacatgatccctgggactgttgtgatatcctcttggttcctatccccaccccagttttctcctcttagaccacctcttaacca

SEQ ID NO: 320936 - DNA, 201 bp, Homo sapiens
tcattctttactgcatcgtgcagtctgttagctttgtgagtttcctgactctctctgaatatcttggtcgccacctgtgcctgactccagtggtctccttrcccatgccaccactctacttatttggttgtctctgatatgtttgaaaagtttgggcattaaaatcaggggactttttttgttcaaaatatttaaacatca

SEQ ID NO: 320937 - DNA, 201 bp, Homo sapiens
gcatcaaatattaagtgacaacaaaagaataacatcatagaaaataaaaggctattcctgtgaaagaaaaattaatgatataaaggatatatactatctcrttcgtgtgtgacaaaataagcatggggagagatacataaaatattatttgctatcttttagtgaatatatggacatgatctttatttctttatactgttt

SEQ ID NO: 320938 - DNA, 201 bp, Homo sapiens
gtcagcaggttcctgtttctctttgataccatatcgcattttgtaagtactcatggacttccacatcaagctctataacctcagcacaaaaaaaaaaaaaragagagaacagtatgtctaaaatgcagtgggtaggggggaaagggtttagacagatttcaagagacaggaagcggcttgatcatgcactccaggtgtttt

SEQ ID NO: 320939 - DNA, 201 bp, Homo sapiens
atctcctgttacaattcttcatataaatgcttcaggattctgatcccacgtatttagaatttccattgaaaactctgctctgatctgagcatgattctgaytcccagcatgttgaaactttgctcaactttaatttttcagtcagaattgtgtaacctgaaccaattgagatgtcaatagtatttgctattgtttctgctg

SEQ ID NO: 320940 - DNA, 201 bp, Homo sapiens
tctattaggtctgcttggtgcagagctgaattcaattcctgggtatccttgttaactttctatctcgttgatctgtctaatgttgacagtggggtgttaamgtctcccattattattgtgtaggagtctaagtctctttgtaggtcactcaggactggctttatgaatctgggtgctcctgtattgggtgcatatatattt

SEQ ID NO: 320941 - DNA, 201 bp, Homo sapiens
ttctctgatggtagtttgtatttctgtgggatcgatggtgatatcccctttatcattttttattgcgtctatttgattcttctcttgctttattagtcttkctagcagtctatcaattttgttgatcctttcaaaaaaccagctcctggattcattaattttttgaagggttttttgtgtctctatttccttcagttctgc

SEQ ID NO: 320942 - DNA, 201 bp, Homo sapiens
caaatttccctatccagattagtttttcccttcccatctgtaacattcttgtctcctttttagacagtagcctctaagtctttctaaccgtatcttccctstttgttttctactatgtttgtttctttctttattattttctctttctgttagcatgtaaactctagaagcagttcatcatggcgattaacattctgggct

SEQ ID NO: 320943 - DNA, 201 bp, Homo sapiens
tctagggtttttatggttttaggtctaatgtttaagtctttattccatcttgaattaatttttgtataaggtgtaaggaagggatccagtttcagctttcyacatatggctagccagttttcccagcaccatttattaaatagggaatctttccccattgcttgtttttgtcaggtttgtcaaagatcagatagttgtaga

SEQ ID NO: 320944 - DNA, 201 bp, Homo sapiens
tccacctcttaaaaacaaaatgcaatgacaacgggacaccataatttttaaaacagtttttagtataaatgagagctcctttatgaatagttggagtgacrttgtcggcaactgccttaagagtacaatttgagggacaaaacattgctgcttcttaaaatatctatctatggaggatgctaaaatgtatagcgaatgtct

SEQ ID NO: 320945 - DNA, 201 bp, Homo sapiens
tgcattatctcatttcaccaacccaagggactttttatcccctccttagagtggaaactcatgctcagagagtataagttatggccctaataacttaataktaagtcagtaggattgtgagggtgacaaatagaatgcgaacccaagcagtattgctccagaggctgtactcctaattaataataaattggcatgctttgg

SEQ ID NO: 320946 - DNA, 201 bp, Homo sapiens
aattttctcccattttgtaggttgcctgttcactctgatggtagtttcttttgctgtgcagaagctctttagtttaattagatcccatttgtcaattttgkcttttgttgccattgcttttggtgttttagacatgaagtccttgcccatgcctatgtcctgaatggtaatgcctaggttttcttctagggtttttatggt

SEQ ID NO: 320947 - DNA, 201 bp, Homo sapiens
caaatggtatttctagttctagatccttgaggaatcgccacactgtcttccacagtggttgaactagtttacagtcccaccaacagtgtaaaagtgttccyatttctccacatcctctccagcacctgctgtttcgtgactttttaatgatcaccattctaactggtgtgagatggtatctcattgtggttttgatttgca

SEQ ID NO: 320948 - DNA, 201 bp, Homo sapiens
caatagtatttgctattgtttctgctgttaatcattgtccctcttcaattagggcacaaataagataaaaattttccttgcaaattgatatgatgatctgyactgcaggcttcacattcaacattgtctcatcccttcttaaaacgagttatccattggtaaactgctgatctctttggtacattgtctcaataaactttt

SEQ ID NO: 320949 - DNA, 201 bp, Homo sapiens
cgacttgaacacaattatttttcaactgatgtgggttttttctgtaacataaaatatacacttcaatttatttatataaatataaaactatctttttctgkaaatcttataaaaaccactttaaagtgtcgttcccatttagcaatgcagcatgattatctgggtacaatctaaacatggagagagcactgttctcagaca

SEQ ID NO: 320950 - DNA, 201 bp, Homo sapiens
atacccaccctatggaattatgggaattgaatgacataaggtattgaaagcatttagcatcactcttgacacatactaagatccttataaaaattgactgttattattaacattatatggaacaatgaaaaatgtatctttttggcctcagtaccaagaaaacttgtatttctcctaagccattggttggctggtgattat

SEQ ID NO: 320951 - DNA, 201 bp, Homo sapiens
caaggaatttaaaatatactgaactaaaatttagaatccagtggtaaaaatggacaagtacattgtatctggtggggtggggggagaagatattggttagragatacaaaatttcgtgaagaggaataagttcaagctatctattgtatgacatgatgactatagttcttaataatgcatttttttaaaaggtgggcaagt

SEQ ID NO: 320952 - DNA, 201 bp, Homo sapiens
aatacccaccctatggaattatgggaattgaatgacataaggtattgaaagcatttagcatcactcttgacacatactaagatccttataaaaattgactgttattattaacattatatggaacaatgaaaaatgtatctttttggcctcagtaccaagaaaacttgtatttctcctaagccattggttggctggtgatta

SEQ ID NO: 320953 - DNA, 201 bp, Homo sapiens
acatgccatgaaaatgttgaccattctacattcaaactcaaaagattttgtgtattacaatttcctcctggcaaggcagaatgtcctgatgtatctgcctygctttccctagtagaggtacatttcgatgcttaaagattttaacttggagaatctttaatcattcctccactgatctctttttgggacatatgagtaaag

SEQ ID NO: 320954 - DNA, 201 bp, Homo sapiens
gatattatgcacacttaggtaatcattcggcttaccagagaagtggtaagactggggaaaacattggaagtaattcaaaaatagccatagcataatacagkggctcaaatccttgctgtttcccctctaatttttatgtgacttaagtctgtgtttcattatcttttttattgttgttttttgagatggagttttgttctt

SEQ ID NO: 320955 - DNA, 201 bp, Homo sapiens
cggagcttgcagtgagccgagatcgcgccactgcactcactccagcctgggcgacagagtgagactccatctcaccaaaaaaagaaaaaagaaaaaagagytcaggggagcctgtctgaagttttatcaagaagagagtctctgttaggaatcactctcagtcttttcccagactattgagtatcattttctgccaagaca

SEQ ID NO: 320956 - DNA, 201 bp, Homo sapiens
ctagtagttttattgttttggattttatatggaaatctttaattcatttttgtatatggtgtgatgtatgaatccaatttcatgcttctgcatgaaatctctattttgcaccattgatctgtttgtctatttctttgccaacactacactacctcaataactatagctttatagtaagttttagaattgagcagtattttt

SEQ ID NO: 320957 - DNA, 201 bp, Homo sapiens
ctcctgagtgatgggattggcaccacttagcaaaatgcttaggtttctcactgtgatccctatgactcaggtggtagaagcaacgtgtttctttctctttytttaggaaaaatacaaaagctaaaagtccctagaaggttctctccctgggcaaagttaagaagcttaactcccagtgctagtctacaattggaatgtgag

SEQ ID NO: 320958 - DNA, 201 bp, Homo sapiens
aacacagcatgctgagctgctgtgtaaggactaagcgatgttccaaggacacagaagaagagcgcctaacctggggcggtttcccaataagtctgtctaamgttgggacctctggcccagagtagtgtatcaatgctaagggttctgtgaaccgttgttgaggaaggaggggtttcttttcccaggctgagaagaaccctg

SEQ ID NO: 320959 - DNA, 201 bp, Homo sapiens
ctgagagtttcagagacctgggaagatgggactaccagctacagagaggaacaatcttctccagggcctcctctctgctgagagcagtagatgtctgcacraccagtagcagagaggagctaccctctccagagcctcctctctgctgagagctgaacactccacagatgaccagcctacagagaagagctatcaacagtg

SEQ ID NO: 320960 - DNA, 201 bp, Homo sapiens
gctcctgagtgatgggattggcaccacttagcaaaatgcttaggtttctcactgtgatccctatgactcaggtggtagaagcaacgtgtttctttctcttkttttaggaaaaatacaaaagctaaaagtccctagaaggttctctccctgggcaaagttaagaagcttaactcccagtgctagtctacaattggaatgtga

SEQ ID NO: 320961 - DNA, 201 bp, Homo sapiens
accatggtttcttgatggagatgacaaattttatagtatgattatttcttacattttaaaaaaaaattaaaggattgtcctgctcaaaattatgtattccwctgattgaaaaagtatttgtttctacttgagaagcatttaccaaaaaagaaaagtatttgttaagtgattactatatggtaggtgccatgctaggcttta

SEQ ID NO: 320962 - DNA, 201 bp, Homo sapiens
tgaacccaggaggcagagcttgcagtgagctgagattgtgccactgcactccagcctgggcaacagagcaagactccgtctcaaaaaaaaaaaaaaaaaaatccttaactgttaaataactaaggtaatcttgctctctctatatattcttttctatgtacaggtatgcatgtattttttacaaaagtatgaaatctgcat

SEQ ID NO: 320963 - DNA, 201 bp, Homo sapiens
ccatgaaatcctcgcctaagacaatatctagaagggtttttccaatattctaggatttttagagttttaggtctcagatctaagtccttaatccatcttgrgttgatttttgtataaagtgagagatgaggatccagtttcattcttctacatgtggctagccaatgatcccagcaccactttttgcaaaggatatccttt

SEQ ID NO: 320964 - DNA, 201 bp, Homo sapiens
cccctacttaaatttttaacagacagcttggatagttttcaggaacaaatttcaaaagtagaaatgtaaaaccaaaaagaaaataaacattgggaacataygccatcactgaaagaaggagggcactgtcttacacctagccagggtgacactgtttaaaactacagcttccaaagacatttatgtccacctgcctacatt

SEQ ID NO: 320965 - DNA, 201 bp, Homo sapiens
aggagaagaaacaggaagaagagcagcaggagaaggaaaggaggcaaggaaagaagggaaaaagaagcggggggagaagggaggagaggatacagaggcartttttagggaagcaggaagcattctgtgagcacataggaagatgatgagtttccaggggcttgcgatcctctccttgagatcctagaatcctaaaatttc

SEQ ID NO: 320966 - DNA, 201 bp, Homo sapiens
tgtcacaccactgtactccagcctgggcaaaacagcgagactttgtctcgaaagatagatagatagatagatagatagatagatagatagatagatagatdttcattaaatagacccataatcgaaaatggatccaactctctcattttctgtcaaataaaaatggggcccagaatctttctcttaggtctttggtgaggt

SEQ ID NO: 320967 - DNA, 201 bp, Homo sapiens
gggtaagaaaaataaaggaaaggagaagatggaggagaagaaacaggaagaagagcagcaggagaaggaaaggaggcaaggaaagaagggaaaaagaagcrgggggagaagggaggagaggatacagaggcagtttttagggaagcaggaagcattctgtgagcacataggaagatgatgagtttccaggggcttgcgatc

SEQ ID NO: 320968 - DNA, 201 bp, Homo sapiens
gagtacatttttgagatatattaaaaattctcatgtgaaagctttctttttcctagggaatgttctgctaacaaaatacagaaactgatttcaatccattkctttctctttgagttctggaaaaggttctttcaaatttctgtgttgttcttgctatcagcctttttgaatggcacaaagactgccttcaatgtatctcct

SEQ ID NO: 320969 - DNA, 201 bp, Homo sapiens
agatattatttatagtgttgtattttagttgcaaaagagtacatttttgagatatattaaaaattctcatgtgaaagctttctttttcctagggaatgttytgctaacaaaatacagaaactgatttcaatccatttctttctctttgagttctggaaaaggttctttcaaatttctgtgttgttcttgctatcagccttt

SEQ ID NO: 320970 - DNA, 201 bp, Homo sapiens
catgggggcagattcctcatgaatggcttggtgccctgcccatggtaatgagttcttgctctgatagttcaaaatagttcagatagtttctgaatctgccstggcacatttgtagggaacaggaaccttgtgttagttgtctaaaggagcctggcatctcctccactctctcttgctcccactctcaccaagtagcatgcc

SEQ ID NO: 320971 - DNA, 201 bp, Homo sapiens
aaatattatgtggaagatccacagagcttattttcttcagcatttctcctcttcctttgtccaaagaagcatattccatttgaggagatattatttatagkgttgtattttagttgcaaaagagtacatttttgagatatattaaaaattctcatgtgaaagctttctttttcctagggaatgttctgctaacaaaataca

SEQ ID NO: 320972 - DNA, 201 bp, Homo sapiens
ctgcacttgggaggcagaggcaggggaattgcataagcccaggggtctaaaactagcctaagcaacacagtgagaccctgtctttacaaaaaaaaaaaaaagggtttaaaaaatcatccaggctgatggcacatgcctgtagtcccagctactgaggagactgacggggaggagcacttgagcccaggggtttgaggctac

SEQ ID NO: 320973 - DNA, 201 bp, Homo sapiens
attctgccttttttttttgtatggagccagcagtgacagtgtttaataggcacatatgaaactgatactttaaaaaaaactgttgagatataatttatatrccataaaatctagctgcttaagatttacaattcaatggttttagtatatttacaaaactataaaaattgatatttgatattttaaaactaatgatataaa

SEQ ID NO: 320974 - DNA, 201 bp, Homo sapiens
gcatttgtaaaaggaagtagttggagccacacacagtggctcatgtcctggagtttgagaccagcctgggcaatataataagaccccatttccacacacamaaaaaaagtttaattactagcctgggcaacatggcaaaacctcatctctaccaaaaaatacaaaatgtagccaggcatggtggtgcacatgtgtggtccc

SEQ ID NO: 320975 - DNA, 201 bp, Homo sapiens
ttcttttatttctagtcagcacatgataaattctaatatttggatctcaatttcttaactcttaaatttcttaacttcttaattagttcttaatttctctraggagttttgggtaattctgccttttttttttgtatggagccagcagtgacagtgtttaataggcacatatgaaactgatactttaaaaaaaactgttga

SEQ ID NO: 320976 - DNA, 201 bp, Homo sapiens
tgtaggtcagaagaaaggaaatcagtgcaataagcaatttagggctatccagactgaactaatcactgcgtgcattctaatggcaatgttatggggcctgrgggcttagttttagactaaaatgatgattaccttttgttatgttgctaaaacgttattttttatagatcgtgataattattggacatgcgaactccaact

SEQ ID NO: 320977 - DNA, 201 bp, Homo sapiens
ttttcttccctgccttttctgcctcttttatctcattgttagcaccacaataaagaaaccctaaaaagctgtacaggaaaataatttgaacatgaacttgyactcttagaaacaactgcatttgcagctgtcccccacctcatattcaaaagtacccacacttatctggtctctttttctgtcatctaaatgagggaaaaa

SEQ ID NO: 320978 - DNA, 201 bp, Homo sapiens
tctttcatcaggttgccacatacaaggtgagcttcccgcttgtcagcttcgatccaaaccattgcaatatgcaggcaagatgaagaattgtttgtacccascaattgaggcttatggtgggatttaagtctctgaggaacaacagtgatcggagtgagactactatgtcttcattaatctcacaagtcatcctcctctgtt

SEQ ID NO: 320979 - DNA, 201 bp, Homo sapiens
gttctaagaaagaaattttaaactcaaataagagtaccaaccagtatcctggctccacaggaggagagaagcgaagctctatacctggcccgcatgtgaayacaagcagccagttaccaaaagggggagcccagaagcacacaatagccaggttctgttggatttatcacaaagttggtaatccactaataatttctttta

SEQ ID NO: 320980 - DNA, 201 bp, Homo sapiens
ctgtccccccaagtagtctcatacatccttactttcctcaccctccttatattaacggtaaactcaattatgacagtctgacttctgacattttaaaaccrttcggtatatcaggtgctgtattacagttttctttacatttctacattaggttcattgaacttcttgcatatgtggttataagacttttattaaatttat

SEQ ID NO: 320981 - DNA, 201 bp, Homo sapiens
tggaagaatggggccacaagacaagaaacacgataacctgtagaagctggaatgaggaaaaaaaacactagattccccctccagaacctccagaaaggaayatggccccagtgatactttgattttagcctagtaagaccgtgtcagatttctgacctacagagctataagttatatctgtattaattaagccaatcaggt

SEQ ID NO: 320982 - DNA, 201 bp, Homo sapiens
atttgctattgtttctgctgttaatcattgtccctcttcaattagggcacaaataagataaaaattttccttgcaaattgatatgatgatctgcactgcargcttcacattcaacattgtctcatcccttcttaaaacgagttatccattggtaaactgctgatctctttggtacattgtctcaataaacttttagtagat

SEQ ID NO: 320983 - DNA, 201 bp, Homo sapiens
aaccagtcctatttgaccagatggtaccaaagagtaacaataacaataacaataataatagttgacatttatggtattgatatgtgcttggctatgtgctraacatgttaagtgatagtcccatttatttctcacaacaatgctataaagtaggaactattgtttttattgtcgcatcatttgcagatgaaaaaactgagc

SEQ ID NO: 320984 - DNA, 201 bp, Homo sapiens
cttgtctcttccttctgttgtacactcttctagttgttatgaaaagcagaacagaaaacctatccctttcgtttcacctcatcttacttctttttctcccmcattattcttgcctcttgttccagtccttcagctttttcctatcatacctcattttaaaaattccaatgtgtggctaactgctgccattaaccatgtttt

SEQ ID NO: 320985 - DNA, 201 bp, Homo sapiens
atcaaatacaattttatttaattccttcacagtagcctttagctaccatggtttcttgatggagatgacaaattttatagtatgattatttcttacatttwaaaaaaaaattaaaggattgtcctgctcaaaattatgtattcctctgattgaaaaagtatttgtttctacttgagaagcatttaccaaaaaagaaaagta

SEQ ID NO: 320986 - DNA, 201 bp, Homo sapiens
atttcattttgtttggttttttatcttagtcataatcaacattgttaatgggtcttttatgatgactttcctttcactgtgagtctctggcaacagtgctstatatgggtactctgctggggactgggcattacaaccctcagtaccatgtgctatccttaacttgctgccaaaatacccatggaaattgttgtactagag

SEQ ID NO: 320987 - DNA, 201 bp, Homo sapiens
tttcaccatattggccaggctggtctcgaactccggaccttgtgatccacccccttcagcctcccaaagtgctgggattacaggcgtgagccaacgcgccyagcctaacttaagatttctactcagctttcttgactgtacatggagcaacgatattgcctacctagcagggttactgtgaggagtatgtaaagcacttag

SEQ ID NO: 320988 - DNA, 201 bp, Homo sapiens
ctaggattttgataacactgatatttctcttgctttcctacccctccctatcctccttctttctctcccttcttctttccctctctccattcctccttctmtagcagaggctcactcagaactccagaaagtcttatattaaaaatgtttaaaatcccctgtcatagagaaatttagtttctgaaaagatcaataatcaat

SEQ ID NO: 320989 - DNA, 201 bp, Homo sapiens
ttgcagtgagccgagatcatgccactgccctccagcctgggtaacatagtgagactctgtcaaaaagaaaaaaaaaaagaaagaaagaaagaaagaaaaaagaaaagatattctggagagctcccttaccccctccactgtgtgaggacccagcaagaagacaactgtctatgaacgaggaactgggcctttaccaaacac

SEQ ID NO: 320990 - DNA, 201 bp, Homo sapiens
gttgcagtgagccgagatcatgccactgccctccagcctgggtaacatagtgagactctgtcaaaaagaaaaaaaaaaagaaagaaagaaagaaagaaaaaagaaaagatattctggagagctcccttaccccctccactgtgtgaggacccagcaagaagacaactgtctatgaacgaggaactgggcctttaccaaaca

SEQ ID NO: 320991 - DNA, 201 bp, Homo sapiens
gcagtatcttttttaaaagagtgggtgaattttattctctgtgtacaatagtaggagtgaaatatggtactttcttattccagctaacgctattatttaartgtatcatgaatcttttgagcaaataatgcataggattattaaagctattattaaatacacatgttaattgttataattatgatgttatattgtggagtt

SEQ ID NO: 320992 - DNA, 201 bp, Homo sapiens
ggttgcagtgagccgagatcatgccactgccctccagcctgggtaacatagtgagactctgtcaaaaagaaaaaaaaaaagaaagaaagaaagaaagaaaaaagaaaagatattctggagagctcccttaccccctccactgtgtgaggacccagcaagaagacaactgtctatgaacgaggaactgggcctttaccaaac

SEQ ID NO: 320993 - DNA, 201 bp, Homo sapiens
gctcttgtttctaggctatgcacttaactgtcaatttttcaggagagggataagacatcctgctagatgtaaccttttctactgcagcggctactacattmataaggtctcttggtctagcgagcgctcataggaaggcattggctgtaacctgatggaccacatctccgcccaaaagatcgaaatacatggttcacatta

SEQ ID NO: 320994 - DNA, 201 bp, Homo sapiens
cccagtatgactttgaatcatagcacttaactggtgtgctatacctaatgggagatgatgtccaaatgtggggagtggtattaactctgaaatcactgtgktttttttcctctgagatatgtggttgaagcaagtcgtttctcaaaaatagccactgcattctctgtaactgtcaaccacaatcattttccagatacacat

SEQ ID NO: 320995 - DNA, 201 bp, Homo sapiens
aaaaggttgcagtgagccgagatcatgccactgccctccagcctgggtaacatagtgagactctgtcaaaaagaaaaaaaaaaagaaagaaagaaagaaagaaaaaagaaaagatattctggagagctcccttaccccctccactgtgtgaggacccagcaagaagacaactgtctatgaacgaggaactgggcctttacc

SEQ ID NO: 320996 - DNA, 201 bp, Homo sapiens
gagtttctcctccacctctcaatgcaaacactatgcggagagcagtctgcttccctgcgctgtgcctgctccttaatcttcacgctgcaggtaaggggttrccaggcttagagccggagctgtgcatgagatgggaaactgcacatgcttaaggactctaggaaaagcttgccttgcgaagaaagcctttctaaaaaggta

SEQ ID NO: 320997 - DNA, 201 bp, Homo sapiens
tatgtagttgtaattaccatatacatatatttgcattatgtttattttacctaatattatagacctgctttattcattcatccaaaagatatttattgagyttctgccataagccaagcattatttaggctctgtggatcatcagtaagcaaaacagtcaaaatccttgcttttttgaagcataccttctaataggaacag

SEQ ID NO: 320998 - DNA, 201 bp, Homo sapiens
tgcttgaacctggaagaaaaaggttgcagtgagccgagatcatgccactgccctccagcctgggtaacatagtgagactctgtcaaaaagaaaaaaaaaaagaaagaaagaaagaaagaaaaaagaaaagatattctggagagctcccttaccccctccactgtgtgaggacccagcaagaagacaactgtctatgaacga

SEQ ID NO: 320999 - DNA, 201 bp, Homo sapiens
taaatagggcatggggatgttgcaaaacattgttgttatatgcaggttttcaagcagtgctttgttgtttaaatgcaatttggcctaaaagccttaaaaamgaataacttttcttcacatagtatgctaaagtttctgaacagttttcacatgccatttttattcagtattcaaagtatctcagtgaggtagtcagaacaa

SEQ ID NO: 321000 - DNA, 201 bp, Homo sapiens
tggagattttgacactgttgactcctcccttcttcatggcactatattctccggcctttcctactactactctgtctgttctttctcagctttccaaaatkctggtgttcctcagaggtgtgtcccagctcctttattttgactgtatgtattctctctagtcaacatcattttcatccaggatatcaaatatgtatttac

SEQ ID NO: 321001 - DNA, 201 bp, Homo sapiens
tactttctcagtttccattaatccactacagtatggattcacctccatcactccaatgaaacagtatcataatggtccccatgacctaattgacagttaartgttcgcttcttgtgtagctggagattttgacactgttgactcctcccttcttcatggcactatattctccggcctttcctactactactctgtctgttc

SEQ ID NO: 321002 - DNA, 201 bp, Homo sapiens
gcatacgtgattctatatcttattctcttctccccttaacaaccagtcattcatctgtttatttccactgaattttaaagaattcacgaaggctaatataragttaaaatctatttagatgtcagaactggcagaagttggcaacagattggatgtcctggtatgaagaactggtgcttaagaaaccaatgctcaagcctt

SEQ ID NO: 321003 - DNA, 201 bp, Homo sapiens
tttcagcctccctctcagctgatatatttgttgcctatttcttggaaaacagtaaaagacatcacaaagaaactcactccaattcctttcctgcttctcawatctataaacatctctagatctgtatatttcctttcctccttccccagagtgccagagaaatgactattctattcattataaatcttataccctcactag

SEQ ID NO: 321004 - DNA, 201 bp, Homo sapiens
tgagttttcagcctccctctcagctgatatatttgttgcctatttcttggaaaacagtaaaagacatcacaaagaaactcactccaattcctttcctgctyctcaaatctataaacatctctagatctgtatatttcctttcctccttccccagagtgccagagaaatgactattctattcattataaatcttataccctc

SEQ ID NO: 321005 - DNA, 201 bp, Homo sapiens
ggaggtggctgtccattgttattcacaatagcggtgcccctcatgaaatgctctgccaggatagataaattacctattcttagacagaagttttatatatstgcaatgttgactgactcagactctaatcaaaactgttctcttggttctcctcagtatatttctaactcctcggtatatttctaacctatttctaactgg

SEQ ID NO: 321006 - DNA, 201 bp, Homo sapiens
tcttaagctgtgcatcctaccaagttctcagccagaattgggatcttattgctaaagaaagacagggatggtgactactaggagacgactagctcttaaartacatatttggatatgcgtactattgtgtgctccagctattgacagcaaaaatgccagacagcacggagcatgcttggcaagaagcttttagggcgctgt

SEQ ID NO: 321007 - DNA, 201 bp, Homo sapiens
cccctttccccattcacccacccacctagcctttggtaaccaccattctactctctatttctatgagttcaacttttttagattccacacataaagaagaycatgtctctctgtgcctggcttatttcatttagcataatatctgtgaagtctatctatgttgtcacaaatgacagaatttcctgctttttaaaggccaga

SEQ ID NO: 321008 - DNA, 201 bp, Homo sapiens
ctcaccaacagcctaccagagctcccttttcttcacaaccttgccaacatttatcttttatctttttgataatagcccttctaacaggtatgaagtgataytgtggttttaatttgcatttctctgatgatttgagatgtggaacattttttcgtagatctgttggacatttgcatgtcttgtttttagaaatgtctattc

SEQ ID NO: 321009 - DNA, 201 bp, Homo sapiens
tcagctgtctgaggccagtgttggtgctcttcatttttatgtgtcctaatgtgcttttgtagaaataagagctcaaatgtgtgttaaatgaatgttagtgrgttaatcaatgaatgagaccttacatcattttccaacttcaaaacatataatttcagtcagaagtaacaacctaaatgcttaacacatagaagctaccag

SEQ ID NO: 321010 - DNA, 201 bp, Homo sapiens
ataagtttgaccaaaagcaatgcataaagaggcaatgtgtattctcggccatcctccctttctgagtctctgtattctgttccttccaggattccacccarttcttccattctatgtccaaattacccttgatcttcccaaactgctttttctttaaaatcctcttctagatatcatgaagaccaaaacacctgaataaag

SEQ ID NO: 321011 - DNA, 201 bp, Homo sapiens
tgtaaatatgcaacctcattcatgaaaacacatctatcctaatgtagtgaggtgggcgagtcttgaggactcaaccctcaatacattatttattgtcaatwtccttaagatgctttgtggcatttggaaatttttgtttgttttgtaaagaaatgcggagaaaatgagatccagtcttcaggatcaaagacaagacaagac

SEQ ID NO: 321012 - DNA, 201 bp, Homo sapiens
accctggctaacatggtgaaactccgtcgctactaaaaatacaaaaaattagccaggcgtggtggcgggcgcctgtagtcccaagtactcgggaggctgargcaggagaatggcgtgaactcgggaagcggagcttgcagtgagccgagatcgcgccactgcactcactccagcctgggcgacagagtgagactccatctc

SEQ ID NO: 321013 - DNA, 201 bp, Homo sapiens
gttcggccctcactggccctctcttggctgctgctggccctgccttcctgcctctgaatcctccgtgtgctcctaactctctcagacaaggacctgtcccytggcaggcagctgccacctccctaagcaaggtcagccctttgttctcttccagagaactaggccatctttcttgctgccccacactgcaggaactgtaag

SEQ ID NO: 321014 - DNA, 201 bp, Homo sapiens
ttgcacctcactgcttctctccacaccctattagcactattccatttccggattaattggaggaaaggtgttaacaaaatttcagctttcttctcagtaayaatctaggattttgataacactgatatttctcttgctttcctacccctccctatcctccttctttctctcccttcttctttccctctctccattcctcct

SEQ ID NO: 321015 - DNA, 201 bp, Homo sapiens
tagatcccaccatcaatgaacacagaattctgatataaaagtacataaataaatgtatttattcccaagttatattcacagatgcttcatcatctcacacrgtggtttgcaatagcctgagcatctttcccagcctagaaatcccagggcaaagcagggtcagggtcagtaagaatgtccttccttactattcttcctcaa

SEQ ID NO: 321016 - DNA, 201 bp, Homo sapiens
agtctctggcaacagtgctctatatgggtactctgctggggactgggcattacaaccctcagtaccatgtgctatccttaacttgctgccaaaatacccayggaaattgttgtactagagtcagtgaagccgtaacctgtgttgcttttgtactagcccagctatttcgttgaagatctttcacctacactttcactgcaa

SEQ ID NO: 321017 - DNA, 201 bp, Homo sapiens
gtctgaaaagttgaagagaagtacttatttatctcacaagtttttatgggagctattatcccattttacagaagagaaagtccacttgggagaggttaaawgtctttcttaagagcatacagtggtgtaagaaggggtaagtatcaaacccaagtctttgattgtaagtcaatgctcttttcattaaatcatccccacaac

SEQ ID NO: 321018 - DNA, 201 bp, Homo sapiens
caatctcaaaaggtaggcagaaacctacaataccttcttaattaattatttttaattattttcctcttactttgttcctgagtctgaaaagttgaagagamgtacttatttatctcacaagtttttatgggagctattatcccattttacagaagagaaagtccacttgggagaggttaaatgtctttcttaagagcatac

SEQ ID NO: 321019 - DNA, 201 bp, Homo sapiens
gtaacattatcctttttactgttgatgttcatttaagttgcttctgattttttactattatgttgcaaagaaaatatttgtgcctacttattttttattcrttgagatcattttcttaagataaatttgcagatggggaattactggattaaagattatgaacatttttaatacccttaacactgccctattgccttaaaa

SEQ ID NO: 321020 - DNA, 201 bp, Homo sapiens
aaaatactaccgagaaccaggcaccatgtaggcactgggggacctcaccacctgatgcacctgcaaacacagatctattggtctctaacgtgcagctggargagaaaataagcctgcttcatagatctcatcagaaggagacacaactctctaagaaggtcatatttgataaaatagcctgtagaagagggagactagagt

SEQ ID NO: 321021 - DNA, 201 bp, Homo sapiens
ttttgctgtagatatgatcttctggaaaggatggggccgggcagcctcgtgaagtttgcattcgtgaactttgggttcccgtaatcctacggcatgccttrtcgaggacagcctaggagcgaattggcagtaggttagaaagcatgattagaagagggaaagctgaaatggccttcatgtcggctgttttcctccacagga

SEQ ID NO: 321022 - DNA, 201 bp, Homo sapiens
taagggtgggtctcctggtgatgttttagtctagagtgttcttggtgttctatatcctctgggaagccagggggtgggcagcagtcacggtagtgacttargatacagattctgaccatcactcctcctatctatcatagctagtgatggggtgcaaagaatcttggaatcagcaataacaagtaaaggaatagttccaaa

SEQ ID NO: 321023 - DNA, 201 bp, Homo sapiens
gctatgagttgagatcaatcaaaatgttttttgagcacttggtttgtggttatcactgtaatacctgtttggggaggggcagaaacatatgagttattttkccattagaatgataaattatttgggagaaaagatttccacagaagtccgtgtttacccagtgccaggatcttggtgtaatgagttttcagcctccctctc

SEQ ID NO: 321024 - DNA, 201 bp, Homo sapiens
tcctatctatcatagctagtgatggggtgcaaagaatcttggaatcagcaataacaagtaaaggaatagttccaaaaggaaatacctccagggctaagccrgtgtaaatatttaatgacaaagcttctagatttggagatctcttcactttctcttgcgcaggattagatttcaatttgcttcttggagtttggaaagaaa

SEQ ID NO: 321025 - DNA, 201 bp, Homo sapiens
ctctaattctagtttgcaggagttcttcgtttattcaacaaatacttattgagcatttttacgttctaagcactacattaaattctaggaattcaacacaracaaaaaatccctgcttttattccaatggaggaagacagaccataaacaaatgcatgcatactatttccagcactaagttctagaaaacaatttaaaatg

SEQ ID NO: 321026 - DNA, 201 bp, Homo sapiens
tagtcttgccctactctaattctagtttgcaggagttcttcgtttattcaacaaatacttattgagcatttttacgttctaagcactacattaaattctargaattcaacacaaacaaaaaatccctgcttttattccaatggaggaagacagaccataaacaaatgcatgcatactatttccagcactaagttctagaaa

SEQ ID NO: 321027 - DNA, 201 bp, Homo sapiens
attttacagaaacccatggcaaggaaatgatttaaccattacattaacagatgccctcagagactgtgctatgagatactctgtctttctccttagctggmatcttctccccatgtgagcatcccacctctcattccctgctaggccaagaggactttcctctatggagcttcttgaacactgttagtttatattagtctt

SEQ ID NO: 321028 - DNA, 201 bp, Homo sapiens
atttgcatggatgccattggaattaaatctccataaggatatttggaacagaaaagcccatccttcttacgcttttataaattttacaatccgactgatgrcttctacaaaagtttatcctatttttcatatgccaggcagttctcaaactcaactttacagccaccataacaaaagcgtttggggatttgaaaaatactt

SEQ ID NO: 321029 - DNA, 201 bp, Homo sapiens
gaaaatcacatcctacctaacaccttgtaaaaattctgggatgcattatgcacattcagccttttcttctttatttctcacctacttctctatcagcttcmgtcctcatcctatcatcctatggttgaacataattaaagaggttattgtaatgtatgttcttgttatcaatgcatttctatagtacttatatattttgac

SEQ ID NO: 321030 - DNA, 201 bp, Homo sapiens
gtttttactagccacatttcaagtgcttgaaagctagaggctacattttttggacagcacagatagataatattttcatcacctcagaaaattctattgaycagggctgctctaaactgaattatcaataagtatataaatataatagttaagtatgtaaatacagtaggtataataaaattgagtccaacggacaaatag

SEQ ID NO: 321031 - DNA, 201 bp, Homo sapiens
ctatatatgtgtctgtcaaacacttgtaaaattgtttaggccatagcacttggaagttaactagattatcagctgtctgaggccagtgttggtgctcttcrtttttatgtgtcctaatgtgcttttgtagaaataagagctcaaatgtgtgttaaatgaatgttagtgagttaatcaatgaatgagaccttacatcatttt

SEQ ID NO: 321032 - DNA, 201 bp, Homo sapiens
ccacatccggctaatttttgtatttttagtagagatggggtttcaccatgttggtcaggctggtttcgagctcctgacctcatgatccgacctcctcggcytcccaaactgctgggattacaggcgtgagccgctgcacctggccaaccaaattgactttctagtatgtggtagaaaggcaataaagttataaactaattt

SEQ ID NO: 321033 - DNA, 201 bp, Homo sapiens
gtatcactttgaattagaaatttgaagacaagcaaaaacttcataatccctatactcatttactaggctggcttttttttttttaaggtttctctaattgytttaattcaggttatctacataggtttctacatatggattctctttttttattattattattatactttaagttttaggatacatgtgcacaacgtgcag

SEQ ID NO: 321034 - DNA, 201 bp, Homo sapiens
gagcccaggaatttacggttgtaatgagctatgatgaggccactgcactccagcctgggtggagtcccaaaacaaacagacaacaacaacaacaacaacamgagcaaatagccaagtactgtgctagctaatatctaaagccagaaaaataaataaacaagaaaacaaacaataaatgatgtttgttctcaatgaatttat

SEQ ID NO: 321035 - DNA, 201 bp, Homo sapiens
cagctaatgaggtaatactaataggaaaagtctcatgacatcactacataagatatgcatttccaccaaatgaccaattttaaatgtgtgacatatttgaygtgaagaacagtatcaggaaaaggacttcaaagatcatctggcaccatcttctttagctagccaagccttcacattaacacaagttataaaaataataga

SEQ ID NO: 321036 - DNA, 201 bp, Homo sapiens
aaactttattcaggactactgcatttgatgtcaagacaattgtgaaagatgagagaaattgtgcttaactctgaatacaacaaagagagttgaggacttayacccagcaaggagagtgaagggtcagtgaatagtaaattactaagaggagataggaaaagtggagtggtgtgattcttgctaaaacaacaggactcttgc

SEQ ID NO: 321037 - DNA, 201 bp, Homo sapiens
cccttggcaggcagctgccacctccctaagcaaggtcagccctttgttctcttccagagaactaggccatctttcttgctgccccacactgcaggaactgyaaggaagggagagggagctccaagctaagccaagagagttaggagaggaacataataagtacaagttgttaaaaaacaaaacaaaacaaaaaaaacacac

SEQ ID NO: 321038 - DNA, 201 bp, Homo sapiens
catggttcagcatcacaacattcacattttagtttatagataaagaaaagaagtggacagcaaacagcttctgtttgaggtatgcaggaaggtgtatgcawgacctcagtaaacatctcattagccggaatttagttacatagccatagcaagctgcaagggactcagggaagtgtaatctacagatttgtgtccatatgt

SEQ ID NO: 321039 - DNA, 201 bp, Homo sapiens
cctcctttctactgcctgtatcttgcctaagtgcagaccttaattattttttattttttctagaacaattataatgcctttttactgttcccccaactcaycacttccccccacccctctcatcctactacttataattaaatgtaaaaatatattttaagcacttagcacagggccaggtttataatactcaatatgtga

SEQ ID NO: 321040 - DNA, 201 bp, Homo sapiens
tttccctgagttccgagagctgctttagaattgatttcttgcttgatgtgtggaggacaacccccacatatcttgtgtcagaagcatgttgtaagaatgtrgtagaagaaattgtttgtttgttattactgtattctcagatccactgaattgaatatttcttttctgtcagactagctgattagtgcttatcaaggcagc

SEQ ID NO: 321041 - DNA, 201 bp, Homo sapiens
aagggatctgaaggttatgttgatcaccaatgggcaatgacttaatcatcatgcctttgtaatgaagcctccatgaaaacccaaaaaggagtaggcttccrgaaagctgaacatgtggaggtttctagagggtggcatacccagagagggcatgaaacctcagcactgctttccatatgtctcaccctatacatcttttca

SEQ ID NO: 321042 - DNA, 201 bp, Homo sapiens
taatgataatctcttttgtgttcctgtttctcctccataaaataaaagtcctaacacttgcctcagaggattgtagtgaggaataaatgagataaagtgtrgcggcccctggcccgtgaacggtagtcatgattattgtaaggaacataagatagaaatttgccacggtaatctcccatgaggacagaacttcttttgaaa

SEQ ID NO: 321043 - DNA, 201 bp, Homo sapiens
tttagatgactctttctccaacttcaaatgttgatcaggcatagcccactttgagaatcttcttttttttggatgactcacctcattcaagtagctctccwacatttcccttttcaatcctgtatattcccctgtcaatgtacttaacctgtatactgaagttttttgagaacaataacacaattgcagctttatttctat

SEQ ID NO: 321044 - DNA, 201 bp, Homo sapiens
agtgttaaggtttgatagaacactattctaaatctggtaataatgataataatgatgatattttagctacttgattctcagagatttgttgttgagtcacraacacacatctacgaccttttctgtatgtcccactttttgatgtacagtaagagtaaggtagaaacaactcgccacttggcatttaatctccttatcttt

SEQ ID NO: 321045 - DNA, 201 bp, Homo sapiens
ttcctaattttgattcatttctaggtgcccatttactgtccttgtacttcactctatgtctgtgtttgctcatggtagcttcactagcctttgctaccagyttataatctttttcttcactatgttcctgtgatatcatttttatttatttttgtttccagttatatgcctccgccatattctgaatttaagtgttctttc

SEQ ID NO: 321046 - DNA, 201 bp, Homo sapiens
tgaatcctgttttcccactaccagccatgtgatgacatgaacagattatttaattattagatgccgtaaggctggtaattatagcagaacctttcttaaartgtggatgtaaggatggagagaattaatatatgagaagcccttagcacagtaattgcacagagtaaacacaaataattattctcctcattattataatga

SEQ ID NO: 321047 - DNA, 201 bp, Homo sapiens
ttttttgagaacaataacacaattgcagctttatttctatatacttattccctagaactatgcttgttacctaatatggcatcagtaagtgttcaatgaaygaatacatatattaaatatatttgttaaaatgaattgtgataaattaatttacattgaccaagagattatatctcatcttcatgaccataaagaaggtaa

SEQ ID NO: 321048 - DNA, 201 bp, Homo sapiens
tggcaccaatttaaatattctctccagcaacattgagtagcctttataaagatatggagaaggtaagcagttggacactcggcttcatctaggtggatggratgaaaggtcatggggcaaggtgctgaagatattgaaaagaaaatgattgaaataatagaaaatagaataatagatcatgggagagagttacttgaaatg

SEQ ID NO: 321049 - DNA, 201 bp, Homo sapiens
gaacaatccccgttagtcaaaccagattggtcctaggcctttgtaggtgtatcctcccctggcttctgctacaattttcctaattttgattcatttctagrtgcccatttactgtccttgtacttcactctatgtctgtgtttgctcatggtagcttcactagcctttgctaccagcttataatctttttcttcactatgt

SEQ ID NO: 321050 - DNA, 201 bp, Homo sapiens
caaatggtctaactttcagtagtatcaggggaaactgcctccgataattcaacgtgagtcctttcctatttgccctaagtgttggccagtctgagaaataragggagagagtacaaaagagagaaattttaaagctgggtgtccaagggagacatcacatgtcagcaggttctgtgatgccccctgagctgtaaaaccagc

SEQ ID NO: 321051 - DNA, 201 bp, Homo sapiens
ttaacaaaaaatagaggattaattagcaatctgggtccacagagctagaacaatccccgttagtcaaaccagattggtcctaggcctttgtaggtgtatcytcccctggcttctgctacaattttcctaattttgattcatttctaggtgcccatttactgtccttgtacttcactctatgtctgtgtttgctcatggtag

SEQ ID NO: 321052 - DNA, 201 bp, Homo sapiens
gaacatgtctatgtatgtgtataaatgatacatatttatgtatatattatatatactacatgtttccttttacatttacatatatatgtccttttccattkacttccttttccatttacatatatatgtcaattggatagattttcaaaagaaagattttttagcccaagagtattttaattaataaattaccaaattatt

SEQ ID NO: 321053 - DNA, 201 bp, Homo sapiens
gactcagggaagtgtaatctacagatttgtgtccatatgttcagtggacacttggaagattctactagttaacaaaaaatagaggattaattagcaatctsggtccacagagctagaacaatccccgttagtcaaaccagattggtcctaggcctttgtaggtgtatcctcccctggcttctgctacaattttcctaattt

SEQ ID NO: 321054 - DNA, 201 bp, Homo sapiens
tcctctgagactggaaagctggctgcttactagttttgactttgaactttggatctcacagccagcccacttctacctggtgatagcttttcatgtcaccrtggtccacccttcttgtgagacacccaactgctactcttatctcctgagagcccaaacatcttttccatcagccagaatgtgctacccaacacttgccat

SEQ ID NO: 321055 - DNA, 201 bp, Homo sapiens
ttttttttttttttttgagatggagtctcactctgtcactgggctggagtgcagtggcccgatctccgctaactgcaacctcctcctcctgggttcaagcrattcccctgcctcaggctctggagcagctggtactataggtgcacgccaccacgcccagctaatttttgtatttttagtggagacagggtttcaccatgt

SEQ ID NO: 321056 - DNA, 201 bp, Homo sapiens
cctggatttctggacccaaagcaatcacaagggaccttaaaagtgggagaaaaagacaggagaggacgtcagaataatgcagtgtgagcagaacatagcawggctattctggctttggagatggaagaatggggccacaagacaagaaacacgataacctgtagaagctggaatgaggaaaaaaaacactagattccccct

SEQ ID NO: 321057 - DNA, 201 bp, Homo sapiens
gtcaataagactcttactgaagagtaaaagtatgggcccaaagagtactgtttatgattttagcttgatattttaataatcattcagttcttaaagaaaakttgccttccagaaaagtatcttagttaataaaggacagttaaaaggcttgagttctgctccttaaagctgttgaataccactttcagtctaattagggta

SEQ ID NO: 321058 - DNA, 201 bp, Homo sapiens
ccagggaagctagtcttcatcagaggattccacatatttttgttccatagattcatccacagtgagaaaatccctcagttctcttaaagacgttgcattgktcatttcaattccttttacttttattgtagactcaacaaagctgacttctgtttagagatgggcatctcatccagcttgacttcagggtgaaaatgcaac

SEQ ID NO: 321059 - DNA, 201 bp, Homo sapiens
ttaaaactgcagacagagacagagagagcacgtgtgcttgtgaggttgattttatggacatatcgtctaaggcagttgaatgtataaacccaccaggacaracatcatttctgttcaattatcatgtctatacaaatctcttggaaatatgtgcctctagctgcaccctctcctaaaatgaatccaatcttcaattgctca

SEQ ID NO: 321060 - DNA, 201 bp, Homo sapiens
tggccaggcaggtcttgaactcctgacctgaggtgatccacctgccttggcctcccaaagtgttgggattacaggagtgagccaccaagccaggccttctratttaaatatgttcttccatatatgacctgcaggtggcagagtgaaacagcactatactgtaaaagtaaaaatcgaggcttgggtgtgacagaaattctc

SEQ ID NO: 321061 - DNA, 201 bp, Homo sapiens
tgcagaaaattattaattcccccatgacagaaaaaatcaggattactaagaaaaaagttgaaagacattaaatcatagagtttttatttgcatgttaaaascacatgccaataaacctcatttcattttaccgtgtttcttggagaattgtatagttcaccagaaaagtgaaaacacagaatcccattacagccattgaag

SEQ ID NO: 321062 - DNA, 201 bp, Homo sapiens
gggctctgaggggagctcctaaaaccctcacggtccctgctgtgaatatgatcttctgaatcatttgttttactcttgttacgttggctcctaacttagcrtgttgttaccaaatccctattcagaggaatattttttcctgacagaatccttagtctacttaaggtttctaagaaaaaaaagttggaattttaaacccac

SEQ ID NO: 321063 - DNA, 201 bp, Homo sapiens
cagttgaaagtcccaaaagagtctattcctattgattgaatataagcacataaaaggtacccatctccttatttcacccacatctgaaataaagctccaawgacctgtaaggacttttaatttcttaatttttttaaaaaagagtagtatttatatattcaatggctcaggaaagtatcagtttatgactagaatgcaaag

SEQ ID NO: 321064 - DNA, 201 bp, Homo sapiens
actgggaaaaataacatcccaataaaagatagaaaacataatcaggggagtggaaggtggaaagttctgttgactcaaacatataataatgagaattgaawactctgttaaaaacaagtaacttgctattatgtttgtttactgtacccaggataatatctatttgtggttaaatcgtgatttttctcctgtctctgagga

SEQ ID NO: 321065 - DNA, 201 bp, Homo sapiens
atttctatagtacttatatattttgacccctttctgaattttaaaatttttcctcacttgacttccacagacagtcattacttcctagcttccctcttatytctccagccatttctcaatttgtacttttaggtcttctgctgtgtattatttaatggttagtgctctctacagcttgtcattgattttttgttatttttc

SEQ ID NO: 321066 - DNA, 201 bp, Homo sapiens
aataattgatcctagatcatccctttgctactttcatcttaaaggtttcaaactcttctcataagatgttctccactctccatgatcatgtcactgccttragacagatccttatttctcacataatatcttgtgatgacctcctatcaaatttattctttataataatgtcggaggtgaaactcttaaaagcatacctga

SEQ ID NO: 321067 - DNA, 201 bp, Homo sapiens
ggatgttagtagtttcgaaaaataaagatgtaatgctaaaatattattttaagatcaaatttcctaatgcttatgtaccatataatgtaactataagtgcytactatagtaatgatatttgccacaaaaggacaattagcaaatttatattataaacattagcactttccacttaaatcatttttattcataatgactgca

SEQ ID NO: 321068 - DNA, 201 bp, Homo sapiens
gctgtctaacaagcacaaaactaatcaaacactgaattcatcacctccatttttacccccacccaccactccagcctacctgttcctgcccctcttgttayagtctcaacaaatgacaggagccaagacccacctttccaacctagaaatctgagtggcaacctctatgctttcttatccctcactaccatattgaatcca

SEQ ID NO: 321069 - DNA, 201 bp, Homo sapiens
gagtggtgtgattcttgctaaaacaacaggactcttgctgaaggcaggctaaggactcaaaggtaaagaatgaggaacttgatcagaaaatgaaagtgatragataccaagtggggattctctctaaactggcttaacaggattcttgctgaaactcctcttgcctggccaaaggcagagcccaaggatgagacctcattg

SEQ ID NO: 321070 - DNA, 201 bp, Homo sapiens
tcctggctatccttaccttcagctctgaatctgtccagagattccagaatgcactatgtatttaatacatacagaatgtatttaatcatggactcttcacyatggtcttcaaagcacatgacttatttaactcccaaaataaacccaagtgaaggaaaagaagcatcttggcctaatttttttttttttaatgaggaacca

SEQ ID NO: 321071 - DNA, 201 bp, Homo sapiens
ccccgtctctactaaaaatacgaaaactagctgggcatggtggcgggcacctgcagtcccatctactcgggaggctgaggcaggagaatcacttaaacccagtaggcggaggttgcagtgagccaagattgcaccactgcacttcagcctggcaacagagcgagactctgtcttaaaaaaaaaaaaagtgagtttcaaaaa

SEQ ID NO: 321072 - DNA, 201 bp, Homo sapiens
taataattaagtgacctaatgaataaaatgctgttacctgctctacctgacacatataggagtcaacaatgagtgcaatgacaataacagtgatcatgatrtcactccagagttttgtgactgactccttattggtccctatattacctatttattgctatggaacaaattaccccaaaatttagtggcttaaaacaatac

SEQ ID NO: 321073 - DNA, 201 bp, Homo sapiens
cgggaggcggagcggggacatggctggctgacttgggtcctatagcaaagcttggggccctagagctgccagagccaagtaagaagtagtgaccagagatrggtccatgtcctgggataggcacaataggaccccagggcttggtacaagaagcaaaagcatatttgcggtcaggccaatgttacatatcaagtccgagac

SEQ ID NO: 321074 - DNA, 201 bp, Homo sapiens
tagaatgggaaagaagggacatgatttggatgtttgtaagtgttaaggtttgatagaacactattctaaatctggtaataatgataataatgatgatattktagctacttgattctcagagatttgttgttgagtcacgaacacacatctacgaccttttctgtatgtcccactttttgatgtacagtaagagtaaggtag

SEQ ID NO: 321075 - DNA, 201 bp, Homo sapiens
ttcacagtgctttaaaaagcacttagaatttggaagactttaggcaaactatgcactcttcaaattgctgtggaccctattatgtcatttgtttacatttmtgaccctagaagatatttgagtttgcaacccctgcctgccgatattaatataccacattgggtaaaaatagcagctaatatttatcaagcatcttctatg

SEQ ID NO: 321076 - DNA, 201 bp, Homo sapiens
tgggaactgtgttaagccctttatatacattaccatgttaactttgatagttgagacatttggacacaggtaagagggataacaaaagaaccactaggtcractgttctatgtgtctttggcataataccctagcttggatgaaatctctgtgttacttgaaattgcaagattttagcaaaatcagttattttatgatttc

SEQ ID NO: 321077 - DNA, 201 bp, Homo sapiens
attatcctgcctcagcctcccgagttgctgggattactcccggctaatttttgtatttttagtagaggcaggatttcaccatgttggccaggctggtctcraactcctgacctcaggtgatccacctgcctcgggctgccaaagtgctgggactgcaggcatgagccatggcacccagccctacactatatttcttcgaag

SEQ ID NO: 321078 - DNA, 201 bp, Homo sapiens
ctggtctcgaactcctgacctcaggtgatccacctgcctcgggctgccaaagtgctgggactgcaggcatgagccatggcacccagccctacactatattycttcgaagtcttccccactcggagactcacaataagcattaatgcattaaaaaatctaaaatcttccaatgtagaaactcctttaattttatttaagcac

SEQ ID NO: 321079 - DNA, 201 bp, Homo sapiens
ggacactgatctacggttaattttgcctaagtcattctgaatactcttgtcagtaccctgtatatgataaggctttgatactctggctggtggaaacaggmactatccccattcctgtgtgaactctgaggactattccccgtgttcttttctggttggttttattccccctgcctcaggaagcttcctcccatccttgtg

SEQ ID NO: 321080 - DNA, 201 bp, Homo sapiens
tggatgaaatctctgtgttacttgaaattgcaagattttagcaaaatcagttattttatgatttcttccttgcagaggtggaatggtgcaaaccagtgagmagtatgaatttgtgcaccatgctctgtgcctgtatgagagcagactttcagcagagactgtccagtgagtcattgaagacttgtcagaccatcaatctct

SEQ ID NO: 321081 - DNA, 201 bp, Homo sapiens
tggccctctggaaggttctcatttggtatccatcggaaggccttttatcgcttgttagtaatgatacagatttgttgtagaggcaagcaattctttcagtrtttaagcctttgcaattttcattatttttttaaaaaaatgatttttttttttgcccttttgctccccttcctaacaaaggaaattgttaggaactatatt

SEQ ID NO: 321082 - DNA, 201 bp, Homo sapiens
cacaaaacttaccccctaccactggccatgtaacctatttgtgcccacagtgatgtataacacctataaattctcagatataccactcctctggcaatgaytttaattgaacaatcattcagaaagggacttgaactggtttttaagtggtttgtcttgtgttttcagcagatgacaagaattttaagaacaggtactatg

SEQ ID NO: 321083 - DNA, 201 bp, Homo sapiens
ggaactttgaagcacagacctgggcatcagtgatgaacgaagggccggtggcaagaaagggtctgcaggcaataggaggccatgttatctatagtagatamcaatgaagggtcataatgaaactgattaaaagacaaatttttattatcatcatgcactaccaattctaagcaaggtcagaataaaattgtctaggaaagt

SEQ ID NO: 321084 - DNA, 201 bp, Homo sapiens
cccatatattttgttgcctgaggtttttaaatcacatatataaattttgaatatatttcccatgatacatcacaatgccctatgcaaatagttatggtttrcacacacaaacacacccttcagaaaatatagcttgggattttaagaactgcagaatacaaaattgatccttcataattatttgaaagtattgccaaggaa

SEQ ID NO: 321085 - DNA, 201 bp, Homo sapiens
gtgggcaacttccaatccattcagtctgttttagatgaaagaaacttactaagaagaattagttcttaaacttgaacaaataatagaaagaacaccatttrtcatctaaattagacatccaaatgtccttacaggtttattaacaagtacaaagacatttatgaaatatagctagagatgtctacaggccagattgcttct

SEQ ID NO: 321086 - DNA, 201 bp, Homo sapiens
tggaactaaactaaagcaaaattattcaaggcacatttcaatgaaattctttatgaattgaccattaatttgtgctttttattataactagacaaattgcwttattatataatataccatctttttaaaaaatcaacttttattttagattcagggggtacatgtgcaggtttgcgacatgggaacactggatcataacac

SEQ ID NO: 321087 - DNA, 201 bp, Homo sapiens
tcaaggcacatttcaatgaaattctttatgaattgaccattaatttgtgctttttattataactagacaaattgctttattatataatataccatcttttwaaaaaatcaacttttattttagattcagggggtacatgtgcaggtttgcgacatgggaacactggatcataacactgagatttagagtgcagatgatccc

SEQ ID NO: 321088 - DNA, 201 bp, Homo sapiens
aaagaaatgaaagaaataattagatggatttcaaacactgtcttaaattttaatttgaaggagtcacttttaaaagtaacagggggaccaagtgcagtggytcacgcctgtaatccctgcacttgggaggcagaggcaggggaattgcataagcccaggggtctaaaactagcctaagcaacacagtgagaccctgtcttt

SEQ ID NO: 321089 - DNA, 201 bp, Homo sapiens
ataataatacatcaatattggttcatcagttgcaacaaatgaatcacaccaatgcaagatgttaataacgggaaaatgaagagatagggaagaagggtatrtgagaacttggtattttctgctcagtttttctgtaaacctaaaactactctaaaaaatagtatattaatttaaaaaatcaaatgttgataagtgctatga

SEQ ID NO: 321090 - DNA, 201 bp, Homo sapiens
taattaagttaattttaaaaaatcaaatggtgaacatgctatgtgagtccaactatatgacattcaggaaaagtcaagcctatagaaaatatcagtggttrccagagatttcagagaaagggaacgattaggtaggggacagcagattttagggcagtgaaactattctattttctgtaatgatgaatacatgacattatg

SEQ ID NO: 321091 - DNA, 201 bp, Homo sapiens
gaaaggagcatttcagaagtataggtgattgctctctattgggttagcaggtggattcatctattcattcaatcaacagattcctgcagaatattctctgygggtctatttgttgctggtgctgtgggcaaaggagaaaacaagacagataagatccctattttcttgaagtctttactctagagggagacatagaaaata

SEQ ID NO: 321092 - DNA, 201 bp, Homo sapiens
ggcaaggatagaagaagggaagtgggaaagcagagtcatgcccagcctttgagtactaaagggcagcagaaacagagcagagcttgctattaacatatagratgtgtttcagattctgcatttctaactcagggcgtgctcatgtactgaatgtaactagataaatgcctatgttggtcttgtggcaaaaggacctatagt

SEQ ID NO: 321093 - DNA, 201 bp, Homo sapiens
tatatattatgtatgatatatacatattgttttataccatgtacacatagaaaatatttggaagtatacacaagatatggttagcaggattatttctgcgrattaggatgaagggctaggaaggggaagcatattttcactttttaccatatatccatctgtaccttaaattttgttgtaataagcatgacatttttataa

SEQ ID NO: 321094 - DNA, 201 bp, Homo sapiens
ttttgatttacatttccctgatcattagtgatgtcgagcattttttcatatgttggttggccatttgtataccttcttttgagaattgtctattcatgtcyttagcccactttttttatgggattgtttgttttgttcttgctgatttgtttgagtttgtatagattctgaatattagtcctttgtcagatgtgttatggg

SEQ ID NO: 321095 - DNA, 201 bp, Homo sapiens
cccctacaaatttaagagggaacatggccccactgacactttgattcagacttccagcctctagtatgacaagacaagaaatttctgttgttttaagcttwaaaaaaaataaagtaagataaattttaagaaattttaaagtgttactgattgtgtttgatatagctttctatatactccaacatcattcttatttctcct

SEQ ID NO: 321096 - DNA, 201 bp, Homo sapiens
agcccactttttttatgggattgtttgttttgttcttgctgatttgtttgagtttgtatagattctgaatattagtcctttgtcagatgtgttatgggaartggtatagaggttcctttaaaaactaaaaatagaatagattgtgaagattttctcccactctgtgggttatctgtttactctgctattcttttgccatgc

SEQ ID NO: 321097 - DNA, 201 bp, Homo sapiens
taatccagtttccaatcacttatttattacctacttgcaggtacaaaatagagaatatacttgcaggtaaaaaatagaggatatattatggtatttccttwtgagactataaatccttgaaacagtattaatctctttttaaagcaagctgagggaagttcccctaaagagttcctactctataggagattgcacatgtaa

SEQ ID NO: 321098 - DNA, 201 bp, Homo sapiens
tgtagcaatttagcgaattgccctcccttctttctggattttctaattttaacttcctaggttgcattcatgcaaccatttatataactactaggtgctgratcttctcctttcttaggcattttatccaatgaagacttaagattcatgatgcagttgaggtcattcttaaaggaaataatagactttttaggttaattt

SEQ ID NO: 321099 - DNA, 201 bp, Homo sapiens
tgtccatgtccagaaacaacagtgtcttttcaaaaatgagaaagtggtcgtgggctcatgcaacaggaccatccagaaccagcagtggatgtggactgagratgaaaagctccttcatgttaaatctgcactgtgcttggccatctccaactcttcccgcggcccctcccgctcagccatcttggaccgctgttcccaggc

SEQ ID NO: 321100 - DNA, 201 bp, Homo sapiens
tataattagtgagcacatcgctgttttacaagtaaagaaaatagaatcctgattacgttagcatttaataaaggctttctccaaataatttttgtaatcamaattgaactcaaaaatcttttctgttcagccttgcttatcttcccaccaaaacacacttgcattccagaatgaaagttctcataaaatatttttcaaggt

SEQ ID NO: 321101 - DNA, 201 bp, Homo sapiens
atgcagtcaatttccaaacaggtgagataatctctcatgataggcagagggtcctcggtgtaatgttaagagcttaggagggtaaatattaagatttatgyctatatctgttcatgtaaatgtagaaaaatgagtcagcatagaacttatgtgatatctagggaaatatctttagcctaaaagtctgaaattaaaagaaaa

SEQ ID NO: 321102 - DNA, 201 bp, Homo sapiens
acaaatataccagctacaatgaatttatttaaccttcacagcagtagttactgttactatcctgctttaacagaggaagaaactaaagtgcaaggggtttygaggaatttgtccaagatgcatacagctaagaattggcagaggagggatttgaactcaccttggctgatgccaaatccaagtacttgatcattaggctgt

SEQ ID NO: 321103 - DNA, 201 bp, Homo sapiens
gccaaggagtggctgcagctttaggactcttaccccagcaagtgcacatcaatcgcctcattgtaagatacccacatttcgcatttccaaaattcaagccrtgtgtgtggtttttttaatcactaaagggctcatgctatagttgtatggctaatgagccaaatccggcacgtcatgtttttgcaaataaaattttatgaa

SEQ ID NO: 321104 - DNA, 201 bp, Homo sapiens
acagatatataaaatcatttcctcctcatatccacctcaggtgggtaaattatatcatctcaaatttaatgataaggaaacggagacacaggcattcaagyacatttccatggtcgcagagtacattactgcagagataggattcgagcccaggtaatgtgcccccagatctcacgcttgtttctatttcctgcttcccct

SEQ ID NO: 321105 - DNA, 201 bp, Homo sapiens
tttccatgagatacagtggtcagctaggctggatgcttccatgtcacttgacagcagtgtccaggtttctacagagcagatatttctgtcactgctctgcygtactgtgggtcaatgtgtttcaggagcctgccatcctttctttgatcaatctcttttgtttcactcttattctagtttaactaaaaggcagtcttaaac

SEQ ID NO: 321106 - DNA, 201 bp, Homo sapiens
aactggtgcttaagaaaccaatgctcaagcctttggtgccatttatttaaataagaaatacaagatcccttcctgttagagccaatgtaaaaaaaaaaaaagggcgaaatgctagaagaaaatcagatgaagtttagatacattgtgttcaaaatgcctacaaagcatatctagaagtataggcagttatcaggactcaac

SEQ ID NO: 321107 - DNA, 201 bp, Homo sapiens
taccctgcttaatgacttaagatatctgctttttatatcaaatgactgagatggaatctagaatctttcagatagatattaaagggtacttttaaaaatayataatccttggcataaatgtaaaaattttctttgtgaatacttaactttataaatgtttctttccaatgactaaaaacaaatttaaggatttggaattaa

SEQ ID NO: 321108 - DNA, 201 bp, Homo sapiens
tagatatggttcaatcagcatttaacatttctcctgacataggagaaagttaagatccctaggatatgtcttaaaattcagactgtttgccattgagcackatgctttagtacaacctattgaattctttatattttgaccctgaaaagtctcaaattttgtgaaaaactacagtagcctgtatacttcttgacagtgatt

SEQ ID NO: 321109 - DNA, 201 bp, Homo sapiens
aagccctcaaagtcagtaaagtctcacgggcacactttgggtttactttatttctccttttatatcatctttatggaactcaggaaaaaatttaaaaagaratatgtctttgagacaagattactccctaaggaatggttgatttccttatttttaaaaggacttgaaagcattctatgaaaaggagatgattataccctc

SEQ ID NO: 321110 - DNA, 201 bp, Homo sapiens
gctcttttttgacttctatgttaagttcaggggtacatgtgcaggtttgttacgtagataaacttgtgtcatgggggtttgttgtatacattatttcatcrcccaggttaatacctactaccccttagttatcctactacccctaaatataaataaatatactaaatataaatatactaaataatcctactaccccttagt

SEQ ID NO: 321111 - DNA, 201 bp, Homo sapiens
gtgagtctctgaaaccagtaatatcctcagcttctccgtgttgtttttcccctccccatatagccgaacattatgaagacctggcaccttctcccaactgyttcccccgtccaaccccaatcccactgagaactcaggatctccctaattctagccagtctcctcctggtccccacctcgaattctgtttttttccagtcc

SEQ ID NO: 321112 - DNA, 201 bp, Homo sapiens
aggagagcttatggaattaaggatgctgacctgaataataaggctgtaattgcaatgcagtttttagtaacttgatcaactctgagaatgaagctttagamagtgatttactgaggtcactgaagccctcaaagtcagtaaagtctcacgggcacactttgggtttactttatttctccttttatatcatctttatggaac

SEQ ID NO: 321113 - DNA, 201 bp, Homo sapiens
ggaacaaaaatgatacaaataaagataaacctgtgtattctaccttttattgacaaataattctgaactttttaatgttccgtattactttagaaaaatakgtgatattctaacaatatgtattcttgagatgatattttagtcaggttttgacagcagagactctatttgaaaaaaaaaaaagatgtgattaaaagaaag

SEQ ID NO: 321114 - DNA, 201 bp, Homo sapiens
agcatgctatggtaattcaaccccaagaggctttgagatggaagttgtttattgtatgttatttgataataaaaatttccctgagtgtcagaattctctgrtctttacattgtatatgtttacttcttaaggaaatgcactttcacattaaggttttcactttttggcatttttcttcttcaaacctttgtggccttataa

SEQ ID NO: 321115 - DNA, 201 bp, Homo sapiens
atgatttcaaagttcagacacctacaagacgtgttttactccaggccttcttaatcactggaaacaataaccaaggacagacatgtactctcactaaaggsaataaaaaggcacccttcaacaaaatgaaattttagatgagttaaagcatttgacttgatttagcctttatatgtttttcccaatcatggactatttggt

SEQ ID NO: 321116 - DNA, 201 bp, Homo sapiens
atgactcttcagaaacaaaaaaacccaactagaaaactgttcttgtttagtcatttgttttcatttgtaatctgtttcttaaaggaaaagacattatttcytttatatatttgtatatgatatctagaacattataggcactcatatagataaaactagacctcctcttgcctaataagtaaaatcccaggaaaataaaat

SEQ ID NO: 321117 - DNA, 201 bp, Homo sapiens
acggaatgaagtctagatttcttaatatggtatatggtcctttgtatgctgggctttataattgttgaacaacactttcctagtttacatttcagcaattytaaactcgatagatctatgatacaccatattctctccttccttcatgcttttgtatgtgttgtttcatctacatacctttcgtttgtttttttttttttt

SEQ ID NO: 321118 - DNA, 201 bp, Homo sapiens
cctgcaaaaatattgattgatagttgcttaaaactggtaaatgctattctgtgagttttcttacaactttattcattttttctgtggttaatcttttatarcaacttatacctcaacccattttttcacattttaatcttaaaattataacatgttatggcaacatattcattaacagaaaaaaaggatcactggtatttt

SEQ ID NO: 321119 - DNA, 201 bp, Homo sapiens
gggacacaggtccggatgagaatgtgacaggagatgaggatggagaaatacacagtagatagattaggaagcatcttacgtcaaaagggtagctacttgcrggttttatcatattttcagtgctcagatattccagtgaaatctggaaaaaatctactgaactaggagattttagagttaggaagccttgctaaggaacaa

SEQ ID NO: 321120 - DNA, 201 bp, Homo sapiens
acagatacaacctaaagaagccctgcaaaaatattgattgatagttgcttaaaactggtaaatgctattctgtgagttttcttacaactttattcattttktctgtggttaatcttttataacaacttatacctcaacccattttttcacattttaatcttaaaattataacatgttatggcaacatattcattaacagaa

SEQ ID NO: 321121 - DNA, 201 bp, Homo sapiens
agatagattaggaagcatcttacgtcaaaagggtagctacttgcaggttttatcatattttcagtgctcagatattccagtgaaatctggaaaaaatctaytgaactaggagattttagagttaggaagccttgctaaggaacaactgcaaaggtctgaaccaaagaggaagagagtttgagctacatcaatatcagcgag

SEQ ID NO: 321122 - DNA, 201 bp, Homo sapiens
tagaaatctagaatttagaaaatatgcattacagaagatgaggaagtatttgaatcagatataaggagcatatcatgaaggacggagggattatttgaacyttttgtttgagtactcctagaaggggccaggcattaccctttgacctttgaccagaatctctaaatgcagaaacagggaaaagctgtctgtagtgagcag

SEQ ID NO: 321123 - DNA, 201 bp, Homo sapiens
caatcaaaaggcatagcaacattctacctagtgaggtgtaggtcctttcaggtaggaaaatggatcatttcctacactaaaaatgttctctatgttaaaakattttctttttactttagggtgaaattcatatatcatcttcctgggttcatgcctggcatcttttatatttattattatttcttcccttcaggatttcct

SEQ ID NO: 321124 - DNA, 201 bp, Homo sapiens
ataaaattgttggaatctagaaatctagaatttagaaaatatgcattacagaagatgaggaagtatttgaatcagatataaggagcatatcatgaaggacrgagggattatttgaaccttttgtttgagtactcctagaaggggccaggcattaccctttgacctttgaccagaatctctaaatgcagaaacagggaaaag

SEQ ID NO: 321125 - DNA, 201 bp, Homo sapiens
aacaacaacaacaacaacaagagcaaatagccaagtactgtgctagctaatatctaaagccagaaaaataaataaacaagaaaacaaacaataaatgatgyttgttctcaatgaatttatgcactaatagggcaaatacgacacaaagagataataagaatatagttctatgaataaagttactacactgtgccatgggtg

SEQ ID NO: 321126 - DNA, 201 bp, Homo sapiens
tgcatccagccaatagactattctatatatcaatatatgcaataggacatttatttaatattttcagagatgattatgatgagttcctgaatttgaaccascctccagtgaatgcatcctggaataccttttgctttcttttagcctagagtttatctgttttcacatgacatgaaaatagcatgacctgggtaattcatt

SEQ ID NO: 321127 - DNA, 201 bp, Homo sapiens
ggtaaaacaggaagagtaacaccaaagtatctgctcaatgtatcccaaattgttcttaggaagcaccttataaagcttgatactaatgtagaaaatcatttctagttcttataacctcatagaaagtccttactttctatgcacctatgagatcctcagccaacaccattgattgactgacagacatgactgcaaaaggca

SEQ ID NO: 321128 - DNA, 201 bp, Homo sapiens
gatataataatagtttttaaatagtctgtataacttcacaaatgaagcatatgctgcaactacagaagaaaatgttgcagttgcacatttctaagatttttcccttaattttaagtaatataagtcatctgagttgtagtaatgctgttcaaatggtcaatgatgtattggacacttttaacacacacacacacacacaca

SEQ ID NO: 321129 - DNA, 201 bp, Homo sapiens
ccgtcaagcttaaaacaaaaactccttattccatattagtctttaggctcatctctacactgtgggttttttgagagcttgtgacatgtcatttgatctgkgtcttcattgccttcatttagtgcctggcatgcaatgggcacacaacaaaactgagtcaacaaatagtcatgctgggcgcgttggctcaagcctgtaatc

SEQ ID NO: 321130 - DNA, 201 bp, Homo sapiens
gggaacatggccccactgacactttgattcagacttccagcctctagtatgacaagacaagaaatttctgttgttttaagcttaaaaaaaaataaagtaarataaattttaagaaattttaaagtgttactgattgtgtttgatatagctttctatatactccaacatcattcttatttctcctccccagaagcaaattgt

SEQ ID NO: 321131 - DNA, 201 bp, Homo sapiens
ctcagacaagcagagaactgaggaaaatcattcaaatgttttgatgcaatgaaccagatgatttcaatttcaactaattacttcaactcacttcttcactrtagttgggtagtctaaatttctgtttcaaatgtacagcttttgtacagctttcatatttttgcaaagttgcctttttcagtgatttttaaatctttagtt

SEQ ID NO: 321132 - DNA, 201 bp, Homo sapiens
tcgtttttaaaagtacgactttacataatgtttatttagtggtcatgtttagtttctctctcacacttttatttgaattgttcgtattgatagatgaaacmatattcaatcaatttagcatttattgaggatctgtattcaaagttcatcaacaaaaaataaatacaaagatgaagatacttaaaactttccatcaaggaa

SEQ ID NO: 321133 - DNA, 201 bp, Homo sapiens
aaaccccgtctctactaaaaatacgaaaactagctgggcatggtggcgggcacctgcagtcccatctactcgggaggctgaggcaggagaatcacttaaayccagtaggcggaggttgcagtgagccaagattgcaccactgcacttcagcctggcaacagagcgagactctgtcttaaaaaaaaaaaaagtgagtttcaa

SEQ ID NO: 321134 - DNA, 201 bp, Homo sapiens
tccacttccccttgtactgaatatccaaagaagcaagtcactaaactattcattttcaacattgatgtgcagtaaacacgtatctttaagcctagtttacygttactttttatctgccacttctagctgttttatagctaatagtgatggcagcggcggccatctggtgcggctgctgccatcatgccggccgctgcaggg

SEQ ID NO: 321135 - DNA, 201 bp, Homo sapiens
gagacctttgtttataaaggagattaaaaaaaggaatggtagctgaataacaggatatttggatttgttcagcttttgttttaatatgagaaatattatamcacatttgaatataaattagaaaaatctagtagaaagggtgaactaatgatgcaggaatgagagggagaattagacaacaattatctcctgttgatgtaa

SEQ ID NO: 321136 - DNA, 201 bp, Homo sapiens
tggagggtgagagaaagaagggagacaagaatgatggctggtttttttgtttttgtttttgttttttgtctcttgtttttgagatggagtctccttctgtyacccaggctggaatgcggtggtgctatcttggctcactgcaacctccgcttcctgggatggctggttttttaacctgagcacatgaaagattgaagttgc

SEQ ID NO: 321137 - DNA, 201 bp, Homo sapiens
aagtcagcttgtccggatgcagctgatatgtttaggaaaggaagggtgttggtccaccagaggtgctagatctgttgtttttaagtggctttgaagtccartagaactctggatcagatgcccccctgtgaagattttctttgtggcagtattagatacactaatttgatattatttatttttgcaggaaataccaatgaa

SEQ ID NO: 321138 - DNA, 201 bp, Homo sapiens
attaaatatgctgagagaacaatggtgttataaggcagaagaactagatttcaagcaaaacagttttaaatgtcttgctgtggtaggccaaaaaatggtgycccaaaagatatccatgccaaatctctggaatctgtgactattatcttattttggaagatgaatctttgcagatgtgattaagactcttgacatgaagag

SEQ ID NO: 321139 - DNA, 201 bp, Homo sapiens
ctttgagtctttgaagatttgtttatgtggagaacaatgggatagccgcaatagtcataacatttgccaaacatctcctaggaaaagggtgggtttttttwtaaaatctagcctcaggaatatattgcccaaagttttcattctaaaggaagaatccaaaaccaaaaaaggggacatctccaaggccacatgaccaatttt

SEQ ID NO: 321140 - DNA, 201 bp, Homo sapiens
atagatgctcagttctcattgcagattcatgagtctgtgattctccttttactaatacttttgagcatattttgaactaaaataagatttcttttttttttccaagtaggagttcaaattcagtgcaaggcacccacgaatgttttatttagaagggcattaagggatcatcccttcattcccactgcattcgcttttaat

SEQ ID NO: 321141 - DNA, 201 bp, Homo sapiens
ctacttgagaatgtgttacagatattatggctctttacctctaagtagttcagtgtatggttcctaagaacaagaccattctcttttatatccataaaacwattattaaaataaggaaaataacgttgatacaatactattacttaatatacagaccttatccattggcatctttctctattctatcttttgtagcaacaa

SEQ ID NO: 321142 - DNA, 201 bp, Homo sapiens
atatgcttcgattacagtgcattaagttagaaataaaaagcagaaagataagattaaaaaatacactttgatgcttaaaaaaagttttaacacacacacarttcatggatgaaaatgaatttataatataactgtaaattacctgcaattcagggatgatgcaaatactacacatcaaatcttgtgagatgctgctaaaaa

SEQ ID NO: 321143 - DNA, 201 bp, Homo sapiens
gctgtgctcttaacctctacccaaaacgtttttctgatttttccatataggactttggacacttttcccatctcttggtttgtcttttagaatattccatyatcttctgtgaagacattggaatatggattctcattctcacttatttttgtctgtgtgtctgggtattttaccagagggtcattattagagtcaggataa

SEQ ID NO: 321144 - DNA, 201 bp, Homo sapiens
attatcttctctttcagatgaagaaactgaccttgtgagaggttaagtaactagcccaggtttatccagctgagttgaagagttatgcttcagacccagtmtgactttgaatcatagcacttaactggtgtgctatacctaatgggagatgatgtccaaatgtggggagtggtattaactctgaaatcactgtggtttttt

SEQ ID NO: 321145 - DNA, 201 bp, Homo sapiens
tggactcttcaccatggtcttcaaagcacatgacttatttaactcccaaaataaacccaagtgaaggaaaagaagcatcttggcctaatttttttttttttaatgaggaaccaaagaattcgagatagcgagtaacttgtccaaagtcaagtagcttgggaagtaacaaaatggacctattggaatctgggacatttgcct

SEQ ID NO: 321146 - DNA, 201 bp, Homo sapiens
attttaattacacatgtttggccagaaagctcatatgatacctatgggtctgaaaagtgagtaggtgcccaagggggagacatttaaaagatgttccattrtaatcccagcacttcagaaaaccaaggtgaaaggatcacttgtggccaggaattcgagaccagcctgggcaacataaggataccttgtctctacaaatga

SEQ ID NO: 321147 - DNA, 201 bp, Homo sapiens
gtgcctcaaagtagatcctgttcagacatgttacaacaagttcatttgagtttactttgtgcaaaaaaaatttaaattgatgcatcttttttcataatatrcattttccatgaagattttgaagacctctcatataacagaagtcagcatgtgtacaaaatttagtgtttttcttaatacctatcccctatatgagaattt

SEQ ID NO: 321148 - DNA, 201 bp, Homo sapiens
aactaattttaaaaagataatttcagaaagctattaaagctataaatggtttaggtcaaataaactgagtgacatcttaagttatatgtgcatgtgcttgkgggtctgtatcaaatgtatctcttattgacaaacatatctcgtgaagtattcacatctcctttcttagaggatgtggcactgtctgaacaacagcctggt

SEQ ID NO: 321149 - DNA, 201 bp, Homo sapiens
gtctttccttaaatggaaagaattctgctaaaattcttcaattttggaagaattaatgttgctctgacaggggctcttttcaaactgatatctcattattyttagtgcctcaaagtagatcctgttcagacatgttacaacaagttcatttgagtttactttgtgcaaaaaaaatttaaattgatgcatcttttttcataa

SEQ ID NO: 321150 - DNA, 201 bp, Homo sapiens
tggcatcttttatatttattattatttcttcccttcaggatttcctttgggaaattttattatgaatggtcacaatacctactcatttatttcagttctcraaattggtaacactccatttatgtcacaatttaactttcctagtggtccgtgtttatttctgttttatcctatcatctttcaagtgatccagaaagaggg

SEQ ID NO: 321151 - DNA, 201 bp, Homo sapiens
agaagttgcagtgaaccgagatcgcaccactgcactccagcctgggtcacagggcaagactctgtgtcaaaaaaaaaaaaaaaaaaaaaaaaaaaaatctrctaaatacattttgaacatataggacccaataaaatgtttctgacagtttgttatttagcaattgccttcctcaaaacacatgacagtgagcagtactcc

SEQ ID NO: 321152 - DNA, 201 bp, Homo sapiens
atttttttggttgtatggccttgggcaagttactacccttctccatgcctcagttttctcatttggaaaattggagtaatagtagtatatatttcctattmttattgtaaggatgaaaagatgatatgacctatgtgaaatgcctggtgtgtaataagcattcaatcaagtttccacagttgttatcactatacgtagcaa

SEQ ID NO: 321153 - DNA, 201 bp, Homo sapiens
taatttactggaagataaagagatggaaacagcataacattattaaatgccattaacctcggaacttaaaagtcatagaattgggagttgcaaaaactgcytatgccactcagtccacacaaagtaaaagaattccatctctccatttctccacttttgtctcctttgttattcaaatgagcaaaaacttgtttttttttc

SEQ ID NO: 321154 - DNA, 201 bp, Homo sapiens
caggtttataatactcaatatgtgaatactacttttaactgtggtttcagatttaaaagtacccttgtaaaagaatgtttcttatctttgtcattttcccscactttttaaatttcttttcttttcttttcagtgcaggaataggtagaacagggtgttttattgctacatccattggctgtcaacagctgaaagaagaag

SEQ ID NO: 321155 - DNA, 201 bp, Homo sapiens
aaacagaaactaggccagtgtggctggagcactggaaagaaagacaaggccagtgaagtgagccagagacttagatatgcagggctttgtaaaccagggtragctgtggagcctgttgtaaaagcagtaggaaaagacaacttaaagagtttctgcactgaatagataaaatagatttgatctcgtgtatatttttaaaat

SEQ ID NO: 321156 - DNA, 201 bp, Homo sapiens
tgttctggatcctcttttatctggctttttttttcgttatttatgtatttatttatttatttatttttgacatggggtctcactctgtcacccaacctggmgtacgacagtggtgcaatcttacctcactgcagcctcgaactcctgggctcaagcaatcttccggcctcatcctcccgaatagctgagactacaggcaag

SEQ ID NO: 321157 - DNA, 201 bp, Homo sapiens
aacattgagacaacaaataagcccacacaaatggggttattagagactataataaggtctatgtaagatacataccagatactgagatagagaatgtgatragggtgggggtggggtgcttctttagataaaatgattagagcagcctccatgaaaatgaacatttaagtcaagatctgatgaatcagagtaagcagcatt

SEQ ID NO: 321158 - DNA, 201 bp, Homo sapiens
cactggcctaatgtgtcagcaggttcctgtttctctttgataccatatcgcattttgtaagtactcatggacttccacatcaagctctataacctcagcayaaaaaaaaaaaaaaagagagaacagtatgtctaaaatgcagtgggtaggggggaaagggtttagacagatttcaagagacaggaagcggcttgatcatgc

SEQ ID NO: 321159 - DNA, 201 bp, Homo sapiens
ttgtaaatttagagagataagacaatataatctctaaaaatctcagcactttaatgtgacttatttcttaattattatctaacagatgtttgcaaaaagtrtaacagtacatttggaggtaaataacaaaatcactgccctgtcattgccattattatttaaagccattttaatggttgtatcttgtgcctaattcccatg

SEQ ID NO: 321160 - DNA, 201 bp, Homo sapiens
caattgataatgacaccaggacaacaccaatgaaccacaactcttccaaacatggttaccctaggtgtcgtattaactaagaataagaaaaataatacacrgcatttatttagtactcactgaagggcagttactgtgccaagagttttgtggattctctcatttaaaccttgtaaaacttgaagccttattagataaata

SEQ ID NO: 321161 - DNA, 201 bp, Homo sapiens
gagtacccttgtttctcacctcccagaaccactttgtattgggaactttatatcagtaatatagatccagattttagcaaatccatgaaacctatctgacytaagagcttcctggagtcaagtcagagctctcctgaggatgaataactatagagctctcttgagagttccatagttaaccaagctttatacatttattcc

SEQ ID NO: 321162 - DNA, 201 bp, Homo sapiens
tccatcactttgggagcccaagacaagaggatcacttgagtccaggagaccagcctgggcaacatagtgaggccttgtctctacaagaaaaaaaaaatttraaaattgtccaggtgtggtggtgcctgtggtcccagctacaccagaggctgaggtgggagaattgcttgatcccaggaagttgaggctgcactgagctgt

SEQ ID NO: 321163 - DNA, 201 bp, Homo sapiens
aattaaaataaagggctcttttttgacttctatgttaagttcaggggtacatgtgcaggtttgttacgtagataaacttgtgtcatgggggtttgttgtayacattatttcatcacccaggttaatacctactaccccttagttatcctactacccctaaatataaataaatatactaaatataaatatactaaataatcc

SEQ ID NO: 321164 - DNA, 201 bp, Homo sapiens
tgcaggtttgttacgtagataaacttgtgtcatgggggtttgttgtatacattatttcatcacccaggttaatacctactaccccttagttatcctactayccctaaatataaataaatatactaaatataaatatactaaataatcctactaccccttagttatttttcctgatcctcttcctcctcccactctctaccc

SEQ ID NO: 321165 - DNA, 201 bp, Homo sapiens
gtgtctgttcctgtcctttgatcaccttttaatgagattttttttcttgtaaatttgttaaggttccttatagatgctggatattagacctttgtctgatrcagagttggcaaaaattttcccccattctgtaggttgtctgttatactctgttgatagtttcttttgctgtgcagaagctctttggtttaattaaatccc

SEQ ID NO: 321166 - DNA, 201 bp, Homo sapiens
atgggtctgaaaagtgagtaggtgcccaagggggagacatttaaaagatgttccattgtaatcccagcacttcagaaaaccaaggtgaaaggatcacttgwggccaggaattcgagaccagcctgggcaacataaggataccttgtctctacaaatgaaatttttttttaattagccattgccatgataggaataaataaa

SEQ ID NO: 321167 - DNA, 201 bp, Homo sapiens
taatcccagcacttcagaaaaccaaggtgaaaggatcacttgtggccaggaattcgagaccagcctgggcaacataaggataccttgtctctacaaatgamatttttttttaattagccattgccatgataggaataaataaacaagccaggcatggtggtgtacaaatgtagccccagctacttgaaaggcagagaccag

SEQ ID NO: 321168 - DNA, 201 bp, Homo sapiens
ggttgaagaagattggtaatagagttatcggtatgaaactaaacaagaaatccaacagcgtaacgcaaaggctgtgtcacaatagtgtcacaataaacacycaatactttagaagagaaaacaaatataggaaatattcaactctccaccctttaattaaaaagaaaatatcctttccttacgcttatcttaagagaacta

SEQ ID NO: 321169 - DNA, 201 bp, Homo sapiens
aataaataaacaagccaggcatggtggtgtacaaatgtagccccagctacttgaaaggcagagaccagaggatcgcttgagcccaggagtttgaggatgcrgtaagctatgatcgtgccactgcactccagcctggctgacagtgtgcaagcttgtgtgtgtgtgtgtgtgtgtgtgtgtgtataacatatatatatatgg

SEQ ID NO: 321170 - DNA, 201 bp, Homo sapiens
aagttctagggtacatgtgtgcaatgtgcaggtttgttacatatgtatacatgtgccatgttggtgtgctgcacacattaactagtcatttacattgggtrtatctcccaatgctttcccttccccctccccacaccccacaacaggccctggtgtgtgatgttccccttcctgtgtccaagtgttctcattgttcaattc

SEQ ID NO: 321171 - DNA, 201 bp, Homo sapiens
acatcttcatcatgaaatgcctatgtccttgcctatggcttgaatggtattgtctggattttcttaaaggatttttatagtttgggtttttacatttaagygtttaagccatcttgagttaatttttgtatatgatataaggaaggagtccagttttaattttctgcatatggctagtcagttctcccagcaccatttact

SEQ ID NO: 321172 - DNA, 201 bp, Homo sapiens
atgtgccatgttggtgtgctgcacacattaactagtcatttacattgggtatatctcccaatgctttcccttccccctccccacaccccacaacaggcccyggtgtgtgatgttccccttcctgtgtccaagtgttctcattgttcaattcccacctatgagtgagaacatgtggtgtttggttttttgttctttcaatag

SEQ ID NO: 321173 - DNA, 201 bp, Homo sapiens
cacccctctcatcctactacttataattaaatgtaaaaatatattttaagcacttagcacagggccaggtttataatactcaatatgtgaatactacttttaactgtggtttcagatttaaaagtacccttgtaaaagaatgtttcttatctttgtcattttcccccactttttaaatttcttttcttttcttttcagtgc

SEQ ID NO: 321174 - DNA, 201 bp, Homo sapiens
ttcatctccctagttagctgtattcctaggtattttatccttttggggcaattgtgaatgggagttcattcctgatttgcctcttggcttgactgttgttrgtgtacaagaatgctagtgatttttgcacattgcacattgattttgtatcctgaaactttgctgaagttgtttattcgcttcagaagcttctgggctgaa

SEQ ID NO: 321175 - DNA, 201 bp, Homo sapiens
ccaatcttcaattgctcaattattcactagacttctgaacatcagtatgtccaaggcaaaactccccttccctgcctccttcaaattcaccctattccagsatgcacttggcctcagggcatcaccattcttctttctctccaggcctagtcatctttgactttttgcttttctccctcttcagctccagtccttcagatt

SEQ ID NO: 321176 - DNA, 201 bp, Homo sapiens
tgtcgctggtcaactggattcatgagcataaattggagtcacaagataaattaggatctcatgcaggactttgcttatgaaacacgaatccattcaagatrgattcaacaggaagcaaagagaccaaagccaccacaagcatgaccaaggccacctagcctctgacttagggccatcatgttggtggagaggcaacctggc

SEQ ID NO: 321177 - DNA, 201 bp, Homo sapiens
tcccataataacagcaaaggtgtctctggtgccccagtgctaagcgatattttcagttaactgtagcccaagcccaggaggctgttatctatggcaaaackcaaagttcctgttccctacaaatgtgccagggcagattcagaaatcaataactgtctgaatatctagaaagcccactgatagagtcagagccaagatcat

SEQ ID NO: 321178 - DNA, 201 bp, Homo sapiens
attttccttttaatgtaaccaaactgaaggcagcatttttaaagtaatttatatgaacaactatttatttatttatttatttatttatttatttatttattatgagacagagtctcactctatcacccaggctggagtgcagtggcgctatctcggctcactgcaacctccgcctccttggctcaagtgattcccctgcct

SEQ ID NO: 321179 - DNA, 201 bp, Homo sapiens
gctgactgcgcccaaacaaaattactctcctgtccttccaggcatgcatatattccaaatctaactttgcaccttaatgtttaatccacagtgttatgttyaaactgcattagcctgctttacttccaactatagttagaagccctcttgtttaacacagttaatcagccaggcacggtggctcatgcctgcaatcctagc

SEQ ID NO: 321180 - DNA, 201 bp, Homo sapiens
aattttccttttaatgtaaccaaactgaaggcagcatttttaaagtaatttatatgaacaactatttatttatttatttatttatttatttatttatttattatgagacagagtctcactctatcacccaggctggagtgcagtggcgctatctcggctcactgcaacctccgcctccttggctcaagtgattcccctgcc

SEQ ID NO: 321181 - DNA, 201 bp, Homo sapiens
aggcacggtggctcatgcctgcaatcctagcactttgggaggccaaggcaggaggatcacgacgtcaggagatcgagactatcctggctaacacggtgaawctccgtctctactaaaaaatacaaaaaattagccaggcatggtggcgggcgcctgtagtcccagctactcgggaggctgaggcaggagaatggggtgaac

SEQ ID NO: 321182 - DNA, 201 bp, Homo sapiens
ccattctctaatttccacaactataactagaaattataaggaaaataaatgtctaaacttacagatatccatcaaattaaagtagaaattaaaatctcaaytacaaaccatttagaaattaacaaaaatgacattacatatcaaattatagaatgacaacaaaaatgcaaccagaggcagattcatcagagaagaaaactg

SEQ ID NO: 321183 - DNA, 201 bp, Homo sapiens
agggagctatgatcacaccactctactccagcctgggccacagaatgagatcctgtcccaaaaataataataaataataaaattatatatatacatatacrtatatacataaactccctcaaaaatcattgattttaactaattctataaattctaagaaagcactgcaagaagtacaaaaagaatgttacaggataaaat

SEQ ID NO: 321184 - DNA, 201 bp, Homo sapiens
taattttccttttaatgtaaccaaactgaaggcagcatttttaaagtaatttatatgaacaactatttatttatttatttatttatttatttatttatttattatgagacagagtctcactctatcacccaggctggagtgcagtggcgctatctcggctcactgcaacctccgcctccttggctcaagtgattcccctgc

SEQ ID NO: 321185 - DNA, 201 bp, Homo sapiens
accagcggagttcactgtgacagattgccaagggaaaagaaagcttattttcttcttgtcattaatagttaattgttattgcagtttctcagatgggaaaygtgggttagggaaatcatatctatcctttctaaaagtgctgcagtattattagaggtgatcacatggcagaaaataaacctattccttgaggaattaaat

SEQ ID NO: 321186 - DNA, 201 bp, Homo sapiens
ctaattttccttttaatgtaaccaaactgaaggcagcatttttaaagtaatttatatgaacaactatttatttatttatttatttatttatttatttatttattatgagacagagtctcactctatcacccaggctggagtgcagtggcgctatctcggctcactgcaacctccgcctccttggctcaagtgattcccctg

SEQ ID NO: 321187 - DNA, 201 bp, Homo sapiens
gagggcagacaattttgtctcttgaggctgaaaatttgactgaatggcatggtgattttaaagggcataggactagccatcccttaagcggcctctctcamcttcatactaaaatatctataaagcttgcaaaagctgaattctcacaaatgccctaaatattaagaccaatcggcaaactattatcagaatccgtaagga

SEQ ID NO: 321188 - DNA, 201 bp, Homo sapiens
agaattctagcctccttggcctctttgaattctgaacttggggagatgtgtggcctctcttcaggcaggaagctgaggtgctggtgacgctcatcccactrtttcctcctctcaaggatcactgtcctgtgctgcctgttgtccaacatctgaaaacttttgcttcacatatttggtctagttttatactcatttaaggca

SEQ ID NO: 321189 - DNA, 201 bp, Homo sapiens
aggaacacaggaggaagaccaagtgtgggctaaaaagaatgatgaattcagttttagacataccagtgttgctagtgaaagcttaaagcatgataacatayatcaactcagagaacatgaagtaagattaaaccttcttaggtctaattgttgcccaaggagaatattgactttgttgatcacctcttgcatcttaagccg

SEQ ID NO: 321190 - DNA, 201 bp, Homo sapiens
attccaggttattgttttatggtggtgactactactatagtacatagacctgtttaaaggtcatatttttcttgaggaatgtgcattcattttcatatttrcatatactcctaggtaaggatcattttcctggggtgtactcatttatttcatatttgtttataaatatttgtgcaccacagtgtgactcttacatttttt

SEQ ID NO: 321191 - DNA, 201 bp, Homo sapiens
caagagacactgtcctctggaaacctatttttttcttccaaattatggattcttagaattaatagataattttactgaaaggataagcctagctagcaaargaatagtgatgatttggggttatattctgctaaatagcatgctattttgaatcacctacaattagtgtggtttcacagtattatctgtaaggcagcattt

SEQ ID NO: 321192 - DNA, 201 bp, Homo sapiens
tttcttaatgtcgcattccagagtaagtattaaaataccagagggaataatttgctgggcctagcatctactcttactgtctttactctcacatattttgrcctgtttttccctgctctctacttccttgagccgccaactgcttggcactatatttgatctgacacacacctacggcccctttaaatgtaacagtttttg

SEQ ID NO: 321193 - DNA, 201 bp, Homo sapiens
ttaatttttcatatattttaagctctttaagtaacttttaaaacttttaaaacacattaaagtgtttgtgggctgccatgtatcaaactttaacataggtrttacttttttaaaatagtttaaagtgaccttaaagtgtcttctgctaccttattgaattaaaaagtataacacataatagtattcattcatttgttcacc

SEQ ID NO: 321194 - DNA, 201 bp, Homo sapiens
tggaatccacttatggtgggaaaggatagtctacagtgcaagaagtgattgcatccagaaagtggtatgtatgattgcttacattcaaggttagaaatctwtaaccattctcttttggaagaggagatagacaagacattttgatcaggttttaaaaaaaacgttgaatctgtttattcaaactagtggacaattttgaaa

SEQ ID NO: 321195 - DNA, 201 bp, Homo sapiens
gccaacctatgatttctgtaataagtatatgcattcataaattatagcatattttctcaatttagagttctttccaacaacaaaattgttattttcctgtraaggaactatgggtagttgctatggccaaccatgatactaaaagagaaaatatagttggttgttatttctgtaaaagttctcactgaattgtgtgcatgt

SEQ ID NO: 321196 - DNA, 201 bp, Homo sapiens
tgacaaacatatctcgtgaagtattcacatctcctttcttagaggatgtggcactgtctgaacaacagcctggtgttcttcagaacaatcattttgaaccrgcatttcctttggaatcactctcaatcttttctcagcctgttcaacaagactgtgtataaaagtagtagagtggcacctaatagttagctcttgagcaga

SEQ ID NO: 321197 - DNA, 201 bp, Homo sapiens
acaaaacaaacaaaacaaacacaaaaaacacacacacacagaaaaaattagctcagtatggtggcatgcacctgtcatcccagctacttgggaggctgagrtgggagaatcacctgagcctgggaggccaaggctgcagtgagctgtgattgcatgactacactccagcctgggcaacaaagcaagaccccatatcaaaaa

SEQ ID NO: 321198 - DNA, 201 bp, Homo sapiens
attgactaagcaactgagcacagcccatgtttgcctttacaaaagagtttctttatttaaatttttatttttaattttgtgggtatgtagtaagtatacaytaatggagtacattgccttaaatttcattataaaatcagatgtgcattcattcagatagaaagattggctactcaatagatatgtaaattttactttaaa

SEQ ID NO: 321199 - DNA, 201 bp, Homo sapiens
caaagtgaaatggttttagattcactcagtctcatccactattgataagtattaaaattggaatgtagagctaaattaaggcagaatatgcaagaattggygaggcaaataagtggtatagggagctgggcagagaaggggcattccaggacaaagaatagccttgctgtcactgtctggggaattaaactgttcagttta

SEQ ID NO: 321200 - DNA, 201 bp, Homo sapiens
agatgatagatagagagagaggcacatatctgtgtgtgtatgtcctgtctcacaaatttattttctttttttttttttttttttgagacggagtttcactytgtcacccaggctggagtgcaatggcatgatcttggctcactgcaacctctgcatttcaagagcttgaactgcctcaatcctgggttcaggagattctcc

SEQ ID NO: 321201 - DNA, 201 bp, Homo sapiens
caccttggctgatgccaaatccaagtacttgatcattaggctgtaccacctccccagtaatgttacacaggtaaaaattaatcacgtgcctagtgtgtgcygggaactgtgttaagccctttatatacattaccatgttaactttgatagttgagacatttggacacaggtaagagggataacaaaagaaccactaggtcg

SEQ ID NO: 321202 - DNA, 201 bp, Homo sapiens
aaggatgtatttcaaaccacttagccttccatataagatcccagggtacctctctatctttatttcccatagttccactaaaataactttctcttcaagayaagctgttctacttattgttgcaaatcatatttgctgtttctcattaattcttttcttctttcattgtatatcattgtcgtacctagaatattctctctc

SEQ ID NO: 321203 - DNA, 201 bp, Homo sapiens
agctgttctacttattgttgcaaatcatatttgctgtttctcattaattcttttcttctttcattgtatatcattgtcgtacctagaatattctctctcarttataacagccaaaatacctgccattcatggggcacagttccaatcctatttcttcaatgaaatgaactttctgtggacacttcagctaaaagagagcca

SEQ ID NO: 321204 - DNA, 201 bp, Homo sapiens
aaaggagggagggcatttctgaccaagaaaacattgttaacacagaaaaattggaaaaccaaaagcccaaacaattgacgtaagtgaaaatcatggcacaygggagggaagacagcaaaatacataaggcttgaaagttagtcacattcagattttgcaaggtcatgaataccatggtagggaggttagacattatgctat

SEQ ID NO: 321205 - DNA, 201 bp, Homo sapiens
tctaaataatttcaagctctctgaaaagtgtgagaataatgctctcatattcccatagtacgcttatattcatctagattccccattgttaatgttttacrttgatgttatcagctacctatccttctctctcttcttctttctctttctcaataaataaatagttgatagatgatagatagagagagaggcacatatctg

SEQ ID NO: 321206 - DNA, 201 bp, Homo sapiens
agaccttaattattttttattttttctagaacaattataatgcctttttactgttcccccaactcaccacttccccccacccctctcatcctactacttayaattaaatgtaaaaatatattttaagcacttagcacagggccaggtttataatactcaatatgtgaatactacttttaactgtggtttcagatttaaaag

SEQ ID NO: 321207 - DNA, 201 bp, Homo sapiens
tggtgagccttctatttattgttcactcttcagtcggtattttgatacatggggcactagagacgtatggaaatgatactgtcctatacttaagcagtctrcagtaaacaaatggcaaagtgaaatggttttagattcactcagtctcatccactattgataagtattaaaattggaatgtagagctaaattaaggcagaa

SEQ ID NO: 321208 - DNA, 201 bp, Homo sapiens
cctagttagctgtattcctaggtattttatccttttggggcaattgtgaatgggagttcattcctgatttgcctcttggcttgactgttgttggtgtacargaatgctagtgatttttgcacattgcacattgattttgtatcctgaaactttgctgaagttgtttattcgcttcagaagcttctgggctgaaactctggg

SEQ ID NO: 321209 - DNA, 201 bp, Homo sapiens
aagattcctctaattaatgaacttcaaagatctcatttgaagatcaggaattcaacattttgatttgcttattttaaggacacttggagataaagccctaraaattggtgtggatttacttgacattataattcctgagatcacaacaagaggtctactttgtaaaacatattatgctgactgaatcttccaagtggctgc

SEQ ID NO: 321210 - DNA, 201 bp, Homo sapiens
gcctcttggcttgactgttgttggtgtacaagaatgctagtgatttttgcacattgcacattgattttgtatcctgaaactttgctgaagttgtttattcrcttcagaagcttctgggctgaaactctgggttttctagatataggatcatgtcatctgcaaacaggatcatgtcatctgcaaacagggatagtttacttc

SEQ ID NO: 321211 - DNA, 201 bp, Homo sapiens
tcaggaattcaacattttgatttgcttattttaaggacacttggagataaagccctagaaattggtgtggatttacttgacattataattcctgagatcayaacaagaggtctactttgtaaaacatattatgctgactgaatcttccaagtggctgccaggacattttccttcttcctagcttggagttaattaggtgtt

SEQ ID NO: 321212 - DNA, 201 bp, Homo sapiens
gtttattcgcttcagaagcttctgggctgaaactctgggttttctagatataggatcatgtcatctgcaaacaggatcatgtcatctgcaaacagggatartttacttcctcttttcctatttgaatgctctttatttcttcctcttgcctgatttctctggccaggacatccaatactatgttgactacaagtggtgaaa

SEQ ID NO: 321213 - DNA, 201 bp, Homo sapiens
cctcagtaccatgtgctatccttaacttgctgccaaaatacccatggaaattgttgtactagagtcagtgaagccgtaacctgtgttgcttttgtactagsccagctatttcgttgaagatctttcacctacactttcactgcaaggcatgaacttaaaaaccaatatttttgtttctttactccatctagggctacagtg

SEQ ID NO: 321214 - DNA, 201 bp, Homo sapiens
ggtactctggagaaatgcacaggtgagagagatcagatgtcatgagaaggtacagcattggtgtaaagacaataaaagagggtattgtattatgatgtatwttctgcttttaacattatgagtattctccatgtcattaataattcatcaaaatgttaaattactagaatttcattgtgtggatgtgctaaaatgtaatca

SEQ ID NO: 321215 - DNA, 201 bp, Homo sapiens
ctcagtaccatgtgctatccttaacttgctgccaaaatacccatggaaattgttgtactagagtcagtgaagccgtaacctgtgttgcttttgtactagcscagctatttcgttgaagatctttcacctacactttcactgcaaggcatgaacttaaaaaccaatatttttgtttctttactccatctagggctacagtgg

SEQ ID NO: 321216 - DNA, 201 bp, Homo sapiens
attttggtttgtcggccagggtggggtggaggagatcatactcttgtttagtgtgagaaaatgtgacaggagttttttatatctccttctatagattcttyacagattaaaagaaagatttcagctttccttaagacaagacaaagagaaaaaccaggagatccacctatcgcccatcacattacagccagcactgtccga

SEQ ID NO: 321217 - DNA, 201 bp, Homo sapiens
tccacataattcatgcccacacacaccaccttatctggccatgtggctggagccagggaggtcacttccaaccatggtaggactggcaactgggcacccarggctcttcttgccactgagaggatggcctctccctgctctaggaactgtgtcatcattttggggagcatagagtcaaaggcattgaggttgataaccctt

SEQ ID NO: 321218 - DNA, 201 bp, Homo sapiens
tactgtaataataatcatacatcaatagaaaattattagcacacaataaaatactgtaataataagtttaaattttttatttttactttagattcaggggstacctgtgcaggtttgttacaagggtatattgtgtgatgctgccgtttgggcttcttctgacggcatgacacccagagagtgaacatagtacccaatagg

SEQ ID NO: 321219 - DNA, 201 bp, Homo sapiens
taaatcattgatgaaggaaattgtagagaacacaaataaacagaaatatatcctgtgttcatggagtggaataattaatattgttaaaatgtccatactaygctaaacaatcaatagattcaatgcattccctatcaaaataccaataacattcttcatggaaaaaaatttttaatcctaaaatttgtatgaagcgacaaa

SEQ ID NO: 321220 - DNA, 201 bp, Homo sapiens
ctggaagacactcttaaaaaatgaatacaacattatgaatacaaaataagatacaaggttcttattgaaaatggctcatgcaagtgagggtcagtctgccsctgaccaacaattgtaggaaatgtagagatagatctgttaagactgtatgagatttgggggaaaatgaagtgcttttgaaagtttggtgctagcttccat

SEQ ID NO: 321221 - DNA, 201 bp, Homo sapiens
gttagaactaatagacaaatttagtaaagttcaaggatacagatttaacattcaaaaatcagtagcatttgtatatgctaatggtgagctagctaaaaacraaatcaagaaaacaattccatttacaattgctaccaataaatagagatacctaaaaataaatctaaccaaagaggtgaaatatcttttatactgaaaact

SEQ ID NO: 321222 - DNA, 201 bp, Homo sapiens
tccgaggcaaagacagtccacagcatggtccaacctgagcaggccccaaaggtactgaatgttgtcgtggaccctcaaggccgaggtgctcctgagatcaragctaccaccgctacctctgtttgcccttctcctttcaaaatgaagcccataggacttcaagagaggtaagagcttgttctgtataccctacgtgtggct

SEQ ID NO: 321223 - DNA, 201 bp, Homo sapiens
acatgaaaatagcatgacctgggtaattcatttgacaagtatttacctaggactcgtaagtgctttttattgttacaagtagaagaagaccatgccattaygcttgtaggtctttaaaggacctacaacctagttggaaataattatagaatgggattagatagtatatatcatgatatcaacttactcatattaaagacc

SEQ ID NO: 321224 - DNA, 201 bp, Homo sapiens
cataaaactgacaaaactttagatgccacagaaatgcaaagaattataaaagactatggtgaacaatactacacgaacaaattggataatctaaaaaaaaatgaataaattcctggacacatgcaaccttccaagattgaacaatgaagaaatagaaaatctgaaaacgctaatgagtgaggaaattaaatcagtaacaga

SEQ ID NO: 321225 - DNA, 201 bp, Homo sapiens
tcacttataccagataaaatagacttcaaatcaaaaatcacaaaaaagcacaaagaagatcattatataatgatacatgggttaattcaacaaaaaaaaaattgtaaatatgtatgcacctaacactagagtacccaaatataaagagcaattatttattagattaaagaaagagatagactgctatatagtaataatcat

SEQ ID NO: 321226 - DNA, 201 bp, Homo sapiens; identical to SEQ ID NO: 318239

SEQ ID NO: 321227 - DNA, 201 bp, Homo sapiens
tacaggatgggagaaagctataatgtccacattcaaaaaaagtcttgttgactttttatttaatctacaccgtcagttagtatcttaaaatactaccgagmaccaggcaccatgtaggcactgggggacctcaccacctgatgcacctgcaaacacagatctattggtctctaacgtgcagctggaagagaaaataagcct

SEQ ID NO: 321228 - DNA, 201 bp, Homo sapiens
aggtaccgctttcattttaggacaacttactgggattatttacagtctaattttaatcagcatttcagtgtttgttttcttgtcaaaaatattgtaccagrgcttcaccatgacagtaagaatttaagaaaactaagcattcctttataagcctttggtgattataatccttgagtacagcataatcctgctgctaatgga

SEQ ID NO: 321229 - DNA, 201 bp, Homo sapiens
attatcatgtctatacaaatctcttggaaatatgtgcctctagctgcaccctctcctaaaatgaatccaatcttcaattgctcaattattcactagacttmtgaacatcagtatgtccaaggcaaaactccccttccctgcctccttcaaattcaccctattccagcatgcacttggcctcagggcatcaccattcttctt

SEQ ID NO: 321230 - DNA, 201 bp, Homo sapiens
gctgctgagtgaagaatgttctagcctggacagaaatctgagcaaactgaggattagtaaggcttgggaatataaggggtggtttttgacatcagtgaaasggcatggaaatgggaagattatgatttactctgtgagatggactcatgggtaagaaaaataaaggaaaggagaagatggaggagaagaaacaggaagaag

SEQ ID NO: 321231 - DNA, 201 bp, Homo sapiens
tcttctttttattagtaatcaggaaaatttatagtttatttgttacaaggagagtacaacacaattagaatgtttatcccaaataatgctaactatgttcsggaactcaattaagaagctgttattaggatttctgtgcaagtacaatgtagagaagatattgaatgcctcaaggtcagtactatggtaagaggaaaaaaa

SEQ ID NO: 321232 - DNA, 201 bp, Homo sapiens
tttattttttctagaacaattataatgcctttttactgttcccccaactcaccacttccccccacccctctcatcctactacttataattaaatgtaaaartatattttaagcacttagcacagggccaggtttataatactcaatatgtgaatactacttttaactgtggtttcagatttaaaagtacccttgtaaaaga

SEQ ID NO: 321233 - DNA, 201 bp, Homo sapiens
taagaattctattataaatccagattcctaggctacatctatagagattatgctttggtagttctagtctggggtctaagaaactgtatcatcatgtcccrggtagctctgatacagagaacctaaggacagcactatgaaattttttttcttacctaatgattgtggtaggacacctaatattacactgctatcttagaa

SEQ ID NO: 321234 - DNA, 201 bp, Homo sapiens
cttctcagtcttcacttttccaaaatttttacttgagtatattcataaagctgaagtgaaggaggaaataggtagcatttgaggatagaaaatacaaaacyaattccagacattaggtcagtggtcctcaaacatcagagtttgaacataagaattctattataaatccagattcctaggctacatctatagagattatgc

SEQ ID NO: 321235 - DNA, 201 bp, Homo sapiens
ccatttctcctttcatttttgtcagctttgctccatgaattttaagctcatttttgatgcatatatatttaggaatattatgtattcttatgtacattgcrtcatatgtccatcattatgtaatgtccctctttatccttgggaatttctttgtgctgaattgatattaatatagtcactccaggtttcttttgattaggt

SEQ ID NO: 321236 - DNA, 201 bp, Homo sapiens
attttcccatttctcctttcatttttgtcagctttgctccatgaattttaagctcatttttgatgcatatatatttaggaatattatgtattcttatgtayattgcgtcatatgtccatcattatgtaatgtccctctttatccttgggaatttctttgtgctgaattgatattaatatagtcactccaggtttcttttga

SEQ ID NO: 321237 - DNA, 201 bp, Homo sapiens
aattttcagaggaaaaaaaaatggaactcaaaatatgttagactcatcaattgaattatcatttgatatatgctgatttttatgacctacaaatactttaraacacatctattttggagaaggtgtctatgttcaaaatacctggtcagaattggccaaatttacatttaagttctccctccttgatatgacatctgtgta

SEQ ID NO: 321238 - DNA, 201 bp, Homo sapiens
ttaattcaagatggattaaagacttacatgttagacctaaaaccgtaaaaaccctagaagaaaacctaggcaataccattcaggatatgttatatttttaytttagttcagttcaaaatatgttctaatttgtcttgtgactttctctttggcccatggatatttagaaatgtgtttttttaatttccaaattttggaaat

SEQ ID NO: 321239 - DNA, 201 bp, Homo sapiens
agctgatatgtttaggaaaggaagggtgttggtccaccagaggtgctagatctgttgtttttaagtggctttgaagtccaatagaactctggatcagatgyccccctgtgaagattttctttgtggcagtattagatacactaatttgatattatttatttttgcaggaaataccaatgaactttgtggatcccaaagaaa

SEQ ID NO: 321240 - DNA, 201 bp, Homo sapiens
atagtattccatggtgtacatgtgccacattttcttaatccagtctatcattgttggacatctgggttgcttccaagtctttgctattgtgaatagtgccrcaaccaacatatgtgtgcatgtgtctttatagcagcacgatttataatcctttgggtacatacccagtaatgggacggctgggtcaaatggtatttctag

SEQ ID NO: 321241 - DNA, 201 bp, Homo sapiens
tattattattatactttaagttttaggatacatgtgcacaacgtgcaggtttgttacatacatatacatgtgccatgttggtgtgctgcacccattaactmgtcatttagcattaggtatatctcctaatgttatcccttccccctccccccaccccacaacagtctctggtgtgtgatgttccccttcctgtgtccatgt

SEQ ID NO: 321242 - DNA, 201 bp, Homo sapiens
tataaagagtatcaaggagttaaaaaaagactaaatgatgatgaaaagaaaaacataaactgtagaaaaacaatataaataagagaacaactaaaataaaatgaggtgtctttttaaaagtgcatatattgacaagataatgcattgggttcacatttatagaagtatcactttgaattagaaatttgaagacaagcaaaa

SEQ ID NO: 321243 - DNA, 201 bp, Homo sapiens
aaataattatataaactaggaaaaattaacttaggaactaaaaatagaactactatcattttgttattttgttgaaagggaaacagcctcctcaccatgartgacagtcaaaacaataccaaatgacaaaaaaaaaaggagtaaaaattaatcatccttggttacaaaacaaagcagtacattttcttcctttttctgaat

SEQ ID NO: 321244 - DNA, 201 bp, Homo sapiens
caaaatatgttagactcatcaattgaattatcatttgatatatgctgatttttatgacctacaaatactttagaacacatctattttggagaaggtgtctrtgttcaaaatacctggtcagaattggccaaatttacatttaagttctccctccttgatatgacatctgtgtaaagccatgggaaatcctctgtccaaggg

SEQ ID NO: 321245 - DNA, 201 bp, Homo sapiens; identical to SEQ ID NO: 67306

SEQ ID NO: 321246 - DNA, 201 bp, Homo sapiens; identical to SEQ ID NO: 67308

SEQ ID NO: 321247 - DNA, 201 bp, Homo sapiens
aatggccttgttaaattctaagtttggtaatctggtttcaactctctgcttcatttcttactgtgtgaccttgggtgagttacttaacctctctgtgctgmaatttcctaatctaaataaagagactgttaacagtatgtacgttatagaattgtaataattaagtgacctaatgaataaaatgctgttacctgctctacc

SEQ ID NO: 321248 - DNA, 201 bp, Homo sapiens
ttttacctgtggcctataagatcagataagcatcttggtcttcacaagtcaatctaaagctttaagcagaatgggactttctcctgccaaagccagatccsttatagctcaaatctactttatccatccttggatagaagctcctattacttgttttatttatatatataacatatatataaaatatctttatttcaaata

SEQ ID NO: 321249 - DNA, 201 bp, Homo sapiens
aatgaatacacaaagatgttctttatggttttagactgtaatatgagataaacttgaaatattacataaaatgatgattattaaatgatcaagaatttaarcattatgattgtttttagttttaacctacactaaactcttcttagttctaaaagcttgacagcttgtacataatagcaacattatacaattctgagaatg

SEQ ID NO: 321250 - DNA, 201 bp, Homo sapiens
tagatccagtgccccatccatgaagcccatatagcaccttgccctcaaaggaacagacaatcttgatcagcagagaaaccaagtccaaactggcctcatgmgcagtcagcatgctcaccagcgaatgcaccattccaaagcgagtcccacccaaaccagtggaccagcccctgcatgtccctggtgcactcaacagttggg

SEQ ID NO: 321251 - DNA, 201 bp, Homo sapiens
actccataaaattaaaagagttgaccattccatcagatgcacaaatatcaatacagggatacaagatacatgaaaaagcaaagaaacatgacaccatcaargaagcagaagaatcctccagtaactgacccctaaagaaatggaaatttataaattgcctgaaaaggaatttaaaataatgacctgaaggaaattatgaat

SEQ ID NO: 321252 - DNA, 201 bp, Homo sapiens
aggatgccttgagcccaggagtttgaggttacagtgagctatgattgtgccactgcacactgacctaggtgacagagtgagatcccatctctaaaaataaattaattaataaacgaatagctgtttctctctgtagaacaagcctcaaattcatagtatagtccagcttttctcaaattttcagaatgactgaaaactagg

SEQ ID NO: 321253 - DNA, 201 bp, Homo sapiens
gaggatgccttgagcccaggagtttgaggttacagtgagctatgattgtgccactgcacactgacctaggtgacagagtgagatcccatctctaaaaataaattaattaataaacgaatagctgtttctctctgtagaacaagcctcaaattcatagtatagtccagcttttctcaaattttcagaatgactgaaaactag

SEQ ID NO: 321254 - DNA, 201 bp, Homo sapiens
tagagacagggtcttgctatgttgcccaagccagtctcaaactcctggcctcaagtgatcctcctgcctcagtctcccaaagtgctgggattacagatgtsagccaacatccctggactatttttgggctttttatagtcttatagtgtctatgactgttgcttctctctcatctctcttacataagcctgctccccaatt

SEQ ID NO: 321255 - DNA, 201 bp, Homo sapiens
tttgagtctttgaagatttgtttatgtggagaacaatgggatagccgcaatagtcataacatttgccaaacatctcctaggaaaagggtgggttttttttwaaaatctagcctcaggaatatattgcccaaagttttcattctaaaggaagaatccaaaaccaaaaaaggggacatctccaaggccacatgaccaattttg

SEQ ID NO: 321256 - DNA, 201 bp, Homo sapiens
atatctgaatatgataagtacaatgaactttctgttggccagcattgttgcaaaagggatattttgctcaatcacattttcctattaacaggagattaccrtaaatgtataggtcaattttttaaaattatagttgaaaaaaagatccataacattagtactaaactgaacacagtataatcattttttattacttagaaa

SEQ ID NO: 321257 - DNA, 201 bp, Homo sapiens
tgtgggttatctgtttactctgctattcttttgccatgcaaaagcttaattaaattaattaataattaaattaatgattaagtcccaactatttatctttstttttattgcatttgcttttgggttattggccatgaaatcctcgcctaagacaatatctagaagggtttttccaatattctaggatttttagagttttag

SEQ ID NO: 321258 - DNA, 201 bp, Homo sapiens
gatacagaatagttcgctcaccacaaaaaaacttcctactatctttttgtctccaactcctacacccaaataaccactgatctgtatttcataactatatwtttttgtcttttgagaatgtcatgtaatggaaaaatacagtgactttttgagactggcttctttcgctcaacttaatgccttttatattcaagttgtgtg

SEQ ID NO: 321259 - DNA, 201 bp, Homo sapiens
aaataactctattaaagctgggcaaaaatcaggaaacatgaacccctttcattgcaattttaccaccagcaaatagcagacaatggatttttcctgaaacrgttgtcaattctgtaactcccaaatagaggtttacactgttcagctcaactttcaatggataaacagggagaagtaagggatatccagagtatttatgct

SEQ ID NO: 321260 - DNA, 201 bp, Homo sapiens
tcactttttccagcagagtctgaggcccaaggtcttaatgctcattctttcttcatgacttatgtctagtcacattgtcccaaggtaccgttttaattgtrttatgttccactctgtaatagatatttatcaaatgaaaaataactctattaaagctgggcaaaaatcaggaaacatgaacccctttcattgcaattttac

SEQ ID NO: 321261 - DNA, 201 bp, Homo sapiens
tggcagctctttcagtgcctctgaaaatttcatgacatttaagaagctcactagggcaattcacatgagtcctcacaagcctggtccccttgggcatttgrgcatgtctcttggcattgctgggaacctctgtacctctagagcatcaggatttcccatcaggcattcattggttacttttgattgttttatttcctcaaa

SEQ ID NO: 321262 - DNA, 201 bp, Homo sapiens
ggggtatggttgatcatgttaaggttttggactttagtccaaaacaattttttgatttgtggtgatatgtcctatttctgcagaagtgcagcaaaattatytaagcttcccagagagggtaaagaaaacatttgtagaaggtgtaatgtatgcattcagatttaaaggaaaaatagggcgtttccaggcaggcagatgaag

SEQ ID NO: 321263 - DNA, 201 bp, Homo sapiens
tggaggaatttcttattctttttatgtttatgccaatactgggtaagcatacacacctagatacattctggattctgagtggtttttttttttttttttttcagttgagccttttcttgatagttttcatctgtatgctataggcaggagcctgaccatatgtgcaggtttgtagtggactatgaagctcgaaaatatcta

SEQ ID NO: 321264 - DNA, 201 bp, Homo sapiens
ttctccaaatgtatcatgttctctctagttccctttacctgaaatgccctttatccataatattttaaaattaagatagcatttaaaaatcagaagattgyacatttttaaaaacctgaatgttgaccttctcttggaaaaaaactgatctagcagcatagagcctgcttccccatacagcaaaaattgggcagagctttg

SEQ ID NO: 321265 - DNA, 201 bp, Homo sapiens
ttggaggaatttcttattctttttatgtttatgccaatactgggtaagcatacacacctagatacattctggattctgagtggtttttttttttttttttttcagttgagccttttcttgatagttttcatctgtatgctataggcaggagcctgaccatatgtgcaggtttgtagtggactatgaagctcgaaaatatct

SEQ ID NO: 321266 - DNA, 201 bp, Homo sapiens
cagtctctgtggactatattcataggtttagagtacaagatccttgaaaatatgaaagaagcatctctcattagactttgtatccccggcaccttgcctgytgcctggaatatagaaggtttgcagtaaatgtttatttcaaatgagtaaatatcatgaattagaagacctggctttcatgttgagtcccccgccccacaa

SEQ ID NO: 321267 - DNA, 201 bp, Homo sapiens
gagatgataaatggttaattgtaccttggaggaatttcttattctttttatgtttatgccaatactgggtaagcatacacacctagatacattctggattytgagtggtttttttttttttttttttcagttgagccttttcttgatagttttcatctgtatgctataggcaggagcctgaccatatgtgcaggtttgtag

SEQ ID NO: 321268 - DNA, 201 bp, Homo sapiens
gccaataagaggaagaaaaggtttcaaatagaatcctcttgtctctttcagcaccgtggctagcgtccgctggcatattaaaaaaaaaaaaaaaaaaaaamaattacagttccaaagctgacaaccctgggttaggcactgtccctcggacagatttgataaggtgtaaccaagagtaacagtgagactgctcccaaatat

SEQ ID NO: 321269 - DNA, 201 bp, Homo sapiens
aagccaataagaggaagaaaaggtttcaaatagaatcctcttgtctctttcagcaccgtggctagcgtccgctggcatattaaaaaaaaaaaaaaaaaaaaacaattacagttccaaagctgacaaccctgggttaggcactgtccctcggacagatttgataaggtgtaaccaagagtaacagtgagactgctcccaaat

SEQ ID NO: 321270 - DNA, 201 bp, Homo sapiens
aataaattcagttaaatgctgcctacaagaggacacagaaatgttaaaatggaaaggatggaaaaaaatacaccaaactaatactaatcaaaagtcaagtyagataaaactgactctcaaaagaataattctcaaaagaatattctcaaaagaataattactagagaggttaccagagataaagaatgtcagatgaaaatg

SEQ ID NO: 321271 - DNA, 201 bp, Homo sapiens
atctgtggatttgctgtgcagaagctttttagtttgatgcaatcccctgtgtctatttttgctttcattgtgctttcagggtcatatccaagaaatttttrcccacatcaatgtcatggaactttgccctggaagacactcttaaaaaatgaatacaacattatgaatacaaaataagatacaaggttcttattgaaaatg

SEQ ID NO: 321272 - DNA, 201 bp, Homo sapiens
agagccgactagagaagccgaatgctcatacttcccaccaaaaaaaagagccaaaacaacaaataagaaagtatgtttgaactggagtgtttgagggagcrcactggaatacagtaggagagagacagaaatcctgtgagacaaggagacctttagtgagggtcacatagagaagagaatgaagcactctgcctctgccac

SEQ ID NO: 321273 - DNA, 201 bp, Homo sapiens
gagacagaaatcctgtgagacaaggagacctttagtgagggtcacatagagaagagaatgaagcactctgcctctgccacaccgccatctccccagccagkattagctcagaacaaggagatgcatccccagtggggactaggcaagcaagaggccccagcagcccccattaatgtcacagacatctgcactctttgttgc

SEQ ID NO: 321274 - DNA, 201 bp, Homo sapiens
agtcttctcaaagtaaaagggcactcttcaaaaatcttctaaatttttttcccacctagaaataaattgccagcaagatgggggtgataaaaggcattcaktattgtggtttggatgacttttagttctacaagtgaatgaggcatttggtggctgttgctattttcagcaaggaagccacacccaacatgtgaagcatta

SEQ ID NO: 321275 - DNA, 201 bp, Homo sapiens
ccctagccatcccctgcgtaaatatacaaatcttagaaatattggagagaaaaaaatgggaataagtaggaagaaatgcattttgtaaatgcagccaggcrtggtggctcatgcctgtaatcccagcactctgggaggtcgaggctggtgaatcacttgaggccaggtgttcaagaccttttagcagagacatggtgtaat

SEQ ID NO: 321276 - DNA, 201 bp, Homo sapiens
taacatgcattatttttgaatcatgaaaacattgttaactttaaagacattaggtataaatgttaaggacttgaagtatgaaaaatagtcccaacttagaygaccattgattttgcatgtgtgatactgctgctaactcttaatcactaaccaattttctcaactttacctccctcaaatgttcatcagtgtgtactcatg

SEQ ID NO: 321277 - DNA, 201 bp, Homo sapiens
catttcccactgaaacttaatttcataatccaacagtttcaaaagtacatcttccgggactacaagaaaaaatgatcatctgtttcattttgtcctcttcyatttccattctttattggttgctaaatgaggtatactgcttgaagtctcactgttctcagtgaccaaagtactgcaaaaaaagtagcatgtctgagaatt

SEQ ID NO: 321278 - DNA, 201 bp, Homo sapiens
tcagacatctttttatgaattcaaaacttttatagattcaatcaaaaggcatagcaacattctacctagtgaggtgtaggtcctttcaggtaggaaaatgratcatttcctacactaaaaatgttctctatgttaaaagattttctttttactttagggtgaaattcatatatcatcttcctgggttcatgcctggcatct

SEQ ID NO: 321279 - DNA, 201 bp, Homo sapiens
actgctgctaactcttaatcactaaccaattttctcaactttacctccctcaaatgttcatcagtgtgtactcatgtagctcccacatagctgtgtaaatagagagtgaagcaaaaatcaccatgttattattaattatgataataattcatatatgtttattatatcccagacattagggtggaagtattcacatattct

SEQ ID NO: 321280 - DNA, 201 bp, Homo sapiens
tactgctgctaactcttaatcactaaccaattttctcaactttacctccctcaaatgttcatcagtgtgtactcatgtagctcccacatagctgtgtaaatagagagtgaagcaaaaatcaccatgttattattaattatgataataattcatatatgtttattatatcccagacattagggtggaagtattcacatattc

SEQ ID NO: 321281 - DNA, 201 bp, Homo sapiens
ttatgtggatcctgaaatagtaatggaaactaatcatcatgtcttcagttccgagcatgctaaattgaccataacttttttaaaacaatcaagccacccakagtttgccaaagatgatgattggacaatgatgacccttaaataattgtacattttatttctccatattaaatgagttcctcggatttggaaatgaaactc

SEQ ID NO: 321282 - DNA, 201 bp, Homo sapiens
gatactgctgctaactcttaatcactaaccaattttctcaactttacctccctcaaatgttcatcagtgtgtactcatgtagctcccacatagctgtgtaaatagagagtgaagcaaaaatcaccatgttattattaattatgataataattcatatatgtttattatatcccagacattagggtggaagtattcacatat

SEQ ID NO: 321283 - DNA, 201 bp, Homo sapiens
tatctcaatgttgttgttcttaccactgttttatcaatggaaaatggtgccaaaatgttttagatgtatatgaactttctgaccacaaggtgtgtatttaktattttactaaaaataatttactaaataatattgtagtgtcctagaagagtttctacatttctgaaaggagagtaattttcttctttccctctgaaaaac

SEQ ID NO: 321284 - DNA, 201 bp, Homo sapiens
gacatggacccgcaccaatggagcccacattttgtaaagtgagaatatacaataaacaagtaaacaagaaactgtcagatagtgataaatgctatgaggaraagaaagcagggtgatctgatagagagtggtcaggctgggaaggcctctctgaggaagtgatgttaagaccgagctgaacaaccagaaggaggcaccacc

SEQ ID NO: 321285 - DNA, 201 bp, Homo sapiens
tgatactgctgctaactcttaatcactaaccaattttctcaactttacctccctcaaatgttcatcagtgtgtactcatgtagctcccacatagctgtgtaaatagagagtgaagcaaaaatcaccatgttattattaattatgataataattcatatatgtttattatatcccagacattagggtggaagtattcacata

SEQ ID NO: 321286 - DNA, 201 bp, Homo sapiens
aagtattggttaaataactatgacacatctcaataatgggatactatcaaatgtttgaaaacagtgtttaaaaaaatttgaggacatgaaaagacattcatgatatagtttttttaaaaagtaaatcatatgcaatggttctgtgcctacttcctttttttaaaagtaaatcataaaagaatatattgaataaaaatctag

SEQ ID NO: 321287 - DNA, 201 bp, Homo sapiens
aaagtattggttaaataactatgacacatctcaataatgggatactatcaaatgtttgaaaacagtgtttaaaaaaatttgaggacatgaaaagacattcatgatatagtttttttaaaaagtaaatcatatgcaatggttctgtgcctacttcctttttttaaaagtaaatcataaaagaatatattgaataaaaatcta

SEQ ID NO: 321288 - DNA, 201 bp, Homo sapiens
taaagtattggttaaataactatgacacatctcaataatgggatactatcaaatgtttgaaaacagtgtttaaaaaaatttgaggacatgaaaagacattcatgatatagtttttttaaaaagtaaatcatatgcaatggttctgtgcctacttcctttttttaaaagtaaatcataaaagaatatattgaataaaaatct

SEQ ID NO: 321289 - DNA, 201 bp, Homo sapiens
ataaagtattggttaaataactatgacacatctcaataatgggatactatcaaatgtttgaaaacagtgtttaaaaaaatttgaggacatgaaaagacattcatgatatagtttttttaaaaagtaaatcatatgcaatggttctgtgcctacttcctttttttaaaagtaaatcataaaagaatatattgaataaaaatc

SEQ ID NO: 321290 - DNA, 201 bp, Homo sapiens
attattttaagagttatctccagaaaaacaggttgaaacaaatttatgaaatgagaagtgagcaagtcaccaaaggaaaacaaagtgctgttaccagaacrtggagcactagaggccaagccaacaacagcagcagggtctgtgctggttcctgtccctaatttctagttcaaagctctcttcctaaaactgatacctcct

SEQ ID NO: 321291 - DNA, 201 bp, Homo sapiens
tgttatactctgttgatagtttcttttgctgtgcagaagctctttggtttaattaaatcccatttgtcaatttttccttttgttgaaatcatttttgacaycttcatcatgaaatgcctatgtccttgcctatggcttgaatggtattgtctggattttcttaaaggatttttatagtttgggtttttacatttaagcgtt

SEQ ID NO: 321292 - DNA, 201 bp, Homo sapiens
ttaagttgtctggagaactctgctatgaaaacaatggagatagtttctaatctttatttgaaaacaattatattttagctgtttgtataacaatgaacgaygtatagaattagtttctaaatgtactacttcattattcagtgagtgcaaacagaactgaactcctgtgatttctgcagtcttagctttctagccatatga

SEQ ID NO: 321293 - DNA, 201 bp, Homo sapiens
tggttcttttaaatgattgttttgaattttttttgtaaaataagggtgtagtaaattttgccttgtcctatacacatataaaaggtcagacatctttttaygaattcaaaacttttatagattcaatcaaaaggcatagcaacattctacctagtgaggtgtaggtcctttcaggtaggaaaatggatcatttcctacact

SEQ ID NO: 321294 - DNA, 201 bp, Homo sapiens
aatgcctggtttctgagttattccaacactcagttgtaatgttactgtatttttagctacgttttcttcccacctctaagtcattagaaactgatgtcatwagaattgaacaattttgacccaaagttgtttatattctcttgctgaaatggatgtgtcgccctggcccataatatttatacatattttcctttttagtta

SEQ ID NO: 321295 - DNA, 201 bp, Homo sapiens
agtatttgatatccaatataccataacaggtgttttagaaggagaaagaagaggatatgagaaaagaagtaatatttgaagaaataatagatagggatttkccaaaactgatggaagacttgagttcaaaaatctaaaaagcacaataaatcctaggctgaataggtaaatgtaaatcacagctagacacatctctggaac

SEQ ID NO: 321296 - DNA, 201 bp, Homo sapiens
gactgaagaatgtgttttttctgtaagacaatattagttcaggggctgaagaaccaaaacgacaagtgagaagttcccaaaggacaaaggagcagatcaargggcaagaaaaggaatgtggagacaaatttctgaggcttattatgtccttaacactgtgtttaactactaaaggggacaagacagttttatttatcaaat

SEQ ID NO: 321297 - DNA, 201 bp, Homo sapiens
gtgagaagttcccaaaggacaaaggagcagatcaaagggcaagaaaaggaatgtggagacaaatttctgaggcttattatgtccttaacactgtgtttaaytactaaaggggacaagacagttttatttatcaaatctatttattagatactgttacagactgaatatgtatgtccctcagaatgtcatatgttgaaacct

SEQ ID NO: 321298 - DNA, 201 bp, Homo sapiens
aaaattatttaatttctgctgaactctaagcagtacaacagactctagggatacaatagggaacaagataaacaagatcattgcagctgtgtagtttataytctaatcgaagaaagacaacaaaacaagtaaacaaatgaacatgataatttcggatagtgctaagtgcaatgaaaaaaacaaaacaaaaccatgtggcag

SEQ ID NO: 321299 - DNA, 201 bp, Homo sapiens
ggattttagattttcttctggagctagtaaaagtcactggagagtcttggcagagtattgacattatccggagcaaaggactagtgaacgccatacatgtkttgcagccagtcctatctcagagtattcatgtcattagtttctgttgaatatattttcaaataaaaatcaaagcacatggattgacaagtttacacgtgc

SEQ ID NO: 321300 - DNA, 201 bp, Homo sapiens
tctaagcagtacaacagactctagggatacaatagggaacaagataaacaagatcattgcagctgtgtagtttatattctaatcgaagaaagacaacaaarcaagtaaacaaatgaacatgataatttcggatagtgctaagtgcaatgaaaaaaacaaaacaaaaccatgtggcagggagaaaatagtggggactacctt

SEQ ID NO: 321301 - DNA, 201 bp, Homo sapiens
gcattctaaggaactttaaaaagggtaaatctgtttaatatattcttttttgttttcttcattagatcccctcagcagagtgtgtttaagaccaaaaaatrtaaccgattcattgagcacctacattaatgctaattatattagggtaagtaaataagtacaaatttctttctggtgacttcctatttggaattgttggtt

SEQ ID NO: 321302 - DNA, 201 bp, Homo sapiens
gctcaattagtatatattctgcaaatattctgaaatccaaaaaaatccaaaattcaaaacatatctggtcccaagcattttggaaaagaaaccacctgtaytcatttacattcccacaacaatgtgcaagagttcccctttcttcccatcctggccaacacttaactttcatcttttttgataaacccattctaacaggta

SEQ ID NO: 321303 - DNA, 201 bp, Homo sapiens
acatggcacatgtatacatatgtaacaaacctgcacgttgtgcacatgtaccctagaacttaaggcataataaagatatatatatatgcaaaaaaaaaaaagaatgaagagtcagtgagggagacattaaggcctatatttgggagatgtccttttaaatcatcttgtaattatgtgagaaaataatgtagagaaatgaga

SEQ ID NO: 321304 - DNA, 201 bp, Homo sapiens
aagagggttggtactatgtataatttactggaagataaagagatggaaacagcataacattattaaatgccattaacctcggaacttaaaagtcatagaaytgggagttgcaaaaactgcctatgccactcagtccacacaaagtaaaagaattccatctctccatttctccacttttgtctcctttgttattcaaatgag

SEQ ID NO: 321305 - DNA, 201 bp, Homo sapiens
ctggtttttaacttgtacacaggaaaccagtgccaatcaattttgttcccaaggtgacaggaaaccctggttggtcagatgttgattgtgcttgctgttcrtgctccacccatcatattttcttcccttttggctgaacttaagacaaattaatcagtggtcgacatctggcagacagttttggtgtcttctcagtgattt

SEQ ID NO: 321306 - DNA, 201 bp, Homo sapiens
gtcccacccaaaccagtggaccagcccctgcatgtccctggtgcactcaacagttgggtgcactacttctaaggatgccccaacctgagctggcagacctrtccgcatataccaccagtaagctcaccagctgggcatgtcattttcaggggacttctgctctgagttggcaagccaagccccatgcttgccagccaagta

SEQ ID NO: 321307 - DNA, 201 bp, Homo sapiens
tccgcgtccctccaagtcaagcttctttggagtctcctctttcaaactcatggtttatgactcttaaaaaagaaaaattacaaactgtttactagccttgmgaactcttttcagaaatcatttgttttaacgagagtggtactaaaatataggtctaattttatcaggtctagtgacaggagagatcatgagaaacataca

SEQ ID NO: 321308 - DNA, 201 bp, Homo sapiens
aagcttatcactatggaaaaccaccaagtcacaaagggaaacaataaaagtagaagaaagaaacaaagtatctagaaaacagttaacaaaatggcaggagkaagttcttacctgtcagtaataatcttgaatggaaatagattaaattttccaattaaaagatatagagtggccaaatgggggaaagaaaaaaacgcaaga

SEQ ID NO: 321309 - DNA, 201 bp, Homo sapiens
aatgtgcgtattgataattcagacatacgaaagcaaaaaagtccaaaggacttatcttcaaattgttttacacaatatttcaagcatgtgcaaaatggtayaaatatgtttcaatctgtaaatttatgtattcttctagtatttccccattataattgaatccttgttttgtaaacatttcacctcatctacaatatacac

SEQ ID NO: 321310 - DNA, 201 bp, Homo sapiens
gaaaaaaacgcaagactcacctatatgacgtctataagaaactcacttcacatgtaaagacatatagactgaaagtgaagggatgaaaaattgatatcacwtgcaaatggaaactaaaagagaccaggagtagcttcacttataccagataaaatagacttcaaatcaaaaatcacaaaaaagcacaaagaagatcattat

SEQ ID NO: 321311 - DNA, 201 bp, Homo sapiens
aaaggacaggtaaaaatattatccaaagttgtttaaaatgtctataacaaatacaaatattctgcttttattagggaaagaagaacagtattgaactgttygtgtctcccataaaccgaaaaacaggaatttctgatgctctgccctctgaggaagttcttcgttcacttaatatcaatgttttgcatcaaagtttatccc

SEQ ID NO: 321312 - DNA, 201 bp, Homo sapiens
ttctgaagacaacatcaacattaaagttcttgcttctcaccacataagatttgacgtgtacactaatgaagacaactccagacaaattatatatacttttyacagaaccaaaaaaaaaaatctcggaagtcaaatctgtttgctttcattctgtactaaattcttcttataatctttaaaatccatatttttccgttctca

SEQ ID NO: 321313 - DNA, 201 bp, Homo sapiens
aaaacagtggaccggccaggcatagtggctcacacctgtaatcccagcattttgggaggctaggcaggcggatcacgaggtcaggagtttgagaccagccyagccatcatggtgaaaccccgtctctactaaaaatacaaaaaattagctgagcatggtggcacacgcctgtaatcccagctactcgggaggctgaggcag

SEQ ID NO: 321314 - DNA, 201 bp, Homo sapiens
tgggtcgaatgatatttctgtctataggtctttaaggaattgccaccgtgtctttcacaatggttgaattaatttacactcccaccaacagtgtataagcrttcctttttctccacaaccttgccagcatatgtcattttttgactttttaatagtagccattctaactggtgtgagagggtatctcattatggttttgat

SEQ ID NO: 321315 - DNA, 201 bp, Homo sapiens
ccggccaggcatagtggctcacacctgtaatcccagcattttgggaggctaggcaggcggatcacgaggtcaggagtttgagaccagcccagccatcatgstgaaaccccgtctctactaaaaatacaaaaaattagctgagcatggtggcacacgcctgtaatcccagctactcgggaggctgaggcaggagaatcgctt

SEQ ID NO: 321316 - DNA, 201 bp, Homo sapiens
taatctcgttctttttttatggctgcatagtattacatggtgtatatgtagcacattttctttatccagtccatcattactgggcatttatgttgattccrtgtctttgctgttgtgaatagcgctgcaatgaacatatgtgtgaatgtgtctttataatagagcaatttatattcctttgggtatatgggattgctgggt

SEQ ID NO: 321317 - DNA, 201 bp, Homo sapiens
ttcggcagacaagaagcaattccaattctataaaaaatataacatttaaatcaaagtaatgggttttctaaaagtcattttatcctgattcagacagttartatttgagagacttttcaaataccatggctgtatagtatttttaaaaagaagattgtatttttcttttcttagcatagatgcctattcatgccagaaatc

SEQ ID NO: 321318 - DNA, 201 bp, Homo sapiens
gcaaaggacataatctcgttctttttttatggctgcatagtattacatggtgtatatgtagcacattttctttatccagtccatcattactgggcatttakgttgattccgtgtctttgctgttgtgaatagcgctgcaatgaacatatgtgtgaatgtgtctttataatagagcaatttatattcctttgggtatatggg

SEQ ID NO: 321319 - DNA, 201 bp, Homo sapiens
catttatacgaaatgtccaaagcaggtaaatctacagacacagcatgtatattagtggtttctagagcctggagagagagagaaatacagagtaactgccrgtgagcagggagaatttttttggggggagtgaggaaaatgctttaaaatttattgtagtgatgcttatacaactaagtgactataataaaaaccattgaa

SEQ ID NO: 321320 - DNA, 201 bp, Homo sapiens
ttctcaaaccagccgatgcttagggaaaatagaaaagaacctacatgactatcggggcaggttccctgatatcgtaatgtcttaaataacaaaaaaaaaaattattttggcatactcaatatatagaagaaactttttttggagacagggtctcactctgtcaccaaggctggagtgcagtagcgtgatcacggctcactg

SEQ ID NO: 321321 - DNA, 201 bp, Homo sapiens
gtaaatatttcataatttgcataatacataagtataatagtacatgtatataatttacaaatacataaatttcattagaggcaaactttttttttttttttacttagaagacagacaatagaaaaaaattgaaaattattaacaattctacccaaaaatgggagataaagttagagtacatatatagtggacccaatctga

SEQ ID NO: 321322 - DNA, 201 bp, Homo sapiens
agaagaattcttgtaaaaagaggtaagtaattttctaaggacagcacttgttaccacaagcatttccagtgaaaatctggggtaccattgctagggactaygttataaaacagatctcatgtttgcttttctaactggtatttgacctagtaatattctttttgattcatatgtattatctgtttcctcctgtggccagta

SEQ ID NO: 321323 - DNA, 201 bp, Homo sapiens
gtaaattatatcatctcaaatttaatgataaggaaacggagacacaggcattcaagtacatttccatggtcgcagagtacattactgcagagataggattmgagcccaggtaatgtgcccccagatctcacgcttgtttctatttcctgcttcccctaatgactaaggcacccgaggatttttctttttccaccttctcca

SEQ ID NO: 321324 - DNA, 201 bp, Homo sapiens
ttcttgaattaagttgactaaaatatatacatatgtatatattttacaagtgtaatgtaaaatgttttgcaaaaacataaagcagactgcaaaaaaaaaaagcatcattctttactgggttttagcttggatcttctgggtaatgtcatacaaagaagatgttgaaaaatatcacttgtgatcatcatctatctatgatgt

SEQ ID NO: 321325 - DNA, 201 bp, Homo sapiens
tcctaatggttagtgatgctgagcatattttcatttacctattggaaatttgtaagtcgtcttttcagaaatatctgttcaaatcttttgcccatcttttmactgggttaatttttttggtattacattgtttgagttccttatgtatttttgatattaactccttatcagatgtgtggtttgcaaatattttctcccatt

SEQ ID NO: 321326 - DNA, 201 bp, Homo sapiens
cttaaaaatatgttataaaaagagttgtgatatgttttctagcccaaaaatagcaggattgctacaataccagctgtaacgtgggagccactttgccttaygttgttattttatatccattgcttcttcccccaatttattgaagacttttttcataccaggcacagtgctagataactgagggcgatataagatggtaaa

SEQ ID NO: 321327 - DNA, 201 bp, Homo sapiens
gggatttgagaaaagaccagatgactccatctctaaatgctttaaggcaggcccaggcctcttttctccattagcactaaatccacattttgggtggtagrgggctgattctggctctgtggtatcaagaggtatgtgtttggatttggatgcagtttgcacatgcagcaggattgtgtagtgattgtgagtgggcactct

SEQ ID NO: 321328 - DNA, 201 bp, Homo sapiens
ctatagttgtatggctaatgagccaaatccggcacgtcatgtttttgcaaataaaattttatgaaacaagctatatctgctcatctacccattgcccatgrtgccttttgtattacagtggcagagttcagtagttgcaaaagattggctcatgaagcctaaactgtttatcatctggccctttatagaggaagtttgtta

SEQ ID NO: 321329 - DNA, 201 bp, Homo sapiens
gcccactgtcaaagcagtatgtgagagtcagctttgtttagtcccgaaggaatggtgatttttttcatctttactcttacacagatatccctccgcccccrccaaccccatcccgacaaaggcatagccaaatatttgctctctagcactggaaggataaggaaagcaacacgaaccagcagctgacaccaccagacacac

SEQ ID NO: 321330 - DNA, 201 bp, Homo sapiens
tatggctaatgagccaaatccggcacgtcatgtttttgcaaataaaattttatgaaacaagctatatctgctcatctacccattgcccatgatgccttttrtattacagtggcagagttcagtagttgcaaaagattggctcatgaagcctaaactgtttatcatctggccctttatagaggaagtttgttaactctgtca

SEQ ID NO: 321331 - DNA, 201 bp, Homo sapiens
aattactcccaccagagtaactaaccaaaaaaaaaaaggcttttctatagcaaaactagaagccaaaaatcagtagaatattacctacaaagaactgaaakaaaatacttgactacccagaactttatacccaacaaatctatcctacagggccaggtgtgaaagacattttcaaactaacaaaaatggtaagaattcacc

SEQ ID NO: 321332 - DNA, 201 bp, Homo sapiens
aattgtttaatatgtaataaaagcaaatactattttttttcctttggaatcaatgcaaaacattatgataaacagaagaaataattcatttctagtcagtytggaaactcctttgtatttcattcttattttccttttcacacctacaaatccctgccatgcacacaggaaatgcccggatgcatggaagaaattaaaatt

SEQ ID NO: 321333 - DNA, 201 bp, Homo sapiens
agataattgagagagtggtctcaaagtggggcatgtgcatcccaagaaatgtgtaaaatgatccattagggtgtaaaacatatatattacaaaaaaagtayatttatcttgccctttcctacttcaaattttgtaaatatttcataatttgcataatacataagtataatagtacatgtatataatttacaaatacataaa

SEQ ID NO: 321334 - DNA, 201 bp, Homo sapiens
catttttgttatggtgatctgcagaaagtttgaatcagatcatatcacaccacacacacacacccacacacacacatacacacattcacgactgccttctyattgccattgaactaaaattcaaacattttcccatggcctatatcctacatcacctgggatccaagattcccagaactcttgcctaaggattctgattcc

SEQ ID NO: 321335 - DNA, 201 bp, Homo sapiens
tgcccaggccacggtgcagtggtgcgatcttggctgactgcaaccttcgcctcctgggttcaagcaattctcctgcctcagcctctcaagtagctgggackataggcacggaccaccacgcccagctaaattttttgtatttttagtagaggcggggtttcaccatgttggcccagctggtctcaaactcctgacctcaag

SEQ ID NO: 321336 - DNA, 201 bp, Homo sapiens
ctctccaggtgcagtgaatgagcagggaataacttagtaatatttttgttctaattccaaaaattatgcattttcatacagttgtagaatatttagaaagwttagataaggaaaagcggaaataaaaaccatccataaccagccaggcgtggtggctcagcgtgtaattccaacactttgggaggccaaggctggtggatc

SEQ ID NO: 321337 - DNA, 201 bp, Homo sapiens
gtgctatccttaacttgctgccaaaatacccatggaaattgttgtactagagtcagtgaagccgtaacctgtgttgcttttgtactagcccagctatttcrttgaagatctttcacctacactttcactgcaaggcatgaacttaaaaaccaatatttttgtttctttactccatctagggctacagtggcaaggagaaag

SEQ ID NO: 321338 - DNA, 201 bp, Homo sapiens
aatgggctgctaagcaaattctttggatataggctttaaaaaatcagcagtcattgtgtgtgggaaaatgaattacaaaattttttttcatgtattacaartgatgatgtcatctatatgttaagtataacttttaaaataaaaaatcaaattgataaaatcaagtctatgccaagctggattattaaaaatagccaagtt

SEQ ID NO: 321339 - DNA, 201 bp, Homo sapiens
taaggacccacccactattgtgtttagacaccccgtacaccaaaaggctaaggttgcttctgtacaacatattcaaataaaccattccaaggtagacttcrttttacttgtagaaagcaacattttgcagatgagttttgtttggtttgtctccgtcaatcaattttaagccaaatgtataaaccattttaacaagagatg

SEQ ID NO: 321340 - DNA, 201 bp, Homo sapiens
taaggagatcagttgacctgggaggttgaggctgcagtgagccacgatccagccaggatgacacagtgagaccctgccccaaaaagaaaaagaaaaaaaaagtaagaaaaagagtacccttgtttctcacctcccagaaccactttgtattgggaactttatatcagtaatatagatccagattttagcaaatccatgaaa

SEQ ID NO: 321341 - DNA, 201 bp, Homo sapiens
atgagatgacctgttaatagactgtgatcattctataaatattgcagaattcatagaaataaacctagaagctgaggctgataaaatactacagctgtccrtaatcattcacttaaaatcgaatcatcttcatcaatttctggatgattttgttaaaatcaaacattgtaacttagaagttgaaaaacatagtttctattt

SEQ ID NO: 321342 - DNA, 201 bp, Homo sapiens
gtttctttttattttttctgtgtgtagagagtgagttgtttcatttcttcataaaaatttgtattctgtgaatcaacaatgttctagaagtaaacaagctkttaaaaagttttaactcataccacagaagaagaaatacaacattcccctgaatgagtgaaggttacccggtggctcacgcctgtaatcccagaactttgg

SEQ ID NO: 321343 - DNA, 201 bp, Homo sapiens
tgaggaatgtgcattcattttcatatttgcatatactcctaggtaaggatcattttcctggggtgtactcatttatttcatatttgtttataaatatttgygcaccacagtgtgactcttacattttttgcttgtcataaagttttagataagacacttcaggaaacatttgtgctaaaggtaaagaataatgaattaaag

SEQ ID NO: 321344 - DNA, 201 bp, Homo sapiens
attagtctttaggctcatctctacactgtgggttttttgagagcttgtgacatgtcatttgatctgtgtcttcattgccttcatttagtgcctggcatgcratgggcacacaacaaaactgagtcaacaaatagtcatgctgggcgcgttggctcaagcctgtaatcccagcactttgggaggtcaagagaagaggattgg

SEQ ID NO: 321345 - DNA, 201 bp, Homo sapiens
tgcattgaccttttgccactaatttttgcgtgtacctagaaaatgagggaaaagacctctgtgaaagtaatgatattatgtctacgttcttaaagaataartgtttttaatattactacctaatgttaggaaatacacactgagctgttctaccacttgacattttatacctgacttctgcaaagcaaattctagggactg

SEQ ID NO: 321346 - DNA, 201 bp, Homo sapiens
attaaatgtgccaaaatctctactttcttaaaaagaaaccaaaaacacatccctcaaccctatctttccttcctggtaacacatagtcactctcttattayacccaaacttgatttttccacttattttgtttctactttatctcctactcagtcctcatttcaattaaatttagctttctgtcccttcccaacacactga

SEQ ID NO: 321347 - DNA, 201 bp, Homo sapiens
ccagaggagagggtcaggaggaggtgaaccaccaggcccctcccagccttgcccacgtctgaatctgaagcagttccgcttgtgcacaaagccaaaccccrttcccacagtcaaggccctacacggactgactggtacacatcttgcctaggacaattctttaaattttagaaagaccgttggataaatgtatcctgcttc

SEQ ID NO: 321348 - DNA, 201 bp, Homo sapiens
gtcaggatacaaaacaaaacaatgtgtgtacatacaaatatatacatacatatgcatatattgttggaacataactaaggcacagaaactgaattctgtamaactggctttgtatatagcatatgttgtattttgggaggttatcctaactaacattggttgtcatattttgggaaggctgtaatgtttatcagtggggtt

SEQ ID NO: 321349 - DNA, 201 bp, Homo sapiens
gaagtgttcttttaataagtttatccacgtgttttttgggtccatgtttataattttggcaaatttaattattgtcatctcgtagaaactgattttttttwaaaaaaactttttgtaacaaaatggctagtttaaggataaatatttttgtcaaattggttatttggtgtcaggatacaaaacaaaacaatgtgtgtacat

SEQ ID NO: 321350 - DNA, 201 bp, Homo sapiens
tccttactattcttcctcaagtagaccgcttttcaatcttccttccaggaaatcttactggacagcattatttatttatttatttatttatttatttatttctctttccttccttccttcctctttccttctttccttctttccttcaattttcaagtattcattgaatgcctattatgtgccactgttctagacactgag

SEQ ID NO: 321351 - DNA, 201 bp, Homo sapiens
ttccttactattcttcctcaagtagaccgcttttcaatcttccttccaggaaatcttactggacagcattatttatttatttatttatttatttatttatttctctttccttccttccttcctctttccttctttccttctttccttcaattttcaagtattcattgaatgcctattatgtgccactgttctagacactga

SEQ ID NO: 321352 - DNA, 201 bp, Homo sapiens
cttccttactattcttcctcaagtagaccgcttttcaatcttccttccaggaaatcttactggacagcattatttatttatttatttatttatttatttatttctctttccttccttccttcctctttccttctttccttctttccttcaattttcaagtattcattgaatgcctattatgtgccactgttctagacactg

SEQ ID NO: 321353 - DNA, 201 bp, Homo sapiens
ccttccttactattcttcctcaagtagaccgcttttcaatcttccttccaggaaatcttactggacagcattatttatttatttatttatttatttatttatttctctttccttccttccttcctctttccttctttccttctttccttcaattttcaagtattcattgaatgcctattatgtgccactgttctagacact

SEQ ID NO: 321354 - DNA, 201 bp, Homo sapiens
gatttaagtctctgaggaacaacagtgatcggagtgagactactatgtcttcattaatctcacaagtcatcctcctctgttctttaccttaaattgttgcrctccagctcccattcccaggctgtttctcatttgctcccatgagttcaagctcacctttacactgatgtcttccagcaacttttctccagcccacctggc

SEQ ID NO: 321355 - DNA, 201 bp, Homo sapiens
cattgaaccctttgtgtctataccaacaccacgggagaaggtagcaatggagtatctgcagtcagccagccgaattctcacaaggtctcagctgagggacrtcgtggcaagttcacatttactccaaagtgaattcatggtgagccttctatttattgttcactcttcagtcggtattttgatacatggggcactagagac

SEQ ID NO: 321356 - DNA, 201 bp, Homo sapiens
tagaaggtgtaatgtatgcattcagatttaaaggaaaaatagggcgtttccaggcaggcagatgaagcaagagcacaccagtccgagaaaaaaaaaaaaaacacatgtcttgagatactgccattagaattgttcccagttcataagcagagaggaaaagatgagatagctctggtaggcagggaccaactcatacatgcc

SEQ ID NO: 321357 - DNA, 201 bp, Homo sapiens
ttgaatttacagtgaaaactaataccatgagaaattaaatgaaaaaataaaggctattgcattttgtattagaaatctctattagatttaggaaaatgatgtctttacttttattcagcttaaataaaatatttgagacattgaatatttttaaaagtattattctactaggtaaagtcagacttaatgtttacttttgtt

SEQ ID NO: 321358 - DNA, 201 bp, Homo sapiens
tttgaatttacagtgaaaactaataccatgagaaattaaatgaaaaaataaaggctattgcattttgtattagaaatctctattagatttaggaaaatgatgtctttacttttattcagcttaaataaaatatttgagacattgaatatttttaaaagtattattctactaggtaaagtcagacttaatgtttacttttgt

SEQ ID NO: 321359 - DNA, 201 bp, Homo sapiens
acatataaaattaatcatcacaaatactatcagaaagtgaaaagacaattcatagaatgggaaggcatatatgtaataagggtctagtgtccagaatatayacataattttacaacgcaaaataaaaagacaacccaaattaaaaatgggccaaggatttcattaggcatttatccacagaatatatataaatgtccagta

SEQ ID NO: 321360 - DNA, 201 bp, Homo sapiens
aaaactggggaggcagggttattttttaaataaatcaataatgtttagcttcctcaaaaagcaaaggggtgatgcaattaaatgtcagctgatttgaagayccattccatacagaaaatggatgtatggatggggcatacaggaagcaagggatatattctggggcagcataatgactttaatggaataattgatgtgtgt

SEQ ID NO: 321361 - DNA, 201 bp, Homo sapiens
gtctttgatattgtttctgcttcttccctctttcagggtgcttttcaggaaacaatgatcattttttggcaattaatcagaagaagagtgggaagccggtrttcatttataagcattcacaagacattgagaagagcctggatatagccccacaaaaaatctacagacatagctaccattcctcttccgaagctcaagtaa

SEQ ID NO: 321362 - DNA, 201 bp, Homo sapiens
aactagattatcagctgtctgaggccagtgttggtgctcttcatttttatgtgtcctaatgtgcttttgtagaaataagagctcaaatgtgtgttaaatgmatgttagtgagttaatcaatgaatgagaccttacatcattttccaacttcaaaacatataatttcagtcagaagtaacaacctaaatgcttaacacatag

SEQ ID NO: 321363 - DNA, 201 bp, Homo sapiens
ctcccctgagcccatgggcgttttcttaggctttgggaatagaaaaccctactctggcttatttcatattctaccttatctgacatccacaccccgagacrccaccttccaccaaagtcctggcctttagaacacaaagcccatgacaggactcaaatttccctgctttctgctctcagatttcttcaaatgcaataaaac

SEQ ID NO: 321364 - DNA, 201 bp, Homo sapiens
ttcataatccaacagtttcaaaagtacatcttccgggactacaagaaaaaatgatcatctgtttcattttgtcctcttccatttccattctttattggttkctaaatgaggtatactgcttgaagtctcactgttctcagtgaccaaagtactgcaaaaaaagtagcatgtctgagaattagagcccgtagacatgatact

SEQ ID NO: 321365 - DNA, 201 bp, Homo sapiens
agaggaagataaattgtaactcattttaagggtctgtgatttctatggccccttataagtttaccacaaaattaaatgaattcgtgtgtcaattcacataygcgtgcatacatatacacataaatagaggatacagaagccatctttttttatttttatctattgttttatttatttattttagagccaaggtctctctct

SEQ ID NO: 321366 - DNA, 201 bp, Homo sapiens
tgcttatacaactaagtgactataataaaaaccattgaattttacactttggaaatgtgaattttattgtacataagttgatctcaataaaaaagaggagrgagtatatataactttagttttctatcataaatattactcattaatattatataaaattggttgggaattgcttctgggcattttttcattttgtttgat

SEQ ID NO: 321367 - DNA, 201 bp, Homo sapiens
ctgaaattccaaggtgaaaggccagtgacttgtagggagcaaaggtcatcctggtttatttgcaaagcacctaactgaccaaagcccacgattacatggcrggtggtacacttttaaatgaacactgaacaaacacagagatgtatatttaaataacttactgttcttgggtaaacatttggagaaactctggagagagta

SEQ ID NO: 321368 - DNA, 201 bp, Homo sapiens
tctagttcggccctcactggccctctcttggctgctgctggccctgccttcctgcctctgaatcctccgtgtgctcctaactctctcagacaaggacctgkcccttggcaggcagctgccacctccctaagcaaggtcagccctttgttctcttccagagaactaggccatctttcttgctgccccacactgcaggaactg

SEQ ID NO: 321369 - DNA, 201 bp, Homo sapiens
tatccatatagaaattgtgttgttttgtattctacaaacgtggtctaatattatagacacttctctgctttatttttcctttctgtctcagtaatatccakggaaaactttcctactcaatggtcatgattcatgattctaactgattctttttaatggtgcatattacttcatggtatggttataccataacttattcaa

SEQ ID NO: 321370 - DNA, 201 bp, Homo sapiens
aatatccatggaaaactttcctactcaatggtcatgattcatgattctaactgattctttttaatggtgcatattacttcatggtatggttataccataasttattcaaccattcctctatgaatgataattcacattgttaatacctttatttttggccatatgaataatgttataaaaagatctttgtacatttgctgc

SEQ ID NO: 321371 - DNA, 201 bp, Homo sapiens
agcataggctctggagtcaaactgccacagtttaaatttcaactctacaacttacaacctatataatcttgagcaatgcatccgaatttcctcatccttasaatgggaataataatattatctaccacatttggttgttgcaaggattaaatgagacaactcatgtttaataaactgctaatggaaattcatattttacaa

SEQ ID NO: 321372 - DNA, 201 bp, Homo sapiens
ataatattatctaccacatttggttgttgcaaggattaaatgagacaactcatgtttaataaactgctaatggaaattcatattttacaacctccctgaarggcaacttggcaaaattataaaaagtcccagctgaaacaggaggatcacttgagaccaggagtttacaaccagcctgggcaacataggcagactctatct

SEQ ID NO: 321373 - DNA, 201 bp, Homo sapiens
caatctcagcccttttctgattcatctaacctacttctggtttcctagggtttcctctacgttttaaggagactttctcaacatgaagagtaaggcccctrtctgccttgatgtcatctgtgcacattgtcatctgctaaaatgtccattatctctttggttctcataagtattcccaggacagttaccaccatgttgttc

SEQ ID NO: 321374 - DNA, 201 bp, Homo sapiens
tccatcagtaagatctaattaaatgttttaaaatatttatacaatgctaagataaacctatacttttggtttagaaaatggcatcaaatattaagtgacarcaaaagaataacatcatagaaaataaaaggctattcctgtgaaagaaaaattaatgatataaaggatatatactatctcattcgtgtgtgacaaaataag

SEQ ID NO: 321375 - DNA, 201 bp, Homo sapiens; identical to SEQ ID NO: 67325

SEQ ID NO: 321376 - DNA, 201 bp, Homo sapiens
tatcattttaataataattcataatggttaaacaaagacctgtgtgccaggcactgttctcaaacacctcatgtgtattatttcatttaaatttcatgacrgtgtatgaagaaagtgttgttattttcaccatttgacagatgaggaacctgaaacttcatgttaagtaacttgtaagtggtagtgcatagactttaaatc

SEQ ID NO: 321377 - DNA, 201 bp, Homo sapiens
gtttagagcagatttgggagtgtggtaaagaagaatagggaggaggtgtggctggttgatttgactaactgggtgcaaggtgaagcccaaggtacaggcayacttgtgattttttttttgtttttaagggtaactttcttcagggagccttttgtgacccctacaccaggtttcactgtgctatgtacttccatagaatcc

SEQ ID NO: 321378 - DNA, 201 bp, Homo sapiens
aaactgatggaaaattttcactcatgtcatagacaaaatgcttattcccttaacacataaagaccaaagagtgcctagaaattaataagttaaaaaaaaaagatgaacaataccaaaaaatggattaagaatatgaaaaaggcatttcacagtaaaggaaatgcaaacaggccttagacatatgaaaagatgattaaattt

SEQ ID NO: 321379 - DNA, 201 bp, Homo sapiens
ctctttggtgctaaggaattggcttgagaattagagggagacagtaagaggagaaaatggaaaattagtatgtgaaaattcagtgtggcaaaaattattaktagtagtagtagtagtagtagagacagggtgtcactctattgcccaagctagagtgcagtggcatgatcatagctcactgcagcctcaacttcctgggat

SEQ ID NO: 321380 - DNA, 201 bp, Homo sapiens
aacaccatgcttcttttaccttacagtttcttagaggttgttccataatatccattagagatgtacatcatttcctttaatgagttggcatattccatcakataaagggatcataattgaagtaaaattgagggatgtttaattgtgtctagtctttcatgattggtattgcaatgactgtcattgtactaatgtcccctg

SEQ ID NO: 321381 - DNA, 201 bp, Homo sapiens
gtgccatagaggcaaagatgtgtatatatgtgtgcatttttatgggaatacgttttctttaaattgtcataggagtctctggccaaaaaaaaaaaaaaaaattggtatggacaactgatgtgaattattatgtaacctactagttttcagagaaaaccattataagattcttaaccccaaggctctattgggcataattta

SEQ ID NO: 321382 - DNA, 201 bp, Homo sapiens
tagcgttttcacccattagcagaattctctgattcatgagcagcactaagtagataccgtgtgcgtgcattttgaatgaattcatttctacactattttayaggagtattgaatagttgggaattggaacccctccagggggaaccaaacattgtcgttcagaagaagacaaagagagattgaaatgaagctgttgatttc

SEQ ID NO: 321383 - DNA, 201 bp, Homo sapiens
tttaaatgcaattatagatattctcaagaattttgttttagttaaaggggtaagtagaagcaagtgatttttagtcataaaagacacctgtagaactttttaaaatcaggcacattcagccctcaccactggagactttgttccagtagatttggggttgattctgggtatctgttttttcatgttctgtaagaaagtata

SEQ ID NO: 321384 - DNA, 201 bp, Homo sapiens
tccagtagatggagctgttgactaaggatgctaacgtgtgcgataaacattaatagttttcaagacatactgtcaattcttaattatttatattaacagaraaacagcacaaattatttatgagtgcctactctttttgttgttgttgttacttcctttaaaaaatgcaattgtaggccgggcacagtggcttatgcctgt

SEQ ID NO: 321385 - DNA, 201 bp, Homo sapiens
ttgaaattaagttacttttcactgttcaaaaagtgcattgttattggctggactgtaatcaaaatatttagtcctttttattctattgtcatgggcttattaactactttctctcttaaacattactaataagtatgtatatttctctttaggccaacaactgtatcctgtagattatttcagtctaaaaattagttttca

SEQ ID NO: 321386 - DNA, 201 bp, Homo sapiens
ttattacctcctcaatgaggcttttcctgacgccatcccatttttgaataaatcatgagcttcctaagagaattgccatgtcttatccttttatttactgkgcttaacacgttcactctgcaggcaccagtacatggcagttactcagttaatgcttgtggaataaactgaacacattaaaaaaattaatacaaaaaagaa

SEQ ID NO: 321387 - DNA, 201 bp, Homo sapiens
tcttcctattcactgatgtttacagttgcttctctatttagctttctttttaaaaataatttttaaaagtttttttgaataccagaaatcaccttgctttytttttaaaaaaaatgcatattttttctgagaacacctcgtaatttttccattatgccttgtgctattaatggatacaatctgcagtaactatttatcgtt

SEQ ID NO: 321388 - DNA, 201 bp, Homo sapiens
gaggtggtgctagaaatgacaaccacttcttggcaaagtgaatcacaccacttttttattgttctctttatgaagtatccgtggcgaaatgactgtccctktccactgctgccactaaatgaacgttatctctgtggtactttgctcatcagcacgaagacgaaagtagacatgatgatctgggccatttggcgctaatgt

SEQ ID NO: 321389 - DNA, 201 bp, Homo sapiens
ctatcaattcagcattgctttgatgatcttctttcctgaagtcctacaatttttaaattatctcgttatgtagtttaagatatatacatctctttctgtgrctgtattgtaaattcctagagaacaaggactgggttttattgatcttcactatcccttatagccagtaccttttaatgaatactttccactggtaaaaag

SEQ ID NO: 321390 - DNA, 201 bp, Homo sapiens
tagggaaaatcaagaccaattaaaattttaactagattaacaattattgtctcggatccatctcactgcaatgttttggtaagttaattatttttcttctstccttttggctttgtgagttgtattgattaatgttgaacaatgttgcattttgtcttccccattttacattttccctcgcccccgccaaaccatgacacc

SEQ ID NO: 321391 - DNA, 201 bp, Homo sapiens
ctttttgtattcctagagagcaacttcttcaagggcccggctctatgatgttgttgcagtttttccaaagacagaaaagctttttcatgtgagtaacagakaagtaaaagaaagtagtgtatatatgttatataagaagtctgatgttctgactttgtagatgacctgttttgactcatctggaaacttttaggatttgtt

SEQ ID NO: 321392 - DNA, 201 bp, Homo sapiens
tagttttcaagacatactgtcaattcttaattatttatattaacagagaaacagcacaaattatttatgagtgcctactctttttgttgttgttgttactkcctttaaaaaatgcaattgtaggccgggcacagtggcttatgcctgtaatcctagcactttgggaggccgaggcaggtggatcacttgaggtcaggagtt

SEQ ID NO: 321393 - DNA, 201 bp, Homo sapiens
gatgtggatttagtctgcataactgtaacagagaaactaccattttacttcaaaagacctcctattaatgtggtaagtgtactttccattctgtatttgartcttagaaacttacattagcaaattggaaaagaagcagaagaaatcagtgttcttagaaggaaaaacaaaggctagggaataggaggcagttttagaaaa

SEQ ID NO: 321394 - DNA, 201 bp, Homo sapiens
tcagtagtagggagtgaggagggatgtgaagagagaatcagtgaaaatgaagtaggccagtgcatgcttatctctgacagttctctttatttcctgtgaargcgattgaccgaggcctggcttttgaacttgtctatagccctgctatcaaagactccacaatgagaaggtatacaatttccagtgccctcaatttgatgc

SEQ ID NO: 321395 - DNA, 201 bp, Homo sapiens; identical to SEQ ID NO: 67326

SEQ ID NO: 321396 - DNA, 201 bp, Homo sapiens
cccattgggactttgttcttcttagcctcttcataattcctgtttatgtaaagtcagcttccccacagccaagttaaactctcttaatcaagtagagccayggatttattttcttctccttgtgggtggtgccatttgagtgttgatctgtctttcataaagctgtaccttgacatgtaaggggtcagtagtagggagtga

SEQ ID NO: 321397 - DNA, 201 bp, Homo sapiens
agatttcacattaaaatcacctgtgtgattagagatacactctgttgtaaggctgcaggaaagcagacattctcatattttgctcgtaactgtgtaaatgrgaacagtccctatgcggagagtgggtaatttggcaacaactattcaaattacaaatacgtttactgatttaaacaacagttttaaactgtatgatctcac

SEQ ID NO: 321398 - DNA, 201 bp, Homo sapiens
acaatatgatactctacaactgtaaaacagaggaagttatgagctgacttggaagagctttcatgtcaggacaacaatgcagcagactaccttttggatargaaagaaaaatagtatctcttcgtatttgcttatagttgtatgaagaaactctggaagaagacacaagaaattaataaaagtgattattggaggaaggga

SEQ ID NO: 321399 - DNA, 201 bp, Homo sapiens
atggactgccagttctagaaaaagacaagtttctccattccccgtaaatgctcaggagtaaaccccagtagtcacagctgggccagtcccaacttatactytgggcaatcgaaactcatttgccaagcagagacttggaccatactgcctagaacatgcctaccattctttctttattcttttgaaagagtactgccactc

SEQ ID NO: 321400 - DNA, 201 bp, Homo sapiens
aaagagatcaataaatttatgagtgattttattcattaactcaactagtatttactgaacacattttgcataaccaggccattgttgagtgttggcaatayaatgcaattgattcttcagaggtaccttgatgttctaataagagagatagggtacatgctgtaaaatgaggcaagcatgtgctccacatgggagccatac

SEQ ID NO: 321401 - DNA, 201 bp, Homo sapiens
gaagccggagctggactccaagggtacaatcttctaagcttctaagttactatcagcccttcctgattctcacgacagtgtctaaacaaatactggaatttggggcacggacaggaagcgccgtggaggctcggagaaggaggaggacgtgggagtgttggaacaatactatctagacagagagagggtaggtgggggcag

SEQ ID NO: 321402 - DNA, 201 bp, Homo sapiens
aattagtagttttggtaaaatatatagccaaggagatggctgataatatggctaaaagggatgtttttacttatctgtggtttttggttagccaggtgcaycgaggttcctttgatgatggatcatctataatgaacaacgttatcacaggacatcttctccataagctgctatttattcactcaaaatataaatatatta

SEQ ID NO: 321403 - DNA, 201 bp, Homo sapiens
gtggcatgaacgcggctcactgcagcctcaacctatgggactcaagagacccttctgcttcaggcccctcaagtgtctgggacatatgtgtgtaccaccayacccagctaatttttaaatttttttgcagtgatggagtctcacaatgtttcccaggctagtctcaaactcctgggctcaggcagtcctcccacgtcggcc

SEQ ID NO: 321404 - DNA, 201 bp, Homo sapiens
ttacttggtttactatgtttgtatacagtttactgtaaatgtagggagtacatttctgttttccttttgatagttcatggagtagtagcccctctctcacsccattgggactttgttcttcttagcctcttcataattcctgtttatgtaaagtcagcttccccacagccaagttaaactctcttaatcaagtagagccac

SEQ ID NO: 321405 - DNA, 201 bp, Homo sapiens
atgcctttcaagcttctcttatattttcaaaagctatgaaacccatcaaaattataaggacttaaatttatgtaatttttttatttttggatacttaaatwttctattaatttgctataagtcattgaaatgttataaataattttctcatatctactctttgttcattttatttcagcctttagaaataagagggccata

SEQ ID NO: 321406 - DNA, 201 bp, Homo sapiens
ataaggacttaaatttatgtaatttttttatttttggatacttaaattttctattaatttgctataagtcattgaaatgttataaataattttctcatatmtactctttgttcattttatttcagcctttagaaataagagggccatatgacgtggcaaatctgtatccttttctgagtaaaaagttgttgacattgtctt

SEQ ID NO: 321407 - DNA, 201 bp, Homo sapiens
attttcagtgactcttttatgagttggacagctgtggcagttgggatggggcagattctttatgagccaagtatttctgccaaaacaacattgcttcccargcttactaagttactatgactgtcttaaagctagccagcctctgatctctacttcctaaagccctggggttggagtaggagtgactgaagtggggattct

SEQ ID NO: 321408 - DNA, 201 bp, Homo sapiens
gaaactgagcctcgctctgcaacccatccttatgtagaagaccatatgagttagagagtctccaggccctatcttttgagaaagtctgtggacatattccrcttttgctggattacagttaaaccatttaaaccaaacctaaaagagtagcaaaacagttgactttgtaaaaggtcagatgtatttcaacacagaaccatc

SEQ ID NO: 321409 - DNA, 201 bp, Homo sapiens
tccactcttccttactctgccctttcccctggtacatgccactgatgttgtttgtcagcgtagccatcctggaagtttgaatttgtctgtcaagcctgtayacactagcattgtcagtaagctttgtttttaatgtaatacataacagccaaatatttttatcactataaatcaaataatggcaaaatcagagccaggtat

SEQ ID NO: 321410 - DNA, 201 bp, Homo sapiens
tgataggcttctaatctcccttccttcttctccctcaccagaaggccatgctttccctgttgaaaatctctgttttagagaacggatatgttaaaaatatrtgttaaactatttattaggaaaacaaaaccagcaaatacatttttaaaaatccaactaacaaaacatagactgtaacttttacatttattataactcaga

SEQ ID NO: 321411 - DNA, 201 bp, Homo sapiens
tcatgttggccaggctggttttgaactcctgacctcaagtgatccacccgcctcggccaggatactttaaattaagcacagatcttaattttgtcacgatktgggcccttttctttggttgtggtgaaaagcagtattaagaaaggtaaatcattcatcttttaccaataggccagatgccatgtgagaatcatcagcttg

SEQ ID NO: 321412 - DNA, 201 bp, Homo sapiens; identical to SEQ ID NO: 67324

SEQ ID NO: 321413 - DNA, 201 bp, Homo sapiens; identical to SEQ ID NO: 67327

SEQ ID NO: 321414 - DNA, 201 bp, Homo sapiens; identical to SEQ ID NO: 67328

SEQ ID NO: 321415 - DNA, 201 bp, Homo sapiens; identical to SEQ ID NO: 67329

SEQ ID NO: 321416 - DNA, 201 bp, Homo sapiens; identical to SEQ ID NO: 67330

SEQ ID NO: 321417 - DNA, 201 bp, Homo sapiens
cgcaaatatttctaaatggggagaactcaggcagatggcgcggcatgccttcagctcagtgcacagactctgccccagacaacccacctgtgtgtccacaytccccactgactgagcacctcctgagggtggggggcatatcatgttaatatttgtacatccaacatttcatgaaatgttatgaacatcagaggagtttta

SEQ ID NO: 321418 - DNA, 201 bp, Homo sapiens; identical to SEQ ID NO: 67331

SEQ ID NO: 321419 - DNA, 201 bp, Homo sapiens; identical to SEQ ID NO: 67333

SEQ ID NO: 321420 - DNA, 201 bp, Homo sapiens; identical to SEQ ID NO: 67332

SEQ ID NO: 321421 - DNA, 201 bp, Homo sapiens; identical to SEQ ID NO: 67334

SEQ ID NO: 321422 - DNA, 201 bp, Homo sapiens
cattttctgtaagcttttcttcccctttaaaaattgcagtaaaatatacataagacaaaatgtatcatttaaatcattttaagtgtacaattcagtggggygatatacataaggcaaaatgtattatttaaatcattttaagtgtaaaatccagtgcctttaagtcccttcacgatgtcgttgcaactgtcaccaccatcc

SEQ ID NO: 321423 - DNA, 201 bp, Homo sapiens
aggaccacgagtggatggcggcaccagactctgaaattctcctccggtcccctcctgtgtcgcacgtacgtcagcacgtggccgggcgtggatacctgccycatgagccacgtgttcattcaggaactattccgaccttacacaccaggccctgggcagggaaagatgctgccttcatggagctgatagcctggtcgggga

SEQ ID NO: 321424 - DNA, 201 bp, Homo sapiens; identical to SEQ ID NO: 67335

SEQ ID NO: 321425 - DNA, 201 bp, Homo sapiens; identical to SEQ ID NO: 67336

SEQ ID NO: 321426 - DNA, 201 bp, Homo sapiens
taaggaaaacaagaagccaaaaaaaaaaaaaaaattaaaaaggcagattcagcaagctgctgtggggaggtgttaagggcagctgtttgggggatcgcacrtaacaccacatggctagaatagggtccagggtccagggtatgctgtggggtgaacatgtggggtgagagcagtagacatgtctgcagtgggcacagcacc

SEQ ID NO: 321427 - DNA, 201 bp, Homo sapiens; identical to SEQ ID NO: 67337

SEQ ID NO: 321428 - DNA, 201 bp, Homo sapiens; identical to SEQ ID NO: 67338

SEQ ID NO: 321429 - DNA, 201 bp, Homo sapiens
tgtcttattgaagtttaaaaatgacagtatgaagtaggcatagatggcaagctacatcgtgtcctgccctgtatcacacagctacagtgtgttggagcaargatttgaactcaggcatttgactttggtgccctgtatgcagtttaatttgctgactctaaagataatggacctaatgtaataatagctccagggctcccc

SEQ ID NO: 321430 - DNA, 201 bp, Homo sapiens
cttgctgcatcatgggctttatcagttcctggttggttattgtgtgttggtattgatctgtagaaattctttatattctggcagtggcctgttgtctgctrtgtgttttgtaagtatcttttcacattcccaggcttcttgttttgtcttttattttatggaagtttaaaattatgaccttttcaaattttttaataactt

SEQ ID NO: 321431 - DNA, 201 bp, Homo sapiens
actagaatataaaaatgttttatgtcttggtgtactttacattttctaacataattgtctatatagaatataagggcatattttgcaaagcacataaaagrctgaaaccttcatttcacatgggaaattattatgattttatttttagaatactgtgtctttcttttctagtcttccatataaagaattttttggtggtgt

SEQ ID NO: 321432 - DNA, 201 bp, Homo sapiens
aaagataatttgatttcaattaaaagagatattcagaataatggccggggtggcggatagactatatacacataatacattgggaagacacaaataccacyggacagagtactgaaggagtgtggaggtgtttctctaagtctggcagtgagttgagctccttaggaggtggccaagaatagcagatgtttagctctaaaa

SEQ ID NO: 321433 - DNA, 201 bp, Homo sapiens
ccagtgatggtttggagggccacaaagccctctcttctgctgtttatcttcttcctaaggtgtgcattcttgacctgccctttaataataaaaaaaaaaaacccaaatcttttccttctctaattggagataatttaaaatgaacagttatcagagctgagatagtaacttaaaaggacatgaaagaatgcaagtctaata

SEQ ID NO: 321434 - DNA, 201 bp, Homo sapiens
ctttctttttggatctcctattatgtattatttctctctcgtttttcaattctttttctttcctttctatctttctgggagattgctctgactttactacmatgctttgatttgattttttaaattttggcaaacttatttttaagaattcttttttttttcttttcttactgttactgtctccctcaaataagaatgcct

SEQ ID NO: 321435 - DNA, 201 bp, Homo sapiens
ggtgggtggatcacgaggtcagtagttcgagaccagcctggccaacatggtgaaaccccatctctactaaaaataccaaaaaaaagaaaaaaaaaaaaaaagatgatgaagtgtgagtacatttctatttttttctctcggtctgctccatgaagactggcacacaaccttttaaccgtgcgatgcttttcaatgtgggct

SEQ ID NO: 321436 - DNA, 201 bp, Homo sapiens
cactgcaagctccgccccccaggttcacgccattctcctgcctcagcctcccaagtagctgggactacaggcacccgccaccacgcccggctaattttttrtatttttagtagatacagggtttcaccgtgttagccaggatggtcttgatctcctgatctcgtgatccacccccctcggcctcctaaagtgctaggatta

SEQ ID NO: 321437 - DNA, 201 bp, Homo sapiens
ctagacactgtcacaaaactcataacaatagtaatcttaagcagttttggtgggagtgacagaaacccaattcatgcttattgcacttgctgctaccactrgcaaggtaggagtccccatagagagagaagccctttttttaaaaacaaaaacaaaaagaaaaaaacaagaattttggtatatatgtagatatatatattt

SEQ ID NO: 321438 - DNA, 201 bp, Homo sapiens
ttttaacagttttgttacctacaagttgtataatttaaaaagttgtttccaggaaacataataatgcatataatgcttctacttagcatctcatttcttargccagggtcagtcctggaagtacaagttttttgccttaggctgagttctagtactttgtggcaggttttcttttcacagtttggtgtagcacaaatataa

SEQ ID NO: 321439 - DNA, 201 bp, Homo sapiens
gaataggaagatgaaactaaaaacactgaaggagaatgagggcttactagcttctgcttactcagtggcagataactagattcaccttaaggttaccaagyctaaagccatgtcatttagggacagtgtagctggtggtgtgctgaaaatttgaaagcaggacagaaacttggtgggagaaattgatgtgatacacatttt

SEQ ID NO: 321440 - DNA, 201 bp, Homo sapiens
tcagttttactgatctaggaaagtgctagtttcctttgtgtaaacttcaattccccataatgtgtggagaggtgagagagctgtctctggttttttttttktttgtttgtttgtttgttttgtgatggagtctcgctctgtcgccaggctggagtgcagtggcgtgatctcggctcactgcaacctctgcctcctgggttc

SEQ ID NO: 321441 - DNA, 201 bp, Homo sapiens
gttggctgttcttttagttttcttttttctcttcgtctcttttcttccatgtttttgtagttaccaaagatgaatttgttgctgtagatactttcattatkaaaaaattaatatggattaagaaattagaaaaaagtctatacaagaataagatcaggaactaatacatttaaaaatagaggaaaaaagaattgagatatt

SEQ ID NO: 321442 - DNA, 201 bp, Homo sapiens
atgttcataggttaaaggccacaatctttagaaaacgcttcagagccccttctacctctcagctttataagaccatagcagcatgcagcaagggctttttscgtgtttgcttgctgttgtatctctgatgagaaaattcataaggacgtggctttaaaaccatcagaagttttcaaggattgatttttatccttacctcta

SEQ ID NO: 321443 - DNA, 201 bp, Homo sapiens
ttttagctttgtgtttagagactttaaagaagaatgcactacttgcacacctgccttgtgaaaacgaggaaactgagatccaaggagctgtacaaagttaygcacagcactaacagaattgggaccaggaaaggagtttctgacttagttctgtgcctctggggagtctggacatctcaaaagttagggatttttgcgata

SEQ ID NO: 321444 - DNA, 201 bp, Homo sapiens
aacataccatacttctgtgtgtataaatcattctttaagttttgtgccttatgtactttttaatgtaacaatctgtactgtgaaatctgacttgttttacytaacaagtggaaattctcatctactttcatggagctgtagttgtagatttctagatcagttttactgatctaggaaagtgctagtttcctttgtgtaaac

SEQ ID NO: 321445 - DNA, 201 bp, Homo sapiens
aactaagttaccctcacacatgatagaagcagtttggcacacacgactggaaggtagcttccagctgacttgagttccctgtccttcaccttgaccttctmggtacttggcagcccctccactcttcagacactcagttctcctgctctttcctttctaaccccagcgccaccttcaaaatagtgaaattcagtatttggt

SEQ ID NO: 321446 - DNA, 201 bp, Homo sapiens
gtcctatcagtatggaatatcttacccttcatttctccaaaatatttttatattatttctttgataatttgtcttcctattattttcctttctttttggawctcctattatgtattatttctctctcgtttttcaattctttttctttcctttctatctttctgggagattgctctgactttactacaatgctttgatttg

SEQ ID NO: 321447 - DNA, 201 bp, Homo sapiens
ggaagcagggatgagacaggaatcttcctactcattcattcattcattcattctgtgtccaggcattgcccttggcagtggggatgtgtgactaatgctctgtcttatgtttagaatgctcaggtttggttgcttcaagaaaacttgagtaataaatcgtttgttaagcagaggttgtcaaattttataagtcgagaagct

SEQ ID NO: 321448 - DNA, 201 bp, Homo sapiens
ccagaaaagctgccttatatgcgtaagtcgtcatctaattttgacttaactgtttacttgtgttacaatacagtcataaaaaccacatgatttgagtgcarcaggagcaggtcatgtgcacctgggtgcaaatgtttatattatgcagcatgttatttgaacttttatttatttatttattttttggcaaagcgctttttg

SEQ ID NO: 321449 - DNA, 201 bp, Homo sapiens
aaataattcatattttagcctgaattacatcttggggcaaaatgtgtttatgactaaaatgtatgttgtaagtactttttatgtgccctaaaaagcgtttyaaatctcctctgttaagaaattcctattaatcctaccatatcaacctgtttggtaaactttaattctctttccctacttgttttctgtcctgagccctgt

SEQ ID NO: 321450 - DNA, 201 bp, Homo sapiens
gtgcagcaggagcaggtcatgtgcacctgggtgcaaatgtttatattatgcagcatgttatttgaacttttatttatttatttattttttggcaaagcgcwttttgaagggggatgattgaaaagctgaagaaaaatacaaagggggaaaatgacaaatacccatattgttcccaaccagttttaaaaactaatacttcgg

SEQ ID NO: 321451 - DNA, 201 bp, Homo sapiens
tcaggaaatctttctgttcttggtttagttgccattttctttaattagtgctttatgagtactaattaaactctatttcaaagcatctgtctgccacttcmtcattctggtactcctctcctcccgccccacagcccattgtaccatctcttgtggtgcctgagagattgcgtcgtgcgtggctgctgtgcactgcctttt

SEQ ID NO: 321452 - DNA, 201 bp, Homo sapiens
tatttcaaagcatctgtctgccacttcctcattctggtactcctctcctcccgccccacagcccattgtaccatctcttgtggtgcctgagagattgcgtygtgcgtggctgctgtgcactgccttttcactgggggtggggaggggtctcagcactactgccccttctctctgcttccctgggatccttgcattctttta

SEQ ID NO: 321453 - DNA, 201 bp, Homo sapiens
aggaagagatggacttgagcatgttgtaggcatcatggaaagaaaggatggagagaagaggccgggcgccgtggctcacgcctgtaatcccagcactttgrgaggccgaggcgggcagataatgaggtcaggagatcgagaccatcctggctaacacagtgaaaccccgtctctaccaaaaataaaaaaaattagctgggc

SEQ ID NO: 321454 - DNA, 201 bp, Homo sapiens
aggcatcggtaagcaccgagacacaccctcgcttcccctggtcacaccacagccagcgcaggctgttatccgatgttacttctgggatttggaagctgttyaaacaggggcccgcagaaaagcgttttgttttaaatgttatttcagacgtgtcaaactgcttcagggcatggctttggtatgtgagttttgttaatgcat

SEQ ID NO: 321455 - DNA, 201 bp, Homo sapiens
gcagcaatcaatcaattgcacaagtgcttcagatttcttatttatgagacatatccagaagtaattaggttcttataactagtttttattcgatgtatgtrgatttttcttgaaataataacttcaagaaaataattcatattttagcctgaattacatcttggggcaaaatgtgtttatgactaaaatgtatgttgtaag

SEQ ID NO: 321456 - DNA, 201 bp, Homo sapiens
tttaattatgaagataatacattatcattattttaaaaaaaacactatactgtactgtcaacactcagaagccacacggctattattttagcttttttttktgtgtgtatcttctacccctgccccatgatttttaagcctactttgtacatataggtttgtatcttggatttgatataaagatttaaataaacatctttt

SEQ ID NO: 321457 - DNA, 201 bp, Homo sapiens
atttatccatattctgatgtattttgtatctgtgttttttattcttgacacgagcttttttaattgaggaaattagcctttgcctatcatatttgtaggayttgttttagcttattgttgatagatattatatatcaataataaaaagaaagattgaccttctaatatcatctaaggccatggctttcagtcttgggggta

SEQ ID NO: 321458 - DNA, 201 bp, Homo sapiens
agactcagcaggtctggagcgggcctgagaatctgcatttctaacaaatcccgcaaggtgatgctgttgccgctgagccttgggccacgtattgagacccmctgatctagagtagtgggcctggtccctggtatttaagaaaaaaaaaaattctcaggtgattctaatcttgctgtctctttgctgtaccataataaagaa

SEQ ID NO: 321459 - DNA, 201 bp, Homo sapiens
gttgtaccatcattgatctctactatgttggggttttctgggaatgcatttaccttaacaccttactgatgccctgtgaaatttgtaactggggtttccawgcacttctttggaattggaccttctcttgtggcttctgtttcctccttgatacccagcctggaacctttgcccgtcccaacaccctctgcttagcagccg

SEQ ID NO: 321460 - DNA, 201 bp, Homo sapiens
aagtaagttgagtgggtaaatctcagtttctacagtgtgaggtggtaagaaaacattactcccacccctctgctctgtggatgctagtagcagcacgcagyggtttggaacacccctggctgtgccatagtggaggggattccctggtgtactttcacactccctttagatcgggctcagccaggggagggacgggagcag

SEQ ID NO: 321461 - DNA, 201 bp, Homo sapiens
tagaatttttataaatcttatttatattaggtaaattgtagtacttatccattccaagaacattctttgggatgggatatgtttgaggtttctaaaccctrttttatatttctctttttttttcattaagtctgctttctgaaattattggcagcatataattagagcagcggtccccaacttttttggcaccagggacca

SEQ ID NO: 321462 - DNA, 201 bp, Homo sapiens
tctgatgatttgtgatttggagcatttttttttgtttgttggctacttgaatgtttccttttaagaagttagtatcttttgctcatttttttttttttttkgctcattttttaatggggttgttttttgcttgttgaattgtttaaattccttatagattctggatattaggactttgttgtatgcacagttttgcataaa

SEQ ID NO: 321463 - DNA, 201 bp, Homo sapiens
accaaggtttccaaagctgttgaataaatgaaaggtaaataaaaatgcattgaaccccaaaaaagctgctgaagggaattttcataatggaagggaagtaytttttgctgaagggaatctttacaaaaggaagcatttttgatgcttgtttttaagagatatacgtatatatacattaataaatacacatatttacgttaa

SEQ ID NO: 321464 - DNA, 201 bp, Homo sapiens; identical to SEQ ID NO: 67343

SEQ ID NO: 321465 - DNA, 201 bp, Homo sapiens; identical to SEQ ID NO: 67344

SEQ ID NO: 321466 - DNA, 201 bp, Homo sapiens; identical to SEQ ID NO: 67345

SEQ ID NO: 321467 - DNA, 201 bp, Homo sapiens; identical to SEQ ID NO: 67346

SEQ ID NO: 321468 - DNA, 201 bp, Homo sapiens
tggaagcagggatgagacaggaatcttcctactcattcattcattcattcattctgtgtccaggcattgcccttggcagtggggatgtgtgactaatgctctgtcttatgtttagaatgctcaggtttggttgcttcaagaaaacttgagtaataaatcgtttgttaagcagaggttgtcaaattttataagtcgagaagc

SEQ ID NO: 321469 - DNA, 201 bp, Homo sapiens
gctgggcgtggtggcgggcgcctgaagtcccagctactggggaggctgaggcaggagaatggcgtgaacccaggaggtggagctggcagtgagctgagatstcgccactgcacttcagcctgggaaacagagggagactccatctcaaaaaaagaaaaagatgaagagaagagaactgggaaggatgagggagaagcacaa

SEQ ID NO: 321470 - DNA, 201 bp, Homo sapiens
gtggtagttttatattaatgtatgctgacctaatgtaagtctctcctccgcttaaaaccccccactgccttctggaggttcttaagtagaggagcaacttwatcgctggtgtgttcctctcgacgtccacctgcttgtgtctcttcctgccaggatctcagggctttcataggcaaaggatgagggatactgggaattcta

SEQ ID NO: 321471 - DNA, 201 bp, Homo sapiens
ttggaggcggaggttgcagtgagccgagatcgcaccactgcactccagcccaggcaacagagcgagactttgtctcaaaaaaaaaaaaaaaaaaaaaaaaagaaaaaaggttatgaatgtgacaaaagggagacagcagtttattttggaagggaaaggacgatgtcagagagaggtgtcatcagaactgggtcttacaag

SEQ ID NO: 321472 - DNA, 201 bp, Homo sapiens
ttcctctcgacgtccacctgcttgtgtctcttcctgccaggatctcagggctttcataggcaaaggatgagggatactgggaattctaggaaaaatgaccmatgattatgaatcagaaacctatgaacattctcagcaatactgggaaatttttttttcctggaattttttacccagccaaattgacaaatgtgagagtag

SEQ ID NO: 321473 - DNA, 201 bp, Homo sapiens
gatggacttgagcatgttgtaggcatcatggaaagaaaggatggagagaagaggccgggcgccgtggctcacgcctgtaatcccagcactttgagaggccraggcgggcagataatgaggtcaggagatcgagaccatcctggctaacacagtgaaaccccgtctctaccaaaaataaaaaaaattagctgggcgtggtgg

SEQ ID NO: 321474 - DNA, 201 bp, Homo sapiens
tttggagatgaggtggagaggtagggtgctcgtgcctgctgtgtctgttttcctagtaaagcaggaggccgtgtgtccctgaggggatggccaggaaggaytgagcagcttgaaagggaggagtaagtatttaaaaagttgtcatagggaatgaaaagtgaagtcaactaatcataaattagaaggtgactaacaggttat

SEQ ID NO: 321475 - DNA, 201 bp, Homo sapiens
acttgtcagggcttaaacctcctaccagcattgctcaggtctggagaccagaagtgccacttcttggttcctgtaaagctagaagcttttgccaccacttygggtgcatttggtcatatgaccactcctacctgttagaggggtttggagagtgggttctagctttttcctttgaaaggcaggacccaatggtgggtagtt

SEQ ID NO: 321476 - DNA, 201 bp, Homo sapiens
tcgccagcatctgttgttttttcacttttcaataatggcttttcctattggtatttgatgctgtcttatcgtggttttaatatgcatttctctgatgattwgtgatttggagcatttttttttgtttgttggctacttgaatgtttccttttaagaagttagtatcttttgctcattttttttttttttttgctcattttt

SEQ ID NO: 321477 - DNA, 201 bp, Homo sapiens
ggttgcttcaagaaaacttgagtaataaatcgtttgttaagcagaggttgtcaaattttataagtcgagaagcttaagtaaagcatttgaaataggcagtrtctagtgttggcttcagaaaggacaggaggtgaccaatggctggatgactcataactgttcagcctcagagctgtgcttaggaggcagcacagagtgtgg

SEQ ID NO: 321478 - DNA, 201 bp, Homo sapiens
atagggggcaatggccaatagaagattagaactgtcgaggttggtagttcatcagggcagagttgaatggatgggaatagtaggtttgaagaaacaggaasagctttaacatgaggtttggattctagcttagacattcaggtagctattaatagggagtatagaaagtcacgtctttggggggctattttgcttttagag

SEQ ID NO: 321479 - DNA, 201 bp, Homo sapiens
tgattacactgctgggtaaatggatttcagtcaacatatttattttctgatctttaaatctctaactgggaaagaaaccacttgtgccagttaaaaatctyagatttatactattacatctgggattaagaacaacaacaaccaatctcagattcaccacagaggagagtgaagattggctctccatggagttcagtggat

SEQ ID NO: 321480 - DNA, 201 bp, Homo sapiens
ggagctcctcagacctgtatgtttgcaacattctttttctagtccattttcttggccgccttggaccaagctggcttttgtcaccactgcctgagcctgcrgtttgccagcctaagctggctgtccccacctctttcccttcctcttttctcctttccccttgtccctctgaatctgtttcgtgttttctttttaattcct

SEQ ID NO: 321481 - DNA, 201 bp, Homo sapiens
ctttgtcagctgagtcatgatagtctgtacttatgtttactgatcaatcttacattttacttactctttctctgcaagttcataggtttctctttcttttwgatgaatctgacctttctaagattagctagtttgtgtatcttgtcacgctgaaggctgagtgtttggttataaaagactgcttatgttgtcagtagaaca

SEQ ID NO: 321482 - DNA, 201 bp, Homo sapiens
gtctactttttgaattatcaactagggttaaagtaggctgaactaatgatctggttgttggaaaagtccttctgatgttttagacagtttgtgcctttgcrggatcttggttctttacagaggaagccagatggccccttaacttttggcattgcttggtaaacggcagacactcaataaacatgtggataaacatgtttc

SEQ ID NO: 321483 - DNA, 201 bp, Homo sapiens
atatacattaataaatacacatatttacgttaaagagcccggttaactatttatgtaaaagtatttacgtaacataaagcataatgttttatttattaaakatgtctaattgtaaaagtgcaaaataattttttcaggtggcatttcttgagtagtaaaattgctaatttagaataatggtttagagattcttaaattatg

SEQ ID NO: 321484 - DNA, 201 bp, Homo sapiens
cagcaaagctcaaataatgctaatgtaacaaactgtcatgcatatgtttattgtaaaaaaaaaaaatgagatgggagccattttagagtcaacaagtcatkgatgaacagccgctgtgcagcggtccctgtgttgttcatagaagcaggtacgggagagacaagactgaacgtggtcatgtgtgtggcagcttggagcagg

SEQ ID NO: 321485 - DNA, 201 bp, Homo sapiens
aaaggacgatgtcagagagaggtgtcatcagaactgggtcttacaagatagctgagagagaacagcatcaccacaagggaggctctgtgtattcccggacyggagagtggtcggctctgcccagagagggtgtgttaagtggcgtgtatgggaaatgaagctggctagaagggtcttgtgtaaaggactgaggaatctgag

SEQ ID NO: 321486 - DNA, 201 bp, Homo sapiens
ctgctctttcctttctaaccccagcgccaccttcaaaatagtgaaattcagtatttggtaaattatattatttacatttgctgattgtgattacactgctrggtaaatggatttcagtcaacatatttattttctgatctttaaatctctaactgggaaagaaaccacttgtgccagttaaaaatctcagatttatactat

SEQ ID NO: 321487 - DNA, 201 bp, Homo sapiens
tccgctccccttcttccccctccccccttcttcctcttccttccttccttcctgcttctccttctccacctcatccttctcctcctccttccttttttttkgctggtcattgttatcattagaaaacctttttctttattacctctgtatctgaactttgagtatggggttaccttgaagaaggccatcaaggttcacaat

SEQ ID NO: 321488 - DNA, 201 bp, Homo sapiens
ttttctgtcctgttttcagtttttcattttcaaagtcatctttcttggtagaggaaccttgactgtttttgttgtaggatatagacccagctctacagttkgtaagtaaatatgcatccattgaactgacaggtcaaaaaaaaaaaaaaaaagcatacattgcatggaagactaaactatgtgatgcccaagatcccttcc

SEQ ID NO: 321489 - DNA, 201 bp, Homo sapiens
aaataatttgttgttaacttgaaaatatcaatttctaataaaatacagttgacccttgagtaatgcaggggttacagtggtgaccacctcccccagccacyggaatgcagttgaaaatctagtataacttttgactccccaaaagcttaactactaatagcctactgttagccaaaagccttaccaataatataaacaatt

SEQ ID NO: 321490 - DNA, 201 bp, Homo sapiens
ttagaaaagtttaaaaacattgcatcgtttgacacattccttggagtatgagttaggaaagggtaaggaaaataaaatccaaacaaaaatagttatttctrtaaatatcaatgcattgaaaatgaatatatttgtaaatatccatgaatattttgagagtataattccaacagataagatcattataaaagtaggtagcta

SEQ ID NO: 321491 - DNA, 201 bp, Homo sapiens
atggaggtgcttagttttctttggctcctctcacatacttcctatctaattcgcaggattctctcatttccctatggtcagagggtttagcttctacattktctctcattggagcagattactcaacattcaaagaatatcttcacattttcctaaagtgtctgctagagtttcactttctgtagtacattgtttgtgatc

SEQ ID NO: 321492 - DNA, 201 bp, Homo sapiens
tcgctgatccgacaggaggtggagctcaagcagtaatgatcgctcacctcctgctgtgcggcccagtttttaacaggccatggacctatactggtttgtgrcccaggggttggggaaccctggattagagcattcttttgtgttttaaaattgaactcacataacccattttcatattttatttctctatattttcatttc

SEQ ID NO: 321493 - DNA, 201 bp, Homo sapiens
tgctgttctctagttccttaaagataattgattttaagtacttctgtagattgtatattgtagttttctcccagtgatagtgacgtatttcattccagggrgaaagcaaaaggcctttttttttttttgtaactcttttctctctttccaagattatcccgaaggcaataattcaagtgattatcttgttcaaacaacaac

SEQ ID NO: 321494 - DNA, 201 bp, Homo sapiens
tttggctggagggcgctccagagcaatttgtacctatttggaagttaacggatgacattaaaactgctaaaagatgatctgtagtttcaatagccttttayatcctgttctaacagtgaagtcattgaagatagcattgctttgaagggatgttagtgatcatgcagctattttaattcagggggagataaagaggcttct

SEQ ID NO: 321495 - DNA, 201 bp, Homo sapiens
tctgaaatgtaagacatttaaaatttcttttatataatctaaataagatacagggaccaatatcttttttctcaccagagatctgatcatattcacaatayaaatttttgagaagtatctgtaccacaacattttggaattacatatgtgtgtgtgtatatatatatatgtatatatatatacactcaattatatgtatat

SEQ ID NO: 321496 - DNA, 201 bp, Homo sapiens
taataaatacgtgacttgagtttggcttggaaaatagatttttttgttgttctgttctgtttggaagagaggctgtgagttccctgcctcctgcagctgtycctaatgattactgacacctgcaagcatagcctcaccagtttctgaattgtgagaactcactgggaggatattaatatcccgattttcagtttgttctgg

SEQ ID NO: 321497 - DNA, 201 bp, Homo sapiens
ccagatggattttaaattttttgtttgttttcttctcattttccaggagacaggtgtatcacatgagtatttcctacttaaagatattagtagactgactrtaaactacatatgattcagtaggtaacagtatggaaaagagttcctgggaacaaactaattcagggatctaaggttcatacctgtaatcccagcactttg

SEQ ID NO: 321498 - DNA, 201 bp, Homo sapiens; identical to SEQ ID NO: 67342

SEQ ID NO: 321499 - DNA, 201 bp, Homo sapiens
tggcaaattaattagaactgagatctttcaaaactagtaattttggctggccaacctgttgagaccccgtctctactaaaaataaaaaaattagccgggcrtggtggtgcaggcttgtaatcccagctactcgggaggctgaggcaggagaattgcttgaacccgggaggcagaggttgcagtgagccaagatcgcgccca

SEQ ID NO: 321500 - DNA, 201 bp, Homo sapiens
atgtcataggtggccaactcgtggccaaattcaaaatcaagaagggcaggcttgacttactaagctacatgttatcacatggatatgctttagataaggtyagtggtgggatatgtactcaccatctaacctcttttgctccttttacttttcatagcacttttccatcctaaaagtaaacccctgagctagcttcacagt

SEQ ID NO: 321501 - DNA, 201 bp, Homo sapiens
ttccatcctaaaagtaaacccctgagctagcttcacagttgttttgattcgggaattccttgaatatgccagccattggcgctgaagcccagcagtaagtscccctcagtatatagttccagtacagttggcagccattgtgcgggggcaggaaggaggtcttggatgttgggtcggtattgctggggtagcctcatggtc

SEQ ID NO: 321502 - DNA, 201 bp, Homo sapiens
aggtcttggatgttgggtcggtattgctggggtagcctcatggtcctcaggcttctgagccaagagagacgttatggggaaaccaaaaaggaatgggaccsaaagttgggctggcaggggcaccagacctctttagttcctaccatttgccagatagatatgctgtgattaattattatcatgaaaacatcagcctcatag

SEQ ID NO: 321503 - DNA, 201 bp, Homo sapiens
aagcagtggtaggtttccctattagttttatgaaatgagggtttcttataaattggaatagatattttagacaaggattttctctacctaaagtcttgccmataagaaattacattttattttttgcaatctatccatcggacaaagggctaatatccagaatctacaaagaacttgaatttacaagaaaaaaaccccatc

SEQ ID NO: 321504 - DNA, 201 bp, Homo sapiens
tagaaaattcacaataataataaagctagctcagctaggaagttgctgagaaaagtaattttgaaaacactttaggtttttcaagggcaaaatctaaattrtaaggagatctagattgtatgacaaagtttgtatccaagaaatagaggatttgaattagtgatgattgatgatcattcatttattcttgtattacactaa

SEQ ID NO: 321505 - DNA, 201 bp, Homo sapiens
tcttaaaaaatcagtttgtttttgtcagtttttatagtaggcaatattttatatttctgttttgcgtttggacgtgctgattgagtcagtttatgtttatkgggcacttccccaattctgaatattattttattaaataaaaaaaagcttactgtgttatgacattctttctctatttttcttttatagccaacacatatc

SEQ ID NO: 321506 - DNA, 201 bp, Homo sapiens
tttctattatatttctgaaaatatctctaggacagagaaaccatgtgtaagatagtagatattcaagtgaaatgtcttttaaattcaattcaaaatccagraagttattatttaggatctactctaaaaccgagacgttactcttatgatacattcccctcccttacttttcatgcccaattgatagccaaaccctgctag

SEQ ID NO: 321507 - DNA, 201 bp, Homo sapiens
tttattacagtaaaatctccaaaagcttaaatcattattggctgtattatcatttgtgaggtgtttatttatagtatgttcctactatgttgtaggtactwttattaggtgctagaaatcaaagataatttgatttcaattaaaagagatattcagaataatggccggggtggcggatagactatatacacataatacatt

SEQ ID NO: 321508 - DNA, 201 bp, Homo sapiens
tctactctaaaaccgagacgttactcttatgatacattcccctcccttacttttcatgcccaattgatagccaaaccctgctagcttacctcttagatgtrttgaaaacccatgtacttctcttctcctttatcctcctgttagtttaagctaccattacctgttttctcaacgactgtactaattgcctaactagctccc

SEQ ID NO: 321509 - DNA, 201 bp, Homo sapiens
gaaatgtcagaagtcttgaaagcgatgcagtccattgtcttagagtgacccttctagcatgaaggatgggttatagggggcaatggccaatagaagattaraactgtcgaggttggtagttcatcagggcagagttgaatggatgggaatagtaggtttgaagaaacaggaacagctttaacatgaggtttggattctagc

SEQ ID NO: 321510 - DNA, 201 bp, Homo sapiens
ttcttccccctccccccttcttcctcttccttccttccttcctgcttctccttctccacctcatccttctcctcctccttcctttttttttgctggtcatkgttatcattagaaaacctttttctttattacctctgtatctgaactttgagtatggggttaccttgaagaaggccatcaaggttcacaatctggttctct

SEQ ID NO: 321511 - DNA, 201 bp, Homo sapiens
ccctctgctctgtggatgctagtagcagcacgcagcggtttggaacacccctggctgtgccatagtggaggggattccctggtgtactttcacactccctktagatcgggctcagccaggggagggacgggagcaggtgttctcacatggttgcaagtgggactgccatgtctgtgtgcaaggataagggtgtgctgctct

SEQ ID NO: 321512 - DNA, 201 bp, Homo sapiens
agcaatgtgtacagtctattttatgaaactaacattaagaacaaaaacatagatggcaaaaaacccacaaaccttacttatgaatatatatttaaattgtrtgaataagtttttcccccatatggtctatttattttaaataatttcaacttttattttagattcagggcatacatgtgcaactttgttacatgggtatat

SEQ ID NO: 321513 - DNA, 201 bp, Homo sapiens
tgctaccctccttctcactccctagctttgttacaagagtcattgggtccattccacactcaagagatgagagatgagttagagattgtttccacagtcarattgccattcctaagtagcatatgtgactcagctatatctcttcagtgtaaactaatccaaatcccatggccttgtgggaaattaggcaatattgaaggg

SEQ ID NO: 321514 - DNA, 201 bp, Homo sapiens; identical to SEQ ID NO: 67339

SEQ ID NO: 321515 - DNA, 201 bp, Homo sapiens
aaactgcttcagggcatggctttggtatgtgagttttgttaatgcatgcattttgttaatgcatgtttgttaataacgtaaaagattgcattaaatagacrtagcaaaattagtgtgatggcccgggatgccctagtcgctttcttgagtgttcatgacagctttatccatttaatgttaagtctttaagcctaaactgag

SEQ ID NO: 321516 - DNA, 201 bp, Homo sapiens
gttttccattcaagattcattcctgtttcaatggtatacattagaaaagctactagtaagaacacctccagtaatgtcatatatttgttaatttggagaaygagtgcctgttagaccaggaatacctcagaagtggtttttcagttttgtatgccaaggggcctgatatatggtaagtgctcagaatcagtactttgaatt

SEQ ID NO: 321517 - DNA, 201 bp, Homo sapiens
catatttccaaaacttttctgagtttttcctggctattacgtatttaatgttcaattacttagtaacagtgagcatctcctctcatttctccttacacacwgtggtcgtttgagccagtgctctttgttccgagttagctaaaaatgtaatgccccttacagagtgaaaacacctgcagaattttcagatggaatgatcag

SEQ ID NO: 321518 - DNA, 201 bp, Homo sapiens
ttgagttcctggtaataaatacgtgacttgagtttggcttggaaaatagatttttttgttgttctgttctgtttggaagagaggctgtgagttccctgcckcctgcagctgtccctaatgattactgacacctgcaagcatagcctcaccagtttctgaattgtgagaactcactgggaggatattaatatcccgattttc

SEQ ID NO: 321519 - DNA, 201 bp, Homo sapiens
gtgtgaaacactaataaattttccttatttgaatgcttaatgtttgccatagaacggtcactgatataatgtaaaaatgttggcacgtgtcttgtaggcarttagattgatgtggcttaacctactctgtttttgtaggtcttataaatgataataagttattaaaaccagttagaagagtgcaaaccaaaaacttacaaa

SEQ ID NO: 321520 - DNA, 201 bp, Homo sapiens
cctgggctatagaatgagacccccatctctaaaagaaaaaaaatgcagattcttgaactcagtcctcaaacattctgattctattggtgggaaggaacaasaacttgcatttttaaccaagtgcctccagtttgagaactgctcctggaggtactggaaatgaggaggaataggaagatgaaactaaaaacactgaaggag

SEQ ID NO: 321521 - DNA, 201 bp, Homo sapiens
tctgtttccaaaaccctgtaccatttagccaaaaaaagcctcctttttaatcttttgtatctttaagtattgggaagcagttttccaaaattcagattttygcttgaaagtttgaattttatcattggcaacaaatactgtcagtttttcttgaagtgtcaggctcactttgctcattttcgagaaaatgtaggtcagatg

SEQ ID NO: 321522 - DNA, 201 bp, Homo sapiens
gaggaagatgtctgtgctcaggcggatgatgcgggtttccaatcgctctctcctcgccttcatcttcttcttctccctctcttcgtcctgtctgtacttcrtctatgtggccccaggcatcggtaagcaccgagacacaccctcgcttcccctggtcacaccacagccagcgcaggctgttatccgatgttacttctggga

SEQ ID NO: 321523 - DNA, 201 bp, Homo sapiens
aggtgagggtagatgaccgcctcttaaagctgtgattaccctggagagggtgctttgtttgggatactggacagacctcttggattcccttaaacactgtyactcagtgctgtgtttatactgtgtgcttagactccgcagcaccctggcttaccttgcaaaagggcagacctgctcctctacctgtccgccacccacact

SEQ ID NO: 321524 - DNA, 201 bp, Homo sapiens
cacccacactgtcttttgtgactccttttccctttcaagcctgcctttcatgtttgtcttaagtagaaatgtggaggtaggaggggaggctgaggtgagayatgtgtgaggagtgatttttctagagcttgggtttcctaggtcgccattgggagctcctcagacctgtatgtttgcaacattctttttctagtccatttt

SEQ ID NO: 321525 - DNA, 201 bp, Homo sapiens; identical to SEQ ID NO: 67341

SEQ ID NO: 321526 - DNA, 201 bp, Homo sapiens
caatacccccttctcagttgaaataggagagttagcttaaaggatgtttatgtcagtaattatatttttggctgtgaagcacagcaaaatgtttaggaaartatacttagtaatttcaaatcttaatgttttattttttttcctccagaagtgtagtatggctttttgcttgcatctttgtttttatgtttaattacttga

SEQ ID NO: 321527 - DNA, 201 bp, Homo sapiens
ttttgatgaagtccaatgtattgatttttgtttttatagcttgggctttttgtattatatttgagaaattgttctgtatgattttctctttcttccagaarcttaatagttttagctcttacacttaggctaatcattgagttaatctttagatatgatatgagctaagagtgaagtttcgtttagttgtttcatcaccac

SEQ ID NO: 321528 - DNA, 201 bp, Homo sapiens
ttttatatatttgaggcaagtgttaatatgattttactgaaatcttgttacgtgtattgccttcctgataattaagttaattgctcagaaattatgacttytaattatagtgcaattttcagtttgactcataggaagagaaattggacattattttcatttgaatcaagagaccaaaggtagagaattaaaaggtgcctt

SEQ ID NO: 321529 - DNA, 201 bp, Homo sapiens
attatgcacaagaaccagaaattgtaaagggcattaagtgctttaattataagatgaccttgaacacagtccttatcagttttcctttttgaacatgtttygttgcttttttgttttttcctctaaaactataggtataaattactaaggtattccaaggagcgtcagtacatcgatggactgaacaatttaatatatagg

SEQ ID NO: 321530 - DNA, 201 bp, Homo sapiens
  misc_feature (1)...(201): n = A,T,C or G
ctttgcaggatcttggttctttacagaggaagccagatggccccttaacttttggcattgcttggtaaacggcagacactcaataaacatgtggataaacntgtttccaccctgaacatttttagtaagatcattggaaaagtcagttttcatttaaaaatgtttaaccttgatcagtattcaaacacaaagattctccag

SEQ ID NO: 321531 - DNA, 201 bp, Homo sapiens
tactaaatattaaatttaggtttccataagtgctttacatttaacataacacatgtacatgtacttgtttcactagaatataaaaatgttttatgtcttgstgtactttacattttctaacataattgtctatatagaatataagggcatattttgcaaagcacataaaagactgaaaccttcatttcacatgggaaatta

SEQ ID NO: 321532 - DNA, 201 bp, Homo sapiens
catcttcaccatatttgaaatagaaaagtaatttttctgctagacaggtacccagggagtgctaagcagttgaagagcagctcaggaattctagttaaatrtagaggatggacatgggttcactgcttctttccaaactcctaaaatgagagtgaaagaagaaaacttttgaaaagttattaaacctcaaggacagaaagt

SEQ ID NO: 321533 - DNA, 201 bp, Homo sapiens
agcaggaagctgctgagagtgctgacgcacctgtgtggtagggcataaaaccggggggttgagtaaatctgcatgctgaccctagggaccccaggcctttycccgtctggccttttgaagccaacagccaggtgtgaatctccccacccctccagctgtggcagggcatagtggtgtcttcgctagagaaatgaattatct

SEQ ID NO: 321534 - DNA, 201 bp, Homo sapiens
tggctaaaagtgtattctccatgggtctttacttagcaagctcttgaagaatgtgcctcaggaaattgagaaagccaaggaaaaggcgtaggtgatttagrgaatgaagacgacccaggtgatatgcacacatggtctggagagggcaagggagagttgggcttgagagatggagaaagaattgatagatgatttgatgtg

SEQ ID NO: 321535 - DNA, 201 bp, Homo sapiens
tgtttgaatgattacatcaattattaataggtgtagggcatatttcttgggccttcagtacaaagtaataatataatagttatatagaaaactgtagttaytcccagtttgcaaaagaaaacagttcactcagcactgaagaaatattaaatatttacatagtcctaataatgtaaagtcttgatttaaccaaaaattatg

SEQ ID NO: 321536 - DNA, 201 bp, Homo sapiens
gaagtatatttattatttgtctatttcatttgggtctaattattgtaatcatttgatcatgatgcaacaagtttgaaaaataatagaaaaaagtcagatgrgggccgggcgcggtggctcacacctgcaatcccagcaccttgggaggctgaggtgggtggatcacgaggtcagtagttcgagaccagcctggccaacatg

SEQ ID NO: 321537 - DNA, 201 bp, Homo sapiens
acttgtccaaggtcagggcaccgcgggtgcccccgggctgggccgcagccagactgcgcttcccgcgcgccttcgctttgcaccaggatcgcccaggaaaygcctgcgggcaccttgaggaaggtcggcggctccgggccagctcgcactggccgggggtggggcgggggccgtacctgctgcggaagccccgaaagcttt

SEQ ID NO: 321538 - DNA, 201 bp, Homo sapiens
tcgggctgtcctggcggtccctggccccgccccacctcaggccacagcgcatgatggcagctggggttctcctgctgtgaggcgtcccggttcccccgccygccccgtgttggcgggtggagtcttggcagcagcctccactcctgggcatggcagggagcagcacctcagggacttgggaagttcctttggtctgggggc

SEQ ID NO: 321539 - DNA, 201 bp, Homo sapiens
tggttattcgtgagatcagtttttttttttaatcgcacttatgcttattgtttattagcgtttcctcccatctttgcctgaagtctccggggactgccttkgggggtcgggtaaacttgtcccctgcgaagagggcccagggttggggtctggaaactccgaggctgcacttgccagcggcctcttaaggccacagcgtcc

SEQ ID NO: 321540 - DNA, 201 bp, Homo sapiens
agcaccagtcctccccagctcctcctggtccatttcccaccacctctcactccagttacagcaccagcctcctaacgggcttctctgcctccaccttcacwccctgctgtcagcatcccggaaagatgtgaaaatagaaactgaggagccacatgtgtctgtaggaagggcaggctggaggctctgacctccacctttgtg

SEQ ID NO: 321541 - DNA, 201 bp, Homo sapiens
gtgactgcagtccctcccctctaagcagcacagcctcctaccccactgtgctctgtgatccccagtcagcccctgtccctctcctgacctcagcccgcttyctcttcgggctctgcagaactcaggggcagggcactgggaggaagcaatgctgcctccggctgcactctgcagaggagcagactacaaggatagagtcca

SEQ ID NO: 321542 - DNA, 201 bp, Homo sapiens
aagcatgccaaggagcaaagaggcatgtgtctcctctgcagtgaccatggggatgagacaggagaaaaggcccccacaccgatgctcacataggcagaggygaacaggcttcccctgcctttgggccttggctctggtgccttctgctctgaggcacctattcggggtcccttatacctggaacgccactgctctgtgtcc

SEQ ID NO: 321543 - DNA, 201 bp, Homo sapiens
gttaagggactgggccccggcccgtgggggctcaggactcagcaacacctccccaccccgagacgtgaggtgggggcggggctctctggcgcctctcccckacggccctgggagctggagctctttgttttcttttctcactcctccgccgctgggattctaccaggggctggtgacgccaaagcttctccaggggcaggg

SEQ ID NO: 321544 - DNA, 201 bp, Homo sapiens
cgtgcacatccaggcacagcacctttccttaaacttatttatgacacagagacctttgctcacatgttttcctgctgaccctctccccaccattaccctawagtcctgccacatccccctcactgaaatagtagaaatagtgatcaataaatactgaaggaactcagagaccagtgccggcgcgggtcctccatatgctgg

SEQ ID NO: 321545 - DNA, 201 bp, Homo sapiens
cagcaatttaagttgcaggcagcgtgtggacgcctgtcttcccgcattccagctcaaagccagcaatggctggggtcgatctgggagtgttgggggtaggrgcaggtggagtcactgcttaatttgcatgattctggttattcgtgagatcagtttttttttttaatcgcacttatgcttattgtttattagcgtttcctc

SEQ ID NO: 321546 - DNA, 201 bp, Homo sapiens
atggaatgtctcggtgtaaaacccgattgtacattctatttactgagatacgagaaaactgccttatggctggaggtgagacatgctggcggcaataccgytctttactgcactgagatgtttgtgtaaagtcagacataaatctggcctacgtgcacatccaggcacagcacctttccttaaacttatttatgacacaga

SEQ ID NO: 321547 - DNA, 201 bp, Homo sapiens; identical to SEQ ID NO: 67356

SEQ ID NO: 321548 - DNA, 201 bp, Homo sapiens
ctgaccatcccccagcccaacacccgtaaagggtctgtgctgaggaggattagtgaaagaggaaggcctctttgcagttgagataggaggaaagcatctayctcctgctcctccctgggaatggaatgtctcggtgtaaaacccgattgtacattctatttactgagatacgagaaaactgccttatggctggaggtgaga

SEQ ID NO: 321549 - DNA, 201 bp, Homo sapiens
gtgctgcggcttcccgtggcctttgggcagccctgtttcctccgccctgacttgctgtctccccaggcggtgtggacacggctgcggtgggcggggtcttmgacgtctccaacgctgaccgcctgggcttctcagaggtggagctggtgcagatggtggtggacggagtgaagctgctcatcgagatggaacagcggctgg

SEQ ID NO: 321550 - DNA, 201 bp, Homo sapiens
cccaggcaggctcgcacagggccggcgctctgggagggtggaaggattgctgggcccatgactggacacctctgtcacccaacttctgatctatctgcacrttgagaccagcctggccaacacagcaagatccctgtctcaacagaataaaaacaaaaataaaatgatcttctgtctgcacactggggacaaaaacaccca

SEQ ID NO: 321551 - DNA, 201 bp, Homo sapiens
acgacctggaccccaactacgtgctgagctcgcgggtgcgcacgggccgcagcatccgtggcttctgcctccccccgcactgcagccgcggggagcgccgmgccatcgagaagctcgcggtggaaggtaggggccgggcgggccgaggggcggcggcggccgcgtccccctcccggcgcggtccccgcccgcttttgttta

SEQ ID NO: 321552 - DNA, 201 bp, Homo sapiens
ccttatacctggaacgccactgctctgtgtccccctggccccagcagcaccgatctgatgtcatctggtttgttgggctgctggctcatggccagtcttcytccagcagcaggcgctgtgtacctcgctgcctgctgtatccccagcggctggcacctgttaggtgctcattgtgccactgctggagggatttgtatcaaa

SEQ ID NO: 321553 - DNA, 201 bp, Homo sapiens
gttcaccagagggctggcccgtggctcactgcccagtcctctatgaggacacttcgccatagacattttgttattgcagactgctctgggaacacccctgrctgggccctaaaatgaattccagaaaaggaatcgcaggtcaaggggcggttctaaaaggcttgggctagggtcagccagagctctgtgcagcagatgggg

SEQ ID NO: 321554 - DNA, 201 bp, Homo sapiens
gctttgcaccaggatcgcccaggaaatgcctgcgggcaccttgaggaaggtcggcggctccgggccagctcgcactggccgggggtggggcgggggccgtwcctgctgcggaagccccgaaagctttcgcccggcccctcgccgccgccgcgggggctggctggactaggcgggcaggctcgaggatgcggatgaacccaa

SEQ ID NO: 321555 - DNA, 201 bp, Homo sapiens
tttccggcactggggagtctcagggcctgtaggggtttcaggcaggccttctccctcataccctcttctccgtctgcagattgaaactctcttcaagtctraggactatgagttcatgtggaaccctcacctgggctacatcctcacctgcccatccaacctgggcaccgggctgcgggcaggtgtgcatatcaagctgcc

SEQ ID NO: 321556 - DNA, 201 bp, Homo sapiens; identical to SEQ ID NO: 67357

SEQ ID NO: 321557 - DNA, 201 bp, Homo sapiens
cctccgcacccagcatcttccctaaaaggggccagctccctgggctccagagcctgggggaggagaggctttgggaaacagcagggaggggactccagacycctccggccgggcctgccctgcacttgggtggcgctgccaccttcctccatcagggggttgggagaggccagagaccaggagcagggcccagccagggac

SEQ ID NO: 321558 - DNA, 201 bp, Homo sapiens
gacccccgagctgtacgcggagctgcgcgccaagagcacgccgagcggcttcacgctggacgacgtcatccagacaggcgtggacaacccgggtacgcgamccctcggggccggggtcccggccccccctccccccgcgcagccgcagggtcctcagcagcgcgctcgggcccggcagtgacgtcactgtccccgtcccgc

SEQ ID NO: 321559 - DNA, 201 bp, Homo sapiens
tcctgctgccggggctccacacgtgcctccgcgacgcgcggcggcggcggccacaacacttccggctccgcgcccgctgatgacgtcgcgccccgcctccscctccccctccccccctccgcgcacgggatcctgggagcgccaggctgcccttcccgcccctcccagaggacgtttcctgggcgacttcttccctcatgt

SEQ ID NO: 321560 - DNA, 201 bp, Homo sapiens
ctgatgctgtatatgcccagctgtgccatctcattgacttctccccaggatcctaggagggagggaacactttacagatggggaaactgaaactcagagakgttaaataacttgcctgaagtcacagccagtgaggtcaaagtgggattaggatttaaagccaataaacccccaaagctcagcactgaggaggctgaagag

SEQ ID NO: 321561 - DNA, 201 bp, Homo sapiens
tgcccgctgctggtggaactccaccgtgtgcaggtgacccgtgggtgcaatggtgcggatgatggcgtgggacacagagccactgccggtgcctggcaggwcaagaagggatgggcaaggcatcagttgggactgctcgggacccacagcctcccaggaaacaacccccacctcaccctggagacccacacagggcttggg

SEQ ID NO: 321562 - DNA, 201 bp, Homo sapiens
cgcactgaagctgcgcttcccggccgaggacgagttccccgacctgagcgcccacaacaaccacatggccaaggtgctgacccccgagctgtacgcggagstgcgcgccaagagcacgccgagcggcttcacgctggacgacgtcatccagacaggcgtggacaacccgggtacgcgacccctcggggccggggtcccggc

SEQ ID NO: 321563 - DNA, 201 bp, Homo sapiens
gtctggcaggcatcgctgaccatataaggtgcctctggcctccctgcccagcccttcagtgctcccagctccctggtgccctgggaggcggccccctagcytggggtcttggtggcgaaggtcaggtagccggtgtggcccacggcctccttcatgggcgtgccgctgcggaaggggctggtgtcggagccggcagggcca

SEQ ID NO: 321564 - DNA, 201 bp, Homo sapiens
cggagctgcgcgccaagagcacgccgagcggcttcacgctggacgacgtcatccagacaggcgtggacaacccgggtacgcgacccctcggggccggggtyccggccccccctccccccgcgcagccgcagggtcctcagcagcgcgctcgggcccggcagtgacgtcactgtccccgtcccgcgccccctcccccaggcc

SEQ ID NO: 321565 - DNA, 201 bp, Homo sapiens
ccctgcccagcccttcagtgctcccagctccctggtgccctgggaggcggccccctagcctggggtcttggtggcgaaggtcaggtagccggtgtggcccmcggcctccttcatgggcgtgccgctgcggaaggggctggtgtcggagccggcagggccatctgtgcctgtgcccaggtcgggcggtggcaggctgacagt

SEQ ID NO: 321566 - DNA, 201 bp, Homo sapiens
aagtcctgattttcacacccttttcaggcctggggatttaccaaaatttaaggcttaacaaaaattaaggccccccaaaagataaaagtgctactgccagyggcacctgtctctgattcaccttcatggcacggatgctggtggtcccctagcagccattctcccctctgcttgagtgacagcgccctggtttccagcctg

SEQ ID NO: 321567 - DNA, 201 bp, Homo sapiens
agccaccgtgcccggccaggctgaggttttttacacgcagacttctcagtctggctagaggctttctgcactcgcagtgactgaacttttttgaggcgggrtttcactctgtcacccaggctggagggcagttgcacgatcgcggctcattgaagccttgacctgcctgggctcaggtgatcctcccacctcagcctccca

SEQ ID NO: 321568 - DNA, 201 bp, Homo sapiens
ggggctggtgacgccaaagcttctccaggggcagggctcctacccccactgtggggggcgggtcgggctgtcctggcggtccctggccccgccccacctcrggccacagcgcatgatggcagctggggttctcctgctgtgaggcgtcccggttcccccgcccgccccgtgttggcgggtggagtcttggcagcagcctcc

SEQ ID NO: 321569 - DNA, 201 bp, Homo sapiens
tttaaggcttaacaaaaattaaggccccccaaaagataaaagtgctactgccagcggcacctgtctctgattcaccttcatggcacggatgctggtggtcycctagcagccattctcccctctgcttgagtgacagcgccctggtttccagcctgcacgcagctgcctggctgtgaaagcacactttcaagactcccatgc

SEQ ID NO: 321570 - DNA, 201 bp, Homo sapiens
ttttacatgggttggttttattaagtctaaaaaatgctggcttggaacaggacgaagcatgccaaggagcaaagaggcatgtgtctcctctgcagtgaccrtggggatgagacaggagaaaaggcccccacaccgatgctcacataggcagaggtgaacaggcttcccctgcctttgggccttggctctggtgccttctgc

SEQ ID NO: 321571 - DNA, 201 bp, Homo sapiens
acgcactgaagctgcgcttcccggccgaggacgagttccccgacctgagcgcccacaacaaccacatggccaaggtgctgacccccgagctgtacgcggasctgcgcgccaagagcacgccgagcggcttcacgctggacgacgtcatccagacaggcgtggacaacccgggtacgcgacccctcggggccggggtcccgg

SEQ ID NO: 321572 - DNA, 201 bp, Homo sapiens
tgacccccgagctgtacgcggagctgcgcgccaagagcacgccgagcggcttcacgctggacgacgtcatccagacaggcgtggacaacccgggtacgcgmcccctcggggccggggtcccggccccccctccccccgcgcagccgcagggtcctcagcagcgcgctcgggcccggcagtgacgtcactgtccccgtcccg

SEQ ID NO: 321573 - DNA, 201 bp, Homo sapiens
ccgacaccagccctgctgcttcctaacttattgcctgggcagtgcccaccatgcacccctgatgttcgccgtctggcgagcccttagccttgctgtagagrcttccgtcacccttggtagagtttatttttttgatggctaagatactgctgatgctgaaataaactagggttttggcctgcctgcgtctgagtggtgcct

SEQ ID NO: 321574 - DNA, 201 bp, Homo sapiens; identical to SEQ ID NO: 67361

SEQ ID NO: 321575 - DNA, 201 bp, Homo sapiens
cgctgccattgtctcacttggcccacagcgggcactgctctcctgccttccacagggctgctggagctctgggcccggagcagctctgacagcacggcagmgtggggcggtgcgggggccgctgctgtcacaggaaattagaggctgtcgctgctcccgggaacaggaggcgcctactcgaagcagagcccgagcatgaca

SEQ ID NO: 321576 - DNA, 201 bp, Homo sapiens
tccccagtcagcccctgtccctctcctgacctcagcccgcttcctcttcgggctctgcagaactcaggggcagggcactgggaggaagcaatgctgcctcyggctgcactctgcagaggagcagactacaaggatagagtccagtgccctgcctggagtctgccctgtgcctgacctgctgagccgggtcatgttctgtgg

SEQ ID NO: 321577 - DNA, 201 bp, Homo sapiens
atatcagatgttttatgtttaattaaaagcaatggcgtaagtattataaaatacttgagtctcactgtctttatatcttgtttttcatggaaaatgtaccttttttttttttttttgagacagtctttctctgtcacccaggctggagtgcggtggtgcaatctcggctcactgcaacctccgcctcctggattcaagcaa

SEQ ID NO: 321578 - DNA, 201 bp, Homo sapiens
gtccagcttcctatatgaattattagaaatagtccagattactgaagatttctgttctgctatgggtggcagtggtacaaaaaggtgacctggaggatgattttttttttttttttgagatggagttttgctcttgtcacccaggctggagtgcaatagtacgatcttggcgcactgcaacctccacctcccgggttcaag

SEQ ID NO: 321579 - DNA, 201 bp, Homo sapiens
cttttaacaaagaacataatctgtcttctaccatccccaatttagggggtaaaaaaaggaagttcttctttgggcactatgttgttgtatctgacttcatmtgtctgttgttgaaattgagttgggaacttcccctttgtcagctgtgtggtatcagtgggaaaatgcagaaacattatgacttgcaataagtttttctta

SEQ ID NO: 321580 - DNA, 201 bp, Homo sapiens
gttactgaaccagtaacaaaagaaaaaaaattctgatattgagaaaggctatttgaaatttatcaagctaagtctgcctcatagcagaaactaattttttwaatgactatgatatatattttatatggttttggtcttcccactagcatttagaagtgcttatttatttccagtggagatctggacatttctgactcattg

SEQ ID NO: 321581 - DNA, 201 bp, Homo sapiens
ctcccgggttcaagcaattctcctgcctcagcctcccaagtagctgggattacaggcgtgcatcaccacgcccagctaattttgtatttttaatagagacrggattttaccgtgttggttaggctggtctcaaactcctgacctgaggtgatccccacctctgcatcccaaagtgctgggattacaggcgtgtgccaccat

SEQ ID NO: 321582 - DNA, 201 bp, Homo sapiens
attcttttaacaaagaacataatctgtcttctaccatccccaatttagggggtaaaaaaaggaagttcttctttgggcactatgttgttgtatctgacttyatatgtctgttgttgaaattgagttgggaacttcccctttgtcagctgtgtggtatcagtgggaaaatgcagaaacattatgacttgcaataagtttttc

SEQ ID NO: 321583 - DNA, 201 bp, Homo sapiens
tgattctctgcattttattgaactctcagaaaacatgaccgcttcactattccattatacggaagctagccattttaatgtaagcccaatagccttcctgsttctttctgaggacaatagttataatttgagtgtttgttttgcttttcaaaagttaattcttttttttttttttttttttttttctgtgagacgaagtct

SEQ ID NO: 321584 - DNA, 201 bp, Homo sapiens
atttatataggaaccaaaataaacataggtgagtatgtttttgttggcagatacatgactaaattagtccctggggtagacatgaaatagggttaagacctttttttttttttttttttttttgagaccaattctcgctctgtcccccaggctgaagtgcagtggcgcgatctcggctcactgcaagctctgcctcccagg

SEQ ID NO: 321585 - DNA, 201 bp, Homo sapiens
acgatgcctccctaccctttcagtgtttggggagattttattttgttttgtttttttgatctggtgttgagtatttccaagttcgattttgcgcatctgtktcaatgagctgaaaggtaatttgatgttgataaaaagcagaagtcagagaatgatccactaaggtcttagcactgtgctgcaaggagggtgtgcttgctt

SEQ ID NO: 321586 - DNA, 201 bp, Homo sapiens
tatataaatatcaaatatatagagatatataaatatcaaatacagatatataatatcaaatacatagagatatataaatcaaatatatatataaataaaawatatatatatatcaaacaataaggtatataaggtagagtgaaagcccctggtcaccttatttcccagagctgtcaccactgatagtttaatgaactcact

SEQ ID NO: 321587 - DNA, 201 bp, Homo sapiens
caaagatgaaaactttggaattcttttaacaaagaacataatctgtcttctaccatccccaatttagggggtaaaaaaaggaagttcttctttgggcactrtgttgttgtatctgacttcatatgtctgttgttgaaattgagttgggaacttcccctttgtcagctgtgtggtatcagtgggaaaatgcagaaacattat

SEQ ID NO: 321588 - DNA, 201 bp, Homo sapiens
agctttcttggtactcaaaaatttctgtattttatttcctgtctttggtagaatatgtctagttttcattctttttttcttctgtggattatctgtacactttttttttttttttttttttgagacaaggtctcactctgtcatctgggctggagtgcagtggcacaatctcagctcactacagccttgacctcctggact

SEQ ID NO: 321589 - DNA, 201 bp, Homo sapiens
actcctgaactcaagcagttcacccacctccgtctcccaaagtgttgggactacaggcgtgagccaccgtgcccggcgatctgtacattttgaacaagtaygttttcatctatatttctttatccatatcaaaaaattaaccactatttaaaatattctaccatctcacaagaaaaatcatgtaggatattttgacttctt

SEQ ID NO: 321590 - DNA, 201 bp, Homo sapiens
cttagaaagattgaagatctggtattggacaaagatgaaaactttggaattcttttaacaaagaacataatctgtcttctaccatccccaatttagggggwaaaaaaaggaagttcttctttgggcactatgttgttgtatctgacttcatatgtctgttgttgaaattgagttgggaacttcccctttgtcagctgtgtg

SEQ ID NO: 321591 - DNA, 201 bp, Homo sapiens
gtgcagtggcgcgatctcggctcactgcaagctctgcctcccaggttcacgccattctcttgcctcagcttccggagtagctgggactacagtaggcgccygccaccacgcctggctaatttttttgtatttttagtagagacggggtttcaccatgttagccaggatggtctccatctcctgaccttgtgatccgcccgc

SEQ ID NO: 321592 - DNA, 201 bp, Homo sapiens
gtggcacgatcttggctcactgcaacctctgcctcccaggttcaagtagttctcctgcctcagcctcccgagtagctgggattacaggcgcgtgccaccayacccagctagttttttatatttttggtagagacggggtttcaccatgttggccaggctggtcttgaactcctgaccttaggtgatccacctgcctcagcc

SEQ ID NO: 321593 - DNA, 201 bp, Homo sapiens
gtagaagatgatgacaatatgttccgatttgactattcacccgagttcctgttgtggtaagtctcatcgatcacagatgtcgtggataggcgctgctgacytggggactcctgcgtctgttcctgtgttcttggacaataactggtgcctgttttcttgtctaccgtgacctcagggctctgcgtccaccaggctggctcc

SEQ ID NO: 321594 - DNA, 201 bp, Homo sapiens
aaaatgtaagtatttaaatatgtaaaactgcatatgctgttcttttattttcatggaattttcttcatggactaaaaagggtatttcgttttatagataaygctaagagtccatgaatgaaatatcagatgttttatgtttaattaaaagcaatggcgtaagtattataaaatacttgagtctcactgtctttatatcttg

SEQ ID NO: 321595 - DNA, 201 bp, Homo sapiens
attacgtagaagatgatgacaatatgttccgatttgactattcacccgagttcctgttgtggtaagtctcatcgatcacagatgtcgtggataggcgctgytgacttggggactcctgcgtctgttcctgtgttcttggacaataactggtgcctgttttcttgtctaccgtgacctcagggctctgcgtccaccaggctg

SEQ ID NO: 321596 - DNA, 201 bp, Homo sapiens
aggacacttgttttatcttatagctcaaggagttatacacgttgttaaatgagaattacgtagaagatgatgacaatatgttccgatttgactattcaccygagttcctgttgtggtaagtctcatcgatcacagatgtcgtggataggcgctgctgacttggggactcctgcgtctgttcctgtgttcttggacaataac

SEQ ID NO: 321597 - DNA, 201 bp, Homo sapiens
tcctgcctcagcctcccaagtaggcaggattatagacgcacactaccatgcctagctaatttttgtatttttagtagagacggggtttcaccacgttggcyggctggtctcgaactcctgacctcaaggaatctccccacctcagcctcccaaagtgctgggattacaggtgtgagccactgcacctggcacctttccttt

SEQ ID NO: 321598 - DNA, 201 bp, Homo sapiens
gcctagctaatttttgtatttttagtagagacggggtttcaccacgttggccggctggtctcgaactcctgacctcaaggaatctccccacctcagcctcycaaagtgctgggattacaggtgtgagccactgcacctggcacctttcctttactatctaaacaaaatggcctgagctgatacatgttcatgggggtttct

SEQ ID NO: 321599 - DNA, 201 bp, Homo sapiens
ttggctgtagagtttttagttttggtctgctatatagggcccaacatttttaaatggtaactaattttttgacctcttggcatatgcttatgtatttttcttttttttttttttgagacagagtatctctctgttacccaggctggagtgcagtggcgtgatcttggctcactgcaacctccacctcctgggttcaggaga

SEQ ID NO: 321600 - DNA, 201 bp, Homo sapiens
atcttcaattctgtcttgaagccatggtacacttaaactggggactctggggatgatggctcttacttcgtccacaaagtcagtggtgttctttttgaacsccaaggctagaacacattttaagccaatgacgggggcgattctctcactgagccgggggacctgacaggcagggacacttctgcttaggcttaactgaat

SEQ ID NO: 321601 - DNA, 201 bp, Homo sapiens
tccttcatcccctcgttgctcctgcagagcatttactctgacagtgccccccacccaaggctcgtggctgcctggctgttggatgacagtaatgcatgcaytgcacgtctcccccagaggagtaatgccggggaccatttgtagatggatgggaaactgaagcaaagcgtgcttcaatttagattccccaaactgccagag

SEQ ID NO: 321602 - DNA, 201 bp, Homo sapiens
tcgaaagtaaaataaataactgcagcattgccagttggaaactttgtcatgagcttacctcacggtgacagttacactgctcctttaaagagtcatttacrtaatttgttatcaaattattaaccacttttaaatagaataataactacatttgcctccataattgaagcagattactaattaacattttcgagaattaaa

SEQ ID NO: 321603 - DNA, 201 bp, Homo sapiens
gagtcaaggctctaatttaggactttacttcccactcattttcatgccacaaagtctatacaaagtaggttttcaaataattgcagaatcagccaggcacrgtggctcacacctgtaatccctgcactttgggaggccaaggtgagcagatcacttgaggtcaggagtcttgagaccagcctggccaacatggtgaagccc

SEQ ID NO: 321604 - DNA, 201 bp, Homo sapiens
atggactgtcttgatggatattccatgggtgcatgaaacgtgtataccactacggttgtgtggagtgttctttgtatggcaattgcatcatgttgattaaytgagttattcagctcttctgtttccatgctgattttctgtctagcagttctatcacttgatgagaggggcatggaagtccccagctgtaattgtggattt

SEQ ID NO: 321605 - DNA, 201 bp, Homo sapiens
tcctctttagcccacccctacttagaattgtgctgttcaattttgctgtgtttagagattttctgttgtctccctattacagatttctagtttgattcaawtatggttaaagaacacacactgtatggttttgattattttaaggctcttgaggtttgttttattactcgggatatggactgtcttgatggatattccatg

SEQ ID NO: 321606 - DNA, 201 bp, Homo sapiens
cgtattttggtatgttgtatcttcgttgtcattcacgtctatgtattttttggtttcgtttgaggcttcctctttagcccacccctacttagaattgtgcygttcaattttgctgtgtttagagattttctgttgtctccctattacagatttctagtttgattcaattatggttaaagaacacacactgtatggttttga

SEQ ID NO: 321607 - DNA, 201 bp, Homo sapiens; identical to SEQ ID NO: 67407

SEQ ID NO: 321608 - DNA, 201 bp, Homo sapiens
gaagtgtccaaaagctctctgtcttggctttccagaggttcagtctctaaattttccccagaatcttcaattctgtcttgaagccatggtacacttaaackggggactctggggatgatggctcttacttcgtccacaaagtcagtggtgttctttttgaacgccaaggctagaacacattttaagccaatgacgggggcg

SEQ ID NO: 321609 - DNA, 201 bp, Homo sapiens
tttggagtagcttttttacttttgggtggtttccttatcttattagggtttggaatcagtttctttattttaaggggttgtaatgttacagaagcctgccsaccgtcagcaagctttctcttaggttttgacagatcttcaaatgaagtgtccaaaagctctctgtcttggctttccagaggttcagtctctaaattttcc

SEQ ID NO: 321610 - DNA, 201 bp, Homo sapiens
gccaaggtgagcagatcacttgaggtcaggagtcttgagaccagcctggccaacatggtgaagccctatctctactaaaattacaaaaactagccggacaygggggtgtgcacctgtaatcccagctattcaggaggctgaggcaggagaatcgcttgaacccaggaggcggggttgcagtgagccgggatcacaccactg

SEQ ID NO: 321611 - DNA, 201 bp, Homo sapiens
ccctctggtggtacctgataaaatttaaaattactttttatccttggaattcacataccaaaaattgagctcctttgatgtcactttttttttttttttttttttttttttttttttttttttgagagcgagaggatctttcgctgttgcccagctggaatggagtggtgcaaacatagcttactgcaaccttgacctcct

SEQ ID NO: 321612 - DNA, 201 bp, Homo sapiens
caggctaagaatgtttttattttctggaatggttgaggagaaaaagccaaaaaatgacatcattttgtgacatgtgcaaattacacaaaattcaaattccrgtgtccctcaataaggttttattggaacatagccatacttttttttttttttttttaggacagggtctcactctattgtccaggctagaatacagtggca

SEQ ID NO: 321613 - DNA, 201 bp, Homo sapiens
cacgggggcatctctttctgtcatgcgtctccctccagagtacctggagtcctgtgggacgcagacccctggctaagcagccacagctgactcctgatctrctctggccataacatcatcctgtcacccccagggacaggagtgtcacctgtcaacacttctgtttcatttgatataattcacataccataccattcactc

SEQ ID NO: 321614 - DNA, 201 bp, Homo sapiens
cattcccatcaacagtgtatgagggttccagcgtctctccatcctccccagcactggctctttcttttttttttttgagacggagtctcgctctgtcgccsaggctggagtgcagtggtgcaatctcggctcactgcaagctccgcttcccgggttcacgccattctcctgcctcagcctcctgagtagctgggactacag

SEQ ID NO: 321615 - DNA, 201 bp, Homo sapiens
cgcatgccaccacaccctgctaatgttttgtattttagtagagacggggtttcaccacgttggccaggctggtctcgaacttctgagctcagaaaatccasccactttggcctccccaagtgctgagattacaggcatgagccaccatgcccagccctagtttgctaatattttacttaggatcttctatactcactactg

SEQ ID NO: 321616 - DNA, 201 bp, Homo sapiens
ccagcgtctctccatcctccccagcactggctctttcttttttttttttgagacggagtctcgctctgtcgcccaggctggagtgcagtggtgcaatctcsgctcactgcaagctccgcttcccgggttcacgccattctcctgcctcagcctcctgagtagctgggactacaggcgcccgccaccacgcccagcaaattt

SEQ ID NO: 321617 - DNA, 201 bp, Homo sapiens
cagcgtctctccatcctccccagcactggctctttcttttttttttttgagacggagtctcgctctgtcgcccaggctggagtgcagtggtgcaatctcgrctcactgcaagctccgcttcccgggttcacgccattctcctgcctcagcctcctgagtagctgggactacaggcgcccgccaccacgcccagcaaatttt

SEQ ID NO: 321618 - DNA, 201 bp, Homo sapiens
cttcagcccagttccttctcttctctctaactcgcagttcgatcttgaggttccagttggagcatttttattgaagagtttttacatcctaaaacagtgcatatatatatatatatatatatatatatatatatatatatatatagtagttgttaccattctacaagctttgtggatttccttttttcttatgcagagttt

SEQ ID NO: 321619 - DNA, 201 bp, Homo sapiens
ttcagcccagttccttctcttctctctaactcgcagttcgatcttgaggttccagttggagcatttttattgaagagtttttacatcctaaaacagtgcatatatatatatatatatatatatatatatatatatatatatatagtagttgttaccattctacaagctttgtggatttccttttttcttatgcagagtttc

SEQ ID NO: 321620 - DNA, 201 bp, Homo sapiens
ctttctcttaggttttgacagatcttcaaatgaagtgtccaaaagctctctgtcttggctttccagaggttcagtctctaaattttccccagaatcttcarttctgtcttgaagccatggtacacttaaactggggactctggggatgatggctcttacttcgtccacaaagtcagtggtgttctttttgaacgccaaggc

SEQ ID NO: 321621 - DNA, 201 bp, Homo sapiens
aaactagagccaagccaggcagtggcgaactcttggcattatatggtaggtgtattggtcagggttctctagagggacagaactaatgggatggatggatrgatagatagatagatagatagatagatagatagatagatagatagaggggagtttattaagtattaattcacatgatcataaggtcccacaataggccat

SEQ ID NO: 321622 - DNA, 201 bp, Homo sapiens
actagagccaagccaggcagtggcgaactcttggcattatatggtaggtgtattggtcagggttctctagagggacagaactaatgggatggatggatggdtagatagatagatagatagatagatagatagatagatagatagaggggagtttattaagtattaattcacatgatcataaggtcccacaataggccatct

SEQ ID NO: 321623 - DNA, 201 bp, Homo sapiens; identical to SEQ ID NO: 67401

SEQ ID NO: 321624 - DNA, 201 bp, Homo sapiens
gatgttcgagggcaggaagcatccagtatgggagaaagatggaggctgggaggctaggccagtctctcttttcacatttttctgcctgcttgtatcctagmtgcactggcagctgattagattgtgcccacccagattaagggtgggtctgcatttcccagcccactgactcaaacgttaatctcctttggcaacaccctc

SEQ ID NO: 321625 - DNA, 201 bp, Homo sapiens; identical to SEQ ID NO: 67405

SEQ ID NO: 321626 - DNA, 201 bp, Homo sapiens
gtgaaaccctgtctctactaaaaatacaaaaattagccaggcgtggtggcacaagcctgtaatcccagctactcaggaaactgaggcaggagaatcacttkaacccaggaggcggaggtcacagtgagccatgatcatgccattgcattccagcctgggcgacagagtgagactctgcctcaaaatgaaaaaaaaaaaaaa

SEQ ID NO: 321627 - DNA, 201 bp, Homo sapiens
gccaaattgttgaagaattatttagaacccactgtcttctcgctgtccttttgatgtccggcttctccagttatgaaatacatttggtattggtcatgatytcttactgagctaatgttatggtccattgttggagacagagtcaaataaaattcgtgttgaactttggtaacaaaaccaaatctgtccccttgcttaacc

SEQ ID NO: 321628 - DNA, 201 bp, Homo sapiens
aaccgtattctttgccacagggttttatgtgggacactttagacttgagtgatgccgaagtggtgagtgagtaaaaacctcttaaattcaactcctgcatycacacattgcttctaagttgattctgagcaccatggataggacacttgttttatcttatagctcaaggagttatacacgttgttaaatgagaattacgta

SEQ ID NO: 321629 - DNA, 201 bp, Homo sapiens
tcacaccactgcctagctttcctgtttcagtccagaggcgcttgatataacagcatctttttaaagattatctgaaacccgagggccctaagtcagatttkgcttatgtcactgaccactttggatggttagaatactttgtcatttaatattctcgctttttgcctttcttttttctctttctctccctgttcagatgaa

SEQ ID NO: 321630 - DNA, 201 bp, Homo sapiens
taggttgccgtgattctaaagaccaacccacagctgtgacatccctgagactaccaccagagggcgactgggccccacagtagtacataatataggacctytcttggagataatggaagacttggaatttcagatggttccaccctaattgcattagcgttctttcttaacaggagaaaggcttcaagaaacaaaacagtc

SEQ ID NO: 321631 - DNA, 201 bp, Homo sapiens
tatcacggacgttaaatcctattagaaatgcatattcgagctattagtagaattgttaaactgagatatgtaatacagaaaacactagtcctttgttttarattttaaatcttttttaaattggcagaaaggatttgatgtattcaatgcactggatttgatggaaaataagacattcttggaaaaactcaagtttggtat

SEQ ID NO: 321632 - DNA, 201 bp, Homo sapiens; identical to SEQ ID NO: 67406

SEQ ID NO: 321633 - DNA, 201 bp, Homo sapiens
cctatgctatatatcacggacgttaaatcctattagaaatgcatattcgagctattagtagaattgttaaactgagatatgtaatacagaaaacactagtyctttgttttaaattttaaatcttttttaaattggcagaaaggatttgatgtattcaatgcactggatttgatggaaaataagacattcttggaaaaactc

SEQ ID NO: 321634 - DNA, 201 bp, Homo sapiens
tggccagtttcctgttggttacccgagcgggctgcgggttctccaacaatccatgttcacagagatgagctgcaggaacctcactcatctgtatttgcttytatcctaaagtttcacagaggtgacatgtgacattttgcctcagaaatagttgccgttgttaaaggcaatattgtatttccttttgtgttttgaccccat

SEQ ID NO: 321635 - DNA, 201 bp, Homo sapiens
caaaaagactttcacctgcctccagctggacttcagaacttcgtttccttagggttcttgacagtgtttgtatgaaacaaaccctgttctgtgctgtgtamgatgagtaagcttcccaagttaaaattattgctccacaccacagatttcagattccaagtggaacagaagtccaaagttgctgtttataaacttctaagg

SEQ ID NO: 321636 - DNA, 201 bp, Homo sapiens
ataaaagagagattaaagtacagatattatgaaattggaaggtgctggcagcagtcccttgggtgtctgcctcttgagttaaactggacagaactgcatayaccggatgccccttcctctcctatgggcccagatgggtgataccactgctagcagtcaagttatttaagaacatttttgtaccattcagcgtaaaagcaa

SEQ ID NO: 321637 - DNA, 201 bp, Homo sapiens
tgagccacagcatccggccctgaattcttaacctatgctatatatcacggacgttaaatcctattagaaatgcatattcgagctattagtagaattgttamactgagatatgtaatacagaaaacactagtcctttgttttaaattttaaatcttttttaaattggcagaaaggatttgatgtattcaatgcactggattt

SEQ ID NO: 321638 - DNA, 201 bp, Homo sapiens
aagtttatgcaagattactttggagtagcttttttacttttgggtggtttccttatcttattagggtttggaatcagtttctttattttaaggggttgtartgttacagaagcctgccgaccgtcagcaagctttctcttaggttttgacagatcttcaaatgaagtgtccaaaagctctctgtcttggctttccagaggt

SEQ ID NO: 321639 - DNA, 201 bp, Homo sapiens
atttgccacttggtgattaaaaaaaagtttttgacattttcctactaatgatgctggatctatacttttttttttttttttttttttgaggcagactcttrctctgttgcccaggctggaatgcagtggcgtgatattggctcaccgcaaactcgcctcctgggttcaagtgattctcctgcctcagcttcccgagtagct

SEQ ID NO: 321640 - DNA, 201 bp, Homo sapiens
tgtgacttactgcttttcgttctctggggcaagggagagaacagagttagtggaaatgcacgtatgcagttggttcaaggagatctctgtctgacagcacytttgctcctagagccccaacggtaaactgactgatttcctgagcttctatacgctcccctccacggtgatgcaccaccctgctcacaagagcctcaaagc

SEQ ID NO: 321641 - DNA, 201 bp, Homo sapiens
cattctgcttcctaagaactttgtgcaaatcaccaatgggcacttaggctgaagtcccaactccaggcccttcttggcctctacacagcacaatataaggsgccccaaattggactgccgagaaagaagtgtgacttactgcttttcgttctctggggcaagggagagaacagagttagtggaaatgcacgtatgcagttg

SEQ ID NO: 321642 - DNA, 201 bp, Homo sapiens
actttgtgcaaatcaccaatgggcacttaggctgaagtcccaactccaggcccttcttggcctctacacagcacaatataaggggccccaaattggactgycgagaaagaagtgtgacttactgcttttcgttctctggggcaagggagagaacagagttagtggaaatgcacgtatgcagttggttcaaggagatctctg

SEQ ID NO: 321643 - DNA, 201 bp, Homo sapiens
aagatacaacacattgtctgtctcgcctatattttaacccagctcttctcaaaccttaatgtatgtacaaacccaaggaaatcttgttgagttgcagattyggattcattagatctggggcagggccaggctctgcagctctaactagctcccgcgtgctgctcattctgctggtctgcagaccacactttgagtgcaaag

SEQ ID NO: 321644 - DNA, 201 bp, Homo sapiens
accaaagacttgccgcacagataggaagatacaacacattgtctgtctcgcctatattttaacccagctcttctcaaaccttaatgtatgtacaaacccamggaaatcttgttgagttgcagattcggattcattagatctggggcagggccaggctctgcagctctaactagctcccgcgtgctgctcattctgctggtc

SEQ ID NO: 321645 - DNA, 201 bp, Homo sapiens
aggccaaattgttgaagaattatttagaacccactgtcttctcgctgtccttttgatgtccggcttctccagttatgaaatacatttggtattggtcatgwtctcttactgagctaatgttatggtccattgttggagacagagtcaaataaaattcgtgttgaactttggtaacaaaaccaaatctgtccccttgcttaa

SEQ ID NO: 321646 - DNA, 201 bp, Homo sapiens
tcaacatagcgagacctcatctcaaaaaaggaaaaaaaaaaaaaaggaaagaaacgtaaagagccatagctgatccattttctaaactgaaaacgtataayggaccaaagtcccaaaatgtatttagaacaagagggttggagcctccgtgcgttttacaatcattttggcagggagatatggggaatagtgtttccgtct

SEQ ID NO: 321647 - DNA, 201 bp, Homo sapiens
tacccactatggggacaccatggctcagccccactgaatgtctcactgtgagtacagcataaatcaaggcagaaaaggacgattgtcaagatgcaaacagytctcattggcttgccccagtctcctttcccccttttaagtcataggaaaggaaaggaaaataaagagtaaattaatagaataaaagagagattaaagtac

SEQ ID NO: 321648 - DNA, 201 bp, Homo sapiens
ttgagacctttccctgttactagtaagcatttagttctatcagtttccctctctgcactgctttagctatttctgacgtattttggtatgttgtatcttcrttgtcattcacgtctatgtattttttggtttcgtttgaggcttcctctttagcccacccctacttagaattgtgctgttcaattttgctgtgtttagaga

SEQ ID NO: 321649 - DNA, 201 bp, Homo sapiens
ccttgagggaagaacttactgacttgagacctttccctgttactagtaagcatttagttctatcagtttccctctctgcactgctttagctatttctgacrtattttggtatgttgtatcttcgttgtcattcacgtctatgtattttttggtttcgtttgaggcttcctctttagcccacccctacttagaattgtgctg

SEQ ID NO: 321650 - DNA, 201 bp, Homo sapiens
gcacaccaccacacctggctaatttttgtatttttttgtaaagacgctgtttcagtatgttgcttgggctggtctcgaactcctgggctcaagtgatccayctgccttggcctcccaaagtgctgggttacaggtgtgagccaccgcacctagcccattagagtattaaaaatgtatataaggttctgtgatggaaggacc

SEQ ID NO: 321651 - DNA, 201 bp, Homo sapiens
gaattataggtgtgagccactgtgcccagcccgtgaaaggttttttatatgctgaatactaacactttgtattgcgttcctttctgggtcctctatattcyatttcgttgatctccatgtctgtcttttcactaataccacactgacctcgttgctatagcgatataggaagccttagtatcaggtagagtaattcctccc

SEQ ID NO: 321652 - DNA, 201 bp, Homo sapiens
caggaatcaagtgtagaggagagacccagcgagtggaaataatgtctcattaaattatcatcttcttaaactatctcgttctcaatgtgaaaagttgtcattttttttttttttggagacagtcttgctctgttgccccttcagcgcaatggcacaatctcagctcactgcaacctctgcctcccgggttcaagcgattct

SEQ ID NO: 321653 - DNA, 201 bp, Homo sapiens
agaggagagacccagcgagtggaaataatgtctcattaaattatcatcttcttaaactatctcgttctcaatgtgaaaagttgtcattttttttttttttrgagacagtcttgctctgttgccccttcagcgcaatggcacaatctcagctcactgcaacctctgcctcccgggttcaagcgattctcccacctcagcctc

SEQ ID NO: 321654 - DNA, 201 bp, Homo sapiens
tgttaatttatatcctcattgttgatgaatttgagtatctcatcaatctgttagccatgtttatttcttttataaacttgctatttacatcacttgcctgttttttttttttgaccgtagttgtcttactgatttatgaaaggttttttgtttgtttgttttgagatggaattttgctcttgttgcccaggctggagtgca

SEQ ID NO: 321655 - DNA, 201 bp, Homo sapiens
tgggaggcagaggttgcaatggagctgagattgcaccactgcactccagcctgggtgacagaaactgtctcaaaaaaaaaaaaaaaaaaaaaaaaaaaaawaaaaatatatatatatatatatatatatatatatatatatatatataaagcccatatcttaggaagtaatataaggaaaatattaatacatgagtgaata

SEQ ID NO: 321656 - DNA, 201 bp, Homo sapiens
aagcagtttcatctggctccagtgatggatgaagaggaagtagcccactggttcctcccccgggagcacattattgacacgtttgtagtggaggtaaagamaaggtgataaacataaagcttctccttgaagcaccctttgtgttcagcgtgcagcagaattatttacacacacttccttctatttcatcacagaacatta

SEQ ID NO: 321657 - DNA, 201 bp, Homo sapiens
ctatgaccaaaggcgctgacccctgccggaagccctgtagctcttagtgagtgtatctttcccgtgacatctttcccagttgctctcacctcatctccccmgccctctgctcgggaagaccctcattctcctgccccaagctgtggctcctagaggtgagttccttgtccacaatcacaaatgggagatgtgggtctttgc

SEQ ID NO: 321658 - DNA, 201 bp, Homo sapiens
aagaatgatttgcagttttttgaagctgtaacaactgacgcttttaatgcagaaaagaattatttgcaggagtctaaaaactgactggtgtgtctgaggargtgaatatggagcgaaagagatttcatggaactcgggagctagggaaggtagggagtttgtttggaaatgccaatctttccttttttcccaaggctctta

SEQ ID NO: 321659 - DNA, 201 bp, Homo sapiens
ctgccttggcctcccaaagtgctgagattacaggcgacagccagtgttcccagcctgcattcttattcttggatatttcctgggtatcatcttattttttwaaatgtgttgactcttcattttgaatctcgttttgactcttaatcttcaccatctttatttcttagtgtgaagaagatggtagaaatcaactttctttgt

SEQ ID NO: 321660 - DNA, 201 bp, Homo sapiens
agtttctttactatcatgggttgttactgatatgtctgttgcatttcatggacctgtttatctgttcttcagttccgttgtagtttaataatgttttcctwacaaaggtattgtgattattatacactagttcaaaaatgcatgaaaatacgaatgagaagattacaatcagctatattcccaccattttccatgcaggaa

SEQ ID NO: 321661 - DNA, 201 bp, Homo sapiens
ttgaggataaggggcacctactgtatactgtttgtattcatctgttgtcatttgaaaggaactgaatgtctttccaggtcaccacacagcctgcacctgartcaggtcaattggctggccatcccgtcatgtggttctacacagggtaccattatttatttagtcccctattgctggaccctcatggccaaggctgccagt

SEQ ID NO: 321662 - DNA, 201 bp, Homo sapiens
gtactaaagggtagagagttaataagattaataattctgaatactctatcaaggacatgcttaagtgaaactgccatttgttgaaccatgagggtgtggtrttgaggaatatggtaaccatgagtgtggtctggtgccattgtcttgttttgtgctaaggcaccagcagctttacccacagcactgctttgcaccgttgat

SEQ ID NO: 321663 - DNA, 201 bp, Homo sapiens
cgggagcacattattgacacgtttgtagtggaggtaaagacaaggtgataaacataaagcttctccttgaagcaccctttgtgttcagcgtgcagcagaaktatttacacacacttccttctatttcatcacagaacattacaaagatgtgtactaaagggtagagagttaataagattaataattctgaatactctatca

SEQ ID NO: 321664 - DNA, 201 bp, Homo sapiens
aaaagctgactatgtgcatctcccatttgcaagttgtttttatctttgccgtgaatacttcagtggcggctgcaagtatcgaatgttcgagtctagaatatttttttttttaaagagaggaaaggaaattgcataggaatctgaacctgagccctgtttatgcagggatagaaacgtgtttgtgatagatagctaaataca

SEQ ID NO: 321665 - DNA, 201 bp, Homo sapiens
tgttatcaactgtataaatctaaatggaaaaatagattaacgacagtctttgcctgagggacctcctcaaatcaagaactactgtttgaaatgatcaagtrtctgctaagacttgcatctgaatgggtgatgtcaccctttggcccagaacaaattttttccagggttgtctaaatataggacacatactttgccatcttt

SEQ ID NO: 321666 - DNA, 201 bp, Homo sapiens
aagaaaagttcctttataacctagatgctaggtaacaaaactagcactttgtgttttgtttgtgattgtttgtgacagggtctctctctgtagttagacayttaaagcttttcattgttagcccccctagtaaaaatctttatcagggaacatttcctcctctgcaaaaaagtggtttgtttagttctgttgcttcaagat

SEQ ID NO: 321667 - DNA, 201 bp, Homo sapiens
ctccccttcccttcccttctctgctgtgtttccattctagaagttctttccttcatcccctcgttgctcctgcagagcatttactctgacagtgccccccmcccaaggctcgtggctgcctggctgttggatgacagtaatgcatgcactgcacgtctcccccagaggagtaatgccggggaccatttgtagatggatggg

SEQ ID NO: 321668 - DNA, 201 bp, Homo sapiens; identical to SEQ ID NO: 67403

SEQ ID NO: 321669 - DNA, 201 bp, Homo sapiens
caagtgtgaggtgatcatggcaggcttgactgatttacacaccagaactaacagcagttccctcctttccagggctctggtaacttcgttaacgccaatgrcaagctgcttcctgacgtgtgcaggcgtccaccctgacacttgctgcttagcatctgttttcttctccttcagattctcactaatatcaacagcaatgct

SEQ ID NO: 321670 - DNA, 201 bp, Homo sapiens; identical to SEQ ID NO: 67400

SEQ ID NO: 321671 - DNA, 201 bp, Homo sapiens
tgggttttgttgtgagcggggtttttttgttttgttttgttttgttttgttttttatcagtctttacaattgattgggtgtgagggacaatggaaagatcrtcccactcttccccaacagttggtgattctctggtcattttaacagcaagagaggaaacagtaattttaccagcaatatgaatgtgaagaagtagttttc

SEQ ID NO: 321672 - DNA, 201 bp, Homo sapiens; identical to SEQ ID NO: 67402

SEQ ID NO: 321673 - DNA, 201 bp, Homo sapiens
gtgtatgtaataatagggattacttgttccttgaaagttgttagaagttgcttataagccatctagacatggtgccatggtgggttttgttgtgagcgggktttttttgttttgttttgttttgttttgttttttatcagtctttacaattgattgggtgtgagggacaatggaaagatcatcccactcttccccaacagt

SEQ ID NO: 321674 - DNA, 201 bp, Homo sapiens
aaagctgactatgtgcatctcccatttgcaagttgtttttatctttgccgtgaatacttcagtggcggctgcaagtatcgaatgttcgagtctagaatatttttttttttaaagagaggaaaggaaattgcataggaatctgaacctgagccctgtttatgcagggatagaaacgtgtttgtgatagatagctaaatacaa

SEQ ID NO: 321675 - DNA, 201 bp, Homo sapiens
ataactatttgatttttacaattacacatttaacttaaatttctcaagttcacatttgatggcaccagaagtacacttacctttcggaagtttggtgtacragcatttatgctatatcatgatatctgcatttctgaaaaatcttgaaaactacagattcaaagtgatagaatttatgataaaagtaagggccaaaccact

SEQ ID NO: 321676 - DNA, 201 bp, Homo sapiens
gacattatatgtgggaacattgttccattttagaattagaatcaatttctggttctcatttaccagtgtaatgcaattttagatcctttgacttctggtartatagaaattcagctgtttcccttaatgcctatttttaaattgacaacgtttgtatgtattcatggtatacaacttggtgttttgatatgggtctgcatt

SEQ ID NO: 321677 - DNA, 201 bp, Homo sapiens
caattttagatcctttgacttctggtaatatagaaattcagctgtttcccttaatgcctatttttaaattgacaacgtttgtatgtattcatggtatacamcttggtgttttgatatgggtctgcattgtggaatggctaaatcaagctaattaacatgtgcattacttcacatacatatttatttgtggtgagagtattt

SEQ ID NO: 321678 - DNA, 201 bp, Homo sapiens
cctatttttaaattgacaacgtttgtatgtattcatggtatacaacttggtgttttgatatgggtctgcattgtggaatggctaaatcaagctaattaacrtgtgcattacttcacatacatatttatttgtggtgagagtattttcccttgattggtcatttctggacatgatacttgggtttgcactggaattagctgc

SEQ ID NO: 321679 - DNA, 201 bp, Homo sapiens
ctgaaacttgctgagcaccaacatgacactaccatggaaaatttcacacataaaagtactttaactttgtgtaatgctcaaatgtatttaaaatatttttwaaaattacctttagcctccatgtttaagatatatatgaaacataaatgaattttatgttgagatttgggtctcatctcaaagatagcttattatatatgt

SEQ ID NO: 321680 - DNA, 201 bp, Homo sapiens
tctctgacattgtgatagaagctccccaggtgattataatatgcaacaaaggttgaaaactgctgttctggagacttttctattgtgtcgaaataggaagwctgaggctgcccagaatgcttctttaaagagtgtttttcaaatatcgtgtgcctgaaaatcatgggtggaactcgtcaaaagcagtaccacccttaggga

SEQ ID NO: 321681 - DNA, 201 bp, Homo sapiens
tctgttgccattgcaagtagagttgctctgaaataatcaaattgcccagtgattgattgctagatcttaggatgtgtgcaagctattgcttcaaatgccartttggactagatgcatgagagtgtgtctatgactctttcacaaaggagcaaaagaagcagtttcatgccttacttgtcaatctagttcttatatttcata

SEQ ID NO: 321682 - DNA, 201 bp, Homo sapiens
cctaatccaggactgggtcaagccaaatccaaggtgcagagagaaacattcccacttggcttcttctgatgtaaatgatgtgatctggtctagatttcccrgttgacttatcttttctgttcagtcacatgatttggtgtatgtggattttaaaatctctttattataaaatttaaaggctgcagaagttatccagttgct

SEQ ID NO: 321683 - DNA, 201 bp, Homo sapiens
cttgaagccaggagtttgaggctgtagtgagctatgatcatgccgctatactccagcctgggcaacagcaataccctgtctaaaaaaaaaaaataaagtcytagtgcccaggcccagccccagatcagtagatcagatctctgacattgtgatagaagctccccaggtgattataatatgcaacaaaggttgaaaactgct

SEQ ID NO: 321684 - DNA, 201 bp, Homo sapiens
attctttagaagttgatttttagctgcttcctggaccctgcttaagcatgaacataggttttttatggtaaaaatacatttgaaatgtatattcttaataraaacaaaaattatttttctaatagagcctggttatatgaaacaagtttgggttttcaggaattgagaagtgtctgaccccattcttaatgctacccctgg

SEQ ID NO: 321685 - DNA, 201 bp, Homo sapiens
tgggctggaaacaagacagcaagcttccccttattgtgccactgcaatcattgagcaccatctttttctcctagagaggtaagggtttgggaaggaagagrcacaggtgaacaggctttgagattcttagcttccaagggtttttcagagccccacaaggtttgagtgggacacaacaaggaccaccccatacatatatac

SEQ ID NO: 321686 - DNA, 201 bp, Homo sapiens
cctgcatttaacttgctctgcaagtatttttacacttacctgacattttaaagagatttcagagacagcgttatagttttatggtaaaatgttcgtgatayatgggtatcactttttactttgcctgcatcagaggattttttctattagttcatcacctatttctccctcttctgaataaaaaacaatgagcaatgatat

SEQ ID NO: 321687 - DNA, 201 bp, Homo sapiens
gtatcattaacacataaactgatgaaatataaatgtgaaaagtaagagcacgcacttctatataaacttagttggtagctttggaaagatttgatagaggygagtccttttaaaatattgctgttaaatttggggtagtcaaggtaccagtaaaataatggggaagttcacaaaaatgtggagcctgcatttaacttgctc

SEQ ID NO: 321688 - DNA, 201 bp, Homo sapiens
ccttggcacttacgtacattcttgcagtgtctcttgcctccttgctaaggaaatcggttaagtaggcagaatagcaggagattaggggaaaagcaattcartgtggttaaggtgccaatgtgtggcaagaccataagtgcaaggaagtttacagagtgctgtttggtggtgatgaactctctccgcctgttgtgttttcat

SEQ ID NO: 321689 - DNA, 201 bp, Homo sapiens
cattacttcacatacatatttatttgtggtgagagtattttcccttgattggtcatttctggacatgatacttgggtttgcactggaattagctgcacgtrtggacccagtgcaccctaccattgttaatgtgagattagtagagatgttttgtaaaaccgattaattcctttttagtatttttaaaatcctggacaatat

SEQ ID NO: 321690 - DNA, 201 bp, Homo sapiens
caccagcttccgctgagttatgggattagaaacttctgttagtactttcaccctcaccaacttgtagtctatggatcttttttggttaaatcccaggaagmaaagccatcaatatttttccttaaaatacccccacagctgtttgttatatgtctgacgctgtactagagatggtagagataaaagctgagtggttgcctt

SEQ ID NO: 321691 - DNA, 201 bp, Homo sapiens
cctcacccactaaagttcttagcaacacttcctgtttatgaatgttatataccacaacatttatatttagacttcttgttctggcctccactctacaaaamtcagaagggcaaaggacaagacttgccaaaacccaaatcaacacttctttgactgcttcttggaacacatgtggcaggatggggcttcaatgctgtcatc

SEQ ID NO: 321692 - DNA, 201 bp, Homo sapiens
aagaggaaattcatagaagaaaccatttatttcccagttcatttcctagaatttccagcttttcttctttttgcttgcttgctttttgttttttattatcrttatgtagtaatggattaaaacatttgaacaatccattgcagttattttcttactgattgtcaagttgccccgctttggccagtgaggacctattcatac

SEQ ID NO: 321693 - DNA, 201 bp, Homo sapiens
gtgtgacttgtgactagtactcaaacaataatagaacttgaagagtatcttcccttccccaacccatccttgttttggtgatttgaaaagagacttctgamcttctttgggatttggcaactccaaagtgatactcagaactcccgggcagcccgtgtggaacattcagtgcgtttgttcttggagtgtggagggcttttc

SEQ ID NO: 321694 - DNA, 201 bp, Homo sapiens
gtgccactcacccgagtcaatgctattcttgtttctgaggtgaattgatctctgtctccagcagcctgacccaaattctgatccctagtgatcacctcttwtctaacaggacaaacccggtccacttgtgttctctaatgaacagtaatggaaatctgaggcaaggtgacatttccccttatggtccatccacacgttgtt

SEQ ID NO: 321695 - DNA, 201 bp, Homo sapiens
attactcttgagctttggggctgctattaagcaaaatgagggtttattgaacacaggcactgagatactgagacagttgatctggtaacataaaggctacwaagtgactaatgtgagtgggttgtgtctatatcatggatcccctggacaaaggagctgttccagccctgggcatgatggagcaggaatcacaaggtttca

SEQ ID NO: 321696 - DNA, 201 bp, Homo sapiens
cactgagatactgagacagttgatctggtaacataaaggctacaaagtgactaatgtgagtgggttgtgtctatatcatggatcccctggacaaaggagcygttccagccctgggcatgatggagcaggaatcacaaggtttcatcagctactaagagcattgcgcaatttaaaacttttgaattgtttatttctggaatt

SEQ ID NO: 321697 - DNA, 201 bp, Homo sapiens
ctatatcattgttgcctaaaatatgactacctcttaaaattgagtgactttagttgtcaaaatgtccttatgtggatacagaccagttgggaccagttttrccagcatccagtgggagctgtgcctagtgagagttgctatagaaagtatctctatgcattatctgtttggttggctacagaggaatttatttgctgcttc

SEQ ID NO: 321698 - DNA, 201 bp, Homo sapiens
aattctgcaccccccctcacccctgatatgctgagcagaactctcatggatccctctggccctgtactctgtctcttgcaggtagccagttctgtactttktgttaataatattcctccctgtcttgtcagggggcagcagtacagtgttagaggaaacacacaagacctgatttgctgtctggatcccaccacttcccta

SEQ ID NO: 321699 - DNA, 201 bp, Homo sapiens
actgatcccagattcagttatctttccccactgaaataggtctcttatccctcactaagcttggcctaaaggtaactctaatgtatcctggtcagagaggmaacaaatttcagttgtcactcagccctgccactcactagagaagttatagtggcaaattcacattaagccttgacttcatcccatgtaacatgttgctag

SEQ ID NO: 321700 - DNA, 201 bp, Homo sapiens
agggacatggattataggcagaccctctccctctccccttgccacccagccttgcagtcttgggcaagccacttgtctctgtgagcttccgtttcttcatstgttacccggcaggttcactgtgaagctctcatgagagaagagtataaatactgataccatgttggaatggtagccctcatttttctgattatatcttaa

SEQ ID NO: 321701 - DNA, 201 bp, Homo sapiens
tgaaataatttctatagaatcaagttcttttttcctttctctttcctcctcccctcaatttctaaaccttattcattgacagaacaatccatcttccagaytggctctcacaagatcatcaaggttttttttttttctcctcctttcatttctttctcagataggttttaccaccttatttcttgagatagtgtgaagcaa

SEQ ID NO: 321702 - DNA, 201 bp, Homo sapiens
agctgtgttcttgtggcgaaaggattaggccatggctctgcacttgttctgattctgtcacttggcctgtggccttgggcatattttaacttgtgtcaacmcagttttctcacctgtaaaacaagaatgacatgaacagtgcttgggtcatagggctgtagaggtgagatgacgcatgtcaaaaagtgcatagtatagtgt

SEQ ID NO: 321703 - DNA, 201 bp, Homo sapiens
ctcattataaaaactgcattttaacatagctcagggctttgtaatgcctgtgctgcttttctcaatttctaattttttaatgatgtccctttgggcagatsagcagtcagcagccttggcttcagtttgcaatcctgggaccttaaagtcaaagctgcagcagacaagacttacttttgaagctctcaatttaattgacta

SEQ ID NO: 321704 - DNA, 201 bp, Homo sapiens
tttcccccatttccttacctgaatccaaccttcgagagcttcctattatatcatcatgaaaattttgtatttttgttgtttttcatccctggcttttggakagccagtgagtttcattgttactctgtctggttggtgcttctgcttatgcccgtaggggagagagagagagaaatttgattaaatttgagccagtttctt

SEQ ID NO: 321705 - DNA, 201 bp, Homo sapiens
tgggcagtgtgatcaggagcatagacttggagatagatggctgggttcaaatcctgactgggccaccagctgcctaaggttgggtacattacttagctggkgcacagtaagtctaaatacatgtttgctgctcttactaatatcattattggggccagataggaaatgctgcagtgggaattggtggggatgtgagccagg

SEQ ID NO: 321706 - DNA, 201 bp, Homo sapiens
tttgattgttggagccatgtcaatgaaaaaaggctgagtttgacctctcaatatatggatactaatttattgataaaaatggagagtagaataatggtatktatggtatacaaatattacactgtaaagaaacacattcctatttttttgtgcatccccgtggatcatctcgtgcatcccctttttgaggttcacttttta

SEQ ID NO: 321707 - DNA, 201 bp, Homo sapiens
aaaattttgtatttttgttgtttttcatccctggcttttggatagccagtgagtttcattgttactctgtctggttggtgcttctgcttatgcccgtaggrgagagagagagagaaatttgattaaatttgagccagtttctttctagtttatgaggacaggcttggaaaacctctcgaatacccctgggcttagaagact

SEQ ID NO: 321708 - DNA, 201 bp, Homo sapiens
aattactttggcattgactatattgtcatgtttgcctttccatgtgtttgaaattttccatggtaagaggttagaagtattttagctgtagataaaagaccaatagtgttagaaaatactgtcctgtcttaccttcctttaatcccgattttacaaatacactgtgcttttaaaaggtggaattatctgtccataccttgt

SEQ ID NO: 321709 - DNA, 201 bp, Homo sapiens
gtggaggcttcataggatgtgatagttacaatcctagatgtgatagttacaatcctagattgtgatactttagaggacaagaacattgtgtagctctctayggggtagtgtatgtatgtgcatgtgtacacatttatttatactctcaataaagagttgtcattcaaggtcagctgaataactggccagtgctgactgttc

SEQ ID NO: 321710 - DNA, 201 bp, Homo sapiens
caccaagtaccccctaaaatgtctgattaccaaccccaggctctcatagactgtgcctaattttgtggaacctctgctgctgctcatttgcttggccaaaaccccccatcatgccaagtaagcattgacaagcaaaatcagaatgaaaaatagtgataggaataatggtcattgcaaaatactattctttggtgaggcatt

SEQ ID NO: 321711 - DNA, 201 bp, Homo sapiens
ggactcagcccctagactccagctggccttgttgggtagtcaggtgagaggtacaggtttcctcttccaagctactgggctgtggggataaggtgtgggargggagtaggttgcagcaggatccccctagagagttagcccagtgttgttaccgttccttttgggtgagatgaagtcacctggcatgatgatgtgtttaga

SEQ ID NO: 321712 - DNA, 201 bp, Homo sapiens
taggctatgacttctggtatcaatatggatgttcttatgcagaaaccagatgttgacctcaccctatagttcactgctttctctatgggaggaaggaagtyttttccttaaggaggcacacacgccggttggagaaccagcatagggcttttggttgctggttgggggcagtggagaggtaactgctttggacttccgatt

SEQ ID NO: 321713 - DNA, 201 bp, Homo sapiens
acgaagcaagcaagcagtggcatggaaggtgttgaggcagtgagaagccggcagcttatgcagagccctgtaggctatgacttctggtatcaatatggatrttcttatgcagaaaccagatgttgacctcaccctatagttcactgctttctctatgggaggaaggaagttttttccttaaggaggcacacacgccggttg

SEQ ID NO: 321714 - DNA, 201 bp, Homo sapiens
ttctttccaaaaggggaaaaaaacttgtttttaaaaaagtatgtaaaattttatacacacgtatgtgtatgtgtgtgtgtgtatgtgtatatattagaagrtgcttacttctgaggaacattttagaaattcttttctagttcttactatgtaaataatcacactctgcatttaatctgttaaaagtgtctgtaggcattg

SEQ ID NO: 321715 - DNA, 201 bp, Homo sapiens
ttctttttgcttgcttgctttttgttttttattatcattatgtagtaatggattaaaacatttgaacaatccattgcagttattttcttactgattgtcargttgccccgctttggccagtgaggacctattcatactgctttctcagaccttttgacatgaccatggtagtttgtaatagttttcttgttctgtggtatg

SEQ ID NO: 321716 - DNA, 201 bp, Homo sapiens
aggttctctcagttcctccttgtcaccctttcaggtcttattttctgtgatcttctcagcataacagtgacaatacaagtggcctccaagaaaggttcccrggtattttcccctccatcccttgtcttagacatattttgtttctgtaatctcactgccctgcccccctagaattttcttctggagtgtttttttgcagtt

SEQ ID NO: 321717 - DNA, 201 bp, Homo sapiens
gtactgaaacccttgaaaagaacacatttttgtaagtagattaaaccttgtcattctgttttgttcttcaggctacttagccaagcttctctgcccagatratgtagagataaataaaccagataaatttaaacccaccctaactcaaattggcatatattttgaaataacaaagttagaatcagttttgttggatttact

SEQ ID NO: 321718 - DNA, 201 bp, Homo sapiens
cttgtgaaccttgtattgaacatgttcactttccctttctcacattcaactggagttcagaaaaatatcatcattctccttttacaattattctttctaarctgagaacgtgaataactaggacaggcagggcgttggtgtggtttcatcactttttcccaatccttcctgcagttttttgcaagccttccattccacgct

SEQ ID NO: 321719 - DNA, 201 bp, Homo sapiens
ttccttatgtgtggtgcattgaattcaggctgccctttttattcctaactttgagaggctggcaggaaggtaaggcccttgggatgaaaggtaaaggtgtrtaccatcccatagaagtgggccctgcctcacacgcctttttccctttctggtttcccaatgaaactgggccttctccactcatcccacctcccagatttc

SEQ ID NO: 321720 - DNA, 201 bp, Homo sapiens
ctcagaaatctccctatgtctgtctttggaccagaaaccaaaattctcacctaattggacagtagagaataataagtaaagtgtttgtggctgttctttcytcctgttcgttcccccagataggcaaattctagagccactcagtatcatacttgagacccattgcccaagatgaatcctaatttataccagatgagctca

SEQ ID NO: 321721 - DNA, 201 bp, Homo sapiens
cagcaccagcatctgcttctggttcatgaggcataatggaacaggctggtgcacctttgttgagattcgctggctgtgatctgtgctgtttatgtgagcaygtgtgtttatttcatggccagattaccgcatctgctcagggacaagtttgctctgtttttaggagaatggaagatggcaccttcccgtttgtcttaactc

SEQ ID NO: 321722 - DNA, 201 bp, Homo sapiens
gcaaagtatataattatcaagatatgagagagtaaattaaataagttaaagaaaacaagacaggtccccaaagatctactttacatcagaaaatacccttsacagcatacttggagcaatattgaagaaaatgagactagagagttaattgggatttgtgatgcattttcaatgttaaatgaaggagtttctattttgttc

SEQ ID NO: 321723 - DNA, 201 bp, Homo sapiens
agcaatataaaaaggaggatgaatcaactataaaatataccttttaagttttacaactctttttattttgtttttgattagaatacacacttaggtagtcktggactttaagctcgtttgctggaagcaggtggaaagtgaaggaatgtgccgtgcccgagatccatgtttcccacaagtccataagtcctttgtggtttg

SEQ ID NO: 321724 - DNA, 201 bp, Homo sapiens
gctcactttccctcactctttagtgtcatattgtaagtgttatctgtgggaagattgttccaatacaagcttctctgctattgccaatgcatagtttctcwgctttgtttttaaagaatcctaggttaactgttatgtggatcttacacaggtagtgtagtttagcagcgtgctctgggctgggaagctgtctgaattatc

SEQ ID NO: 321725 - DNA, 201 bp, Homo sapiens
gtcaaagaagactaggatcgtgtcaaaagaacttaggagccagcttggatagcctaccacaggcctagatgggacaattggatagtcagtgagaggaatakccacaatattttgaagcatatcaaatatgctttgatgtcataatgattttttaaattaaaaatcctcatagatcatcattagagtaggctaaagaacaag

SEQ ID NO: 321726 - DNA, 201 bp, Homo sapiens
tattttgtgatgcctccaggtaatttcattatacagacaagtttgggaaacactgaacatggggtggaccagagatcagcaaactatggctcagcaggccraatcagccctctgtctttttttgtaaatacagtttcatgggaacacagccatgcctattgtttacgtatcatatatagctgtcttcattccacaacggga

SEQ ID NO: 321727 - DNA, 201 bp, Homo sapiens
taagcgcttctgctgaggcctaacgtaagccagtgtcttcctgttaatcgtccaaggaggtgagctgcacacctggctatcttgacctcggctcagtgacyctgtcactcagttctttagggcacagcttgagccattcactccatcttcaccattctatcctcgccttccctgtcagcagatgtggagggcctgtgaatg

SEQ ID NO: 321728 - DNA, 201 bp, Homo sapiens
gctacatggtgttctgacttaaggttttttttcccctccttaacaaaggttgcatggttgtgggtagaaaaagcttatcaaatagtatcttttcagctgtrtggagtgttgctcattcgtaattgaaattcagattctcagtgactttgtactttctatggctattcgttattttcattggtttcttagaaaacaagtgtc

SEQ ID NO: 321729 - DNA, 201 bp, Homo sapiens
gttaatacttagccttcctctcagtatgcgtatgccagtgtcatctatttaatcaaataacaattttgataaaatatgtacagtgtcatttcttgtgttcygtgggttttagatcatgattcgcttttcttaccctttacctcatcagtattcttgtcattcctggaagggaaatctgggaatacgttatctgaatgctgg

SEQ ID NO: 321730 - DNA, 201 bp, Homo sapiens
caaacactgatcagttccttgggtccctagctttcttttttcgggactgtgggctttatttctgcccacctatcggccacgaggccaatgacatatctttratgatactgtgaaaactcccactgtgatgagagcatattccgtgagagccacacaagaatctaagacagggaaattcctcctgtagttagcttgtatttg

SEQ ID NO: 321731 - DNA, 201 bp, Homo sapiens
tgaagtgaaaataaaagttgaaagaatgcttttctgatagtaggaaaaaactgagccagatttttagaagtcattgccatcatctgattctaaaatgtggstttcaatctttacttttatgcttcttagtcttctaaaagttattcagaagttattactgatacataatagaaaatagagctgcttttattggccatcctc

SEQ ID NO: 321732 - DNA, 201 bp, Homo sapiens
ggtttcagtattacaagatgaaaaagttctgaagatctcttgcataacagtgtgaatatacttaacactactgaacacttaaaaaaggttaagatggtaamtttagtgttatttgttttttaccacaataaaaattcaaataaaaaagaaaagcattcactaaaaattgaaaacagatagagacaaacctagctgtacacg

SEQ ID NO: 321733 - DNA, 201 bp, Homo sapiens
agaagagaaagctctaaaattgatgacttgcactgtaaattttccggtatttggatagctctaattatctgcaccacacccacatttacaacttcgtctgkcttgtataaaaacattggcagtggtaaatcatctttatctaattgagttttttcctctctttccctagagttgatggctgaaagtagcaatagcaggcat

SEQ ID NO: 321734 - DNA, 201 bp, Homo sapiens
gtacttgtggaaatttggagcagaaaagacaggaagctataacaaagtggagagaagagcagatgggggattctggaggtgtttagaactttcccatttcrccttccacttctttgattttttttttctttttaccccctcctcctctttcccaaatccttgtaaggtgctccttagtaaaggctacagagctgactaagc

SEQ ID NO: 321735 - DNA, 201 bp, Homo sapiens
cgtgcccgagatccatgtttcccacaagtccataagtcctttgtggtttgtgtgcctgccctccttgtgtttttcactcagccagcttgtatttactgagmgctcgctcgccctgtgccaggcctctgccaagcctactggttctgccctggagaagttcacagttccagccatctgggaacatccagtgacagtgcagcc

SEQ ID NO: 321736 - DNA, 201 bp, Homo sapiens
caagcctactggttctgccctggagaagttcacagttccagccatctgggaacatccagtgacagtgcagcccaagcaggaagatggttaaggcacagagragacagcaatgaccttcacctgggtggatccaggactgcctgcttgtaaaggaggaggaggcaggagtccatccagaagaaaaggagggaggagagaagg

SEQ ID NO: 321737 - DNA, 201 bp, Homo sapiens
tggttctgccctggagaagttcacagttccagccatctgggaacatccagtgacagtgcagcccaagcaggaagatggttaaggcacagagaagacagcawtgaccttcacctgggtggatccaggactgcctgcttgtaaaggaggaggaggcaggagtccatccagaagaaaaggagggaggagagaaggttcttttgg

SEQ ID NO: 321738 - DNA, 201 bp, Homo sapiens
gagacctgaggtagaagtacctaattgttacatcaatgtcaaaggctaaagttaggcttgaaacattttttttcctctaatcagctgttgggattttcacrtttatgaaattggtaaatcctttctgaaggtaatctctagttttgattttaccatgcctaaaagttagtaagttcatacactttattagtctttacatat

SEQ ID NO: 321739 - DNA, 201 bp, Homo sapiens
tctctgactaaacctgcagaaatcctgatctgcgtcttctggcacttttctcctcagtcagaaagatctggactccctgtgctatcttatgcccaaccacsgcctgacagaggtcatttgttttccactggagagccggcacatcctctccaaagtctgataggagagggcaaatcagagatcacaagtctggtagataac

SEQ ID NO: 321740 - DNA, 201 bp, Homo sapiens
atcctggagaggaaactggggagggggcttccaactgccctgcatggaagaggagaggaaggtgcccctgtgtgggctggaagcctgcagaggttttgccrttgctgatcttgatagaatcctaaaccgatttatagctgataacagttccatggggagagaaatcctaagttatgattaatgtttttccccgctataata

SEQ ID NO: 321741 - DNA, 201 bp, Homo sapiens
actacctgagaggttgctttgaatgaatagttcttgcagaaaagaaacagggacccagaatttctaattctgttggactaattactgacccttcaaggaawacatggcttgtttcatttcgaaaagtgagactatatatatccctgtcgggaataatgttcctccccagccacttgatgggggaactcagtaacatacact

SEQ ID NO: 321742 - DNA, 201 bp, Homo sapiens
gaagtgggtgctgtttcaggtttgaggcttgtcaagaaagcctctctgaagaagagagattgagcagagacccatattattgagtgagggaggcctggggytctccagctagctgccagcaggatcagtctgtacaacagcccagggcacattcttcctgggtgcatttaagaaccactgttgggcccttttaattctaat

SEQ ID NO: 321743 - DNA, 201 bp, Homo sapiens
cttgcctcatcctgtaatagttttctgagagaagaaggtaaatggaggggaaatcatgagatttctttttctttttttttttaagatggagtctcgctctrttgcctaggctggagtatagtggcgcagtctctgctcactgcaacttctgcctcctgggttcaagcagttttcctgcctcagcctcccaagtagctgaga

SEQ ID NO: 321744 - DNA, 201 bp, Homo sapiens
ggttgggattggggctggttgagtgttctgtatgaaagacgattccaggcaggaagcatgaaagcaatttaagactgtaccttccctctgaatgaaaaagkcaaaagaagaatggaagaagaaggaagtcacatttagaagataagaattcttctgctttcttgtgaaagttagtgtcccatttgagaataatattcttac

SEQ ID NO: 321745 - DNA, 201 bp, Homo sapiens
tcgctcaatgatgtgctctgtgccggggcttccaagcacccttcctgctaacagagggcggcccagtggagcctccgctgggcagaactgatgggcaaggygtaatggctggtagctttcagaatgtgagggaaaggaagaattccgcttcatggggactagagttagtgtggggcctttaagtctgggaagttacattct

SEQ ID NO: 321746 - DNA, 201 bp, Homo sapiens
atttagagaggttaagtctcagttctctcatctgtacagcagaaactagctcatggggccacatgagaaagtgtctgtggagggagggctggcacatggttaagtgctcaggaaatactggctgttgctataattaacaaaatgtggttttggcaaatggttttaagagggtctgtatgtgcctttgttccataagttttt

SEQ ID NO: 321747 - DNA, 201 bp, Homo sapiens
ggatttttgagaaactaatatccctgggactacaccgactgtgagggctaaggaatgggcccaggctggcgctggggtttcttctcttggtgaccaggagwtgtgaagatacattacattcttagagatgtttgggacttactggtagaaaaaacagacctcagagatttatgcagttgaaagaaaggtcaactcgactta

SEQ ID NO: 321748 - DNA, 201 bp, Homo sapiens
ttcttagagatgtttgggacttactggtagaaaaaacagacctcagagatttatgcagttgaaagaaaggtcaactcgacttagtatgcattttgaattayagtttaaaagatgatattatgactgcttggtagatatagtgtatgcttcatttattaagtagctggtaagctccttgagggcagaaactcatctttatat

SEQ ID NO: 321749 - DNA, 201 bp, Homo sapiens
tataacatgaaataaaacccattgtttcacttgctggattattttttaagtgcctacctagggactaaataactacatttcagaagcaagtatttcaaagcatcgtgctttaatcaccatgtaaattttctgaaaataaaaaaaatttaaaaacacctgatcctgaatatagtgtcaggtttgagttcaaaacttttagaa

SEQ ID NO: 321750 - DNA, 201 bp, Homo sapiens
ataacactgagaatgcacacaggttttgttcctctccccgctaatccttgaaaattccctatgccctcagcttctcaaaaggggggagaaaagcaactatygcctcttgttggcagtagaatttattcagtaatttactttccagccaactgcagccattgccattgcctctgggcactggttcaaaaacgcagaaatgaa

SEQ ID NO: 321751 - DNA, 201 bp, Homo sapiens
atctctgtttaatctagagagaattattttctgattgtcacttgctggtgaaatgccttttaaaattataggcacaagatgcggatgtttggagagggtgyggggttgctgtcccccttggtcaagcgttagagaagttacagaacccaaatgagagaaatccaaaattttctcttccagaatagcctactctgtagacag

SEQ ID NO: 321752 - DNA, 201 bp, Homo sapiens
tcagaactcccagtcagccctgccccctacagatttctggccagtaggtggtgaaacctgggtgaaagcatttctgctgggaaatggacagtagccttatwctgaggcaacaaggaagagagtacacagcttaatgattttcagacagatgtattttcccctaaaaagcaggttttggttcaggttaatccatcctagaga

SEQ ID NO: 321753 - DNA, 201 bp, Homo sapiens
gcagaaccagtcccttgtgtatggcaaagtggatagcttctggaaggtgagtcagtctgtgcgtgtctctctctctgaaaagaagcttgttgggtaatttmatttaactttgatccagggaataatcaagccaagtgcccagggcttaatgggatctacttagacataaacaagaatgtgcaaagattcagttgctcagca

SEQ ID NO: 321754 - DNA, 201 bp, Homo sapiens
ctaccaacttgatcttggccacttgttgtattgttgtgcgttcttagtttttctacttttaccatttctggccagagctgtcacttttaaaaattactccrttgatgttgcctagcaagagccactcagctctttgtggggaattaaagtagattataggttgaggccagttgcacttactgtgctgcaaattggggactg

SEQ ID NO: 321755 - DNA, 201 bp, Homo sapiens
aggggcctttggcccatcttcactagttggcaactggctttttaggcgaaatgcctccttttgcataaaggagagatgcctgtccccacctgcaccgcccrtctcctgctttaaggccagcaagatgtcccgagaggcctccttgtagatgagtgaaatccacacagggaaactcaagtaaaaatatggggtggggtctgg

SEQ ID NO: 321756 - DNA, 201 bp, Homo sapiens
tgcctttgttccataagtttttaaccaaaactaaggagcctcgaaaattatgttagaggcaccaaatggggagcaggttctagtcattcatcaaagaaggrgctaaataaaatcaagatttaacagaaggatcacacatttgaggtagggtttggagtttcagtcatgaagtcggtgcacagtttatatagggttcaactt

SEQ ID NO: 321757 - DNA, 201 bp, Homo sapiens
cccatttgtttacttactgtctgtggctgctttcatgctacagctgcagaatttagtggttgtacaggagaccataaggcccacaaaattgaaaatatttmctatctggctttttacagaaaaagtttgccaacccctggcctaaatgaatggtgctgtctggaatgcagtacatagtctgcatgcaaccctgtgtgctaa

SEQ ID NO: 321758 - DNA, 201 bp, Homo sapiens
tggaaactggaatattggatgagacaaggaaaattgactaaaaacaacacccagattatacgctgcatgttgttgcctgcagctcacattagaacccccccatccccgcaactcccccaccatcacactgctctgaggtcagcccctgggtctttgtgcttgaaccaggactgctcttgttagggtgaccacgattttctg

SEQ ID NO: 321759 - DNA, 201 bp, Homo sapiens
gtagggagagtgtgtggcctcttgtgtcctgcctgctgcagggaagctctcatgagtaggggtgtaagctatgtttttttttgttgttgttgttgtttttsagacagggtctctctcttttgcctaggctggagtgcagtggcgcgatcttggcttactgtaacctccacctcctgggttcaagcaattctcacgcctcag

SEQ ID NO: 321760 - DNA, 201 bp, Homo sapiens
attccaggcttgaagaggatgtttaggaagtggagtggacctggggctcagggctcacctgtccctgttcaggcttcacgccctgttagtgctgttgtccrctgttgttatttgtgcaccatggtctgagttggcctgtttcttgtgagtcgtcttatccttaagtgtggtataaaacccttcgtagggagagtgtgtggc

SEQ ID NO: 321761 - DNA, 201 bp, Homo sapiens
cagctactgaggaagctgaggcaggagaattgcgtgaatccaggaggcggaggtagcagggaaccgagatcgcaccactgtactccagcctgggcgacagwacaagacttcgtctcaaaaatatatctatacaagcacaaggttaaaaaaaaaagaaaagaaaaatggcaacagtatgccctctggatgcagctctgggcc

SEQ ID NO: 321762 - DNA, 201 bp, Homo sapiens
aacacagctgtgctcctttgttgatgtgttgccgtgttgcctgtggctgctttcacatcacaatatcagaaattgagtagttgatacagagactacgtggrcagcaaatctagaatatttaccatctagctctttaaaaaaaaaaaaaaaattcaacccctgaagtagatgtttgtttgtttggtgcttgataccatgtaa

SEQ ID NO: 321763 - DNA, 201 bp, Homo sapiens
gctcattaaaagtaacacaaggccgggcgcggtggctcacacctgtaatcccggcactttgggaggttgaggtgggcagatcacctgaggtcaggagttcragaccagcctggccaacatggcaaaacctcgtctctactaaaaatacaaaaattagctgggtgtgggggtgcacacctgtagttccagctactgaggaag

SEQ ID NO: 321764 - DNA, 201 bp, Homo sapiens
tgtgtgtatatgtgtatatatgtacatgaatatatgcttttttaaaaattaagatactgcatttccttatgccattaggttttttttttttttttttttttgagatggagtttcactcttgttgcccaggctgaagtgcaatggcacgatctcggctcgccgcaatctccgcctcccaggttcaagcgattctcctgcctc

SEQ ID NO: 321765 - DNA, 201 bp, Homo sapiens
tgatttggtgtatgtggattttaaaatctctttattataaaatttaaaggctgcagaagttatccagttgctcctaaagaattacaggttgagcaggctgrcatggtggcttacacctgtaatcccacactttgggaggctgaggcaagcgaatcccctgaggctaggagttcgaggtcagcctggcaaacatggcgaaac

SEQ ID NO: 321766 - DNA, 201 bp, Homo sapiens
gtcacatgatttggtgtatgtggattttaaaatctctttattataaaatttaaaggctgcagaagttatccagttgctcctaaagaattacaggttgagcrggctgacatggtggcttacacctgtaatcccacactttgggaggctgaggcaagcgaatcccctgaggctaggagttcgaggtcagcctggcaaacatgg

SEQ ID NO: 321767 - DNA, 201 bp, Homo sapiens
caatatttatggaacacttcctgtgccaggccctggatttctcagctgtaacacagataaccaatatgtgccttatccctcaaatagctgaccgaacgggrcccaaaccccattttcatggtcctacctgtcctaccaacttttttttttttttttgccaatttctggtttttcttcctctagatcctgcctgcagacatt

SEQ ID NO: 321768 - DNA, 201 bp, Homo sapiens
attcctttcttccaactggttgctcttcgtgcactctagagcagtggtcagaaaaccttctgaaaagagccagccagtaaacattgtaagctttttgagcygtatatgcatcgctgcagctacttagctgtgctgttgcaggatgaaagcagccatagagaataggtcaacaacagggtgtggctgcattcaagtacaatt

SEQ ID NO: 321769 - DNA, 201 bp, Homo sapiens
ctataaactgtctctaaattgggtaccatagcaattgaagaaggattccctaaatttattttctttagggggatagctctgtgtgtgtgtgtgtgtgtgtgtctgtgtgtctccttattttttctctctagctgtgttctgtgtagcttttatccagtatggcttatcttcacaaatttatcaccgagggttttttaatgt

SEQ ID NO: 321770 - DNA, 201 bp, Homo sapiens
tccctgatggattcaaagttttatctatctccttatctcctgccctgtcttggcacaactctggatagattgcaggtgtggaatttgctggagtttggtgwcttcgtcaaattcctttggattctgttccgccaaatcagcagtctcgtcctgtggatgcagtgactggaatttcccatctgcaaagcatctctgtagccc

SEQ ID NO: 321771 - DNA, 201 bp, Homo sapiens
tggttctcagccaagctgttgctctttggaatcacccggagagccattaaaaccccagtgatggccaggtacagtggctcacatctgtaatcccagcacgwtgggaggccaaagcaggagggtcacttgaagccaggagtttgaggctgtagtgagctatgatcatgccgctatactccagcctgggcaacagcaataccc

SEQ ID NO: 321772 - DNA, 201 bp, Homo sapiens
agaaattgagtagttgatacagagactacgtgggcagcaaatctagaatatttaccatctagctctttaaaaaaaaaaaaaaaattcaacccctgaagtaratgtttgtttgtttggtgcttgataccatgtaagtatttgcaaaggcttatggaaattgatggttcattgttcttatgaataaaaactaataagcatgaa

SEQ ID NO: 321773 - DNA, 201 bp, Homo sapiens
aatcaatccttgctcccaccccaggcctaggaaaccactgatctgtttcctgcctttttagatgagccttttctggagatttctggctttcacttagcatratgttttgggggttcacccatgttgttaaatgtgtcagaactgattttattgctgaatagtattccatgtatgtacagattaatatcacaatttgtttat

SEQ ID NO: 321774 - DNA, 201 bp, Homo sapiens
ctggatcagtcacagtagacttacaatttaaatagcttttagcctttcttcaaaccgtacccaagaatttgttgtgcttgtgggtgtttgaaatattctgsctttcagcttcttttatacattctctctgtcctactttctctaggaccaaaaccttattatcaaggtgtcatctcaattctgcattatcttgcaatttat

SEQ ID NO: 321775 - DNA, 201 bp, Homo sapiens
tttctgtttcctgtaaagacactgtaaatatatagcatggtcacagtcatgttaatttgtaaagagctgtgtgattcatctgagaagcattctggagagakggagggtaaaaaaaagagttaactccaacaatggctgtggaatcagctgaaggtcctaggatgtctgttcatcagagcccagaataagcccactatggag

SEQ ID NO: 321776 - DNA, 201 bp, Homo sapiens
tggatcagtcacagtagacttacaatttaaatagcttttagcctttcttcaaaccgtacccaagaatttgttgtgcttgtgggtgtttgaaatattctggstttcagcttcttttatacattctctctgtcctactttctctaggaccaaaaccttattatcaaggtgtcatctcaattctgcattatcttgcaatttatt

SEQ ID NO: 321777 - DNA, 201 bp, Homo sapiens
tgatataaggccatgatatgcagctgtgtgaagttgcatatggatttgaacttgagtgactgattatccagcacttactaagtgccaagacttggaatgawtcctttccatgtactatctcatgtaatcctcacagcaaccccatgaaataaagcactattgttttacccattttacacatgaaaactctgaggtttagca

SEQ ID NO: 321778 - DNA, 201 bp, Homo sapiens
ctcaaataagaatgcctggagggtgaggcacattcttaaaaggtccccaagaaatgtttaaatgtgcagatagggctaggaatggctaacttgtgaccttrgccaagttacttaatctggctgggcctcagtgtcttctgtagtagaatgaaggataatagtacttattattgtgaggctcaatcgagtaatcggtgtaca

SEQ ID NO: 321779 - DNA, 201 bp, Homo sapiens
agggtgaggcacattcttaaaaggtccccaagaaatgtttaaatgtgcagatagggctaggaatggctaacttgtgaccttggccaagttacttaatctgsctgggcctcagtgtcttctgtagtagaatgaaggataatagtacttattattgtgaggctcaatcgagtaatcggtgtacataagatacagtggtgttac

SEQ ID NO: 321780 - DNA, 201 bp, Homo sapiens
cctgatgactaatgatgataagctctgcctacttttgtcagtagcaattatttaaccccagctgtgttcttcctatcatgtgtgtgctcctaggtgtgtgrataaccttttccctggctgaccatttctagtagcagcaccgtggggcttatcagaatggagggttggggtatatatgatgttgtggctgtgtgtatgtat

SEQ ID NO: 321781 - DNA, 201 bp, Homo sapiens
taaccagggcattggtggtggtggtgtttctggcatggtacagcaagcaggaagcagtagtgtgcgaggccaccctttccaagaaggtgcgggccctggcrtcaggtgggggacaatggataacaataggcttgacctctcagcacttctctgattccttatcttttctataaaaaaggctaaaattcttggttcctattc

SEQ ID NO: 321782 - DNA, 201 bp, Homo sapiens
ctagagggccagggcttctgtgcttggccaactacaattaccggtgatagttaaatgctattctagattgtattcggattctagctggctgatgacacagrctctaggcaaagaggctgaaatgggggagattgatcttttatatctgaagagtatttctttatactgaacattgccacttctcactggcacgactgcccc

SEQ ID NO: 321783 - DNA, 201 bp, Homo sapiens
cagtgacacaaatgggtgagtgagcccttgacatggatcatttatggggtgcctccatcctgccggctttgtctgtggctatgacaaccctgctatgcctrtgtcagccatgtggggttggtcaacagtggctctcactggtcagcatgagagagcctgggccatttcaggcacctgctgagtctttgaagctgacttccc

SEQ ID NO: 321784 - DNA, 201 bp, Homo sapiens
aggtaccatgctgtgggctgttggaactggagttcctggagggggtgtagatatcagagtcccattaggcacttgatcttgataaaaatccctaagccacygcctctcctgggctttattgcctgctgtaccacgaccttactctccactctaagcgcttctgctgaggcctaacgtaagccagtgtcttcctgttaatcg

SEQ ID NO: 321785 - DNA, 201 bp, Homo sapiens
ccacacttgcaggttgttgatccctaagttaacatttcacaaggtgagacaggagttaaagtatttggatgaaaacgtagaagagagcttagatgtgaaaktcatagtgtcagagttaattgagtaccaaattatagtcatagcagcaaaagcccaccattcctcacaagtttttctgatatttgcttctccctctcacca

SEQ ID NO: 321786 - DNA, 201 bp, Homo sapiens
acggggttttaccgtgttagccaggatggtctttatatcctgacctcgtcaccgcctgcctcggcctcccaaagtgctgggattacaggtgtcagccaccrcgcctggccgctaagcatggtttttatgtttttaaactattgagaaagaatcaaaagaagggtatattggacataaaaattttatgtaattcacatttca

SEQ ID NO: 321787 - DNA, 201 bp, Homo sapiens
catcctgtggtagagtccagcctgcccagtatcctcatcaaagccaggccaagttcacaagcacgcccaggccagtcaaaaggtctgaggaagacctcagraatgttttagacaggaggagtaaactcagaataaggggctcattcttctacccctcagtcattaagaccctttctttcatgcagcaccactacttcaagt

SEQ ID NO: 321788 - DNA, 201 bp, Homo sapiens
tgaagggcaatagcagactcctccagctaagagacaggacatgttcttgagccactgtagctgttgaagctggacaccagacgctccctataacccccccrccaggccatagcgtgtatgcatgtgcacttccacccacagaggagggtgtgaagccttgagaacctcaagaaagggctggattctgccatacctttgggt

SEQ ID NO: 321789 - DNA, 201 bp, Homo sapiens
aacgtaagccagtgtcttcctgttaatcgtccaaggaggtgagctgcacacctggctatcttgacctcggctcagtgactctgtcactcagttctttaggscacagcttgagccattcactccatcttcaccattctatcctcgccttccctgtcagcagatgtggagggcctgtgaatgggctgctcagagatgttcttc

SEQ ID NO: 321790 - DNA, 201 bp, Homo sapiens; identical to SEQ ID NO: 67414

SEQ ID NO: 321791 - DNA, 201 bp, Homo sapiens
cgcgggagggagaggagggattgatcacaggcttcttttatttccactgttaatcatccaccttcactatactgttgttctgtctgctttgggcagggtgyaggagagagaccgtgtgccgtggggctggtggcctgctcagggacagccatggggacctggcagctcaaaacagatggcagcagaacaaaagaaactttt

SEQ ID NO: 321792 - DNA, 201 bp, Homo sapiens
tgtcttgaatcagggccattcaggaaaccagcctcgagttcttgtgcatgcagggtgcaagggcgcagttaagcactgaagaggccaccgcagagcacgcrtgattcaggtgcgacccacatcctctggacaagtctcctcccagactggggtggagactggaagatgcaggctccaggaagtgccagggtccattccagt

SEQ ID NO: 321793 - DNA, 201 bp, Homo sapiens; identical to SEQ ID NO: 67416

SEQ ID NO: 321794 - DNA, 201 bp, Homo sapiens; identical to SEQ ID NO: 67417

SEQ ID NO: 321795 - DNA, 201 bp, Homo sapiens
caagagcagccttctcctgcggcctgttcccttttgcactttcttctagctcactgacacatggtgcatctcaggccccagcagacctgagtctgcggggyctcttggtaatgaggcgagtgtggcactgggaatgctggcccagggctgcacaggggaggcgccttccttgaatttcttaccttgtgcttgcattactta

SEQ ID NO: 321796 - DNA, 201 bp, Homo sapiens
tttttgggttgtcctttccccacttacaatgctcccacttagcagggtctggcacaagtttcttgggtgaagccaagcagaatatctgcctgtaagacttttcctttgaacctgtctttgtcagggtatcaggaaactttcccccatttccttacctgaatccaaccttcgagagcttcctattatatcatcatgaaaatt

SEQ ID NO: 321797 - DNA, 201 bp, Homo sapiens
gtaggttgcagcaggatccccctagagagttagcccagtgttgttaccgttccttttgggtgagatgaagtcacctggcatgatgatgtgtttagaatttraatgggagtgttgtatttgcataaataaagctgtatctgggtttgaagattgtgggaggtgttcggcttgctaatgttgaccccaagaacagtgggagta

SEQ ID NO: 321798 - DNA, 201 bp, Homo sapiens
aaattaattcaagatggattaaagacttaaatgttagacctaaaaccataaaatccctagaagaaaacctaggcattaccattcaagacataggcatgggyaaggacttcatgtctaaaataccaaaagcaatggcaacaaaagccaaaattgacaaaggggatctaattaaactaaagaacttctgcacagcaaaagaaa

SEQ ID NO: 321799 - DNA, 201 bp, Homo sapiens
ctggaggcatcacgctacctgacttcaaactatactacaaggctacagtaaccaaaacagcatggtactggtaccaaaacagagatctagatcaatggaamagaacagagccctcagaaataatgccacatatctacaactatctgatctttgacaaacctgagaaaaacaagcaatggggaaaggattccctatttaata

SEQ ID NO: 321800 - DNA, 201 bp, Homo sapiens
ttaccacattggtcaggctggtctcaaactcctccactcaggtgatccaaccaccttggcctcccaaagtgctgggattacaggcatgagccaccctgccyggcctctagcttcagtgttaacctttgtgctgcttcctgtaccccatgaggctgaacatgaataagaagccaagtttctaaagagtcttcaaactcagta

SEQ ID NO: 321801 - DNA, 201 bp, Homo sapiens
aaatatcaccggattgttgcccgagaataccaacacacacccttcaaatgttcagccatttgaaatgggaaattccttttcctcaagataatatttctggrcagtaaaggaggtggcagagatttatgatcatgttcttttcaccttctctgttcagcctttattggtatctttttcatctgtatatatttgttgctctta

SEQ ID NO: 321802 - DNA, 201 bp, Homo sapiens
tgcctaggattcttcctttatgaaataataggaatgtacttagagtacaacccggcagataaaagacactcaataagcataactgacacttccgtggttttaaatgttgtgatctttttggaatagttgtggggtgtcactttgccttggacattatatgtgggaacattgttccattttagaattagaatcaatttctgg

SEQ ID NO: 321803 - DNA, 201 bp, Homo sapiens
taaagcatttttgtcgttgactatacctcataccccaccaagcattgtgacaaaattaattagggacggacaagacaggcacagagaatatacaataggaygagtatattgtacaaatagattaaatgatctaatgagagctagtgtgtgatgtttcagtgtggtgcaggcaatctctccttctcatggctttatcttttt

SEQ ID NO: 321804 - DNA, 201 bp, Homo sapiens
aatcaccataggttaattttgcctgttcttgagcatcatcaaaatgaaatcttacagtatgaacatttttgcagagtccggcctctttttctcagcatagygttttcaagattgatccatggtgctgcatatgtcaatagtttattctttttaaaaaatcgcagagcagtactttgttgtatgaacataccataattggtt

SEQ ID NO: 321805 - DNA, 201 bp, Homo sapiens
agttataattggaaaaaaatcttcaatgatgttgaaaatatttttccctctggattagccttctcttttattctcagtcataattttagtagggagttttsttgtcactttaagggtattcattccatttcgacttgtcacccagattctcttcgaggatgacaagaacagccagtagtggctggcttgtggctcttctgt

SEQ ID NO: 321806 - DNA, 201 bp, Homo sapiens
ttcttatgtttgcattgttttgattaattaggacaatatttactaattatcttctgtgtgccaagccacacatcagtgaacaaaacaaaaaaaaattcttacccttaccaaaattcagccctaaacattccatcagagaacccttcttactgcggcccacagatcaaatagtttaccatgcttttattcagtagtcgtctt

SEQ ID NO: 321807 - DNA, 201 bp, Homo sapiens
agggcacattcttcctgggtgcatttaagaaccactgttgggcccttttaattctaatacagaaggtggcctattaaaaccaaaaccgaaaaaaaaaaaaaggaccctttactgtatcatctgtcatttatgtttctgctaggctcaaactagacttttgagagagcagtgttggaaccacagaaaggtctggatgtgtta

SEQ ID NO: 321808 - DNA, 201 bp, Homo sapiens
tgccctgttcaaaagatacagttttcttctgtgggctgtaagataagctgggtatggccaagttcacctttggatctaaccagggcattggtggtggtggygtttctggcatggtacagcaagcaggaagcagtagtgtgcgaggccaccctttccaagaaggtgcgggccctggcatcaggtgggggacaatggataaca

SEQ ID NO: 321809 - DNA, 201 bp, Homo sapiens
atagtgctctaccttttgcatgaggtgtttttctggtttttggcttgtttcttgaaatcttgacccaagtagagctgttgttttctaccattttgtaaacrgcagacatctgataaatgtgcaaaggaatctacacggtataggcttcccttgactcacatatcctcgctgttaagaagagttctttggatggaaaaatat

SEQ ID NO: 321810 - DNA, 201 bp, Homo sapiens
taattcttttttcaatagcaccttcctttctcattaacgccctgtctttgccagtttctccagagcagcaagtgaagctgctctgtggctctgttgttcaygctctgcctctcgggcagccatggtgaaagggatttgattcatgagcaggcacagatgtaaataatttttggcatttcagatgtaagaccttgctcattg

SEQ ID NO: 321811 - DNA, 201 bp, Homo sapiens
attatacaatggctatatgactgtttatgtccacaaagtccagccagattacttttcaaagaaattttagcagtttgattgccaaattcctgtgatctccrtattaagaactctctgtctgtggcctctagtcttagaagttctagtccatgatacaggttgttatgcaaatgaaagaaaaagagaaatgtcttgtgcttg

SEQ ID NO: 321812 - DNA, 201 bp, Homo sapiens
aaggcatggtcttctgaatgttattgggcacagatttataagaatgaggtaattgtgttgattatgcgattttccacctaaatagaaccttattaaaatayagcttgtaggaaaacagagtttggattagatttctaggcatagtccatattctaagagcatggtgacaaattgaggagatagacctatactggtccatcc

SEQ ID NO: 321813 - DNA, 201 bp, Homo sapiens
ttatcctcaatgttccccatcaagagtgaaactgaccaagcccatggataagaaccccctttatccatgtttaaagattctttaagtactccacttagcartttaaaacaattgtttcttctttcacagagtgggaaaaatctgggtggttttactggaccctttgtgaatgtgtaggaacgtcccaatcctatactgtga

SEQ ID NO: 321814 - DNA, 201 bp, Homo sapiens
tctcttccagggtgccgatctctcttctgtggcccttcctaagtccttgccaatactgccccttggtagtggcccgggcacaaagccatcagccagctgcktcctgccagtctcccatgtgctacctgagtcagcggaacactgtgtgttgtgtgcatgtagatgttgagggactttggtgtggttgcagggttctgccga

SEQ ID NO: 321815 - DNA, 201 bp, Homo sapiens
cagatattcgatctagcaggtgtaccattccaggcttgaagaggatgtttaggaagtggagtggacctggggctcagggctcacctgtccctgttcaggcktcacgccctgttagtgctgttgtccactgttgttatttgtgcaccatggtctgagttggcctgtttcttgtgagtcgtcttatccttaagtgtggtataa

SEQ ID NO: 321816 - DNA, 201 bp, Homo sapiens
tctaaacatgtagtagaattttgtaaaagtaactacatttctggcctcttctgatcaattcaacagacatttgtgaggtacctaccatacacagagtgctstctgagtcacctggggttgtggagggcggggtgtttacttccataatcatagaggaggctggcttcccacctatcagaagtttaccatccagtaaagacg

SEQ ID NO: 321817 - DNA, 201 bp, Homo sapiens
gctgctttgcctcactgatgacctttgctcccaaggataatggagtcaccttcctgactgctcagggctatgggatgggcacatgcatgccagtaaaaggsagagctcactgggggcttagaagacactggggccagggggttggttagagccctgcattccacagccgaatccatcagttgaacccttgaggagctgcct

SEQ ID NO: 321818 - DNA, 201 bp, Homo sapiens
gtggtgtgtctgatatgctgagcttttgttagcagcaagagagcgcgctctgcagccaggccatgtgggttttactcctggcaccatgtgtttctagttayatgacttgggcatgttacttggcctctctatgccttagtttccttgtctgtaaaataaggatgatgctaatagggcctacttcgtagggctgatgtgagg

SEQ ID NO: 321819 - DNA, 201 bp, Homo sapiens
gtggttggtttttgtgtgtgtgtggttggtttttttgtttctttctttctttttaagtgttgaggattttataagtatgatgggaagttttgaacaggggsatgagatgacctagtttactttgaaattatgaagagaaattacagattctgcttactcagaatcctatggttagtatatggaggagccgtgactcaaacc

SEQ ID NO: 321820 - DNA, 201 bp, Homo sapiens
caatatgttgtactgattgaccccaggtttctccactatgaagttactcttttagtcttttctctgtggtaggggtagtactctggggctatgttagaatwtcctgtttatcctcaaatttttgtatcatatagcagtggatttgtatagtgtcacatactatacaaataaatacagtatttattgtatcatataggactg

SEQ ID NO: 321821 - DNA, 201 bp, Homo sapiens
acccagctaattaatttttttttttttttttttgcagaaacaaaggtcttactatgttgcttaggctggtctccaactcctgggatcaagtgatccccccmacctcagcctcccaaagtgctgggattacagcatgagtcaccatgcctggcctatgtcactcctttttatgaaaaaaatatatatatttcactccttttt

SEQ ID NO: 321822 - DNA, 201 bp, Homo sapiens
gaatttacgtgcgaggggatgctacagagaatcaatgctttcattgaaaaacaggtaaggcttatcagaagtcagtctgtctttgctgtgtactgcttcckgtgacgccatagggctctcaagaacatttaagagctcactgtgtttctgtggctattttcctgctttgggagactctagaagctggataatagtagcact

SEQ ID NO: 321823 - DNA, 201 bp, Homo sapiens
ctgttcataaggaaaaggggatatctttgcattagataaaggggtagagaagtagttctatatgcttaggaaatatgtatatatgggatatctcaaaatarggaaaagttggagtgaagattaaaatagaaaataacaaaatgttaacacactaagactacacaagagaccatttggccagataaaagatatgtatgagcc

SEQ ID NO: 321824 - DNA, 201 bp, Homo sapiens
cagggcacattcttcctgggtgcatttaagaaccactgttgggcccttttaattctaatacagaaggtggcctattaaaaccaaaaccgaaaaaaaaaaaaaggaccctttactgtatcatctgtcatttatgtttctgctaggctcaaactagacttttgagagagcagtgttggaaccacagaaaggtctggatgtgtt

SEQ ID NO: 321825 - DNA, 201 bp, Homo sapiens
attagcaactgagttggccaggagtgtgtgccatgccgggctgggtgtacggagctgtcaagccaggcacctggggattaatttagcatgggttttcatgsccccgggctaccagtgaccatacagccatcatctctacctttgagttgatgtgtataactgaataatagtgctgtgttttcaaaaggaaaggcttaaaaa

SEQ ID NO: 321826 - DNA, 201 bp, Homo sapiens
atcaccataggttaattttgcctgttcttgagcatcatcaaaatgaaatcttacagtatgaacatttttgcagagtccggcctctttttctcagcatagcrttttcaagattgatccatggtgctgcatatgtcaatagtttattctttttaaaaaatcgcagagcagtactttgttgtatgaacataccataattggttt

SEQ ID NO: 321827 - DNA, 201 bp, Homo sapiens
tattagcaactgagttggccaggagtgtgtgccatgccgggctgggtgtacggagctgtcaagccaggcacctggggattaatttagcatgggttttcatscccccgggctaccagtgaccatacagccatcatctctacctttgagttgatgtgtataactgaataatagtgctgtgttttcaaaaggaaaggcttaaaa

SEQ ID NO: 321828 - DNA, 201 bp, Homo sapiens
atggaacactgtagtgacttcttatttggatatcaccactaatagtgaaattaatatgtgtatagtgctttatagattagaaaataattttgtatatagtrtttcactggaacactttaaatttgaagttcccaaattgatctttttgtgcctctgttatcaatatttagctcatcacgaaattcatgttttgtcaataat

SEQ ID NO: 321829 - DNA, 201 bp, Homo sapiens
gcgattttgcccccaggggacacatgtcaatgtcaggacacattttggttttcacaaatgaagaggtgctatttcctttttttttttttttttttttttttgagacagtctcgctctgttgctcaggccagaatgcagtggcactatcacagctctttgcagcctcgaccttccatgtccccaccccctgccgcctcagcc

SEQ ID NO: 321830 - DNA, 201 bp, Homo sapiens
ggcgattttgcccccaggggacacatgtcaatgtcaggacacattttggttttcacaaatgaagaggtgctatttcctttttttttttttttttttttttttgagacagtctcgctctgttgctcaggccagaatgcagtggcactatcacagctctttgcagcctcgaccttccatgtccccaccccctgccgcctcagc

SEQ ID NO: 321831 - DNA, 201 bp, Homo sapiens
tataaactgtctctaaattgggtaccatagcaattgaagaaggattccctaaatttattttctttagggggatagctctgtgtgtgtgtgtgtgtgtgtgtctgtgtgtctccttattttttctctctagctgtgttctgtgtagcttttatccagtatggcttatcttcacaaatttatcaccgagggttttttaatgtg

SEQ ID NO: 321832 - DNA, 201 bp, Homo sapiens
ggaaggtagttagtgtttctgttgggcggatggaacacattgtgttccttactgatgtgtgaccttgaacaagtcaccgatcatcttaaagcttacttccycttttgtaaaacagacaatataatatcatttaacctcataggcttgttgtaaggattacaaatgacaaagtttattaaggcacttagattaatttagatt

SEQ ID NO: 321833 - DNA, 201 bp, Homo sapiens
ttttttagtttgttttgtttttccactttttttttgtgtctctcttcctacaaatagggaaatatggtcaaggaataggaatggtttcttttttctttttyttttttttttttttttgagggctgggactgttgtgggataatgtggaaaaccactgttgccaaagtagaaatcccctgcccttgagggaaatacactgtt

SEQ ID NO: 321834 - DNA, 201 bp, Homo sapiens
actggttttagtttttttgtttgtttgtttctgagatggagtcttgcgttgttgcccaggctggagtgcagtggtgtgatcttggctcactgcaacacccrcctcctgggttcaagcctcagcctccagagtagctgggattacaggcgcacaccaccacgcctgcctaatttttgtgtttttagtagatacggggtttca

SEQ ID NO: 321835 - DNA, 201 bp, Homo sapiens
gctcagtggtaattttctcttgtttctctcagtctgtcaaaccttttccatgggcaagaagaagccccacaaatagcaaatttataggctttaaatttctscagttgttttggctgtttgtatttcttgtgtattgataaaaatctcacagggaaggcttccccacattttaaaggacaataatttggtcttagcttttca

SEQ ID NO: 321836 - DNA, 201 bp, Homo sapiens
tcaggaaccatgtgatctcatgtgggagtgagttcagggaatgctgaaaaatattctcatctttccctaaacaaaacttaattaaggctggtgggggtgargtgaagaggatggggaggaatgttctatggaagccagtaaacttagagccaattgtgttcctccctccagccaataaatatgacactggcacttgcatgc

SEQ ID NO: 321837 - DNA, 201 bp, Homo sapiens
ggaatgctgaaaaatattctcatctttccctaaacaaaacttaattaaggctggtgggggtgaggtgaagaggatggggaggaatgttctatggaagccartaaacttagagccaattgtgttcctccctccagccaataaatatgacactggcacttgcatgctggtgagttttaacctttggcttcttgaggttatgtt

SEQ ID NO: 321838 - DNA, 201 bp, Homo sapiens
ggcagagggaggttgcagtgaaccaagatcatgccactgcactcctgcctgggtgacacagcgagactccgtctcaaaaaaaaaaaaaaaagatttacaggttgagtatccctaatctgaaaatccaaaatgctccaaaatctgaaacttgctgagcaccaacatgacactaccatggaaaatttcacacataaaagtact

SEQ ID NO: 321839 - DNA, 201 bp, Homo sapiens
acatgaacctggcagagggaggttgcagtgaaccaagatcatgccactgcactcctgcctgggtgacacagcgagactccgtctcaaaaaaaaaaaaaaaagatttacaggttgagtatccctaatctgaaaatccaaaatgctccaaaatctgaaacttgctgagcaccaacatgacactaccatggaaaatttcacaca

SEQ ID NO: 321840 - DNA, 201 bp, Homo sapiens
atctggaatatcctcattagattctgggcttctgaaggcaaggtgaagtataagtaaaatatggccagttttctccagcagagttaagccttggcacttaygtacattcttgcagtgtctcttgcctccttgctaaggaaatcggttaagtaggcagaatagcaggagattaggggaaaagcaattcaatgtggttaaggt

SEQ ID NO: 321841 - DNA, 201 bp, Homo sapiens
actgtttcttttgtggaaacaaaaattcacactcacttctgggaaacaacctctggggccgtgtgtggacacagttcactgtgttttaagggaaagcacaygccgagaatggtcggtttcagcctggcacctgaggtgtgctaatccagtcagttactcaatatttatggaacacttcctgtgccaggccctggatttctc

SEQ ID NO: 321842 - DNA, 201 bp, Homo sapiens
aattagccaggcatgatgtgcacatctgtagtcccaactactcagaatgctgaggcaaggtgatctcttgagcccaggagtttgaggctgcagtgaactaygactgggcaacagagcaagaccctttggggaaaaaaaagaagaatggacacttcatgaattcagaattgtcatggtttgcacttggtttctttgaccaca

SEQ ID NO: 321843 - DNA, 201 bp, Homo sapiens
gacttgaatggaggaaatatggaaatgaatagagaaataaagcagtttgatacctttatcctattgagatgtgtctgagctggaaaatttgcaacaacaamaaaaaaaaatagttcctacactctgttttccagcgcctgcccacagtgaacttggatgcatgcttgcaagagggtccctttcttcccatgtgacaaaggc

SEQ ID NO: 321844 - DNA, 201 bp, Homo sapiens
tatacaaaaagaggagagtacctaaagattctagattccggaatgatacaccaaccaagaaaactccacaaagtgtagtgggtcaccttcgcaaattgctrggatactacctcattactgtaaaaagtaaagtgaaagaattcagctttgatcatgcctttctagcacaaattgtatttgaagataatcaaatagttgatg

SEQ ID NO: 321845 - DNA, 201 bp, Homo sapiens
acaagttatagcaagatttgcagaagaacaaagtaaatatttaagactttatttcaggatgcagttgggtcgaggcaaggagaagattagtagaagctgtmtctgatggtatctgaggttgaaacacagtgaacctcttggcagaagtgccagtcatttctcatcagtggttcacagaatcctaactctggggaggcagat

SEQ ID NO: 321846 - DNA, 201 bp, Homo sapiens
aagccaagcagaatatctgcctgtaagacttttcctttgaacctgtctttgtcagggtatcaggaaactttcccccatttccttacctgaatccaaccttygagagcttcctattatatcatcatgaaaattttgtatttttgttgtttttcatccctggcttttggatagccagtgagtttcattgttactctgtctggt

SEQ ID NO: 321847 - DNA, 201 bp, Homo sapiens
aagtgactaaatcagtcaaccattagcataggtttgtttactgagcaattctctgagggttcctgaatgataggctactgatatgagtaagacctggtacsagctgtggaggcccttagtgatctaataaggctgatggcaaataatgaccatctctgtcacaaatgctgtaatataggcctgtgggaattaatgaggaag

SEQ ID NO: 321848 - DNA, 201 bp, Homo sapiens
aagccacaaacgctatctgacatcatctttttaaggatgttatcaagcagataactggttttagtttttttgtttgtttgtttctgagatggagtcttgcrttgttgcccaggctggagtgcagtggtgtgatcttggctcactgcaacacccgcctcctgggttcaagcctcagcctccagagtagctgggattacaggc

SEQ ID NO: 321849 - DNA, 201 bp, Homo sapiens
ttgctcatttgagagctgtttgtttcagtacttggagttattgccaatgctggctttcttccaatcctggtaatcctccgaggtttcccagagaaagaaaygctttgttttgtttttcccttctccccatgggataattggtttatgtataatttaattattttgttaaccagttatcctatcacagcatacaaaaacaac

SEQ ID NO: 321850 - DNA, 201 bp, Homo sapiens
agccattaacatactcacctgagcatttaattttctgcttattatttaaacaatacacaatttaatgaactttgtatttttcttataaaacgccaaatgcytccaatttaaatcaagcactgaaaggagagtattagtcaagtactttattactaatctagctattgaactgtacttcattgaaagatttgcttttgaaat

SEQ ID NO: 321851 - DNA, 201 bp, Homo sapiens
actttatataagggacttgagtatccttggattttggtgtccacaggggtcctggaacaaatccaccagataccaaagatggctgtagactgttggagtcrattgccaataaatggaagaagctgagccttcaagccaaggctccacatgaccacagtggcccatttctccctgctttgcctgcacagagtgctgtaatct

SEQ ID NO: 321852 - DNA, 201 bp, Homo sapiens
gcacagagtgctgtaatctttgactcacaaagtagtgctggtgaatcccagctctggttctctggtaggagtggagcattccccagccccacaaatcagcrtgggtcctgtcctctcctcccactttttgcagtgacctgcagagctgccaccgttaacactgccagcttttgcagaagaatatatagtggctcaaaccac

SEQ ID NO: 321853 - DNA, 201 bp, Homo sapiens
gatggattcaaagttttatctatctccttatctcctgccctgtcttggcacaactctggatagattgcaggtgtggaatttgctggagtttggtgacttcstcaaattcctttggattctgttccgccaaatcagcagtctcgtcctgtggatgcagtgactggaatttcccatctgcaaagcatctctgtagcccagatt

SEQ ID NO: 321854 - DNA, 201 bp, Homo sapiens
caagagctataaactgtaaactgagacctgatgggcccagaaactttaactaccatcctgtaagaaactaggaagaaaggaaaggaagatggcacactgcrgtggggtctctgagcaggaggatgtgcttgtttgtgagacagacactgcagggacagagaggcagacatagcaccatgcactgcctggaaaggcagggac

SEQ ID NO: 321855 - DNA, 201 bp, Homo sapiens
aaccatggtatcctcagtggacgggacctgcagttccttcttcgagaaaccaaggtaaaaattcaccacggatgtggtgttcaggttattgccattggctrtgaaaatgggatcagaatatttcatgcttgtttttcaatgctgcaataaactcttgtggctattttggggcagcagtttgctagaccaatggcagctgaa

SEQ ID NO: 321856 - DNA, 201 bp, Homo sapiens
aaaaaccatggtatcctcagtggacgggacctgcagttccttcttcgagaaaccaaggtaaaaattcaccacggatgtggtgttcaggttattgccattgsctgtgaaaatgggatcagaatatttcatgcttgtttttcaatgctgcaataaactcttgtggctattttggggcagcagtttgctagaccaatggcagct

SEQ ID NO: 321857 - DNA, 201 bp, Homo sapiens
tcagtattatggaatcaagaactgtgctgtcccatacccaacagctataccaggcactatgatgccttgtttctcctcacaatgagtgtttttatttaaaaggaatgaaacattcagctgaatatggtcagcctttttacttaaaattgacattatgaaggaggagcgaagcctgagtgtgtttacgtatgcccacatata

SEQ ID NO: 321858 - DNA, 201 bp, Homo sapiens
tgtagaaatactcattgatggagctggagttgcagccatggagatattttgtcatctggaatatcctcattagattctgggcttctgaaggcaaggtgaartataagtaaaatatggccagttttctccagcagagttaagccttggcacttacgtacattcttgcagtgtctcttgcctccttgctaaggaaatcggtta

SEQ ID NO: 321859 - DNA, 201 bp, Homo sapiens
actgcagccattgccattgcctctgggcactggttcaaaaacgcagaaatgaaataacagattggccagactgaacacaactccccagccacaaccctgtkatctcctcattctgtcacccccatcaggcaaaagcctgggaaacggagggtgacaacacagtttttacatggctcgtgcatttccacagctcagggcttc

SEQ ID NO: 321860 - DNA, 201 bp, Homo sapiens
tttttgtgaatttcctgttctttttatccttggcttcaagtttttattgatggaaggttaaatattctttttttttcctttgtagcatatgactaaacctrtggttcttttgcttcctctttttttccccttgtcttgtttttccctttcaccccaggaattaattatagtacttgaaagaaaaccactttccttagtctt

SEQ ID NO: 321861 - DNA, 201 bp, Homo sapiens
cagcagcactcgcctcctgtccagcgcatcctgtcctgtgcattataggtctgtgtcaggaagggactggtgacttctcagcccagtgcctgtgacttcartcacagcgtggccagccccattggagggaggctttgcctttttttattcttcaagagctataaactgtaaactgagacctgatgggcccagaaactttaa

SEQ ID NO: 321862 - DNA, 201 bp, Homo sapiens
cgcatgattcaggtgcgacccacatcctctggacaagtctcctcccagactggggtggagactggaagatgcaggctccaggaagtgccagggtccattccagtggggcccagtggagaggacctcagttccatacacaggaacatgtgttcctgcccagtttctaattttgctacctcttaaagttgtttcttctacaat

SEQ ID NO: 321863 - DNA, 201 bp, Homo sapiens
cccttcgtagggagagtgtgtggcctcttgtgtcctgcctgctgcagggaagctctcatgagtaggggtgtaagctatgtttttttttgttgttgttgttktttttgagacagggtctctctcttttgcctaggctggagtgcagtggcgcgatcttggcttactgtaacctccacctcctgggttcaagcaattctcacg

SEQ ID NO: 321864 - DNA, 201 bp, Homo sapiens
tgtggcgttcagatccctgctacgcagactatggagtggatggatccacctgctctttttttatttacctcagtgaggtgagtagctttctgtggctcctsggggtagatgtgactggttggactgttctgtagctgagtctgaaatttgaaaagcttgaaaacgtgtggtatttttatgtggaggacctatggttccgtc

SEQ ID NO: 321865 - DNA, 201 bp, Homo sapiens
catcctatcacatgctacttagacttctatttctccagttcttgaatatacgaaatgttgtacagaagatcctcaaataatgtcattttgctataatgttkagaatgaagaaagttgattcctggtcgggcccactgtctgtgtggagtcagcccattctccctgtgtcttcatgggttttctccagggtctctggttttc

SEQ ID NO: 321866 - DNA, 201 bp, Homo sapiens
acggcaacctctgcctcccgggttcaagcaattctcctgtcttagcctcctgggtagctgggattacaggcgcgcgccaccatgcctagcaatttttttgkatttttagtagagatgggattttaccacattggtcaggctggtctcaaactcctccactcaggtgatccaaccaccttggcctcccaaagtgctgggatt

SEQ ID NO: 321867 - DNA, 201 bp, Homo sapiens
gcagtttgggaggcggacacaggagaatcatttgaggccaggagtttgagacccacctgggcaacatacagagaccgtgtgtatacaaaaaaaaaaaaaaattgtttttaattagccaggcatgatgtgcacatctgtagtcccaactactcagaatgctgaggcaaggtgatctcttgagcccaggagtttgaggctgca

SEQ ID NO: 321868 - DNA, 201 bp, Homo sapiens
ggcagtttgggaggcggacacaggagaatcatttgaggccaggagtttgagacccacctgggcaacatacagagaccgtgtgtatacaaaaaaaaaaaaaaattgtttttaattagccaggcatgatgtgcacatctgtagtcccaactactcagaatgctgaggcaaggtgatctcttgagcccaggagtttgaggctgc

SEQ ID NO: 321869 - DNA, 201 bp, Homo sapiens
gaattgcttgaacccaggaggcagaggttgcagtgagctggatcatactactgcattccagctggggtgacaaagcaaaactctgtttcaaaaaaaaaaaataaaaaactagattctctaagcccacgtgaaagccctgcaggccatttgaaagtttcgtgggcagtggacaattcttcctgtgcaggactgtccttggac

SEQ ID NO: 321870 - DNA, 201 bp, Homo sapiens
gctcttggtgtggcaggatacaaagaacagtggctaagggaaagacggaggggtgccagttaattcctctagccctgtgagtatcctgaggaaaagaggagagccagcttgacctccaaagcaaaggcctgaggagaagagaagagccagcttgacctccaaagcaaaggcctcagcactggcaaacccaatatttcctat

SEQ ID NO: 321871 - DNA, 201 bp, Homo sapiens
tgctcttggtgtggcaggatacaaagaacagtggctaagggaaagacggaggggtgccagttaattcctctagccctgtgagtatcctgaggaaaagaggagagccagcttgacctccaaagcaaaggcctgaggagaagagaagagccagcttgacctccaaagcaaaggcctcagcactggcaaacccaatatttccta

SEQ ID NO: 321872 - DNA, 201 bp, Homo sapiens
gtcgtcttcctgatgctttctgccctcctgtgacaggctggcctggctgcatcctgggcctgctgtacagttgtcgtaggactgtttccaaagcccctttycccctttggtgctgggtcttttatttcttagattccacattttcccctttgttggtttcttgcctcatcctgtaatagttttctgagagaagaaggtaaa

SEQ ID NO: 321873 - DNA, 201 bp, Homo sapiens
gatgagaagctgtcagaggcaaaatacgaaatatttgaaccaaccattgataggaaaagcaaaaaacaggaatgatgtcagagaagttagaagaaatgtcrtttaaacaagagactacatagaaaaaaatcaaatgttggcattaaaatttccggtagtcagaacatgcaaatgggttggtgtatcaaattaagaattaca

SEQ ID NO: 321874 - DNA, 201 bp, Homo sapiens
catgggcaagaagaagccccacaaatagcaaatttataggctttaaatttctccagttgttttggctgtttgtatttcttgtgtattgataaaaatctcayagggaaggcttccccacattttaaaggacaataatttggtcttagcttttcagcctcacagaaatattattttttaagttacaaaaaaatcccagaatag

SEQ ID NO: 321875 - DNA, 201 bp, Homo sapiens
aaaccttttccatgggcaagaagaagccccacaaatagcaaatttataggctttaaatttctccagttgttttggctgtttgtatttcttgtgtattgatraaaatctcacagggaaggcttccccacattttaaaggacaataatttggtcttagcttttcagcctcacagaaatattattttttaagttacaaaaaaat

SEQ ID NO: 321876 - DNA, 201 bp, Homo sapiens
ctcagtcattaagaccctttctttcatgcagcaccactacttcaagtctggattgaggagggattgcacgcacatgtgtgaggttggagtctcaatctcartgtgattgtcattgccatgttcaaacgatgaggcttagaatgtcccttgtcttacctgatggtcatagctctctatgaccctctgcttcttcccagctgt

SEQ ID NO: 321877 - DNA, 201 bp, Homo sapiens
ggtgatccgcctgcctcggcctcccaaagtgctaggattacaggcgtgagccgccgcgccagcctgttatttctttaaagttgtgataaaactgttaacaktttttggaggtttaacagtaaaatacaaaggtgcaaaataatttcattgcccggaaaggtataatttattgagccttatttgtgagagtactatagtttg

SEQ ID NO: 321878 - DNA, 201 bp, Homo sapiens
atgctcttggtgtggcaggatacaaagaacagtggctaagggaaagacggaggggtgccagttaattcctctagccctgtgagtatcctgaggaaaagaggagagccagcttgacctccaaagcaaaggcctgaggagaagagaagagccagcttgacctccaaagcaaaggcctcagcactggcaaacccaatatttcct

SEQ ID NO: 321879 - DNA, 201 bp, Homo sapiens
caaaaaaatcccagaataggctgttagaatttcagccaccttatatgcctgtaatcataagactttgcatctcaaagaaactatagaaattatttattccwacttactttcgtagatgaaccttagcaaaataatttgtctttttctcaaaaacaacaaagaaacaatcaaacaggtcacatcagcaactctaactgacac

SEQ ID NO: 321880 - DNA, 201 bp, Homo sapiens
gaagttcaataagatctatgtttatctataaaaggttaatccgtggcccagataacctttgacaagggttgtgcacacacttgtgtgtgtgtgtgtgtttkttttttttttccttctgctagaataataaatttgaattcttcatttggggagtggttttgtattaagaggtcagtttgttcatttataagtcggcaatac

SEQ ID NO: 321881 - DNA, 201 bp, Homo sapiens
cctcctgtccagcgcatcctgtcctgtgcattataggtctgtgtcaggaagggactggtgacttctcagcccagtgcctgtgacttcagtcacagcgtggycagccccattggagggaggctttgcctttttttattcttcaagagctataaactgtaaactgagacctgatgggcccagaaactttaactaccatcctgt

SEQ ID NO: 321882 - DNA, 201 bp, Homo sapiens
tagaagttcaataagatctatgtttatctataaaaggttaatccgtggcccagataacctttgacaagggttgtgcacacacttgtgtgtgtgtgtgtgttttttttttttttccttctgctagaataataaatttgaattcttcatttggggagtggttttgtattaagaggtcagtttgttcatttataagtcggcaat

SEQ ID NO: 321883 - DNA, 201 bp, Homo sapiens
cttatgcagaaaccagatgttgacctcaccctatagttcactgctttctctatgggaggaaggaagttttttccttaaggaggcacacacgccggttggasaaccagcatagggcttttggttgctggttgggggcagtggagaggtaactgctttggacttccgattggccctcattggcttgggatgctatgtctaaga

SEQ ID NO: 321884 - DNA, 201 bp, Homo sapiens
atagaagttcaataagatctatgtttatctataaaaggttaatccgtggcccagataacctttgacaagggttgtgcacacacttgtgtgtgtgtgtgtgttttttttttttttccttctgctagaataataaatttgaattcttcatttggggagtggttttgtattaagaggtcagtttgttcatttataagtcggcaa

SEQ ID NO: 321885 - DNA, 201 bp, Homo sapiens
tctgtgtgccaagccacacatcagtgaacaaaacaaaaaaaaattcttacccttaccaaaattcagccctaaacattccatcagagaacccttcttactgyggcccacagatcaaatagtttaccatgcttttattcagtagtcgtcttcctgatgctttctgccctcctgtgacaggctggcctggctgcatcctgggcc

SEQ ID NO: 321886 - DNA, 201 bp, Homo sapiens
aagattgctctgaaaggttagcagctgccctgtgttgcagatccagataacgttctgagattcgaatgagagcttttgcaagtgtttccttccacctctcytgtgaaaaaggaacaaaaacaggttggatttcattaaagatgcaagcatgtaaagggttttttagtttgttttgtttttccactttttttttgtgtctct

SEQ ID NO: 321887 - DNA, 201 bp, Homo sapiens
ggcacttttctcctcagtcagaaagatctggactccctgtgctatcttatgcccaaccacggcctgacagaggtcatttgttttccactggagagccggcrcatcctctccaaagtctgataggagagggcaaatcagagatcacaagtctggtagataacaaccctggattcttcatattccataaagctgggatgtcgt

SEQ ID NO: 321888 - DNA, 201 bp, Homo sapiens
ctgactaaacctgcagaaatcctgatctgcgtcttctggcacttttctcctcagtcagaaagatctggactccctgtgctatcttatgcccaaccacggcytgacagaggtcatttgttttccactggagagccggcacatcctctccaaagtctgataggagagggcaaatcagagatcacaagtctggtagataacaac

SEQ ID NO: 321889 - DNA, 201 bp, Homo sapiens
tgtctggtctccatgtgctctagcgattggggaaagctgctttgcctcactgatgacctttgctcccaaggataatggagtcaccttcctgactgctcagrgctatgggatgggcacatgcatgccagtaaaaggcagagctcactgggggcttagaagacactggggccagggggttggttagagccctgcattccacag

SEQ ID NO: 321890 - DNA, 201 bp, Homo sapiens
atgttcaaggtaggggagagaggttgagcaggtggacttctagggcataatctcagttgtccaatcattatgtgatacttcatttataaaaagtgtattcrcatatgctatcctctttgattctcacaacagcattaagaggtagatagagcaggtattattgttaactttattttgaacatgaggaaataggctacagag

SEQ ID NO: 321891 - DNA, 201 bp, Homo sapiens
gaaagatcactctaaaattaatttaaaaatatataattgatgaaacttgacattcctgacagtcaatggaaataagaggttgaggttaattcttttttcawtagcaccttcctttctcattaacgccctgtctttgccagtttctccagagcagcaagtgaagctgctctgtggctctgttgttcatgctctgcctctcgg

SEQ ID NO: 321892 - DNA, 201 bp, Homo sapiens
caaaattcagtgcctacaaatacaagaaaaggggtttggttgtgcttctaatagtataagtaaaattactcttgaatgtttcagggctcatcaaaatttayatttattctcttttttctacttttatctacctgagtattctcattatctctccagctgtgagaaactctcatcttcccatgatcccaaattaggtgggat

SEQ ID NO: 321893 - DNA, 201 bp, Homo sapiens
acctcagaaatgttttagacaggaggagtaaactcagaataaggggctcattcttctacccctcagtcattaagaccctttctttcatgcagcaccactasttcaagtctggattgaggagggattgcacgcacatgtgtgaggttggagtctcaatctcaatgtgattgtcattgccatgttcaaacgatgaggcttaga

SEQ ID NO: 321894 - DNA, 201 bp, Homo sapiens
ccattgcccaagatgaatcctaatttataccagatgagctcaagccaagactaaatgtggaggccagtacatgaaaggaagcagactcccctctttttagkgcctgtgggccaataggtggaccacagcctgggctggaaacaagacagcaagcttccccttattgtgccactgcaatcattgagcaccatctttttctcc

SEQ ID NO: 321895 - DNA, 201 bp, Homo sapiens
acagagttaccacaggacagggacatgagtgagtcttaagagtgattggtatatgttgttacacaaacacatggcaaaatcccagaggttattccctaacmagtagattcagggggagcaagtcagagatgcttgctggtggacaggtccattgtagttcttaagaggtggtgaagcatggtgggtaagagccatcagccc

SEQ ID NO: 321896 - DNA, 201 bp, Homo sapiens
tgtttttgatagattgagctccttgaggagatgataatggctgacattttagtgcttcctgtgttccaggcatggccttcacaatgactatgaagtaaatrctattattaaccccacttttgagtgaaagaactgaagcagatagaggtaaaggttcctcaggtggtcaggatttgaattacatcatgtattgtagccaac

SEQ ID NO: 321897 - DNA, 201 bp, Homo sapiens
attggcttgggatgctatgtctaagatgttaataccatttagggctgccgaagattgctctgaaaggttagcagctgccctgtgttgcagatccagataaygttctgagattcgaatgagagcttttgcaagtgtttccttccacctctcttgtgaaaaaggaacaaaaacaggttggatttcattaaagatgcaagcatg

SEQ ID NO: 321898 - DNA, 201 bp, Homo sapiens
agccaggccaagttcacaagcacgcccaggccagtcaaaaggtctgaggaagacctcagaaatgttttagacaggaggagtaaactcagaataaggggctyattcttctacccctcagtcattaagaccctttctttcatgcagcaccactacttcaagtctggattgaggagggattgcacgcacatgtgtgaggttgga

SEQ ID NO: 321899 - DNA, 201 bp, Homo sapiens
catttgttcacttacgtaacacatgcttaatgtgcctagcactgtataatgatacagatatgggcttggcgtcatctctgtcattgtgttttttattaacmacatccttaatcttgggttggctgctttgaaatggtgactcaggtagctgcttgagttgaaaatgaacttttttctttcatattgggagagaaaacatgc

SEQ ID NO: 321900 - DNA, 201 bp, Homo sapiens
ctgtgggctttatttctgcccacctatcggccacgaggccaatgacatatctttgatgatactgtgaaaactcccactgtgatgagagcatattccgtgasagccacacaagaatctaagacagggaaattcctcctgtagttagcttgtatttgacttgtggtggtggcctgcctgcctttcttttcttcacttcctggc

SEQ ID NO: 321901 - DNA, 201 bp, Homo sapiens
cctttaattaaaaagttaaacatacttaaagaacgtaaatgatgctgagctttgccccactctcacttcttggaagcagccattgctaaggcattagcacrtagccgtctcgacttgcagccttcacctcccgtgtgcacactgcgggctggttcccctgtgcttcccattctgggactcacctttccccaggatgactct

SEQ ID NO: 321902 - DNA, 201 bp, Homo sapiens
taaagaacgtaaatgatgctgagctttgccccactctcacttcttggaagcagccattgctaaggcattagcacatagccgtctcgacttgcagccttcamctcccgtgtgcacactgcgggctggttcccctgtgcttcccattctgggactcacctttccccaggatgactctcctgctcctctcttctccctcattct

SEQ ID NO: 321903 - DNA, 201 bp, Homo sapiens
tgatgaaacttgacattcctgacagtcaatggaaataagaggttgaggttaattcttttttcaatagcaccttcctttctcattaacgccctgtctttgcyagtttctccagagcagcaagtgaagctgctctgtggctctgttgttcatgctctgcctctcgggcagccatggtgaaagggatttgattcatgagcaggc

SEQ ID NO: 321904 - DNA, 201 bp, Homo sapiens
ttactttcccaggcatttagtctgggaaccctaatcttgagtctgtctacagtggatatttttctccaggacaggaaccaaatgggccagttactggtctrccctgtagctcaccacagacatagcctaggggcctttggcccatcttcactagttggcaactggctttttaggcgaaatgcctccttttgcataaaggag

SEQ ID NO: 321905 - DNA, 201 bp, Homo sapiens
gatgaaacttgacattcctgacagtcaatggaaataagaggttgaggttaattcttttttcaatagcaccttcctttctcattaacgccctgtctttgccrgtttctccagagcagcaagtgaagctgctctgtggctctgttgttcatgctctgcctctcgggcagccatggtgaaagggatttgattcatgagcaggca

SEQ ID NO: 321906 - DNA, 201 bp, Homo sapiens
acaggactgtgtgactaattcgacatgtgtgtccatggagcttgaaggggacagaaccacaggtgcaaaactggtgtaggtacttggctgggagtttggtrtgagaggcttctggggcacctttacctggaataggcagcgtggttcatctgcaccaggattctactcagaactcttacaagtggtaacaagagacctgag

SEQ ID NO: 321907 - DNA, 201 bp, Homo sapiens
gatttgattcatgagcaggcacagatgtaaataatttttggcatttcagatgtaagaccttgctcattgcgtagttggttctgtgccatagtatcatggckgccgtaccttcacagtagatctcaaccttggctgtgccctaatccttgacggactctgcagatccggatttagtgtgttgaagatgcaacctggtaactg

SEQ ID NO: 321908 - DNA, 201 bp, Homo sapiens
gggcttggcgtcatctctgtcattgtgttttttattaacaacatccttaatcttgggttggctgctttgaaatggtgactcaggtagctgcttgagttgamaatgaacttttttctttcatattgggagagaaaacatgcctacctaggtaaagtgcttagagaattcaaggtttttagtaggcttatattccgtcttcat

SEQ ID NO: 321909 - DNA, 201 bp, Homo sapiens
ggtagctgcttgagttgaaaatgaacttttttctttcatattgggagagaaaacatgcctacctaggtaaagtgcttagagaattcaaggtttttagtagscttatattccgtcttcattttaagggagaagataaagaaagagtcttaattttaaaaaaatcttggatcacttgatgtatctggtagtctccagtgtcag

SEQ ID NO: 321910 - DNA, 201 bp, Homo sapiens
gtgtcagctggtggatgtttagtgatactgggtcgggtggacagagttaccacaggacagggacatgagtgagtcttaagagtgattggtatatgttgttmcacaaacacatggcaaaatcccagaggttattccctaacaagtagattcagggggagcaagtcagagatgcttgctggtggacaggtccattgtagttct

SEQ ID NO: 321911 - DNA, 201 bp, Homo sapiens
tccatctcaaaaataaaaaataaaaataaaaaataaaaagttatgtatgatatatatatatatatatatatatatatatatttttttttttttttttttttttaccaaaccagcacagaaactagatttcatagagtattggttaagaactgtgttccaatcctggttctatcggctaacttattagaggactagaggacc

SEQ ID NO: 321912 - DNA, 201 bp, Homo sapiens
cagctggtggatgtttagtgatactgggtcgggtggacagagttaccacaggacagggacatgagtgagtcttaagagtgattggtatatgttgttacacraacacatggcaaaatcccagaggttattccctaacaagtagattcagggggagcaagtcagagatgcttgctggtggacaggtccattgtagttcttaag

SEQ ID NO: 321913 - DNA, 201 bp, Homo sapiens
atagtttttaatgccaccaaaattcgaggtagtaaggtaagtatggtttttaaaaggtacacacgtaaggttggatatttataaatacatacgaaacatayatagggcatgacaattaaaaaatgaaaagttttgacaatatgacactagggaaacataaagccactgaagataatattgggtatttttgggaggaggaag

SEQ ID NO: 321914 - DNA, 201 bp, Homo sapiens
atatgttgttacacaaacacatggcaaaatcccagaggttattccctaacaagtagattcagggggagcaagtcagagatgcttgctggtggacaggtccrttgtagttcttaagaggtggtgaagcatggtgggtaagagccatcagccctggaaccagactgggtttgagtcctggatctgtaatcacctctgctaagt

SEQ ID NO: 321915 - DNA, 201 bp, Homo sapiens
ctatgcattaaacagcaatagcagcaaaacctgcctcataataaccagcaaaaaatcaagcagatatcaaataagcattaaaaatttcaggtcagcatttwtgtcaagacagcatgtatataccacaatatatattaaatccaaagagaaggaagaataaaagtgtgactagaatgtccttagtcacttaatccttcttgt

SEQ ID NO: 321916 - DNA, 201 bp, Homo sapiens
gaaactggaatattggatgagacaaggaaaattgactaaaaacaacacccagattatacgctgcatgttgttgcctgcagctcacattagaacccccccayccccgcaactcccccaccatcacactgctctgaggtcagcccctgggtctttgtgcttgaaccaggactgctcttgttagggtgaccacgattttctggg

SEQ ID NO: 321917 - DNA, 201 bp, Homo sapiens
catagcaagacctgtctggtaggtaggtaggtaggtagagaaatagacagaccagacagacagacagaccagacagacagacagacagacagacagacagatagatagatagatagatagatagatagatagcactccagcctgggcaacatagcaagacctgtctctaaaatagatagacagacagacagacaaacagga

SEQ ID NO: 321918 - DNA, 201 bp, Homo sapiens
tgcatgttgttgcctgcagctcacattagaacccccccatccccgcaactcccccaccatcacactgctctgaggtcagcccctgggtctttgtgcttgarccaggactgctcttgttagggtgaccacgattttctggggacccaggacaaagtgaagagcctgaggattaggattcagtgctttgggtgaatggttgtg

SEQ ID NO: 321919 - DNA, 201 bp, Homo sapiens
acatagcaagacctgtctggtaggtaggtaggtaggtagagaaatagacagaccagacagacagacagaccagacagacagacagacagacagacagacagatagatagatagatagatagatagatagatagcactccagcctgggcaacatagcaagacctgtctctaaaatagatagacagacagacagacaaacagg

SEQ ID NO: 321920 - DNA, 201 bp, Homo sapiens
aggaagtagaggatgcagtgaaagcaattttaaatcagaaggttggttcattttattccactttccctcctttctaatgtgacctgaaatgtgtataaaayacatcataggtccttgtttttagcaaacagatctttaccacatcagcttaactctggaattagaaaataaccaagctgcaggatttggcctgtggatttc

SEQ ID NO: 321921 - DNA, 201 bp, Homo sapiens
ggactgttgacctcaacaatcaggaggaagtagaggatgcagtgaaagcaattttaaatcagaaggttggttcattttattccactttccctcctttctartgtgacctgaaatgtgtataaaacacatcataggtccttgtttttagcaaacagatctttaccacatcagcttaactctggaattagaaaataaccaagc

SEQ ID NO: 321922 - DNA, 201 bp, Homo sapiens
ttgcacgcacatgtgtgaggttggagtctcaatctcaatgtgattgtcattgccatgttcaaacgatgaggcttagaatgtcccttgtcttacctgatggycatagctctctatgaccctctgcttcttcccagctgtgtcctggtgctcttttgctgtcagaagtgcttgagcagacctcttgctgctgtggacacccta

SEQ ID NO: 321923 - DNA, 201 bp, Homo sapiens
gctctctatgaccctctgcttcttcccagctgtgtcctggtgctcttttgctgtcagaagtgcttgagcagacctcttgctgctgtggacaccctaaaaasctccgcaccccctcaagtctactaaggcatggtggctctcttctaggacaagactgttgggtggtggctgagcattcgcctgtctttgagcgtctgcatt

SEQ ID NO: 321924 - DNA, 201 bp, Homo sapiens
agttagattggaatctttatttggttgtcgattttatccactgaacagtgtgtgtttcctgaccatctgtgggatgtctaagtctctgttctccagaagcktactttcggtggagtcaggaggtacgcaaaaataagactttctcatacttccactttaaaaattacagacccaggtgaatggagtagggaaaatttgaat

SEQ ID NO: 321925 - DNA, 201 bp, Homo sapiens
ccctctgcttcttcccagctgtgtcctggtgctcttttgctgtcagaagtgcttgagcagacctcttgctgctgtggacaccctaaaaagctccgcacccyctcaagtctactaaggcatggtggctctcttctaggacaagactgttgggtggtggctgagcattcgcctgtctttgagcgtctgcatttgctctccccc

SEQ ID NO: 321926 - DNA, 201 bp, Homo sapiens
cccaaagaggccttcacttgttcctaaagaacttttatgcagaaaactgcccgctctcccagcccccagtccacattaacagctgtcacttcagaggctgycaggactctgaagagctttccaatgcagaagcccctgcctgccctcacccacagggtccagcaatatagacctaccttctgactcaccgacttccttcct

SEQ ID NO: 321927 - DNA, 201 bp, Homo sapiens
tgggaggcagagcccatagcagggttctcatcttttataattcttctctgtctgtgctttaccttccccagggtcagatctacttgacaaggcactcaggrgtagaagtgtctatcaaacccgagaggcagaatacagttaagagcatgggctttagagacagaccggaatttgtttccaagctgtgccatttactctctc

SEQ ID NO: 321928 - DNA, 201 bp, Homo sapiens
gtcctggtgctcttttgctgtcagaagtgcttgagcagacctcttgctgctgtggacaccctaaaaagctccgcaccccctcaagtctactaaggcatggyggctctcttctaggacaagactgttgggtggtggctgagcattcgcctgtctttgagcgtctgcatttgctctcccccaccccttcctctcttccttctt

SEQ ID NO: 321929 - DNA, 201 bp, Homo sapiens
acaagattagggcccaccctaattcagtgtgacctcatctaacttgtttacatctacaaagaccctatttccaaataagatcacattcacgggtgctgggrgttaggacagcatatcttgtaaaggggtacaattcaatccacaacacttagttaatgcttgtactcttgaggagagtaatttaaaagctgaggtagaagc

SEQ ID NO: 321930 - DNA, 201 bp, Homo sapiens
attccaagagccatgatccaggaaccttaaggatttattttaatgggtgttggctgcatgctgactataacataaccccatgtggcatcccctgtgtaagygtgtcagtgtttgctaagtgtatgtgagtaggaataagtgtggaactaggagcccatgggacccgggggtagccttacccgatgtcatcaccctactggt

SEQ ID NO: 321931 - DNA, 201 bp, Homo sapiens
ttggcggctgaggggttgtcctggtgtggaatttgggggagagaggcgtggtcagaaaagggtcctcccaggagatgatgcctgagtggacttttaatggkgagcacttgaggctggcccaactgaacatgttcagcatctacaggtttaaatttatgcaaatattcttttactcccctatctccaagttaataaatttac

SEQ ID NO: 321932 - DNA, 201 bp, Homo sapiens
cagtccagcaaaccccaggagtgcagtttaagccagcaaatcaggactcactagggtggcatgtttttatttttggtttaaatctccatctcttttaaagwggcttctttcttcatcttcctggatttaacctcttcatgtccacctccctcagtctcccctgtttcatatatgatactgaatagtgcatttgcatctgca

SEQ ID NO: 321933 - DNA, 201 bp, Homo sapiens
ggtaccatgctgtgggctgttggaactggagttcctggagggggtgtagatatcagagtcccattaggcacttgatcttgataaaaatccctaagccaccrcctctcctgggctttattgcctgctgtaccacgaccttactctccactctaagcgcttctgctgaggcctaacgtaagccagtgtcttcctgttaatcgt

SEQ ID NO: 321934 - DNA, 201 bp, Homo sapiens
gtgcaaacaactgagtggcttaaaacagcagaaatttattctctctgttctggaagcaagaagtctgaagtcaaaatgtcagcagggtcatggcccacccycgaagtctctagctagatatcctcccttgcctctttcagcttctggtaggcctaggcatttcttggcttgcagcctcaaaggtttgatctctgcctccat

SEQ ID NO: 321935 - DNA, 201 bp, Homo sapiens
accattttcaggtcaagaaggtggtgggtaggattccaacttacaagggacgtgaaggacctcttcaaggagaactacaaaccactgctcaatgaaataaragaggatacaaacaaatggaagaacattccatgctcatgggtaggaagaatcaatatcatgaaaaggaagaatcaatatcatgaaaatggccgtactgcc

SEQ ID NO: 321936 - DNA, 201 bp, Homo sapiens
tggattccatagaccgtttagacatgaccatggatcccaggcacaggagcaggaactggagtcatacttggttcagtgacctgattatgttgctctcacaragatctgaaaagatagccctgcttcctctacaaaagagggagaagtgcaaggaaatgctgaggaatgtttttatagaacatctgtttgtttgtttgttct

SEQ ID NO: 321937 - DNA, 201 bp, Homo sapiens
tggcaagagaagcagggctgacctcctcaagagagttagagacatagagagatgattgatgcttgatcagcttctgactcattatttttctttacaagccrtctttgaatctctgcaccaatcttaggaaaccctctgctcagcagaattttgtccaggcatgccattaggggtgcaggcgtcattagtagcctcttgctt

SEQ ID NO: 321938 - DNA, 201 bp, Homo sapiens
tttcccttttcctagcaaggctgttcacaagcccccccacccccgccgcccgccaatctccacctcatttagctttgccactggtcttggaggcctccaargaaagagattttagaaactcccagaagactattttaggatcctgcccttaaggaactcctttcctggcccacagtgtgcttttggcaatgtacattttac

SEQ ID NO: 321939 - DNA, 201 bp, Homo sapiens
gccactgactttgtggaagttggtctcactggctttgcagtctttgtaggtatgtgcatttctgcacacaaacaaattccaattagaggatggtcaaagcmaacaccagatttttagttttagattgttcagtatagactaaaaattttataggtgttcacaggcaccctggaagtacctgtgcgagctggagtactcttg

SEQ ID NO: 321940 - DNA, 201 bp, Homo sapiens
cctattgctgagaggagctgttgggctccctgaagcaataatagactatattgctggtgattttctctcaaatgaaatttccattttagattggtaatacmcctgaaaacacaggcctcatagtgttggcagacactgtgcagcagagatcaaacccacatttcttccccttctccaaggtgtcacaatattgataagatt

SEQ ID NO: 321941 - DNA, 201 bp, Homo sapiens
tctacacatgtatatagactgaagagtgtacagaggtatgagtcagtaacctgtctgactttcagagcaaaagtgcatccctacactcaaataaatacaayacgttcaacttctgtgcacagagacacttgattgctggaaagatccagtctcatagtatttattcttttactgtttcatccagcaagtaagtataatatt

SEQ ID NO: 321942 - DNA, 201 bp, Homo sapiens
ttcccttttcctagcaaggctgttcacaagcccccccacccccgccgcccgccaatctccacctcatttagctttgccactggtcttggaggcctccaagraaagagattttagaaactcccagaagactattttaggatcctgcccttaaggaactcctttcctggcccacagtgtgcttttggcaatgtacattttact

SEQ ID NO: 321943 - DNA, 201 bp, Homo sapiens
tcctctacaaaagagggagaagtgcaaggaaatgctgaggaatgtttttatagaacatctgtttgtttgtttgttctatctaaacatgtagtagaattttrtaaaagtaactacatttctggcctcttctgatcaattcaacagacatttgtgaggtacctaccatacacagagtgctctctgagtcacctggggttgtgg

SEQ ID NO: 321944 - DNA, 201 bp, Homo sapiens; identical to SEQ ID NO: 67418

SEQ ID NO: 321945 - DNA, 201 bp, Homo sapiens
tagcttattatatatgtaaatattccaaaatctgaaaaaatccaaacacttctcatcctaagcatttcagataagggatattcaacctatataaacaaagytgcttgcattagccaaccagaaaaacaaccaaaaaacactttaccttttccaatgcccatgcccccactcagctctgatcatcagtaactccattgatca

SEQ ID NO: 321946 - DNA, 201 bp, Homo sapiens
tgatgggaagttttgaacagggggatgagatgacctagtttactttgaaattatgaagagaaattacagattctgcttactcagaatcctatggttagtawatggaggagccgtgactcaaaccctggcctcctgatactttctaagaccatttcttattgaatgatgccaagccacatctgtcaggtcagaccatggagg

SEQ ID NO: 321947 - DNA, 201 bp, Homo sapiens
atctaggaaaaccacttgctcttttctcttaatgtccccacttcctttactgtactgaaaatgttgattcagagtgcatgctcttttaaatgagctttctyaaagagacgctgtctccagcagggagaacttctttgtaatctaagatcaagcactgttgttccctatcctcagtatgtgtgggcttgttaaggttttcat

SEQ ID NO: 321948 - DNA, 201 bp, Homo sapiens
aatgtgatagctccaaatatagactaatgtgggtatgttttactggagactctgacatcctcagtggcactgactttgttgctttgatctttctgaaatgrtgacagctcattggtgacgtttcagataaaacagagcagagacattgcttcatttacatggtgattatgtctctggataattcaatgtatgtttgaactg

SEQ ID NO: 321949 - DNA, 201 bp, Homo sapiens
catctttgcctgagtaataacacccaaaaatcctgggtgttatttcaattttattacatccagcattctgtgctggaaaaagcccaaaagatgaaaaatcytataaagttttcacatgaattcaggacatcttctccaactctagaacacggcacagtatgtgagaatttagtttctttttccaaagcttgtgcgtcctgg

SEQ ID NO: 321950 - DNA, 201 bp, Homo sapiens
tataaatagaattgccagtaatgtgatagctccaaatatagactaatgtgggtatgttttactggagactctgacatcctcagtggcactgactttgttgytttgatctttctgaaatgatgacagctcattggtgacgtttcagataaaacagagcagagacattgcttcatttacatggtgattatgtctctggataat

SEQ ID NO: 321951 - DNA, 201 bp, Homo sapiens
gcctgagtgtgtttacgtatgcccacatataaatagaattgccagtaatgtgatagctccaaatatagactaatgtgggtatgttttactggagactctgwcatcctcagtggcactgactttgttgctttgatctttctgaaatgatgacagctcattggtgacgtttcagataaaacagagcagagacattgcttcatt

SEQ ID NO: 321952 - DNA, 201 bp, Homo sapiens
gcagggccaagagcaggctccagatctttagagaggttgccatctcagtcaccagagccaccctattcagattcagtgtttgagtcactgcttgtagaggkatcagtgtgtggatctgaatagcagagtctatgtcctcctcctccttttaaagaccaggaagcatttactggtttattataacagaaacaactcagaaac

SEQ ID NO: 321953 - DNA, 201 bp, Homo sapiens
aggaggatgggaaacagactaaactcatggaatttcatgtagctgggtaggccaagtcgactctagtttagttaccatgttttctttgtggctgtgtcagrgaattggggatggacacatggaatttaaaaaataacacacaattttaaaagttattaccaccatataaaactagctggacctgggagtcagtttctggaa

SEQ ID NO: 321954 - DNA, 201 bp, Homo sapiens
cctgggctttattgcctgctgtaccacgaccttactctccactctaagcgcttctgctgaggcctaacgtaagccagtgtcttcctgttaatcgtccaagkaggtgagctgcacacctggctatcttgacctcggctcagtgactctgtcactcagttctttagggcacagcttgagccattcactccatcttcaccattc

SEQ ID NO: 321955 - DNA, 201 bp, Homo sapiens
cggggtatgatgttcatatttctgagacaaatttagaaatacatacagtctaaccaaggatttttgttccaggtatataccactgcaggtcaagttctgtrtaaggggatttgtagttgtgaatgccaagggcttggttttatagaaggtaggtgtaaaaaatagaggttcctcttcaaagactttcctccccgtctaatt

SEQ ID NO: 321956 - DNA, 201 bp, Homo sapiens
aacatagcaagacctgtctggtaggtaggtaggtaggtagagaaatagacagaccagacagacagacagaccagacagacagacagacagacagacagacagatagatagatagatagatagatagatagatagcactccagcctgggcaacatagcaagacctgtctctaaaatagatagacagacagacagacaaacag

SEQ ID NO: 321957 - DNA, 201 bp, Homo sapiens
caacatagcaagacctgtctggtaggtaggtaggtaggtagagaaatagacagaccagacagacagacagaccagacagacagacagacagacagacagacagatagatagatagatagatagatagatagatagcactccagcctgggcaacatagcaagacctgtctctaaaatagatagacagacagacagacaaaca

SEQ ID NO: 321958 - DNA, 201 bp, Homo sapiens
gtcttgattgtagccttacctgttgaagataattcagtaaatattgctcacatggattggtttctattggagggaacagcatttggtttcaccacctggargagtttcttcttatagttcttcttctcaatttacatttgtggtgatttgcctagaagtcggacttggtatttcgtttccctagttctcagaccttagcag

SEQ ID NO: 321959 - DNA, 201 bp, Homo sapiens
gctggaaacaagacagcaagcttccccttattgtgccactgcaatcattgagcaccatctttttctcctagagaggtaagggtttgggaaggaagaggcasaggtgaacaggctttgagattcttagcttccaagggtttttcagagccccacaaggtttgagtgggacacaacaaggaccaccccatacatatatacctt

SEQ ID NO: 321960 - DNA, 201 bp, Homo sapiens
tgaatgcactccactgcactccagcctgggcagcatagcaagacctgtctcatagatagatagatagatagatagatagatagatagatagatagatagatagataagatagatagatagatagatagatagatagatagatagatagatagatagatagatagcctgggcaacatagcaagacctgtctggtaggtaggt

SEQ ID NO: 321961 - DNA, 201 bp, Homo sapiens
gggatctcatatttttcttttcagttcagtgctgagcttggagtctggcaaatcacaggtttttatcaataaatgtccagctgggtacattcctccctctmctaaacacaactcctgccggtcaggcactgtgtcctagaacctttgccatgacgctgatggccatgctttcacttctagatcaccatttctgccacttat

SEQ ID NO: 321962 - DNA, 201 bp, Homo sapiens
actgtggaaactttcctttaccttggtgcagctagagatgggctcttgaaccagagaaaagtggacacccagtgaaggacttgtgctaatgttttcccccytcgggggacttgattaaacagcagccacatgattatgggaccctggataaacccagtcagtttcctcattgataaaatgaggataagagcctgtaccatg

SEQ ID NO: 321963 - DNA, 201 bp, Homo sapiens
tgtgaatgcactccactgcactccagcctgggcagcatagcaagacctgtctcatagatagatagatagatagatagatagatagatagatagatagatagatagataagatagatagatagatagatagatagatagatagatagatagatagatagatagatagcctgggcaacatagcaagacctgtctggtaggtag

SEQ ID NO: 321964 - DNA, 201 bp, Homo sapiens
cttggtgcagctagagatgggctcttgaaccagagaaaagtggacacccagtgaaggacttgtgctaatgttttcccccttcgggggacttgattaaacarcagccacatgattatgggaccctggataaacccagtcagtttcctcattgataaaatgaggataagagcctgtaccatggtattgttgctaggagtatga

SEQ ID NO: 321965 - DNA, 201 bp, Homo sapiens
tcttatcctttacggaaaaaatttgatgacaactggataagatcaatcattattcacctgtgtgttttcagagccctagggtctgctattataggaggtcraggagcagccacacaggatgggccctgtctcaacagagcagttctaatatatctgtggcatagatttggcttttggctttccagtaagatttaactgggg

SEQ ID NO: 321966 - DNA, 201 bp, Homo sapiens
aatgagatgatgcatattgagatcctggtccaacatcttcctgtgacctacctactgaccttgccctctgtgattaataccgtgttacaaagcagtggtcrcaaacataacgtggcaaacactgatgtatcttttatccaacctatgcggacagcatgatgccaggtctgtgtcaggcatcggaaatgcagctgggtagga

SEQ ID NO: 321967 - DNA, 201 bp, Homo sapiens
aaaaggttaagatggtaactttagtgttatttgttttttaccacaataaaaattcaaataaaaaagaaaagcattcactaaaaattgaaaacagatagagacaaacctagctgtacacgtgaggttggtgttaacctctcatacagagaagattattacttaagtggctttaaaagacaatcttttgactatacagttgta

SEQ ID NO: 321968 - DNA, 201 bp, Homo sapiens
ttaagcagatccagaaactgcctgaccctttactgtaccttcccactccaaaatggggaggggaactcctgtgcgggagtgctcagctctcaagggaagayagtcattaacctgtctaaactctatgttaatagaaccttctcgataattgctttcattaagtgtggttaatgtgaacagtacaagttatagcaagatttg

SEQ ID NO: 321969 - DNA, 201 bp, Homo sapiens
aaaaaggttaagatggtaactttagtgttatttgttttttaccacaataaaaattcaaataaaaaagaaaagcattcactaaaaattgaaaacagatagagacaaacctagctgtacacgtgaggttggtgttaacctctcatacagagaagattattacttaagtggctttaaaagacaatcttttgactatacagttgt

SEQ ID NO: 321970 - DNA, 201 bp, Homo sapiens
atctctacctttgagttgatgtgtataactgaataatagtgctgtgttttcaaaaggaaaggcttaaaaaacagtgcttctgtagtacaaggagggatgcyctgctgaaaatctggaaattacagctaagcaaaaagatgaaaatacaaagtagctgttattctaccacccagagatcgatttgtttctttactaacagat

SEQ ID NO: 321971 - DNA, 201 bp, Homo sapiens
ttaaaaaaggttaagatggtaactttagtgttatttgttttttaccacaataaaaattcaaataaaaaagaaaagcattcactaaaaattgaaaacagatagagacaaacctagctgtacacgtgaggttggtgttaacctctcatacagagaagattattacttaagtggctttaaaagacaatcttttgactatacagt

SEQ ID NO: 321972 - DNA, 201 bp, Homo sapiens
ttttcaaaaggaaaggcttaaaaaacagtgcttctgtagtacaaggagggatgctctgctgaaaatctggaaattacagctaagcaaaaagatgaaaatamaaagtagctgttattctaccacccagagatcgatttgtttctttactaacagatacggcaagtgcctgttctgtgccaggcactgtctaggcactggaga

SEQ ID NO: 321973 - DNA, 201 bp, Homo sapiens
cttaaaaaaggttaagatggtaactttagtgttatttgttttttaccacaataaaaattcaaataaaaaagaaaagcattcactaaaaattgaaaacagatagagacaaacctagctgtacacgtgaggttggtgttaacctctcatacagagaagattattacttaagtggctttaaaagacaatcttttgactatacag

SEQ ID NO: 321974 - DNA, 201 bp, Homo sapiens
gtttctttactaacagatacggcaagtgcctgttctgtgccaggcactgtctaggcactggagatagtgatgagcaaaaccatctcttctttctggagatkacactccagcagtgaaggcagataggaaacaaatacataaacacatctggtgaaaaatgcttgaggaacagcaaagtagggtaagaaattagcgaaggaa

SEQ ID NO: 321975 - DNA, 201 bp, Homo sapiens
ttttgggttgtcctttccccacttacaatgctcccacttagcagggtctggcacaagtttcttgggtgaagccaagcagaatatctgcctgtaagacttttcctttgaacctgtctttgtcagggtatcaggaaactttcccccatttccttacctgaatccaaccttcgagagcttcctattatatcatcatgaaaattt

SEQ ID NO: 321976 - DNA, 201 bp, Homo sapiens
tgtgtggactgttgacctcaacaatcaggaggaagtagaggatgcagtgaaagcaattttaaatcagaaggttggttcattttattccactttccctcctytctaatgtgacctgaaatgtgtataaaacacatcataggtccttgtttttagcaaacagatctttaccacatcagcttaactctggaattagaaaataac

SEQ ID NO: 321977 - DNA, 201 bp, Homo sapiens
caaaattattccattttgaataatatgaataatagctatttattgagtgctcatgtaggtattaacttcatctaacatgattgggtgggagggtgagggtrtagaggctcagagaggcaaatgacctgatcacatcaccttgcaagttaggggcaggatttgaatctacttctgccttcaccaagtaagggatcttgacac

SEQ ID NO: 321978 - DNA, 201 bp, Homo sapiens
cctcagcctcccaagtagctgagattacaggcatatgctaccatacctggctcatttttttgtatttttagtagagacgatgtttcaccatgttggccagsctcgtcttgaactcccgacctcaagtgatctacctgcctcggcctcccaaagtactgggattacaagcgtgagccaccatgcctggcctatctctgtatt

SEQ ID NO: 321979 - DNA, 201 bp, Homo sapiens
gcgtcaataccactatcatcatctgtagtccacaaaatctctgtcaattctgtgagccagtgttattctggagcatacaaaagcagactgacacatggccrctgactttgtggaagttggtctcactggctttgcagtctttgtaggtatgtgcatttctgcacacaaacaaattccaattagaggatggtcaaagcaaac

SEQ ID NO: 321980 - DNA, 201 bp, Homo sapiens
aagcagactgacacatggccactgactttgtggaagttggtctcactggctttgcagtctttgtaggtatgtgcatttctgcacacaaacaaattccaatyagaggatggtcaaagcaaacaccagatttttagttttagattgttcagtatagactaaaaattttataggtgttcacaggcaccctggaagtacctgtgc

SEQ ID NO: 321981 - DNA, 201 bp, Homo sapiens; identical to SEQ ID NO: 67426

SEQ ID NO: 321982 - DNA, 201 bp, Homo sapiens
caaacccagtatctaatatttatcccctgtcccctcttttattcctcatgaattttttcagattggatgtgtacagactccattcaaaaattttaaaaagytcccatttcaaagctggtttcctttaatcccatagtccatgtccaaaggcctcttgttgcagttctctcttcctgtagcaaacacccacccttggatctt

SEQ ID NO: 321983 - DNA, 201 bp, Homo sapiens
gcagttcacacgtgcaggaggcgccgcaggctctgggggagggaggcctgagcaccagtgacatgctgagttccagaagcagttggggcttcagctgcaaytgagcaggagccaggctgacagcctgggagatctcagcagaagccccagcagatgtgcggggaatcgcaggattaatgttggcaaggggaggaaggcccc

SEQ ID NO: 321984 - DNA, 201 bp, Homo sapiens
ttcaaagctggtttcctttaatcccatagtccatgtccaaaggcctcttgttgcagttctctcttcctgtagcaaacacccacccttggatcttccctggracacacaaaccttgctgctgcttaagaaattcctccctggctttccagttgacttgcactcaccttgaatataactctctgaatacctgtaagctcatat

SEQ ID NO: 321985 - DNA, 201 bp, Homo sapiens
acacaattaactagttcactgcaaataggagacacctaaatgcactcagtgacagagaagaacactttaccaacagtttgtacttaagtccaagattacartttccaagatgaagattaaactttagttttatgcacttttgtaaccaaactaaagagatggaccctttagcactgccagcccacaatgaaatgtaatatt

SEQ ID NO: 321986 - DNA, 201 bp, Homo sapiens
tatcctgaggaaaagaggagagccagcttgacctccaaagcaaaggcctgaggagaagagaagagccagcttgacctccaaagcaaaggcctcagcactgscaaacccaatatttcctattgttataaatatgagatgaaatttgtaaattatataaccttgcctacccgtgtaatttcaaaagggaataattctctaaca

SEQ ID NO: 321987 - DNA, 201 bp, Homo sapiens
tatatctataaaatcaccacaggcaagataaggaacatattcatcaccccagaatgttcccccatgcctctttccattcagtctgcatcccccataggcastctctactctgatttcaatcaccataggttaattttgcctgttcttgagcatcatcaaaatgaaatcttacagtatgaacatttttgcagagtccggcct

SEQ ID NO: 321988 - DNA, 201 bp, Homo sapiens
ggaaagcctgaaatgttgaccctttgactttttggggtttaaactgtggctgccctgcagtgagcagcagctgaagtcttgtgaatactttgaacttttaytggagcctccctcacaaatgcttagttttagggtcgctcaagaagtttaaggtagtttatatacagactttggggttctcctctttgggctccctctttc

SEQ ID NO: 321989 - DNA, 201 bp, Homo sapiens
ctggagcctccctcacaaatgcttagttttagggtcgctcaagaagtttaaggtagtttatatacagactttggggttctcctctttgggctccctctttytgggaatatgctaccttaatttttcactactatgcaaaacttcattctatgaaacctcaagccagtgagactgtagccttttgtttgctaccttccagac

SEQ ID NO: 321990 - DNA, 201 bp, Homo sapiens
tagctgcgaaggggatagtggaggagctgtgctttcaaggaaaaggaggcgagcgggtctcaagcctgagaagcatgaatactgacaagtcggggataccycaagaaggtcagtttgctttatgcaagagggcaggttccatctgatatctagctccctccagcaacatcagacagcattgagagggaccagcgagcttga

SEQ ID NO: 321991 - DNA, 201 bp, Homo sapiens
tactgcagtttctatatacaagcctttgggaaatgaatcaaaagtagctgagattaagttggcaactgacacacttttgttaaaactgactctaaaggttwtaatgacactgtggccactgagtatttttttcccgggaaaaaaaaaattaggacactcttaaacacaatctgaacattgcccagtgaatgatgtaatgtt

SEQ ID NO: 321992 - DNA, 201 bp, Homo sapiens
atttttgtatcatatagcagtggatttgtatagtgtcacatactatacaaataaatacagtatttattgtatcatataggactggatcatgtctgcaacartgattactgtggtattctgatggtgattttctgattccctcatgattttttaaatgcatgaaaagcaaagaagcccctatcttttcttactgcagtttct

SEQ ID NO: 321993 - DNA, 201 bp, Homo sapiens
aactccatcttgttcactgttcagtcaccagggcctgatggccgctcatgctcaatatagacttggcgcggagcggagtggaggaaggaaagagggcaggygctagttggctggcctgcagttagaagggctgaataaagtgctgtagtgccctaggcgacatattcatttagcagatactttattgtgccactgtggtca

SEQ ID NO: 321994 - DNA, 201 bp, Homo sapiens; identical to SEQ ID NO: 67412

SEQ ID NO: 321995 - DNA, 201 bp, Homo sapiens
ttagtcttttctctgtggtaggggtagtactctggggctatgttagaatatcctgtttatcctcaaatttttgtatcatatagcagtggatttgtatagtrtcacatactatacaaataaatacagtatttattgtatcatataggactggatcatgtctgcaacaatgattactgtggtattctgatggtgattttctga

SEQ ID NO: 321996 - DNA, 201 bp, Homo sapiens
cagcgtcgttgggaatcagttcttttctggtttctctgttctgttccattggtctgtatgtctgtttttatgccaaaatcacctgtacatttgaaattagstctaggaaatctctaaagttctacttctgcccaaattgtagatattatttttccatgttttatgcccaaattgtagatattaattttccatgtttgttta

SEQ ID NO: 321997 - DNA, 201 bp, Homo sapiens
gcctctctgaagaagagagattgagcagagacccatattattgagtgagggaggcctggggctctccagctagctgccagcaggatcagtctgtacaacarcccagggcacattcttcctgggtgcatttaagaaccactgttgggcccttttaattctaatacagaaggtggcctattaaaaccaaaaccgaaaaaaaaa

SEQ ID NO: 321998 - DNA, 201 bp, Homo sapiens
cctctctgaagaagagagattgagcagagacccatattattgagtgagggaggcctggggctctccagctagctgccagcaggatcagtctgtacaacagmccagggcacattcttcctgggtgcatttaagaaccactgttgggcccttttaattctaatacagaaggtggcctattaaaaccaaaaccgaaaaaaaaaa

SEQ ID NO: 321999 - DNA, 201 bp, Homo sapiens
tctggatgtgttaacgcattggttcagcatgtgatgagacttgtgtgcgcagtacagactcaggctgctggggttcaagtctgagttccacagtggtgcarctgtggtgaagtcatttagagaggttaagtctcagttctctcatctgtacagcagaaactagctcatggggccacatgagaaagtgtctgtggagggagg

SEQ ID NO: 322000 - DNA, 201 bp, Homo sapiens
aacacaaccttgcccatttgtttacttactgtctgtggctgctttcatgctacagctgcagaatttagtggttgtacaggagaccataaggcccacaaaaytgaaaatatttactatctggctttttacagaaaaagtttgccaacccctggcctaaatgaatggtgctgtctggaatgcagtacatagtctgcatgcaac

SEQ ID NO: 322001 - DNA, 201 bp, Homo sapiens
tgccagcaacccctccgctacatggctcctctctgttttccagaatcagaatgtcctaaatatttgctggggtcaaatttagtggtcagtgcttactttakaaggacactgcttagccacttactaaaataaaataaggtgatagtaaattgccattctgatacatctttctgtttttcccagcgttaataatttacttct

SEQ ID NO: 322002 - DNA, 201 bp, Homo sapiens
tagaaacccacaaatctagattctacaattaaccatttactgtatcaatctatatgccccagtcctctctctatccatcactccaccttttttttttttttggatgcataaaagaactctctgatgcttcagcttcacatcattaactataattcaatattttgaggggaaaaatgatccacaagcttagaaaaaaagtcc

SEQ ID NO: 322003 - DNA, 201 bp, Homo sapiens
catcttctcagctcaacttatattacagtttccctagcctgcatcccagccttctctcttgaagaaactagtatcaccaccatttggaaaaaaaaaaaaaatcagtttttgtaaaatttgaagcataacattactatgtatagttttttaatccagatttcttgtgtgacataactatttttcaatgaatttttttctacc

SEQ ID NO: 322004 - DNA, 201 bp, Homo sapiens
ttgtagaaacttctttaggccagtggcctcatcttactttcttgtgtcttcccagggaacttactcacatttttgggctttcaagtggcattcagaccatratgattgtcagtatcattgatattccaaccctgaatttctcccaggatttggggctcacagccatttttatttgcatgatcaaattgaatgatggcttgc

SEQ ID NO: 322005 - DNA, 201 bp, Homo sapiens
tgcacctgtctatgggatttaccataacagtaacagccattatctctcccctctaccatgtactaggccctatgctaagccctttctgtgtattctctctytgcatcacaaaaatccaatgatcttggtactgttataaacggtaccattttaatgaagcagccactgaggctccagtcgtaaataagcctgttttgctgc

SEQ ID NO: 322006 - DNA, 201 bp, Homo sapiens
cacctgaggatcagtgccttctaagagctaactcaaaaaccaaatattcatctgggaacagactacttgctgaaacgaacaaattcccaggcagttgaaarcctttgtgtttcctactgggaataacctgcattcacaaattcattagccttttatgtggagttgatgaatagcattccaggattataagaatacttgtaa

SEQ ID NO: 322007 - DNA, 201 bp, Homo sapiens
gtcttaacacaaagcatgttcttttctacatgaaggaatacctgctaagggccgggagaagttctaaggaattaagttgtaagatagcctgattttttgtkttttaacatgtcttgctatgttgcccaggctggtctcaacctactgggcacaagcagtcttcctgcctcagccttctcagtaggtgggactgtaggcatg

SEQ ID NO: 322008 - DNA, 201 bp, Homo sapiens
ggcatgtatattttatgccaatggcttgtaggtttcatatcactctggatcagtcacagtagacttacaatttaaatagcttttagcctttcttcaaaccrtacccaagaatttgttgtgcttgtgggtgtttgaaatattctggctttcagcttcttttatacattctctctgtcctactttctctaggaccaaaacctt

SEQ ID NO: 322009 - DNA, 201 bp, Homo sapiens
ggtggccagatagtatcttacgagagggttgatctactgtttggagatttagagaacacagatttttatagctttgtaactttagaggccgatgggatgayggcattttggaatatgtttaattaattttcattaatttaatgaaaatggatgttaaagagactatttaagaaaagcattagaagctgctgttaatcaaag

SEQ ID NO: 322010 - DNA, 201 bp, Homo sapiens
tcattaatttaatgaaaatggatgttaaagagactatttaagaaaagcattagaagctgctgttaatcaaagaagggggcttgagcattcttaatttgttytgaagaccttgtgtcagaaaaacacccctgacttccttactaatgaaagacagttttcaactccggggccatttacaatgttagatataaactctattca

SEQ ID NO: 322011 - DNA, 201 bp, Homo sapiens
gcttccctttttaccacattcttgccagacacttgttatcttttgtctttttgataaaagccattttaacaagcatgaggtgatatctccttgtggtttcratgtgcatctccctgatgatgaaagatgttgagcaccttttcatatgtttgtttgccttgtgtatgtcttctttcgagaaatgtcttcaggttatttgcg

SEQ ID NO: 322012 - DNA, 201 bp, Homo sapiens
tactaatgaaagacagttttcaactccggggccatttacaatgttagatataaactctattcaactgtaaagattttatacagtaatatcttttaaattayacatggtcacatttttatccacaaaatgtgactttcattccccttttcctctggatgtcacctttttttcaaaatgttgtttctccactcaaagaacatt

SEQ ID NO: 322013 - DNA, 201 bp, Homo sapiens
aaatcagagatcacaagtctggtagataacaaccctggattcttcatattccataaagctgggatgtcgtgggactagtacattcccactgtttccttccrtttcatctgcagcagtcagatctcccccacccctgagccacatgtccaggccacaccctatagttagaagttctctctgacaatctcgtttctgttagct

SEQ ID NO: 322014 - DNA, 201 bp, Homo sapiens
attacacatggtcacatttttatccacaaaatgtgactttcattccccttttcctctggatgtcacctttttttcaaaatgttgtttctccactcaaagamcattagttacttcccctggccattgtactgaaactccgcaagtgttttcagttgccttccggtttcctgctgtgataacagtgataaattatgttctgag

SEQ ID NO: 322015 - DNA, 201 bp, Homo sapiens
tgagtagagtatattaaaatactctgagtggaatcatggctcagacatttggcaaatgtgacaaggatggggcagcgtattgctgagactcccctcacacytggcacacagctacaggctccaaaatgaatgaacctttggctttgaaataatgacatgaaagaccagtcaggcttcgcatctataaccctttctgtctct

SEQ ID NO: 322016 - DNA, 201 bp, Homo sapiens
acagaatgtgaggtcctgttccagccaatggaaactggacacagcagtaaggtggacgcgtcaacttataaatgaccctgcctcctttgttcggtgtactmtcgtggcaaaactgctggcaagtgtaccctttctgtagaaagtaaaaatggccttgctaaggaaattaaatttatgttcaagtgctatttctttattgca

SEQ ID NO: 322017 - DNA, 201 bp, Homo sapiens
gagcaagttttgggttctaagcatatttaaggctccctcaaggtgaataatgttttgtgtttctctttgcttcccaggaaggtactgaaatcatgacaaaygctctaatttaggtgcagtatttgttgaatgagtcaatgtcagaacttttctggtttttgtaacagctttattgagataatttacataccacacatttca

SEQ ID NO: 322018 - DNA, 201 bp, Homo sapiens
ctagttgagggttctactttctttacatccttggcaacacttgttattgtctgaatttttattataactattttagttgatgtgaagtcgtacctcattgygctcttgatttccatttccctgatgactaatgatgataagctctgcctacttttgtcagtagcaattatttaaccccagctgtgttcttcctatcatgtg

SEQ ID NO: 322019 - DNA, 201 bp, Homo sapiens
cttcctatcatgtgtgtgctcctaggtgtgtggataaccttttccctggctgaccatttctagtagcagcaccgtggggcttatcagaatggagggttggkgtatatatgatgttgtggctgtgtgtatgtatagcattcttatataactgtttttcatactgagaatctcagtcctaggtcccctttttaatactaattt

SEQ ID NO: 322020 - DNA, 201 bp, Homo sapiens
catacactttattagtctttacatatacctctttatatttgcctgaacttgcccccttgttatacttcaagaaaccccagccttttctgggatttaatggyaatacatatgtaatctagtaccttgttactttcccaggcatttagtctgggaaccctaatcttgagtctgtctacagtggatatttttctccaggacagg

SEQ ID NO: 322021 - DNA, 201 bp, Homo sapiens
aaatgttcccaaaacaaagaaatgataaatgtttgaggtgatggataccctaaagaccctgatttgatcatcacatgtagtatccatgtattgaaatatcmcatatatcccataaacatgtacaattattatcaatttaaaaatgttgtaaagtaagttggggaaagcttctgattctctagttctgcattctaccactcc

SEQ ID NO: 322022 - DNA, 201 bp, Homo sapiens
ttagcttgagtgtccatcagcggatgaatggataaagaaaatatgtacataatggaatacgattcagccatttaaaaaaaatggcagtctgtagtttgcarcaatatggatggagctggagatcattatgttaagtgaaataagcaagtcacagatgtcgaatgttctcactcctatgtaggagctaaaaaggtggccctc

SEQ ID NO: 322023 - DNA, 201 bp, Homo sapiens
gccaaagactgcagagactttaaattgttctgaaatgtaaattttttcggctacactgctgaaattcacagagatttgcattttagaacttacctccaatmttggaataaaataatttttcatctttgttgaattttagacttcaggagcaagcagatgaggtagtttctttttgtctctctcctctctttttcttttttg

SEQ ID NO: 322024 - DNA, 201 bp, Homo sapiens
tcatacttgagacccattgcccaagatgaatcctaatttataccagatgagctcaagccaagactaaatgtggaggccagtacatgaaaggaagcagactyccctctttttagtgcctgtgggccaataggtggaccacagcctgggctggaaacaagacagcaagcttccccttattgtgccactgcaatcattgagcac

SEQ ID NO: 322025 - DNA, 201 bp, Homo sapiens
cacctagatgtgacttttggccttctggaagctggtgggatttgcttctaccttgtgttcagatgtttcctgtgcctggtgtggaccacatttcatccttkttctgactcttctgtgacatctttcttgtctgggaaatttttgtgaactgtttattgagtagtctcatctccctacagtctttcttctagaactcactgg

SEQ ID NO: 322026 - DNA, 201 bp, Homo sapiens
tgttgtgcgttcttagtttttctacttttaccatttctggccagagctgtcacttttaaaaattactccgttgatgttgcctagcaagagccactcagctstttgtggggaattaaagtagattataggttgaggccagttgcacttactgtgctgcaaattggggactgatgatctagtcatcctcttcctttcttacac

SEQ ID NO: 322027 - DNA, 201 bp, Homo sapiens
agagggaatccacttgatcagattggctatatggagttggaggatcaattatgtgactcagtaagtgcttattgcgtgtcttctaggtgccagaaacgtawtgcaaaacaaaatacacaaaaatacctcacttcagagagcttatattctagcaaaggagactggccatagacagtttacgtgtaatgtcaaggagtgaga

SEQ ID NO: 322028 - DNA, 201 bp, Homo sapiens
aaggtttaaacgtggggataaagccaggttctggtttctttctttttgaaattaggagctttggattttccttaaggtcttcaacttctgtgattttaatrcaattcaggtttattttctgctatccctcacctttgctctgccagtcattactaggtgtggtggtgttttgtttgtcttgtttgtttttcctgttaggat

SEQ ID NO: 322029 - DNA, 201 bp, Homo sapiens
taacagatggaggtcatggaccttcacagatgtgtgcctggcatagggcaaatgcattgttgtcactgggaaaaatagctagcaagcatgcctccagggartgtgggtccttaacacatgaaaggcaccttcacacatgaaaggtagcctattctcatttcattacaattcattttgggtatcactgtgcacccttgcttc

SEQ ID NO: 322030 - DNA, 201 bp, Homo sapiens
cgcaaattttgaaagaacccttacttacctaccatccattaccctgtcagagattaggaaataggccaaaacggagatcgctgatgtccaggggaggacargaaaagaggcagggaaggcccaggccaagatgtccaagtttgtctaatgagcaaggattgcagcctgagttaaagagcacgaggggtgtatgttcatcct

SEQ ID NO: 322031 - DNA, 201 bp, Homo sapiens
agattctcttcgaggatgacaagaacagccagtagtggctggcttgtggctcttctgtgctgttgctggctgcagccaaacaggaaagggctgttcggagyttctattggaaccatcaggaatactgtttggtcagctttgctacctgacaggaatggttttgggaagcttgaattataccaagttgcagtctgtttcagt

SEQ ID NO: 322032 - DNA, 201 bp, Homo sapiens
attatttagagaaaggaggatcattcagcttgggttaggtataaagagagtcaatatcaggaaatctcctgggtttgtcaagaagagatgccacatgatcwgaatcttgagaaaaaaaaatgttataagtaagttaggtaaatgaaagacaaaagtgtattcaaggcagagaaacaacatagggaaagttatggtatcagt

SEQ ID NO: 322033 - DNA, 201 bp, Homo sapiens
tttgattttgttaggatgtaaacatgactttgggattggtcaatcatttcttggcgcattactgtgccttttgtatgtggttcagtgtgaatcagtatatrcctctttgttttccaggtcctcgttcacctgggactcctgaccaaggaatctggatttaagattgcagagacagctttcagtggtggccctcttggtgaa

SEQ ID NO: 322034 - DNA, 201 bp, Homo sapiens
tttactttgttaagatagacttgacatttgattaggaaaaaaaatatgcattcaaatgttatgagatatagaatccaaaaaagggaagattgcagaaattwaaaataaatgtaaaagattacaaggtaatacaatgaataagttcatactatgaaatgacacaactttgatgacatggaaaaattcctagacacaatctgt

SEQ ID NO: 322035 - DNA, 201 bp, Homo sapiens
caaggcagagaaacaacatagggaaagttatggtatcagttgcacagtgggagtgatgggacaatggacataggcaggggctaccacttgggaagtatggratactctaccaaaacctgggaatgtgggtagaccttctggttgctgataggctttatcttcaggtcctctatgccatcaacatactcatccatgctgtgg

SEQ ID NO: 322036 - DNA, 201 bp, Homo sapiens
ggcatgtttttatttttggtttaaatctccatctcttttaaagtggcttctttcttcatcttcctggatttaacctcttcatgtccacctccctcagtctyccctgtttcatatatgatactgaatagtgcatttgcatctgcaactcactgagtgctttgtgagctggaccagtaccgtcctttctacagttgaaaacaa

SEQ ID NO: 322037 - DNA, 201 bp, Homo sapiens
accaggaagcatttactggtttattataacagaaacaactcagaaacagccagagggaagagatgcgtaaggctaggtttgggagggaagtaactaaaagwtagttacatttaccttccttttttccctaaatctgagcatcattttcatttgtacccttgaatttaaatagcagcttttgtatttttttttttaacggtt

SEQ ID NO: 322038 - DNA, 201 bp, Homo sapiens
ggattactgcccatggagacttcccacccaacagtcaagttgccatgttgctatatgtcgtatatttccagaaggaataccttgaatgaacattctagagytcattgagatgagagacatgttaaaacaatatatggtggctcccagcacttcgggaggccaaggtaggtagatcacttgaggccaggggttcaagaacaa

SEQ ID NO: 322039 - DNA, 201 bp, Homo sapiens
tttctctcccaaatagtatataagatgcattttcaatggttattttttattgatcagtcagaaaccttgacaatttatagaactgattactttgagagttrtttttctctgacccttcctgtcattggtgaaatagccaaaggagatagaagttcaataagatctatgtttatctataaaaggttaatccgtggcccagat

SEQ ID NO: 322040 - DNA, 201 bp, Homo sapiens
tccaaggtagacaggtgtttttaactcataatactcctttattccctgttttaaaaatttttttaaatttgatacaataattatacataataatggagtaycatgtgagattcaatccacatatacattgtgaaatgatcaaattaggatagttagcatgcacatcacccccaaataattattacttttgtggtgagaaca

SEQ ID NO: 322041 - DNA, 201 bp, Homo sapiens
ctcaaaccctggcctcctgatactttctaagaccatttcttattgaatgatgccaagccacatctgtcaggtcagaccatggagggcttctcatggaggcygatctctaaaagcaattgcctgtagaagttgtccctgacttggaaaggtgagttggtactagtggagacaggaaatctcacaaggagggaggccaagaag

SEQ ID NO: 322042 - DNA, 201 bp, Homo sapiens
tcttgcccttgtctctaactgccctcactttgaaaggaatctttgtgtacttgttgctttttctttaaagaatttttttcagaattctttttgaaatcagmaagagtaaaaaaatacacatatgggatgtaacttatttttcttttatgtttaatatagaaaaagttggaagctgtagacaagcaaaaaaagaaaaaaatt

SEQ ID NO: 322043 - DNA, 201 bp, Homo sapiens
ttattgaatgatgccaagccacatctgtcaggtcagaccatggagggcttctcatggaggctgatctctaaaagcaattgcctgtagaagttgtccctgayttggaaaggtgagttggtactagtggagacaggaaatctcacaaggagggaggccaagaagagaaaatggaggggaagataagggaaaatttccaaggtc

SEQ ID NO: 322044 - DNA, 201 bp, Homo sapiens
gagtttctggaatttttattggacttgtatgtatgtgcttgaggtactggggggttatcacatggtgagatcctactaagacagtgtctcatttggtgctrttgacttttggtctaaataggtcttgattgtggtaggatttcagcagcatctcaggggtctctacccactagatgccagtaacagctccctagttgtgac

SEQ ID NO: 322045 - DNA, 201 bp, Homo sapiens
attttaataatacatgttcagcaattctaaatgttaggactttttagaggttttcagacatcttctaaaagcaggaccctttgtcaaatgaaaccttataygtatataaaacagataaaaagcaggacaaagccaaggagggtgccaagagttccaccttccccaacaaggtttggaaactgcagcatgtgctcctagaag

SEQ ID NO: 322046 - DNA, 201 bp, Homo sapiens
ctttaaaagttaccaggtcctctgtaagccttgctgggcttcctttcaaacaggaaggtcctgttcaccaaatagaccttgctaaatgctccataatgcaraggctccacctggcttcacctctatatccctagtaacctgctggacacatggtcggtgcacagtaacttccaggtgacagaaacaatgaaggaaggaagg

SEQ ID NO: 322047 - DNA, 201 bp, Homo sapiens
gcaaagacccagggaggcgatgccccaggacagcaccttctgtctgatagctttccagcaagaggctaaggccatataacaggaattctttaaagcctttmattaaaaagttaaacatacttaaagaacgtaaatgatgctgagctttgccccactctcacttcttggaagcagccattgctaaggcattagcacatagcc

SEQ ID NO: 322048 - DNA, 201 bp, Homo sapiens
ctaaaagcacagaagggccatgatttatttggccattccctgcttggtgagtatttgggttgtttccagtttttctccattgcagacaaagcttcactagkcagcctcaaacacacacccctgcacacactccctggtgcacacatgccttcctgagtctagatgcctagaggtggaggattgcagacgaagagggtgggc

SEQ ID NO: 322049 - DNA, 201 bp, Homo sapiens
ttttcttgttgagttccattatgtccatagtatttgtacacaggcagtactgtagcttctggtttttatacagcaagtccatgaggcccttggaggtgctycttcaagagggaataagaatttgttaattgtgttcactcttgaaatttcccatgcagaacatgaagatgatgatgtgcatttcaacagtgttgtggaaat

SEQ ID NO: 322050 - DNA, 201 bp, Homo sapiens
tggaaggtgctagtggattttgtttaatccataaatgaggaaggcacttcatctcactaggccttactgttatgaatcaggaaaactagagggttgaatgktgtggtttcagaagtcccttgcagctctaaaattattttatgcaatgatgattctattttcaacttagattaaaaaacaaaacaaaaatgatatataaac

SEQ ID NO: 322051 - DNA, 201 bp, Homo sapiens
gttgataatcttagggtcggcaaaacaactgggtaaggagattgaatcagtttcctgtaacttcctggggtcaacagatactcatgttctttgaggtttcwgagagtttttataaacctactttttcttctatttttttctttcctttttttaacctttaaaatggcaatggcgatggatttagatgcccttaatctatca

SEQ ID NO: 322052 - DNA, 201 bp, Homo sapiens
tggtgatacttaaaaagaaatggacgatagcatctttatatacgtataaatattgatcctaggcaattagaagatgcaagtagccttgtgtgacacccaargcacctagcatctgatttatacaagcagtgggacagttaacaaatgattcattaagattttctccaggccgggtacagtggcttatgcctgtaatcccag

SEQ ID NO: 322053 - DNA, 201 bp, Homo sapiens
acccatcactgtgtaactaaataaaggagagaaaattcgtgtataagaacatggagttgcagaggagactgtcgaattagctgacaaaccaccagtttgargaagaggaaaggccctggcctggtgggagtctctgctcagtctagttctccctgagcccaggagtcaggcccgttgggcagaggggaacatgcctatgtt

SEQ ID NO: 322054 - DNA, 201 bp, Homo sapiens
attatttttaatttattctttactgatgtgattgggtggtacttggcctctgtggtttggttcctggcctttggggcctcagtttaattttcagaggaagscccgtcacacctactgccagtgtgaccatgcagttttccaaaattcttccctgacaactctcacaggatggtcctgtaataataggagacacttctccct

SEQ ID NO: 322055 - DNA, 201 bp, Homo sapiens
gaattagctgacaaaccaccagtttgaggaagaggaaaggccctggcctggtgggagtctctgctcagtctagttctccctgagcccaggagtcaggcccrttgggcagaggggaacatgcctatgtttattcagtcagatggcacttagtgtctggagatccagcaggaagacgtaaccttcctataggttcctcatgtg

SEQ ID NO: 322056 - DNA, 201 bp, Homo sapiens
gggtattaatgcatatggcatggggctgagtgcctcagcaaggaaatttagcaagcacagccctacaactagagcttaaaattagaaatgcaccttagtgmtgtggcatagtggaaaccagcctatgctgtcccacccagaagggggcacccctgggtcagtggacccagcatctaggacagaaagccctttggtgaggga

SEQ ID NO: 322057 - DNA, 201 bp, Homo sapiens
ttttagctgaagaaagaggaaggggctttaactgggcagaggaagagtggtggcctggaaggactgaggagaaggacgttccagggagaggaaggcccgcmgggagccttgaaagaagtcagtccagcaggctttggcagaaacgaggggccttgctttgggaatctcctagcatagcaacaggggggtctgtgcctgatt

SEQ ID NO: 322058 - DNA, 201 bp, Homo sapiens
tggtcactgatttttggtaaaaatagttgctgcagagttcctttaacatagcaagttatttgggcctaggtctccactgaagtgggccatttccaacctcyctgtatggtttcttttactggataaacgtctcttctttagcatcttttatgccatctctcagacttttgcctctctttgtcttgtttcagaccctaaagg

SEQ ID NO: 322059 - DNA, 201 bp, Homo sapiens
cgaggggccttgctttgggaatctcctagcatagcaacaggggggtctgtgcctgattctgtaaataacattttattggaacacagcccatccattcgttyagctgttatctgtggctgctttttcatgacaacagcagagttgagtagctgagaaagggaccttgtggctcacagagccttaaatatttactctctgttt

SEQ ID NO: 322060 - DNA, 201 bp, Homo sapiens
agcaacaggggggtctgtgcctgattctgtaaataacattttattggaacacagcccatccattcgttcagctgttatctgtggctgctttttcatgacarcagcagagttgagtagctgagaaagggaccttgtggctcacagagccttaaatatttactctctgtttctttacaaaaaaagtttgctgacccttaactt

SEQ ID NO: 322061 - DNA, 201 bp, Homo sapiens
tttctagggtacatgtgcacaacgtgcaggtttgttacatatgtatacatgtgccatgttggtgtgctgcacccattaactcgtcatttacattaggtatrtctcctaatgctatcttttttaaatcagaaaatatagaaaggaattatttttatttcaatatatgtttcttttgttttcagaaattaaagagtattcaaa

SEQ ID NO: 322062 - DNA, 201 bp, Homo sapiens
ccatgagaaatagggtatttatttttatgctctagttattcttagcaggtagagggcttgttgaaatacttgaatcaagaggtcaagaattttggtgacasactatcaaaataactggttttcaaggggcaggtaaaatcctccttagcactaacttctgtctcagtcccagcagccactgagttatcatttcaatacccc

SEQ ID NO: 322063 - DNA, 201 bp, Homo sapiens
ggaagggttagagcttttaccttttcaactttgggggcaagtatgtagtgttcaacacattgcttttttctttcaggtgcatgctccgagtccttgattcrtttggtactgaacccgaatttaatcatgcaaattatgcccaatcgaaaggccacaagaccccttggggaaaatggaatctgaaccctcagcagttttata

SEQ ID NO: 322064 - DNA, 201 bp, Homo sapiens
tgtttgtttgtttgtttgtttttttattatactttttctagggtacatgtgcacaacgtgcaggtttgttacatatgtatacatgtgccatgttggtgtgytgcacccattaactcgtcatttacattaggtatatctcctaatgctatcttttttaaatcagaaaatatagaaaggaattatttttatttcaatatatgt

SEQ ID NO: 322065 - DNA, 201 bp, Homo sapiens
cacctcccggttcaagcaattctcctgcctcagcctcctgggtagctgttattacaggtgcacaccaccacatctggccaatttttgtatttttagtagaratggggtttcaccatgttggccaggctggtctcaaactcttgatctccagtgatcggcctgcctcggcctcccaaagtgctgggattggcctccccaagt

SEQ ID NO: 322066 - DNA, 201 bp, Homo sapiens
taggaggcaaaagcaagaagtgaaggataaaagagtgtgtgtttctctgctgaggcagccccctctaaagagctttctctgaagctgtgtctagtctttasctactcctagttactagggagattaggaaatttcaactactattgctgccccaagaaaaagtgagattctgttcataaggaaaaggggatatctttgcat

SEQ ID NO: 322067 - DNA, 201 bp, Homo sapiens
tatttttttcctggtctttttatgagaagacccaggcacagaagctgccctgattccaccatgaaaacaaaagcataggtcaaaagtgggggcttggggcrgcaccctgctctgccaccaggcaagctttaggagggggcagtggtccaggatgtctggaaagcctgtgatggtactggaagtttccagttccacagcgca

SEQ ID NO: 322068 - DNA, 201 bp, Homo sapiens
gcatttactggtttattataacagaaacaactcagaaacagccagagggaagagatgcgtaaggctaggtttgggagggaagtaactaaaagttagttacrtttaccttccttttttccctaaatctgagcatcattttcatttgtacccttgaatttaaatagcagcttttgtatttttttttttaacggttgcagagaa

SEQ ID NO: 322069 - DNA, 201 bp, Homo sapiens
actggtttattataacagaaacaactcagaaacagccagagggaagagatgcgtaaggctaggtttgggagggaagtaactaaaagttagttacatttacsttccttttttccctaaatctgagcatcattttcatttgtacccttgaatttaaatagcagcttttgtatttttttttttaacggttgcagagaactttat

SEQ ID NO: 322070 - DNA, 201 bp, Homo sapiens
cctgaacctcagggcttttctatgttatcatagcattgtaataagtaccctgtgagagttgaaggagaatgtcaccaatatggtcccttcaataggaatamtatcttagagtcacacctgacatcagcttctgtttctgctgctttctcagctctatgaggtcacttaaccttttgtgcctaggattcttcctttatgaaa

SEQ ID NO: 322071 - DNA, 201 bp, Homo sapiens
caagttatttcatggataatggtattatatacttgagttgggaggcacataatgcctgatttctctttctctctctctctctctcttttttttttttttttgatgttagcaatcattgatcagtgcccaggttcattaattcattaaaggtaccttcttaatatatcaggaatacttctgtgcagagatgtgactcttcat

SEQ ID NO: 322072 - DNA, 201 bp, Homo sapiens
aggtcttgattgtggtaggatttcagcagcatctcaggggtctctacccactagatgccagtaacagctccctagttgtgacaatcaaaatgtctttagayatgtgataattatccccttcctgccaccttggagaactgtactaagagtggaagccacaaacgctatctgacatcatctttttaaggatgttatcaagca

SEQ ID NO: 322073 - DNA, 201 bp, Homo sapiens
tgcttcccttggaatctgtcagtatcagtaacattgtgtgacatgcaggcagctctggtagttaatgtcacatgctggtgcagagactgtaggattctcartggtatagctgggctggcagaacagtgatgtggatgcataggccattagtttgcagtctcctttttttttttttttttttttttttgccataaatgcagc

SEQ ID NO: 322074 - DNA, 201 bp, Homo sapiens
tgggtggagataactagggaccccttcttacaagttttaatctgaatataaccctgaacctcagggcttttctatgttatcatagcattgtaataagtacyctgtgagagttgaaggagaatgtcaccaatatggtcccttcaataggaatactatcttagagtcacacctgacatcagcttctgtttctgctgctttctc

SEQ ID NO: 322075 - DNA, 201 bp, Homo sapiens
aagtcaattagaagtacctctcctgccctgaggaaaaggttcctcatttagtttaattttcaaaagttttattcccctttctacttgaaagaatttagccagagtctgaccaagctccatgattgacaagctgggctaatttcatgccttcctaagcctttgcatgttggggtatgctgctgaggcagaggattttacatt

SEQ ID NO: 322076 - DNA, 201 bp, Homo sapiens
ttgacatggatcatttatggggtgcctccatcctgccggctttgtctgtggctatgacaaccctgctatgcctatgtcagccatgtggggttggtcaacartggctctcactggtcagcatgagagagcctgggccatttcaggcacctgctgagtctttgaagctgacttcccctctctgtttcccagcctccagcaagt

SEQ ID NO: 322077 - DNA, 201 bp, Homo sapiens
gtccaactccccaccatctcagtccccaggctcctgctctgaagcctccagactgtggtttaagtgtcacatttgtatttgtggttgagtactgagagacrcttggctgctattttacttggctgcttttttttccagaaatcctatttgtatggcctgcccctggggagaccactccctgctcagtagttttcagagaac

SEQ ID NO: 322078 - DNA, 201 bp, Homo sapiens
aggaatgatgtttttcttttctccttgagggaaaaataagcggagttagttagctatttcctttttttctagcttttctttaaattgtagtaaaatagacrtgagatttgccatcttaaccattttcaaatgtgtatagttcagtggcattaagtatattcacatcattgtgcaaccatcactactgtccctctctagaat

SEQ ID NO: 322079 - DNA, 201 bp, Homo sapiens
aattgtagtaaaatagacatgagatttgccatcttaaccattttcaaatgtgtatagttcagtggcattaagtatattcacatcattgtgcaaccatcacyactgtccctctctagaattccttgtatcttgcaaaactgaacctctagactcattaaacactaactcccccttaagaccctgctttcagttattttggaa

SEQ ID NO: 322080 - DNA, 201 bp, Homo sapiens
aacaaggacaaggacatgctgaagtaagtgccctggggtgggggtggggactcagcccctagactccagctggccttgttgggtagtcaggtgagaggtayaggtttcctcttccaagctactgggctgtggggataaggtgtgggaggggagtaggttgcagcaggatccccctagagagttagcccagtgttgttaccg

SEQ ID NO: 322081 - DNA, 201 bp, Homo sapiens
acacacattttagcagaacccactgtacttctttcttcattctctgagtctatctctccaagtactgctatgcattaaacagcaatagcagcaaaacctgyctcataataaccagcaaaaaatcaagcagatatcaaataagcattaaaaatttcaggtcagcatttttgtcaagacagcatgtatataccacaatatata

SEQ ID NO: 322082 - DNA, 201 bp, Homo sapiens
tggcaatgctgttttggatataacacctaaatcacaatcaaccaaagaaaaaaaataaattggacttcatcaagattaacatatattgtgtttcaaataamgtgaaaagataagtcacagaatgggagaaaatatttgcacatatgtctcttaaaggacttgtatccagaagagaacccaattaacaatggatttaagtag

SEQ ID NO: 322083 - DNA, 201 bp, Homo sapiens
taagagaaaccactcagactgcatgcatcctctccctcttactctctcagaggaagagaagaacaatcatcaatggcaaatagcagttgcagtgaagcaaygccaagaaccaacttcacgctcaggagagaatactgaacctcctccttgtggattccagggctgcgccatttaaaaactcttcttcttccttttctttgc

SEQ ID NO: 322084 - DNA, 201 bp, Homo sapiens
tgcttataagcagattaggtgtggtatgtagacaaattttcttgaagtcaagagtatcattaacattcactaacgccctttctagtggcaggcatagcagrtataattttgccctggacatagtttgttcatatggacgaaagttcatagattggaagtttgtaataaggactgtcaattttttttcttttttttttttcc

SEQ ID NO: 322085 - DNA, 201 bp, Homo sapiens
tcaggtaatccacctgccttggcctcccaaagtgctgggattagagtcatgagccaccacggctgaccaattttttttttttctttggagacagaatctcrctctgtcacgcaggctggagtgcagtggtgtgatcttggctcactgcaacttctgcctcccaggttcaagtgattctcctgcctcagcctctggagtagc

SEQ ID NO: 322086 - DNA, 201 bp, Homo sapiens
ccacggctgaccaattttttttttttctttggagacagaatctcgctctgtcacgcaggctggagtgcagtggtgtgatcttggctcactgcaacttctgyctcccaggttcaagtgattctcctgcctcagcctctggagtagctgggactacaggcacccgccgccacgcctggctaattttttgtattttagtagcga

SEQ ID NO: 322087 - DNA, 201 bp, Homo sapiens
cagctacttacaggctgaggcaggagaatcacttgaacgcaggaggtggaagctgcagtgagcttagatcacatcactacattccagcctgggcgacagartgagactatctcaaaaaggaaagaaaaaaagaaagaaaagcattaacttagtgccattgaatttatctaggaattcagtgtttattgctgttcagataat

SEQ ID NO: 322088 - DNA, 201 bp, Homo sapiens
tacaggctgaggcaggagaatcacttgaacgcaggaggtggaagctgcagtgagcttagatcacatcactacattccagcctgggcgacagagtgagactrtctcaaaaaggaaagaaaaaaagaaagaaaagcattaacttagtgccattgaatttatctaggaattcagtgtttattgctgttcagataattttgttca

SEQ ID NO: 322089 - DNA, 201 bp, Homo sapiens
cattttttacatatcctagaaagataactggtgttatgctataagttagtatgtgttcttgaaaaacttcatgttctgcaaaatcacataccgaaaataacagctgatttttcaagaaaaacagagttgaggcaaaccactaaaaacctatgtatctcatgtggtttcagtcagatggtggctgggtagcagtcatcaaag

SEQ ID NO: 322090 - DNA, 201 bp, Homo sapiens
aaggaatttttggggttgccccaattggaagcaattgttccctccctctgaacccccatgctacttaatttgccactctctgggttttttacttgtattayggttatttttctaagtgccacctgcttcctactaggtttgcaacaatgaagtttctgtcccctggactaatttgggttaatttaaatctaggcttttatg

SEQ ID NO: 322091 - DNA, 201 bp, Homo sapiens
tgtgttcgccaggctggtctcaaacccctgaacttgtgatccgcccacctctgcctcccaaagtgctgtgattacaggcgtgagccactgtgtccggcctrttgcttatattgctgaatgaaatatatgtgttactacttttttagctatgtttagacatattagttgacttcccgtgatggaagataaataatttgacct

SEQ ID NO: 322092 - DNA, 201 bp, Homo sapiens
ttttatttgagacagagtattgctctgttgcccaggctggagtgcagtggtatgatcttggctcagtgtaacctccacctcctggcttcaagcgattttcytgcctcagcctcccaagtagctgggactaaagtcacgcaccaccatgcccagctaatttttttatatttttagtagagatggggtttcgccatgttggcc

SEQ ID NO: 322093 - DNA, 201 bp, Homo sapiens
atgcactgatagtcccagctacttgggaggctgggggggaaaaaaaatatatatatatatatatacacacatatgaaaaatagattaagtgaaatatagtrggtcagatgaaaatgcatttagcacgggtaagtgatttgcaggtaattagtagacattatatataagattagaaatcacacagctgattcgtgttaataa

SEQ ID NO: 322094 - DNA, 201 bp, Homo sapiens; identical to SEQ ID NO: 67438

SEQ ID NO: 322095 - DNA, 201 bp, Homo sapiens
ataccttttaagtctttgaatccaagtttcccaaatatgcctgatcctaaccatcctatggaatgcttgttaaaaattagatttctgaaatttacttcagrccaagttgtctcagaatctgtgctaacaactgccccaagtggtgattaaaattagtcaagtataggaaacatcctgctccttttggcagcggaggaaaca

SEQ ID NO: 322096 - DNA, 201 bp, Homo sapiens
actccagcctggcggcagagcaagacactgtctcaaaaaaaaaaaaaaaaatgtagctgaacaaatatatatttttgatatagggtggctacatgaattgkattatttatttaatgtatatgcatttatatatgcatattagtgtttgagtgtatatatagaatctcactaaaaataaatatgagtgatttaaggaattat

SEQ ID NO: 322097 - DNA, 201 bp, Homo sapiens
caactgccccaagtggtgattaaaattagtcaagtataggaaacatcctgctccttttggcagcggaggaaacagctgcaatgaactaagtttcttaggcrgggttgtctagttttagtttttttaaagaaattatgtcttactgacttaaatactgaactgagtagtcagtcacgaattaaatctttgattattccagcc

SEQ ID NO: 322098 - DNA, 201 bp, Homo sapiens
ctttataaagtatattcatatgtgaatgacaggataccatcttttttctgattctcgtggtcctatgtggaatagggaccttgaaaatgtttgataaatamaaatgtatgaatgcatgggatttccatatttgaaaatgtcaccattgtgtcttttttttcaaatgtgcttctactgtttccagtagtgcatttattttac

SEQ ID NO: 322099 - DNA, 201 bp, Homo sapiens
tgaacagtgaagtgagaaaaatacatcagctccagaaggggatgctactgatgatttggaagtagaataggttagagcataatgtgtatgaccatttattsaggcaatctgcaaatatttattgattacctatatgagacagaccctagctaggtactgggaatatactgagaatatactggtctatatatactggcctct

SEQ ID NO: 322100 - DNA, 201 bp, Homo sapiens
gactcagtgtactcttatgtgatgtgactgtaatcctttgtgatatgtataagttgctatgtaaagggtttgtgttcttaagtggcaacaaaggtggaaaycatttataaaggatatttaaaatcatcctgaagtagaagcagccattatgggggaacaaagatcacaacaaggcactctttaagtgtggaaccatggttc

SEQ ID NO: 322101 - DNA, 201 bp, Homo sapiens
gtgaccgaatgctattctgcttttgatggtgatgtgttaccctaacactgattaaagaaaacaatactgaaacaaaaatatccatattctcttaaaatggrcttgtccaaactataaaattgaatatcacatttacctttaggattaagatataaccccactggaaaacttttccttgccttctaataccagattttaaaa

SEQ ID NO: 322102 - DNA, 201 bp, Homo sapiens
tctggttcttggtatatttggttactgatctctactctctgctgaggctgaggtttttctttttggctaggtcccaagaaggttaaaatacccttgaatckaagtgaagatgtaaaagtttatcttgagctccatgaaaagggtattactgcatacttactgaggtttgcagatccctgcagaatattaatttcctacata

SEQ ID NO: 322103 - DNA, 201 bp, Homo sapiens
tttttattgtgtagagttagcatattagtgtgtaataagaatttatctcttcctagagtaatcctgaaagatgagttataattcaagctcctatctttatrtggaatctgaagtgcattctctattaactagggtattccctgtcacctttgtctttaagccaaaacattagacctactactgttgaatcacagcttgact

SEQ ID NO: 322104 - DNA, 201 bp, Homo sapiens
cacagagagctaactgttttagaaaacagttcagtgtatatccagatatttaacatttcatttgctttagaagcacaactttaagccatctcaattacttyaattagtcacaactggaactttgcttttgaagctgcagatttattgaatagtttaaaattatctttgctcataggaaatgctgcctggcaagaacagttg

SEQ ID NO: 322105 - DNA, 201 bp, Homo sapiens
tttaatttgtagttttagtttgtcaacttagtaaaagagacattttagttttatcctgacagaactttaattatgtaattaacaaaatatccaaaaataaraaaccttaaatttcatttttatttttagatttttgggctttcatttaattggatttgtatttgtaccctgagcaatccttttaattagcagttgaagtta

SEQ ID NO: 322106 - DNA, 201 bp, Homo sapiens
gtaatgctttaatgagaaattacatgataaaaagggactctatacagttgcatgacatggggatcttttagacagaatttatatgtataacataatctttwtactaaaatttactttaaaactgattggttaataattaatttgactttctagttactatagtgtgctacacttaggaatatgatcttcagattctataaa

SEQ ID NO: 322107 - DNA, 201 bp, Homo sapiens
agccactgtgttttagccagtttatgggagatttgagggtactgcaaagatgtctttgttgtgtcttgatgtgctgtgagcgtaggttttggatagtggamaaacattctttcctatcttttataactgagcaaagttcctagtaggtttgcaaaggtatcatagcctgaaaaaaggttgggagacctatcctttttgctt

SEQ ID NO: 322108 - DNA, 201 bp, Homo sapiens
atttaacataggtttccccatgattaacttatgggaatgatttgctgataattaaagatttttaaatggcattgaaatttccagaaatttccaaagttttrtaaatatctctttctctcttttattttaggctaaaataaatgaagctgtagaatgcttactgtccctgaaggctcagtataaagaaaaaactgggaagga

SEQ ID NO: 322109 - DNA, 201 bp, Homo sapiens
actattgatttctattgaggccgagtatgtattgtttaaatgctaagaacagaattgggaatatgtttatgttaaaatacatagatggagaaagagtaaarcattttcttcctaatacagcaatgaactgctaacagtttagtaacacagaagacttttgtatggttaaagaatagaatgaatgtataaatttgcatactg

SEQ ID NO: 322110 - DNA, 201 bp, Homo sapiens
ttcctctattttgatagttgtgagttttcttcttcttcacttaaactgttgagcactgacacagttcatagctttgcaatagtgatacctaaatttaaaayagtttttgtggaagcttatttttattatgttagaataaaaacgatctcgagcgcttgtttatgattaccctcacgtaactagtatactaaaatgtttatg

SEQ ID NO: 322111 - DNA, 201 bp, Homo sapiens
tgcaaagatgtctttgttgtgtcttgatgtgctgtgagcgtaggttttggatagtggaaaaacattctttcctatcttttataactgagcaaagttcctartaggtttgcaaaggtatcatagcctgaaaaaaggttgggagacctatcctttttgcttgccagtttaatatagaactcaaatgttccttctgcagaatag

SEQ ID NO: 322112 - DNA, 201 bp, Homo sapiens
gggatttgttctaaaatgtcagatctgttgtcctgtcagggtcctaggctcaggctggagaattcagtaagttcttcaccttatcaacaagttgctggcayctgacatgaaacactgccacctaagatactttgattcatgaatatttgacctcatattttgaggtcttgccccaggagttaatatttttctgtctctcca

SEQ ID NO: 322113 - DNA, 201 bp, Homo sapiens
aagtagaatatattgagattctgtgccaatttttggtcagcttaattatgggtggaatagtaacagaagcaaccgttgtacttggagtgacagtcaactaygaatccatcacccatccttttgggttaatgggttacatcatgctttcataaaatatcactgttgaggttatgaaaagtcagcttaaggtaaaaagatcta

SEQ ID NO: 322114 - DNA, 201 bp, Homo sapiens
caaaatggtgcataacaacaataggctaattgagataaacaagaaattaagtaggccaggtgcggtggctcatgcctgtaatcccagcactttgggaggcygaggtgggcagatcataaggtcaggagatcgagaccatccttgctaacacagtgaaaccctgtctctactaaaaatgcaaaaaattagctgggtgtggtg

SEQ ID NO: 322115 - DNA, 201 bp, Homo sapiens
ggttttgggtggccagagcccatccttgtagctcagggctcaaggcaggaaccagccctggataagacatcattccattgcagggcacactcacacacacygacactcagaccgggagcatttagactcaccagttcacctaatgtgtgcagctttgggatgtggaatgaaactggagttcccagagaaaactcacacaga

SEQ ID NO: 322116 - DNA, 201 bp, Homo sapiens; identical to SEQ ID NO: 67439

SEQ ID NO: 322117 - DNA, 201 bp, Homo sapiens
agtaattcaaattttataatgcttgatgcaggtgactttaagttaataaatatatacatgttcctcatcaattgtatgtgaatctgttctctagttgattrttagtatctcgatgtcagtgattatgttgtatttattaaccaatatatgtctggcatgttagaagctcaaataaatgtttgatttggaatttttccaaag

SEQ ID NO: 322118 - DNA, 201 bp, Homo sapiens
cccatagtttccttgttttaagaaagggagaataatgtcttccagataggattggttgccagagttaagtgagactatagttaaagctcctgatactgttwttttttttttttttttttttttttttggagaccgagctcattgcaacctctgcctcccaggatcaagcaattcttgttctcagccacacgagtagttgcg

SEQ ID NO: 322119 - DNA, 201 bp, Homo sapiens
tcctagctctttgggaagccaagatgggtggatcgcttgagctcaggagttcaagaccagcctgggcaacatggtgaaaccccgtctctacaaaaaaaaamaaaaaacaaaaaaaaaaacgatgtaagtaatgtttccattttatagatgataggaagtgaaacacagtgaagttgagtaacttacctgaggacaaacagt

SEQ ID NO: 322120 - DNA, 201 bp, Homo sapiens
ttttacatatcctagaaagataactggtgttatgctataagttagtatgtgttcttgaaaaacttcatgttctgcaaaatcacataccgaaaataacagcygatttttcaagaaaaacagagttgaggcaaaccactaaaaacctatgtatctcatgtggtttcagtcagatggtggctgggtagcagtcatcaaagactc

SEQ ID NO: 322121 - DNA, 201 bp, Homo sapiens
ttacatcagattatggttcaggatacttcacaagacttacatcagcttggggatcttctggaaaatcttcagaatttgtgttaattgatttgtatcagagraaaatagcaggtaaattgtgatttaggtaaacgaatcagcccagttgataagcaggagaacaggtgttgtgttctaatttaggtttgatgtcaggatctc

SEQ ID NO: 322122 - DNA, 201 bp, Homo sapiens
taagcaggagaacaggtgttgtgttctaatttaggtttgatgtcaggatctcggctctaccctgtgctgtattggctcctagaatcaggtttcagtaatckgttattccttacaggtgtaggtatttaagctatgcacaactggttaattattttcttaaaatgcctctctttgcaacctgtgaacttctagtttactaag

SEQ ID NO: 322123 - DNA, 201 bp, Homo sapiens
taagagatgtctctgctgtttttgtttctttcttttttttttttttttcttttgagacggagtttcacttctgttgcccaggctggagtgcaatggcgcartctcggctcactgcagcctttacctcccaggttcaagcgattcattctcctgcctcagcctcccgagtagctgggattacaagcatgcgccaccacgcct

SEQ ID NO: 322124 - DNA, 201 bp, Homo sapiens
aattgatatagcaaaaattaaaacagaggaaatttgcctgcatttgtactgttgctccaaaatgctattgaaaaaaaagtatgaaaaatgattttttcttmctaggttgcttgggttacaagatctggcaaaaccgagctggcagaaccaattgccattcgtcctactagtgaaacaggtgagaataggcattggagtgca

SEQ ID NO: 322125 - DNA, 201 bp, Homo sapiens
aatagtcatttttctagaaatagttgcagggaagttccttcttttccatttttattttagctggtggaaatttcccttttttccccccttgattctcataygtctgattaacttggccctttttcttgagataaagtagtttctgctgtgaaaactctttcctaaaaacagaataaacaagagacacaacaggagtacaaa

SEQ ID NO: 322126 - DNA, 201 bp, Homo sapiens
tgcaaattttttgaaggtataccattggtatcctgcattcctctgatgcccatttgagtattcttcatggcttctgcctggtttcatttagctatctggarcattattcgaatgtagcagtaaaaattggatagggtgatttggagacacttttcctatctattttgattgatacctccaagttcccagtggtacactggt

SEQ ID NO: 322127 - DNA, 201 bp, Homo sapiens
ccatttcaggtaaggtgtccagcttgggccctttgcctgtgttgctatcattctctgctagagagtcacaagtgtctcggtggggctgagtatatcattcttttttattattatgttgaagtatcagattaaaatatataggtaagtgtctaaaaacttcaacatgctttctcatctcattgtcagtttttaaaattgata

SEQ ID NO: 322128 - DNA, 201 bp, Homo sapiens
catttcaggtaaggtgtccagcttgggccctttgcctgtgttgctatcattctctgctagagagtcacaagtgtctcggtggggctgagtatatcattcttttttattattatgttgaagtatcagattaaaatatataggtaagtgtctaaaaacttcaacatgctttctcatctcattgtcagtttttaaaattgatat

SEQ ID NO: 322129 - DNA, 201 bp, Homo sapiens
caggtaaggtgtccagcttgggccctttgcctgtgttgctatcattctctgctagagagtcacaagtgtctcggtggggctgagtatatcattcttttttattattatgttgaagtatcagattaaaatatataggtaagtgtctaaaaacttcaacatgctttctcatctcattgtcagtttttaaaattgatataacta

SEQ ID NO: 322130 - DNA, 201 bp, Homo sapiens
agatttgaattttggttatcatactcttgccacttatactagaattttggttcaatgtaagctttaaagactatttttcttttaaaaaggtcatcacaaartcagaaatgattgaataccatgacataagtggctgttatattcttcgtccctgggcctatgccatttgggaagccatcaaggacttttttgatgctgaga

SEQ ID NO: 322131 - DNA, 201 bp, Homo sapiens
ccactctctgggttttttacttgtattatggttatttttctaagtgccacctgcttcctactaggtttgcaacaatgaagtttctgtcccctggactaatktgggttaatttaaatctaggcttttatgagatataaatgtgagggcttcaggcattgactgtcatctgctgggtacacattggcagcacctgggaagctt

SEQ ID NO: 322132 - DNA, 201 bp, Homo sapiens
gattcacatgagtggaagacagttgtagttttgaaatttaactttattagaacttgataaccattatctcatctttataattgtgaaatgttcaacttatrtaatttaatggctcttaacttagattcctatggaatacatgttagataccagtgctttctagtagaactttctgcagtgatggaaatatgctataacaat

SEQ ID NO: 322133 - DNA, 201 bp, Homo sapiens
tgatatatggcacttgatattggcatcgcagatcaagtgggggaaattattgatattcagtaatgttgctgggatatttggttttccatataaaaatataygtatatcatctaggtttgtgtaagtacaagctatgatgtttgcacaatgatgaaatcacctaacagcgtatttctgaaaatgtattcatgtcattaagtg

SEQ ID NO: 322134 - DNA, 201 bp, Homo sapiens
tctgggaggccagaacaggaggattgcatgaggccaggagttcaagactggcctgggcaacatagcgagaccctgcctctaccaaaaaataaaaataaaawaataagccagacgttgtatgcacctgtagtcctagctactggggaggctgaggtgagagaatctcttgagctgaggaatccgaggttgcagtgagacagg

SEQ ID NO: 322135 - DNA, 201 bp, Homo sapiens
gactacaggcacacgctaccacgcccggctaatttttgtagttttagtagagactgggtttcaccatattggtcaggctggtctcgaactcctgacctcargcaatccacccacctcggcgtcccaaagtcctgggattgcaggcctaagccacaatgcccggtggaattcaagttttatggagagtttggaaccctgtta

SEQ ID NO: 322136 - DNA, 201 bp, Homo sapiens
taatggtggtggtaccaccaactaaaataacagagtaggttctcattttattcttagaaagtttttgaacttttcaacaaatagtgctagaagaactgaayagctacacatgaaagagtgaagttgggcactttctcatatcatatacaaaaattaactcaacatttatcaaagacctaaatgtaagagctaaaaactata

SEQ ID NO: 322137 - DNA, 201 bp, Homo sapiens
ttagatgaaacattttaaaataatagttgcattgctagaattttcctattttgtatgcattcatcatgttatatatttaatgttaatttcaaacttaaaayaaagacctttttcccccataccacccaagagcatactgtagatatgaggcttcagtatctcagcataactccagtgtacatccccaacaaacttggaaac

SEQ ID NO: 322138 - DNA, 201 bp, Homo sapiens
gattcaggctctttgtttttggcaggaatagcgtagttattccttgttcttcattgcagcccatcagttggtgcatgaatttaattttcccattactgatkattctaaccttaattttaatgggcagatgcattggaatcatgtaaatgttccactttgcatcagatcttcacccactagtttcagtatccattgatactt

SEQ ID NO: 322139 - DNA, 201 bp, Homo sapiens
tctgttattccttacaggtgtaggtatttaagctatgcacaactggttaattattttcttaaaatgcctctctttgcaacctgtgaacttctagtttactwagtctcctagcagactttaaaaaatataatacaagcatcatcactctcttccctcactcacttggaaggattttctgttctgattacctttcattcatcc

SEQ ID NO: 322140 - DNA, 201 bp, Homo sapiens
aaatgcctctctttgcaacctgtgaacttctagtttactaagtctcctagcagactttaaaaaatataatacaagcatcatcactctcttccctcactcasttggaaggattttctgttctgattacctttcattcatccccctcccaaccaagtgagaatctctgctttcaggagtcatcattaccaacgtgtgtagata

SEQ ID NO: 322141 - DNA, 201 bp, Homo sapiens
ggtcttgacactgacagtttacttagatgttctattatttgtctgtttacttaagtaaaatagaaagttacactgttgtatgttgaattgtatttttgttwattcagcttatatataatttatgtttttaatttagctttatcacttattgtaggctgatgatttaacataggtttccccatgattaacttatgggaatga

SEQ ID NO: 322142 - DNA, 201 bp, Homo sapiens
aagagtatcctgcttctcattgggatgatgaaggggctttcagggagcccatgagctcagactctcaacctgagctgtgttctttagataggcacggtctrtagtgccaatgcctgtgggaccttagggccggaccaaaccattctgtcccttaggcatgaggtggcaaaataagaatgcttctgctttaaaggcagaatg

SEQ ID NO: 322143 - DNA, 201 bp, Homo sapiens
tgccataattatttttaaattttaataatacatttaggtttgcattcatgtagggtgttcataggttgctaagtacttttacgtcatctcgtgttattctkacaacagtgttgtgaggaaggcagggaaagttactgtgatttccattttgcaggtaaagaaaagtctctgaaagattaaatgatttttctgaaattacgt

SEQ ID NO: 322144 - DNA, 201 bp, Homo sapiens
taccacgcccggctaatttttgtagttttagtagagactgggtttcaccatattggtcaggctggtctcgaactcctgacctcaagcaatccacccacctyggcgtcccaaagtcctgggattgcaggcctaagccacaatgcccggtggaattcaagttttatggagagtttggaaccctgttatatgttgtttttcagt

SEQ ID NO: 322145 - DNA, 201 bp, Homo sapiens
taatttttgattacttattatataaaatggtaataaaaattggaaagtggctgggcgtggcagctcatgcttataatcccagcactttgggaggtcgagcsgacagatcacttgagcccaggattttgagaccagcctgggcaacatggcaaaaccacatctctactaaaaatgcaaaaattagccagctgcattggcgtg

SEQ ID NO: 322146 - DNA, 201 bp, Homo sapiens
ccatatgtattgctggtagggttgtagaatggttcagccactttggaaaaacagttggatgattcctccaaaaattaaacacggagttaccatttgatccrtcaattccattcctgtgtatttgccaaagaaaaataacatgttcacacaaaaatgtgtacatgaatgtttacagctgcattattcataattgccaaaaag

SEQ ID NO: 322147 - DNA, 201 bp, Homo sapiens
agcctgggcaacatggcaaaatctagtctacaaaaaattagccaggtgtggtggcatgcactgatagtcccagctacttgggaggctgggggggaaaaaawatatatatatatatatatacacacatatgaaaaatagattaagtgaaatatagtaggtcagatgaaaatgcatttagcacgggtaagtgatttgcaggta

SEQ ID NO: 322148 - DNA, 201 bp, Homo sapiens
tcgagcaattctcctgcctcagcctcccaagtagctgggactacaggcacatgccaccacgcctggctaattttttgtattttagcagagatggggtttcmccatgttgtccaggctggtctcgaactcctgagctcaggcaatccgcctgcctcagtctcccaaagtactaggattacaggtatgagccattgcatgtgg

SEQ ID NO: 322149 - DNA, 201 bp, Homo sapiens
caacttataacaaagcaagtccaatacaaataattaaattttcctgcttgaatcatttgaaaataagatgctaacctgatgctccatcaccctgcaaacayactctcctacataatcacagcacaagcaacatagtacaaccaacatattctcctacataatacaatacaagttagtatagtagtgttcatacattacaat

SEQ ID NO: 322150 - DNA, 201 bp, Homo sapiens
tttcaccatgttgtccaggctggtctcgaactcctgagctcaggcaatccgcctgcctcagtctcccaaagtactaggattacaggtatgagccattgcaygtggcctttttttttttttttttttggggacggagtcttgctctgccacctaggctggagtgcagtggcgtgatctcggctcactgcaacctctgcctcc

SEQ ID NO: 322151 - DNA, 201 bp, Homo sapiens
gagctgtctgactagtgtttctttatagcagaatgacctagttcagaattatgtgttgcatgtagttattatgtatctttagtctctttcagtctgcagtmatttctcaggttttctttgattatcgtgatcttgacacagcacattttttattagcctttctattagctaattcatattttatggatccatggtttccag

SEQ ID NO: 322152 - DNA, 201 bp, Homo sapiens
catcttacatcagattatggttcaggatacttcacaagacttacatcagcttggggatcttctggaaaatcttcagaatttgtgttaattgatttgtatcrgaggaaaatagcaggtaaattgtgatttaggtaaacgaatcagcccagttgataagcaggagaacaggtgttgtgttctaatttaggtttgatgtcagga

SEQ ID NO: 322153 - DNA, 201 bp, Homo sapiens
ccctgtctctactaaaaatacaaaaaattatccaggtgttgtggcacatgcttgtaatcccagctacctgggaggctgaggcaggagaattgcttgaaccygggaggcggaggttgcagtaaaccgagaacgcgccactgcactccagcctgggtgacagagttagactctgtctcaaaaaaaaaaaaaaatcagcattaa

SEQ ID NO: 322154 - DNA, 201 bp, Homo sapiens
tgctgggtatgctcattgcttttgagctatcacttctcccgggccttctcagtagatggagctactgaatatgtatatatatgtagatatccatacacacwtacagatatgtgtacacttttaccaccatatttccatatctatttatgtatgttgaaaaccaagagtttatatctatactttaaattccaataaaaaacc

SEQ ID NO: 322155 - DNA, 201 bp, Homo sapiens
tctggatttatatttatttgacagcgattgaccaaagtgtgtgagcgatgtgtacgcgcattttgaaacttattcagattaataaatgagctataatattrtttgattgtgaggccagaacccagcaactcctgtaattcttctttggtaccccttcctatattatgaaagtataaaggggaaaataatctgagtgaatta

SEQ ID NO: 322156 - DNA, 201 bp, Homo sapiens
cattgctaaaaatgaatttattcttttatgaacttttattttaggttcagtggtacatgtgcaggtttgttatgtagataaacttgtgtcatggggtttgytgtacatattattttgtcacccaggtactaagccatccaatagttatttcttctgctcttctccctcctcccaacatccaccctcaagccccagtgtctg

SEQ ID NO: 322157 - DNA, 201 bp, Homo sapiens
gctgggtatgctcattgcttttgagctatcacttctcccgggccttctcagtagatggagctactgaatatgtatatatatgtagatatccatacacacatacagatatgtgtacacttttaccaccatatttccatatctatttatgtatgttgaaaaccaagagtttatatctatactttaaattccaataaaaaacca

SEQ ID NO: 322158 - DNA, 201 bp, Homo sapiens
agccatccaatagttatttcttctgctcttctccctcctcccaacatccaccctcaagccccagtgtctgttgttcccttttttgtgttcatgtgttctcrtcgttaagctcccacttataagtgagagaatgcagtatttggttttctgttcctgtgtcagtttgctaaatataatggcctccagtgccatccatgttgc

SEQ ID NO: 322159 - DNA, 201 bp, Homo sapiens
tgggtatgctcattgcttttgagctatcacttctcccgggccttctcagtagatggagctactgaatatgtatatatatgtagatatccatacacacatacagatatgtgtacacttttaccaccatatttccatatctatttatgtatgttgaaaaccaagagtttatatctatactttaaattccaataaaaaaccata

SEQ ID NO: 322160 - DNA, 201 bp, Homo sapiens
atgtgttctcatcgttaagctcccacttataagtgagagaatgcagtatttggttttctgttcctgtgtcagtttgctaaatataatggcctccagtgccrtccatgttgctgcaaaagacatgatctttttttttttttatggctgcatagtattctgtggtatatatgtaccacattttctttatccagtgtgtcactc

SEQ ID NO: 322161 - DNA, 201 bp, Homo sapiens
ccatcttaaacctttaccaaagtcttttgtataggttgtttcttttctcattaatccacatcagcaattatttgctgaaaaccttttctgtttgtattggyatatgttaggtaagtttaaaacagtctttgtccactaacaacttaaaatctactagcaatgctctctcagcttctgctgttgtatgatattgtactaaat

SEQ ID NO: 322162 - DNA, 201 bp, Homo sapiens
ggtatgctcattgcttttgagctatcacttctcccgggccttctcagtagatggagctactgaatatgtatatatatgtagatatccatacacacatacasatatgtgtacacttttaccaccatatttccatatctatttatgtatgttgaaaaccaagagtttatatctatactttaaattccaataaaaaaccatagg

SEQ ID NO: 322163 - DNA, 201 bp, Homo sapiens
catcgttaagctcccacttataagtgagagaatgcagtatttggttttctgttcctgtgtcagtttgctaaatataatggcctccagtgccatccatgttsctgcaaaagacatgatctttttttttttttatggctgcatagtattctgtggtatatatgtaccacattttctttatccagtgtgtcactcatgggcatt

SEQ ID NO: 322164 - DNA, 201 bp, Homo sapiens
tgctcattgcttttgagctatcacttctcccgggccttctcagtagatggagctactgaatatgtatatatatgtagatatccatacacacatacagatakgtgtacacttttaccaccatatttccatatctatttatgtatgttgaaaaccaagagtttatatctatactttaaattccaataaaaaaccatagggtgg

SEQ ID NO: 322165 - DNA, 201 bp, Homo sapiens
aaagacatgatctttttttttttttatggctgcatagtattctgtggtatatatgtaccacattttctttatccagtgtgtcactcatgggcatttaggtkgattccatgtctttgttattgtgaatagcgctgcagtgaacatttccatgcatgtgtctttatggtagaatgaactatattcctctgagtgtatagccag

SEQ ID NO: 322166 - DNA, 201 bp, Homo sapiens
ccaccaccacacccggctaatttttatatttgtagaagagacggggtttcaccatgttggccaggctggtctcaagctcctgacctcaagtgatctgtccrcctcggcctcccgaagtgccgggattacaggcatgagccaccacacctggcttgtgatgggtttggatgaggtttgatctgccttcgtagcctctttatt

SEQ ID NO: 322167 - DNA, 201 bp, Homo sapiens
tgaaccctggaggcagaggttgcagtgaaccaagatcacaccattgcactccagcttgggcaacaagagtgaaactgcatctgaaacaaacaaacaattarcagatctattttttactatagtagaaaatacatggtaaatataataaagtttccatttttacatttcttcataagtctcatgacttactgatttgctaga

SEQ ID NO: 322168 - DNA, 201 bp, Homo sapiens
tgtatgatattgtactaaatcatagtataccacccaattcctctttgtaaatgccttttgatccagaaaactagtatattaagagataatttgttctccayccatttgttcttcattgtgtattctaagagataaattcaaagtaatagtcaaacatctctttcgaaaagcagttttcctagcatgttactaggattaaaa

SEQ ID NO: 322169 - DNA, 201 bp, Homo sapiens
gacagtttacttagatgttctattatttgtctgtttacttaagtaaaatagaaagttacactgttgtatgttgaattgtatttttgtttattcagcttatrtataatttatgtttttaatttagctttatcacttattgtaggctgatgatttaacataggtttccccatgattaacttatgggaatgatttgctgataat

SEQ ID NO: 322170 - DNA, 201 bp, Homo sapiens
attactgaagaaagaagtgatcccagtgaatgtacctgaagctcaggaggagatgaaagaagtagccaaacacccaaaggtcactcttacagtttcaccartgtgtttctctctgttaaaagaaggagcaggaaataaaaaggaaaatgtgctttcatggcagtggcatgattttgagatgattttctttctttctttctt

SEQ ID NO: 322171 - DNA, 201 bp, Homo sapiens
gactttttcggagggtgagatggttacatttataaattggggcaacctcaacattacaaaaatacacaagtaagaactttttgtttgttttcaaataaacrtaggagaaaagtattttatttgtgtttacttattaaacattaccaaattcagacccatacatgttgctgactagtaaatctgcccagacatagctactgc

SEQ ID NO: 322172 - DNA, 201 bp, Homo sapiens
gccgagtatgtattgtttaaatgctaagaacagaattgggaatatgtttatgttaaaatacatagatggagaaagagtaaagcattttcttcctaatacarcaatgaactgctaacagtttagtaacacagaagacttttgtatggttaaagaatagaatgaatgtataaatttgcatactgggttcaataagttgttgtt

SEQ ID NO: 322173 - DNA, 201 bp, Homo sapiens
atgaaaagcctagctcaaattatccttagtacatgaatttattagattagtcaccctgtatgccaccaatctctcgttgccattgccaccccctcctctgygtgaatgggctccttatccctcgtgggctctgtcactctatgcaaagctgttctcatgtgcagatgccctcttgcctaactgaggctcagacaccctgct

SEQ ID NO: 322174 - DNA, 201 bp, Homo sapiens
gtggccctctcctttttcagtgtaggatccagtcctattgcattttgccatcatgccttttagttttctttaatcagaagtagttcctcagactttcattrtcatttatgacataggcatttttgtaactataggtcagttttttatagaatgttttttaattcggacgaataatttacttattaatttttaccttctcca

SEQ ID NO: 322175 - DNA, 201 bp, Homo sapiens
tttcagtgtaggatccagtcctattgcattttgccatcatgccttttagttttctttaatcagaagtagttcctcagactttcattatcatttatgacatwggcatttttgtaactataggtcagttttttatagaatgttttttaattcggacgaataatttacttattaatttttaccttctccagtaacttttcttct

SEQ ID NO: 322176 - DNA, 201 bp, Homo sapiens
catcatgccttttagttttctttaatcagaagtagttcctcagactttcattatcatttatgacataggcatttttgtaactataggtcagttttttataraatgttttttaattcggacgaataatttacttattaatttttaccttctccagtaacttttcttctctcttccagctgaggaatattctctcactgctaa

SEQ ID NO: 322177 - DNA, 201 bp, Homo sapiens
cctggatgccaagttgatattggtgttggctgggagctcaggtggaatagttgactgcaatagctgcaagtggcctctctagcatgacagtggcagggtartaagacttcttaactatcatttaaggcctccaaaagtgaatgtccagtagatgaggtgggagtagcattgcattttaggatttagacttgtaagtctcac

SEQ ID NO: 322178 - DNA, 201 bp, Homo sapiens
agaatgttttttaattcggacgaataatttacttattaatttttaccttctccagtaacttttcttctctcttccagctgaggaatattctctcactgctractttctgtattaatttttgttgtttatatgtgtgccttatttaccctacaaagcatgaagcttctagaggacaagatgtatttcttattcatcttgtaa

SEQ ID NO: 322179 - DNA, 201 bp, Homo sapiens
ttctagaggacaagatgtatttcttattcatcttgtaaatctcattgcacttagcactgtatcttacaaatgcatgtaatacatccagtataatacattgrataaataactaaagcaataaaataatgtaatatttagcatacaacagttggttccattgtggtttttttttaaatatcattttgtaaaataagtcttccc

SEQ ID NO: 322180 - DNA, 201 bp, Homo sapiens
acccgtcatctaaattgtatatggaagcatgtaactcaggaaaatcccaagttaattttagaggattattcattcaaaaaaattacttaaaatctactatktatcagataaggttctgggccctaaaaatgtggtttttccctaagccttaaggattttaatccccttacgggatacacattcacaagattgaacattccc

SEQ ID NO: 322181 - DNA, 201 bp, Homo sapiens
ggatacacattcacaagattgaacattcccaagtcgtaaacttgcatatagtctgtccttaagttgctttggaaaaaccaaagagtataggggagtggttyttaaactgtggtcctaggaccagcagtgtcagcatcacttggaaacttgttagaaatacaaactcttggccaagtacggtggctcacgtctataatccca

SEQ ID NO: 322182 - DNA, 201 bp, Homo sapiens
ggcatggtggtaggtgcctgtaatcccagctactcgggaggctgaggcatgagaatcaattgatcttgggaggcggaggttgtagtgagccaagatcatgycactgcactccagtctggtcaacagtgagactctgtcttcaaacaaacaaaaaaaaacaaattctcaggtcgcatccccaacctactctaataaaagact

SEQ ID NO: 322183 - DNA, 201 bp, Homo sapiens
tcctagcatgttactaggattaaaatgcacatttagatctttgttttctgtaatccttagcaaaccgtagtggtcaagatcacagcctctggaataaactygggattcaaatactagctctactacttattgtgtaactctggggaaggaacttaatctttctaaacttgacaacttctctaagggttgttttgagagtta

SEQ ID NO: 322184 - DNA, 201 bp, Homo sapiens
tttgttttacatttatatgtcatataaatatataatctaaatatatagtctttgttttatatttatatatgtcatatataaatatagtgtgtgtgtatatrtatatatatatagtctttgttttctactggcttttctaaagcattacaacattataccattttgggggtaatacttgtgaactgattatgtaagtttttt

SEQ ID NO: 322185 - DNA, 201 bp, Homo sapiens
aggatttttaatttaaatactcatttttatgctgtaaatttttaggacttttcaaggagttttattcttagaataatttttattgttggaattgattatartattgcaaatgcaatttttatgccataattatttttaaattttaataatacatttaggtttgcattcatgtagggtgttcataggttgctaagtactttt

SEQ ID NO: 322186 - DNA, 201 bp, Homo sapiens
tgtcacctttgtctttaagccaaaacattagacctactactgttgaatcacagcttgacttcagagtctcttacactgtcatttcctctgtttggaaagtrtaagtgaagggtccatctaaattctgaatagaattttttttttttttttttttttttgagacagttgcgctttgtggcccaggttggagtgcagtggcat

SEQ ID NO: 322187 - DNA, 201 bp, Homo sapiens
aggttggagtgcagtggcatgattctggctcactgcaacttctgcctcccggcttcaagtgattctcatgccttagcctcctgagtagcttggattacagrtgtgcgccactacacccagcaatgtttgtatttttagtagagatggggttttgccatgttggcggccaggctggtcttgaactcctggcctcaaatgatc

SEQ ID NO: 322188 - DNA, 201 bp, Homo sapiens
ttagctgttacatccctaaaggagaaataaagccttaaatgactgtctctattttcccgtgtctttcagtaatgtatcctgcatatgcaaaatgggtacartcacacagagacctgcccatcaagctcaatcagtggtgcaatgtggtggtaggtattcaccccctcttgtattctattattattcatgttcttttttttt

SEQ ID NO: 322189 - DNA, 201 bp, Homo sapiens
acaagtaccatagagtacttttttgttaagctgtggtcatcccagatccttatgactgcttagttgacaattttgaagcaaaacaagattttttttttttyttaattttgaaatgggccttgctctggtgctcaggctggagtgcagtggcctgatctcagctcactgcatcctctatcttggtctcaagtgatccttcca

SEQ ID NO: 322190 - DNA, 201 bp, Homo sapiens
cctcttgtattctattattattcatgttcttttttttttttttaaagcacattttgtttttattttcaaaggattgggagtatggaactgtttttgaagtrtttaagataaattgtaatttttgattacttattatataaaatggtaataaaaattggaaagtggctgggcgtggcagctcatgcttataatcccagcact

SEQ ID NO: 322191 - DNA, 201 bp, Homo sapiens
aagtaccatagagtacttttttgttaagctgtggtcatcccagatccttatgactgcttagttgacaattttgaagcaaaacaagattttttttttttttwaattttgaaatgggccttgctctggtgctcaggctggagtgcagtggcctgatctcagctcactgcatcctctatcttggtctcaagtgatccttccacc

SEQ ID NO: 322192 - DNA, 201 bp, Homo sapiens
tgtggtcatcccagatccttatgactgcttagttgacaattttgaagcaaaacaagatttttttttttttttaattttgaaatgggccttgctctggtgcycaggctggagtgcagtggcctgatctcagctcactgcatcctctatcttggtctcaagtgatccttccacctcagcatcctgaatacctgggactacagg

SEQ ID NO: 322193 - DNA, 201 bp, Homo sapiens
tactcagtttgctctgtggaattttcattataacatttccgtcgcaaagtattttttatttagcctgtcagtattctattctgagcttagtatgttatctrttgttaaaacatactgatttttctgaaatgcattggtgagttcattgaacagttgttaaacacatgctggttaatgtttatttcaaaagatcttcttact

SEQ ID NO: 322194 - DNA, 201 bp, Homo sapiens
gcttgagcccacaagttcaaggttacagtgacctataattgcaccaccacactccagccttggtgacagagcaagactctctcaaaaacaaacaaacattrttgttagtttcagagtaaaagctaaacttttgagtttgatatgcaagatttttcatgttacggcgtctcttgagccataggtgttggagttttctcgccc

SEQ ID NO: 322195 - DNA, 201 bp, Homo sapiens
gagcacttgatcacaaagccagtgctaggaaaagacgaggactttaagcagtatgtcaacaagaacagtaaggtaaccttccaaagaaaccatatttcacmttttaaattttcctttagaattaaaaaaattaattttatatatttcggatcctcagataaaatggataagatgtgtagaattttatttaaatcaaaagat

SEQ ID NO: 322196 - DNA, 201 bp, Homo sapiens
agttggccgagcatggtggctcatgcctgtaatcctagctctttgggaagccaagatgggtggatcgcttgagctcaggagttcaagaccagcctgggcarcatggtgaaaccccgtctctacaaaaaaaaaaaaaaaacaaaaaaaaaaacgatgtaagtaatgtttccattttatagatgataggaagtgaaacacagt

SEQ ID NO: 322197 - DNA, 201 bp, Homo sapiens
ttcaggtttttactatagtaaaaatgcttcagtgagtatgtaggtacctctatctttgtttacgcctgtcatttttcattaggataaatacttaggagatyattcatttaagctttttaagggattgaagtttaaagtttctgtttttaattggaaacattataaaacaatcagtttgaaataattttgtgggaaaacatt

SEQ ID NO: 322198 - DNA, 201 bp, Homo sapiens
aaaaatcccctaaggtcagtatgttagagaaagtcaagaccacattttcagtgtgtgaattcaaactgcttagagtagtctcatcttcttataaaacatcractgctcatattttgatgtaataatcaacattgattgatacctgctatgtgccaagctctgaaaatatatataagaagctcataatctagtggaggggtg

SEQ ID NO: 322199 - DNA, 201 bp, Homo sapiens
ttttgtgccccatcaaatctggctaacttctactcatatttcagttcttaattctcttaccttgccttttagagaaactttgttgattgtttcttacgccractagatttgactggatgttttcatatgacaccgcccatcactgacatagtacttaaacagactgtattttaattgttaaattgtttgtttccctccaat

SEQ ID NO: 322200 - DNA, 201 bp, Homo sapiens
ccattttgggggtaatacttgtgaactgattatgtaagtttttttttccccatgtttgatatgctactttctaaagaacattaattctgtatgtctccttwtttctttattgaaaatctgtgttatttcagtttctggtaagttcctaaagtaaccattgttctagctttagagctgtcatatgcggctgcctaaaacaag

SEQ ID NO: 322201 - DNA, 201 bp, Homo sapiens
ctgaaggctcagtataaagaaaaaactgggaaggagtacatacctggtcagcccccattatctcaaagttcggattcaagcccaaccagaaattctgaacmtgctggtttagaaacaccagaagcgaaagtactttttgacaaagtagcttctcaaggggaagtagttcggaaacttaaaactgaaaaagcccctaaggtt

SEQ ID NO: 322202 - DNA, 201 bp, Homo sapiens
ttcctctgtatctttttttgtgttttaaattcatgctgagaatgagcatgaatttatgtaaagctttaatttttatggtcataacgtattaatatgtctcktatttcttgagctgggaaaattaatctctctggctttcattttactattctgtaaaatgagtacaaaatagataatatcaaaatcctctttagatctata

SEQ ID NO: 322203 - DNA, 201 bp, Homo sapiens
gctgggaaaattaatctctctggctttcattttactattctgtaaaatgagtacaaaatagataatatcaaaatcctctttagatctataattcttcagtrtttagccttctatccttattgggttattgcttttgtaatttttcacctttctggtttctgtagtttttcacttgactcaaacttcctgcttttttttttt

SEQ ID NO: 322204 - DNA, 201 bp, Homo sapiens
ctctgcctcccgagttcaagcgattctcctgcctcagccttccacgtggctgggattacaggcgcctgccatgacacgcagctaatttttgtatttttagkagagatggggttttgccattttggccaggctggtcttaaactctgacctcaggtgacccacctgccgtggcctcccaaagtgctgggattacaggcgtga

SEQ ID NO: 322205 - DNA, 201 bp, Homo sapiens
cctcggcctcccaaagtgctgggattacaggcgtgagccactacacccggcctgtaaatgaagttttattggaatacagccacactcatggtgtacatatygtctatggctgctttcatgctacagttagagttgaatagttgcaaccaagactcacatagtctaaaatatttattatatagccctttatagaaaaagttt

SEQ ID NO: 322206 - DNA, 201 bp, Homo sapiens
aactagatttgactggatgttttcatatgacaccgcccatcactgacatagtacttaaacagactgtattttaattgttaaattgtttgtttccctccaayctgtaagatccagaatagtgacctagaccctagcacagtgctcaccccattgaaggcccttaatatttaccttgtttttcattctttctcctaaagctct

SEQ ID NO: 322207 - DNA, 201 bp, Homo sapiens
atatttaccttgtttttcattctttctcctaaagctctgtcaaactgaaatagtaggttttattttgagctcttagtagtttgtgctagttctttaagtgygaattctgttatctttttaggagtaggtttttctgtacagattcacatgagtggaagacagttgtagttttgaaatttaactttattagaacttgataac

SEQ ID NO: 322208 - DNA, 201 bp, Homo sapiens
aacgtcagcagatagcatttattgattttccatttagttttaaaaataggtaacacgtttgtttggttcaagaatctcagaatgtaagaagttcctgtgcrtgtttcccatctttccggttttccccaccaccgtaatcagtcagtagccactgttaacagtttcttctgtatctgttgagcgattttcatttattattca

SEQ ID NO: 322209 - DNA, 201 bp, Homo sapiens
tctttccggttttccccaccaccgtaatcagtcagtagccactgttaacagtttcttctgtatctgttgagcgattttcatttattattcaagtaaatacwgatacacacacacacacacacacacacacacatacatattttctctcctcctttttaaacatgattggtagcctaattatacacattgttttgcacctta

SEQ ID NO: 322210 - DNA, 201 bp, Homo sapiens
taagtacaagctatgatgtttgcacaatgatgaaatcacctaacagcgtatttctgaaaatgtattcatgtcattaagtgacgcataattgtaattttttrtctgtttccacaattacagtgaactttgtgatgggtttcccttaatggcttacttaataagaagaaaaagctgttactgagatactttggttttacattt

SEQ ID NO: 322211 - DNA, 201 bp, Homo sapiens
atatgaattcctttttaactgttgtaggtaaaattactgctataaaaggggctgcccagagcaaaatgcttgtaaatagtattttttgactaatcttaatytcttattatggtaattatgcttataattaaaaaccttatttaatgtaaaaaaagggagaaaaaaagtgtagtgccattttaaagcatgtgatcttatagt

SEQ ID NO: 322212 - DNA, 201 bp, Homo sapiens
atgctcattgcttttgagctatcacttctcccgggccttctcagtagatggagctactgaatatgtatatatatgtagatatccatacacacatacagatrtgtgtacacttttaccaccatatttccatatctatttatgtatgttgaaaaccaagagtttatatctatactttaaattccaataaaaaaccatagggtg

SEQ ID NO: 322213 - DNA, 201 bp, Homo sapiens
atagaaggagatgaaacagaagtgatgactgtggaaaattcacagacttgatcgttaaatggttgattggtaattgactaagtggattcaggcataaatartacttaccttacatggtttaatatctatagacatcttgggttcctaccatctagtattctgctactgtgcacttggtatgagaggtcatgattgtcctgt

SEQ ID NO: 322214 - DNA, 201 bp, Homo sapiens
ctactgtgcacttggtatgagaggtcatgattgtcctgttggatagtgaccttgatcgtctaaaagccacctttttttggcagtggccatttttagctgcrccacttgaacatttgtcttttttaaatcttttcatattttgcgtcactgtcacttctgggaatagtgagttccccatgtttgtatatttacagtataata

SEQ ID NO: 322215 - DNA, 201 bp, Homo sapiens
ctgggaaggagtacatacctggtcagcccccattatctcaaagttcggattcaagcccaaccagaaattctgaacctgctggtttagaaacaccagaagcraaagtactttttgacaaagtagcttctcaaggggaagtagttcggaaacttaaaactgaaaaagcccctaaggttagtgtgttattttgtttatatgctt

SEQ ID NO: 322216 - DNA, 201 bp, Homo sapiens
tgaacctgctggtttagaaacaccagaagcgaaagtactttttgacaaagtagcttctcaaggggaagtagttcggaaacttaaaactgaaaaagcccctmaggttagtgtgttattttgtttatatgcttttgttttttatgtttcagggtattgtctttgcctcaagtgttttgtgccccatcaaatctggctaacttc

SEQ ID NO: 322217 - DNA, 201 bp, Homo sapiens
ctgctggtttagaaacaccagaagcgaaagtactttttgacaaagtagcttctcaaggggaagtagttcggaaacttaaaactgaaaaagcccctaaggtyagtgtgttattttgtttatatgcttttgttttttatgtttcagggtattgtctttgcctcaagtgttttgtgccccatcaaatctggctaacttctactc

SEQ ID NO: 322218 - DNA, 201 bp, Homo sapiens
acccttctaaaaaccaaggaggtgggctctcatcaagtggagcaggagaagggcaggggcctaagaaacagaccaggtaatgaatcgcagaaacttcattkgaagcaaagcagtgaattaattcaactcttaatagtttttaaaacaaattttgactggtttaaccatcacattaagttagagaacgctaaagctacaacg

SEQ ID NO: 322219 - DNA, 201 bp, Homo sapiens
cttgccacttatactagaattttggttcaatgtaagctttaaagactatttttcttttaaaaaggtcatcacaaagtcagaaatgattgaataccatgacrtaagtggctgttatattcttcgtccctgggcctatgccatttgggaagccatcaaggacttttttgatgctgagatcaagaaacttggtgttgaaaactg

SEQ ID NO: 322220 - DNA, 201 bp, Homo sapiens
tcctgttccttgaatttgggctcactagtattgcatactacctaattagtataactagctcttagacaaatgtttaacaagctgaatatgatttattattsattaagtatcttctactctccacatctacacattacaaaatttccttggtacttaaaatttacatatttccagggatgacccaagatttcctacggttcg

SEQ ID NO: 322221 - DNA, 201 bp, Homo sapiens
ctaggttgcttgggttacaagatctggcaaaaccgagctggcagaaccaattgccattcgtcctactagtgaaacaggtgagaataggcattggagtgcargagaatgctcactgaacgttagagacagcctctaaagttgagtctcagcttttgctttgtgatagctataatctctgttgacgatataacatttcatgaa

SEQ ID NO: 322222 - DNA, 201 bp, Homo sapiens
gtgatattcacagatgtgaattctatacttcgctacttggctagagttgcaactacagctgggttatatggctctaatctgatggaacatactgaggtaarcaatgaacattttgttgtgtgtgttttgtcttatgcttctgtttttttatgggaacctcatcatttattgttggcttatgaactattctacttaagtata

SEQ ID NO: 322223 - DNA, 201 bp, Homo sapiens
ttcattgcaagagctttcatactctgagtagatgcatcagatataaattaattctgcttctcatacataactgctggattcagcaaattgtttagcttctrtaaactcagctttccacgtctttaaaactgagttatgataccttcttgtgggttgaatgtgagaattgaacaggtcaatgaatgcagagaacttaacata

SEQ ID NO: 322224 - DNA, 201 bp, Homo sapiens
tcattatcccctttcatatgccgttttctctcttcttcacagacagcctgtttttccacctctgtgtctttacttgtgctatttcttctacctgggttgtraaatttttttatcatgcaacagtcaccaacttataacaaagcaagtccaatacaaataattaaattttcctgcttgaatcatttgaaaataagatgctaa

SEQ ID NO: 322225 - DNA, 201 bp, Homo sapiens
ctttcctattctgtaaaatggggatgaaagtatctctcatttttttttttttgagacagtttcgctgtgtcattcaggcaggaacgcagtggtgcaatcakggctcactgcggccatgacttcccaggctcaagcagtcctgccacctcagccccctgggtagctgggaccacaggtgtgtaccactatgcctagctaatt

SEQ ID NO: 322226 - DNA, 201 bp, Homo sapiens
taagcaatgaacattttgttgtgtgtgttttgtcttatgcttctgtttttttatgggaacctcatcatttattgttggcttatgaactattctacttaagkatattaacagagtgttaattatatagaccaaggtacagaatgctcatcttgtttttttgtcacaaaaaaattctttttttgtaattcctaagtttgaacc

SEQ ID NO: 322227 - DNA, 201 bp, Homo sapiens
ctataatgaagtatgcagagaagctaattcaagaagggaaggcttatgtggatgatactcctgctgaacagatgaaagcagaacgtgagcagaggatagamtctaaacatagaaaaaaccgtaagccacattgttttatattttaattgatattcttatattgtgcttctttagtagaacatgatttcttttttgtgaaag

SEQ ID NO: 322228 - DNA, 201 bp, Homo sapiens
agatgcttggacactataataaggcaaatcattcaaatgccatgttttaaattatggtttctgtgattgtgttctgtaaattcttatttgggattgctgcytgatggtgctgatgtcttgcctcaagatatagttgcttgtttcgcatgtgtcttgaatttgttttattttggtctttcgtgtttagtttttgatacataa

SEQ ID NO: 322229 - DNA, 201 bp, Homo sapiens
gtgtttagtttttgatacataaaggaattgttaattggttctttctgttgctgcagttactaataataaatatgagtagaatttgctggcaaagttaacaytggtgtacttttcattaacaatacaatttttactgattttaagttttaataaagttaaacatggacacttcagatatctgaaatatattttactatagta

SEQ ID NO: 322230 - DNA, 201 bp, Homo sapiens
ttggtgtacttttcattaacaatacaatttttactgattttaagttttaataaagttaaacatggacacttcagatatctgaaatatattttactatagtmaaatagttctgtagggtctgttaagatgaacaacacattcctctctctatctactttcatagtctccctggagaaagcactttcatctcttctagatagt

SEQ ID NO: 322231 - DNA, 201 bp, Homo sapiens
gggaatagtgagttccccatgtttgtatatttacagtataatatatatttacctgttgtaaattatgtcagagactacgctcatgagacagttttggggtyaggaatataaatcagtatttagttttttttactatgcatagttttcatcatctcttcttatactgttaaagagtttttctttaattactattttttcatt

SEQ ID NO: 322232 - DNA, 201 bp, Homo sapiens
atatatttagtgggaaagctttaaaacagtgattaaatacttaaagtattaataggttaataatatagaagaacataagattttaattgtgagagttaaarttctaaacgttttaacagtttttatgttattaatagttaatgttgatttaatttgtagttttagtttgtcaacttagtaaaagagacattttagttttat

SEQ ID NO: 322233 - DNA, 201 bp, Homo sapiens
aattatgtcagagactacgctcatgagacagttttggggttaggaatataaatcagtatttagttttttttactatgcatagttttcatcatctcttcttrtactgttaaagagtttttctttaattactattttttcattttttcttttctgtgtcttaaaggccagaaggcttggcttagtcttttattcttattctta

SEQ ID NO: 322234 - DNA, 201 bp, Homo sapiens
acagattcatatgttgtagtaacttgccaagctcaaacctctaccatctggctctagaatccatataattaaaaattgtactacatgtatctgttaacatrtggcagaagtccaattcagcatcagttctaactcatgcagcatgattcttttgtgtgtgtgtgtgtgcgcgtgtgtgtgtgttttagcgattctgatata

SEQ ID NO: 322235 - DNA, 201 bp, Homo sapiens
tcgccccgtgtccccggcaggtgcatctgctcctgaagatggttttcccgggcatggagggaggcgcagtgtgagcccgggctagacaacacgagactccrcttcggatctttttctcagagggatgaactcccagtcaactcacctctccctttttcccccggagagcgagagttgctcgtggaaataagattttaaaac

SEQ ID NO: 322236 - DNA, 201 bp, Homo sapiens
gttcgttaagtcatagtatgtatcctgaattactactaaaatatgaattcctttttaactgttgtaggtaaaattactgctataaaaggggctgcccagarcaaaatgcttgtaaatagtattttttgactaatcttaatctcttattatggtaattatgcttataattaaaaaccttatttaatgtaaaaaaagggagaa

SEQ ID NO: 322237 - DNA, 201 bp, Homo sapiens
attttttttttaggtttatgccttcttactggaataggtttctacagtatctcagcagtattacctgttttttttttttctcttgttttttttggctttgyctttgttttttgggttttttataatttatggtagctaaagccatgaattacatctgtatattcaactggagacattcatatatcattttaactgcctttt

SEQ ID NO: 322238 - DNA, 201 bp, Homo sapiens
tattaaatggtcactggaggcaggttttttggtcatataatcttaagtttatgaatgaaataaacactaagtaggtattggaaaatgtgaaggtttcctarcctcttatctttattcagaagtatggcagtgtattcaaagagagggcaaatgattgtcagttctcccagtaatgaccagcttttccaaagtaaatggaaa

SEQ ID NO: 322239 - DNA, 201 bp, Homo sapiens
agaacatgatttcttttttgtgaaagctgctagtttttttgtttgtttgtttgttttgagaaggagtctcgctctgttgcctgggctggagtacaatggcrcgatctcggctcactgcaacctccgcctcccaggttcaagtgattcttctgcctcagcctcccaagtagctgggatgacaggcgtgcaccaccacacctt

SEQ ID NO: 322240 - DNA, 201 bp, Homo sapiens
cctcccaggttcaagtgattcttctgcctcagcctcccaagtagctgggatgacaggcgtgcaccaccacaccttgctaatttttgtatttttagtagagrcggggtttcaccatattggccaagctggtctcgaattcctgaccttgtgatctgcctgccttggcctcccaaagtgccgggattacaggcatgagccacc

SEQ ID NO: 322241 - DNA, 201 bp, Homo sapiens
ctttaatgtgtagaaaaaattatttttcaggaaatttgcattttgatactgtatatctttcttaacatttattttctcttatattctaaacatatatacaytttaaaaagttatttgacttctttttacattgcttcattgaatatctttcttaataagttcacactggctgctttaaccttttcataaaaagaggttttt

SEQ ID NO: 322242 - DNA, 201 bp, Homo sapiens
gatactttgcttcctgtaataaactttgagtctactttgcacaaattgattcctaaaagtaatagtattgaaaacttccagaaatatgaacaatacaggaragtaacatgtgtttagattagttttcaatgtggatttgtaggttaacgaatctttgttttaaatggaccttttccaaaaaaaaaaccctactttataaaa

SEQ ID NO: 322243 - DNA, 201 bp, Homo sapiens
caatttgcagcataaatgagtggaattcttatttgttattaatttcagggatcaagatcttgaacctggtgctccatccatgggagctaaaagcctttgcrtccccttcaaaccactctgtgaactgcagcctggagccaaatgtgtctgtggcaagaaccctgccaagtactacaccttatttggtcgcagctactgagg

SEQ ID NO: 322244 - DNA, 201 bp, Homo sapiens
gagttcaacttcttttcagccactgtgttttagccagtttatgggagatttgagggtactgcaaagatgtctttgttgtgtcttgatgtgctgtgagcgtrggttttggatagtggaaaaacattctttcctatcttttataactgagcaaagttcctagtaggtttgcaaaggtatcatagcctgaaaaaaggttgggag

SEQ ID NO: 322245 - DNA, 201 bp, Homo sapiens
aggaaaagcatagtaagagtgtactgttgctctagttaactagaatttttttatggtctttctttttataagttgaaatgttggaatgcatttcttttctrtcttttatgttgacagattgatcactggttggagttcagtgctacaaaattatcttcatgtgattcctttacttctacaattaatgaactcaatcattgc

SEQ ID NO: 322246 - DNA, 201 bp, Homo sapiens
aatagttgcagggaagttccttcttttccatttttattttagctggtggaaatttcccttttttccccccttgattctcatacgtctgattaacttggccstttttcttgagataaagtagtttctgctgtgaaaactctttcctaaaaacagaataaacaagagacacaacaggagtacaaatcagacaatctactctca

SEQ ID NO: 322247 - DNA, 201 bp, Homo sapiens
agacttgaagttgggccacgtgatatgaagagctgtcagtttgtagccgtcagacgagatactggagaaaagctgacagttgctgaaaatgaggcagagamtaaacttcaagctattttggaagacatccaggtcacccttttcacaaggtagtttcttaaaattgcttatgtctctctctccagatcttccaccaccttt

SEQ ID NO: 322248 - DNA, 201 bp, Homo sapiens
atgttgtagtaacttgccaagctcaaacctctaccatctggctctagaatccatataattaaaaattgtactacatgtatctgttaacatgtggcagaagyccaattcagcatcagttctaactcatgcagcatgattcttttgtgtgtgtgtgtgtgcgcgtgtgtgtgtgttttagcgattctgatatagagtcactct

SEQ ID NO: 322249 - DNA, 201 bp, Homo sapiens
cattaactgtaaaataataggtactaattgttaatcttttcttgacaatggttataacatgttattgggtgcaacgccctcaagttaaaagtacaccacartatttttcttcctgggaacttatggcccttcatttagttttatttttaataaatttttaattttagaatagttttagatttacacaaagttgcaaaaata

SEQ ID NO: 322250 - DNA, 201 bp, Homo sapiens
ttctcaaattcttattttcctgttctttcctgaagtgccccgccacactcctgtaaaaaaaaaaaaaaagcagaaagcatagcaaaataaatgtggcattwatttaagttctattttagattttaggcaatcagaatttagtccacataatgataaattgtataatttgagaaaggaaaagcatagtaagagtgtactgtt

SEQ ID NO: 322251 - DNA, 201 bp, Homo sapiens
accagatcaatttacttatacttcggatcattttgaaactataatgaagtatgcagagaagctaattcaagaagggaaggcttatgtggatgatactcctsctgaacagatgaaagcagaacgtgagcagaggatagaatctaaacatagaaaaaaccgtaagccacattgttttatattttaattgatattcttatattg

SEQ ID NO: 322252 - DNA, 201 bp, Homo sapiens
aaattgacatgagtagtaacaatggatgcatgagagatccaaccctttatcgctgcaaaattcaaccacatccaagaactggaaataaatacaagtaagtrtatctccttcaatatgctaggtagccatctgtgcttttgttttgatcttctttaaacatggagtacaagcaaaatagtcaagaaacctggccttttgttc

SEQ ID NO: 322253 - DNA, 201 bp, Homo sapiens
gcatgagagatccaaccctttatcgctgcaaaattcaaccacatccaagaactggaaataaatacaagtaagtatatctccttcaatatgctaggtagccwtctgtgcttttgttttgatcttctttaaacatggagtacaagcaaaatagtcaagaaacctggccttttgttcatccatgggttcactggctggtggcct

SEQ ID NO: 322254 - DNA, 201 bp, Homo sapiens
gagagatccaaccctttatcgctgcaaaattcaaccacatccaagaactggaaataaatacaagtaagtatatctccttcaatatgctaggtagccatctktgcttttgttttgatcttctttaaacatggagtacaagcaaaatagtcaagaaacctggccttttgttcatccatgggttcactggctggtggccttctg

SEQ ID NO: 322255 - DNA, 201 bp, Homo sapiens
ttcagttggttgtatctacggttatggaacccatggacacagagagctaactgttttagaaaacagttcagtgtatatccagatatttaacatttcatttkctttagaagcacaactttaagccatctcaattactttaattagtcacaactggaactttgcttttgaagctgcagatttattgaatagtttaaaattatc

SEQ ID NO: 322256 - DNA, 201 bp, Homo sapiens; identical to SEQ ID NO: 67431

SEQ ID NO: 322257 - DNA, 201 bp, Homo sapiens
gtcttgtgaatctaactgctttagatatctgtgaatagattctttcaagcatttcaaactcaacgtgttcaaaattccaggatctaggtgtcatctttgayttatgcttccccttcatcccttttttcactcagcaaactctgtcgtttgtgttgcccatctggtccatctctgtggatccactgctctgccttatttcag

SEQ ID NO: 322258 - DNA, 201 bp, Homo sapiens
taacagagtgttaattatatagaccaaggtacagaatgctcatcttgtttttttgtcacaaaaaaattctttttttgtaattcctaagtttgaacctttartcccctaccagctgtacttttgggagcatttagtgccatcttggccttcacagattcctagcatttcatagccagatggggctgtatagatcatctcatc

SEQ ID NO: 322259 - DNA, 201 bp, Homo sapiens
tactttaattagtcacaactggaactttgcttttgaagctgcagatttattgaatagtttaaaattatctttgctcataggaaatgctgcctggcaagaayagttgaaacagaagaaagctccagttcatgtaaaacgttggtttggctttcttgaagcccagcaggccttccagtcagtaggtaccaagtgggatgtttc

SEQ ID NO: 322260 - DNA, 201 bp, Homo sapiens
tagatgacagtactgctttttagatgctgctttttttcctgtttgtattctgctctaaccttcctaaatctcataaaattcaaagtacacagaatggtttytaagtactaacttttaaatttttcaagtaaatgaatctgtttggctaggtaccatcccttcggttcattcaggttggcttatttctgccaccaattctca

SEQ ID NO: 322261 - DNA, 201 bp, Homo sapiens
aatctctgttgacgatataacatttcatgaatgttgatgaagattgaatgcaaacttaagttgtctagagttttattctctaatattcattgtagagctcyttatcattaaattataggatttttaatttaaatactcatttttatgctgtaaatttttaggacttttcaaggagttttattcttagaataatttttattg

SEQ ID NO: 322262 - DNA, 201 bp, Homo sapiens
ggttacagtgacctataattgcaccaccacactccagccttggtgacagagcaagactctctcaaaaacaaacaaacattattgttagtttcagagtaaargctaaacttttgagtttgatatgcaagatttttcatgttacggcgtctcttgagccataggtgttggagttttctcgccctgatcccttctttttaacat

SEQ ID NO: 322263 - DNA, 201 bp, Homo sapiens
tacatgaggcttgcattcagatcctgactgctatatattttgtcaaggacattaggctggttatttaactcctttaagcgttactttcctattctgtaaawtggggatgaaagtatctctcatttttttttttttgagacagtttcgctgtgtcattcaggcaggaacgcagtggtgcaatcatggctcactgcggccatg

SEQ ID NO: 322264 - DNA, 201 bp, Homo sapiens
agaccagcctggccaacatagtgaaaccccatctctactttaaaacaaatacaaaaattagcggggcatggtggcgcatgcctgtaatcccatctataccygggaggctgagaatcacttgaacccaggaggcggaggttgcactgagctgagatcgcaccggtgcactctagcctgggtaaaagagcgagactgtctcca

SEQ ID NO: 322265 - DNA, 201 bp, Homo sapiens
taaaaattatatatatttctgtgtgtatgcatgtatgtatatgtgtgtgtatatatatgtttagacagtaacttaggactttattacaggggaatgacctscctggctgttttattcctatccagctacgggaattccctgtgtttttctgccgtcgtctgtctcacaaccccaacttccttcttgcctttggagctgatc

SEQ ID NO: 322266 - DNA, 201 bp, Homo sapiens
tacctaattttgtattagattgcaaatttgcttttttgtttgactgctaagttgacaactgactcattgttctcaaaggctgataatgttttgatacactktgagtattaagtcataaaaccttttggtttttaagaatctcttaacttgtaaagaattacattttaaattagtattgttgtttataatgcttaatctaag

SEQ ID NO: 322267 - DNA, 201 bp, Homo sapiens; identical to SEQ ID NO: 67444

SEQ ID NO: 322268 - DNA, 201 bp, Homo sapiens
aacaacacagtgctatccaaaagaaaactcacatggtttgtcaatgaaggactagtagatggatggtatgtttaatgttacttagaattgacaagaagtarggacatagtagatcagtgatttttaaactgcttgagagatagggaaggtgattgggaggagggggaatgggtaggcctatagaattcctgattcttatct

SEQ ID NO: 322269 - DNA, 201 bp, Homo sapiens
aagtgctgggattacaggcatgaaccaccgtgcctagcatcccatatactccatctgatacatttctacttatcttcgaggtccagcttggttcttaactscttttaagcttttcctgataaacctaggtattgctgattaatttcaactgagtgccctaacagcaccctgaacatatctgtattactggtatttggtttt

SEQ ID NO: 322270 - DNA, 201 bp, Homo sapiens
tgctggattcagcaaattgtttagcttctgtaaactcagctttccacgtctttaaaactgagttatgataccttcttgtgggttgaatgtgagaattgaayaggtcaatgaatgcagagaacttaacatagaacatgacctttatttgtgtttttaaaaacaaaatgtgaaaaccgtcgaagtacattaactgttatgtga

SEQ ID NO: 322271 - DNA, 201 bp, Homo sapiens
aggctgaggcaggagaatcgcttgaacctgggaggcggaggttgcagtgagcccagattgcaccattgcactcctgcctgggtgacaagagcgaaactccrtctcaagaaaaacaacaacaacaaaaaccaccgcaggatgcattctagtttttctccattttgtgcttgtaattcccttttctgacaatgaaaagcctag

SEQ ID NO: 322272 - DNA, 201 bp, Homo sapiens
ggagaatcgcttgaacctgggaggcggaggttgcagtgagcccagattgcaccattgcactcctgcctgggtgacaagagcgaaactccatctcaagaaaracaacaacaacaaaaaccaccgcaggatgcattctagtttttctccattttgtgcttgtaattcccttttctgacaatgaaaagcctagctcaaattatc

SEQ ID NO: 322273 - DNA, 201 bp, Homo sapiens
tttaaatatcattttgtaaaataagtcttccctaggggtaaataaggacttctagagtaatatttaaaatttttcctatggcatttttggggtgaccaccygtcatctaaattgtatatggaagcatgtaactcaggaaaatcccaagttaattttagaggattattcattcaaaaaaattacttaaaatctactatgtat

SEQ ID NO: 322274 - DNA, 201 bp, Homo sapiens
gtcattagagatttaacagcagtaacaaaagttatgatcacctgttgtgtgcttaacacatttcccatgcatttaaggctcacaatagtgcaatgataagrtaactctgatatactgatggtcactatgagtgatagacttgagattcaaattgagtccttctcactcccaggttgtcttttcattaaattgtgcttatgt

SEQ ID NO: 322275 - DNA, 201 bp, Homo sapiens
tagggttgtagaatggttcagccactttggaaaaacagttggatgattcctccaaaaattaaacacggagttaccatttgatccgtcaattccattcctgygtatttgccaaagaaaaataacatgttcacacaaaaatgtgtacatgaatgtttacagctgcattattcataattgccaaaaagtggcaatagattattg

SEQ ID NO: 322276 - DNA, 201 bp, Homo sapiens
gaaacttaaaactgaaaaagcccctaaggttagtgtgttattttgtttatatgcttttgttttttatgtttcagggtattgtctttgcctcaagtgttttbtgccccatcaaatctggctaacttctactcatatttcagttcttaattctcttaccttgccttttagagaaactttgttgattgtttcttacgccaacta

SEQ ID NO: 322277 - DNA, 201 bp, Homo sapiens
tatttttagatttttgggctttcatttaattggatttgtatttgtaccctgagcaatccttttaattagcagttgaagttataatagtattggtctttaarttattttttttccccaaatgaaggggagtcctgaaaagcctgttcctattcctttctttccattaggtttcccaaccccttcatctcttggcacccatgg

SEQ ID NO: 322278 - DNA, 201 bp, Homo sapiens
ctttcatttaattggatttgtatttgtaccctgagcaatccttttaattagcagttgaagttataatagtattggtctttaaattattttttttccccaartgaaggggagtcctgaaaagcctgttcctattcctttctttccattaggtttcccaaccccttcatctcttggcacccatggaaagtagtatttgaatag

SEQ ID NO: 322279 - DNA, 201 bp, Homo sapiens
tcaaatctggctaacttctactcatatttcagttcttaattctcttaccttgccttttagagaaactttgttgattgtttcttacgccaactagatttgaytggatgttttcatatgacaccgcccatcactgacatagtacttaaacagactgtattttaattgttaaattgtttgtttccctccaatctgtaagatcca

SEQ ID NO: 322280 - DNA, 201 bp, Homo sapiens
gcagtaacaaaagttatgatcacctgttgtgtgcttaacacatttcccatgcatttaaggctcacaatagtgcaatgataaggtaactctgatatactgayggtcactatgagtgatagacttgagattcaaattgagtccttctcactcccaggttgtcttttcattaaattgtgcttatgtgtttcataaaactttgtc

SEQ ID NO: 322281 - DNA, 201 bp, Homo sapiens
tttaaggctcacaatagtgcaatgataaggtaactctgatatactgatggtcactatgagtgatagacttgagattcaaattgagtccttctcactcccargttgtcttttcattaaattgtgcttatgtgtttcataaaactttgtcatatttgtgagaacaattatgtattgttttctaattttgtttggtagggcttc

SEQ ID NO: 322282 - DNA, 201 bp, Homo sapiens
tcagtaaattgtattttaaggctcattgaatttatgcatggtattaatacctttttaagccaatcacataaaaagatagtacattactcaacatttatatrtacgtataaatatataatctaattatatagtctttgttttacatttatatgtcatataaatatataatctaaatatatagtctttgttttatatttatat

SEQ ID NO: 322283 - DNA, 201 bp, Homo sapiens
gattttcagctgctttacactgtatttctaatatgtggagattattcacaactttgctattcccctcattaactctccaggaatattttatagggctactrcataattgttattgaagacaaacctcattttgaagtagacatgctttaaaaattagcattcacaactgggagaaattttaatacttgttggctgggcccg

SEQ ID NO: 322284 - DNA, 201 bp, Homo sapiens
aactctccaggaatattttatagggctactacataattgttattgaagacaaacctcattttgaagtagacatgctttaaaaattagcattcacaactggragaaattttaatacttgttggctgggcccggtggctcacacctgtaatcccagcactttgggaggccgaggtgggtggactgcttgaggccaggagtttg

SEQ ID NO: 322285 - DNA, 201 bp, Homo sapiens
ggtggactgcttgaggccaggagtttgagaccagcctggccaacatggcgaaaccccgtctctactaaaattacacaaattagctgggcatggtggcacaygcctgtaattccagctacactaggaggctggggcacgagaattgcttgaacccaagaggcagaggttgcaatgagccaagatagtgccactgtactccat

SEQ ID NO: 322286 - DNA, 201 bp, Homo sapiens
ctgggcatggtggcacacgcctgtaattccagctacactaggaggctggggcacgagaattgcttgaacccaagaggcagaggttgcaatgagccaagatwgtgccactgtactccatcctgggtgacagagtaagactgtgtctcaaaaaaaaaatttttttttaatgcttgtctagtctgacatccacaatttattaaa

SEQ ID NO: 322287 - DNA, 201 bp, Homo sapiens
caccttttaaattttcctttagaattaaaaaaattaattttatatatttcggatcctcagataaaatggataagatgtgtagaattttatttaaatcaaawgatgtaagttggccgagcatggtggctcatgcctgtaatcctagctctttgggaagccaagatgggtggatcgcttgagctcaggagttcaagaccagcc

SEQ ID NO: 322288 - DNA, 201 bp, Homo sapiens
actatagttaaagctcctgatactgttattttttttttttttttttttttttttggagaccgagctcattgcaacctctgcctcccaggatcaagcaattyttgttctcagccacacgagtagttgcgcttagaggtgcgcaccaccatgcccgcctaatttttgtattttttagtagacacagcattttgccatgttggc

SEQ ID NO: 322289 - DNA, 201 bp, Homo sapiens
tcttgaaaaacttcatgttctgcaaaatcacataccgaaaataacagctgatttttcaagaaaaacagagttgaggcaaaccactaaaaacctatgtatcycatgtggtttcagtcagatggtggctgggtagcagtcatcaaagactcaactgggctgtattctatttttattttattttatttgagacagagtattgct

SEQ ID NO: 322290 - DNA, 201 bp, Homo sapiens
agattttgtggacaatatctctcaactttttaagagatgtctctgctgtttttgtttctttcttttttttttttttttcttttgagacggagtttcacttytgttgcccaggctggagtgcaatggcgcagtctcggctcactgcagcctttacctcccaggttcaagcgattcattctcctgcctcagcctcccgagtag

SEQ ID NO: 322291 - DNA, 201 bp, Homo sapiens
tgagcatcaagtcctgggattctgcagcactttttcattggttctgtaggaaaatgtgacatagtgtacagtacaaaagctccttttctctaccagagttrctccactttgatctgttttacactttaggaatgtgttgtaaagttttgatttaattaaggttttctaatgtaaaatttgaaaactactgtctacttggat

SEQ ID NO: 322292 - DNA, 201 bp, Homo sapiens
ttaaccagattagtgaaccgtaatgtaattatcattttatagctattgagaagaatctacaaatgtgggaagaaatgaaaaaagggagccagtttggtcastcctgttgtttgcgagcaaaaattgacatgagtagtaacaatggatgcatgagagatccaaccctttatcgctgcaaaattcaaccacatccaagaactg

SEQ ID NO: 322293 - DNA, 201 bp, Homo sapiens
ttttgtattctatcaccataatgaagttctcacctttctatagtacacagtagaaactggaagatacagaaacaattttcttttagcgatgtatttaatasttcttcacaaactatttcataagcatcattaacagtaaaattgcttttagaatttcacattttgtctctgcttttctatgtttgctgattcaggaggtga

SEQ ID NO: 322294 - DNA, 201 bp, Homo sapiens
aaagttaagtttgaacagggtaacacgcatagtttggatcccattttcttttctttctaagtgtatgccttgtttaattaattatttcagtagtaaattarctttatatacaatcatgtgcctcttaacaatgggatgcgttctgagaaatgtgttattaggcagtttcatcattctgtcaacatcatagagtgtacctac

SEQ ID NO: 322295 - DNA, 201 bp, Homo sapiens
tggctttcttgaagcccagcaggccttccagtcagtaggtaccaagtgggatgtttcaacaaccaaagctcgagtggtaagcctttttttctttttttttaaaaaaaaaaacactttgggaggctgaggcgggcggatcacaaggtcaggagattgagaccatcctgaataacacggtgaaaccgcatctctgctaaaaat

SEQ ID NO: 322296 - DNA, 201 bp, Homo sapiens
caggtgcacgccgccaggcccagctaatttttgcatttttagtagagatggggtttcaccatgttagccagtctggtctcaaacttctgacctcaagtgawctgccatcctcggcctcccaaagtgctgggattacaggcatgaaccaccgtgcctagcatcccatatactccatctgatacatttctacttatcttcgag

SEQ ID NO: 322297 - DNA, 201 bp, Homo sapiens
ttctacttatcttcgaggtccagcttggttcttaactccttttaagcttttcctgataaacctaggtattgctgattaatttcaactgagtgccctaacarcaccctgaacatatctgtattactggtatttggttttatttatattcttaaccagattttgtaccctcaagtgtagggatgatgttctagtcatcatatt

SEQ ID NO: 322298 - DNA, 201 bp, Homo sapiens
gaggtccagcttggttcttaactccttttaagcttttcctgataaacctaggtattgctgattaatttcaactgagtgccctaacagcaccctgaacatayctgtattactggtatttggttttatttatattcttaaccagattttgtaccctcaagtgtagggatgatgttctagtcatcatatttttcataaccagtg

SEQ ID NO: 322299 - DNA, 201 bp, Homo sapiens
gtatcaggtctttgaaataagggttacagtttctgtctgaaagagtgataagccctcctcccttctttaaactttctacttttcctcacccttctgccccyaccatagcactgttttcactgagatcatgaagggtactcctgagcaaagctcatgttgacttcttagtttcatgtcttaccatatcactccggtgcattt

SEQ ID NO: 322300 - DNA, 201 bp, Homo sapiens
taattttttcagattttgtattctatcaccataatgaagttctcacctttctatagtacacagtagaaactggaagatacagaaacaattttcttttagckatgtatttaatagttcttcacaaactatttcataagcatcattaacagtaaaattgcttttagaatttcacattttgtctctgcttttctatgtttgctg

SEQ ID NO: 322301 - DNA, 201 bp, Homo sapiens
agtgagcttgcttttttattttttgcaatgttctctgacaaactggaaaatatattttcaacttttaacaaccaattttgaaaaatataaagccatttttrttaaaaagttctgtttctacctttatagcaagtaatgattttgttacattaattaactgacttttaatatttagaaggtcagtaagtgcgtacctttcct

SEQ ID NO: 322302 - DNA, 201 bp, Homo sapiens
aattaattttttgtatttttagtagagacagagttccgccatgttggtcagcctggtcttgaactcgcgacctcaggtgatccgcctgccttggcctcccrtagtgtcgggattacaggcgtgagccactgcacccggcgtacagccctttattatatgtataaagttttgaatagccctaaatatgttgcattgtagttg

SEQ ID NO: 322303 - DNA, 201 bp, Homo sapiens
agtagagacagagttccgccatgttggtcagcctggtcttgaactcgcgacctcaggtgatccgcctgccttggcctcccgtagtgtcgggattacaggcrtgagccactgcacccggcgtacagccctttattatatgtataaagttttgaatagccctaaatatgttgcattgtagttgtttgcattagtctttgtata

SEQ ID NO: 322304 - DNA, 201 bp, Homo sapiens
ggcaggcgggtcacaaggtcaggagatcgagaccatcctggctaacacagtgaaaccccgtctctactaaaaatacaaaaaattagccgggcatggtggcrggcacctgtagtatcagctacttgggaggctgaggtaggagaatggtgtgaacctgagaggcagaacttgcagtgagctgagatcacgccactgcactcc

SEQ ID NO: 322305 - DNA, 201 bp, Homo sapiens
tattctagaaatgtgatattcacagatgtgaattctatacttcgctacttggctagagttgcaactacagctgggttatatggctctaatctgatggaacwtactgaggtaagcaatgaacattttgttgtgtgtgttttgtcttatgcttctgtttttttatgggaacctcatcatttattgttggcttatgaactattc

SEQ ID NO: 322306 - DNA, 201 bp, Homo sapiens
gggattactcagaacagagtgagactccgtctcaaaaaaaaagatgttcaaaagctaaatttccttaaaattattacatgtattatttattgcttcctacyatgttatacattggccattacagaaatattatgattatacaatttgccaagccaatacctaattttgtattagattgcaaatttgcttttttgtttgact

SEQ ID NO: 322307 - DNA, 201 bp, Homo sapiens
ggtggaatagttgactgcaatagctgcaagtggcctctctagcatgacagtggcagggtagtaagacttcttaactatcatttaaggcctccaaaagtgartgtccagtagatgaggtgggagtagcattgcattttaggatttagacttgtaagtctcacataacatcatttctgctgtactctgttggtcaaatcagta

SEQ ID NO: 322308 - DNA, 201 bp, Homo sapiens
agaatattaatttcctacatatatttttgttttattccaaagggctttataaagtatattcatatgtgaatgacaggataccatcttttttctgattctcrtggtcctatgtggaatagggaccttgaaaatgtttgataaatacaaatgtatgaatgcatgggatttccatatttgaaaatgtcaccattgtgtcttttt

SEQ ID NO: 322309 - DNA, 201 bp, Homo sapiens
agctgaacaaatatatatttttgatatagggtggctacatgaattgtattatttatttaatgtatatgcatttatatatgcatattagtgtttgagtgtayatatagaatctcactaaaaataaatatgagtgatttaaggaattatggggaaggaattttgagcgatgggttttttttactgacatgcccactttgagag

SEQ ID NO: 322310 - DNA, 201 bp, Homo sapiens
atgaaggtatgtagttctcctcaaacagcagcatagtttaagacatgatcagataaatagtactgcaacgaaaaacaattcagcccctgatgagctgccaraaattgtagaatttaggctgtggcacatacacagagaggtatggtacaccactaggcttgacttgtgtggcgggaaggggatttgttctaaaatgtcaga

SEQ ID NO: 322311 - DNA, 201 bp, Homo sapiens
tgcagtgagctgagatcacgccactgcactccagcctgggcgacagagcgagagtccgtctcaaaaaaaaaacaaacaaaacaacaacaacaaaaaaaacygtaccactgctgccatcattataatttgaaactaatacaagttggtgaaagctgattaaacttccttgcttcatgccttgtcagcccaatcaactgtatt

SEQ ID NO: 322312 - DNA, 201 bp, Homo sapiens
cttattaaagacaaacagtggaaggtagcgttggaaacaattttgaagcagctttactttaattaaatgatcattctttttgataaaaagaaaaaggagartctccttaaggttgcaatgtttgtaaataccttgtcccctctgtgagattttacatttgaagttgtttcttataattgttttatatatggtatagtcttt

SEQ ID NO: 322313 - DNA, 201 bp, Homo sapiens
gaacgtgagcagaggatagaatctaaacatagaaaaaaccgtaagccacattgttttatattttaattgatattcttatattgtgcttctttagtagaacrtgatttcttttttgtgaaagctgctagtttttttgtttgtttgtttgttttgagaaggagtctcgctctgttgcctgggctggagtacaatggcgcgatc

SEQ ID NO: 322314 - DNA, 201 bp, Homo sapiens
gaaacactaggtgagcggagccttcaggccttgtactttttcttatgcttaattgataccacatgagtggaatgtattgatgttaccttttctaaaacgtrtttgtatttgctaaatgtattgtgaaacttctttaattaaaaaatgacgcatttgctcttggtactggatactggaaatattacagtgtttttaaactaa

SEQ ID NO: 322315 - DNA, 201 bp, Homo sapiens
cggtgcactctagcctgggtaaaagagcgagactgtctccaaaaaaaaagaaagaaagcataatgcactaatatatatatatatatatatatatatatatwtataaattcaaattgatactgcatgtaaattgtatacattatcttagtcagaaactgttttttagactatttcatcttaaatgtaattttgacctaatga

SEQ ID NO: 322316 - DNA, 201 bp, Homo sapiens
acttagaattgacaagaagtaaggacatagtagatcagtgatttttaaactgcttgagagatagggaaggtgattgggaggagggggaatgggtaggcctwtagaattcctgattcttatcttcttctcagccagtgcattagggcttccccttcttgttttaatgccacaaataatggagtgcccactggggatcatgga

SEQ ID NO: 322317 - DNA, 201 bp, Homo sapiens
cttgagctccatgaaaagggtattactgcatacttactgaggtttgcagatccctgcagaatattaatttcctacatatatttttgttttattccaaaggrctttataaagtatattcatatgtgaatgacaggataccatcttttttctgattctcgtggtcctatgtggaatagggaccttgaaaatgtttgataaata

SEQ ID NO: 322318 - DNA, 201 bp, Homo sapiens
attgaaaatgcattattcctagtgttaaaaaccatgtcctctggttttcttagtgccaaggggaatattgggataactctattctaccccattcccttgtrtgctgagaggacatagaattctaaaagtatgtatttcattgagttgtattaaagtttcattaattacagttcctttgtcttactgaatccagcttttttt

SEQ ID NO: 322319 - DNA, 201 bp, Homo sapiens
tcaagatatagttgcttgtttcgcatgtgtcttgaatttgttttattttggtctttcgtgtttagtttttgatacataaaggaattgttaattggttcttkctgttgctgcagttactaataataaatatgagtagaatttgctggcaaagttaacattggtgtacttttcattaacaatacaatttttactgattttaag

SEQ ID NO: 322320 - DNA, 201 bp, Homo sapiens
gaagataaataatttgaccttttactttttctcctaactttttggtttgcttgtagttgattgtcttgctttgtctctccctctcatttgcttattttttytttttgtttttgtttttctgttaaaaaaaaaaaaaaaagccaggttctcatgcctctactcccagcagttcagaaggccaaggtaggaggatcgcctgag

SEQ ID NO: 322321 - DNA, 201 bp, Homo sapiens
ttcctctgtttggaaagtgtaagtgaagggtccatctaaattctgaatagaattttttttttttttttttttttttgagacagttgcgctttgtggcccargttggagtgcagtggcatgattctggctcactgcaacttctgcctcccggcttcaagtgattctcatgccttagcctcctgagtagcttggattacaggt

SEQ ID NO: 322322 - DNA, 201 bp, Homo sapiens
attgttttgaccaggtaagtagtagtatctgacctgccatatcacctaccatacagttagtataaatctgaagcatattgaatattttaaaatttgaatcwtgagaataaaagttttgaagggtgcttattttttaaaatgacagttgtggtctgatagtttagattaaattgctaggttggtggcttatgcctgtaatcc

SEQ ID NO: 322323 - DNA, 201 bp, Homo sapiens
gcatattgaatattttaaaatttgaatcatgagaataaaagttttgaagggtgcttattttttaaaatgacagttgtggtctgatagtttagattaaattrctaggttggtggcttatgcctgtaatcctagcactttgagaggtggaggtgggaagatcatttgaggccaggagttcaagaccagcctggtcaacatagc

SEQ ID NO: 322324 - DNA, 201 bp, Homo sapiens
acctttgtgtggtacctggtatgacactctaataggcagaaaacgttataaagtagctggacaaggaaatgtgctttgctgcctcatagatgcaaattttktgaaggtataccattggtatcctgcattcctctgatgcccatttgagtattcttcatggcttctgcctggtttcatttagctatctggagcattattcga

SEQ ID NO: 322325 - DNA, 201 bp, Homo sapiens
ctctcatcaagtggagcaggagaagggcaggggcctaagaaacagaccaggtaatgaatcgcagaaacttcatttgaagcaaagcagtgaattaattcaaytcttaatagtttttaaaacaaattttgactggtttaaccatcacattaagttagagaacgctaaagctacaacgtcagcagatagcatttattgattttc

SEQ ID NO: 322326 - DNA, 201 bp, Homo sapiens
gaaaaaagctgaaagaaaggtataatgtgagctgggttttaatgttagaagggtttcagtagggaagaatgcagtctaggcagcagaaagcatgaataaamatagtatctttattcactcttcagggttgattttagtgaacatagctctagattttatacacaaatagatacctgtaaatttataattttacacaaatga

SEQ ID NO: 322327 - DNA, 201 bp, Homo sapiens
gactcatatggttgtggctaatacaatggaagactttcagaagatactagattctggaaaggtcagagagtttggaaaacttttcagtataagaatatttmagtaaattgtattttaaggctcattgaatttatgcatggtattaatacctttttaagccaatcacataaaaagatagtacattactcaacatttatatgt

SEQ ID NO: 322328 - DNA, 201 bp, Homo sapiens; identical to SEQ ID NO: 67430

SEQ ID NO: 322329 - DNA, 201 bp, Homo sapiens
cctcacgttcagtcgtgaacatggagtgggacaaaatctgggcgtttaacaaaaaggtatgtatgttaactctctgccttcttttctcatgcttaagtccyaaataatgtacaagtagaagtcattactgtgctcatggtagagaaaagtttgtgaagaatattaacattttgcagactttcaggaaaatggaatgttttc

SEQ ID NO: 322330 - DNA, 201 bp, Homo sapiens
acccagctaatttttgtatttttagtggagacggggttttgccatgttggccaggctggtctcgaactcccgacctcgtgatccgcccacctcagcctccyggagttctgggattacaggtgtgagccaccaagcccccctgcatacttttctgtctccacaagatgtgcaaatttcccaccaagatattcagatgcctta

SEQ ID NO: 322331 - DNA, 201 bp, Homo sapiens
ctctaattactgctttgttgttttctagcttgctctgtctttcttctcaagctctgcaggtaagatttaagtgaagcatcagtgaactaaatttagcgccrtggagttgtgaagtaagtgttactggcagagctgaatcatcattctttggacattctcctactcttcactaacttagcattttttttttcaaagcaggtt

SEQ ID NO: 322332 - DNA, 201 bp, Homo sapiens
cctaggtctcttcagcatcttcctagggattccctttgcttttattctgtaatggacattacagaacattgccccattcttggatcttctttttttttttwtatattaccttcttgctttcctgaaggtaatacgtcattctttggagactcagtccagctccctgacaaggggaggatgggatgaagaaaattttgaaac

SEQ ID NO: 322333 - DNA, 201 bp, Homo sapiens
tccctgtacccttttgtccattaagcaggttgttctaggaagccgccaccctgcactctcaccccagatagctttaagatgtctcaggccaaaagataaaygttgcagggaaggaaacaagaaaaaagcctatctttttcttgatgttgtttgtaattcttatttgggatgtgtgtagtgaattccagctatatctattta

SEQ ID NO: 322334 - DNA, 201 bp, Homo sapiens
taaggataggaaacagattctagttgaagagatactaaatgataaagtatactgtcttagctgtgaaatcaatgagtcttgtaggctggaagtaatcttargggcaagctacctcatctaattccattaacattagtggtcaggttgctgatctgatgtcacagagctggaattcaaactattgatttctattgaggccga

SEQ ID NO: 322335 - DNA, 201 bp, Homo sapiens
aaataaaacagaaacatagctgttctggttgaagtatgtgaaggggatctggaggccctctggtccttccccctccacttagtgctaccagaattaaaccscaataaataaaacaaaaacttagctgttctggttgaagtatatgaaggggatctggaggccctctggtccttccacctccacttagtgctaccagggcac

SEQ ID NO: 322336 - DNA, 201 bp, Homo sapiens
gagtgcagtggggcgatctcggctcactgcaacccctgcctcccgggttcacgccattctcctgcctcagcctcctgagtagctggaattacaggtgcccsccactacgcctagctaattttcgtatttttagtggagatggggtttcaccatgttggccaggttggtctcaatctcctgacctcgtgatctgcctgcgtc

SEQ ID NO: 322337 - DNA, 201 bp, Homo sapiens
tttcaccatgttggccaggttggtctcaatctcctgacctcgtgatctgcctgcgtcggcctcccaaagtgctggaattacaggcgtgagccactgcgccmggctgagatgattttctattcaacattgtcaggatttgatactaatcgaagtaaatcttttttggattttttgccttaaaaaagtttattttagtaacaa

SEQ ID NO: 322338 - DNA, 201 bp, Homo sapiens
ttgaagcaaagcagtgaattaattcaactcttaatagtttttaaaacaaattttgactggtttaaccatcacattaagttagagaacgctaaagctacaaygtcagcagatagcatttattgattttccatttagttttaaaaataggtaacacgtttgtttggttcaagaatctcagaatgtaagaagttcctgtgcgtg

SEQ ID NO: 322339 - DNA, 201 bp, Homo sapiens
tactactgttgaatcacagcttgacttcagagtctcttacactgtcatttcctctgtttggaaagtgtaagtgaagggtccatctaaattctgaatagaattttttttttttttttttttttttgagacagttgcgctttgtggcccaggttggagtgcagtggcatgattctggctcactgcaacttctgcctcccggct

SEQ ID NO: 322340 - DNA, 201 bp, Homo sapiens
gaacaggaggattgcatgaggccaggagttcaagactggcctgggcaacatagcgagaccctgcctctaccaaaaaataaaaataaaaaaataagccagaygttgtatgcacctgtagtcctagctactggggaggctgaggtgagagaatctcttgagctgaggaatccgaggttgcagtgagacaggatcacaccattg

SEQ ID NO: 322341 - DNA, 201 bp, Homo sapiens
aaaaaccaaagagtataggggagtggttcttaaactgtggtcctaggaccagcagtgtcagcatcacttggaaacttgttagaaatacaaactcttggccragtacggtggctcacgtctataatcccagcaatttgagaggctgaggccggcagatcagttgaggccaggtgttcgacaccagcctggtcaatgtggtga

SEQ ID NO: 322342 - DNA, 201 bp, Homo sapiens
gtgattctcatgccttagcctcctgagtagcttggattacaggtgtgcgccactacacccagcaatgtttgtatttttagtagagatggggttttgccatrttggcggccaggctggtcttgaactcctggcctcaaatgatctgcttgcctcatcctcccaaaatactgggattataggcatgagccactgtgcccagcc

SEQ ID NO: 322343 - DNA, 201 bp, Homo sapiens
ctaccaaaaaataaaaataaaaaaataagccagacgttgtatgcacctgtagtcctagctactggggaggctgaggtgagagaatctcttgagctgaggartccgaggttgcagtgagacaggatcacaccattgcgctccagcctgggtgacagagtaagaccctgtctcaaaaacaaaacaagaaaacaacaacgttat

SEQ ID NO: 322344 - DNA, 201 bp, Homo sapiens
tgcatgccaccacgcccagttaactttctgtatttttagtagagacggggtttcaccgtgttagccaggatgatctcgatctcctgacctcgtgatctgcycacctcagctgggattacaggcgtaagccaccatgcccagcgaagcagtggccacccaaagtgctgggattacaggtgtgagccaccatgcccggcgaag

SEQ ID NO: 322345 - DNA, 201 bp, Homo sapiens
ccttggcaatgctgttttggatataacacctaaatcacaatcaaccaaagaaaaaaaataaattggacttcatcaagattaacatatattgtgtttcaaakaacgtgaaaagataagtcacagaatgggagaaaatatttgcacatatgtctcttaaaggacttgtatccagaagagaacccaattaacaatggatttaag

SEQ ID NO: 322346 - DNA, 201 bp, Homo sapiens
tgtctctacgaaaaataaaaaaattagccaggcattatggttcatgcttataatctcagaggtaggtggatcacttgagctcaggagttcaaggctgcagygagctatgactataccactgcactccagcctgggtgactgatcaaagccctacctcaaataaaatttaaaaaattaaattactaagtactgctcattgtt

SEQ ID NO: 322347 - DNA, 201 bp, Homo sapiens
tacgaaaaataaaaaaattagccaggcattatggttcatgcttataatctcagaggtaggtggatcacttgagctcaggagttcaaggctgcagtgagctrtgactataccactgcactccagcctgggtgactgatcaaagccctacctcaaataaaatttaaaaaattaaattactaagtactgctcattgttaaaaat

SEQ ID NO: 322348 - DNA, 201 bp, Homo sapiens
gcccctaacttctggaaattatgagaaatttagtaaaaatagccaaggaatttccaatataatttgagtgttaactttagctacctcaaattttttctcarttaacaataataaaccttttgttcaaaaaatttatgttcattaaataaagaaaaatttcttcaaaatggttttctgtcagctttaaaacataaatctagg

SEQ ID NO: 322349 - DNA, 201 bp, Homo sapiens; identical to SEQ ID NO: 67467

SEQ ID NO: 322350 - DNA, 201 bp, Homo sapiens
caaaagactgaaaaagaagcctctgctaaaccaattaagaaacagtgttacaagttgaatgcctatcagaaatactcttcatgtatttttttataggtggkgatattcgtgaagagtcttcctataaagtaattgtcatgccgactacgaaagaaaaatgcccccgttgttggaagtatacagcggagtcttcagatacac

SEQ ID NO: 322351 - DNA, 201 bp, Homo sapiens
aaagtaacaagtaacatctggagaattgaataattataggtcatctccaactttccagtggactgggtttattctaaaggtagatatatacttggaatacrtctttctatggaaataataaaaacaattgccaagtttctaagcccgctcttaaaactatcttacctgatgatcttgggaactgagggctagggacagaag

SEQ ID NO: 322352 - DNA, 201 bp, Homo sapiens
ggacaaaagactgaaaaagaagcctctgctaaaccaattaagaaacagtgttacaagttgaatgcctatcagaaatactcttcatgtatttttttataggkggtgatattcgtgaagagtcttcctataaagtaattgtcatgccgactacgaaagaaaaatgcccccgttgttggaagtatacagcggagtcttcagata

SEQ ID NO: 322353 - DNA, 201 bp, Homo sapiens
ttgttaattttataaaacaggctgaaaatctttttttctgctggaatcaaatgagagtccaagtgaccacaattttctgtctttctttattatacctttayattgtagcaagttggtaaccatcaaaagtaacagcatctccactggaaattggtacacagtccacatggagttgctgttacacttgataacaccattaaa

SEQ ID NO: 322354 - DNA, 201 bp, Homo sapiens
tcaccatgttggccaggctggtcttgaactcctgacctcaggtgatccacccgcctcggcatcccaaaatgctgggattacaggcttgagccaccatgccyggccatgtaatgttcacatactctttgtacaatgactagaaaataacttagttttatatttttatcaatctgaggtctaagagtattaattgtggagata

SEQ ID NO: 322355 - DNA, 201 bp, Homo sapiens
agtggcacaatctctgcccactgtaacctccacctcccgggttcaagtgattctcctgcttcagcctcccaagtagctgggattacaggcgcccaccaccrtgcccagataattttcgtgtttttagagatggggtttcgccatgttggtcaacctggtctcgaactcctgacctcaggatttgccagcctccacctctca

SEQ ID NO: 322356 - DNA, 201 bp, Homo sapiens
gttatttcttttcttttttttttttgagacagattcttactctgtcgcccaggctagagtgcagtggcacaatctctgcccactgtaacctccacctcccrggttcaagtgattctcctgcttcagcctcccaagtagctgggattacaggcgcccaccaccgtgcccagataattttcgtgtttttagagatggggtttc

SEQ ID NO: 322357 - DNA, 201 bp, Homo sapiens
ttacattatctcagactttcctggctgcacagactagattaaactctttattttccccttggtaacacccatcacagttatttcttttcttttttttttttgagacagattcttactctgtcgcccaggctagagtgcagtggcacaatctctgcccactgtaacctccacctcccgggttcaagtgattctcctgcttca

SEQ ID NO: 322358 - DNA, 201 bp, Homo sapiens
atataattatggaagtctagggaagtttaaaattagctttttgttgttgttgttcttcattttgttttgagacgtggtcttgctctgttgcccaggctggrgtgcagtggtgccatcttggctcactgcagcctctggatcctaggctcaagtgatcttcctgcctcagcctcttgagtagctgggactacaagtgtgtgc

SEQ ID NO: 322359 - DNA, 201 bp, Homo sapiens
gcctcctgggttcacgccattctcctgccccagcctcccgagtagctgggactacaggcacctgccaccacgcctggctaattttttgtatttttagtagrgacggggtttcaccatgttagccaggatggggtaggggtttattttcattcttctgcacatggatagccagtttttccagcaccatttcttaaagagggt

SEQ ID NO: 322360 - DNA, 201 bp, Homo sapiens
cccgccaccatgcccggctaatttttttgtattttttttagtagagatggggtttcaccgtgttagccaggatggtctcgatctcctgagctcgtgatccrcccgcctcagcctcccaaagtgctgggattacaggcgtgagccactgctcctggcctgtagagcatatttaatttatactcatttgattttgctttccac

SEQ ID NO: 322361 - DNA, 201 bp, Homo sapiens
aggacaagtaggtgattctctaaaatgtattttattttcgttttaaggatcttaaattggcagccaaagcccttaatatagttacttcaatgtaaaaatamaaactatcttttatactctcaaataacacatgattgtaatgaagaaggcagaggctgggattgtggtccttttaacttatttcaggcctgactctccagt

SEQ ID NO: 322362 - DNA, 201 bp, Homo sapiens
agccctttgggaggccgaggctggtgtatcatgaggtcaggagttcaagaccagcctggccaagatggtgaaactccatctctaccgaaaatacaaaaatkagccaggcatggtggcgcgggcctgtaatctcagctactccgaaggctcaggcagagaactgcttgaacctgggaggcagaggttgcagtgagccaagat

SEQ ID NO: 322363 - DNA, 201 bp, Homo sapiens
agtataatcaaagataggtatgtatgactaaatattaaaatgcttaacaatggccaggtgtggtgactcacgcctgtaatcccagcactttgggaggccgrggcgggtggatgacatgaggccaggagttcgagaccagtatggcaaaatacaaaaattagccgggcatggtggcacatgcctgtaatccgagtcactcag

SEQ ID NO: 322364 - DNA, 201 bp, Homo sapiens
gtgcggtggctcacgcctgtaatcccagccctttgggaggccgaggctggtgtatcatgaggtcaggagttcaagaccagcctggccaagatggtgaaacyccatctctaccgaaaatacaaaaattagccaggcatggtggcgcgggcctgtaatctcagctactccgaaggctcaggcagagaactgcttgaacctggg

SEQ ID NO: 322365 - DNA, 201 bp, Homo sapiens
gcttaagaagagaattggcaatgaatataattttttttccacggggcattttatttgtaaatatatgtattacatccctagaaaaagaatcccaggatttyccctcctgtgtgttttcatcttgcttcttcatggtccatgatgccagctgaggttgtcagtacaatgaaaccaaactggcgggatggaagcagattattt

SEQ ID NO: 322366 - DNA, 201 bp, Homo sapiens
agattgcagagcacgctctttctttttccagttttgtttttagatacagtctaatttgagattgttagcccgcatttcattacagtgctagtatagtttgkacttacattgtgctcaaaaatatctgaataggagctttacctaaaacatttgttcggctaattggaattgaaagccattgtgtttatatatttttttctc

SEQ ID NO: 322367 - DNA, 201 bp, Homo sapiens
tgttgcctaggctggagtgcaatggcacgatctcagctcactgcaacccccgcctcctaggttcaagcaattctcctgcctcagcctcccgagtagctgcsactacaggcatccaccaccatgcctggctaattttttgtatttttagtagagacgggtttcaccatgttagccaggatggtctcgatctcctgacctcat

SEQ ID NO: 322368 - DNA, 201 bp, Homo sapiens
caggtagaatgctttctaaaattttttagtgttttaaagtgaaatattttttcttcaaaaattgaaaaataatgtggatgattaagaaccgtttatatatrttaaataaaatatgctaaaatagtcttttgggggactaaaatataagttcaaaacaattctatcatacagttaaaatattaactagattttcttaaatat

SEQ ID NO: 322369 - DNA, 201 bp, Homo sapiens
cactgtgcccggctactcttcttttcactatttagagagcaagatgtctagggaatttcactgaagtgattgaggtgggtggggattccttggtggaatarccctctggactctgaggtggatcatatgtatgtattagtaaatatagcaaactggtttaattgatacatcctgataattaaatggtacataggttgactg

SEQ ID NO: 322370 - DNA, 201 bp, Homo sapiens
caattgtaattgtgcgtatgtgtccatgtaaatgtactttactagtatctctcttttatggttgtaatctttttgttttttttttcttttggtctttagayttattcagatttttctattataccatattcatattttcttaactgaaaatgttctggacaaactatataaaatagtaatatgtaactaaatactattgtc

SEQ ID NO: 322371 - DNA, 201 bp, Homo sapiens
gctttgagtgttgttgctgtttttcacagatgtggagaggggaatgttaattcttccttttaggaacacattccagattttcattttctttgagcaatttyttttaatttggtgaatggaattttttctaaattatgctattaagaagtttaaacttttaagtagacttgaggagtaagagtatgttttaggaaaagaaag

SEQ ID NO: 322372 - DNA, 201 bp, Homo sapiens
ggcttgcagtgagccgagatcatgccactcgcgccactgcactctagcctgggtgacagcgagactgtgtctcaaaaaaaatttgcattctaaactgtctrtagcatttgcatttagagagatacatgctaaaccatgtttaagaattcgaattcattggttttttaaaatctttttttcgtcttttttttagctagatca

SEQ ID NO: 322373 - DNA, 201 bp, Homo sapiens
caaagatggacagtgtttagcaggggagcctgaaatgtattttttctaaaggaatgaagagaatcactctcacattctgagtctgctttccttttcagtgkaaatgggattatgtaattgtgtagatacttaaaatttaagaaattgtagttaaatgcacatgattacactgatgattatattcccagtttttcccttttt

SEQ ID NO: 322374 - DNA, 201 bp, Homo sapiens
ttctgagtcaactttactggctcaggaaccacgagagatgactgcagatgtaatcgagcttaaagggaaattcctcatcaacttagaaggtaagaaggagrtgaaagtaacaagtaacatctggagaattgaataattataggtcatctccaactttccagtggactgggtttattctaaaggtagatatatacttggaat

SEQ ID NO: 322375 - DNA, 201 bp, Homo sapiens
taaattggttctagaactatacctaatgaagaggtctactgttttagtaagggtttgtcaatgacagagttaaccacaatattccattctctgagtacackgtaagttctgcaatggtttgatgatatttcttagctcaatataaataatattagactatttgtgtcaatagtttttttatgagttaatttatacgtttcc

SEQ ID NO: 322376 - DNA, 201 bp, Homo sapiens
aaaaaaaaaaaaaaaaaaagaaataaatataatgcaagctataaatttgtgccacataggtaagttaaaatttttctagtggccccagaaaataatgaaargaaacaagtgaaattaattttaatattacatttaactcaacatatctaaagtatcatttcaacatacagtcgatgtaaaacatttttgagatatatcaca

SEQ ID NO: 322377 - DNA, 201 bp, Homo sapiens
gaagttaactgtgaaatgcttaaaaatactgtaaatttcatctaaaaatgtgaacttcatggttgcatttcattttctgaagacttttggggtacagtatytgttgtctatattgtgatctttgtgtacctgacatgcttttgcattatcttactaggttggtggccctgatgccttggaatatgtgccaggtcaggatat

SEQ ID NO: 322378 - DNA, 201 bp, Homo sapiens
acataggtaagttaaaatttttctagtggccccagaaaataatgaaaagaaacaagtgaaattaattttaatattacatttaactcaacatatctaaagtmtcatttcaacatacagtcgatgtaaaacatttttgagatatatcacattttcgtaaaacatgtttgaaatcaggtatatattttataatttacattacat

SEQ ID NO: 322379 - DNA, 201 bp, Homo sapiens
gggacagaagagggagagagattttctttctgtcctttgaataaataatggtcactgtatatgaagtttatgttaggctgacttgctcccattcctctttkgtgtccccctgctttgatacttagtaccccagtactggcccagtcctgcccactgttccccagtattgattctaaaatttcctattatgtataccccgga

SEQ ID NO: 322380 - DNA, 201 bp, Homo sapiens; identical to SEQ ID NO: 67470

SEQ ID NO: 322381 - DNA, 201 bp, Homo sapiens
aatgcacatgattacactgatgattatattcccagtttttccctttttttttttttgagttggaaaggtaatagatggacatagtgaacaattcatagtaraaaagcttgtacactgaaaagtaggctttttcctactccaggtatccagaacctttttttgaggcagtcattgtttacagctgtttctgaatctttccag

SEQ ID NO: 322382 - DNA, 201 bp, Homo sapiens
attatgtaattgtgtagatacttaaaatttaagaaattgtagttaaatgcacatgattacactgatgattatattcccagtttttccctttttttttttttgagttggaaaggtaatagatggacatagtgaacaattcatagtagaaaagcttgtacactgaaaagtaggctttttcctactccaggtatccagaacctt

SEQ ID NO: 322383 - DNA, 201 bp, Homo sapiens
gtatggcaaaatacaaaaattagccgggcatggtggcacatgcctgtaatccgagtcactcaggagactgaggcacgagaatcgcttgaacttgggaggcrgaggttgcaatgagcagagattgtgctgctgcactccagcctgggtgacagagcaagatctcgtctcaaaaaataacaacaacaaaacctcaacaagtat

SEQ ID NO: 322384 - DNA, 201 bp, Homo sapiens
caggggagcctgaaatgtattttttctaaaggaatgaagagaatcactctcacattctgagtctgctttccttttcagtggaaatgggattatgtaattgkgtagatacttaaaatttaagaaattgtagttaaatgcacatgattacactgatgattatattcccagtttttccctttttttttttttgagttggaaagg

SEQ ID NO: 322385 - DNA, 201 bp, Homo sapiens
aagtgaaataacattattctgacccacacacatgaataaactgggctactgaaaggtgatttgccccaacgtaataaagaaatataatgaaaattcagtcrttaggcgtaaaatccagtggttgttcctataactgggctattggaataagagtttgttgtgtactttttgttttttatttttttacatttgtagtcttat

SEQ ID NO: 322386 - DNA, 201 bp, Homo sapiens
caaatggtagcagttttcaaccttattttgggaatggaggaagggagctttcttgagaggaagtaactgttagccatttgtcgatagatatatatatatakagagagagagagatttattttagagacaggctcttgctctgtcgcccaggttggagtgcactgccatgctcatagctcactgcaaccttgaactcttggg

SEQ ID NO: 322387 - DNA, 201 bp, Homo sapiens
tgtgtgtgtaaacatctctcacaacttgattctatttaatgaaagagcttaaatatatatgtgttaaccaggttgaatatatagatattttgctttacagkttgaaagatactactgtatttagctggttcatttattggcctggcaatttggggtccttgccaaagctttttatagcagtttatactttctatacttgtg

SEQ ID NO: 322388 - DNA, 201 bp, Homo sapiens
cttaatatatatttgagccctttcatttaatatgtatctttctatatgggtatatatatatatatatatatatatgtgtgtgtgtgtgtgtgtgtgtgtgtaaacatctctcacaacttgattctatttaatgaaagagcttaaatatatatgtgttaaccaggttgaatatatagatattttgctttacagtttgaaaga

SEQ ID NO: 322389 - DNA, 201 bp, Homo sapiens
acttaatatatatttgagccctttcatttaatatgtatctttctatatgggtatatatatatatatatatatatatgtgtgtgtgtgtgtgtgtgtgtgtgtaaacatctctcacaacttgattctatttaatgaaagagcttaaatatatatgtgttaaccaggttgaatatatagatattttgctttacagtttgaaag

SEQ ID NO: 322390 - DNA, 201 bp, Homo sapiens
aaatacttataattggtatttaaatacttaatatatatttgagccctttcatttaatatgtatctttctatatgggtatatatatatatatatatatatatgtgtgtgtgtgtgtgtgtgtgtgtgtaaacatctctcacaacttgattctatttaatgaaagagcttaaatatatatgtgttaaccaggttgaatatata

SEQ ID NO: 322391 - DNA, 201 bp, Homo sapiens
caaatacttataattggtatttaaatacttaatatatatttgagccctttcatttaatatgtatctttctatatgggtatatatatatatatatatatatatgtgtgtgtgtgtgtgtgtgtgtgtgtaaacatctctcacaacttgattctatttaatgaaagagcttaaatatatatgtgttaaccaggttgaatatat

SEQ ID NO: 322392 - DNA, 201 bp, Homo sapiens
gcaatcttggtttaccgcaacctccgcctcccagattcaagcaattctcttgcctcagcctcccaagtggctgggattacaggcgcctgccaccacacccrgccaatttttgtatttttagtagagatggggtttcaccatgttggccaggctggtcttgaactcctgacctcaggtgatccacccgcctcggcatcccaa

SEQ ID NO: 322393 - DNA, 201 bp, Homo sapiens; identical to SEQ ID NO: 67466

SEQ ID NO: 322394 - DNA, 201 bp, Homo sapiens
gtgactactcttttttattttatttttttttgtgagacagagtctcgctttgttgcccaggctggagtgcagtggcacaatctcggttcactacagcctccgctttagcttaggttcaaatgattctcccacctcagcctcccaagtagctgggattacaggctcacaccactgtgccctgctaatttttttgtattttta

SEQ ID NO: 322395 - DNA, 201 bp, Homo sapiens
tactaaaaatacaaaaaattagccaggtgtggtggtaggtgcctgtaatcccagctactctggagggtgaggcaggagaatcacttgaacctgggaggcaraggttgcagtgagctgagactgcaccactgcactccatcctgggcaacagagcgagagtccatctcaaaaaaaaaaaaaaaatctgccagctcacagact

SEQ ID NO: 322396 - DNA, 201 bp, Homo sapiens; identical to SEQ ID NO: 67472

SEQ ID NO: 322397 - DNA, 201 bp, Homo sapiens
attcagcaagttatgtagaggttggttaggagagtttctatgtaaatatatctttgtgctcctggaagactatagctgtgatagatcccagatgtgaaacygtgggtcaaagatgaagtgcattttattttattttttggagatggagtctcgctctgtcgcccaggctggtgtgcagtggcctgatttctcactgcaacc

SEQ ID NO: 322398 - DNA, 201 bp, Homo sapiens
acttagttattatgttcatatagattttattaacctttaggtgatcctttttatgaccttatccagcttttcgggaaaatgaaatagaagtataagttacraagtgttttgaaaatagtacagtttgatcttgaagtcagttttttcttttttctttttttttttggagaccgagttttgccttttgttgcccaggctgga

SEQ ID NO: 322399 - DNA, 201 bp, Homo sapiens
ggaatgtaattggaatggaaataagcaagtgttggctgttatttatggttagactcaggagtatgtatttatatgatgtttagatatcttttttttttttwaaacagaaatgtggattttcagaactttattcatggcaaagagaaagaaaagtaaagacagaattttgccttcatgatggacctccttatgcaaacggtg

SEQ ID NO: 322400 - DNA, 201 bp, Homo sapiens
agtatgccaattgtgaaacagtgaggtatagtgtatttcaaagtgtattcactgctttaggctttgtgagaattaatgctgctaccattgttgcttttcartttctgaaatggttttacagtgcagttaagtgcacgttatatttggcgctgtcaagtgggttaaaatccatgaaaactggcattaaaatctatctgatag

SEQ ID NO: 322401 - DNA, 201 bp, Homo sapiens
atatagattttattaacctttaggtgatcctttttatgaccttatccagcttttcgggaaaatgaaatagaagtataagttacaaagtgttttgaaaatartacagtttgatcttgaagtcagttttttcttttttctttttttttttggagaccgagttttgccttttgttgcccaggctggagtacagtggcatgatct

SEQ ID NO: 322402 - DNA, 201 bp, Homo sapiens
ttcatagtagaaaagcttgtacactgaaaagtaggctttttcctactccaggtatccagaacctttttttgaggcagtcattgtttacagctgtttctgartctttccagaaaaaatgaattcttctgtcagcacatacatatgtttatacaaaagagagtatctctatcttctgctctgtgcctagatttttttcacttt

SEQ ID NO: 322403 - DNA, 201 bp, Homo sapiens
  misc_feature (1)...(201): n = A,T,C or G
tatgaattaattgcaggaattgttaaaaaaggtgaaatttattcctggatcagcactgaatggcatggttgaaatgatggacaggcggccatattggtgtntatcaaggcaaagagtttggggtgttccaattcctgtgtttcatcataagaccaaggatgaatacttgatcaacaggtagaatgctttctaaaatttttt

SEQ ID NO: 322404 - DNA, 201 bp, Homo sapiens
aaggtaatagatggacatagtgaacaattcatagtagaaaagcttgtacactgaaaagtaggctttttcctactccaggtatccagaacctttttttgagrcagtcattgtttacagctgtttctgaatctttccagaaaaaatgaattcttctgtcagcacatacatatgtttatacaaaagagagtatctctatcttct

SEQ ID NO: 322405 - DNA, 201 bp, Homo sapiens
caaagtgctgggattacaggcgtgagccactgtgcccggctactcttcttttcactatttagagagcaagatgtctagggaatttcactgaagtgattgargtgggtggggattccttggtggaatagccctctggactctgaggtggatcatatgtatgtattagtaaatatagcaaactggtttaattgatacatcctg

SEQ ID NO: 322406 - DNA, 201 bp, Homo sapiens
ttcacagtagccaagaggtggaaacaacccaaatgcccatcgatggatgaatggataaacaaaatgtggtattatacacacaatggaatactgtttagccrttaaaatcaaagaaatgtcacatgctataacatgaatgaaccttgttaaattatgctaagtgaaatattccagtcacaaaaagacaactactatatgatt

SEQ ID NO: 322407 - DNA, 201 bp, Homo sapiens
ggttaccagaggctgaggaaagggagaacgggaattgtttaatgatacagagtttcagatttgcaagatgaagttctggagatctttttttttcacaacartgtgagtacacttaacactactgaactgtccacttagaaatggttaagttgataaattttatgtttttttgtttgtttgtttgtttgtttgttttttctt

SEQ ID NO: 322408 - DNA, 201 bp, Homo sapiens
ctagttactttattaaatttatggttgtgacctggatctcataatatttttatttaaaatttattattttattggtttttgtttacatttacttctctttmtcaagtctaatttttcaaagtttctaattaatttctattttcatctttattcatttttttcatttgtctaagatctgtagaaaagtaatactaaaaaaat

SEQ ID NO: 322409 - DNA, 201 bp, Homo sapiens
ctttccccaagtagtataaagttccaaggctggtttattagatactatataggctttcagaatttcgtacatttcattttgaaagggtgtgccttgtgttttattttattttattttattttattttatttttgcatttccaacctgaagcacatttggctttgtagtacagcgctctcactttgtgctataccggaatgg

SEQ ID NO: 322410 - DNA, 201 bp, Homo sapiens
tttccccaagtagtataaagttccaaggctggtttattagatactatataggctttcagaatttcgtacatttcattttgaaagggtgtgccttgtgttttattttattttattttattttattttatttttgcatttccaacctgaagcacatttggctttgtagtacagcgctctcactttgtgctataccggaatggt

SEQ ID NO: 322411 - DNA, 201 bp, Homo sapiens
acaagccctttaaaggagtcattgagaatcgtctgttgctcacagcatcaatctggtatttagttctcaagcttgaggattctagttttgctcagagggtygggttcagtctctaaaagacgctctgaaagcagaccaggctgttttcttggagcttttcaggttagattctcatgtgtgtatcttccatctaccacgatt

SEQ ID NO: 322412 - DNA, 201 bp, Homo sapiens
ttccccaagtagtataaagttccaaggctggtttattagatactatataggctttcagaatttcgtacatttcattttgaaagggtgtgccttgtgttttattttattttattttattttattttatttttgcatttccaacctgaagcacatttggctttgtagtacagcgctctcactttgtgctataccggaatggtg

SEQ ID NO: 322413 - DNA, 201 bp, Homo sapiens
acatgttctcgtgactcagcaatttccttgtcagaatccattacctgcaaatagtggccaggctcagtgggtcttgtgtccttcaaattcttcgcagcgtrttcctttgcaagcacaaaagcttgtctccagtcacaagccagttcagaatcagaagcagaagcaattgcaggcaaccagtgtacctcatcctgcctccag

SEQ ID NO: 322414 - DNA, 201 bp, Homo sapiens
caaaacacagagcacaatagattgaatggcaaaactgattggagaatccagatataaaccaggcattacagagatttgcaaatatgtaaagtagtgccatrtttctcaccaaatatcctttttttttttgcattgggaaatataactacttttttattattatactttaagttatgggatacatatgcagaacgtgcaggt

SEQ ID NO: 322415 - DNA, 201 bp, Homo sapiens
gttcagaatcagaagcagaagcaattgcaggcaaccagtgtacctcatcctgcctccaggccactgaataacacccaaaacagcaagcagtccccgctgtyggcacctgaaaataatcctgaggaggaactggcatcaaaacagaaaaatgaagaatcaaaaagaggcaatgggctttggaagaccttgaaattggtcgcc

SEQ ID NO: 322416 - DNA, 201 bp, Homo sapiens
ttcttctatgctttagaggtatgagttttatcaatgatcatgagtaaggctgctcttgattttacaatttgtctacaaattggatatggtaacttgcttasccttagaagattaagcagtttacatttctaaatttcaattgaaactaaaattaatctcaactagctttcttctaaattctttagattaactgaaaaggta

SEQ ID NO: 322417 - DNA, 201 bp, Homo sapiens
cagttgtcacatggcagtgtcctactgtgtttttttctcatctcttgaggactcacatttcctttacagctcatggtggatcaaataattttttccagggrgtgttaacgttaatttggatgagacacctaaataggtctgtggagattcacttaacattgtcagccactgttgtttataggctaaatttaatattgcctg

SEQ ID NO: 322418 - DNA, 201 bp, Homo sapiens
ggccactgaataacacccaaaacagcaagcagtccccgctgtcggcacctgaaaataatcctgaggaggaactggcatcaaaacagaaaaatgaagaatcaaaaagaggcaatgggctttggaagaccttgaaattggtcgccctccgggtaaaggaaagtttggtaatgtttatttggcaagagaaaaacaaagcaagtt

SEQ ID NO: 322419 - DNA, 201 bp, Homo sapiens
tcacacatctccctcactttagattctgtctctggtgcctttctttgtccatttggtgaggtcgtgtttccctgaatgttctcgatgcttgtggtagtacratggtattgtgcattgatatattaggtatgtactttagtcttcacagtctggctttgtttgtacttgaccttcctcagagggccttccagggattctaag

SEQ ID NO: 322420 - DNA, 201 bp, Homo sapiens
ttggcttactgcaagctccacctcccgggttcacaccattctcctccctcagcctctcgagtagctgggactacaggtgcctgccaccatgcctggctaattttttttttttttttgtatttttagtagagatggggtttcactgtgttagccaggatggtctcgatctcctgacctcgtgatctgcccgccttggcctcc

SEQ ID NO: 322421 - DNA, 201 bp, Homo sapiens
aaagatcacatgattgtaggtaagggccttatttctgagttctctgttctgttccattggtgtatgtgtctgttcttctaccagtaccatactgttttggktactatagcttgcagtatagtttgaaataaggtagtgtgatgcctccagctatgttctttttgcttagaattgtcttggctatttgggctcttatttggt

SEQ ID NO: 322422 - DNA, 201 bp, Homo sapiens
ataagtgaatctatttgcttcctgctgtaagccatcaggatcagtcccatcttttaaattgttttccccccagaattttaaagctgattgcttaaatatartattttatttagctaaaccttgaccagcattgagaacttggtatgtgtcaggcactgaggactttagtatgctatctggtgtaagtccttacaacaaccc

SEQ ID NO: 322423 - DNA, 201 bp, Homo sapiens
ctttatgattaaaaactaaagtttagatgggtaatttgcactaggtcacagagacagtaagtgctagatcaggatttgaacaagcattcaatactttataygtattacctcaaggccgggcgtggtgatccacgcctgtaatcccaacactttgggaggccaaggtgggtggatcacttgaggtcaggagttcaagaccag

SEQ ID NO: 322424 - DNA, 201 bp, Homo sapiens
cctcattttcaacagtaggatctacccgggcccttttcttccaaggaggctgaggggtctcactggtactgccaccatctccatttccaggtgttttctgyttgttctttttcgttttcacttcaacatttttctgttgcagaccagatgtcttctttcctggggcagcccctctcatcttcccctctgcatactgctcct

SEQ ID NO: 322425 - DNA, 201 bp, Homo sapiens
ctttactattgtattgtgaatagtgctgcagtgaacatatgtgggcatgtatctttataaaagaattatttatattcctttgggtatatacccagtaatgrgattgctgggccaaaaggtatttctgcctctacgtctttgaggaatcaccacactgtcttccacagtggttgaactaatttacactcccaccaacagtgt

SEQ ID NO: 322426 - DNA, 201 bp, Homo sapiens
tatttatattcctttgggtatatacccagtaatgggattgctgggccaaaaggtatttctgcctctacgtctttgaggaatcaccacactgtcttccacartggttgaactaatttacactcccaccaacagtgtaaaagcattcctttttctctgcaaccttgtcagaatctgttgttttttgaccttttaacaatagtc

SEQ ID NO: 322427 - DNA, 201 bp, Homo sapiens
aggtgagaggaaagtatatcccagcagtcctggagatatgaggcaacttgttggattcagagaactagaagtagcttaggatggctggaacataggctatrttagaagaaaagaaaagctaagatgaagacattcctgtgcaggctgtgaatttggattttctagtagtatgtgtaagcttagcacagggtctggcacatg

SEQ ID NO: 322428 - DNA, 201 bp, Homo sapiens
ctgttttaaaggacttggctctgttactaaggcttgatgaaaaagaactgcttaagctccaggcattactagagaaatataagcaagagaacaccaggacraatgttcgattttctgatgataaagatggtgtgttgcctgtaaaaacattcttggaatatttagaatatgaaaaggatgtgctcaacataaagaaaataa

SEQ ID NO: 322429 - DNA, 201 bp, Homo sapiens
gattattcttgagcccagtgtgagattaagtttcaccaccaatttaattgcatctactgttggtagagccaacagctaattaatgaggctgtcacatttayttatagcgccatttacggtttttaaattcggttactttttattatttgtgccatagtaatgtctttttatttaaattattaaatgttacaacattttatc

SEQ ID NO: 322430 - DNA, 201 bp, Homo sapiens; identical to SEQ ID NO: 67475

SEQ ID NO: 322431 - DNA, 201 bp, Homo sapiens
ctatataggctttcagaatttcgtacatttcattttgaaagggtgtgccttgtgttttattttattttattttattttattttatttttgcatttccaacmtgaagcacatttggctttgtagtacagcgctctcactttgtgctataccggaatggtgatataaagcccactaagctcctctcccttttttagaaaattt

SEQ ID NO: 322432 - DNA, 201 bp, Homo sapiens
catttcccccattcagattttgagaacaaatggctgacaaatgagtgactcttgaggtaagactctctcaaagaaggaaaataacctgtcaggaagtgaaygagaatctacattaggaactaaaattacagtgacatagccaagaaaggttaatttgctttattgaagccttccacctatttttatcatcaaagtgtttaa

SEQ ID NO: 322433 - DNA, 201 bp, Homo sapiens
caacaagccacggttttagctattcaggaatctttactttaacttcaactctgttcatgaatgtttcctcattttcaacagtaggatctacccgggccctyttcttccaaggaggctgaggggtctcactggtactgccaccatctccatttccaggtgttttctgtttgttctttttcgttttcacttcaacatttttct

SEQ ID NO: 322434 - DNA, 201 bp, Homo sapiens
catcaacaagccacggttttagctattcaggaatctttactttaacttcaactctgttcatgaatgtttcctcattttcaacagtaggatctacccgggcycttttcttccaaggaggctgaggggtctcactggtactgccaccatctccatttccaggtgttttctgtttgttctttttcgttttcacttcaacatttt

SEQ ID NO: 322435 - DNA, 201 bp, Homo sapiens
tttttcttagcaatgatcagctattttgcttcaagagcagagaatgcagaaagtttaggtcaaccaagattaagatttagccagaggagtatgtgtgtagrgggaaacgagtgtagggaggttgtggatatttgcaagaaagtgatgatgatggaacacaaagctaagctggatggaaagggaagtgatcccaagaggtac

SEQ ID NO: 322436 - DNA, 201 bp, Homo sapiens
ttagacacaccattctctgataatgtgagtaatcccacattttatattatataaaataatctctttgattagttttactttttaaaattagtagtaaagargtagaaaattaagaattttttttaaagctttaaaggtatattttccttaccaagccccctgctagctctctgtgctttgctgctatatttatattattta

SEQ ID NO: 322437 - DNA, 201 bp, Homo sapiens
tgagaaggagccagctatggaaagaggtgtaggaagagcattctaggtagaggagcatcagggatataggcctgggagccttgaagacctcagagtgttcwagaaacagaaagggggttggtgtgacttgactgtaaagagtgaggggaaaacaggacaaggttaggttggagatgcagactggggttagatcacgtaggg

SEQ ID NO: 322438 - DNA, 201 bp, Homo sapiens
gtgtattgtatcctggttcttgtttggctgacagtaactatagcagttttcctgcagggcctaattacgttcctttttaaaaaacaggatgtgggaatgastgacacagcaatgacatctttcctcggctcctgtttggatcttcttcagatcttaatggaggtaaaagaggtgtatttttcattctgaactgctcctaag

SEQ ID NO: 322439 - DNA, 201 bp, Homo sapiens
aggatatctgacacacaggccatctttctatttactgcatagctcttacatggaatactctgtaataaaaacctattggtaaacatttcagtgtgtctacktttttgctagcataaaaatgctgcaaaattccaaagtgttaagttcagttcagggtagcttccctgctctgttaattaaactttggaacattgaaactgg

SEQ ID NO: 322440 - DNA, 201 bp, Homo sapiens
tgacacaaaacaaaatgatgagcttgcatcttgtcagccactgaatgtgtgctgatgctctattaggcttcccagagcattgttgtttacagccctatttcttgcctgagctttctggaactggcgctggaaatcatattttgttgtaaaacctaatactagctcattgtgatccagcctagagagggcatttcctaatct

SEQ ID NO: 322441 - DNA, 201 bp, Homo sapiens
tttaagacatctgtgaaattttaggtgttttttttatcaccgtgtatatttgtccagtatcttgagtaataaacatttgtcatttttagatttttaaaacrtcacctttgcagcttgatttgaatgtgaattaacttgatgtccaatatcttaagatccagataactcacacacaatttcactaataacttgcacacaatt

SEQ ID NO: 322442 - DNA, 201 bp, Homo sapiens
gtaggtcaaatattttctgattgttattacatatagcaaaatcctggtataacacagtttacccttattttctttcttaatatcagcattatacaggggtyggttctatgatgtttagaaaaaatgctttaaagatatttaaagccctatatttcatgcaagcattgttcatctttttaaaaacaggtaaatcaacagact

SEQ ID NO: 322443 - DNA, 201 bp, Homo sapiens
tttcttcatgatgacgtagagtttgtgaacctcaaggccttatagtaatattccatattaacctaaaacagtacatagttctcaaagttatgttgaacatkgctttggctacctacattcttgaccaatgatcaattaaaaaatactaatgatattgattaaagaataccatccttcttggaaaggttaccagaaggaagt

SEQ ID NO: 322444 - DNA, 201 bp, Homo sapiens
cctgtttcattcacagatgtagtgtggacaacatgtttcttcattaatgggtagagggagaaaaagacttgggcttttcatgactctttcaggagttaggragctactttcttagacgtctctagcaaacttttccttatgtcttcttggccaggattgggccacatgctcatttctgaactaatcactggcaagggatat

SEQ ID NO: 322445 - DNA, 201 bp, Homo sapiens
tcctgggctttctttttggttggtagggtatttattacaatttcagaattcattactggtctgttcagagattcagtttcttcctggttgagtcttgggargatgtatgtgtctaggaatttatccattttttatagattttctaccttatttctctgtgtttataaacacagaggtgtttatagtattctctgagggttg

SEQ ID NO: 322446 - DNA, 201 bp, Homo sapiens
accttagtttggagaagttggatttggagaggtagagtcacttaggaggcatttagttaatgggtgtaggataggcaaaggcagagagtaagagagaatgytgtatttggagagtggtaattataacagctattaagggtgtctatgtgccaggcactgtaaaagtgctttgcatattttaactataacaactctgtgaga

SEQ ID NO: 322447 - DNA, 201 bp, Homo sapiens
gctgattctgagtgacgtggacaatgatagcatagttagaatgcataagtgttaacacatttcctttatatctgacctgtaaagcatgtcttcttttttcrgcaaggatatactaaatctagggataacctaaatcgagggatctccagggataaatgtaaggatcttttaaacaatgtagttaaaagctgaaagatgctt

SEQ ID NO: 322448 - DNA, 201 bp, Homo sapiens
tttcttttttttttctttgaaatttaaagaaaaaatttattgaagatctgaaaaacaattcctaaaagattgacttttccagaaaactagctacacagtgyattgcatctatcatgttaaaacgtgcattagacacaaatacaaaaaccatgaaacaagccaccattcttcaacaatttgagccaagataaaatgcctaag

SEQ ID NO: 322449 - DNA, 201 bp, Homo sapiens
agaaaagaaaaaaggagctattaccccttttattttctctgtttaaaatcaaacagaaaacaaacatcaattgttatacactaacatcttcaaagcacatygtttgtacaagagatagactaagaacaaaaatgtgtttacggagatccaaacataagtgagtgagagtgcctctcacacagctttccgatggtactcagg

SEQ ID NO: 322450 - DNA, 201 bp, Homo sapiens
gctctggtagcaaagtggaggagagattggaagaagggaaatggattgggaagctcttccagtaatccaagcaagaaattatgtgagcttgaattaagaaycttagtaggatgaagatgaaggactagattagaaagacgttaaggagttagaatctgcaggaccttgtgaaggtctggtgatgggcattgtaactagtaa

SEQ ID NO: 322451 - DNA, 201 bp, Homo sapiens
ctgccacaacttcattaaccgcatactccttattatctgtgtttccacgagatttcttgtaatttgcataatcctcaagaatggaatccacattcttcttkgcaggaagataaaagagctgtttttgcctggtaattaagtcccagtcatcaacaagccacggttttagctattcaggaatctttactttaacttcaactc

SEQ ID NO: 322452 - DNA, 201 bp, Homo sapiens
ccacccccgactaccgccccctactctctaccccacccaactccgcgtcagacgcgccgtcaggcactgccagctctacatcctgggttctggttttcttwtaacagtctggccactctaccatagggttgctgcagtttactggggatctgctccagaccccagttgcctcagtttctcctgtacctggaggtatcacca

SEQ ID NO: 322453 - DNA, 201 bp, Homo sapiens
ttatataatatctatatctttccaagtcatttatagttttcaggtatatatagctctagcttgttttttttcttcattttctctttttttttttttttttyctttttttgagagagggtctcagcctatcacctaggctgtgccatcatggctcactgctgcctccaccatctgggctcaattgatcctgctgctgcctta

SEQ ID NO: 322454 - DNA, 201 bp, Homo sapiens
tagaggttgtactaatttacattcccaccagcagtgtaagagtgtccctttttcaacacatccatgccaacatctattgttttttgactttttaatcatgrtcattcttgcagtagtgaggtggtatttttttgtggttttaatttgcatttccctcattattagtgatgttgagcaatttttatgtatttgttggctgtt

SEQ ID NO: 322455 - DNA, 201 bp, Homo sapiens
agcagtgtaagagtgtccctttttcaacacatccatgccaacatctattgttttttgactttttaatcatgatcattcttgcagtagtgaggtggtatttytttgtggttttaatttgcatttccctcattattagtgatgttgagcaatttttatgtatttgttggctgtttgtatatcttctttagagaaatatctgtt

SEQ ID NO: 322456 - DNA, 201 bp, Homo sapiens
tacaaaggacatgaactcatcattttttatggctgcatagtattccatggtgtatatgtgccacattttcttaatccagtctatcattgttggacatttgsgttggttccaagtctttgctattgtgaataatgccacaataaacatacgtgtgcatgtgtctttatagcagcatgatttatagtcctttgggtatatacc

SEQ ID NO: 322457 - DNA, 201 bp, Homo sapiens
attaaaggaagacattatgaaagtaagtgatttaaataaaggaatagtctttgatcaattaaaccttgaccaaaaaatgattttaggacagaggaatcctyttaatgcccttcaaatcaccctcttcagttgactacagcctgaatggcgatcatatttaggctctctacttaaatgtgttacttttccattttattaaaa

SEQ ID NO: 322458 - DNA, 201 bp, Homo sapiens
atagtattccatggtgtatatgtgccacattttcttaatccagtctatcattgttggacatttgggttggttccaagtctttgctattgtgaataatgccrcaataaacatacgtgtgcatgtgtctttatagcagcatgatttatagtcctttgggtatatacccagtaatgggatggctgggtcaaatggtatttctag

SEQ ID NO: 322459 - DNA, 201 bp, Homo sapiens
tttacagtcccaccaacagtgtaaaagtgtcctatttctccacatcctctccagcacctgttgtttcctgactttttaatgattgccgttctaactgcaawggtatctcattgtggttttgatttgcatttctctgacggccagtgatgatgagcattttttcatgtgttttttggctgcatagatgtcttcttttgagaa

SEQ ID NO: 322460 - DNA, 201 bp, Homo sapiens
tgactcgcaaagggacctccctgaccccttgcgcttcccaagtgaggcaatgcctcgccctgcttcggctcgcgcatggtgcgcgcacccactggcctgcrcccactgtctggcactccctagtgagatgaacccggtacctcagatggaaatgcagaaatcacccgtcttctgtgtcactcatgctgggagctgtagacc

SEQ ID NO: 322461 - DNA, 201 bp, Homo sapiens
cacagtaatgaaattcaatgaccaccacaggagacatatgaatgcctcagggaagaacaaaggccagcaaaatcagccaacagcagttacttccacaaaakgcatttacctgaataggaacttgaatggttttcaaggaatgacagtctccttccagaaagtgtcatgtgtttgttattcgtccagtaacactaagaatct

SEQ ID NO: 322462 - DNA, 201 bp, Homo sapiens
ccattttcttgccttagaaacatcactcagactttaatggacactttaaaaagtcaaggtaatagggtttgtactgattggaggttatgttcttaactcawattttgtaactctgattatagaaagctattgactttgtgataccatcatgttactttaatgtggaagtaatatagatataagaaattaagaatcttattt

SEQ ID NO: 322463 - DNA, 201 bp, Homo sapiens
gccaggcatggtggtgggcgcctgtaatcccagctactcaggaggctgaggcaggataatcgcttgaacctgggaggtggaggttgcagtgagccgagatygtgccactgtactccagcctgggcaacaagaatgaaactctgtctcaaaaaaaaaaaaagattatacacaaatgcagtggtcccttggacaagcccttta

SEQ ID NO: 322464 - DNA, 201 bp, Homo sapiens
ccactggcctgcgcccactgtctggcactccctagtgagatgaacccggtacctcagatggaaatgcagaaatcacccgtcttctgtgtcactcatgctgrgagctgtagaccggagctgttcctattcggccatcttggctcctcctctttgcccactttttaatgagtttttttttttcttgctgatttgtttgagttc

SEQ ID NO: 322465 - DNA, 201 bp, Homo sapiens
tttctttggtaggagtgggatggagtctcactctgttgcccgggctggagtgcagtggcacaatcttggctcaccgcaacctctacctcctgagttcaagkgattcccctgcctcagcctcccgagtagctaggactacaggtgcatgccaccacgcccagctaatttttgtatttttagtagagatggggtttcaccatg

SEQ ID NO: 322466 - DNA, 201 bp, Homo sapiens
ttggttaagtatattcctaggtgttttatttttttgcggctgttgtaaaagtgattgagttgctgatttggttctcagcttggtcattgttggtgtatagyagtgctactgatttgtgtacattgatttggtaactgtagactttactgaattcacttatcagatccaggggccttttggatgcatctttaggattttttg

SEQ ID NO: 322467 - DNA, 201 bp, Homo sapiens
ctcatgtgccaagactatgctaggttctgtggttgaaccaatggaagttatggtcctggccctcaaagagctcacagtttgaacaccaggtaaacagacartagggagtgtttggagctcagaagaggaggaaataaataacaaaacaaggggaaggcttctgacttaaattttggtggatgcctatatatataccagtaa

SEQ ID NO: 322468 - DNA, 201 bp, Homo sapiens
tgcttttgggatgttgtatcaaagtttgctttctgggtagtaacctaattaatatttgtaaatagactttgggcataagaaaaaactattttctgtagggsacaaaggtattttctgtatagctctatagctttgatctccatagcagcacctcgttgtattgctgtttaacgtgttatgctaatagagactgtgagtgga

SEQ ID NO: 322469 - DNA, 201 bp, Homo sapiens
tcttagaaatggaagtaacagtagtacatacctcagagggaaagctgttgtgcttagagcaatgctttgcgtgtagtaaatacatgtgtttattattatgtttttttttttttttttgagatggagtctctctctgtcacccaggctggagtgcagtggcacgatctcggcttactgcaagctctgcctcccaggttcaca

SEQ ID NO: 322470 - DNA, 201 bp, Homo sapiens
agatgggatttcaccatgttagccaggatggtctcgatctcctgaccttgtgatccgcccccctcggcctcccaaagtgctgggattacaggcgtgagccrccgtgcccagcctgttatatcttttttttaaaaaaataaaggctgatgttgaaggtgcatgtggaagggttttgtttcctgaaaaacgaaaatgaataaa

SEQ ID NO: 322471 - DNA, 201 bp, Homo sapiens
taagagacattaaatctataggtatgtttagaaatctggtattccggccgggcgcagtggctcacgcctgtagtcccagcactttgggaggccaaggcggkcgaatcacgaggtcaggagttcgagaccagcctggccaacatagtgaaacccgtctctacctaaaaatacaaaaattagccgggcatggtggctcgcgcc

SEQ ID NO: 322472 - DNA, 201 bp, Homo sapiens
ccaggctgttttcttggagcttttcaggttagattctcatgtgtgtatcttccatctaccacgattatttggctaccagatgccttagcaagctgaacagkgagctcagaagtgccaccatctatagtaactaatgaggctgtttctttacaatacacaaagaacactactttttaaaagtcaatatttataccactttgt

SEQ ID NO: 322473 - DNA, 201 bp, Homo sapiens
agcttgactttaaaattggttgacagtaaatctaaaagaaggaacttaaatatgctaatgccttgactttcaaattcttgcctgtctattcagtgtggaamgtcagctgaaccagtgtattgtatcctggttcttgtttggctgacagtaactatagcagttttcctgcagggcctaattacgttcctttttaaaaaacag

SEQ ID NO: 322474 - DNA, 201 bp, Homo sapiens
tgttgcagccttcttcacctttttagacatgcttaactttttctgttgttttggatataaaaaataaataatatataaatatgaagttgttaaaaaaacaraattataatagacatgtacatttttaatgtttgtaatataaccctttggtaagtgactaagtgactaatatgaaatttattttcaaattagtatttcttg

SEQ ID NO: 322475 - DNA, 201 bp, Homo sapiens
tgcatggatgagcttattggaattgctctgtaaggctgaagtgtgccatctagagggtgttataattcataacaagaaaacattaatgtgagagaacccaraaatcctttagactcactgatagtacagatatgttcattttctttcagaataatgtttcactgttataaaaattaaaattttactttgattatttttttc

SEQ ID NO: 322476 - DNA, 201 bp, Homo sapiens
atcagaatattaatctgttaaaatattcaacagttttcagtaatgatgaaatattccaaataaggatttatattgattcagaacaaagatgactaaaagakcataaataaatggaatataaatgttctgaataaaatagattgttagacttccacttcattgagaaatacaaaaacacatcagtaggtaacttagttttaa

SEQ ID NO: 322477 - DNA, 201 bp, Homo sapiens
gcggcgccttgcggagggaccccagtaagtgcctctctggcctcgcccttccttccctcgtcacccgcggcctctgctcacgggttcgagtctcctactcrctctgcgcctcctgcctctgccctctggacccccagttctccccgtgcctcccctccgctccgggatgacaccctgcccacctcgtcctgaagccccatt

SEQ ID NO: 322478 - DNA, 201 bp, Homo sapiens
tacctgtatattctggtttggaaagttttctgttattacttatttgagtaaacgttctactcctttgtctttctcagttctctctttaactccagtaaccscaatatttgctcttttgatgttgttttatagatcctatagaccttgttcattccttttcattcatttcatttctttcttctcctctgactatgtattttt

SEQ ID NO: 322479 - DNA, 201 bp, Homo sapiens
tctccgtggaaggaccaatctccatagtggaactggcccttgaacagaagcacatccactacccactggtggagcaccactccatcctgtgctccatcttrtatgcagtcatgaggttttctctgaagaccgtgaagccactttcactttttgacagtaaggtaagtacctcacaggatttcagagctattttggagttgc

SEQ ID NO: 322480 - DNA, 201 bp, Homo sapiens
ttctagagcaacctacaaaaaatatcttaaacttagctgaataatagtgctgtttcaccttcctttatcttgacttggttgggaaaaatgtattcctatgrtaatagaagatgcccaattaaattctctttcctttttgttgaaagaagctttccagtcaggggcattgagaatgggtaaaccttcataaacctaaatatc

SEQ ID NO: 322481 - DNA, 201 bp, Homo sapiens
agtgatttgctgttgtgaaaagtgcagctaagtaattgccaggaaacaaaagttaatttaagttcttcttggatctttggccagagcaacaagttgtctargcttggtctctgtggcattatttatgcctaaatgcttaagctccatgtagtcagctgcaccttttcctttctcttgtttataactgttaattttagttca

SEQ ID NO: 322482 - DNA, 201 bp, Homo sapiens
tgttgattttgtttatcttttttaataaaaacaactttttttgttgatcttgtgtaatttttttattctcaatttcatttatttctgcttgatctttattrcttcttttactaatttttaggttggttcttgcttttctagtttcttgaggtgcattgttagattgtttatttggagtctttttattgaggtgtttattac

SEQ ID NO: 322483 - DNA, 201 bp, Homo sapiens
atggttagtgaaaatccacttattctttttagagcttgatttcttttctggaaaaggaggaatttcactcaaatgatccctgtagttccttctgtttctgttaagattgaatcatcctgtcagttggcttcaagaggattatgacatgtgtaagaaggagattgttgatctgtacagacaagcagttctaggatctttgct

SEQ ID NO: 322484 - DNA, 201 bp, Homo sapiens
tatacagctgctcccccgtgtggttgtggatccaaagagcttgtggagcttgtattaagagcacaacaccattgcattttgtgacaagttagcatcgttcttttttttttttaaattatactttaagttctagggtacatgtgcacaacgtgcaggtttgttacatatgtatacatgtgccattttggtgtgctgcaccca

SEQ ID NO: 322485 - DNA, 201 bp, Homo sapiens
tctacaaaggaagggaacaaactattcatagaaaattatgcaatttgttcctttcctttatataaaaatgagaaattttcttaagtatatgagaaaatgcytaaattctcattaataagaaaaatgtagtttaaaagcatattgagatactacattttacctattaaattgacagagatccgccattaaaatattttttga

SEQ ID NO: 322486 - DNA, 201 bp, Homo sapiens
gtactacattaattcttaaaactcataaacacttaagaaatgcaagttggtacattagtttcctgctgacccagtaaagcttttgtaaccatgatatccartatggtgacatgatggagctgctagcttagaacttgagcccaaaactggttttcaattaaatctttatgactcaaaactgtctgatcagaatgagtaaga

SEQ ID NO: 322487 - DNA, 201 bp, Homo sapiens
cagattacatgatacagcaagcaaccactaattttttcacctcaagaagctgcatcatccatatgcatgcatctgctgtctaggaaagtgtaagattttgkctatgctaaatttttttttagactgaaaaagatttaaatttgatttcagtctctgctcctgagtgtttggctttcaaaggaaaaggatattttggataaa

SEQ ID NO: 322488 - DNA, 201 bp, Homo sapiens
ttacttatttaatgaaatattatatgtttcattctacaacaaagtaaaaccctttagttagaagccaagaaaatttcttatttttagaatttaataatggsaaggcaaaaatatgatattttataaccttatatcttgttttatttggatttaggtgccaaaattacccagagtaaaagaaaaaaaatttggccttgttac

SEQ ID NO: 322489 - DNA, 201 bp, Homo sapiens
aggcaaaaatatgatattttataaccttatatcttgttttatttggatttaggtgccaaaattacccagagtaaaagaaaaaaaatttggccttgttactrgtgatactaccttgtacttaactgtttctcagaaaaggggttactaagcttttgttcatagtggaaaatacatatattcattgaagatttcaactgagaa

SEQ ID NO: 322490 - DNA, 201 bp, Homo sapiens
agggatgattacattatttagaatcatctggaatagtaacatgtcagcatagaccacaatttatggtgcaatcttgtctatcctgtaaaatgtgaggaataatgaatggattgaggtcattcaattactctggaccagattgaagccactatcaccttcttgccaaagaactcctgcagtgatagacagaggcagtcttta

SEQ ID NO: 322491 - DNA, 201 bp, Homo sapiens
gggatgattacattatttagaatcatctggaatagtaacatgtcagcatagaccacaatttatggtgcaatcttgtctatcctgtaaaatgtgaggaataatgaatggattgaggtcattcaattactctggaccagattgaagccactatcaccttcttgccaaagaactcctgcagtgatagacagaggcagtctttac

SEQ ID NO: 322492 - DNA, 201 bp, Homo sapiens
caattaaaataacaaatatctcatttgtatctagcttgcttttaacttatattttgatagtttgcactttaaaaccctggaagctcagttttatattctamgttttctttcttttcagtggttggcttggttggaaaagtaagcacgaagaagaagctgtccaaaagcaaaagccgaaggttgagccagctaccccattag

SEQ ID NO: 322493 - DNA, 201 bp, Homo sapiens
cagtatccatcagctttcaagttaaaagctcattcaagttaatattgattcagaatctttggcaaagaatcaccagtgcattttttattagttttcccaarcagttttgggtgctgattcagaggccctcactgattcctgggaggcactttctcttgacactgagtactggaaactccttctgaaacagctggaggattg

SEQ ID NO: 322494 - DNA, 201 bp, Homo sapiens
ggagcagcagccactgccacagaatgctgacatggaggccaactggctgctactgagttcggcaaaaacactaaaaactccacagtgctttttatctccaygagtgtgttagctctttgagagtagtttcttatttttatggcagaaaatgacttttatgttcagagtgacagtactgggatctggacaaggcttttttag

SEQ ID NO: 322495 - DNA, 201 bp, Homo sapiens
ctttttttctgactctaggttgattctgattctgatttataggtgttagctataataatggcttagtgaagaaagcatattttaatatacactatcggccrtagccaactatgtccaaggaagtgtacatctatgacactggtaggcttaggagctttaaatagtttctgtgacagaagaccaacatctttctgctatagc

SEQ ID NO: 322496 - DNA, 201 bp, Homo sapiens
ggatgattacattatttagaatcatctggaatagtaacatgtcagcatagaccacaatttatggtgcaatcttgtctatcctgtaaaatgtgaggaataatgaatggattgaggtcattcaattactctggaccagattgaagccactatcaccttcttgccaaagaactcctgcagtgatagacagaggcagtctttacc

SEQ ID NO: 322497 - DNA, 201 bp, Homo sapiens
ccttttcaacagtacttggaaggaagtcagggacttcaccattaaaactgagccaacacagtaatgaaattcaatgaccaccacaggagacatatgaatgyctcagggaagaacaaaggccagcaaaatcagccaacagcagttacttccacaaaatgcatttacctgaataggaacttgaatggttttcaaggaatgaca

SEQ ID NO: 322498 - DNA, 201 bp, Homo sapiens
gatgattacattatttagaatcatctggaatagtaacatgtcagcatagaccacaatttatggtgcaatcttgtctatcctgtaaaatgtgaggaataatgaatggattgaggtcattcaattactctggaccagattgaagccactatcaccttcttgccaaagaactcctgcagtgatagacagaggcagtctttacct

SEQ ID NO: 322499 - DNA, 201 bp, Homo sapiens
ttcctatttcccccaaacatgagaggctgaagtcttcttttcacatttttattgtttatccctttctttattttcagatagaagttcctgttgtctctttaaaaaaaaaaaaaaaaattaatattcatgcctgtaactgtaatcctagcactttgggaggccgaggcagggggatcatgaggtcagtagttcgagaccagc

SEQ ID NO: 322500 - DNA, 201 bp, Homo sapiens
cccacttacattcagtgttattattgattggtaaggtcctactactgccattttgttacttgtttattagttgctgtgtaactcctctcttttttctgtctttttttttatagttaagtgattttctcttgtagtatgtttcaattcgctacttttgatttttgtgtatctattgtaggctttgcactgtgattaccatga

SEQ ID NO: 322501 - DNA, 201 bp, Homo sapiens
gttgttgatggggaaatgaaccaagctttaagagacattaaatctataggtatgtttagaaatctggtattccggccgggcgcagtggctcacgcctgtartcccagcactttgggaggccaaggcgggcgaatcacgaggtcaggagttcgagaccagcctggccaacatagtgaaacccgtctctacctaaaaatacaa

SEQ ID NO: 322502 - DNA, 201 bp, Homo sapiens
acctgatctagatctaaagtagtcaatacaacccccttgttcctacttgttgttctcaatcatatcatcctgtttattttcatcattatatttctactgtscagtatggtaacctctaggcacatgtggttattgagcctgtgaaatgtggccagtgcaactgaggaactgaatttttaaaattcaagttaattttaatta

SEQ ID NO: 322503 - DNA, 201 bp, Homo sapiens
ttaatagaatcaggcaggtttattttcaaattttagttcttttttttaaatttatttgagatctgataaacatggatccaattttagttcttttcttttctttttttttttttttttttgagacagagtctcgctctgtagcccaggccagagttcagtggcatgatctcagctcactgcaacctccgcctcctgggttca

SEQ ID NO: 322504 - DNA, 201 bp, Homo sapiens
tttttaaaattcaagttaattttaattaatttaaatttaagtagccaaagtggctaatgcctataatatagtatggcacagttataggtgctaaaactcargtacatacagattgaatacttgtccaagttacataggcagttggggatataaatacaccccaaacatctagattaatttgcactatacctatagatttat

SEQ ID NO: 322505 - DNA, 201 bp, Homo sapiens
tgaggtgcaagggtctcttgagcccagtagttcaaggctgcagtgagctatgatcacaccactgcatccagcctgggtgacagagtgagaccctgtctctaaaaaaaaaaaaaaaaaaacaaaacaaaaaacaaaacaaaaaaaaaacagtactggccattttaactacttggaaaagtgctatttataaaggggcaaaac

SEQ ID NO: 322506 - DNA, 201 bp, Homo sapiens
catattgcaaagctgtaataacccaaactgtatgatactggcataaagacaaacaaaccaatggaatggaatagatagctgataagtaaaccctcacatayatggtcaagatgatcttcagcaagtgtgccaagagcattctttgggggaaaagacagcttcttgaatatatgatgttagaggaaatggctatccatatgc

SEQ ID NO: 322507 - DNA, 201 bp, Homo sapiens
taaaatatcccattttacttgaagagaacttgaaaattacttattcatctcttagatcttaccttcatcctatatatatatatatatatatatatatatakatatgtatttatatatttaccttgactgatttagaaaatatcatgtttagattattctatctttattgataaaattaagttactgccggacgcagtggct

SEQ ID NO: 322508 - DNA, 201 bp, Homo sapiens
ggtttttatagttttgggttttacctttaagtctttaatccatcttgggttaaattttgtatatgttgtaaggaaggggtccagtttcgatgatctgcatrtggctaggcagtagtcccatttattaaatttattaaatttattaaataaggagtccttcccccattacttgtttttgtcaaatttgtcaaagatcacatg

SEQ ID NO: 322509 - DNA, 201 bp, Homo sapiens
aaatatcccattttacttgaagagaacttgaaaattacttattcatctcttagatcttaccttcatcctatatatatatatatatatatatatatatatakatgtatttatatatttaccttgactgatttagaaaatatcatgtttagattattctatctttattgataaaattaagttactgccggacgcagtggctca

SEQ ID NO: 322510 - DNA, 201 bp, Homo sapiens
tgtgtgtgcatgtacccacaaacactgaattatttgctttggggatgtgaggaaattataagattgttggttttaaaaagattatatggcagggcgcggtkgctcacgcctgtaatcctagcactttggaaaggcgaggctggtggatcacctgaggtcaggagtttgagaccagcctgaccaacaaggtgaaaccccatc

SEQ ID NO: 322511 - DNA, 201 bp, Homo sapiens
cattatttatgcctaaatgcttaagctccatgtagtcagctgcaccttttcctttctcttgtttataactgttaattttagttcaaatctgcgctccttargcattcctgcagagtagcttctgttaagtgagttttggtttggtgattggggcctctggtcttctaccagggatctggctgggtggtgtggggaaaggga

SEQ ID NO: 322512 - DNA, 201 bp, Homo sapiens
gacagaggccttttcagcagcaagctggatcctactcgtgatgatgcacatggactgagccactggaataccaggtggcaccaaggacttctacttatcakggtcagcggtctgagagcctggactttttcataattgctggaactggctgggctattttgtgcggatcttcggggactccactcacctgcgttccaggag

SEQ ID NO: 322513 - DNA, 201 bp, Homo sapiens
attttatattttgtatcatcataaaaaaataacatgatttgaacaatacatcttaactcagtaaggcaaatggaatggtcttcggggaaggcaatgttttycttgttattttttgtatgattatcagaatattaatctgttaaaatattcaacagttttcagtaatgatgaaatattccaaataaggatttatattgattc

SEQ ID NO: 322514 - DNA, 201 bp, Homo sapiens
atccatttttttatgttacgagggtttcttttaatagaaatgacggaaagaatagagaaagaaaaatacactcagatttaaaaataacaataaccttctayatactacctttaaattaattttctctaaagtctcatttggtcagttccacgctcaggaactgctaggtgcttccctctgcctaagaaaattggcagtgat

SEQ ID NO: 322515 - DNA, 201 bp, Homo sapiens
ggttttcttttttttttctttgaaatttaaagaaaaaatttattgaagatctgaaaaacaattcctaaaagattgacttttccagaaaactagctacacartgcattgcatctatcatgttaaaacgtgcattagacacaaatacaaaaaccatgaaacaagccaccattcttcaacaatttgagccaagataaaatgcct

SEQ ID NO: 322516 - DNA, 201 bp, Homo sapiens
gccagacttccacccacactgtgtacttggctgaaagcaatggtcagtacaatagaacgagatcaggcaaaaggtcattggatgttttcttgagtgcctgsttaataacagttatgaagaaaatttgacaagtttaattcacctagttacaaagaaaagcatttttatgtaataactcttaagtcaataacaattattgtt

SEQ ID NO: 322517 - DNA, 201 bp, Homo sapiens
gctagtccagcctttacaacttttcaaagcattttaaagtaagctttatttagaaagtatgtttgtttctttgtaagctactaagttttctctttcaaatkttctgtttttcagggaagcacacaaccattattatcccatgttgcactagcagttgcaagtaaactcacttctgctttatttaatgctgccaggtaatta

SEQ ID NO: 322518 - DNA, 201 bp, Homo sapiens
aaaacaaaggggctacaggccccctgtaagtccaaaactcaatgggggcagtcattaaaccttaaagttccaaaatgatctcttttgactccatgtctcaygtccatgtcacactcatgcaagaggtgagctcccagagccttgagcagctccccccctgtggctttgcagggtacagccttcctccaggcctccttcatg

SEQ ID NO: 322519 - DNA, 201 bp, Homo sapiens
caattcaacaagtgtttttaaaaggattcagaggctgggcgcggtggctcatgcctgtaatcccagcactttgggaggctgaggcgggcagatcacctgargtcaggagtttgagacctgcctggccaatatggtgaaaaccccgtctctactaaaaatacaaaaaaattagccttggcgtggtagtacacgcctgtagtc

SEQ ID NO: 322520 - DNA, 201 bp, Homo sapiens
tatctccacaattaatactcttagacctcagattgataaaaatataaaactaagttattttctagtcattgtacaaagagtatgtgaacattacatggccrggcatggtggctcaagcctgtaatcccagcattttgggatgccgaggcgggtggatcacctgaggtcaggagttcaagaccagcctggccaacatggtga

SEQ ID NO: 322521 - DNA, 201 bp, Homo sapiens
ttgttttttttcttcattttctcttttttttttttttttttctttttttgagagagggtctcagcctatcacctaggctgtgccatcatggctcactgctkcctccaccatctgggctcaattgatcctgctgctgccttagcctccccaaataactgggactacagacatgtgccaccatgtccagctactttttctatt

SEQ ID NO: 322522 - DNA, 201 bp, Homo sapiens
gcagcttctctattctttagacttttcttttgtcttttagctttgtactgctgggtgatgcttttcttgccttggccaagtagagccaagtaaaatttgcygaatcccctaaattatttacaagtcataggttgtagaggttcttactttttatagaagcaagtacattatctctgtttttttctcatctcagaagaacgg

SEQ ID NO: 322523 - DNA, 201 bp, Homo sapiens
tcttcgttctctttgggtcaagctgtttgtccagtcagtcccagtgcaagaacctgggtatctcagttgaaggttctgaattcacttgccccttttcattyctctccataagctccacagaccacagctgcttctaatcgtccatttcaggtctgagacttctttcagactttctgtgctcagtcaacacacacatacaca

SEQ ID NO: 322524 - DNA, 201 bp, Homo sapiens
tgcattctggtggagtactgacctgttgctggcccacatgtacctgtaggaggtggctggagacccctgttgggaggtcccacccagtgaggaggaatggkatcagggtcccaccccaagaagcagtctggtcacaatctgacaaggcagctgttcttcattgttggggaaccttcctcgtaaactgtctattctccacag

SEQ ID NO: 322525 - DNA, 201 bp, Homo sapiens
aatataactaacatttaaatatttccttgctatttgctgtacaaagcaagaaaatcatctcaaaatttttatcaagaaggaagtctttgttgttactctgyatgctacgttaaacagctctggatctgacacgtcaatttatatatcaaaaatatcttctatttgcttctttttaatatactcccagatttgtcagagatc

SEQ ID NO: 322526 - DNA, 201 bp, Homo sapiens
ccatgtcccttccccactggtttatgcccctgtggccctgaagtcttctttaaaaagagaaacagcctgacagtccagtagaaaaaggagcaaagcagatktcaagagaagaaattggcccaaaagcatataagaaaattttgagccttaataacaatctaagaactataagaaaatataatgagataacttttcaccttt

SEQ ID NO: 322527 - DNA, 201 bp, Homo sapiens
agaatctttcaacaaggcagaactctgctggttgagccctgctttacttatgtacttgctatcagtatttagttgccttattaatgctcctaaattgatartaatgttgggtttcctagctataataaaagcaccttttggcatttctccttgttctaatatttttaccatattggtatgtgatttctttaggctgctgta

SEQ ID NO: 322528 - DNA, 201 bp, Homo sapiens
aaattttgcattgaatgataggtgctatgaagaaaataaagagggccgggtgtcgtggctcacacgtgtaatcccagcactttggaaggctcaggtggcasatcacttgagcccagaagctcgagaccaatctgggcaatatagcgagaccccgtctctaaaaaggaaaaaaatatttatttttaaattgaaaaagaaaga

SEQ ID NO: 322529 - DNA, 201 bp, Homo sapiens
gtgaactttgccttttatcattgtgatgacgtatcagaaggagataagaaaaatgaaaagagaatactgcattaaggaaactggtcatgaactatggccarttttaatttacttttccagattgttagatagcatattaaactaggtttttataagatgttgttcagctttgaactgtgaacaggttaacatgctaccatt

SEQ ID NO: 322530 - DNA, 201 bp, Homo sapiens
agcattctgtggaggaagtagaatagaaataagtattcaaggagaataaaggacttgtaaaaactgttgagaaggtcagcatttttttttaatggatgtcrgtgggtatcatttccctatagtgtttagaatccactaagttttaaaaagtaataatagttttatgtttaaatgtacatgtttatagtataacagaaatta

SEQ ID NO: 322531 - DNA, 201 bp, Homo sapiens
caatatcacttcaaggtgtatatacagcagaattgaaagcagggtcttgaagagatgtttgcacacccatgttcatagacagttcacagtagccaagaggyggaaacaacccaaatgcccatcgatggatgaatggataaacaaaatgtggtattatacacacaatggaatactgtttagccattaaaatcaaagaaatgt

SEQ ID NO: 322532 - DNA, 201 bp, Homo sapiens
aaagaccaagattggccagctctagctgtggatttagcccatcaccttcaagttagtgaagatgttgttagaaggcattatgtgggggaactatacaactrtggagttgaccacttaggagaagaggtaatcatgaccctttgaatgttaattgggctcaagttataaaattgatagttggaataaagaatcagttaagtt

SEQ ID NO: 322533 - DNA, 201 bp, Homo sapiens
tttcatgtattgacttcttatttatttgattctcttatttgactaatattagaaagattgttcacattaggctttgttagactattttttaatttgataaytagattttactcatactcagttaaatgtaatgcccagtactggcattttaatgacataaagaaggactctaaatcctcataaagagactaatatattata

SEQ ID NO: 322534 - DNA, 201 bp, Homo sapiens
acagtgtctctttgttctcattagattcaaagatctttttgatgtctgctttaatttcattgtttacccaaaagtcattcaggagcaggttgttcaatttscttctggttgtgtggttttgagtgaatttctttctttctttttgtttttttttgttttgtttttttttgagatggagtcttgctctgtcacccaggctga

SEQ ID NO: 322535 - DNA, 201 bp, Homo sapiens
tatttggcaagagaaaaacaaagcaagtttattctggctcttagggtgttatttaaagctcagctggagaaagcaggagtggagcatcaactcagaagagmagtagaaatacagtcccacctccaacatcctaatataatcagactgtatggttatttccatgatgccaccagagtctacctaattctggaatatacacca

SEQ ID NO: 322536 - DNA, 201 bp, Homo sapiens
gacagtaaatctaaaagaaggaacttaaatatgctaatgccttgactttcaaattcttgcctgtctattcagtgtggaaagtcagctgaaccagtgtattstatcctggttcttgtttggctgacagtaactatagcagttttcctgcagggcctaattacgttcctttttaaaaaacaggatgtgggaatgagtgacaca

SEQ ID NO: 322537 - DNA, 201 bp, Homo sapiens
gcctttccccaagtagtataaagttccaaggctggtttattagatactatataggctttcagaatttcgtacatttcattttgaaagggtgtgccttgtgttttattttattttattttattttattttatttttgcatttccaacctgaagcacatttggctttgtagtacagcgctctcactttgtgctataccggaat

SEQ ID NO: 322538 - DNA, 201 bp, Homo sapiens
cctttccccaagtagtataaagttccaaggctggtttattagatactatataggctttcagaatttcgtacatttcattttgaaagggtgtgccttgtgttttattttattttattttattttattttatttttgcatttccaacctgaagcacatttggctttgtagtacagcgctctcactttgtgctataccggaatg

SEQ ID NO: 322539 - DNA, 201 bp, Homo sapiens
ttctgaattcacttgccccttttcatttctctccataagctccacagaccacagctgcttctaatcgtccatttcaggtctgagacttctttcagactttstgtgctcagtcaacacacacatacacacaagctaattgggaattttatttatttgtaattttatattgtgatctcatttttataaaatgcatatctgcaa

SEQ ID NO: 322540 - DNA, 201 bp, Homo sapiens
gcttttattctgttttccatttgcttggtaaattttcctccatccttttattttgagcctatgtgtctttgcatgtgaggtgggtccttgaaggttttgcstctttatccagcttgacattctatgtcttttaattggggcatttagcccatttacatttaaggttagtattgttatgtgtggatttgatcctgtcatcat

SEQ ID NO: 322541 - DNA, 201 bp, Homo sapiens
gaaaatttgacaagtttaattcacctagttacaaagaaaagcatttttatgtaataactcttaagtcaataacaattattgtttagttgtctataataggktatttttgtgtcccatttgcaggacccccaggaccttcaaaacactgaagtgccaattgcaacaacagctaaactagtaaataaagtaattgagctttta

SEQ ID NO: 322542 - DNA, 201 bp, Homo sapiens
aaaacgagattgaaaaatggtgttaaatattttaagtatttaaatttcattctttaataatttgataatgcttttcctggtgtatatactgattcaaagaytgatttttgtatattgccacagtgacctcttgtgggggaaacatttatctcatacattttattaactaaatcattctgcaaataggtttcagactgaaat

SEQ ID NO: 322543 - DNA, 201 bp, Homo sapiens
cagaggtccttccagccctgtaatatgaaaataataccactggaatccaactaaataaaagtttgtatttaaatccctatttatccaaaattgaaatcagwgtttgctctctatttcttttattaacttcacagtattcagagcggaagactctaatacccatagacatctaactgagtttgttggtttggacattgaaat

SEQ ID NO: 322544 - DNA, 201 bp, Homo sapiens; identical to SEQ ID NO: 67493

SEQ ID NO: 322545 - DNA, 201 bp, Homo sapiens
cagatcttaagttaccttgtaaaaactagggcaattatttttgtgtactcttaatctgcttaattacataaactatcagtgtacccttacagatagtatasgtctagatacaaggtagacattgtggcagagttatgccattttatagctagaagaatcttagatcattttagaggtaaagtaagattgaaataaaggcca

SEQ ID NO: 322546 - DNA, 201 bp, Homo sapiens
catgcaccaccatatccagctaatttttatatttttagtagagtcggggtttcaccattttggccaggctagtctcaaactcctgacctcaggtgatctgyccaccttggcctcccaaagtgctgggattacagatgtgagccactgcccccggccgtagattgtgtttaagaataaaatcttgtgctctgaatttgcaaa

SEQ ID NO: 322547 - DNA, 201 bp, Homo sapiens
actagatgaactagaataacaaagaaaaaagtaaaaatcaaagatgtttatcaaagtgtaatttagaatgggggagaaattagaaagggcttacatgttcaaaaaaaaaaaaaggaaaaaaatgaatatttaaaccgtaggcctggcactgtggctcatgcttgtaattctggcactttgggaggccaaggtaggaggatc

SEQ ID NO: 322548 - DNA, 201 bp, Homo sapiens
ttaaaatatcaaaagatagaccaggcttgtaatctcaacactttgggaggctgaggcaggtggatcacttgaagtcaggagttcgagaccagcctgaccamcatggtgaaactccatctctactaaaaaaatacaaaaattagttaggcatgggattacacgcttgtaatcccagctactcgagagactgaggcaggagaa

SEQ ID NO: 322549 - DNA, 201 bp, Homo sapiens
gagtctatcatgattttctaacaaatacttacgttcgtgttcccagcgccctgcatactttttgtatatagtcatccagctgtgaaaaaggaatgataatyaatcatcaaataagtagtcagtggtagtggtgttactaataatagtcattaaggccaggcgcagtggctcacgcctgtaatcccggcactttgggaggcc

SEQ ID NO: 322550 - DNA, 201 bp, Homo sapiens
tgagacaggagaattgcttgaacccagaaggtggaggttgcagtgagccgagattatgccattgcattccagcctgggcaacagagcgagatgccatctcaaaaaaaaaaaaagaagtcattaataggccaggcgcgatggctcacacctgtaatcccagcactttgggaggctgaggtgggtggatcacctgaggtcagg

SEQ ID NO: 322551 - DNA, 201 bp, Homo sapiens
tggaactggctctaaggctacaagctttatagagtaaaccaaatgtcagcaatttagttttagtgaaattaaaaattaatattacttattaatttgaattktgtttttatttaaaaatttatttctattttaaagttaagggctataagcataagcatttacagtagtttggtatttgtaggtctttaagtaacatgacag

SEQ ID NO: 322552 - DNA, 201 bp, Homo sapiens
cttgaacccagaagtttgagaccagcctggccaacatggcgaaaccccatctctaccaaaaaaattttttttaaattagtcggccgagcgtggtggctcayacctgtaatcccagtactttgggaggccgaggcgggcagatcacgaggtcaggagatcaagaccatcctggctaacacccgtctctactaaaaatacaaa

SEQ ID NO: 322553 - DNA, 201 bp, Homo sapiens
aattaggatctcctttatctaatacggtctattatcaattttttcttatgttctattgatctggttatttttgtactggcacacttttacatactatatasgtttttgtaaaacaatatgctcatagactgttctcactacttcattcccttcctcccccatctgttgcctttttttaataagaaaaattttttagaatta

SEQ ID NO: 322554 - DNA, 201 bp, Homo sapiens
ctcggcttactgcaacctctgcctcccaggttcaagcgattctcctgcgtcagcctcctgggtagctgggtaaattacaggcgcccaccaccacgcccagytaatttttgtatttttagtagagacagggtttcatcatgttggccagcctggtcttgaactcctcacctcaggtgatccacccgcctcagcctcccaaag

SEQ ID NO: 322555 - DNA, 201 bp, Homo sapiens
tttatttttatactttaagttctaggatacatgtgcacaacgtgcaggtttgctacatatgtatacatgcgccatgttggtgtgctgcacccattaactcstcatttacattaggtatatctcctgatgctgtccctcccccctccccccaccccactacaggccctgatgtgtgatgttccccttcctgtgtccaagtga

SEQ ID NO: 322556 - DNA, 201 bp, Homo sapiens
cgtacacacatcctactcaattaaaagtaaacatggcttctaaaagtattttttgtgctcttcaaaatattagtaaaatttatttttttcttttctttttytttttttttaggaaggaagagctactgttaaccaggatacaagattagacaacagagtcattgatcttagggtatgcctcatttatttattaagtgaagc

SEQ ID NO: 322557 - DNA, 201 bp, Homo sapiens
tatatagactgtgatttagccacaattcttcattttccagtttttgttaaagtgagttacctgagtataaactttttaactagaggtttgcattgataagyttacaattgattataataatataaatataaatgtttacctttcagctgccagtgaaggaggagccaatgtttttactgtgtcatattttaaaaataatgc

SEQ ID NO: 322558 - DNA, 201 bp, Homo sapiens
ccgccagcgctccgggatctcgagatagccgcagctctcgcgatctttctggagccgcacctccacgcggagtccgagcgcgtgtgctgagaccccagggycgggagggcggagactgggagggagggagaagcccctttggcctgccttacggaagcctgcgagggagggtggtgtccactgcccagttccgtgtcccga

SEQ ID NO: 322559 - DNA, 201 bp, Homo sapiens
attcacaagtaagttgtttcactaattgttaagaaacatttttcttttatggaattcctacaaattaaaacatctgctcactaaggatttccggtgaaatwcctttatatgatcatatatagtcattgtattccagcatgcctttttgccttgtatttattcgtgtcctttcgtcttctctccaattattagaatttaaaa

SEQ ID NO: 322560 - DNA, 201 bp, Homo sapiens
ataaagaaggcctttttcctgttcatttaggtatcttaaggtaagggtaagtatagtaatgataaattaaatatataaggtatttgtacattccttgtcarttgaaaataaggttgttatatatttgcattgaaattaacatatgttgcattcattttatgtactatagtttagaagcatttaatttgagatagatttaat

SEQ ID NO: 322561 - DNA, 201 bp, Homo sapiens
gggcaacagagcaagatcctgtctcaacaaataaaaaataaactactatctaatttagtccccaactagctctttcatagactctcagcaaagtcaagggytaaagaatttggaaataaaaggcaaaattgccattcttcttctataatacaaacgttctaagatatatcctccgtcaggttctagtgtagcctgactttt

SEQ ID NO: 322562 - DNA, 201 bp, Homo sapiens
agagtgaaaaacaaaaagtattattatgaaaaagtaagtttgacttcatcaacttctggaaagtctcagggaccttcactgctccccagaccacattttcwgaaccactactctatgtcagcttttatctgttccttcaaccttgggctagcaggttaaatccaggaatcaatgaagaagtgggtggttaatttttcttat

SEQ ID NO: 322563 - DNA, 201 bp, Homo sapiens
attatgcttccgctgtatatttagtttgcaaaacattgaaaacctgatgtactaagggtgtctgtgaattgattttgagctccattgttatttaaacttaytcttaaaatcagcaattctcaaaccttttggtatcgagttgccttttacattattaaaaataattaagaaccctacaagcttttgtttttattggtatat

SEQ ID NO: 322564 - DNA, 201 bp, Homo sapiens
atcaagatacatcagtgttactggggaaggtagtatgattcctggacatttgggaaactattactaaagggcctattattttcagttgttgttgttttttkgtttttttttttttcacagaaactataaagcaatctagcagctcatgagcttctaagaatgaaaatgtattatttcatagtgagctgatgatgcattctg

SEQ ID NO: 322565 - DNA, 201 bp, Homo sapiens
ttggattttcatattaggaatactcaaacctattttatctatacaatgaaataacactctgccttacaaaagaaggaaatcctgtcatttgtagcaatgtrgatgaacatagaggacatcatgctaaacaaattagcacatcaggcacagaaagacaaatactgtgtgatctcacatatatatggtaccttttaaaagttg

SEQ ID NO: 322566 - DNA, 201 bp, Homo sapiens
tttggaactgagatgggctcatcttcccatatggcacttggccaaatatagagtagacaccaaagaggagtgaagctagcccctttagcaaagaagaaggsaagtccattgggcaggcagccagtagtgtttcctaagcttaactatatcgagttaattgaagagaagttccaggcttttgagtttagaaaaagcccaaca

SEQ ID NO: 322567 - DNA, 201 bp, Homo sapiens
tgcttgggaccagaagtgtgtctgattttggatttttttcatttgttatcatatttgcattgtgcttactggttgaacatgccaaatctagaaatctgaartgctccaatgagcattttttggtttttttgtttatgtttttgagtatcatgttggcactcaaaaagtctcagattttggagcattttggattttcatatt

SEQ ID NO: 322568 - DNA, 201 bp, Homo sapiens
cccattatggggtaattattcaaaggaaatgaaatgattatgtcaaagagagatacatatttgcactccaatatttattgcagcaccattcaccatagccragatatggattcaacctaagtttccttcaacagatgaatggataaagtgtgggatatatacactctggaatactattcagccataaaaagtgaaatcttg

SEQ ID NO: 322569 - DNA, 201 bp, Homo sapiens
taattgcttttgtgaccttttaagataaataagatgataaattatattttgttttgtgtctttttgcagatttggagaaaattaaggcttacattgattcyttccgctttggagcccctcctcatgctggtggaggcattggtaatattctgttattgcttacaaataagttcataagttctaagtataatacaaatttga

SEQ ID NO: 322570 - DNA, 201 bp, Homo sapiens
gtaatagaaataggatggtagtcacttgaggactggtgttttttctcttgcagaaacagtccaactcttacgatatgttcatgagaggagaagaaatattktcaggagctcaaagaatacatgatcctcaactgctaacagagagagctttacatcatggaattggtaaacaacttaaaataatttaggggagtgtatatt

SEQ ID NO: 322571 - DNA, 201 bp, Homo sapiens
aaaaaatttttttcttagaaaattgagaaatattcagacagcctgcctttctcccagatgatctgattaactcagtatttaatatttttacgaagttgttstgaggtgtctctaaaagtgatacctatgtcggattagttggaaatgacctccaagttatttgaaaattatttagaaatggtcttccctgtgtacccctgc

SEQ ID NO: 322572 - DNA, 201 bp, Homo sapiens
gttttaaattttcaaataatgttgatttgccttcctgaaaggttgggccatttattctgccaatagtcagtcacattgtattataatccttcatttactcrtctctctcccgttatactgagagcctttgttctgtccaaatggggcactttttcctaaacatagtaatttagcaaattaaaagatagaatgcatgctaca

SEQ ID NO: 322573 - DNA, 201 bp, Homo sapiens
tagaatgtgcacttcacctacaccctctaaactggcaaagagctcttccctttacaggtcattgaaagttgtttatttatgatgatgtttaacatagagaraataggaaaagaaaatagaaccgagtcaagttgattaagaaagtctctatttttccctctttctgtatttgtgactatatttcaagtattaggtaagcta

SEQ ID NO: 322574 - DNA, 201 bp, Homo sapiens; identical to SEQ ID NO: 67491

SEQ ID NO: 322575 - DNA, 201 bp, Homo sapiens
tttttcgttttgcttttctaaaattaatttttttaagtgtagaaaaattagttttctgctttctgtttagtttatcttctacctcatgccctctgtaatcrccgttatcatctaacacctagcccagtactaggaggcatataataaatatttgtttaatgagtgaggaggaagtattattttttttacatattatggaat

SEQ ID NO: 322576 - DNA, 201 bp, Homo sapiens
gccacagcaccaacccctaaccatagcttttttgacatagctagaccgtaagccagtgcctacaccccagtcattacttattacattggtaggcatcttaraatttacaaataatttttatatatgttaccttatttgactgttctaacaaccatagaggtaggcaaaaaatattattatccccattttaaacaaatcatc

SEQ ID NO: 322577 - DNA, 201 bp, Homo sapiens
attaggtgatagccccagtgcaggagacttacgagagtacaagagatatgcatgctgttgattttttttttttaagttagttggtaacagacataaagatwtctaggcagtgtagccaagtgacataaacaattttctttcttaactactcttcacctattatcctcattttgatcctttttcattgaaatggattctggt

SEQ ID NO: 322578 - DNA, 201 bp, Homo sapiens
ttacattaggtatatctcctgatgctgtccctcccccctccccccaccccactacaggccctgatgtgtgatgttccccttcctgtgtccaagtgatctcwttgttcaattcccacctatgagtgagaacatgcggtgtttggttttctgcccttgtgatagtttgctgagaatgatggtttccagcttcatccacgtccc

SEQ ID NO: 322579 - DNA, 201 bp, Homo sapiens
cacctctgatgagatgattcaagttgggaattttttctcttgacagcatcaacaaagagagcattgtggatgtagaaggtgttgtgagaaaagtgaatcasaaaattggaagctgtacacagcaagacgttgagttacatgttcagaaggtaagttttttcaaaatataaaatcgcatatagaaatagatttgggttctaa

SEQ ID NO: 322580 - DNA, 201 bp, Homo sapiens
ggagtggtgagagaggacatacctgtcttgtgccagttttcaaagggaatacttccagtttttgaccattcagtatgatattggctgtgggtttgtcataratagctcttattattttgagatacgtctcatctatacctagtttattaagagtttttagcatgaagggctgttgaattttgtcaaaggccttctctgcat

SEQ ID NO: 322581 - DNA, 201 bp, Homo sapiens
tggatagtatacacatgcatgcgtgcctgatgagtatagtaaattttggcccacttttaaagtagagagcattttccttctttgtaaaacctgaagttgcrtgtccttaatacatttgtgttctttctgtctttttcagggaaacagtgcttcttagtcctacgtcagcagcagtttaatgtccaggctcttgtggcggtg

SEQ ID NO: 322582 - DNA, 201 bp, Homo sapiens
tggaactaagctaatcatgcagtaaggtgtgtcaccaaccagagccaaagaaagaacaattttgtttcctaatacatgacaagagcttggtctcaaaagtrcttcatagagaagtagtctgagtggacagttctatttaccagggagccagtactgatggtttgtttgtttgtttgagtcctttaaaaatcattttaagtg

SEQ ID NO: 322583 - DNA, 201 bp, Homo sapiens
tttctagtttatttgcatagaggtgtttatagtattctctgatggtagtttgtatttctgtgggatcggtggtgatatcccctttatcattttttattgcrtctatttgattcttctctcttttcttctttattagtcttgctagcggtctgtcagttttgttgatcttttcaaaaaaccagctcctggattcattgattt

SEQ ID NO: 322584 - DNA, 201 bp, Homo sapiens
gtatttctgtgggatcggtggtgatatcccctttatcattttttattgcatctatttgattcttctctcttttcttctttattagtcttgctagcggtctrtcagttttgttgatcttttcaaaaaaccagctcctggattcattgattttttgaagggtttttgtgtctctgtctccttcaattctgctctgatcttagt

SEQ ID NO: 322585 - DNA, 201 bp, Homo sapiens
agttttgttgatcttttcaaaaaaccagctcctggattcattgattttttgaagggtttttgtgtctctgtctccttcaattctgctctgatcttagttaytcttgccttctgctagcttttgaatgtgtttgctcttgcttctctagttcttttaattgtgatgttagggtgtcaattttagatctttcttgctttctct

SEQ ID NO: 322586 - DNA, 201 bp, Homo sapiens
tcctcgccagcaacgcaacaaagctggacagagaatgactttgacaaattgagagaagaaggcttcagacggtagataataaacttctctgagctaaaggwggatgtttgaatacatcgcaaagaagctaaaaaccttgaaaaaaagattagatgaatggctaactagaataaacagcatagagaagaacttaaatgacct

SEQ ID NO: 322587 - DNA, 201 bp, Homo sapiens
tgtccaggctcttgtggcggtgggagaccatgcaagcaagcagatggttaaatttgctgccaagtaagtaagcaattatatcctgttgtcagaataaacartggtgggaaccaagactcccaggggtttggaccattttcatacattaacatcaatgcttcgtttgtttaaaaatgtagttatttaaattgtcagttcagt

SEQ ID NO: 322588 - DNA, 201 bp, Homo sapiens
actcatgcctgtaatcccagcactttaggacactgaggtaggaggatcacttgagcccaagagttcaagaccaacctggtcaacatggcaaaaccctgtcrctacaaaaaaaaaaattaaataaataaataaaaattaaaaataaataaaaagtggatctgattataaagtaataaaaaatatttttatgtttgagtgata

SEQ ID NO: 322589 - DNA, 201 bp, Homo sapiens
ctcacacctctggctgttagtaaaaaggtaatggataattgttggtaaggatgtggagaaaagggaatccttgtttgtaaatagttgatgggaatgtaaarttggtacagccattatgaaaaacaggatggagattcttctaaacattacaaagagaattaccatatgattcagaaattccatttctggtcttacatacca

SEQ ID NO: 322590 - DNA, 201 bp, Homo sapiens
gacagatgggtgtaatagaggtagagagaacgcaaggatttagttccctactgactagtgacaaagagtccctcattgaccaaactctcctcagattcctytgaaagaactttctgctccggtaagcctcgacttttttacttcatgtttatgcctgcattgttcagttttagtaagaatcctgctgagttgctttaacta

SEQ ID NO: 322591 - DNA, 201 bp, Homo sapiens
gctcaacatcactaaacattagggaaatataaattaaaacctcaatgagataaccatctcacacctctggctgttagtaaaaaggtaatggataattgttrgtaaggatgtggagaaaagggaatccttgtttgtaaatagttgatgggaatgtaaaattggtacagccattatgaaaaacaggatggagattcttctaaa

SEQ ID NO: 322592 - DNA, 201 bp, Homo sapiens
gctataagcataagcatttacagtagtttggtatttgtaggtctttaagtaacatgacagaacttatttaagtgattaatggggtttgctgacattttttrttccactaaagagaacctatagagtagttttagaactgctggtctgtgccttgttgagtagtgcatacttctcaccacgcttattttggatcagctgggc

SEQ ID NO: 322593 - DNA, 201 bp, Homo sapiens
atactgtatgttgaaagtagtaactgtaagtctgcttgcatttttgctttcctttttctttcttcttttggttaaggcccattctaaatgtaaaatataakgctcagtttaaaaaacaaaatcttgtgatgttttacaaaacaatctgatgtgtaaagtggtcttggagagattaacccattttttatgaagaagtaattt

SEQ ID NO: 322594 - DNA, 201 bp, Homo sapiens
attaatgtaaaatactgaggtttataaattagttactgaatcaattagcttttgttatataacaaatcaccccagtacttagtgacttgaaacaacaaacrtttatttgcttacaattctgtgatgcacccaactgagatggctcatctgctccatgcaacattggctgggctcactgataaatctggcacatctctttct

SEQ ID NO: 322595 - DNA, 201 bp, Homo sapiens
aacagagaagaaacgttaggatcatttagacagaccctgttcttatagaaaattggcctactgtagtgttcagaattgtctaaaaatatcaattgacacaytagtttataactttatacttttcatactttttcacatttgatcatccctgcaagtttgtgaagtaggcagaacaagcattcctattccactttataaatg

SEQ ID NO: 322596 - DNA, 201 bp, Homo sapiens
ctccaaagcaaaagggaaaattaagagtgttttttagtggttaaaaacctgccaatcatatatgactctaaagtcaatagattatgtctgtgttgacactktgtttgcaacctgtcttttttaacttgtgattgctatctgatttgcatttcaaaatactgtatgttgaaagtagtaactgtaagtctgcttgcatttttg

SEQ ID NO: 322597 - DNA, 201 bp, Homo sapiens
ctttacttagaaacttgaggatcaatgaagcatgagataattcagaagaatatttagttagtaacacattctctttgggaagctagcagctcagttagtgracgagctaactattctgccagaatctggtttggaaaatagtatggagagaaatatgtctgtgaggaaaaggccatttctaatctccatttaattttaatt

SEQ ID NO: 322598 - DNA, 201 bp, Homo sapiens
tttctaatactagatcatcctcccaagaggttgtattcaaatatattcccacaggtatgtcacagtaccactttctccacatccttgctgccatggtttcrttatttttcccatgctatattgaaacttaatcctggtcaggcacggtggctcacatgtgtaatcccagcaccttcaggggcttaggcagggtggatcact

SEQ ID NO: 322599 - DNA, 201 bp, Homo sapiens
accatattaactgatatgaattataaagaaaatttttaatcctttgatgttactgtggttacaaaaacgagattgaaaaatggtgttaaatattttaagtrtttaaatttcattctttaataatttgataatgcttttcctggtgtatatactgattcaaagattgatttttgtatattgccacagtgacctcttgtgggg

SEQ ID NO: 322600 - DNA, 201 bp, Homo sapiens
ttaaaacctcaatgagataaccatctcacacctctggctgttagtaaaaaggtaatggataattgttggtaaggatgtggagaaaagggaatccttgtttktaaatagttgatgggaatgtaaaattggtacagccattatgaaaaacaggatggagattcttctaaacattacaaagagaattaccatatgattcagaaa

SEQ ID NO: 322601 - DNA, 201 bp, Homo sapiens
tgccttcttgtttcagctctcatactgtaaataagcgtccctttcacagtctctttaatgccacatttatgccttttaaaaaaggacttttaaaaactttygtgtgggtacatagtaggtgtatatatttttggggtacataataggtgtatatatttatgaggtacttgaaatattttgaaacaggcatgcagtgtgtaa

SEQ ID NO: 322602 - DNA, 201 bp, Homo sapiens
cattatactattcactctgcttttgtgtttgttggaaattttctgtgtaataaaataaattttaacgtagttgatcctcattattcgtggactgcatattsgcaaattcacctactggctaaaatgtatttataaccccagaacacttgcagcacttttgtggtcattctcagtcatgccagacctgtacatgtgcagagt

SEQ ID NO: 322603 - DNA, 201 bp, Homo sapiens
tcccccatctgttgcctttttttaataagaaaaattttttagaattaaatctaataagcacagtaaacatttaaagggtatagtgaacattcttcacttcyttttttttttttttttttttttgaggtggagtcttgctctgttacccaggctggagtgcagtgacacgatctcagctcattgcaacctccgcctgctggg

SEQ ID NO: 322604 - DNA, 201 bp, Homo sapiens
tggctgtggtttcagtagtagttcctaggaaaatgttatttttattcatctgcaagtttctctgtggtaataacctttgtccttccaatattttaaaactmctttgaatttgtttcctgtattaatacaacttcgttttttaggattttactttgtgactggatcatcctccaaagcaaaagggaaaattaagagtgtttt

SEQ ID NO: 322605 - DNA, 201 bp, Homo sapiens
tttgtatatagtcatccagctgtgaaaaaggaatgataattaatcatcaaataagtagtcagtggtagtggtgttactaataatagtcattaaggccaggygcagtggctcacgcctgtaatcccggcactttgggaggccaaggcgggtggatcacctggggtcacgagttcgagaccagcctgaccaatatggtgaagc

SEQ ID NO: 322606 - DNA, 201 bp, Homo sapiens
atatcttcaatgatacaatcacaagaaaaaccaggttagtagctatgtgacagtaaataaagcttttttgctttctaattccaggaaagctctaaatgaarttttaagtaaggttggcataaatctgaaggtataattctgaaaagcttaaatgacattaataatccaagtagatgtcataaccctgtgtaaacattgtca

SEQ ID NO: 322607 - DNA, 201 bp, Homo sapiens
aaataatttgaccctaaagactgatgaaatctaagacttcaagctacttttctagcatcgctctaaagtttaattattttcagctggagaaggagtagctaaaaaaaaaaaaaaattgaaaaaaaagagtaaactttaattatttaagtgaagagtgtttttgagaaacttcccgtttgttaatatttttatatttgtaat

SEQ ID NO: 322608 - DNA, 201 bp, Homo sapiens
gttgaagcaattctcgtgcctcagcctcccaagtagctgggattacaggtacctgccaccacatccagctaatttttgtatttctagtagagatgagggcttttttttttttttttttgagtcagggtcttgccctgtcacacaggctggagtgcagtggtgtggtctcggttcactgcagcctccttagctaggactaca

SEQ ID NO: 322609 - DNA, 201 bp, Homo sapiens
gatttttgtatttttagtagagacaagggtctcaccatgttggccagggtggtctcaaactcctgacctcaggtgatctgcctacctcgacctcccaaagkgctgggattacaggcttcagccactgtacccagcctcagatttgtttttatgaggaagttgagggtcaatgtgagtgtatatgtgtgtttgagctaaaat

SEQ ID NO: 322610 - DNA, 201 bp, Homo sapiens
gatgcccagcgccagcgccagccgcaagagtcaggagaagccgcgggagatcatggacgcggcggaagtgggtttcctcctttcctgggcctgggaggacrgacccctgggccgggctgcgccgagggagggaggagggggagtggggccctacaggtccttgtcggcacgttctccgcaggctgcgggcgtggggtccgg

SEQ ID NO: 322611 - DNA, 201 bp, Homo sapiens
tggattttttttttttttttttttggaatatttgcattactggctgagcatcccaaatctgaaatccaaaatgctccaatgagcatgttttttgagagtcrtgtcggcactcaaaaagtttttggattttgaaacattgcacattttcggatttgagaatgttcttcctgtaccatctgctagtgtttttttttccatttg

SEQ ID NO: 322612 - DNA, 201 bp, Homo sapiens
ttcattcctagaaaagtgaattaaaatgtctttggcacccttttcatacatagcactcacataactcatattccagattggcacggcaaattagcttcatsctcataggttagcaggttgttaggagggttttctcagaatctattcaggagagttccctttagatcagaattgtcccctttatttcacctcactcttagg

SEQ ID NO: 322613 - DNA, 201 bp, Homo sapiens
tggaagaaagagtatctgtgattgaagatcaaatgaatgaaatgaagcaagaagagaagtttagagaaaaaagagtaaaaagaaacgaacaaagcctccargaaacatgggactatgtgaaaagaccaaatctacgtctgattggtgtacctgaaagtgacagggagaatggaaccaagttggaaaacactcttcaggata

SEQ ID NO: 322614 - DNA, 201 bp, Homo sapiens
agctggtgtggcacgtgcctgtagtcccagctactcaggaggctgaggtgggagaatcgcttgaacccgggagacagaggttgcagtgagccaagaccacrccattgcactccagcctgggtgacagagtgggactccgtctcaaaaaaaaaaaaaaaaatgatagcaagtcatatgttaattgctccttcacatgagtaa

SEQ ID NO: 322615 - DNA, 201 bp, Homo sapiens
aataatgttgatttgccttcctgaaaggttgggccatttattctgccaatagtcagtcacattgtattataatccttcatttactcgtctctctcccgttrtactgagagcctttgttctgtccaaatggggcactttttcctaaacatagtaatttagcaaattaaaagatagaatgcatgctacaagtaagcctgaacc

SEQ ID NO: 322616 - DNA, 201 bp, Homo sapiens
attaacgtacacacatcctactcaattaaaagtaaacatggcttctaaaagtattttttgtgctcttcaaaatattagtaaaatttatttttttcttttctttttttttttttttaggaaggaagagctactgttaaccaggatacaagattagacaacagagtcattgatcttagggtatgcctcatttatttattaagt

SEQ ID NO: 322617 - DNA, 201 bp, Homo sapiens
tgtttgtatctcatttcttgtttctctttgcaatactagtaggttctctagtacttcagggattcacacaatgaagaatttttgaaagagcagaaattccrgttctaaatgaatgattttgagtttaaggttctacataaaatgtcattagaaaataaatggcaaagttttaaaaagtagattaaaagtagtttcccagcc

SEQ ID NO: 322618 - DNA, 201 bp, Homo sapiens
agtcatgttaatgagcatgacagttacttacttgccttccatcgtagttttttgtgggtcttatttcctgttgtcagctcttggaaggtgctactgcttaytttcttgctttgtttggtacacaacacataataagaaccctaccgaataatagatgaataaaacaggtgttttatacacatataatagagcattgtcttc

SEQ ID NO: 322619 - DNA, 201 bp, Homo sapiens
ggtttagtatggcggcagtgaagatggtagagaaatagacggattttaaaaatatgtttagaaagcacagttcacaaaacttgaggcaaattgcacatggmacatgatagagaagacagtgttgtcaaagattgagaattattcaggatggttccaagtacttatgctagctgtcaaaaataattatgatctctttgtaaa

SEQ ID NO: 322620 - DNA, 201 bp, Homo sapiens
ttgttcaattagaaattctacataattctggccgagcacagtggatcacttgaggtcaggaattcaagaccagcctggccaacatggtgaaaccccgtctytacttaaaatacaaaaattagccaggcgtggtggcgggcacctgtaatcccagctactcgggaggcagaggttgcagtgatccaagatcacgccattgca

SEQ ID NO: 322621 - DNA, 201 bp, Homo sapiens
aatgatgaaaccccgtctgtactaaaaatacaaaaactagccgggcgcggtggttgacgcctgtagtcccagctacttgggaggctgaggcaggagaatcrcttgaacctgggaggcggaggttgcagtgagccgagatcgtgccacggcattctagcctgggtgacagagcaagactccatctcaaaaaaagaaaagaag

SEQ ID NO: 322622 - DNA, 201 bp, Homo sapiens
tcctgatccttcttggtaggagaagtctacttttagacttcggcaagaactttttagaacttttttagggaaaagatatatggggtttttctttgtctttwaaaatccttttcctaaaaattgttaactgtgttttagcgcataaaatgggtatgcgctaaaattgtgaaagcaaaaattaaggtagctttcatacattta

SEQ ID NO: 322623 - DNA, 201 bp, Homo sapiens
ctagcatcgctctaaagtttaattattttcagctggagaaggagtagctaaaaaaaaaaaaaaattgaaaaaaaagagtaaactttaattatttaagtgamgagtgtttttgagaaacttcccgtttgttaatatttttatatttgtaattatctagatgaggagagaagtgaacaaaagataagactgggcaattcaata

SEQ ID NO: 322624 - DNA, 201 bp, Homo sapiens
tgaaagctgcagccctgggcctgcaccatgtcagcgcagcaatcccaggaaagagagcttcattcccagcatctgtatatttagtcccagagaaagacttkcattagctcagttagagtcactgcatcctggggaataggatactgcgactgttcagacttggtagagactagctgacttaggtactgtggcaggcaggca

SEQ ID NO: 322625 - DNA, 201 bp, Homo sapiens
ggagcataatagttggggctcacttacagccaaaaggctcgatagggaaatgtatgagatgacatcaagcatgattggatcttggggctcaggaagcatcwacaggcctttctctctccagcttttggctctgtttcctttaggatattggcctccttctcgaatcctgcaaacatagcaggaaaggtgaaagctgcagcc

SEQ ID NO: 322626 - DNA, 201 bp, Homo sapiens
tgcagtggcatgatctcggctcacttcaacttccgcctcccaagttcctacaattctcctgcctcagcctcctgagcagctgggactacaggcgcacaccrccacgcctcactttttttttgtattttagtagagatggggtttcactgtgttgcccaggctgatctcgaactcctgaactcaaggcaatccacccacctc

SEQ ID NO: 322627 - DNA, 201 bp, Homo sapiens
aatactctgtattattttataacttgcacttttctttatcttttggatatcttttcatgtctgtgcgtataggttttttttgtttgtttgttttttgagayagagtctcgctctgtcgcccaggctggagtgcagtggcacagtctccgctcactgcaaactccgcctcccaggttcacatcattctcctgcctcagcctc

SEQ ID NO: 322628 - DNA, 201 bp, Homo sapiens
ggttaatattgttatgtgtgaatttgatcctgtcatgacgttagctggttattttgcttgttagttgatgcagaaaagctgaaaattctaaaaatcagagygcctcttatcctccaaaggaacgcagctcctcgccagcaacgcaacaaagctggacagagaatgactttgacaaattgagagaagaaggcttcagacggt

SEQ ID NO: 322629 - DNA, 201 bp, Homo sapiens
cacagtctccgctcactgcaaactccgcctcccaggttcacatcattctcctgcctcagcctcccaagtagctgggactacagacacctgccaccacgccyggctaatttttttgtatttttagtagagacggggtttcactatgttagccagaatggtctcgatctcctgaccttgtgatccacccacctcagcctccca

SEQ ID NO: 322630 - DNA, 201 bp, Homo sapiens
aaagtgctgggattacaggcgtgagccactatgcccggccgcatcattgttttttaatggtttcatagtatttcatagtatggctatatttttttacatatattttatttttctcatttgtataaagttcagatttatccattgttgctttaatttgtgtttcagtcattggttagattaaacttcttttcctgatatgtt

SEQ ID NO: 322631 - DNA, 201 bp, Homo sapiens
tcatactttttcacatttgatcatccctgcaagtttgtgaagtaggcagaacaagcattcctattccactttataaatgaggaaacacgttcagaatgaarctacttgcccaaagtctcatagtaattggtggagtataaacagaagctagaagctttctaagacatctccgtctctttagcagagttctttgcttctgta

SEQ ID NO: 322632 - DNA, 201 bp, Homo sapiens
aagtgctgggattacaggcgtgagccactatgcccggccgcatcattgttttttaatggtttcatagtatttcatagtatggctatatttttttacatatattttatttttctcatttgtataaagttcagatttatccattgttgctttaatttgtgtttcagtcattggttagattaaacttcttttcctgatatgtta

SEQ ID NO: 322633 - DNA, 201 bp, Homo sapiens
agtgctgggattacaggcgtgagccactatgcccggccgcatcattgttttttaatggtttcatagtatttcatagtatggctatatttttttacatatattttatttttctcatttgtataaagttcagatttatccattgttgctttaatttgtgtttcagtcattggttagattaaacttcttttcctgatatgttaa

SEQ ID NO: 322634 - DNA, 201 bp, Homo sapiens
gtgctgggattacaggcgtgagccactatgcccggccgcatcattgttttttaatggtttcatagtatttcatagtatggctatatttttttacatatattttatttttctcatttgtataaagttcagatttatccattgttgctttaatttgtgtttcagtcattggttagattaaacttcttttcctgatatgttaac

SEQ ID NO: 322635 - DNA, 201 bp, Homo sapiens
tgctgggattacaggcgtgagccactatgcccggccgcatcattgttttttaatggtttcatagtatttcatagtatggctatatttttttacatatattttatttttctcatttgtataaagttcagatttatccattgttgctttaatttgtgtttcagtcattggttagattaaacttcttttcctgatatgttaact

SEQ ID NO: 322636 - DNA, 201 bp, Homo sapiens
gcggggcaagagtgggaggagaccctgcgcgcggccgccagcgctccgggatctcgagatagccgcagctctcgcgatctttctggagccgcacctccacrcggagtccgagcgcgtgtgctgagaccccagggtcgggagggcggagactgggagggagggagaagcccctttggcctgccttacggaagcctgcgaggg

SEQ ID NO: 322637 - DNA, 201 bp, Homo sapiens
tgataggttttgctggagtctttaggtttttccaaatataagatcatagcatccacaaaaaaggataattttacttcttcctttccaatttggatgccctytatttttttctcttatctgattgctctagctaagatttctagtcctatgttgaataacagtggtgaaaatgagcatccttgtcgtgttccagatctaaga

SEQ ID NO: 322638 - DNA, 201 bp, Homo sapiens
tggcactagcatgttaaggaatcgagcctgaataattaccagtaggtgggttaatggcttttgctatcttgcgaaaaaggaaaattcttatggctaagacwcgttggcaaaaaatgatgagtttttaggttttgtagttggttaagataattttcttaggaacatgattttatgttccagatgggtcagtcagtttgtcct

SEQ ID NO: 322639 - DNA, 201 bp, Homo sapiens
tcaggggcttaggcagggtggatcacttgaatccaggagttcaagaccagcctggccaacatggtaaaaccccatctctactaaaaatacaaaaaatagcygggcatcatggcacacgcctgtaatcccagctacctgggagtctgaggcatgagaatcacttgaacccaggaggcggaggttgcagtgagctgagatcgc

SEQ ID NO: 322640 - DNA, 201 bp, Homo sapiens
tgtagattatctttatttattttttgaaacagagtcttgctctgttgcccaggctggagtgcagtgatatgatctcaactcactgcaacctccacctgccsggttcaagtgattctcctgccttagcctcccaagtagctggctgggactacaggcatgcaccaccatatccagctaatttttatatttttagtagagtcg

SEQ ID NO: 322641 - DNA, 201 bp, Homo sapiens
gttgggtcatttggtaaaggaaaaggtaggactctttatatgctggatttctttttctaattctgaaatgtctcttgggactaaaaacaattgcagagggktctgagcttcctagaatggtatgattctggaataaataaaaaccgaagaaggacaacattaaaaaaatttttttcttagaaaattgagaaatattcagac

SEQ ID NO: 322642 - DNA, 201 bp, Homo sapiens
ctcctgcctcagcctcccgagtagctgggattacaggcgcccaccaccacacccaactaattttttgtgtttttagtagagatagggtttcaccatgtagrccaggctggtctcgaactcctgacctcaggtgattcacctaccttggcctcccaaagtgctgggattacaggcatgagccaccgcgccgggccctcaaat

SEQ ID NO: 322643 - DNA, 201 bp, Homo sapiens
cgcggccgccagcgctccgggatctcgagatagccgcagctctcgcgatctttctggagccgcacctccacgcggagtccgagcgcgtgtgctgagacccsagggtcgggagggcggagactgggagggagggagaagcccctttggcctgccttacggaagcctgcgagggagggtggtgtccactgcccagttccgtgt

SEQ ID NO: 322644 - DNA, 201 bp, Homo sapiens
aggcctcctccgtccccaagcagctacgtcgcccaggggaagagagaaggcgggaaagtccaagagaggagaaaccaaggcccgcgcttaggtgggtgttktagtgacgagtctgcggttacagccgagcggagttgaaagggctgttagaagaatggagcagaagtcgcagttgggacgaagctgaagagagctggcatt

SEQ ID NO: 322645 - DNA, 201 bp, Homo sapiens
atcattcttaaaaacatctcagatgataaagtgaaataaggatcagcactgcttcttaaaaattagatgtgatgctctgatttgttattggggggtgtggraggagagcacagaatctgatataaacaaagaaaaagttattcagccctcagtagtttaattctactttagagaacaagattgcattgttaattgtaggaa

SEQ ID NO: 322646 - DNA, 201 bp, Homo sapiens
gaccccatctcttaaaaaaaaaaaatttaaaaactatggataataagtaatgcctaaaaattaggtattgcaagaatttatgacaccatggcaaaatgctrtaggataaaaatgttactgaaaaaagcaagatattcattgtatatacaatataattagagtaattacgaagaaccaaaatttttgtataaagttaattac

SEQ ID NO: 322647 - DNA, 201 bp, Homo sapiens
ataaaaaccacagtgtttatggagaaaatgagattaatggcataacactcaaaaacttgatgtggagaaagggaaacccctcatacactattggtgggaaygtaaattagtatagcctctatggaaaacggtatggcggctcatgagaaattaaaaatagaactaccatatgatccagtaatcccattatggggtaattat

SEQ ID NO: 322648 - DNA, 201 bp, Homo sapiens
tgtaaaaaataaataaacaaaacatgtaaaggtaatttctatctacttatattttattcaagacttccttgaatgattcctttaaaccatcacaatacatrtgtatttaggagggaaaggaaatgattattgtcactttttagggtttctcaaaaaacaattcacccaaaaccctttatttttgtttaacaaaaaaaaata

SEQ ID NO: 322649 - DNA, 201 bp, Homo sapiens
gtaatttggtttaagataagaaaaaatgaaaatattaataaatgatttttttcacctgatacacttacattttattaactttggtatacagtatgatgctsttttatataatgtgtgatctgaaataaaagtgtttactatagtttgcctaagttttcataattttgtttataaacaccattttccattattttcccctca

SEQ ID NO: 322650 - DNA, 201 bp, Homo sapiens
ggatgatgacaaagttctggaaagggatagtggtgacagttatacaacataatgtacttactgccactgaacttatacactgaaaaatggttaaaatgatragttttattatgtatttttatcacaattttatttttttaaggaaaagttattttgtcatcttatttcctggccttatgacagagctgcacttaagtgtgt

SEQ ID NO: 322651 - DNA, 201 bp, Homo sapiens
gtggtgttgatggatatgagacagaaggcattcgaggactccgggcccttggtgttagggacctttcttataggctggtctttcttgcctgctgtgttgcrccaaccaacccaagggtcagtcgttttgggggtttttgtttgtttttgaaacagtctctctctgtcacccaggctggagtgcaatggcaaagtcatggct

SEQ ID NO: 322652 - DNA, 201 bp, Homo sapiens
gtcttgctctgtcacacccaggccgaaatgcagtggcgcgatcttggctcactgcaacctctgcctcccgggttcaagcgattcttctgcgtcagcctccygaatagctgggattacaggcgcccaccatcacgcccggctaattatttacattttttaatagagacggggtgtcaccatgttggtcaggctggtctcgaa

SEQ ID NO: 322653 - DNA, 201 bp, Homo sapiens
aaacaaattggttttgccacaaatggtgctattctgaaagtattcaaggcttaagtgaagtctttggatttatagctttcatttatttgagcaattttgaygttcagcacctttaatatttaagttgtgaaacaacctatcattctgtttcaggagcacgtgcagaaactaattcccgtgtcagtggtgttgatggatatg

SEQ ID NO: 322654 - DNA, 201 bp, Homo sapiens
actatttgactaaaaggagttttagagtagataatttttaggataaatgttggtacatgtgaaaagtctgctaatgggtcagatagtttagaatacgtccrtatttgtggtatttaatttagattatatggcatctgaaaggtattgcttctcattcttggttggttgtttgtctgtattacaggttcgtattcaagagac

SEQ ID NO: 322655 - DNA, 201 bp, Homo sapiens
gaagctgtggaatcagctcaagctggtgacaagtgtgactttacagggacactgattgttgtgcctgacgtctccaagcttagcacaccaggtcagtaatytgtggctcaaatttaacaaattctcagttacctaaactgcacagtatctagcttcccacatcttcattgtcttctttttggctaccaatcagaagctgag

SEQ ID NO: 322656 - DNA, 201 bp, Homo sapiens
ggtgttagggacctttcttataggctggtctttcttgcctgctgtgttgcgccaaccaacccaagggtcagtcgttttgggggtttttgtttgtttttgaracagtctctctctgtcacccaggctggagtgcaatggcaaagtcatggctcactgtagcctccactttctgggctcaagtgatcctaccatctcaacctc

SEQ ID NO: 322657 - DNA, 201 bp, Homo sapiens
actgcttacatgctcggtcacttctgtaagctctgttcacataggccacttgtgattgccaaacttcgtgttgttctgtcggaagagaggataagttgttrgataaactcactttagcaaagtaaatttgtggagtatcagcatacctgccagcctgaacatttcttcacaagcttattgtcaggcaaagctttgtaggtc

SEQ ID NO: 322658 - DNA, 201 bp, Homo sapiens
ataggtatgggcatattaatcttctttactttgaataggggttgaaatccgggaagccagctcttcttggactgtaagtgttcacttgtgtagcagaaggkcagctttcacagttatttcccactgagaagaggcgctttgatactgccagtggtcgttttagtactgctctgaacttcatgtaggcctttgtagagccga

SEQ ID NO: 322659 - DNA, 201 bp, Homo sapiens
aaaggccattgcagactagaaatggagtaaaatcctcatgtagttattggtaaagtgtggcgtctggacactagtacgcttcctacccttaactgctttamcatgctattcaaagttttatcaccctatagttaactacaaagcagaaggaaaaatgatgaattcaagatgttgaacctaaacttctacttgatagttaag

SEQ ID NO: 322660 - DNA, 201 bp, Homo sapiens; identical to SEQ ID NO: 67512

SEQ ID NO: 322661 - DNA, 201 bp, Homo sapiens; identical to SEQ ID NO: 67514

SEQ ID NO: 322662 - DNA, 201 bp, Homo sapiens
ttcacaggatcatgttctaattgagctcacccaggctggattgaaaggctccacagagggaagtgagagctatgaagaagatccctacttggtagttaacmctaactacttgctcgaagattgagatagtgaaagtaactgaccagagctgaggaactgtggcacagcacctcgtggcctggagcctggctggagctctgc

SEQ ID NO: 322663 - DNA, 201 bp, Homo sapiens
cctgggctcaagccagcctcccacctcagcctcctgagcagctggaactacaggtgcaggcccccatgcccagctaacttttgtattttttgtagagaccragttttgccgtgttgcctggactggtcttgaactcctgagctcaagctatccaccagccttggcctctcaaagtgctaggattacaggcatgagccactg

SEQ ID NO: 322664 - DNA, 201 bp, Homo sapiens; identical to SEQ ID NO: 63819

SEQ ID NO: 322665 - DNA, 201 bp, Homo sapiens
atgagtcaagataaaaatctataccacaatctttgtaccagcctgttccctactatacatggtaagaattccatccatttgtaccataaacttgaaatcamaataatgattataaacagccacaggtgatttctgaaagcacataaatcagactgtgaaagtttttagtgggtctgaaagaggtcatttacaaaaggacag

SEQ ID NO: 322666 - DNA, 201 bp, Homo sapiens
tcccccgcagtttagaagtaattttaagggctgaagctgtggaatcagctcaagctggtgacaagtgtgactttacagggacactgattgttgtgcctgaygtctccaagcttagcacaccaggtcagtaatctgtggctcaaatttaacaaattctcagttacctaaactgcacagtatctagcttcccacatcttcatt

SEQ ID NO: 322667 - DNA, 201 bp, Homo sapiens
acatacccttaagtgtctttgttaactgagggcttactagtttggggagttgtttttttttaaacctttacagtcaataaattgtgaggttgacttcccaygctatgttgtgtttgtaatgaagtttcttctcctttatgctcttttgactgcttctatactaatgattcttcctttgttctctaccattagtttgggggg

SEQ ID NO: 322668 - DNA, 201 bp, Homo sapiens; identical to SEQ ID NO: 305052

SEQ ID NO: 322669 - DNA, 201 bp, Homo sapiens
tgctaatgggtcagatagtttagaatacgtccgtatttgtggtatttaatttagattatatggcatctgaaaggtattgcttctcattcttggttggttgkttgtctgtattacaggttcgtattcaagagacccaagctgagcttcctcgagggagtatcccccgcagtttagaagtaattttaagggctgaagctgtgg

SEQ ID NO: 322670 - DNA, 201 bp, Homo sapiens
ttagataatgttcaactcaatttttatgtaagttaagcatcatcaaaatgactacaaagttaagcccaaaactgttcatgtaaattataattgttagtatrtacatttgttttaactttcagtaacttggaagttccttaagactgacaagatgtatttgtcaaagaataaatggtaactaggtggtggtggttgtcatta

SEQ ID NO: 322671 - DNA, 201 bp, Homo sapiens
aaacagcccacagaaaattcacagtattgagcataatattgacaagatgattgttcagctagtcatcttggacagaggaatggccaacagtgtgggtgctstatgattatttatgtgctatatgataatcaggtatggtatgacattttatatttagtgttccggtgggataggagagaactgaaagagggtcctaaacct

SEQ ID NO: 322672 - DNA, 201 bp, Homo sapiens
agctggacccctagggtatattttaacagtaattaattgagcctagaaatctatactatcaaaaggccattgcagactagaaatggagtaaaatcctcatstagttattggtaaagtgtggcgtctggacactagtacgcttcctacccttaactgctttaccatgctattcaaagttttatcaccctatagttaactaca

SEQ ID NO: 322673 - DNA, 201 bp, Homo sapiens
cattagcagatctgctacaacagagttccaggagccttccaagtctgcaagtgcagagttttgtaaggatcttctgtcacattttgatgtctttgtgtgtrtgctgtgtatgaaattactcaaattcatataaaatttcttaaactcatactaatagctccaattgtggttttttggtagaaatactatggttagacatta

SEQ ID NO: 322674 - DNA, 201 bp, Homo sapiens
aaagaagagttagttgttgggtttttttgttagttagcagttaaacctcacaatcatggtggaaggcaaggaggagcaagtcactgatgtcttacgtggayggcatcaggcaaagagagcttgtgcagaggaactcctctttttaaaaccatcagatctcgtgagacttactatcagagaacagcaggggaaagacttgtc

SEQ ID NO: 322675 - DNA, 201 bp, Homo sapiens
gggctttagaagcaaaaataccagcagctttatttagtgtgcctgtttcaattttccctaagtcttgggctgtgaaacacctcatttccatgtattcttayttctgttctgcttcttaaatccctgactaatttgttagtttgcaaattccctacagaaatggaatcattgggtttgagactgaatttcttgatttaacat

SEQ ID NO: 322676 - DNA, 201 bp, Homo sapiens
atgtttgaaagaacagaaataaatttgtatgatatcctgcttgggctttagaagcaaaaataccagcagctttatttagtgtgcctgtttcaattttccckaagtcttgggctgtgaaacacctcatttccatgtattcttacttctgttctgcttcttaaatccctgactaatttgttagtttgcaaattccctacagaa

SEQ ID NO: 322677 - DNA, 201 bp, Homo sapiens
agataaactcactttagcaaagtaaatttgtggagtatcagcatacctgccagcctgaacatttcttcacaagcttattgtcaggcaaagctttgtaggtycttctttttaacattctgggcctattttaataattttgggacctgataacatatgaagcagcacatacaaatgtttttacaaatgcaaaattactattcc

SEQ ID NO: 322678 - DNA, 201 bp, Homo sapiens
tattttggcaatcttttaccagcacatattagatcaactttcgttttttattaatttcccatattcaattgtgtataccacagcttgattctttagactcytgttgagtgacatttggttcattttcagtgttttgtattacaaacaaaattgtagtaagcatccttgaacgcaacatccttttatatttggctataagag

SEQ ID NO: 322679 - DNA, 201 bp, Homo sapiens
gtacacaattgtaaattgaaaagacaactctttccctgcaactcccagcaacagtagatacttagaggtatctaatggataaaaaggaattttaggaggargaaaataaggcatctattgagtttgtgccccttttaggaatattttgtacataagcataatactgacaatttcattcctgctggtttaacttcataattt

SEQ ID NO: 322680 - DNA, 201 bp, Homo sapiens
gtttaggtggtcatgtagttcttttattaatttagcatattgattgattttcagatgttaaaccaatcttgcatttctggaataagccccatatctagttytgttttgttttatttttaattgcaagaccttctgatagatgattgttgctgtttattactattaaagacttcttttaaaattgatgttttagctgggcgc

SEQ ID NO: 322681 - DNA, 201 bp, Homo sapiens
cggatgcactgctgtgatgaggtatcagagtcactttgatatgatgagagcagagataaacagatttgttgcatgtttttaatctttggtatgggacatamtagaattcactgcaaatacatttttatgtaactgttgaatgctcatacgaccatggaattcttccctttaaagagcttggtaagcatttgagtgtagttg

SEQ ID NO: 322682 - DNA, 201 bp, Homo sapiens; identical to SEQ ID NO: 67511

SEQ ID NO: 322683 - DNA, 201 bp, Homo sapiens
atgataggattattatgtaacacatgcttttttttttagaaattgcgggtaagcaaaaaagtatttgcatataaaacaaaaacaggatcattctgtttttktttttttttttttctgagacagagtcttgctctgtcacccaggccagagtgcagtggcacgatcttggctcactgcaccctccacctcccgggttcaaac

SEQ ID NO: 322684 - DNA, 201 bp, Homo sapiens
aaatcctcatgtagttattggtaaagtgtggcgtctggacactagtacgcttcctacccttaactgctttaccatgctattcaaagttttatcaccctatrgttaactacaaagcagaaggaaaaatgatgaattcaagatgttgaacctaaacttctacttgatagttaagcatcagataattcttgattaaaagcccca

SEQ ID NO: 322685 - DNA, 201 bp, Homo sapiens
ttaggctgaggagtttgagcctatcttaataagcagtgggaatatagtgggaaggtagtttgtgtgtgtgggtgtgtgtttgttttgttttgttttttgtytttttttgagacagtctctctctgtcacccaggctggagtgcagtggcgcgatctcggctcactgcaagctccgcctcctgggttcacgccattctcctg

SEQ ID NO: 322686 - DNA, 201 bp, Homo sapiens; identical to SEQ ID NO: 67518

SEQ ID NO: 322687 - DNA, 201 bp, Homo sapiens
tgttccattgcttcagcttgttaagcagcttttagaaatggtcatttgcttaaatactaagccttttttcaggttcataaaattagtaacatggaattcayaagcctccttaatattagtttcttttgaaagacattacaatagtaatttattgtcactggcttctcaaagtttcaaccctctcaggttccctaaatgttt

SEQ ID NO: 322688 - DNA, 201 bp, Homo sapiens; identical to SEQ ID NO: 67520

SEQ ID NO: 322689 - DNA, 201 bp, Homo sapiens
tcatcttggacagaggaatggccaacagtgtgggtgctctatgattatttatgtgctatatgataatcaggtatggtatgacattttatatttagtgttcmggtgggataggagagaactgaaagagggtcctaaacctagagtagataatagaagtgtcctacacagttaagttctaaggtttagttgtaaccagatgaa

SEQ ID NO: 322690 - DNA, 201 bp, Homo sapiens
tggcaagcattctcagaggtggtgaagcataagaagatgaagaaaagaccttcatactttgaaatcttaatagctttaagaaacatatttcttataatctmttttattaggtttctctccttatggataaaataaggcatgctttaatacaagtgatatgacttgttatttcaggcttatgctagaacattgcggacctta

SEQ ID NO: 322691 - DNA, 201 bp, Homo sapiens
tgtaaccagatgaaattccttaatctcggctgttggtaggtatgtaaagggaaggaggccttggtaaacctctaaggtatcagctgacttttttgtttttyagagtttacccttacctgtgtcgggccttgaaaacattcgtcaaagaccgtaaagagatccctcttgccaaggatttttatgttgcattccaagacctgc

SEQ ID NO: 322692 - DNA, 201 bp, Homo sapiens
cattcttggaatcatctagtcagtcacttcaccacctgtttttatttgaaatttttaactctttcagaagctgaattccaacgccaccttttatatgtatracttgtagttgtttttttaggcagaattagtttctattcccctagcacatttcttgttcttctcattaacaggaacatctttcttgtctgtcttcattgc

SEQ ID NO: 322693 - DNA, 201 bp, Homo sapiens; identical to SEQ ID NO: 67521

SEQ ID NO: 322694 - DNA, 201 bp, Homo sapiens
cctccaggatgaagggtcagcagtttggaatggcttttgaagttcttttttagtaaaatatacataacaaagttgaccattttagccatttttaagtgtasagtccagtggcactaagtgcattcacctcgttgtgcagccgtcaccactctcccatctccaaacttttttttttttgaggcgtaatttagcccttgttgc

SEQ ID NO: 322695 - DNA, 201 bp, Homo sapiens
cgacgaggtggccgagaagtgccagaaactgttcctggacttcttggaggagtaagtcggcgagcgccccgggcctcgcccgcctccggagcctgcggcgsctgggccgggcggtgccgtgtgggcggcgggtgttccggaacctgggggtcgcgcgtccgggaagcgcctccccgcccgccccccaactttaggctccga

SEQ ID NO: 322696 - DNA, 201 bp, Homo sapiens
tcacgattggttccggccgtgcaggtcggaagagggggcggggcggaagcggcggcggcgcgcgcaaagctgcagcgtctggaaaaaagcgacttgtggcrgtcgagcgtggcgcaggcgaatcctcggcactaagcaaatatggacctcgcggcggcagcggagccgggcgccggcagccagcacctggaggtccgcgac

SEQ ID NO: 322697 - DNA, 201 bp, Homo sapiens
tttttggcagaggagatcatgtgggaatgtatgcttgttttaaaattagtgttaaggctggatgtggtggcccacacctgtaatcccagcacttgggagaycaagacaggaggatcagttgagtccggtagttcgagaccagcctgggcagcatagcaagaccctgtctctaaaacaaataataataataatttttaaaag

SEQ ID NO: 322698 - DNA, 201 bp, Homo sapiens; identical to SEQ ID NO: 63815

SEQ ID NO: 322699 - DNA, 201 bp, Homo sapiens
agttcagtattggaaaaagggagtgaacataatattctcttattttatttgcatctttatgtcagtgattaacattctgctatcgcttatctcttgagcattcaggtagctttttttctatttaactcactggacaaatgacatacccttaagtgtctttgttaactgagggcttactagtttggggagttgttttttttt

SEQ ID NO: 322700 - DNA, 201 bp, Homo sapiens
ggccgtgcaggtcggaagagggggcggggcggaagcggcggcggcgcgcgcaaagctgcagcgtctggaaaaaagcgacttgtggcggtcgagcgtggcgyaggcgaatcctcggcactaagcaaatatggacctcgcggcggcagcggagccgggcgccggcagccagcacctggaggtccgcgacgaggtggccgagaa

SEQ ID NO: 322701 - DNA, 201 bp, Homo sapiens
agtgaaaccccatctctactaaaaatacaaaaaaaattagccgggtgtggtggcgagcgcctgtagtcccagctactcgagaggctgaagcaggagaatgrcatgaacccagtaggcagagcttggagtgagccaagatcaagccactgcactccagcctgggtgacagagcaagactctgtctaaataaataaattaatt

SEQ ID NO: 322702 - DNA, 201 bp, Homo sapiens
aagtaggtggatcacctgaggtcaggagttcgagaccagcctggccaacatggtgaaaccccatctctactaaaaatacaaaaattagccgggcatagtgrcgcacacctgtaatcccagcaactcgggaggctgaggcaggagaatcgcttgaacccatgtggcaaaggttgctgtgagctgagatcacaccactgtact

SEQ ID NO: 322703 - DNA, 201 bp, Homo sapiens; identical to SEQ ID NO: 67522

SEQ ID NO: 322704 - DNA, 201 bp, Homo sapiens
tgggataaggtataatgggtatattaaagtggaatttaagtaagtgtgttatatggaaattaactgaacctgtcatctaccttagttcctaaattttacamctttttttttttttctggaacagcaatttgttttttcagagagggctgagaaagggaactgtaaaaaaaattctgaataattccattatttgtttggtgg

SEQ ID NO: 322705 - DNA, 201 bp, Homo sapiens; identical to SEQ ID NO: 305112

SEQ ID NO: 322706 - DNA, 201 bp, Homo sapiens
aaggctggatgtggtggcccacacctgtaatcccagcacttgggagaccaagacaggaggatcagttgagtccggtagttcgagaccagcctgggcagcayagcaagaccctgtctctaaaacaaataataataataatttttaaaagtgaaaaaaatcagtattaaatgtaagtagtgtatttgtaaatgcttgacaagg

SEQ ID NO: 322707 - DNA, 201 bp, Homo sapiens
gtggccgagaagtgccagaaactgttcctggacttcttggaggagtaagtcggcgagcgccccgggcctcgcccgcctccggagcctgcggcgtctgggcrgggcggtgccgtgtgggcggcgggtgttccggaacctgggggtcgcgcgtccgggaagcgcctccccgcccgccccccaactttaggctccgagcccggc

SEQ ID NO: 322708 - DNA, 201 bp, Homo sapiens
ttaactacaaagcagaaggaaaaatgatgaattcaagatgttgaacctaaacttctacttgatagttaagcatcagataattcttgattaaaagccccaasgatggcttgtgctggctttctggaatattttgtcatcacagtatttgctctgctatgaaagaagagaacaagagattgtagtttctgcccttgttcccct

SEQ ID NO: 322709 - DNA, 201 bp, Homo sapiens
tggccgagaagtgccagaaactgttcctggacttcttggaggagtaagtcggcgagcgccccgggcctcgcccgcctccggagcctgcggcgtctgggccrggcggtgccgtgtgggcggcgggtgttccggaacctgggggtcgcgcgtccgggaagcgcctccccgcccgccccccaactttaggctccgagcccggcg

SEQ ID NO: 322710 - DNA, 201 bp, Homo sapiens
tcatgtaggcctttgtagagccgaacgtttttttgttgttgtgttttgtttgtttgtttgtttgtttgttttttgagacggagtcttgctctgtcacaccyaggccgaaatgcagtggcgcgatcttggctcactgcaacctctgcctcccgggttcaagcgattcttctgcgtcagcctcctgaatagctgggattacag

SEQ ID NO: 322711 - DNA, 201 bp, Homo sapiens
ctcttcagtataaagaagtcagaatacccctaccctatcagtaaaggcctataagttaccattaaaaagatgtccttaaaaacagcattctcagctgggcrcggtggctcacacctttgtcccagtactttgggaagccgaggtgggtggatcacctgaggtcaggagttcgagaccagcctggccaacatggcgaaaacc

SEQ ID NO: 322712 - DNA, 201 bp, Homo sapiens
attaacctggtagcttataagatgcacatattttaccaacagctttgggtaggagatgtcttatcttataaagtatgaatctagattgggtcttagtttgsgggggggaacacaactgtataaaggacactcttgacaagacatttgaagatggactagataatagaagatatgtaattttatgaaattaaatattgttta

SEQ ID NO: 322713 - DNA, 201 bp, Homo sapiens
taataacattttaccctgtttgctttattgcttactgtctgtatatatctgcacacttttttcctgaaccatttgagagcaagttgcatattttggggtctttttttttttccagtattctgggatgaatatcttcaaaatttagtggctaagagcacagtctctgaagctagactattcaaatcctggctccactactta

SEQ ID NO: 322714 - DNA, 201 bp, Homo sapiens
cttgatttgtttggttacagggtgtgtgttgtattgatgaatttgataagatggacgtgcgggatcaagttgctattcatgaagctatggaacagcagacyatatccatcactaaagcaggagtgaaggtatgtgttatctacttctgttctgctgcatcgtccatagccttgttgattaatgtagtactagagaagttca

SEQ ID NO: 322715 - DNA, 201 bp, Homo sapiens
acaccatgcgtggctaatttttatatttttagtacagacagggtctcaccatgttggtcaggctggtcttgaactcctggcctccagtgatgcacacccayctcagcctcccaaaatgttgggactataggtgtgagccactgtacctggccccaaccacactcttaagatttttatacaattttttgttttgttgattgg

SEQ ID NO: 322716 - DNA, 201 bp, Homo sapiens; identical to SEQ ID NO: 67517

SEQ ID NO: 322717 - DNA, 201 bp, Homo sapiens
gctaggagctcttctcatttgtggacagttttgactaacctgtaattatatcgtgggcttaaaatctgtcatcaagattttaagccagatggcatgttctmcctttttttttattagctcagagtgaaaaatttttcagatgaattttcatagattcttctcctaactctatgaaatggtggtatatgaaaaagttcagtg

SEQ ID NO: 322718 - DNA, 201 bp, Homo sapiens
agctcccatcatgtcccgattcgatctcttctttatccttgtggatgaatgtaatgaggtaaccccatgagcttccttttttatttccagttggagtaatygagtgagacaaggctggaagatacactgctcaacagctggtgcatgtatgtgcaccagcctttgatttccctcagggtggcacaggatcggacaaagggt

SEQ ID NO: 322719 - DNA, 201 bp, Homo sapiens
atttatttaacatctgtttagatcagagtccatctatgataataattcacttctaggcccttgcaatagcttatttagataatgttcaactcaatttttaygtaagttaagcatcatcaaaatgactacaaagttaagcccaaaactgttcatgtaaattataattgttagtatatacatttgttttaactttcagtaact

SEQ ID NO: 322720 - DNA, 201 bp, Homo sapiens
gtaagttaccatttaatacctttcattcaggaaaaatgtacttagaccctacaatgtactagtaggcctctgcgctggcaatacagataagataatgtagyccctggcctcaaaggaactctcctccttaggttgcatttgtataatgtttgatttttagattgttctttgagccctgcattccacgaggataggtcagtg

SEQ ID NO: 322721 - DNA, 201 bp, Homo sapiens
attttgtacataagcataatactgacaatttcattcctgctggtttaacttcataattttattttggcaatcttttaccagcacatattagatcaactttsgttttttattaatttcccatattcaattgtgtataccacagcttgattctttagactcctgttgagtgacatttggttcattttcagtgttttgtattac

SEQ ID NO: 322722 - DNA, 201 bp, Homo sapiens
aaagcagggaagagaaggtggtgagccatgtgctttctcccccttctatccagaaatgacacatactcacatttcattcgccagagaaattaacatggccmctcctaagttcaaatggatagagaaatgccttcctaccaggtgcccagaattagaagagcaaacatttgtgaacagttctgagtaccacaaataccgtta

SEQ ID NO: 322723 - DNA, 201 bp, Homo sapiens
ttgcctctggtaacagtgtcatgtggtatgtgacagtcttagtggattccatagcattttctatgtataaaatctgtatataatgatagtcggagtatccmatctggctgcctttttttcttgcctaattgtccttgattagagccatcagtataatgttgaatagaagtggcaagagcagacatccatgtcttattcctg

SEQ ID NO: 322724 - DNA, 201 bp, Homo sapiens
atgagatatgatgcttcctatgaaggtatgttaacacatagagtgagtgcttgaaagtgtccaatctaacttcaggggtagatttgaaagggcaatttttwaaaaagtgtccagtcccccttagtggcttcagtgtttatactgtggagccttgccagacttcttaggatcaaatcacagtttcctgagttcctttctatg

SEQ ID NO: 322725 - DNA, 201 bp, Homo sapiens
tgtatttttatcacaattttatttttttaaggaaaagttattttgtcatcttatttcctggccttatgacagagctgcacttaagtgtgtttccatatgckagactagtctcctggcctttttgtggttgtagtctcctggccttgttggtgtgtgtgtatgtgttttagagagacggggttttgctatgttgtctaggct

SEQ ID NO: 322726 - DNA, 201 bp, Homo sapiens; identical to SEQ ID NO: 67524

SEQ ID NO: 322727 - DNA, 201 bp, Homo sapiens
ctacttgggaggctgaggcaggagaatggcgtgaacccaggaggcggagcttgcagtgagccgagattgcgccactgcactccatcctgggcaacagagcragactccgtctcaaaaaaaataaaaataaaataggatgtactttccaaagggaatgctgctatgagatattttatgttaactttgtcagtgtgaacacaa

SEQ ID NO: 322728 - DNA, 201 bp, Homo sapiens
gacctcgcggcggcagcggagccgggcgccggcagccagcacctggaggtccgcgacgaggtggccgagaagtgccagaaactgttcctggacttcttggwggagtaagtcggcgagcgccccgggcctcgcccgcctccggagcctgcggcgtctgggccgggcggtgccgtgtgggcggcgggtgttccggaacctggg

SEQ ID NO: 322729 - DNA, 201 bp, Homo sapiens
ttttagagagacggggttttgctatgttgtctaggctgaagcactccctcctgggctaaagcaaccctacctccagcctccccagtagctgggattacagrtgtaggtcaccacattggctcttgtttctctttttatttaccaaaatggagtgtttatgattggttacttgttctgtctatacctttggcagtttcacat

SEQ ID NO: 322730 - DNA, 201 bp, Homo sapiens
acgtcaccagatgtactttcggacggcttgacatttatctaatctgtacattatctcgttgtatatgtggcagagatttacccaaggactgacagtacgarttgctaggataatttgaatgtgtttttttgttgcagaagaggacgagtcagcattaaagaggagcgagcttgttaactggtacttgaaggaaatcgaatc

SEQ ID NO: 322731 - DNA, 201 bp, Homo sapiens; identical to SEQ ID NO: 67530

SEQ ID NO: 322732 - DNA, 201 bp, Homo sapiens
tccttgggaacaacaggacctggccccagggcctctggtttccagggcagatgcctttagcataccaaggacacttggccagccccaggcccagctctgcyaggctgggagagcggggacatttccaggagggctggacttcccccatcttcccgttcccattccctggctttgccctccccgggggtacaagggaatggc

SEQ ID NO: 322733 - DNA, 201 bp, Homo sapiens
tctgggcctcagtttgcccagctgtgagatacgggagttggttcagctcacctctggggcccctccggctctattatgaatgggtttccacatcacctgcrggaaaggtctgctgggcctgtctgtttttgcccaggtttttctggttggaactttttctgcaggtgctgtgggctcttgggcctggagtctgggcacagc

SEQ ID NO: 322734 - DNA, 201 bp, Homo sapiens
ttccccctcccccttttccccacggcacctgtcacagtgcaatccacaccataggcactcctaaaacacccatgtttgtcaagtgggggattccaggaaaygggagacagaatcctagtgtttctgagagcgggtcttttgtctatttttagagtttaaatgttcttcaaaaatttcccaaattccactctgtctttacat

SEQ ID NO: 322735 - DNA, 201 bp, Homo sapiens
tttatagagggacagtcacgatttggaaacatgaagtcttagcttttggaaggtcagcaccactcttgttaggcatctcagtacgctgccactccctgggygggggtggggagggggaaggcaggtggagaaacagacttggtagccttggagtcaggactgaggactgactctgccatcccaggtgctgtggctacagga

SEQ ID NO: 322736 - DNA, 201 bp, Homo sapiens
gaaacagcctctccccagcggccccggcacaccccccgctgggaagcagccagccatttttttctacggagcatttgtttcaggttcctgagggcctggcrcagtgctaggcagccctgggttttgttcagaccctacctgtctaggagccttgtgggagtaaatccagatggacaggcagcttcctgcctcagccttccc

SEQ ID NO: 322737 - DNA, 201 bp, Homo sapiens
agctgcaggaagaaggggcggtgggcagagccagaccccgtgggctgcaggatgatttgttctaggccctttcctgagacaaaaagcaaaccagacatttrgtgatgatgatattaattgacatttagtgagtgcttacgctgcaccaggcactgtactcactaattagtcctcacaacagccttgttataattatcccca

SEQ ID NO: 322738 - DNA, 201 bp, Homo sapiens; identical to SEQ ID NO: 67527

SEQ ID NO: 322739 - DNA, 201 bp, Homo sapiens
gttcctgagggcctggcacagtgctaggcagccctgggttttgttcagaccctacctgtctaggagccttgtgggagtaaatccagatggacaggcagctycctgcctcagccttcccgctaaagggaggggtcagccctggagcccctaggggttgaggcagatggagaggagcagaagaggtccaggcagagatggtgg

SEQ ID NO: 322740 - DNA, 201 bp, Homo sapiens
agaaggcagcaccgctaggttctagggccgccaccccctggcgctgccacagatcaggccgaggtgggggacagaaatgcccagccctagaatcctcctgraagatgactgggtttttcccactcccaatggagggtccccctgtctgctgtgtgggtggccccaactgtccctgagaatgaagtctggggccttcctggg

SEQ ID NO: 322741 - DNA, 201 bp, Homo sapiens
tagggggagtcaggctcttgccccgtgaggcccctctaaggaactcagagctcaggataagaggcttccgcagctgtctgcaggttaaatcctggggtgcraggaatgtttgttcagctccccaaagctcccaggagtcccccagagaacggtagtctagtgtagaagctgcttaggtcttcagggtgtgtggtgagcact

SEQ ID NO: 322742 - DNA, 201 bp, Homo sapiens
tctgtgccttggctttctcgcctgtgaagtgggcagatattggcttccacatctggttcttgctagaaggacacgagctgatgcagggaaggggcttggcrcaaaactgtcaactgagataatgtggcgatcttggtgttttaattcagactctatgaggtgcatcgaggtcaggaatgctccctggtccactttcacttt

SEQ ID NO: 322743 - DNA, 201 bp, Homo sapiens
agatccaggtaggcatggttcagggggtgagctctgtgaattacagttttccaatatagagctgttcactgctcccagtctgtgccctcatctcaagttcrctgataatgaaatctgagctttctcctgggagtgaaagctcaccaacttgcctgctttctaacagaaatgatagatcgtggtctcctgtgtccaaggttt

SEQ ID NO: 322744 - DNA, 201 bp, Homo sapiens
gtgactcttgtacactgacttggcctctggttgtttcagactcttatacccttgttttccccttgccttgccttcattttcatcacctcattttccttaggaagaaaaacgccttgctgttttatgcattttagccttaactaaaacattcatgggggattagtgctggctacgtcagagtcagggagtaagcatttcccc

SEQ ID NO: 322745 - DNA, 201 bp, Homo sapiens
ccagctgctgtttcctttcacaggctctcctgctcttctgcctttttacattccaaccatctcttaagcctcagttcaactctctcctcctccaggaagcyctccctgaatggccctccaagggtccacctccctctgacttccaaggctaaatttttttgtatttgattgtatttgtagtgacttttctttgctgcttca

SEQ ID NO: 322746 - DNA, 201 bp, Homo sapiens
gtgccatcctcacacctcactgcatcttgcaacatcacctcccgctggctgcatcctcacatcaggttgtagccaacagccccagaattctgaatacagcrgcgatgacgggactacgaggctgcaccgcaggatgtggtcactagagggcagcaggaaagccactgcggtggctcagcaggaagaagttcccaggccggg

SEQ ID NO: 322747 - DNA, 201 bp, Homo sapiens; identical to SEQ ID NO: 67531

SEQ ID NO: 322748 - DNA, 201 bp, Homo sapiens
cgttcccattccctggctttgccctccccgggggtacaagggaatggcctgtggctgggccttcaaacacatgcccctcctcggtgtccaggccacacctygtgaggccgagtctcgctgtcttagggatttataacatccagctgcttcagtgacttctgatttattagcaaagcagcagcttccagtcctggccttaag

SEQ ID NO: 322749 - DNA, 201 bp, Homo sapiens
cgtcatttcctcagtgtgggagtagggggagtcaggctcttgccccgtgaggcccctctaaggaactcagagctcaggataagaggcttccgcagctgtcygcaggttaaatcctggggtgcgaggaatgtttgttcagctccccaaagctcccaggagtcccccagagaacggtagtctagtgtagaagctgcttaggtc

SEQ ID NO: 322750 - DNA, 201 bp, Homo sapiens
acttggccagccccaggcccagctctgccaggctgggagagcggggacatttccaggagggctggacttcccccatcttcccgttcccattccctggcttygccctccccgggggtacaagggaatggcctgtggctgggccttcaaacacatgcccctcctcggtgtccaggccacaccttgtgaggccgagtctcgctg

SEQ ID NO: 322751 - DNA, 201 bp, Homo sapiens
ttccctgccagtttgggcacctgcccacagtgtttgggagcaggggctgtctcctgggcctctgcctgcaccttgccacattctgagctggatcacagatstggctcggaactgcccggcccatggctgaggcttttgtgggcaggggcagaggagggagctcagccctgcacggagcctgccttccctgggccagcctcc

SEQ ID NO: 322752 - DNA, 201 bp, Homo sapiens; identical to SEQ ID NO: 67532

SEQ ID NO: 322753 - DNA, 201 bp, Homo sapiens
caggagtcccccagagaacggtagtctagtgtagaagctgcttaggtcttcagggtgtgtggtgagcactggacaggagccgggcctttccctgggccccytggagaccggctcttccaagggacaagccagtgcccccgccgtggaggcacctgaccgctggccgcctttgcccacagacctcaccccttggagaagcag

SEQ ID NO: 322754 - DNA, 201 bp, Homo sapiens
attgtatttgtagtgacttttctttgctgcttcattgtgtaggatccaaactccttgagcacaagccctttgcttctgtttccccctcccccttttccccwcggcacctgtcacagtgcaatccacaccataggcactcctaaaacacccatgtttgtcaagtgggggattccaggaaacgggagacagaatcctagtgtt

SEQ ID NO: 322755 - DNA, 201 bp, Homo sapiens
actatataccttacatgtctggattatagacccttatggcaccttgtatatctcttttatagtgtttactacagttgtaatcatactttttattacaggamctagcacaaaataggtgtccagtaaacagcgattgaatggataaaagaataaataaaacaggtgttccccctttgataaaagagctgtcttgtccaaggc

SEQ ID NO: 322756 - DNA, 201 bp, Homo sapiens; identical to SEQ ID NO: 67526

SEQ ID NO: 322757 - DNA, 201 bp, Homo sapiens
ggcagccctgggttttgttcagaccctacctgtctaggagccttgtgggagtaaatccagatggacaggcagcttcctgcctcagccttcccgctaaaggsaggggtcagccctggagcccctaggggttgaggcagatggagaggagcagaagaggtccaggcagagatggtggccctctgtgacagagtaaaggggttg

SEQ ID NO: 322758 - DNA, 201 bp, Homo sapiens
gactgtttactccctctctcaggatcattaatgaagatgttagataagatctgacccaatgctgaggcttggcagccctgcccccactcccagacttgcgsccctccagccccttcctctgggcttgccttctccacccggggcccttgggacctgccccctcctgctattatgccccatgacaagtgcttagggccaagt

SEQ ID NO: 322759 - DNA, 201 bp, Homo sapiens
tggctagctcagtagcccacacatggtgtgactcttgtacactgacttggcctctggttgtttcagactcttatacccttgttttccccttgccttgccttcattttcatcacctcattttccttaggaagaaaaacgccttgctgttttatgcattttagccttaactaaaacattcatgggggattagtgctggctacg

SEQ ID NO: 322760 - DNA, 201 bp, Homo sapiens
gcccacccagctgctgtttcctttcacaggctctcctgctcttctgcctttttacattccaaccatctcttaagcctcagttcaactctctcctcctccargaagccctccctgaatggccctccaagggtccacctccctctgacttccaaggctaaatttttttgtatttgattgtatttgtagtgacttttctttgct

SEQ ID NO: 322761 - DNA, 201 bp, Homo sapiens
cagacttgcggccctccagccccttcctctgggcttgccttctccacccggggcccttgggacctgccccctcctgctattatgccccatgacaagtgctwagggccaagtctgtttgaattaattttgtaagattactcgaggcgctgtatcaaatgctttgctaaaaatcaagatatattaccctgcctgcgtttcctt

SEQ ID NO: 322762 - DNA, 201 bp, Homo sapiens
accacagaggccgagtctggaccccagcagctcacccctctggaaggttgcactggttggattgtgtgttggcatactgctcacatggaaggatgctctargacactgtcccatgaaactcgtctttggatttcttaggtacaaagtcttgaggacgagttcatggtggcacacgcacagagctctgtaagagctcccttg

SEQ ID NO: 322763 - DNA, 201 bp, Homo sapiens
ctctggaaggttgcactggttggattgtgtgttggcatactgctcacatggaaggatgctctaggacactgtcccatgaaactcgtctttggatttcttargtacaaagtcttgaggacgagttcatggtggcacacgcacagagctctgtaagagctcccttgggagaaatcttgcactggattcagtgtcaggaatagc

SEQ ID NO: 322764 - DNA, 201 bp, Homo sapiens
ttaacggactgtttactccctctctcaggatcattaatgaagatgttagataagatctgacccaatgctgaggcttggcagccctgcccccactcccagasttgcggccctccagccccttcctctgggcttgccttctccacccggggcccttgggacctgccccctcctgctattatgccccatgacaagtgcttaggg

SEQ ID NO: 322765 - DNA, 201 bp, Homo sapiens
ttgccttgccttcattttcatcacctcattttccttaggaagaaaaacgccttgctgttttatgcattttagccttaactaaaacattcatgggggattastgctggctacgtcagagtcagggagtaagcatttcccctctgcagtctccatcctagaggcctgttcgccagctcctccctccctgtcccattcccttgt

SEQ ID NO: 322766 - DNA, 201 bp, Homo sapiens
tatatgagacacacttagaatggtgccatagtaagtgttccaaagcatcattcctaggaattaagtcaggacattggaagaaactccccaagcatgctcamctagatccttaccctaggtcccagcaggtggtcctgacatcttgctgggctggcctcctgctttgaaacagcctctccccagcggccccggcacaccccc

SEQ ID NO: 322767 - DNA, 201 bp, Homo sapiens
tacactgacttggcctctggttgtttcagactcttatacccttgttttccccttgccttgccttcattttcatcacctcattttccttaggaagaaaaacrccttgctgttttatgcattttagccttaactaaaacattcatgggggattagtgctggctacgtcagagtcagggagtaagcatttcccctctgcagtct

SEQ ID NO: 322768 - DNA, 201 bp, Homo sapiens
ccatggaaacagacttgttcagaggactcagtgtagcggctgtggtgggggagaagggaaacatatagtaaaaccaggctccacaagtgtggcgggacttrgaccaactcccttcggtggggactgtgaggggtgggcaaggctctggcctccctgtcggaggggctgtctctccccacccactggggtcctgccattgga

SEQ ID NO: 322769 - DNA, 201 bp, Homo sapiens
acatagaggcccagagaggtgaagaaagctagccaagatctctcagccagtaagtggctgagctgggatcagcagggctggtgtcagaggctgggttgggyctatatgcctggcattgactaaatgctttaagaccttcaattcttaccagcactactgtagctatgaccactttatggatggggaaactgaggctcaggg

SEQ ID NO: 322770 - DNA, 201 bp, Homo sapiens
gagtggcaccttggcctgatttcaggtgtgccccctcccccaccccgggcctgccctttcacaggactgccttcctcagctctggggccggcttcctcttrgtggacttaaaactgctcttcggcagcggactccctaggaagggccactcctagggtccaggtgcccgaagacgggcttgggccggccattgacagggag

SEQ ID NO: 322771 - DNA, 201 bp, Homo sapiens
cctggctcgggtctgcggaggcgccttgagaccctgaggtccccgcgcccgcaccaactttccaaacccagctgcacccggaggcgggggcgccgctcccygcttcctgctcccagccctggcccggcctccgcacccagaccgctgcgatgagctgggcccctgtggggccggagccgccggatggtgcagagcccacca

SEQ ID NO: 322772 - DNA, 201 bp, Homo sapiens
ggtcccttgggctgacctagaccacagaggccgagtctggaccccagcagctcacccctctggaaggttgcactggttggattgtgtgttggcatactgcycacatggaaggatgctctaggacactgtcccatgaaactcgtctttggatttcttaggtacaaagtcttgaggacgagttcatggtggcacacgcacaga

SEQ ID NO: 322773 - DNA, 201 bp, Homo sapiens
accccaaagagaaggggtcccttgggctgacctagaccacagaggccgagtctggaccccagcagctcacccctctggaaggttgcactggttggattgtrtgttggcatactgctcacatggaaggatgctctaggacactgtcccatgaaactcgtctttggatttcttaggtacaaagtcttgaggacgagttcatgg

SEQ ID NO: 322774 - DNA, 201 bp, Homo sapiens
cagcctgaaatccgttcgttctcttcctgccacttctgagttgcatgaacaaatctcttaacttctctgagcctcagtccctcacctgtgaaattgattcrgctgtagttcttacccctaggcatgtggagaggattcaatgaggtgaggcgtgaaagggtcataccatggtgctaggccgccactgtatatgagcagccg

SEQ ID NO: 322775 - DNA, 201 bp, Homo sapiens
ggctgctgcttctcccacggaccttctggctaggtgcccgggctcatggctacctctccctgcctcagttttcccctctgtaaatggagaaaataacaccracctgatagcattgttgtgaaggtcaaatgcagtaatatatgagacacacttagaatggtgccatagtaagtgttccaaagcatcattcctaggaattaa

SEQ ID NO: 322776 - DNA, 201 bp, Homo sapiens; identical to SEQ ID NO: 67529

SEQ ID NO: 322777 - DNA, 201 bp, Homo sapiens
tggcacaaaactgtcaactgagataatgtggcgatcttggtgttttaattcagactctatgaggtgcatcgaggtcaggaatgctccctggtccactttcrctttgagtttcaggtagctggtgtcacttcggtgtggttggaagaagactttctccccagctgcattcccggaggcgccctttcgacctggaggccgggg

SEQ ID NO: 322778 - DNA, 201 bp, Homo sapiens
ggctgtagagtcccgcctaccgcaagccaggctgtaccaggactggcctgagacagggaaccgggaccttctgactcatccctcccccagaggagctgggyacactggggccttgtgttgtggccaggaggtcagtcactctccccactgctggggaaaactttcccctcaggtcgggcctgggaccacccccctcccact

SEQ ID NO: 322779 - DNA, 201 bp, Homo sapiens
gtactattccaactctggctgtggcttctcggtggggcgggggacaggaaaccggggcttttccgcccagtgtcggggctgtagagtcccgcctaccgcargccaggctgtaccaggactggcctgagacagggaaccgggaccttctgactcatccctcccccagaggagctgggtacactggggccttgtgttgtggcc

SEQ ID NO: 322780 - DNA, 201 bp, Homo sapiens
ggtcaggcccgtcaaagggcagcccccttctgggctgagggatgaggtgggatttctgggtccaggagatcccctccagatcctctgtggcttgccttcartggaagggttttggctcctgggggcactgtggtgacttgggaaaaaacatggctgcatgtccccaaggaggctgatcatcccctcccctatctaggtatt

SEQ ID NO: 322781 - DNA, 201 bp, Homo sapiens
taacagcaactaccatttagagagtacttaccatgtgctggtcactaggctcagcatttctgggttaagcacctgctggcatttcttttaatctttccaayagcctgcaaggtaggtactaagctgttcattctacagattacaaaattgaggcttagagaggttaagtaacttgcctgaggtcacaaagttagtaattac

SEQ ID NO: 322782 - DNA, 201 bp, Homo sapiens; identical to SEQ ID NO: 67539

SEQ ID NO: 322783 - DNA, 201 bp, Homo sapiens; identical to SEQ ID NO: 67540

SEQ ID NO: 322784 - DNA, 201 bp, Homo sapiens
cgcctgtttgtagtccggggacagccagccgacgtgttcccaaggctgttcaaggtaagcgtgcagagccccagagaagacagtgagattctgtccctgasggtttccccacagcctgagtgatatgatattccgactgagggaatggaaacatcagggctggtctggctgttgctgctagagaagttgggagcaaaggca

SEQ ID NO: 322785 - DNA, 201 bp, Homo sapiens; identical to SEQ ID NO: 67542

SEQ ID NO: 322786 - DNA, 201 bp, Homo sapiens
aagagctttaccccattgaggtggcagagaggcttgttaggcccaaagcatggaagcagtgaggacccacactcagggtatttacaaatctgctcctagtmtgcccgagtcccacctgtgcctcatattcccacttccatcctgctcaacagctgccctctgacctcagtggaccctgtctgttacccctccaacagacct

SEQ ID NO: 322787 - DNA, 201 bp, Homo sapiens; identical to SEQ ID NO: 67546

SEQ ID NO: 322788 - DNA, 201 bp, Homo sapiens
aggttctgttaaccaggaagtgtggatactggtagacagctaatggtgactgctttataggcaagacacttactcaagtgtgtgggtcatgagtgcttggwaagcagtagttattattgtaggtattgttattattgtagaggacacaaggttacagttgggtctgattatggagggttgtaaatggcaggcacatgagtc

SEQ ID NO: 322789 - DNA, 201 bp, Homo sapiens
ggcagaagttgcagtgagccaagatcgcgccactgcactctagcctgggcaacagaacaagactccatctattaaaaaaaaaaaaaaaaaaaaaaaaaaargtcgggctcggtggctcactcctgtaatcccagcactttgggaggctgaagtgggtggatcacctgaggtcaggagttagagaccagcctgaccaacatg

SEQ ID NO: 322790 - DNA, 201 bp, Homo sapiens
ttgtcacagagtttcttcttttattgggttttgggggacattgcatagtactgcctactcttttttgatagggaagattaaaaatcaacaataaaattccygttgattaaactccagtttgctaggaaccaggtgtttatggatttttgtgggtcatcattttgtgatcgtgctatcaatctagtgaagaagaaaaggaat

SEQ ID NO: 322791 - DNA, 201 bp, Homo sapiens
tgactctagagctgtatccttacccaccataccatataaatacatttgcctcccttctcccctcgacattgccctttttctcccccagcaactcagaggcyaacccacttatatcccagagatatagctaggtcatccattcagtcatgtaatgtatttttattgagcttctgctaggtactaggccccatactaggtata

SEQ ID NO: 322792 - DNA, 201 bp, Homo sapiens
aaatcctcctatcctcctgatggccataacaacagcaacactaacagcaactaccatttagagagtacttaccatgtgctggtcactaggctcagcatttytgggttaagcacctgctggcatttcttttaatctttccaacagcctgcaaggtaggtactaagctgttcattctacagattacaaaattgaggcttagag

SEQ ID NO: 322793 - DNA, 201 bp, Homo sapiens
acgatcttggattctgactctagagctgtatccttacccaccataccatataaatacatttgcctcccttctcccctcgacattgccctttttctcccccrgcaactcagaggccaacccacttatatcccagagatatagctaggtcatccattcagtcatgtaatgtatttttattgagcttctgctaggtactaggcc

SEQ ID NO: 322794 - DNA, 201 bp, Homo sapiens
gatacttgcaaagggagactgagtgctgtctttcaggttgacaccttcgctgggtatgggacactgcaggctgggatgaactgggccttcctgagtagttstggggctgtgggaggaaatggaacctcagtgtcttgctcctaccctccccacccccacttgcttcatcctgccctgtagccctctgcaatcctgcgagac

SEQ ID NO: 322795 - DNA, 201 bp, Homo sapiens
ggctggacaagcacagtgttccatggctccatggctggctgttctgtgaccgtaggcagattccttaaccacccaatgcctccattttttcctctgttacwtccaagcctttccttttgccaccttctctttctgctgtaggcctgggttgccaactatgagagaccccgaatgaacgccaactccctcctggccagcccc

SEQ ID NO: 322796 - DNA, 201 bp, Homo sapiens
gcctttccttttgccaccttctctttctgctgtaggcctgggttgccaactatgagagaccccgaatgaacgccaactccctcctggccagccccacaggyctcagcccctacctgcgctttggttgtctctcctgccgcctcttctactaccgcctgtgggacctgtataaaaaggtaagggggacatacctgcccacat

SEQ ID NO: 322797 - DNA, 201 bp, Homo sapiens
attgacccattactttccccacttctttacggagacatctttgtcgtgaataaaatgtccagattcatgtggacctgtttctggattctcaattctgactyattagtctattgacctttccctaatttcatattgtacttttattataagtatcatcatccccattttacaaatgaggaaactaaggcacagagaggttaa

SEQ ID NO: 322798 - DNA, 201 bp, Homo sapiens
gacttgtagccagtgagtggcagaacaggggctcctggtctagggctcttacggtctactcagggaggggcggaagggagataacgtagtgtgagggcggracgggtttttgctcgcattcttcaagagcccgttgctgggctcggggagatcactccgaagcctctggctcgtttgaatccgccctaccacccatcctgg

SEQ ID NO: 322799 - DNA, 201 bp, Homo sapiens
ttattcaaccaaaatctagactgagcatttttcatgtgtgctgataggaaaattccttttgactttctagaaggtggagccaaacagggaactcttgaggmcaaggaacatgaccagtcttgggaagtttgaatcctagtgcagagtcctgtggtgaggccccttcccactgcctggccctctgtagctttcttcttgctc

SEQ ID NO: 322800 - DNA, 201 bp, Homo sapiens
gaaagccatgatatcaagggcccctctgatgaccccccaggagatggagtcgacatgatcatggaaaaagatgaacaggtcgttagtgtattttcactgtraacagtattcaaactaaagagttttgagacataatgtacccatcgctcttcagaacacctagtggcagtcgctcggtttgtttgcattgttctggggaat

SEQ ID NO: 322801 - DNA, 201 bp, Homo sapiens
ccagccgacgtgttcccaaggctgttcaaggtaagcgtgcagagccccagagaagacagtgagattctgtccctgagggtttccccacagcctgagtgatrtgatattccgactgagggaatggaaacatcagggctggtctggctgttgctgctagagaagttgggagcaaaggcagccagttagcttgctcttggaatg

SEQ ID NO: 322802 - DNA, 201 bp, Homo sapiens; identical to SEQ ID NO: 67547

SEQ ID NO: 322803 - DNA, 201 bp, Homo sapiens
cttaattcacatgtatgtctgttggatattagtcttcatgctgccatgttgaatttcttctaaaagtcttcttctctaaaagtcttaatgagcaatactawcgtatagagattacttgctagtaaaaagacagatttgagaatcagacagatgtggatttccttttttggctctgccacttatgaatgctgttgtcctggg

SEQ ID NO: 322804 - DNA, 201 bp, Homo sapiens
tgcctgttgggcataaacagcgaaccagtttctccctgctttgttaggaaagagagccactcttcatgatgttatcactaacaaggcctgtgtggactccrcaggttcctacttcagtctctggaagatttggacacaagtttaaggaaactgaactcccgcctgtttgtagtccggggacagccagccgacgtgttccca

SEQ ID NO: 322805 - DNA, 201 bp, Homo sapiens
acacaaagaataactgtgaaaagataaagtccttcctttcaaacgttttgccaaaatagaaaaatgtaaacatttcagaaatgcagaacgtgtttattataaaagctgaggtaggggttgcatatactggggggcaggagggaactattcctgggatgagcacatagactcttggggtggctgtcaaagctctgtttccca

SEQ ID NO: 322806 - DNA, 201 bp, Homo sapiens
tccgggattgttgtcatctacctggagcgatgagggtgcaggggaaagcagagaaaatagtgactgtgggaagagaaccaagttgacctagaaaacgctamaactttaaggattatctaacccccagtagcaccgagacactgtggttcaattctcataaagttcaaataacagaacagccgtgccgggctatcactgaaa

SEQ ID NO: 322807 - DNA, 201 bp, Homo sapiens
cgcggacagccccagcctgcggacagccccagcctgcgtcacttgtccgcatgccagctccacccgggcggacccacacatggtaggaacgtgagggggcgggcctgttccggcgcctctgggccaatcgccaggtggaaggcactcagccaatggcagaggggctctggggccctgtgggcggggactaagggtggagtt

SEQ ID NO: 322808 - DNA, 201 bp, Homo sapiens
cttcctggatcagttgaaggcagagctgcattctcttttgtgcacaaagttggggatagaggggagggctggagccagccatatcttgacatgactgtagtatgtgtaatcgtcccgtggttgtttctggattccaagagtggtctaagagaattgtgctgcagcataatgtcctagctctgcaactgcttaagttgtctc

SEQ ID NO: 322809 - DNA, 201 bp, Homo sapiens
tgagagctgaacactgttggactgttgggaagtggattgagaacgctagtctactggcagggaaacaggagcttctctgagctattcacattggtacctgmgagaggcactttactgttctgctgccaaggaaatgtttctgtttgcccaaaggggataaaaaccttcatctttctctttgaaattaggaaagaataaata

SEQ ID NO: 322810 - DNA, 201 bp, Homo sapiens
ggcagatcacgaggtcaggagatccaggccatcctggctaacatggtgaaaccccgtctctactaaaaatacaaaaaattagctgggcatgttggctggcrcctgtagtcccagctactcgagaggctgaggcaggagaatggtgtgaacccgggaggcggagctttcagtgagccgagattgtgccactgcactccagcc

SEQ ID NO: 322811 - DNA, 201 bp, Homo sapiens
ccatcttgctttgctctgcttattgggaaaagtcagccttttctgccgggcgaggtggctcacgcctgtaatcccagcactttgggaggccgaggcaggcrgatcacgaggtcaggagatccaggccatcctggctaacatggtgaaaccccgtctctactaaaaatacaaaaaattagctgggcatgttggctggcgcct

SEQ ID NO: 322812 - DNA, 201 bp, Homo sapiens
tcttccacctctctgttcaatgttctaataaatggaggctaagaaggggatgattttccaagaaaggaacatgtctgctattccttatgatgttagagttaaaaaaaaaaaaaaaaaaaaacatgtcttcagctcttatcaaagaactttctccagggcttacatgggtggtagaggcctatggggattcccttagcttgg

SEQ ID NO: 322813 - DNA, 201 bp, Homo sapiens
agtaaggaggattttcccggctgtggcagtctggtcctctgctaagaggaccttaatgcttcataccacagtattgcactggcttttcagatggctcccaygtgagtctcacaacaacctcatgctgggcagatacttatatctagccccagagactgcgagggagtaagtgactagcctctgatcacacagaaacaccac

SEQ ID NO: 322814 - DNA, 201 bp, Homo sapiens
tgcttcctgacccgcggggacctctgggtcagctgggagagcggggtccgggtgagtgctctctcaacgaaaagctggcctgtaccctctggtcaggcccrtcaaagggcagcccccttctgggctgagggatgaggtgggatttctgggtccaggagatcccctccagatcctctgtggcttgccttcagtggaagggtt

SEQ ID NO: 322815 - DNA, 201 bp, Homo sapiens
cttccacctctctgttcaatgttctaataaatggaggctaagaaggggatgattttccaagaaaggaacatgtctgctattccttatgatgttagagttaaaaaaaaaaaaaaaaaaaaacatgtcttcagctcttatcaaagaactttctccagggcttacatgggtggtagaggcctatggggattcccttagcttgga

SEQ ID NO: 322816 - DNA, 201 bp, Homo sapiens
tattagagaacaggattccaaactcctgagggcctgcagaatctcagcccctggaacagagttggtgtgcaactagaaatctttagaaatggggcacagarccctcacggtggctcacgcctgtaatcccagcactttggatggctgaggagggcggatcacttgaggtcaggagttcaagaccaacctggccaacatggt

SEQ ID NO: 322817 - DNA, 201 bp, Homo sapiens
ggtttttcattacctttctctccccactgcaacttggataggtgttagcaacagttcctcttccactttatttaaatcattttgtccctggctctgtgctkcgcctctttcaggagcttctgggacagagggaatttgtagaaataaaatatgttccctctcagcccatttctcttagaattggtaaatgaggtaaactgg

SEQ ID NO: 322818 - DNA, 201 bp, Homo sapiens; identical to SEQ ID NO: 67548

SEQ ID NO: 322819 - DNA, 201 bp, Homo sapiens; identical to SEQ ID NO: 67550

SEQ ID NO: 322820 - DNA, 201 bp, Homo sapiens
cagagctgtggctatgtagcccaaattggtatcatattatattgggttgggggaggggagtggcagggagacttgcccctctttcctccatttcctctgtmatttttaattgtgtgactttgggctggatccatagcctttctgccatgctttaggtgtaagatgtgaatagtcattcttcatcagcctgaaggctacatc

SEQ ID NO: 322821 - DNA, 201 bp, Homo sapiens
cttcagtggaagggttttggctcctgggggcactgtggtgacttgggaaaaaacatggctgcatgtccccaaggaggctgatcatcccctcccctatctargtatttgatgagctgctcctggatgcagatttcagcgtgaacgcaggcagctggatgtggctgtcctgcagtgctttcttccagcagttcttccactgct

SEQ ID NO: 322822 - DNA, 201 bp, Homo sapiens
atcctatgtagccaatctgtgccagccagtggtatcatcatcgttgttagataaccttgccttgaagcagaggaacttggtcaaggacagcctggacccaraagaattcactgttatcctccctccccccattaacaacaaataaataaaatattcctcaacacaggatcagccattcctagagaaggccttccctaaata

SEQ ID NO: 322823 - DNA, 201 bp, Homo sapiens; identical to SEQ ID NO: 67554

SEQ ID NO: 322824 - DNA, 201 bp, Homo sapiens
ctgaagggaaggacagcacctacaggctcagggggccagatggggatgtccagatacttgcaaagggagactgagtgctgtctttcaggttgacaccttcrctgggtatgggacactgcaggctgggatgaactgggccttcctgagtagttgtggggctgtgggaggaaatggaacctcagtgtcttgctcctaccctcc

SEQ ID NO: 322825 - DNA, 201 bp, Homo sapiens
tgaggtcacaaagttagtaattacaggttgagtatcccttatccaaagtgcttgggaccaaaagtgtttcagattttagattcttgaattaggaatgctcmccttataacacagtaagaccttgttctatgttattctaaagctatgtcggattgcttttctttcatctgtgggcaggttccccctactaagaggatatct

SEQ ID NO: 322826 - DNA, 201 bp, Homo sapiens
ctcaaggacacagcaagtgcacaaggctgcctacctctctcccaactccactgttgctgtgctgttggcttcgccacactgcctgccctcctcaaactttstgaacctcagcttgtttgctttccagatcaaatccctgttcctagttttttctgctgcccatcagataggtctctagactagctctgttctctcccagga

SEQ ID NO: 322827 - DNA, 201 bp, Homo sapiens
gcctcaaatcctgacccaagggccagcatggggaagagatggttgcaggcaaaatgcactttatagagattttctattgctgggaaggtgtgtttctcccmcaatttgtttgtgaatattcacttgttttataaatgtctgacctgtcttgagtaagtttgtgctgtcgtcaatcttgtgggaggcctgggaaccagggtt

SEQ ID NO: 322828 - DNA, 201 bp, Homo sapiens
ggctctggggccctgtgggcggggactaagggtggagttgcggcgtcataggtcactgggcgggctatgggcggggtccacgtcgcctaccggggcggagmgggggtggctggagcagtctggacagtcatggcggcgactgtggcgacggcggcagctgtggccccggcgccagcgcccggcacggacagcgcctcttcg

SEQ ID NO: 322829 - DNA, 201 bp, Homo sapiens
cagtgccactctctgggactgggggtttcccaggagcgttgtatttatggcctcctgctgcattctcctacctcaaggacacagcaagtgcacaaggctgmctacctctctcccaactccactgttgctgtgctgttggcttcgccacactgcctgccctcctcaaactttctgaacctcagcttgtttgctttccagatc

SEQ ID NO: 322830 - DNA, 201 bp, Homo sapiens
accagaaatgactaaaggcttaggaaagaacttcctccttttcaacatgtagcccctctggtcagtttcctctgacctccagactaaggatcgcttccccyttcctgactctctcagggctggaacctattagctctgtttgctattggcctcaggagtgttgctgtggaaacaattaagacacttcacatagcacaactc

SEQ ID NO: 322831 - DNA, 201 bp, Homo sapiens
actccactcacttgcccacactggcccccactacccacgagctcctagcctcagcctggctcccacccgaccctgctgcacaggtaccacgagtggccccraggccacgcacccacagactatgcccgctggcgggaggctcaggccccgtaccgtgtgcaatgggcggccaactatgaaccctacgtggtggtgccacga

SEQ ID NO: 322832 - DNA, 201 bp, Homo sapiens
gccgccgggatcccgtggcttctcctagaggggctctgttatttagtctcttccccctggttacagttcgctgtgcagctctgggaggagggggaaggggycggcgtggaggtggcggcattggcagggggggtgcagtccgggccattggagatggcccccacagtggcctcagagtctacaggtttggagaggtcgatg

SEQ ID NO: 322833 - DNA, 201 bp, Homo sapiens
ctccactcacttgcccacactggcccccactacccacgagctcctagcctcagcctggctcccacccgaccctgctgcacaggtaccacgagtggccccgmggccacgcacccacagactatgcccgctggcgggaggctcaggccccgtaccgtgtgcaatgggcggccaactatgaaccctacgtggtggtgccacgag

SEQ ID NO: 322834 - DNA, 201 bp, Homo sapiens
acgccgtggccagaaacatcctggagacgctcttccacacatggatggtgcctgctgtccgtgtcagcttttatcatgccgaccagctcaaggcaggggcycagcccttcccccctcccctcagctgtgtccaccgctctcctctctccaagacctggtggggttggagaagagaatcatcagtcccccctccacctactg

SEQ ID NO: 322835 - DNA, 201 bp, Homo sapiens
gacattgacttcctgcctgcctattctctctacgactacctcaggtgggcctgcaggcagagaggggaacaatatatggggtggacgtggacggggcatgygtgggaccccaggcttccatgtccctgctcctttctgggcctcagtggcctctgtcaattggggtttgtattaggctgtttctctgggctgtcaacaggg

SEQ ID NO: 322836 - DNA, 201 bp, Homo sapiens
ccgctcttctcccctgctcatgggtgctcctcctcagggcctccattgagcagctggggctgggcagccggcgcaaggcagcactggtggtgccggcattygagaccctgcgctaccgcttcagcttcccccattccaaggtggagctgttggccttgctggatgcgggcactctctacaccttcaggtaggagaggctac

SEQ ID NO: 322837 - DNA, 201 bp, Homo sapiens
ggagaagagaatcatcagtcccccctccacctactgaagcgcaaacccctctcttttgggggtttaccccctctcctctgtgtcactgcaagcatgtgttmtggtgctcataggcccctctctgccatctcatctcctgcctttcccccacacagccccaggtctcctggatccccaacaagcactactccggcctctatg

SEQ ID NO: 322838 - DNA, 201 bp, Homo sapiens
gggtaagcctgttctctggagctgcaccttccccgcaggccaggcaagccaggcagccactgctcctctgccccaccctgcaggaatatgagctcctggtrctgcccgaggccttcaccatccatctgccccacgctccaagcctggacatctcccgcttccgctccagccccacctatcgtgactgcctccaggccctca

SEQ ID NO: 322839 - DNA, 201 bp, Homo sapiens
tcacatttcgtcttcgggtcccggaaatcccctccctacgccctttgggaacctggacgggtcttctcaagcacagcgatcactaccctgactccgcaggkaagggggccactggggtcataggtcagggcccagaaggaactgatcaaaggtcagggtggcacctgccagcaggtaactgaagccccgcactgctgtctc

SEQ ID NO: 322840 - DNA, 201 bp, Homo sapiens
tgccgccgggatcccgtggcttctcctagaggggctctgttatttagtctcttccccctggttacagttcgctgtgcagctctgggaggagggggaagggsccggcgtggaggtggcggcattggcagggggggtgcagtccgggccattggagatggcccccacagtggcctcagagtctacaggtttggagaggtcgat

SEQ ID NO: 322841 - DNA, 201 bp, Homo sapiens
accgctctcctctctccaagacctggtggggttggagaagagaatcatcagtcccccctccacctactgaagcgcaaacccctctcttttgggggtttacyccctctcctctgtgtcactgcaagcatgtgttctggtgctcataggcccctctctgccatctcatctcctgcctttcccccacacagccccaggtctcct

SEQ ID NO: 322842 - DNA, 201 bp, Homo sapiens
atttcgtcgaggcctcaccagtgcttgctgcccggcaggacgtggcctaccatgtggtgtaccgtgaggggcccctataccccgtcaaccagcttcgcaaygtggccttggcccaggccctcacgccttacgtcttcctcagtgacattgacttcctgcctgcctattctctctacgactacctcaggtgggcctgcaggc

SEQ ID NO: 322843 - DNA, 201 bp, Homo sapiens
gctcctctgccccaccctgcaggaatatgagctcctggtgctgcccgaggccttcaccatccatctgccccacgctccaagcctggacatctcccgcttcygctccagccccacctatcgtgactgcctccaggccctcaaggacgaattccaccaggacttgtcccgccaccatggggctgctgccctcaaatacctccc

SEQ ID NO: 322844 - DNA, 201 bp, Homo sapiens
aggagggcaccttgctgcctccacctttgactcgagcacctccaggtccagggaactcacgacacctgcatgggggaccacaccactaggcaacactgttrgaaatgtcccccttctgtggaattaaaataatctgccctttggcccttgctttagctctcaggggctacagggtaagcctgttctctggagctgcacctt

SEQ ID NO: 322845 - DNA, 201 bp, Homo sapiens
ttttctagagtcttcagtgttctgttctccttgccgccgggatcccgtggcttctcctagaggggctctgttatttagtctcttccccctggttacagttygctgtgcagctctgggaggagggggaaggggccggcgtggaggtggcggcattggcagggggggtgcagtccgggccattggagatggcccccacagtgg

SEQ ID NO: 322846 - DNA, 201 bp, Homo sapiens
cagtcatcactgccaccagggcgcagcgcctgatcaggagctggcaggggactcccagtcagggcccagtgggcagccgctccagctctctgaagtgactrcaaagccagctggtctcaaaagtggctgtcagagcagctaaattctgggccgtggggaaagagcagcggagggaaggaggaggaagcaagtggaggtggc

SEQ ID NO: 322847 - DNA, 201 bp, Homo sapiens
gagattgatactgaagaacattttggctcagagtagacctggttagcttatcactttgaacttctgatttccagatgctggctatgagtttgacatctgcytcacctcagtgcagaagagagcgatccggaccctctggacagtgctagatgccattgatcagatgtggctgccagtggtgaggacttggcgcctcaatga

SEQ ID NO: 322848 - DNA, 201 bp, Homo sapiens
tgataagggccacttaatctggccgagctgctccggagcagcgcggcagccagcgaattggggccgcccccacaacccgccgcccgccgcccgccgccctccgccctccgccctccgccctccgccctccgccctccgccctccgccctccgccctccgccctccgccctccgccctccgcgtgcttacgtgcgctccgtg

SEQ ID NO: 322849 - DNA, 201 bp, Homo sapiens
cggttccagtgataagggccacttaatctggccgagctgctccggagcagcgcggcagccagcgaattggggccgcccccacaacccgccgcccgccgccygccgccctccgccctccgccctccgccctccgccctccgccctccgccctccgccctccgccctccgccctccgccctccgccctccgcgtgcttacgtg

SEQ ID NO: 322850 - DNA, 201 bp, Homo sapiens
tgggagcggttccagtgataagggccacttaatctggccgagctgctccggagcagcgcggcagccagcgaattggggccgcccccacaacccgccgccckccgcccgccgccctccgccctccgccctccgccctccgccctccgccctccgccctccgccctccgccctccgccctccgccctccgccctccgcgtgct

SEQ ID NO: 322851 - DNA, 201 bp, Homo sapiens
tgccttgtttcatggcagtgaaatgcctcttggtcctgtccaagtgtatctttcactgatttctgaatcatgttctagttgcttgaccctgccacatgggyccagtgttcatctgagcataactgtactaaatcctttttccatatcagtataataaaggagtgatgtgcaatagcttcttgtgtgatgtggaagacctta

SEQ ID NO: 322852 - DNA, 201 bp, Homo sapiens
ccaagtgtatctttcactgatttctgaatcatgttctagttgcttgaccctgccacatgggtccagtgttcatctgagcataactgtactaaatccttttwccatatcagtataataaaggagtgatgtgcaatagcttcttgtgtgatgtggaagaccttatctgaggaaactttagcatttaacttgaaatgtctctca

SEQ ID NO: 322853 - DNA, 201 bp, Homo sapiens
ttaatctggccgagctgctccggagcagcgcggcagccagcgaattggggccgcccccacaacccgccgcccgccgcccgccgccctccgccctccgccckccgccctccgccctccgccctccgccctccgccctccgccctccgccctccgccctccgccctccgcgtgcttacgtgcgctccgtgactgcggcgaccg

SEQ ID NO: 322854 - DNA, 201 bp, Homo sapiens
gggccacttaatctggccgagctgctccggagcagcgcggcagccagcgaattggggccgcccccacaacccgccgcccgccgcccgccgccctccgccckccgccctccgccctccgccctccgccctccgccctccgccctccgccctccgccctccgccctccgccctccgcgtgcttacgtgcgctccgtgactgcg

SEQ ID NO: 322855 - DNA, 201 bp, Homo sapiens
agggccacttaatctggccgagctgctccggagcagcgcggcagccagcgaattggggccgcccccacaacccgccgcccgccgcccgccgccctccgccctccgccctccgccctccgccctccgccctccgccctccgccctccgccctccgccctccgccctccgccctccgcgtgcttacgtgcgctccgtgactgc

SEQ ID NO: 322856 - DNA, 201 bp, Homo sapiens
gataagggccacttaatctggccgagctgctccggagcagcgcggcagccagcgaattggggccgcccccacaacccgccgcccgccgcccgccgccctccgccctccgccctccgccctccgccctccgccctccgccctccgccctccgccctccgccctccgccctccgccctccgcgtgcttacgtgcgctccgtga

SEQ ID NO: 322857 - DNA, 201 bp, Homo sapiens
atggatttatcccaaaccatagatccagggaaagtaaggatgtggaaacaaggccatctcacctgactcactgtgggctaccaccactcccagctcgttcwcggcggtggttagcaggtagttggactgtgcatcacctaaggagatctagtcacataacaccggtgaaggaaaatgaggagttagaagtcttcccccacc

SEQ ID NO: 322858 - DNA, 201 bp, Homo sapiens
ttttttttttttttgcgtgcgacagagtctcgctctatcgcccagactggagtgcagtggcgcgatctcagctcactgcaagctccgcctcccggattcaygccattctcctgcctcagcctcctgagtagctgggactacaggcgcccaccaccatgcccggctaatttttttgtatttttagtagagacggggtttcac

SEQ ID NO: 322859 - DNA, 201 bp, Homo sapiens
ggcttctagatcccactttggtagagatatctggccatataccttgctgtagtttgttggtggtctatcttgtataccttttcttgcttttcagtttaatrgctgagaaataagtatggtgggggccattccctgggttcagaactactataaagatcagaaagggtgtcttattttaatttctgtcaaagtcctttatca

SEQ ID NO: 322860 - DNA, 201 bp, Homo sapiens; identical to SEQ ID NO: 67599

SEQ ID NO: 322861 - DNA, 201 bp, Homo sapiens
aggaaggcatcaccataacggatggctgggcattagcacaactagagttgatgatcagggtttcaaaacctgggattaaaaaatgtgttaatgatttttttctacttgtttttcagtgtggtttatagtggtactgatttgattttggtaaatcaacatttattatgactgtagtcttgagtatatgagctcagctgtagt

SEQ ID NO: 322862 - DNA, 201 bp, Homo sapiens
tctaaaataataaatttttaaaaaataaatatattactgttacaccagctttataagattgtgatgatttattaagactaatagggatatggtaaatagaraaattgtagtagttttttttttttttttgagatggtgtctggctctgtcccccaggctggagtgcagtggcatgatctcggcttactgcaagctctgccc

SEQ ID NO: 322863 - DNA, 201 bp, Homo sapiens
gtaagacttgaaagttgaagttactccttgatccatgggctgcagaatggatgttgtgttagcaggcatgaaaacaacattatgctccttgtacgtctctrtcagaactcttgggtgactggtgtgttgttagtgaacagtagtattttgaaagaaatattttttttttttctggctggtcatggtggctcacacctgtaa

SEQ ID NO: 322864 - DNA, 201 bp, Homo sapiens
gttaatattattatcctctcaggctatgttagaaattcaggctttgtatcagtctttactctgcctctcctttttctcatcaggttggaagattatccaaytacttgcatatttgatcatacctctccttccattcctatcacagctgcctaaattcaggcttttgtagctctcattacagtattctcttaatagatcagt

SEQ ID NO: 322865 - DNA, 201 bp, Homo sapiens
ctctcaggctatgttagaaattcaggctttgtatcagtctttactctgcctctcctttttctcatcaggttggaagattatccaactacttgcatatttgwtcatacctctccttccattcctatcacagctgcctaaattcaggcttttgtagctctcattacagtattctcttaatagatcagtcatcacttctttttc

SEQ ID NO: 322866 - DNA, 201 bp, Homo sapiens
ctatagtacatgttgtcttcagtatcaatctccatttcatagttctggagttttaatatttatgaaggactgtgtgtattgagttcttgaaatatgttaasttttgaaaggctttgttgacttacaaaatgttaaaacttaaatattgttgctctcaaaatattatagtattggtttcttaattctgaaaatttaaactgc

SEQ ID NO: 322867 - DNA, 201 bp, Homo sapiens
tttgtggtttctgttaccattcccattcactaccaggactgccagggtaagagagtaactaacaatattgggggaactctggaaaagtgaaaccaagaatrttagatttcatgtggaatttaaagcactttccaaaatgtattataaggaaggattgtattttttaaattgtttttgacttaaaagaagtaatgcacttat

SEQ ID NO: 322868 - DNA, 201 bp, Homo sapiens
tttacctgaatactcttttactgaattatttttaggttggtcttcctgcaaaatctggagttgctgggggcattcttttagttgtccccaatgttatgggyatgatgtgctggtctcctcctctggataagatgggcaacagtgttaagggaattcacttttgtcacgtaagcatattttcttaatgtaaataatggtgtt

SEQ ID NO: 322869 - DNA, 201 bp, Homo sapiens
atattaacgtatttatgtctcttatttttttgcagcaaggagtaaataatgctgaaaaatttgactatgtaagtgcaacatgtcattcagttttcatgccwcattctctatatatttgttttttgattactaatattccctacttttggtttctaggtcatgcagtttttgaataagatggctggtaatgaatatgttgga

SEQ ID NO: 322870 - DNA, 201 bp, Homo sapiens
agcattccctttgtaattctaatgcattctcaacatatgggtattaaataacatgaaaaaaagtttatataaatgttaaattactttagaactatttcctrgatttaaaaatactaatgcagtatattataatagtagctttgaaattttgatattggcttgaaacttaactgtagtggtacctatattaacgtatttatg

SEQ ID NO: 322871 - DNA, 201 bp, Homo sapiens
gatttctatataatccattgagagagtttcatcacctacttttaaaaatgattattttaggcatctcataccactgggaagtgggctagggagaacatgarcttctctcttcataaccacctttagggaaatatagcgaaatctcaaaatacatgagatttgctttaaaataatttagttaaggcagctgggagtgctggg

SEQ ID NO: 322872 - DNA, 201 bp, Homo sapiens
ttatagaccaggggttgctgactttttctttgaaggaccagacagtaaatattttaagcttgtgtaccatacggtctgtgttgtaacttctcagttctgcygtttagtagaaaacagccatagacaatatgagggtgtgttataaaaaactttataaaaacaggcagcaggccgtatagtggatgtttcccattttgtatt

SEQ ID NO: 322873 - DNA, 201 bp, Homo sapiens
ttcttttagaattagttaataaggagttccagtataatgatatattcaatatatgtaacagtttatgattacttgcttttaaagatttttttaaaaaattyatttgaagtaaagagagaggagacttaaaatacctggtgatcttgatctgacagtgtatatttaataggcatatatttatgtggaaagaactgctgaaat

SEQ ID NO: 322874 - DNA, 201 bp, Homo sapiens
tgtaaatttcattcaccagtaaattacagaatacttattattgaaaaccatcatgtattgctttaaaacaaaagttataatcttgccctcaaaaggcaagmgttagaaacaggtgagctggtgccaactgcttctgtcggttaatcttgtaacatttttactatacatttaactctaaatctcatttactaattatggaat

SEQ ID NO: 322875 - DNA, 201 bp, Homo sapiens
ttctgcagtttttcagtgtattttaatggtagaagatttgagaattttaaaattagcatttttgtttacaaaatatgaagactagaaaggacctgaattcrtttcagtcattttatagccaagaaaatgaagattgaaagaattaccacttaaatgacttgtccaaagtcacacaaatagcctattgacagaattgattgg

SEQ ID NO: 322876 - DNA, 201 bp, Homo sapiens
ttttcaaacatgtaaaacgagagagagagagagatacatttaatgttatccatcactcagcttcattaattatgaatacattactaatcttgtttcatctrtatgtgcatctgtttcccctatccttgtcatatttcagtatgtaattctaaataaggatccttaacaaaacataacaataatacagtttttacatataaa

SEQ ID NO: 322877 - DNA, 201 bp, Homo sapiens
aactgcttctgtcggttaatcttgtaacatttttactatacatttaactctaaatctcatttactaattatggaatttttttaaagaaaaattatataccrcatctcaatggcaaagaataattcattgtatttatttttaagccatatttcaatatctgaggatatgatttttctgtacatagtatgattaaaaataatg

SEQ ID NO: 322878 - DNA, 201 bp, Homo sapiens
tcaccccactactccataatgataaagataatggattttttatcatttttagttttgattttgcattgggggtggtttactctcttttgtatatgtaggcrtgtgcttttcctaagagctttgcaaataaactttttactgtaactttttcagaattaatatgacatgttaatgattattagatctcatctatccttgggg

SEQ ID NO: 322879 - DNA, 201 bp, Homo sapiens
tacaagttgtaagtattctgaaattgggaaacatttattttaaatgcaatcaggtagtgttgctttttacagcataataaatatatgtatcaaaaaaaaaactgtgtggaaaaaatgaattttcttaaaacaattaagagccaggaactccactgagcatacagaccatctctggttaggttccaatccatttctaatgcc

SEQ ID NO: 322880 - DNA, 201 bp, Homo sapiens
ctttaccattatgtaatgcccttttctcttttgatctttgtcggtttaaagtctgttttatcagagactagcattgcaacccctgctttttttttttttttgctttccatttgcttggtaaatattcccctatccttttattttgagcctatgtgtgtctttgcacgtgagatggatctcctgaatacagcagaccaatgg

SEQ ID NO: 322881 - DNA, 201 bp, Homo sapiens
tgccaagtgatattattccattccttccctcgtgtatcttatctttattattgaattttccctcacaatccactgttaaaagaagaaagtatcacacacgwgggttcttttggctatggaagtgtccttgagatcactttttgcacgtgactcagctgaagtgttcaaagcacatggaaatcacttgccagtgacaggtgg

SEQ ID NO: 322882 - DNA, 201 bp, Homo sapiens
ggggtttggtgtctggcagatcatcaggattagtaaggccatatactgctgtatacctaaggtcttttgtgtagagttgtaacttattttcttttttttttctcccattaatacctcaaataactgattttcaaagtggaaaaatgtctgtgcttcccccccttgttttgaagtctgacaagtactagtagactgtgaaat

SEQ ID NO: 322883 - DNA, 201 bp, Homo sapiens
tctgagaatgacccaatttgtaccacctgggcattgaactgaaggctgtctttccagtgaagtaaagtttaagatgacagttaacactgaatgttctctcwtaagatttgcaaagaagccagtgattggtgaggatagtgattcttggcagggattagacatttatatagcatgatttaatttttaataatgtgaatttta

SEQ ID NO: 322884 - DNA, 201 bp, Homo sapiens
tggaagtgtccttgagatcactttttgcacgtgactcagctgaagtgttcaaagcacatggaaatcacttgccagtgacaggtggacgttgtatgtgttttctctctcctaaggatgcctaaactttcttttcttcacaggtaaagtcagtgataaatcttttgtttgctgcatatactggagatgtgtctgcacttcgaa

SEQ ID NO: 322885 - DNA, 201 bp, Homo sapiens
gctatggaagtgtccttgagatcactttttgcacgtgactcagctgaagtgttcaaagcacatggaaatcacttgccagtgacaggtggacgttgtatgtgttttctctctcctaaggatgcctaaactttcttttcttcacaggtaaagtcagtgataaatcttttgtttgctgcatatactggagatgtgtctgcactt

SEQ ID NO: 322886 - DNA, 201 bp, Homo sapiens
attctgtggtccaagagcaaaaagggaattgagaattcagagttgaccccattaaaaaagaaagacattaaggacacctgaaacagtggtttataacccaraaaagtgcatatcaaagtcacctggagactttaaacaaaattatgggctgagcatgttggctcatgcctgtaatcccaacagtttgggaggccaaggcag

SEQ ID NO: 322887 - DNA, 201 bp, Homo sapiens
aatccagatacctgagttctactcaagctccatcactaattcatatgctgtgtgaccttgagccagggtccttaatctcagtggtagtaataaataaaatatatctatcaacatattttataaccagcctgtcagggatttttaaaaacaactataactgtttaaaatgttgaatgttttagggtcatccactatataaat

SEQ ID NO: 322888 - DNA, 201 bp, Homo sapiens
tacttgatggtggtttgatatgtattaggagtttggattcatttgagaactgggagctgtattaagtttggagcaagttgattactctttagctgtattgygtttctgtttattaagcttcaattttttttttttttttttttttgagactgggtcttgccttgccactcaggctgaagtgcaagtggcatgatcatagtt

SEQ ID NO: 322889 - DNA, 201 bp, Homo sapiens
aaaaattgaagagcattttcctcctgtgtttataatcccaactaaaacactatgtaatacatgttggaaatattactgtgctttgtatatgtattaatttyttttgccctaaattggcctctaggaatgtgaaagtagatgtacccacctgataagaaaaagtgagctaagtaactaacttgataactaggcattcaacaa

SEQ ID NO: 322890 - DNA, 201 bp, Homo sapiens; identical to SEQ ID NO: 67601

SEQ ID NO: 322891 - DNA, 201 bp, Homo sapiens; identical to SEQ ID NO: 67605

SEQ ID NO: 322892 - DNA, 201 bp, Homo sapiens
acaaaatggtatatgccatatgatgctatttttgtacatctataataaactttatgagacacaaatatgcaatgtagttactaataaaactataagaacawgaacaccaatctttagataaagcttactgccaggagggaatggaatggatgcagagagcatggttagctgtatctttaatgtttcatttctttaaaaaat

SEQ ID NO: 322893 - DNA, 201 bp, Homo sapiens; identical to SEQ ID NO: 67614

SEQ ID NO: 322894 - DNA, 201 bp, Homo sapiens
aggtaaataagagatgtgtttaagaaataggattggcagcacttggtgatcgtttttggtgggtgaaaaggaatgcgatatcaagctgactaccaggtttwtagtatgagcaacagggccaaagctgctgcattaactaagatggagaacactggaaaagcaaaccttgggagtatgggaagaaattagtttaactttggc

SEQ ID NO: 322895 - DNA, 201 bp, Homo sapiens
atgtgtttaagaaataggattggcagcacttggtgatcgtttttggtgggtgaaaaggaatgcgatatcaagctgactaccaggtttatagtatgagcaayagggccaaagctgctgcattaactaagatggagaacactggaaaagcaaaccttgggagtatgggaagaaattagtttaactttggctattgtgacaatg

SEQ ID NO: 322896 - DNA, 201 bp, Homo sapiens
aaaattaaaagtatttgtcatgtgatttctatataatccattgagagagtttcatcacctacttttaaaaatgattattttaggcatctcataccactggraagtgggctagggagaacatgaacttctctcttcataaccacctttagggaaatatagcgaaatctcaaaatacatgagatttgctttaaaataatttag

SEQ ID NO: 322897 - DNA, 201 bp, Homo sapiens
atgagggatttcttttctaacattaaagcaattagtaaagattgtgttagtattgtgggttggaataactatagaaaactcaagtccatgtgcctggcttygttatagtagcaggatttgaggcatgctaagagaaataggaccttaaactctgaattgaaaccataattcttcctgtatgaatgctaaaaccgtgttgtt

SEQ ID NO: 322898 - DNA, 201 bp, Homo sapiens
atgtaatttttaaaaactcaaacagtaacattatattaagttttatgagacatctattttattcacagttgtagtcttgttttttgagtattattcaaatrcctgcagttaccaatttgtttcagaaaagcaggcttgtcaaaacatgacactattctctaatgaactgactactaataaaattagtccctatttctcaac

SEQ ID NO: 322899 - DNA, 201 bp, Homo sapiens
tagaaaactcaagtccatgtgcctggcttcgttatagtagcaggatttgaggcatgctaagagaaataggaccttaaactctgaattgaaaccataattcktcctgtatgaatgctaaaaccgtgttgtttcacagcaggaagagaacctcatctattttcagggaccttgtttgtatttatttatttttaatttacacaa

SEQ ID NO: 322900 - DNA, 201 bp, Homo sapiens
ttgtataatggtgagaatgacatggagaagatcatcttttataatggaaattagtcctaacaggatataatttcaaaaggtaaataaatttaaattttaakgtaatttttaaaaactcaaacagtaacattatattaagttttatgagacatctattttattcacagttgtagtcttgttttttgagtattattcaaatac

SEQ ID NO: 322901 - DNA, 201 bp, Homo sapiens
ctgtatgaatgctaaaaccgtgttgtttcacagcaggaagagaacctcatctattttcagggaccttgtttgtatttatttatttttaatttacacaaaayggtgtctttgtaagaatagtttgattccaatggcctggatttttttttttttgtttaatatgtgtatttggtgatgaatgtcttctcttcctgtcttaaa

SEQ ID NO: 322902 - DNA, 201 bp, Homo sapiens
ccacttgtctgccttctcaacagcgtatcccttctttcagctttgactctcatctttgtgtaggtaatacttcacctcttaatccaaagctctgttcttamatttgtcgccacatattcaatgacttcaaattttaagtctgtaccctgatattcattcttttctccaattcaacctattttgcgtactgttatgagagta

SEQ ID NO: 322903 - DNA, 201 bp, Homo sapiens
gtaacagtcatatttgcttttattcacattcacccaactcacatttcatttttaaagttttaaatgcaaagaataaaggtaataactttttctatttgtcrtttgtgatattatcaaattgaattatttcttttgttcttttattttcccttcatttaaaaaacacctttgggtagcacctcaatataaaattaatatctc

SEQ ID NO: 322904 - DNA, 201 bp, Homo sapiens
taaagtataacatactttacttcttcaatttgactttaaagatttgtggtttctgttaccattcccattcactaccaggactgccagggtaagagagtaastaacaatattgggggaactctggaaaagtgaaaccaagaatattagatttcatgtggaatttaaagcactttccaaaatgtattataaggaaggattgta

SEQ ID NO: 322905 - DNA, 201 bp, Homo sapiens
gaatccagatacctgagttctactcaagctccatcactaattcatatgctgtgtgaccttgagccagggtccttaatctcagtggtagtaataaataaaatatatctatcaacatattttataaccagcctgtcagggatttttaaaaacaactataactgtttaaaatgttgaatgttttagggtcatccactatataaa

SEQ ID NO: 322906 - DNA, 201 bp, Homo sapiens
aggtattttaaaatcaatgtaactcaagtatccagtggggaaataggggaatgagctttgatcaatggttagcacacctacatcctttgcaagtattggtrtggaggtggatgactgatcttctagagtgcccctctccttcagtttgtttgctatgataggcattccagagggtgtgtcagcttagttggaaatactcgt

SEQ ID NO: 322907 - DNA, 201 bp, Homo sapiens
ctataatgtgatctctgcaaattgtatgatcacataatatttataaattggtattggtttgaaatttaggtaataaaaccatagccaaaaggccttaaaarttgtcaaacccagttctcttactttatataacggaggaaactgagaacctggcaaggttgtaacagcagtagaattggacttgaactaaatctcctgata

SEQ ID NO: 322908 - DNA, 201 bp, Homo sapiens
gagttggcacggcgtgcagaaagtggctactgagcagccgggcctggctcacccgcttcacacgtcagtttgactcctctccccgccccccaccaatcccycgccctactctccgcgcacccagagccgagagaaatttgactgccctaatcgccaatcaaaagagaggtcgaggatttgagccaatcgcagcgggcgaaa

SEQ ID NO: 322909 - DNA, 201 bp, Homo sapiens
ggaatccagatacctgagttctactcaagctccatcactaattcatatgctgtgtgaccttgagccagggtccttaatctcagtggtagtaataaataaaatatatctatcaacatattttataaccagcctgtcagggatttttaaaaacaactataactgtttaaaatgttgaatgttttagggtcatccactatataa

SEQ ID NO: 322910 - DNA, 201 bp, Homo sapiens
aagaggagttgagttaatttacatgaggatgacaggactgaattgataggatgaattgtggatggttgggaagaatgtgagagggcactgcacattttttycaaccatcctcaatgggcactgcacattcttcgtaaccatatatatcccaaccagatggagaatattttctctatatctagagaatatattgtaaatgtg

SEQ ID NO: 322911 - DNA, 201 bp, Homo sapiens
gggaatccagatacctgagttctactcaagctccatcactaattcatatgctgtgtgaccttgagccagggtccttaatctcagtggtagtaataaataaaatatatctatcaacatattttataaccagcctgtcagggatttttaaaaacaactataactgtttaaaatgttgaatgttttagggtcatccactatata

SEQ ID NO: 322912 - DNA, 201 bp, Homo sapiens
tgggaatccagatacctgagttctactcaagctccatcactaattcatatgctgtgtgaccttgagccagggtccttaatctcagtggtagtaataaataaaatatatctatcaacatattttataaccagcctgtcagggatttttaaaaacaactataactgtttaaaatgttgaatgttttagggtcatccactatat

SEQ ID NO: 322913 - DNA, 201 bp, Homo sapiens
attcatgtttatatgaagacagaaactaaagatgaaaaacagaggaaattttggtttggcagttggtaatggagttagaaattaaatagttgaagtaaagtgtaaaaccagtgaaccaatttttcctccgtctctccctccctccatcttctccctttcttccttttctcccctcccgctttggtcccatctaggcttcct

SEQ ID NO: 322914 - DNA, 201 bp, Homo sapiens
aattcatgtttatatgaagacagaaactaaagatgaaaaacagaggaaattttggtttggcagttggtaatggagttagaaattaaatagttgaagtaaagtgtaaaaccagtgaaccaatttttcctccgtctctccctccctccatcttctccctttcttccttttctcccctcccgctttggtcccatctaggcttcc

SEQ ID NO: 322915 - DNA, 201 bp, Homo sapiens
gaattcatgtttatatgaagacagaaactaaagatgaaaaacagaggaaattttggtttggcagttggtaatggagttagaaattaaatagttgaagtaaagtgtaaaaccagtgaaccaatttttcctccgtctctccctccctccatcttctccctttcttccttttctcccctcccgctttggtcccatctaggcttc

SEQ ID NO: 322916 - DNA, 201 bp, Homo sapiens
tgaattcatgtttatatgaagacagaaactaaagatgaaaaacagaggaaattttggtttggcagttggtaatggagttagaaattaaatagttgaagtaaagtgtaaaaccagtgaaccaatttttcctccgtctctccctccctccatcttctccctttcttccttttctcccctcccgctttggtcccatctaggctt

SEQ ID NO: 322917 - DNA, 201 bp, Homo sapiens
ctgaattcatgtttatatgaagacagaaactaaagatgaaaaacagaggaaattttggtttggcagttggtaatggagttagaaattaaatagttgaagtaaagtgtaaaaccagtgaaccaatttttcctccgtctctccctccctccatcttctccctttcttccttttctcccctcccgctttggtcccatctaggct

SEQ ID NO: 322918 - DNA, 201 bp, Homo sapiens
tttgctcttgttgcccaggctggagtgcaatggcgcgatcttggctcaccgcaacctccgcctcccaggttcaagcaattctcctgcctcagcctcccgastagctgggattacaggcatgcaccaccacgcccggctaattttgtatttttagtagagacagggtttctccatgttgaggctggtctcgaactcctgacc

SEQ ID NO: 322919 - DNA, 201 bp, Homo sapiens
ggcattattaagtttttttatttggacatttattttttaatgagaaaggaaaagagatacataacagaaattgggctggaaaaataccagcatatgtatgytgttagaaaatagataattcatacaggatgcaatattgaaagtattctgttaaaacaacaatgaggtcactttccccttctcagattggcagatgttaaa

SEQ ID NO: 322920 - DNA, 201 bp, Homo sapiens
ttgggctggaaaaataccagcatatgtatgctgttagaaaatagataattcatacaggatgcaatattgaaagtattctgttaaaacaacaatgaggtcastttccccttctcagattggcagatgttaaatcaagtaattgggaaaataggaactctagcattgctagtagaagtataaattattagttcagttacttta

SEQ ID NO: 322921 - DNA, 201 bp, Homo sapiens; identical to SEQ ID NO: 67600

SEQ ID NO: 322922 - DNA, 201 bp, Homo sapiens
gattaagaaatatatttttgcctatttatttctggtacaggcttctaaaaaagatttttaaaattgtcttcttgatgaggatattttgagtgacatagacmcgtccttcaattcttgatggtaaactttctgaagagcaatttttaagctctatgaggaacttacaaagtattcatacctttttaggaatctaagttcaca

SEQ ID NO: 322923 - DNA, 201 bp, Homo sapiens; identical to SEQ ID NO: 67602

SEQ ID NO: 322924 - DNA, 201 bp, Homo sapiens
ggcctcattttttttaatcccacttgaaaagacagtttttcattgtctcataggtttaccatactatactatgtgttttaagagttatgcgaaaaaaaaawtaagaaagacttgaccccagccttgaagctttatagtttggggaggttaggtaatatgaaatgttatttaacaaaataagaccatacagttggtttcaat

SEQ ID NO: 322925 - DNA, 201 bp, Homo sapiens
gatggacagaggtaagtttatttcaaattcatgaaaaccaactctaagccttaacttttgtataatggtgagaatgacatggagaagatcatcttttatartggaaattagtcctaacaggatataatttcaaaaggtaaataaatttaaattttaatgtaatttttaaaaactcaaacagtaacattatattaagtttta

SEQ ID NO: 322926 - DNA, 201 bp, Homo sapiens
tgtaggttttcacatattgtcagccacactctaatcctcttgtaaagaatgaacctggctttattcaattaaataattctctggtacaggttttcctcccrtaatattttaaagtacaatgttttgggttttttgagggtaaagtaaaagaaaatatgttttaaaaactttagttgtcaaattattttattttaagcctat

SEQ ID NO: 322927 - DNA, 201 bp, Homo sapiens
gaagtcttgcttgtcgcccaggctggagtgcagttctgcctcccaggttcacgccattctcctgcctcagcctcccgagtagctgggactacaggcgcccrccactgtgcctggctaattttttttttttttttgtatttttagtagagacagggtttcaccatgttagccaggatggtctccatctcctgacctcatgat

SEQ ID NO: 322928 - DNA, 201 bp, Homo sapiens
acattttctttcccattttaccgtaacctttttattctgatgctacgtttggttttatggacattactgtaaattaacaacttcaataaggacatcatatrcagaagcactttatttactaagctcattgacatctagatttaatattgaaagaattaatactgttattctaaaaataccaaatattttaaaagaaaaatt

SEQ ID NO: 322929 - DNA, 201 bp, Homo sapiens
ctgagtgcaaactaagttaaactagtcccatggtttggtttctgttttttaatcttctaagcatatgctgtgtttctgattgatgagttaagatatagaaktgaagaaagtgagagcgaagtttgtagtaatggctgtgagagatacacttttgtactttttttttctgctgtataaaaaatgaaatgtgccttatactca

SEQ ID NO: 322930 - DNA, 201 bp, Homo sapiens
agagttgtaattttacctaaatttcgttaaaactactaaaagccgtttaacctagtaattttagattttacttttcaagataatgttgcaattaaaaaccytttttccttttatgaaaatttgatcttttatgttgcccaggttagttttgaactcttggcctcaagtgatcttcctgccttggcatcccaaagtgctggg

SEQ ID NO: 322931 - DNA, 201 bp, Homo sapiens
aatattcacttagtcaatagatatttaatgagcacctattatgtgtgatagacactgagtttacggtggggaacagaaagacaagtggtctctgcccacayggagcctatatttaatgagagagacaaaaaacaagtatatataaaaatatatatactttatatatagttatatataacaaatatagttaaaaaggatata

SEQ ID NO: 322932 - DNA, 201 bp, Homo sapiens
taatgaagtgactaagtgctacacacatactataataaaatctcttcaaacgagcatggtctaaattcaaaattttaaaggggaatgtgtagttcttatawccagtcactgaaacagatgaggctttattgcttagaagtaccaacatagttttaaaaataataactgggtaattaatatattaatggtatatacagggga

SEQ ID NO: 322933 - DNA, 201 bp, Homo sapiens
aaaaaggatatagttaacaatacaatatatatatatatatgaaggggaaaagcaaggtaagggataaggagtgatgaaaagaggggagtgttttagagtcytgagagaacatttgaatggagacctacccaaagggagggggagagggagcctcctgacagcctggggaaagagcatctctagcagccagttgtaggcctt

SEQ ID NO: 322934 - DNA, 201 bp, Homo sapiens
actgcactgtaatacagtgatgctgtaagacaagtgctggcacactttccctgaaaggccaaatagtaaatattttcagcttttggggttctctagtcackactacaacttctcagttcagtggtggtagcaaaatagctgcaaacaataggtaaatagatgtggcagtcttccaataaaactttatttacaaaaagagga

SEQ ID NO: 322935 - DNA, 201 bp, Homo sapiens
ctggaaagggaagagtggtaggaatgatatgtgcagtgtaaccaggaatagagcctttagggtcctgaaagccatggtaaagagtttgattttcctttagmtatgatggaaaggcacgggagttccttgatgtttttaaaagatccctatggcagcagaggtgataaggtggtggttcagatgaggcctaaggcaatagtg

SEQ ID NO: 322936 - DNA, 201 bp, Homo sapiens
tgccttggcctcccaaagtgctgggattacaggcatgagccactgtgcccagcccctttatttctttcccttgcctgattgtcctagccagaactgccaayactatgttgaataggagtggtcacagagggcatccttgtcttgtgccaattttcaaagggaatgcttccagttttttgcccattcagtatgatattggct

SEQ ID NO: 322937 - DNA, 201 bp, Homo sapiens
attacactgatcttgtgaaatgcagactcatacattaaacattgcttgtctattctagaatgaagtagtaggaagatacttgcaatggcaaataaataccrtggaataagagggccttcagcatgtactatgtattatcctgggctaatcaagaccttttatatcacctaagctgacggattattactctgctgcccactg

SEQ ID NO: 322938 - DNA, 201 bp, Homo sapiens
gatgttcttttctctgttttcaaatataagaagttacctagttagtgttgccagaaataaacttctccctttcatgcagctagggaggagatgttaaaacrtgggattcatttttccccagagaaataatttataaaggtgggtaggtttggttgaagcagtgtgttaatattttacctaaaatacattgtagattaatat

SEQ ID NO: 322939 - DNA, 201 bp, Homo sapiens
atgaggtcaagagatagaggtcatcctggccaacatggtgaaaccccatctctactaaaaatacaaaaattattcgggtgtggtagtgtgtgcctgtagtyccagttacttgtgaggctgaggcaggagaatcccttgaacctggaaggccgaggttgcagtgagccgagatcacgccactgcattccagcctggcgacac

SEQ ID NO: 322940 - DNA, 201 bp, Homo sapiens
taacacgcagttgacattccatttttccagaaagacagataattacatactgtagaggatgactcaaaagtctgtttcaagccactgacttcctaaactartgaaggcctattcaaagtcacttaattcagctgtttttttttttttttttttgataaatacaaagatacatgtaaagttttacttacctgattttaaaaa

SEQ ID NO: 322941 - DNA, 201 bp, Homo sapiens
aaaatgtttacctgaatactcttttactgaattatttttaggttggtcttcctgcaaaatctggagttgctgggggcattcttttagttgtccccaatgtyatgggtatgatgtgctggtctcctcctctggataagatgggcaacagtgttaagggaattcacttttgtcacgtaagcatattttcttaatgtaaataat

SEQ ID NO: 322942 - DNA, 201 bp, Homo sapiens
ttagattaaagatggggaagtcagtgtgcccagaggaatagatgaattctttgagggacattatattgaaaaacaagaagattggactgccttgggagtaktatttggcagtggaaagtgggtaatgaatctgcaaagcagcaaacaggaggaagattagggtgatggagcagcatggaaggcaagtcgtgagagggtgga

SEQ ID NO: 322943 - DNA, 201 bp, Homo sapiens
attttcagggaccttgtttgtatttatttatttttaatttacacaaaatggtgtctttgtaagaatagtttgattccaatggcctggatttttttttttttgtttaatatgtgtatttggtgatgaatgtcttctcttcctgtcttaaattcgcttttaagttctttgacttttgggttttatgtacttgttttttaaata

SEQ ID NO: 322944 - DNA, 201 bp, Homo sapiens
tatgttggaggagcctgctatgtaatttgaataataaagtggctatgaaagtgctttgaaaagttacagcattagagaaacatactgttattacacctcttctgtgagtatgctccataaagcacacatgttgaacgtttcacaatagaaatgtgaaataaacattgaagaatatagggagttaagtaaggctctggagac

SEQ ID NO: 322945 - DNA, 201 bp, Homo sapiens
tcctgatccattaacccttaaccaaaatgaataggatactaattagcacttggattgcattgcttttttggcggaatctgtgggtttttttttttttttttgtaaatttcattcaccagtaaattacagaatacttattattgaaaaccatcatgtattgctttaaaacaaaagttataatcttgccctcaaaaggcaagc

SEQ ID NO: 322946 - DNA, 201 bp, Homo sapiens
gcaacctccatcgcctgggttctagcaattctcctatccagaggtactgactgactgaatgttagtaagcaattaatgaacactgctctaatgacattaayttttttttttatcatttgtcaagttttgctaatgtaacttaaattttttgaggaggagtaatttaaattaccattttagaaaatcttttaagaatatata

SEQ ID NO: 322947 - DNA, 201 bp, Homo sapiens
tgaattccacccaagttctgttgttttgttctttctcacagtcattccaaattaaagattttagttgaaaaactcagaatatattatctaaatttcaaatrttctattttttattgtttcatattataatttattttgggccaaaatgaggtaatttaaaaaattatatcaaagttactcaggaaatgggttttcagttcc

SEQ ID NO: 322948 - DNA, 201 bp, Homo sapiens
aggcttcaggatatggtttatatttaaggtcactttctcctgagtttttgttttgtttttagcatgtgtttcacaagtgctttttttttttttttttttttatgaagttcatacaaatcttggagagcaaagcctgatataaccctatgtaaaattgaatgccccagaatatgtaatatttttcttaggatcttttaggga

SEQ ID NO: 322949 - DNA, 201 bp, Homo sapiens
ttgttttgttctttctcacagtcattccaaattaaagattttagttgaaaaactcagaatatattatctaaatttcaaatattctattttttattgtttcrtattataatttattttgggccaaaatgaggtaatttaaaaaattatatcaaagttactcaggaaatgggttttcagttccgtatctttatatatgttcac

SEQ ID NO: 322950 - DNA, 201 bp, Homo sapiens
gaggcttcaggatatggtttatatttaaggtcactttctcctgagtttttgttttgtttttagcatgtgtttcacaagtgctttttttttttttttttttttatgaagttcatacaaatcttggagagcaaagcctgatataaccctatgtaaaattgaatgccccagaatatgtaatatttttcttaggatcttttaggg

SEQ ID NO: 322951 - DNA, 201 bp, Homo sapiens
gttttgttctttctcacagtcattccaaattaaagattttagttgaaaaactcagaatatattatctaaatttcaaatattctattttttattgtttcatrttataatttattttgggccaaaatgaggtaatttaaaaaattatatcaaagttactcaggaaatgggttttcagttccgtatctttatatatgttcactt

SEQ ID NO: 322952 - DNA, 201 bp, Homo sapiens
tgaggcttcaggatatggtttatatttaaggtcactttctcctgagtttttgttttgtttttagcatgtgtttcacaagtgctttttttttttttttttttttatgaagttcatacaaatcttggagagcaaagcctgatataaccctatgtaaaattgaatgccccagaatatgtaatatttttcttaggatcttttagg

SEQ ID NO: 322953 - DNA, 201 bp, Homo sapiens
ccacataatcctatggtaaatgctggagcaattgttgtgacttcactaataaaggtaaaatgttgatgtttcattttaacctagtaaaactttttttttttaacagctaaggcataaagatgaatctgggattatttatgtagaattatgaaaaattttctcttggtgttaagaaatttgtcttatggtatagtgttagga

SEQ ID NO: 322954 - DNA, 201 bp, Homo sapiens
caggcttgagccactgcacccggcagtagtttttaataacagtagttttttttttttttttgagacggagtttcactcttgttgcccaggctggagtgcartggcgcaatctcggctcggcgcaatctcggctcaccgcaacctccgcctcccgggttcaagcgattctcctgcctcagcctcccgagtagctgggattac

SEQ ID NO: 322955 - DNA, 201 bp, Homo sapiens
cagtgacaggtggacgttgtatgtgttttctctctcctaaggatgcctaaactttcttttcttcacaggtaaagtcagtgataaatcttttgtttgctgcmtatactggagatgtgtctgcacttcgaaggtatgtttacaggatggattagcatgcactttacagatatttatgaagttgcttctgggcgagcagccatt

SEQ ID NO: 322956 - DNA, 201 bp, Homo sapiens
ctgaggctggaggatcacttaagcctgggaggtcaaggcttcagtgagccatgattgtgccactgcacttcagcctgggcgacagtctgaaactttggctyttaaaaaaaaaatcccttataattttattattctatgtaaatcacttgtttgtgttttgaaatccttctgtgtatgtgcttgtatataaagataaaaata

SEQ ID NO: 322957 - DNA, 201 bp, Homo sapiens
attacaggcgtgagccaccacacctggcaataacagtagttttaaaatgtttgcaacatagaaagttttggtaggaggtggctgatattttttatcattawaagtgagcaaacaagttactttatggagatgtcagttttgcaaactaccatctcccagggaagtctttttctaccttgtagtgatcgggttaatcaacaa

SEQ ID NO: 322958 - DNA, 201 bp, Homo sapiens
aatagccaatttcttatacctgctctgtataactgtttacaggatcttgtttctctgtgtaatttccataactatgataatttgagacactttgcaaaaamacttgatcctcgaagagaaggtggtgatcaaagggtaagcaaaattcttatttagataagtatataaaatttttaagaagagaaaaagtgagatttgcct

SEQ ID NO: 322959 - DNA, 201 bp, Homo sapiens
agtgcaatggcgcgatcttggctcaccgcaacctccgcctcccaggttcaagcaattctcctgcctcagcctcccgactagctgggattacaggcatgcamcaccacgcccggctaattttgtatttttagtagagacagggtttctccatgttgaggctggtctcgaactcctgacctcaggtgatctgcctgcctcagc

SEQ ID NO: 322960 - DNA, 201 bp, Homo sapiens
atcaattcaactttctatctaacaggtttattaatctgccagtttgctggtgttgatagacggttgttatcagtcagctcactataaattcaaaatgatamactgattttaaaacaaccctgaattatcatctgaaggatcattattcttaaatgaaggcataaagactagcaaatccttttgtattgtgttattattagg

SEQ ID NO: 322961 - DNA, 201 bp, Homo sapiens
tgctggtggaaggtcttgtcttgatgttgatgactactgactgataatggtggtggttgctgaagattgcggtggctgtggcaatttcttaaaataagacracaatgaagttgccacatcaattgactcttacttttatgaaagatttctctgtagcatgcaatgctgtttgacagcattttactcagagtagaacttctt

SEQ ID NO: 322962 - DNA, 201 bp, Homo sapiens
tttaaaatgtttacctgaatactcttttactgaattatttttaggttggtcttcctgcaaaatctggagttgctgggggcattcttttagttgtccccaaygttatgggtatgatgtgctggtctcctcctctggataagatgggcaacagtgttaagggaattcacttttgtcacgtaagcatattttcttaatgtaaat

SEQ ID NO: 322963 - DNA, 201 bp, Homo sapiens
ttttaaaaagtaaaagtttctgccaaacctttaatggtgatttgctatgctatacggtgattctgcttttaaaacaaaattgcatctttgaaggccactgyttcctgtgtaatggaaaaaggggatttataaacatcatttgtttgaagaacttggtacatattaggttctataatacaccgggctaagagtattctttct

SEQ ID NO: 322964 - DNA, 201 bp, Homo sapiens
attatttttaggttggtcttcctgcaaaatctggagttgctgggggcattcttttagttgtccccaatgttatgggtatgatgtgctggtctcctcctctkgataagatgggcaacagtgttaagggaattcacttttgtcacgtaagcatattttcttaatgtaaataatggtgttacaagttgagccatccaatgattc

SEQ ID NO: 322965 - DNA, 201 bp, Homo sapiens
tcttatcggaacgtttgctgaactctataatttgtattggatgattgtactggggtgtataggaaggcatcaccataacggatggctgggcattagcacarctagagttgatgatcagggtttcaaaacctgggattaaaaaatgtgttaatgatttttttctacttgtttttcagtgtggtttatagtggtactgatttg

SEQ ID NO: 322966 - DNA, 201 bp, Homo sapiens; identical to SEQ ID NO: 67608

SEQ ID NO: 322967 - DNA, 201 bp, Homo sapiens
caagcaactacttgaaagactgctagaaggaaagataatgtagaaagcataatttatagaatttagttgtataaaatgataaatttatctattatttaaayagtgtcctaattattactgttattaccaagttctgatatttgaaatgtacccagtttattaattatctttttacattctacagatgtgttcagagcaaca

SEQ ID NO: 322968 - DNA, 201 bp, Homo sapiens; identical to SEQ ID NO: 67609

SEQ ID NO: 322969 - DNA, 201 bp, Homo sapiens; identical to SEQ ID NO: 67611

SEQ ID NO: 322970 - DNA, 201 bp, Homo sapiens
ctttgggaggctgaggcaggagggtcgtttgagcccaggagttggagaccaacttgggcaacatggtaaaattccgtctctaaataataaaaacattagcygagtgtggttgctcacgcttgtggtcccagctgcgtgggaggattgcttaaacttggcagtcgaggctgcagtgagccgtaatgacgccactctactcca

SEQ ID NO: 322971 - DNA, 201 bp, Homo sapiens
taatagtgtgcaacagaggagaatgttcttcctttaggtatagtctcaataacatttcttcccctaggtgctgctgatgtagagaaggtggaggaaaagtyagcaatagatctgacccctattgtggtagaagacaaaggtgggtgtttggagaagttgattgtggttcagaagaactctaaaaccagaagcaaggactgt

SEQ ID NO: 322972 - DNA, 201 bp, Homo sapiens
ccttggcctcccaaagtattgagattataggcataagccactgtgctcagtatcactactccttgtttaaaaaaaaaaaactttttattttaattttagayttagaaaaaagttgcaaaacagcagagagagttcatgtatactgttcaactagctagcttctcttaataataacttacgtaactgcagtacaatgatcaa

SEQ ID NO: 322973 - DNA, 201 bp, Homo sapiens; identical to SEQ ID NO: 67651

SEQ ID NO: 322974 - DNA, 201 bp, Homo sapiens
gaggctggagagcagtggcacaatcatggcttactacagcctggacacacccccaggctcaagtgatcctgctgcttcagcctcccaactagctggggctrtaggcttgatccactgtacctagctaactaaaaaaatttttttgtagagatggggtcttgccatgttgcccaggctgatcacaaagttctgggctcaagc

SEQ ID NO: 322975 - DNA, 201 bp, Homo sapiens
cattttatagatacagaaaacatcattctgtaacttagaaacatacataggaaacagaaacagtttttaaaaacctacacaaaaagccacagtattactayattagaaaagttgcttttcagaggaatgggagtgagatggcgataagaggaaataaaaaacaaaaatatttttaaatagcaaaataaccccttttttttt

SEQ ID NO: 322976 - DNA, 201 bp, Homo sapiens
ttttgtcatcagaaaaaaaaaaaggaggtatattttgaatgattgaagaagtgttgtctggggggaggggccacatagcctagcttttatgcacttacatwggaatctggcttaattcaggctcagttcctctgggttttgtttgtacagtgtaatttgagggtgattaaagttaaaaagatgaatctaagagggacataa

SEQ ID NO: 322977 - DNA, 201 bp, Homo sapiens
agaggctgtctagtcgtgctcgaaagaggtaagtgtgggtgtcaaaacttaagtaggttaaattggtactgctcatctttgaccacagagttaattctagrctctcacatttccctatggtggaaatggcagagcctggaagtatcttcccatttcttcactccttgaatctcttgtgtcttttcagggcagccaagagga

SEQ ID NO: 322978 - DNA, 201 bp, Homo sapiens
aggatatggatgcacttttgaacaacagcctgcccccaccccacccaggtaacatcttccccaagggcccatggcgggaaggagacatctggggctctccygagtgactcctctggtgaggcagggctgtgttgctccgctgtctctgtgcagagccggaggtggagggtatccgaagggagtggttcccttctgcggagc

SEQ ID NO: 322979 - DNA, 201 bp, Homo sapiens
ccgtgcgcctgcgtggaacgattctgtggcgagtgccggccgaaagctaggtccggattgcacgtggagggccgcccgaagggcactctcggacattaacycgcattctggtgggtctagaggaaattgggggacgaagagtggcagcactgacctggtctgggacgtggggagaagggtgcgctacctgggtttcaggtg

SEQ ID NO: 322980 - DNA, 201 bp, Homo sapiens
tcctgtattccctttacaaggaggtaaggaaatctggggtggatagttttttgtgtgggtgttttgtgtttgaagccttaacttacactgagtagagagakaagggaataaaaaaattggtctctgaccttcaagaacactgtggataatagataaacacatgtacacatgtgtttagtagatagtagataaatgtgatag

SEQ ID NO: 322981 - DNA, 201 bp, Homo sapiens
agggcagcgactatactcctggcaagaagaagaagaagaagcttggacctaagaaagagaagaagagcaaatccaagcggaaggaggaggaggaggaggakgatgatgatgatgattcaaaggtgcctggacctccatcctcttctttgtactgttaaacttttgtctttttgtttcctagacaccttactgccctttaga

SEQ ID NO: 322982 - DNA, 201 bp, Homo sapiens
cgtgccatcatccgagagaatgagttctcctttgaagacaatgccattcgtggtggcaagaaggcctcccgcatgaaggtatctcaggggagggaagccaycctagagaaagagttgtggcttctggcttagtttacctccttgtgatctggtccctggtgaggcaaaagggtaaccctgggaggaggaaaacattccatc

SEQ ID NO: 322983 - DNA, 201 bp, Homo sapiens
aaaaaaaagttctcgagagggaattggagtagggacggaactcacaaatggctttatggagaagatggcattggaatgaagttttgaagaatgcgacggaratttttttggtagaaacagaagggtatctgaacaaagggattaggttgggcaaagatgtgagccagcaaagcttagtatgtctggaaatagcagatagcc

SEQ ID NO: 322984 - DNA, 201 bp, Homo sapiens
gtctagctcaggaagtggggagccagagacattttagggctaattttgggggttaagagctaagaacatgtcagggattgaaggagggatattattttctyttttatttttgagatggggtctcactctgtcgccaaggttggagtgcagtgtgcgatcttggctcactgcaacctccgcctcccgggctcaagcgattct

SEQ ID NO: 322985 - DNA, 201 bp, Homo sapiens
gtcttcaacttcttgtcccattgctacaggttcaggagtttgaacatgttaatgggcgctggagcatgcctgaactggctgaggtggaggaaaacaagaaratgtcccagccagggtcaccctccccaaaaactcctacaccctccactccaggggacacgcagcccaacactcctgcacctgtcccacctgctggtaagt

SEQ ID NO: 322986 - DNA, 201 bp, Homo sapiens
gatgagaaacttggtttcatccttgtgtagagtagggggcagatttccatgcccttgcccaaggtgagggcggagttgtggtgctggtaaggggaccctgyccttctgagaggggcatgagaaacagtagtgctgcctaaacattctgggttccacgtcttggcctcccattggccacttgggctggggctgcctttcatg

SEQ ID NO: 322987 - DNA, 201 bp, Homo sapiens
ttcatccttgtgtagagtagggggcagatttccatgcccttgcccaaggtgagggcggagttgtggtgctggtaaggggaccctgtccttctgagaggggyatgagaaacagtagtgctgcctaaacattctgggttccacgtcttggcctcccattggccacttgggctggggctgcctttcatgttgaccgggagctgc

SEQ ID NO: 322988 - DNA, 201 bp, Homo sapiens
tcccctgtgctcagttctaacagggtagtctggcaggacacacagcaattccctctcagtttaggagggccgtcctaagaatagggctggctcttaaaggyacgagaggacaatttaagatgagacaaactgggaagaaatgaccttctctctgatctagtaccttcttcctaattgattgtcttttattgttctgcagaa

SEQ ID NO: 322989 - DNA, 201 bp, Homo sapiens
aacaacgtttcatgtttaacattgcagatggtggttttactggtatggaaatgaggggcccaccagggttagaaggatctgatgtgaaattggggttcttktcagaaaccacggtacagggactttacctctttacctctgtttgatgagggaatgccaaactgatagtgggttctgtggagaaagccagaagcaaattat

SEQ ID NO: 322990 - DNA, 201 bp, Homo sapiens
cagagttgcactccctttggcagaatgaagagcgggcagccacagttaccaagaagacttatgagatctggcatcgacggcatgactactggctgctagcyggcattataaagtatcctttgcctgaatctgtactgaggcttttggtgaaaggttctgaaggtcttttagtttgaggttcttactttccttgttttgttt

SEQ ID NO: 322991 - DNA, 201 bp, Homo sapiens
tgagcctctagaccctggcctgcagggactgagggcagctctagggggttagttattatgggatgtcagtatagaaagtgggagactgattattacgggaygtgtgtgggaggaggccgagtgtccgttgttgtagtatgggggggggtgagtttctgactattatgggatatcaaactgggggtggatgaaggatggtta

SEQ ID NO: 322992 - DNA, 201 bp, Homo sapiens
gacatagttttggcttttttcctagtggcttctgtctctatgaggtagcctgcggtttaggctggcagtgtgaagtgtctgtgtaggtgtgctaggggttrcgctatctgtgttttggggtggcttcatgaactggccaaacccgtatggttgtaaccaccctgtctgattgggggaactgttgtctatcctcaaatgatg

SEQ ID NO: 322993 - DNA, 201 bp, Homo sapiens
cctccccaaagcccttggaggggcggccagagcggcagttctttgtgaaatggcaaggcatgtcttactggcactgctcctgggtttctgaactgcaggtragtttaggatagtctggagatgtaggggctacgatgaagaggatagtgacaaaagagccttgtggatagaaggaatgaacacagcttcttggtggctgat

SEQ ID NO: 322994 - DNA, 201 bp, Homo sapiens
aactttgtagctgagattacttcacaaagtcggcttccccacttctccacatctctatatatcagaaagcactaggattactttcttcttttgtcatcagaaaaaaaaaaaggaggtatattttgaatgattgaagaagtgttgtctggggggaggggccacatagcctagcttttatgcacttacataggaatctggctt

SEQ ID NO: 322995 - DNA, 201 bp, Homo sapiens
tgcctgaatcccccacttccagagatccccaacggtgaatggctctgtccccgttgtacggtgagtgactgatctcagccggggcaaaaaatgggaaagtrtagtcttttctatgtaggctattgtgaggctggggtgcaggagaggaactatgagcttttcagccctgagaaaggtattctccttcatcctatagtgttg

SEQ ID NO: 322996 - DNA, 201 bp, Homo sapiens
ccccgcacagtgactcgggccagtgtagaggtccccaggccgccggcaggagcagctgggccaattccctggccgggagcggaaggggatggcgtcgggcytgggctccccgtccccctgctcggcgggcagtgaggaggaggatatggatgcacttttgaacaacagcctgcccccaccccacccaggtaacatcttccc

SEQ ID NO: 322997 - DNA, 201 bp, Homo sapiens
aatgcaggtagctgggacccctggaggcttgtggtggtggtggtggaggggggcgttgaggattctgtttgaaagaccagccgggcatctgtgctagtagsatcctgtggttgctgctgtggaaaggaaagagggagtgctggttacactctatctgattatttttagcttctgatcggttaccggttttctgtgctgtct

SEQ ID NO: 322998 - DNA, 201 bp, Homo sapiens
ctccccgtccccctgctcggcgggcagtgaggaggaggatatggatgcacttttgaacaacagcctgcccccaccccacccaggtaacatcttccccaagrgcccatggcgggaaggagacatctggggctctcccgagtgactcctctggtgaggcagggctgtgttgctccgctgtctctgtgcagagccggaggtgga

SEQ ID NO: 322999 - DNA, 201 bp, Homo sapiens
acacctgtaatcccagcactttgggaggctgaggcgggtggatcacttgaggtcaggagttagagactagcctggtcaacatggcgaaaccccatctctaytaaaaatacaaaaattagctgcacgtggtggcgggcacctgtattcccagctactcagaaggctgaggcaggagaattgcttgaacccgggaggcggaga

SEQ ID NO: 323000 - DNA, 201 bp, Homo sapiens
agagcgggtgggtgtgggggagggggacagtgcgcgtcactgactgttctgtgtttctcccccctcccccgcacagtgactcgggccagtgtagaggtccycaggccgccggcaggagcagctgggccaattccctggccgggagcggaaggggatggcgtcgggcctgggctccccgtccccctgctcggcgggcagtga

SEQ ID NO: 323001 - DNA, 201 bp, Homo sapiens
cacgatcttggctcactgcaacctccgcctcccgggttcaagcagttctcctgcctcagcctcccaagtagctgggacaacaggcgtgtgccaccacgccyagctaatttttgtatttttagtagagatgtggtttcaccatgttggccaagatggtctcgatctcctgacctcatgatccgcccacctcggcctcccaaa

SEQ ID NO: 323002 - DNA, 201 bp, Homo sapiens
tgtatttttagtagagacagggtttcagcatgttggccaggatggtctcgatctcttgacctcatgttctgcccgcctcggactcccaaagtgctgagatwacaggcgtgagccactgtgcccatccaagaccctgtcttaaaaaaaaaaaaaagttctcgagagggaattggagtagggacggaactcacaaatggcttt

SEQ ID NO: 323003 - DNA, 201 bp, Homo sapiens
attttttgtatttttagtagagacggggtttcaccgtgttagctaggatggtctccacctcctgacctcgtgatccgcccgctttggcctcccaaagtgckgggattacaggcgtgagccaccacgcctggccaaaattttttttttttttttttttgagacggagtcttactctgtcacccaggctggagtgcagtggca

SEQ ID NO: 323004 - DNA, 201 bp, Homo sapiens
aaaagttgcaaaacagcagagagagttcatgtatactgttcaactagctagcttctcttaataataacttacgtaactgcagtacaatgatcaaaactagraaattaacattggtattgtactataaatgacagaacttcaatgaatgtcaccaatttttcttgatgtctgttttctgtttcaggatccaatcccaggtcc

SEQ ID NO: 323005 - DNA, 201 bp, Homo sapiens
aaaggatgtgaccttctatcagaacctgtccttcatagtaggcacgtaagaatgtggggcgtttcccacagaacaagatgagactaggctccctgtataayggtgcttgctgggattctggtgtccccagtgagagagtactcccctctctgccactctgtccttccccttggcttgaacgtctaaccttattctttttca

SEQ ID NO: 323006 - DNA, 201 bp, Homo sapiens
ccctgagggagaggagaaagtggaaaaggcagaggtgaaggagagaacagaggaacctatggagacagagcccaaaggtaaaggtatccacattttttttktttgtttgtttgttttgagacagtgtagtgctgccgccaggctggagtgctgtggcgcgatcttggcttactgcaacctccacctcccaggttcgagcga

SEQ ID NO: 323007 - DNA, 201 bp, Homo sapiens
tagggggttagttattatgggatgtcagtatagaaagtgggagactgattattacgggatgtgtgtgggaggaggccgagtgtccgttgttgtagtatggkggggggtgagtttctgactattatgggatatcaaactgggggtggatgaaggatggttattatgggatgtctgtgggggatggggctgaatattatggga

SEQ ID NO: 323008 - DNA, 201 bp, Homo sapiens
ccagcacctggcagtgatgaggaagaggaggaggaagactctgaagaagatggtatggtgaaccacggggacctctggggctccgaggacgatgctgatayggtagatgactatggagctgactccaactctgaggatgaggaggaaggtgaagcggtgagattcatctttttgggcattcatagaaggatccttgctatt

SEQ ID NO: 323009 - DNA, 201 bp, Homo sapiens; identical to SEQ ID NO: 67666

SEQ ID NO: 323010 - DNA, 201 bp, Homo sapiens
aggttataaatacgaacgcatcgatggtggaatcactgggaacatgcggcaagaggccattgaccgcttcaatggtgagagagaaggagttgtttagtttyaggaatcctcatttgcttatatctttggactgtaacttcttgtgcatctccttttctgtgtagttcttttgggactttgtcatttgagatggagtaaagc

SEQ ID NO: 323011 - DNA, 201 bp, Homo sapiens
gcatctccttttctgtgtagttcttttgggactttgtcatttgagatggagtaaagcttttgaatgtctcaattggacgaatgtattggactattcctagragattttttcttttggggtatttgttctttctgctagaaagaagaaagcattgtatctcgagggcaagcaaagggtcaggacttgttcaagctcaaatag

SEQ ID NO: 323012 - DNA, 201 bp, Homo sapiens
tctatgtccaaacaggagcttgatgatatcctcaaatttggcactgaggaactattcaaggatgaagccactgatggaggtgaggtagtcaggaacttacrttttggtgtggggcttggcctctctaaaggttagggagaatctttgataccaagggtcttgtgggacttgctttttccactgcagctgctgaaactgact

SEQ ID NO: 323013 - DNA, 201 bp, Homo sapiens
agaaggcctcccgcatgaaggtatctcaggggagggaagccaccctagagaaagagttgtggcttctggcttagtttacctccttgtgatctggtccctgrtgaggcaaaagggtaaccctgggaggaggaaaacattccatcagtctcctggttgtgcttacacagaggaactgactagtagtgaccaagttgccttcat

SEQ ID NO: 323014 - DNA, 201 bp, Homo sapiens
tgactgttctgtgtttctcccccctcccccgcacagtgactcgggccagtgtagaggtccccaggccgccggcaggagcagctgggccaattccctggccsggagcggaaggggatggcgtcgggcctgggctccccgtccccctgctcggcgggcagtgaggaggaggatatggatgcacttttgaacaacagcctgccc

SEQ ID NO: 323015 - DNA, 201 bp, Homo sapiens; identical to SEQ ID NO: 67660

SEQ ID NO: 323016 - DNA, 201 bp, Homo sapiens
gcgattctcctgcctcagcctctgagtagctgggattgcaggcgtgccacaaccatgcccacgtaattttttttttttttttttttttgagacggagtctygctttgtcgcccaggcttgagtgcagtggcgccatctcggctcactgcaaactccgcctcccgggttcacaccattctcctgcctcagcctcctgagtag

SEQ ID NO: 323017 - DNA, 201 bp, Homo sapiens
tatctgttgttaaaaatttttgatattctattttctaaattgagtttttatcgcttttgtataagagaacctaaagggtaaagagttttaaaaatgaggacattgaaaaagggaaagaaaaaagttacaaggcaaagttaaactacttgggtgtgggaatgagctgtccatgaagttcttcataggttcttattaccatct

SEQ ID NO: 323018 - DNA, 201 bp, Homo sapiens
agctttcagtttcaagtaggagcacatgtgtaatcaaatgaatgccattctgcatatcaggagagagattgctgattggcataagaaagttctccagaatmgcttgaacccgggaggcggaggttgcagtgagccgagatcgcaccactgcactccagtctggcgacagagcgagactcacctcaaaaaagacaagaaaag

SEQ ID NO: 323019 - DNA, 201 bp, Homo sapiens
ggctcccgagggcaagtggagctgcccacactgcgtgagtgtctggccattgtggccccttggaacccatgagaagaagggtgggacagtaaagctcttcrgggcctggatggaaatggaaatgctggtgctgcgggttgtgagctttgggaagcattcaaaggaatgatgggcactggcttcagactgcggtgggcgggt

SEQ ID NO: 323020 - DNA, 201 bp, Homo sapiens
ggtgaagctgttagtaatgtgttcctagcttccctggaagagaacctgggtcttcttgtggggtctagagatcagccttcccgtgcagtggtgggctttayctcaaggtggagccatagttattgcctgtgataatgcctcacgaagggatggaaaagaatctaagagtcagcatgatccctatttaactctttctctact

SEQ ID NO: 323021 - DNA, 201 bp, Homo sapiens
actttgctgtatgtccctagctttacatactgggtgggtggcctatcagtgaattcccttgagattgggtggattcctatcatctggaattctgactcctygggtctccttctctaggtagcccagcagcagtgaagatgcagactgataccacctccaccgctgagcagtgaccttcctcactttctcttgtcccagctt

SEQ ID NO: 323022 - DNA, 201 bp, Homo sapiens
catggtgacagccactgaggttgcaccaccacctccccctgtggaggtgcctatccgcaaggccaagaccaaggagggcaaaggtgaaatggggttcaaaygggagtgggggtgtctagtgtgggcttaagatgtcaaagacagcatgggaatgctggtctgtcagccctaaggtaggagataggagggaggaatgagtct

SEQ ID NO: 323023 - DNA, 201 bp, Homo sapiens
ccggccgtgaggctaaaagccaactccatgagggaaggtcggtcaagctcaatggtttcgtcacattgctccctccacccgccgcgggtgtaagctgcgcktctccttcgaattgccccctactcgccgccgccggctccgctggcgttcccagggcgagcgtaagttccgggtgcggcggccgactaggcgcaacaggaa

SEQ ID NO: 323024 - DNA, 201 bp, Homo sapiens
cttcactccttgaatctcttgtgtcttttcagggcagccaagaggagattgggctctgttgaagcccctaagacaaataagtctcctgaggccaaaccatygcctggaaagctaccaaaaggtccgtgaaactaagagctggatgctacatgaggagtccctttgggtcctgggtagggaagaactcgctaaacatttccg

SEQ ID NO: 323025 - DNA, 201 bp, Homo sapiens
tctttttaataccaggaacccagcggctctagccactgagcggctaaatgaaataaagtggaaaaaaaaaaaaaggaaaaaaccaaaagcataaaaaaccmcagcaaatttcttgatgaaaattgaaaataaaagtttccttgtattttagtgctctggttcagtgtgggtgtaggtgcaggtggatgagtgtgtgcggca

SEQ ID NO: 323026 - DNA, 201 bp, Homo sapiens
ttacagcgcccatgctggatgaatcagtcatcatccagctggtggagatgggattccctatggacgcctgccgcaaagctgtctactacacgggcaacagyggggctgaggccgccatgaactgggtcatgtcacacatggatgatccaggtaggctggggtggggagcagggtggggcagggcctccatcctcccccaaa

SEQ ID NO: 323027 - DNA, 201 bp, Homo sapiens; identical to SEQ ID NO: 67688

SEQ ID NO: 323028 - DNA, 201 bp, Homo sapiens
ttggtactggcaagactgcaacaccccaacaggtaaccgggcccaggagccctgccctcatcccagcctgcctcaataggtttggacagacacagcccacrtggggcaaccccttatttcaaagacacagagaccttgaacccagagacagtgacttgtccaagggcatccagtccagggcctggcttggatcagagccct

SEQ ID NO: 323029 - DNA, 201 bp, Homo sapiens; identical to SEQ ID NO: 67689

SEQ ID NO: 323030 - DNA, 201 bp, Homo sapiens
tcccttcccaggctctgtgactggggcaacctgcaaggagctggccagccagcctgatgtggatggcttccttgtgggtggtgcttccctcaagcccgaaytcgtggacatcatcaatgccaaacaatgagccccatccatcttccctacccttcctgccaagccagggactaagcagcccagaagcccagtaactgccct

SEQ ID NO: 323031 - DNA, 201 bp, Homo sapiens
gtctgccttcactggacttgcccagataatcttcctttttgaggcagctatataaatgatcatttgtgcaagaaaaaaaaaaaaacaagaacaggtttctwtaacaacatctcttactatttttacttgaaaaaatgttttgcgtagcagactgtcatagccttgaacgccggctccctttcttcctccctccaagtggct

SEQ ID NO: 323032 - DNA, 201 bp, Homo sapiens; identical to SEQ ID NO: 67692

SEQ ID NO: 323033 - DNA, 201 bp, Homo sapiens; identical to SEQ ID NO: 67693

SEQ ID NO: 323034 - DNA, 201 bp, Homo sapiens
gtatcatttatggaggtgagtggctttggttcccggctgaggtggagtgggctgaggactagactgagccctcggacatggaggtggggatggggcagacycatcccattcttgaccaagcccttgttctgctcccttcccaggctctgtgactggggcaacctgcaaggagctggccagccagcctgatgtggatggctt

SEQ ID NO: 323035 - DNA, 201 bp, Homo sapiens; identical to SEQ ID NO: 67713

SEQ ID NO: 323036 - DNA, 201 bp, Homo sapiens
agagaggcagaaaaggtcttacttaggccagcttcttgttctaggcccaggaagtacacgagaagctccgaggatggctgaagtccaacgtctctgatgcrgtggctcagagcacccgtatcatttatggaggtgagtggctttggttcccggctgaggtggagtgggctgaggactagactgagccctcggacatggagg

SEQ ID NO: 323037 - DNA, 201 bp, Homo sapiens
ccctggtactctgactcagtcagaaaccacactaagtgtccactggtgccagtgatttttcctcttagagaggcagaaaaggtcttacttaggccagcttsttgttctaggcccaggaagtacacgagaagctccgaggatggctgaagtccaacgtctctgatgcggtggctcagagcacccgtatcatttatggaggtg

SEQ ID NO: 323038 - DNA, 201 bp, Homo sapiens
gcccaggaagtacacgagaagctccgaggatggctgaagtccaacgtctctgatgcggtggctcagagcacccgtatcatttatggaggtgagtggctttrgttcccggctgaggtggagtgggctgaggactagactgagccctcggacatggaggtggggatggggcagactcatcccattcttgaccaagcccttgtt

SEQ ID NO: 323039 - DNA, 201 bp, Homo sapiens
agagccctggtactctgactcagtcagaaaccacactaagtgtccactggtgccagtgatttttcctcttagagaggcagaaaaggtcttacttaggccarcttcttgttctaggcccaggaagtacacgagaagctccgaggatggctgaagtccaacgtctctgatgcggtggctcagagcacccgtatcatttatgga

SEQ ID NO: 323040 - DNA, 201 bp, Homo sapiens
cccagagacagtgacttgtccaagggcatccagtccagggcctggcttggatcagagccctggtactctgactcagtcagaaaccacactaagtgtccacyggtgccagtgatttttcctcttagagaggcagaaaaggtcttacttaggccagcttcttgttctaggcccaggaagtacacgagaagctccgaggatggc

SEQ ID NO: 323041 - DNA, 201 bp, Homo sapiens
agagaccttgaacccagagacagtgacttgtccaagggcatccagtccagggcctggcttggatcagagccctggtactctgactcagtcagaaaccacastaagtgtccactggtgccagtgatttttcctcttagagaggcagaaaaggtcttacttaggccagcttcttgttctaggcccaggaagtacacgagaagc

SEQ ID NO: 323042 - DNA, 201 bp, Homo sapiens
agacacagcccacatggggcaaccccttatttcaaagacacagagaccttgaacccagagacagtgacttgtccaagggcatccagtccagggcctggctkggatcagagccctggtactctgactcagtcagaaaccacactaagtgtccactggtgccagtgatttttcctcttagagaggcagaaaaggtcttactta

SEQ ID NO: 323043 - DNA, 201 bp, Homo sapiens; identical to SEQ ID NO: 67696

SEQ ID NO: 323044 - DNA, 201 bp, Homo sapiens
ccctcactttcctcgttgaggggaaagccacagggtgggctccctgctgaaccttggcttcatctcttcctttagccctggcatgatcaaagactgcggasccacgtgggtggtcctggggcactcagagagaaggcatgtctttggggagtcagatgaggttagtagccaagagagaagataagggatgtctttttccaa

SEQ ID NO: 323045 - DNA, 201 bp, Homo sapiens; identical to SEQ ID NO: 67698

SEQ ID NO: 323046 - DNA, 201 bp, Homo sapiens; identical to SEQ ID NO: 67708

SEQ ID NO: 323047 - DNA, 201 bp, Homo sapiens; identical to SEQ ID NO: 67701

SEQ ID NO: 323048 - DNA, 201 bp, Homo sapiens; identical to SEQ ID NO: 67700

SEQ ID NO: 323049 - DNA, 201 bp, Homo sapiens
tactggcaagactgcaacaccccaacaggtaaccgggcccaggagccctgccctcatcccagcctgcctcaataggtttggacagacacagcccacatggrgcaaccccttatttcaaagacacagagaccttgaacccagagacagtgacttgtccaagggcatccagtccagggcctggcttggatcagagccctggta

SEQ ID NO: 323050 - DNA, 201 bp, Homo sapiens
cctccgggagctgctgaggtgacccttttcccacagatgtgtccatcgagatgccagaggagctcgacatctcccagttgaggggcacagggctgcagccyggagaggaggagctgccagacattgccccacccctggtcactccggatgagcccaaaggtagccttggtttctatggcaacgaagacgaagactccttct

SEQ ID NO: 323051 - DNA, 201 bp, Homo sapiens; identical to SEQ ID NO: 67702

SEQ ID NO: 323052 - DNA, 201 bp, Homo sapiens; identical to SEQ ID NO: 67703

SEQ ID NO: 323053 - DNA, 201 bp, Homo sapiens; identical to SEQ ID NO: 67716

SEQ ID NO: 323054 - DNA, 201 bp, Homo sapiens; identical to SEQ ID NO: 67717

SEQ ID NO: 323055 - DNA, 201 bp, Homo sapiens
ttgctggggcaggggtggggagggaggagggggtctcctttactggctccttttggagactacagatggaggcaggagctagaaaggagaaggggacattktgctcagcaccttcctctataatctcctagccaagtttggggccaatgccatcctgggtgtgtctctggccgtgtgtaaggcaggggcagctgagcggga

SEQ ID NO: 323056 - DNA, 201 bp, Homo sapiens
ggctggtctccaactcctgacctcaggtaatctatccaccttggtctcccaaagtgctgggattacaggcgtgagccaccacgcctggctggtttgcttttaattaactttttttttttttttttttttttgtagagacagggtttagccatgttgctcatggctggtctcaaactactgggctcaagtgatctgcatgcc

SEQ ID NO: 323057 - DNA, 201 bp, Homo sapiens
gtcctttgtcctgggagatgttgccgcttggtggagggccaggagggagcccaggagaaggaactggtggtgggctggcggaggtgctggcttcacggccrggagcagactgactgccagaggctacctggagagcaggggagggagaggaagggttgggaggagcctgcagtctgtggtggggactgtctccaccttaga

SEQ ID NO: 323058 - DNA, 201 bp, Homo sapiens
ccgagtagctgggactacaggcgcccgccaccacgcccggctaattttttgtattttttagtagagacagggtttcactgtggtctcgaactcctgacctygtgatcggcccgcctcggcctcccaaagtgctgggattacaagcgtgagccaccacgcctggccaggggacagtcttttacctgcctagccagatgtgtt

SEQ ID NO: 323059 - DNA, 201 bp, Homo sapiens
ttattcctgcatgaacccctcctgaccacactggcaggggcaacatggtggccaacctgggggagctggccaagcttcgagacctgcccaagctgcgagcrttggtgctgcttgataacccatgcacggacgaaaccagctaccgccaggaggccctggtgcagatgccataccttgaacgcctggacaaggaattctatg

SEQ ID NO: 323060 - DNA, 201 bp, Homo sapiens
ggtccctatttacttctgtcttctacctccaggagatcaaagacgctggccttcagacctgatcagactcccaggggcagccaccacatgtatgacagagracagaggatgcctgtttttgccccaaagctggaaattcatcacaacctgaggcccaggatctgctctgtgccggtcctctgggcagtgtggggtgcagaa

SEQ ID NO: 323061 - DNA, 201 bp, Homo sapiens
gagtcttgctctgtcacccaggctggagtgcagtggctcgatctcagctcactgcaagctccgcctcccgggttcacgccattctcctgcctcagcctccygagtagctgggactacaggcgcccgccaccacgcccggctaattttttgtattttttagtagagacagggtttcactgtggtctcgaactcctgaccttg

SEQ ID NO: 323062 - DNA, 201 bp, Homo sapiens
cctgcggctctcccaggggcgggtgggggagggagcatgcaactcatgaggaatgatgggaggaaagtgaattgagggaggtaaagaggaaggatggggaygtgagacttagtccggaaagctgggggaagtttgggatcttgggttaacactcctggggcgggcagggaggggctctttgacccttctgtctttctgtgg

SEQ ID NO: 323063 - DNA, 201 bp, Homo sapiens
ctctgggcagtgtggggtgcagaatggggtgcctaggcctgagcgttgcctggagcctaggccgggggccgccctcgggcaggcgtgggtgagagccaagmccgcgtgggccgcggggtgctggtaggagtggttggagagacttgcgaaggcggctggggtgttcggatttccaataaagaaacagagtgatgctcctgt

SEQ ID NO: 323064 - DNA, 201 bp, Homo sapiens
ctctgtggtggagcaagagaaactggacaacctgatgctggagttggatgggactgagaacaaatgtgagccggggccgggagaaagtggggaagcgtcasggtggggaggcgtggagcagatagagagctgaagggccagtgctgtagtggcttcctcaggaatgactgtcaggggcattctcctctcaaagccagagca

SEQ ID NO: 323065 - DNA, 201 bp, Homo sapiens
ctcctctcaaagccagagcaaggggagatgagtttagctgcagagggaaggaccgacagtaggcagaaggaagaccttctttgcagcatacagaggagggrgatggcctgagagagtctgtggtctcagggatatttagaaagaggtgtggctctctgccgtttccaatctcctcctccccacccattcctctccctgctg

SEQ ID NO: 323066 - DNA, 201 bp, Homo sapiens
aataactccacaggaagccactgaaatatttagtcttttagactcttaagcttcgttattctgggatggtgctgatgccaatcctcagtggtggcctgggkgctcctgggccgggtaggggtgggttgaagcatctcctccatcccaagtggctttgatggggcgaatggtagagggttactgctgacctttctctgggat

SEQ ID NO: 323067 - DNA, 201 bp, Homo sapiens
taagagaattccattcctctgtgttcctagaagatggcctctcctcccagacctggggataaccccaacagcatccccgccacacttccctcaggaacagmcctccacctctgccctgaatgtcttttctttccctcctcctccttgcccatccctcctgcttgtactataatctcactgtattctgtccccagccttgga

SEQ ID NO: 323068 - DNA, 201 bp, Homo sapiens; identical to SEQ ID NO: 67733

SEQ ID NO: 323069 - DNA, 201 bp, Homo sapiens
ccctgtatcgccacattgctcagctggccgggaactcagacctcatcctgcctgtgccggtgagcaataagccaggcctgcggctctcccaggggcgggtrggggagggagcatgcaactcatgaggaatgatgggaggaaagtgaattgagggaggtaaagaggaaggatggggacgtgagacttagtccggaaagctgg

SEQ ID NO: 323070 - DNA, 201 bp, Homo sapiens
tcatgaggtgagggtccctggggtgggagcccctggcccagatggctaaaggccccatttgcctgccagaccatctgtagcaccaagggcctggataacaktccatttcctggataacagtccaacagataatattggtttttgcttcctgggtttattgatggcctgattgacaaatcccagagatcacatgggaaagcc

SEQ ID NO: 323071 - DNA, 201 bp, Homo sapiens
atgactgtcaggggcattctcctctcaaagccagagcaaggggagatgagtttagctgcagagggaaggaccgacagtaggcagaaggaagaccttctttrcagcatacagaggagggggatggcctgagagagtctgtggtctcagggatatttagaaagaggtgtggctctctgccgtttccaatctcctcctccccac

SEQ ID NO: 323072 - DNA, 201 bp, Homo sapiens
tgctggggcaggggtggggagggaggagggggtctcctttactggctccttttggagactacagatggaggcaggagctagaaaggagaaggggacattgkgctcagcaccttcctctataatctcctagccaagtttggggccaatgccatcctgggtgtgtctctggccgtgtgtaaggcaggggcagctgagcgggaa

SEQ ID NO: 323073 - DNA, 201 bp, Homo sapiens
acggttctatttgtttctaagttgggagcctctccgggcggtgcatttttatcctagagcgtcccttttggtttgcatttggggaaatgtcttctctcacygttcctcacctcccccagacttcccttggactcccctctctcctgctcttccccacggcgcccctctccgttcgcgcttcctcccctctgctgcacgggg

SEQ ID NO: 323074 - DNA, 201 bp, Homo sapiens
cgccgtcgccaccgccaccgccaccgccactaccaccgtctgagtctgcagtcccgaggtgaagcccccgccaggcccagagcccctgtggccccctcccytcgccgcggcgcccctgcctcctttacccggtgccgctgcgcacctctccgcatctctggcccggtgcagctgcgcacctgctccgccgcccgcgcccag

SEQ ID NO: 323075 - DNA, 201 bp, Homo sapiens
ctccgcccgccgcccgggagccgcagccgccgccgccactgccactcccgctctctcagcgccgccgtcgccaccgccaccgccaccgccactaccaccgkctgagtctgcagtcccgaggtgaagcccccgccaggcccagagcccctgtggccccctcccttcgccgcggcgcccctgcctcctttacccggtgccgct

SEQ ID NO: 323076 - DNA, 201 bp, Homo sapiens
cattgctcagctggccgggaactcagacctcatcctgcctgtgccggtgagcaataagccaggcctgcggctctcccaggggcgggtgggggagggagcaygcaactcatgaggaatgatgggaggaaagtgaattgagggaggtaaagaggaaggatggggacgtgagacttagtccggaaagctgggggaagtttggga

SEQ ID NO: 323077 - DNA, 201 bp, Homo sapiens
ttcctctatacatctctccccaaccctaggttccctgttcttcctccagctgcaccagagcaacctctcactccccatgccacgttccacagttgccaccmcctctgtggcattgaaatgagcacctccattaaagtctgaatcagtgcactgttgtgtctaaggagtcttactctagtccctatgaggggagagaagatg

SEQ ID NO: 323078 - DNA, 201 bp, Homo sapiens
gaggtctgggggcaggcagggacgtgtcccagcaactctggaccttatggggtgctgactcaggcaccaggtgggggtgtcctaagaagaacctgagaacmagggagagggtgcaggagccacctgcaaagactgggctttgtatgtagtgtaaaaatgcaggtacccgtgaccaatctgttctgtctcagatcctgatta

SEQ ID NO: 323079 - DNA, 201 bp, Homo sapiens
caggtgggggtgtcctaagaagaacctgagaaccagggagagggtgcaggagccacctgcaaagactgggctttgtatgtagtgtaaaaatgcaggtaccygtgaccaatctgttctgtctcagatcctgattaaagtcatgggttctgaaaactactggggtcatggggaaggctctggaaggaaccagggatgatatga

SEQ ID NO: 323080 - DNA, 201 bp, Homo sapiens
atgagtgtgactggatctagcagagaactagaacatttcagtatctttgattgatgaaattgtggatgctgaatggagctgggactgatgtgtgagtagawagaaggctgagggggactgaattagcttctgcaagtctgcccagggcctttatctcaggatggaggcagttggtcgccatcttcctgacacagagcgaaa

SEQ ID NO: 323081 - DNA, 201 bp, Homo sapiens
gacgaaaccagctaccgccaggaggccctggtgcagatgccataccttgaacgcctggacaaggaattctatgaggaggaggaacgggctgaggctgatgwgattcgacagaggctgaaggaagaaaaggagcaggagcctgagccccagcgtgacctggaacccgaacagtcattgatctagcagcagttctagcctcta

SEQ ID NO: 323082 - DNA, 201 bp, Homo sapiens
gtcaggctggtctccaactcctgacctcaggtaatctatccaccttggtctcccaaagtgctgggattacaggcgtgagccaccacgcctggctggtttgmttttaattaactttttttttttttttttttttttgtagagacagggtttagccatgttgctcatggctggtctcaaactactgggctcaagtgatctgca

SEQ ID NO: 323083 - DNA, 201 bp, Homo sapiens
ttacttaggcaaaggtgaggtcccttctcttttccagactctcccccacctcagccttatgcccctacctcacaccagtccccagtcctcctctagcatgscttcccctcctcccattgatcccttccggcccctcctggcccgacccagtccagcctcttcctttccccaggtgtcctgaaggcagtggaccacatcaac

SEQ ID NO: 323084 - DNA, 201 bp, Homo sapiens
gattacaggcgtgcaccaccatgcctggctaatttttgtatttttagtagagatggggttttactatgttagccagggaactcctatcctcaagtgatccrttcacctcagtatcccaaagtgctgggattacaggcatgagccactgtgcctggcctctccatgtaaggttttatgaaataagaatcaggagccaggcgt

SEQ ID NO: 323085 - DNA, 201 bp, Homo sapiens; identical to SEQ ID NO: 67732

SEQ ID NO: 323086 - DNA, 201 bp, Homo sapiens
catcctgcccagctccaaggctaaaataggttctagttctgtatgggtagggcccatttcttttcttgccctccttcccgggtccctgacacctcagccaytttcagttcaaagagcctcatgccccctttccatttctgtgccttttagtttcagtgtgggcatctcatctttcccttttctcctggcgaccctttatgc

SEQ ID NO: 323087 - DNA, 201 bp, Homo sapiens
aatctcactgtattctgtccccagccttggagctggtgaaggaagccatcgacaaggctggctacacggaaaagatcgttattggcatggatgttgctgcytcagagttttatcgtgatggcaaatatgacttggacttcaagtctcccactgatccttcccgatacatcactggggaccagctgggggcactctaccagg

SEQ ID NO: 323088 - DNA, 201 bp, Homo sapiens
aatacaaaaaaaaaaaattagctgcgtgtggtggcaggcacctgtagtcccagctactcgggaggctgaggcaggagaatggcgtgaacccaggaggcggrgcttgcagtgagccgagattgcgccactgcactccagcctgggcaacagagctagactctgtttcaaaaaaaaaaaaagaaagaatcacagtcagaaaga

SEQ ID NO: 323089 - DNA, 201 bp, Homo sapiens
caaggggctcactgtcttggggtgcgtctctccacgcttgcatccagaaccagctgctaggccctgatgagaacgctaagacctacatcgccagccagggytgtctggaggccacggtcaatgacttctggcagatggcgtggcaggagaacagccgtgtcatcgtcatgaccacccgagaggtggagaaaggccgggtag

SEQ ID NO: 323090 - DNA, 201 bp, Homo sapiens
ctcatctcacaggtctccaccctccacgccaggaggggccatctccccacaccccccacagagcctcccccttctccaaaaggcctctactcctcccagargtgcctccccaccaccagcaggcaggttgccccctgctcccaacctccttgtgaactccctcactccctccatacagatgatcccccacccctgctgccc

SEQ ID NO: 323091 - DNA, 201 bp, Homo sapiens
tttcgcgatggacagactcacaacctgaacctaggagtgccccattcttttgtaatttaaatggctgcatcccccccacctctccctgaccctgtatatakcccagccaggccccaggcagggccaacccttctcctcttgtaaataaagccctgggatcactgtgtgtcgcctctgagccctttgcttgcccagtgagtg

SEQ ID NO: 323092 - DNA, 201 bp, Homo sapiens
atctgagacgagagcccaggtctcctgcctctctgccagcccatccgtccatccaacaaatgtttgggccggtgccaggcactcagaacatagagcaggayctgggatgggccacagtgccctgctctgtgcctcatccccacccgaccctccctttccagaacaaatgcgtcccatactggcccgaggtgggcatgcagc

SEQ ID NO: 323093 - DNA, 201 bp, Homo sapiens
tccccaccaccagcaggcaggttgccccctgctcccaacctccttgtgaactccctcactccctccatacagatgatcccccacccctgctgcccacagtmccccgcaagcctcatggcttctgagaccagaatggcctgttagctcaggagggtctgacccaggtgtggtgagtccctggctaacccagaccatcttgcc

SEQ ID NO: 323094 - DNA, 201 bp, Homo sapiens
gacttcaggttaagtaataaaaatttattgagaattcctgggttggtgtttatctcctcccagccttgagggagggaacaacactgtaggaaatcactgaraaatcacgcactgtccccaacagccccagttaacacagggaggaggaaagtaattccccagaaaaggggctagtcttcagtcttccttaatccaagaggg

SEQ ID NO: 323095 - DNA, 201 bp, Homo sapiens
agccttgagggagggaacaacactgtaggaaatcactgagaaatcacgcactgtccccaacagccccagttaacacagggaggaggaaagtaattccccaraaaaggggctagtcttcagtcttccttaatccaagaggggttcagggaaccggtgtgggggaccatcgcatgatactggggcggggtagggctgtgctgg

SEQ ID NO: 323096 - DNA, 201 bp, Homo sapiens
cccaagcagggatgagccggctcccaccctgaacagccagggaggcagggagactggcagccggcgctgcctaccctccatcccctcccctccctgcaccrgctggggctctcaatgtccctcctccctgctgtcctgggacctggtgtctcagagcctaacctaccaccctttccacctaaccccgaggaagccacagaa

SEQ ID NO: 323097 - DNA, 201 bp, Homo sapiens
gctgggctcagctgagggtgggcctggggtctccctgaggtctgtttgcccagggctgggaaaggagagaaacttcctactgcactgctcccctgagtccyctgaccctgtgcccccgcaccctgctgtctcagggctatcctttccctgacgtcagggtttgaaggaaaagggaagtgaagccatgctgagagacgctcc

SEQ ID NO: 323098 - DNA, 201 bp, Homo sapiens
tgagcaagcaaagggtgagaatcgtcctagtcaaggcatgggctgctggcctggggtagtcaaggcatgggctgctggtctggggaggatgcgggcggagratgtggggcgacaaacctggctacgtccgccgggaaaatggggtaggggacgccgggtaccgtccttctaagtggggcgcttgcccccaagacttgggat

SEQ ID NO: 323099 - DNA, 201 bp, Homo sapiens
ttctcactctctccccagaaggagttttgtgttttttccatcacgtggtttcctgtggggctgggctttgtggggctacagtttcctcctgggaaaggggtgtgcttcggggaaagggcttagttctgctttctgccctgacagccccttcaaatccgtttgaaccctgggctccccttcagtgacatcatccagggcacc

SEQ ID NO: 323100 - DNA, 201 bp, Homo sapiens
gctctgggttcgaagcccggttagaactctggaggctaggatggcttgaacctgggaggtcgaggctgcagagagctgtaaccgcgccactgcactccagyctgggcaacagagctctggaagcttgccctagagtcagtcaagggccctaggccagtgagtaacagctcagcgtcagtttcctcatctataaaatggggg

SEQ ID NO: 323101 - DNA, 201 bp, Homo sapiens
agtcccccgcaagcctcatggcttctgagaccagaatggcctgttagctcaggagggtctgacccaggtgtggtgagtccctggctaacccagaccatctygcctcctctccgcccactcccagttgaccacagccgagtgatcctgcagggacgggacagtaacatccccgggtccgactacatcaatgccaactacatc

SEQ ID NO: 323102 - DNA, 201 bp, Homo sapiens
cattttcctgccaggtagcttggccaggcctcccctggtgcagatttcatccttggtttctcagcctggccttgaatgaccctctacagcagggtccccasctctcagaacaactttgctccagccacatggcttgctcacggccaggcactgcccatgtggactctgtgcgtgccacctctttgccctgacccatgttgc

SEQ ID NO: 323103 - DNA, 201 bp, Homo sapiens
atcttcttgtatcaccattgatcttgatctgtatggtttttaatttttttttttttgagacggagtttcactctgttgcccaggctggagtgcggtggcaygatctcggctcactgcaacctccacctcctgagaagctgggattacaggcatgtgccaccacacccggctaatctttgtatttttagtagagttggggtt

SEQ ID NO: 323104 - DNA, 201 bp, Homo sapiens
tgagcacaaagccctaatgtgggaacaaacaaaaaaaggacagtgtgcccgtggcagaggaccctagtggagcggaggcagggccacagcaggttagaccwtgttggagctaggatgttgaaagtgaaaacctgacgagatgaggtggcgcacgtctgtgatcccagcactttgggaggccgaagggggaagattgcttga

SEQ ID NO: 323105 - DNA, 201 bp, Homo sapiens
aaggtgggtcagacgcgggaaggcgggtcagacgcgggaaggcgggagttgggtcgggagagggcgccggatctgtgggcccatgagcggttgtcccctttctcgccacacggcggcagccacaatctgactaacattcttggcactcagagcccagggtctaccctgagcttgtgcgtccgagttgcgttttgtacagta

SEQ ID NO: 323106 - DNA, 201 bp, Homo sapiens
agccgaagctggcttcttgcatgggtgagggtggcagtggttcagggcctgtgctgggccaaggggctcactgtcttggggtgcgtctctccacgcttgcrtccagaaccagctgctaggccctgatgagaacgctaagacctacatcgccagccagggctgtctggaggccacggtcaatgacttctggcagatggcgtg

SEQ ID NO: 323107 - DNA, 201 bp, Homo sapiens
ccgaggtgggcatgcagcgtgcttatgggccctactctgtgaccaactgcggggagcatgacacaaccgaatacaaactccgtaccttacaggtctccccvctggacaatgtgagtggcccccacgccctgccccattccgggagtccctccctggacttgttctcctctctggtcgggtagggtgagatggatgaggtgt

SEQ ID NO: 323108 - DNA, 201 bp, Homo sapiens
cagatttttaatctggctcagcaaagccatggctgtccagccttaaaaaaatgggtgatgtgggagaaatggagggtgtgtgaagagcacagctgggcctsgagaactcagggccagccttcccagcttgggtcctgtttcggagcccaggccttgcttccccttagccgccccagccagattcttttgcgccccctgctg

SEQ ID NO: 323109 - DNA, 201 bp, Homo sapiens
gcccgaccatggggtccccagtgagcctgggggtgtcctcagcttcctggaccagatcaaccagcggcaggaaagtctgcctcacgcagggcccatcatcrtgcactgcaggtgaggatgataatcctgatggtagtagtgacagctgagaagtaaatactgctaagtgccatgagctgttataagcaatataaacgttag

SEQ ID NO: 323110 - DNA, 201 bp, Homo sapiens
ttcggatccagaactcaggggatttctatgacctgtatggaggggagaagtttgcgactctgacagagctggtggagtactacactcagcagcagggtgtsctgcaggaccgcgacggcaccatcatccacctcaagtacccgctgaactgctccgatcccactagtgagaggtgagggctccgcacccccgccattccca

SEQ ID NO: 323111 - DNA, 201 bp, Homo sapiens
gagctggattcggtcacggtgcagccctgtggcccacctgggaggcctcctttcctggatcggcctccttcaaggccttccctctctctgtgagcctcacrtggctggctccgtgtctgccccctgcccttcctcttccccaccgcaacactcagggggcttttggcaccgagaccctctaaagctcatgtcctctctttc

SEQ ID NO: 323112 - DNA, 201 bp, Homo sapiens
agccctctccggatgtaccatctcgcccaaccctgccaaatacagaggaggagcccgggacccagttgctggccaggcccaagctagtcagggcaaggccrggcaggcacccacagtaggcctgtgtcccggctgctccgctttctctcgaggtcccattctgttggtttcttctcccaggaacatctatgaggcatgtgc

SEQ ID NO: 323113 - DNA, 201 bp, Homo sapiens
cgtccatccaacaaatgtttgggccggtgccaggcactcagaacatagagcaggacctgggatgggccacagtgccctgctctgtgcctcatccccacccraccctccctttccagaacaaatgcgtcccatactggcccgaggtgggcatgcagcgtgcttatgggccctactctgtgaccaactgcggggagcatgaca

SEQ ID NO: 323114 - DNA, 201 bp, Homo sapiens
ccagactcaggtcccacgttcttggtgataccccacagtgtggccacatctctcacctggtgaaactttcatcctgtaggttcagcacaaggttgtcagcygtgagatagatacgattctgtgatgtggcgatctacagggcaggaaataagacagatgcttgcattaagcaaagacctcaattccgacccctgcaattca

SEQ ID NO: 323115 - DNA, 201 bp, Homo sapiens
cctgtctgtgaccacagtgtgggtggcagggagggtctgcctgggcttgaattcaaggctggggacccagggagggagactcaagtcctgtgaatggcctmatttggctccccccagggtggacgctacacagtgggtggtttggagaccttcgacagcctcacggacctggtggagcatttcaagaagacggggattgag

SEQ ID NO: 323116 - DNA, 201 bp, Homo sapiens
agccatgaagaatgcccatgccaaggcctcccgcacctcgtccaagtgagtggccctgactgccaccgcccggcatccacccctttgtcctgcccagcccratcctcactttctggagaggacaagtgttgcagctggggggacctggcttcaagttcaggcttggttctcaccccttctgttcataagcatttcctgagt

SEQ ID NO: 323117 - DNA, 201 bp, Homo sapiens
gggcacgggtggggcaatcacctgtcgggcccaggtcccctctcccagcaacgccctttctatacaagccgcagctgcacaaaggcaagtcccacctcctytaaccgcccttgggctacctgcccttggggtgggacttggactccactgagggctgtgctgtgaggtgggtccgggagcagctcggtccggagagtggag

SEQ ID NO: 323118 - DNA, 201 bp, Homo sapiens
tcggatccagaactcaggggatttctatgacctgtatggaggggagaagtttgcgactctgacagagctggtggagtactacactcagcagcagggtgtcstgcaggaccgcgacggcaccatcatccacctcaagtacccgctgaactgctccgatcccactagtgagaggtgagggctccgcacccccgccattcccaa

SEQ ID NO: 323119 - DNA, 201 bp, Homo sapiens
ggccacatgtctggcgggcaggcagagacgctgctgcaggccaagggcgagccctggacgtttcttgtgcgtgagagcctcagccagcctggagacttcgwgctttctgtgctcagtgaccagcccaaggctggcccaggctccccgctcagggtcacccacatcaaggtcatgtgcgaggtaaggcagccaggcggcggg

SEQ ID NO: 323120 - DNA, 201 bp, Homo sapiens
gggagactcaagtcctgtgaatggcctaatttggctccccccagggtggacgctacacagtgggtggtttggagaccttcgacagcctcacggacctggtrgagcatttcaagaagacggggattgaggaggcctcaggcgcctttgtctacctgcggcaggtcaggggtgggcccagctgcctccccacttcccctgagc

SEQ ID NO: 323121 - DNA, 201 bp, Homo sapiens
cgaggaggaagtggctgattactgagcggttcttcctcacctggcttgggccactgtgcacagctgtgccgctggctcagccccgccccctgcggccctcygccgtggcttccccctccctacagagagatgctgtcccgtgggtaagtcccgggcaccatcggggtcccagtctcctgttagttttggagggagggaggg

SEQ ID NO: 323122 - DNA, 201 bp, Homo sapiens
agctgtaaccgcgccactgcactccagcctgggcaacagagctctggaagcttgccctagagtcagtcaagggccctaggccagtgagtaacagctcagcrtcagtttcctcatctataaaatgggggtaatatcatacctagctctcagcatgtttgtgagagacctaaatgaggtggtggatttggaagcatgtagcgc

SEQ ID NO: 323123 - DNA, 201 bp, Homo sapiens
gaggcgcagtacaagttcatctacgtggccatcgcccagttcattgaaaccactaagaagaagctggaggtcctgcaggtgcgtgcagagcagggcctggsgggggggggggctgcagtgcaggatgggtgccacctggccctgctgggaccaccaccttcccactgtccctctgcccacagtcgcagaagggccaggagt

SEQ ID NO: 323124 - DNA, 201 bp, Homo sapiens
aggagtcggagtacgggaacatcacctatcccccagccatgaagaatgcccatgccaaggcctcccgcacctcgtccaagtgagtggccctgactgccacygcccggcatccacccctttgtcctgcccagcccaatcctcactttctggagaggacaagtgttgcagctggggggacctggcttcaagttcaggcttggt

SEQ ID NO: 323125 - DNA, 201 bp, Homo sapiens
gtattatctgggcctggagtgtgcaaggcacacatgtgtccttactgcatgtgttgtcacatatgtgcaatgccatgctcctgagcctttgattgcagacrtgtgggaagtgggccccgtccccacccccagtgccaccctgctctgcttctcttcccttgctgtgctctaaaacgagaagtacaagtgagttcccccaag

SEQ ID NO: 323126 - DNA, 201 bp, Homo sapiens
actgtaggaaatcactgagaaatcacgcactgtccccaacagccccagttaacacagggaggaggaaagtaattccccagaaaaggggctagtcttcagtyttccttaatccaagaggggttcagggaaccggtgtgggggaccatcgcatgatactggggcggggtagggctgtgctggacccctggctggctcctcaaa

SEQ ID NO: 323127 - DNA, 201 bp, Homo sapiens
tgaccacagccgagtgatcctgcagggacgggacagtaacatccccgggtccgactacatcaatgccaactacatcaaggtcagcagtgtgggccacgtgrgaggagaggctgggccctgggaattccctgtctggtggggggaccctagatccagagacagctgggcaaagccgaagctggcttcttgcatgggtgaggg

SEQ ID NO: 323128 - DNA, 201 bp, Homo sapiens
atgagaacctgcacactaagaacaagagggaggagaaagtgaagaagcagcggtcagcagacaaggagaagagcaagggttccctcaagaggaagtgagcrgtgctgtcctcaggtggccatggtacagctcttctgcctgggtgtcctccctgccctgccctgtgtccttggctccactgccttccctgggtggatgggg

SEQ ID NO: 323129 - DNA, 201 bp, Homo sapiens
tagttcttccactctgcctttgttccactttggacctccttgtgtttgtctgactcagttcccaggcttggatcccttcacccaaatgcatggtttgcccyaaacctgccttctggtgacaccttcctcttctctgccctccagcctctgcctcggtgcaccctctcattgaccccctggcctcagggtctcaccttaccc

SEQ ID NO: 323130 - DNA, 201 bp, Homo sapiens
ccctcatcaattgtggagttcctttatatcccatcttctctccaaacacatacgcagcagtgttacagctcttttagaatttgtctagtaggctttctggytttttaccggaaagcccctcttatgatgtttgttgccaatgatagattgttttcactgtgcaaaaattatgggtagttttggtggtcttgatgcagttgt

SEQ ID NO: 323131 - DNA, 201 bp, Homo sapiens
tttacaataagttgtgtcccaaaggggtggtattagaattcttttgatggcaagtggcagaaacacaattccaactgccttaagttaaaaaaaaaaaaaaagcatttggctcatataagtgacaagtacttaagtacagccacatccaaaggttcatgtgaggttggcaagatttagcccctcttcacttttggctctgct

SEQ ID NO: 323132 - DNA, 201 bp, Homo sapiens
caaaaggagaaggtatatgacgatgggcttccagtagatgcttggtgtccccttatctctcagtcttccatttccttgttctgtggtctaccacttaattycaatgcactctctcaccctcttggtttcctttgtttgttttccaattgccctcccctctccccagggaagatcttagatcctcagccacaaatggctggg

SEQ ID NO: 323133 - DNA, 201 bp, Homo sapiens
ggcatgagaactatgtgacgaatgcacaagcctcagtagccaatacaatcaactggaagaaagggtatcagcaatggaagacgaaatgaatgaaatgaagygagaagagaagtttagagaaaaaagaataaaaagaaatgaacaaagcctccaagaaatatgggactatgtgaaaagaccaaatctacatctgattggtgt

SEQ ID NO: 323134 - DNA, 201 bp, Homo sapiens
aaatgtatacacgtaaaaagtaaaaagtgagtccatgtagcgaagtatacaaaataaagaagaatagtgcaggtgcaggcagagctgacagaaacaatgakacttaaatgactaaagattgagaaatactgacctatattatttcaccaaatccccataacaacctgggaggtttgcagatgaggaacttgacctcataga

SEQ ID NO: 323135 - DNA, 201 bp, Homo sapiens
gagtagaagttgaatctatcaccttgcctggggcttcttttgacccttctctgtagcccttaagatattggggcaaagtcacccctgaaagataccagttwgtaatttttgtttgtttatttttggtctgttttgttgctttttcatatcatttaggtattggctggacttgaagtcctcagatatcatatggaatatgtc

SEQ ID NO: 323136 - DNA, 201 bp, Homo sapiens
agcatttccttgtatagctttggagacaacgaaggtgggctggaatttctgctgcttgctagatggatggctttttgataagttgcttacctctctgtacytcagtgaccttatgcatgaaacaataaatcgtatatacagaaaataaaatgcctgcttcctagcactgttgacatatattatatggaagtatttaacatg

SEQ ID NO: 323137 - DNA, 201 bp, Homo sapiens
catcatccagacacttactacttatcccatcacgaccctgtgcagtcctcccactgtgtaccggatgctcgtgcaaaaagaccttaagaggtacttgggcrgaaatctccatttgaaccacaaacaatagctaccatccaggatcacagatctctctttttcagcataggatagctcaggctttctcagtcttaccaccac

SEQ ID NO: 323138 - DNA, 201 bp, Homo sapiens
gtgtgtgaataaaagctcttcacctgttattttgctaaatggtctgacaagatggtttaaggcagcagtctgcaacctttttggtaccagggactggattygtggaagacaattttcccatggactagggggagcggggagataatttcaggatgattcaagtacattacatttattgtgtactttatttctattattatt

SEQ ID NO: 323139 - DNA, 201 bp, Homo sapiens
ctcaggaggctgaggtgagaggatcactagagcccaggaggtcgaggctgcaggctccagtctaggcaacagagagagactctgtctcaaaaaaaaaaaaatttcctatataagtaggatgtgtaatgtactagtcacttaatgagtgccatacccatctctgttctgaccagactaatccccaaatgtcatccttggttc

SEQ ID NO: 323140 - DNA, 201 bp, Homo sapiens
atacctcaccttgccagtagttaccaaaacttgcagattgctcagttaggttttgatgaaggagaatgatgattattccatcattcctgcctcccccttakgcaggataaatctcagaggcgttagcgggtgggtgaggttcagaactgagcagctcatctttccactgtgctgggaataatcctctgagagcgtccatgg

SEQ ID NO: 323141 - DNA, 201 bp, Homo sapiens
caccttcctagacgtaagtcatgtcctccagctagatagatctttagagttcttccttgtttcccataaaatcacaaagaaattattccttagaatacaargcttcttgggcttttggaaatcatttctttatacaaagcaaagtctcaagggcctcagcttttgaaacgtatttgacagaatggagggggaacaactgca

SEQ ID NO: 323142 - DNA, 201 bp, Homo sapiens
acatgttgtctatgtaacaacagcagagtggagtagttacaacagaaactgtatggcccacaaagcctaagctacttgctatctgcccctttacagaaaamgtttggcaacccctgccctaaaccataagttctaagaaagcagagactttgtttggttgatcttcctgtctccagttcctaacacataaatggtgcttaa

SEQ ID NO: 323143 - DNA, 201 bp, Homo sapiens
gtttggttgatcttcctgtctccagttcctaacacataaatggtgcttaatatttataaatgaatgaacaaaagagatcacaactgcagttttcctcatawgtaaaatgggaataattatactgtacttatctcaagtgttgttttgagggtaaattaaatgaatatgtgagaaagtgtttttcaagctgtgaaaaaatga

SEQ ID NO: 323144 - DNA, 201 bp, Homo sapiens
ctttaagtcctacaacccagagaaattaactcttgaacttcaggatcatgtgaaaaaatcaactgcaccttacaaatatccaagaaaggcaagtgctttgyccaaaagttaagtttggatgttaccaaactagggtctaagctagaattagattttactggattttgattttatagtagctcattatataggtagaagaca

SEQ ID NO: 323145 - DNA, 201 bp, Homo sapiens
tccacaaagctggaatgggtggctcagcttccaggagttatttcagtgagtatttttcccagccaatctacactgctggcaacaacacaaattatagctayatcttggaatctctttgcctccaaggactcaggaacactgtcagttgatctgggctcttactcagaaaagaattacctaatagctgggtgcggtggctca

SEQ ID NO: 323146 - DNA, 201 bp, Homo sapiens
atgaccatttatttcaccagtgggaccacaggctttcctaaaatggcccagcactctcagagcagcctcggcattgggttcaccctctgcggaaggtaggraagaaaattcagtttgtttttggtgaactcccccaaagctgcgaatatgcgtatccaactaactgatacttctccttgaattgctataagatattggcaa

SEQ ID NO: 323147 - DNA, 201 bp, Homo sapiens
acctacacggcccttctgtttcttctctaaatatgtggtatgaggatagaaagtgctggtcatgcttaatacagacttgggttcaaatttcatttccaccrtgtcttgctatgtaatcttgggcaagcaacaaaatctttcacaactgtaaaatggggagactatcatctgtcacccaagagtactgtaaagatgaaattc

SEQ ID NO: 323148 - DNA, 201 bp, Homo sapiens; identical to SEQ ID NO: 67798

SEQ ID NO: 323149 - DNA, 201 bp, Homo sapiens
aacttctctctttaatctaattcggccatgtatgttcttcccagaatgaactggtactttaaaatcagacatctccagccagtgtttaggatgaaatgagraggtgagataaactaagcattgccaaagtagtctaggcaaaccttgatgatgccagaccactggaatccatagagaagagggctggctctgccactcacc

SEQ ID NO: 323150 - DNA, 201 bp, Homo sapiens
cttgaaaagacccatgcaactctgtctctccagatataaattcaagagtctgcggcactgcttgaccggaggggagccactcaacccagaagtgctggagyagtggagggtgcaaactgggctggagctatatgagggctatggacagacggaagtggtatatctaaagggcatttatgtttagtatatgtgggggccttt

SEQ ID NO: 323151 - DNA, 201 bp, Homo sapiens
tcaagtgacctcatttagtgttcagaagaagatgatatccaaagaaactatggaatctttcctgaaaccttcttcaaagaaggatttaagaacaatactaygtaaatacatgaagatggccctgtagtttccttctaaccatggaactgggtgataattactgatcctctgcatgagatttctgtttagcactgtttcagt

SEQ ID NO: 323152 - DNA, 201 bp, Homo sapiens
gccctcaaaccaagcaacatcaacatcatctaggtagatttggtagaaataccaaattcttagaccccattccacacctaatgaatcagaaactctgggayaaggcccatcaatctgtgtttcaacaatgttccagaatttcaaatttgattctactgcacaccgaagtttgagaactactggtttcaaataatatatttc

SEQ ID NO: 323153 - DNA, 201 bp, Homo sapiens
ttcaactgagcccctgaagtgcccccatcccactgtaaatttttatagagtttcccgggatacctcaccttgccagtagttaccaaaacttgcagattgcycagttaggttttgatgaaggagaatgatgattattccatcattcctgcctcccccttatgcaggataaatctcagaggcgttagcgggtgggtgaggttc

SEQ ID NO: 323154 - DNA, 201 bp, Homo sapiens
gaccgcctgggattctgaaaatgcccttaagaagagtagaagttgaatctatcaccttgcctggggcttcttttgacccttctctgtagcccttaagataytggggcaaagtcacccctgaaagataccagtttgtaatttttgtttgtttatttttggtctgttttgttgctttttcatatcatttaggtattggctgga

SEQ ID NO: 323155 - DNA, 201 bp, Homo sapiens
accgcctgggattctgaaaatgcccttaagaagagtagaagttgaatctatcaccttgcctggggcttcttttgacccttctctgtagcccttaagatatwggggcaaagtcacccctgaaagataccagtttgtaatttttgtttgtttatttttggtctgttttgttgctttttcatatcatttaggtattggctggac

SEQ ID NO: 323156 - DNA, 201 bp, Homo sapiens
tgcagatgtgctggaccagtggtcccaaaaggagaaggtatatgacgatgggcttccagtagatgcttggtgtccccttatctctcagtcttccatttccytgttctgtggtctaccacttaatttcaatgcactctctcaccctcttggtttcctttgtttgttttccaattgccctcccctctccccagggaagatctt

SEQ ID NO: 323157 - DNA, 201 bp, Homo sapiens
gaagcaagttaccaagaaaaccatgttaatattttatgaaactatttttaaataatcctcactgttggctggagatggtggctcatgcctgtaatcccagyactttgggatcccaaggcaggcagatcacataagatcaggagttcaagaccagtctggctgacatggtgaaacctcatctctactaaaaatacaaaaatt

SEQ ID NO: 323158 - DNA, 201 bp, Homo sapiens
tacagggacagtctcccctgaagcacttgattgcctgatacttgaacaaaatcagttctatgagtgcaaggaagaaggagacagctatttggtaagcaacyagctgcgtctgccgcagatattgaagatactgaacaaaaattatttaaaagtttgaatcaaatgccaaacgatcttcctttaaataataaaaactcctga

SEQ ID NO: 323159 - DNA, 201 bp, Homo sapiens
tgctataagatattggcaattataatagctacaaaacagaactcttgctggccccgcccaacctagctcagtaaatggcagcatctaaccagctgattaarcaaaagcttaagaatcaaccttaattaatcccttaacagcatgtctggctcccttttctcattgccaggaaggcctacccagaaaggccttcctaaaaga

SEQ ID NO: 323160 - DNA, 201 bp, Homo sapiens
aagattgataagtaggtaggtaggtagataggtagataggtggatggatgaatagatagatgaaagataggtaggtagatagatgatagatagatagatadatagacagatagatagatgatagatagagagatagatgccttctatcaaaaggtttccatactggattgagaaatgtttaaacataagaggtctccccac

SEQ ID NO: 323161 - DNA, 201 bp, Homo sapiens
gacagatagatggacagatgaaagattgataagtaggtaggtaggtagataggtagataggtggatggatgaatagatagatgaaagataggtaggtagayagatgatagatagatagatagatagacagatagatagatgatagatagagagatagatgccttctatcaaaaggtttccatactggattgagaaatgttt

SEQ ID NO: 323162 - DNA, 201 bp, Homo sapiens
gagccgagtttataccactgcactccagtctaggtggcagagtgaaactttgtctcaaaaaaataaataaataaataaataaaataaaagaaaagaaaaakaaaagtattacctaataaatgaatttaagggcagaagaaaggcacgtagctctgcctcccctctcctgctctctactgtggcctatgatgagtatcctgt

SEQ ID NO: 323163 - DNA, 201 bp, Homo sapiens
cccccttatgcaggataaatctcagaggcgttagcgggtgggtgaggttcagaactgagcagctcatctttccactgtgctgggaataatcctctgagagygtccatgggaaattgagtccaaggtgcatttaacggagtccaaggagtggttttcaaagtgtggccctcaaaccaagcaacatcaacatcatctaggtag

SEQ ID NO: 323164 - DNA, 201 bp, Homo sapiens
gtttcttctctaaatatgtggtatgaggatagaaagtgctggtcatgcttaatacagacttgggttcaaatttcatttccaccgtgtcttgctatgtaatyttgggcaagcaacaaaatctttcacaactgtaaaatggggagactatcatctgtcacccaagagtactgtaaagatgaaattccaaatgtaagaaaccag

SEQ ID NO: 323165 - DNA, 201 bp, Homo sapiens
agattatagatgaaaatggcaatgttctaccacctggcaaagaaggggaaattgccctcagactcaaacctacacggcccttctgtttcttctctaaataygtggtatgaggatagaaagtgctggtcatgcttaatacagacttgggttcaaatttcatttccaccgtgtcttgctatgtaatcttgggcaagcaacaaa

SEQ ID NO: 323166 - DNA, 201 bp, Homo sapiens
gctgaggtagctgaagaatggattgtgatgcttctcctcaccgaggcacaaagcccaagtcttccacaatggacagcagttctgttcagtgcagggccctytgtccttcccagggatcatcttcatgccgggaacaatccagctgacagcaaaagacatcctctaccggctgcgagcatccaaggccaagtgcattgtggc

SEQ ID NO: 323167 - DNA, 201 bp, Homo sapiens
ataggcttgtccatcctcttttgccaccaaagtgtggttgcccaagagggaaagtgctatgcgagacagaataaagcaaacatggatcttctcttttcctwgtcagtgtcaactcctttgctcctatgtcacggcctttgaaacatcagcatcttgttcacatttcaagagtaattcagggactattcaatgattattttg

SEQ ID NO: 323168 - DNA, 201 bp, Homo sapiens
agccacttggagggaggaagaaagggagccggcgttcaaggctatgacagtctgctacgcaaaacattttttcaagtaaaaatagtaagagatgttgttawagaaacctgttcttgtttttttttttttcttgcacaaatgatcatttatatagctgcctcaaaaaggaagattatctgggcaagtccagtgaaggcagac

SEQ ID NO: 323169 - DNA, 201 bp, Homo sapiens
aggaagatacagtttggatgaggccacaggaaggagcagatgacaccatcagaagcatatgcagggaaagggcagttactgggcttctgggctgcttagtycctggcttggcaggaagggtagggaagatggatggggctcattgtttggcattgatgatgtccacgaattcgggcttgagggaagcaccacccacaagga

SEQ ID NO: 323170 - DNA, 201 bp, Homo sapiens
agggcagttactgggcttctgggctgcttagtccctggcttggcaggaagggtagggaagatggatggggctcattgtttggcattgatgatgtccacgarttcgggcttgagggaagcaccacccacaaggaagccatccacatcaggctggctggccagctccttgcaggttgccccagtcacagagcctgggaaggga

SEQ ID NO: 323171 - DNA, 201 bp, Homo sapiens; identical to SEQ ID NO: 67800

SEQ ID NO: 323172 - DNA, 201 bp, Homo sapiens
caccttggccgcgttcagagtgccgatgagctcccccagactctgcttccgcccgttcatcttccagtttcccccaacgaagaacttcctggagggcgccwtggcgctggagccgaggcgctgaaggtcagtgtctgcgcgcagtcgcggccactgcccacttatatagagcgccgcgaagtggaactccgcctcctcgcc

SEQ ID NO: 323173 - DNA, 201 bp, Homo sapiens
cctccatgtccgagggctcagtctagtcctcagcccactccacctcagccgggaaccaaagccactcacctccataaatgatacgggtgctctgagccacygcatcagagacgttggacttcagccatcctcggagcttctcgtgtacttcctgggcctagaacaagaagctggcctaagtaagaccttttctgcctctct

SEQ ID NO: 323174 - DNA, 201 bp, Homo sapiens; identical to SEQ ID NO: 67805

SEQ ID NO: 323175 - DNA, 201 bp, Homo sapiens
aacaagggcttggtcaagaatgggatgagtctgccccatccccacctccatgtccgagggctcagtctagtcctcagcccactccacctcagccgggaacyaaagccactcacctccataaatgatacgggtgctctgagccaccgcatcagagacgttggacttcagccatcctcggagcttctcgtgtacttcctgggc

SEQ ID NO: 323176 - DNA, 201 bp, Homo sapiens
gggcggggccgcgggacgggctcggcccaagggaggagctgggggcggaagcggccggcggtctgcgccctgcgcgcctcggcttctttccgcccggctcyttcagaggcccggcgacctccagggctgggaagtcaaccgaggttcgggggcagcggcgagggctccgggcgagtaagggggatggtccatgctgaggcc

SEQ ID NO: 323177 - DNA, 201 bp, Homo sapiens; identical to SEQ ID NO: 67808

SEQ ID NO: 323178 - DNA, 201 bp, Homo sapiens; identical to SEQ ID NO: 67810

SEQ ID NO: 323179 - DNA, 201 bp, Homo sapiens
ttggaaaaagacatcccttatcttctctcttggctactaacctcatctgactccccaaagacatgccttctctctgagtgccccaggaccacccacgtggstccgcagtctttgatcatgccagggctaaaggaagagatgaagccaaggttcagcagggagcccaccctgtggctttcccctcaacgaggaaagtgaggg

SEQ ID NO: 323180 - DNA, 201 bp, Homo sapiens
atgccatcaaagcgttaattctgagatgggcctgcccgggtgcggactctgccgcagcaagagaagggttaactgccccgggccttcgccgtgggggcggrgcctcggggagggtcacagcccgggactgagacccgaggttaaccgcccggggtgggctccacgggggcggggcatgctctccgcggctgctgccggtat

SEQ ID NO: 323181 - DNA, 201 bp, Homo sapiens
ggaaggcgggagtcgttcaggttgccgaagggaaggggtcagatctgggggctcagggagcccgagcagctcggcgcggggacgcggacgccggcgaggarggggaggagtctggggctacgtgcggcggcgcacggcgcgggaggccagggcgcagggagcgggaagcccacgcggcccagcctcccccggtctcccgca

SEQ ID NO: 323182 - DNA, 201 bp, Homo sapiens
gcttccgcccgttcatcttccagtttcccccaacgaagaacttcctggagggcgccatggcgctggagccgaggcgctgaaggtcagtgtctgcgcgcagycgcggccactgcccacttatatagagcgccgcgaagtggaactccgcctcctcgccgtcctccgccatggcccgcccagtcccccggagccctgcccccc

SEQ ID NO: 323183 - DNA, 201 bp, Homo sapiens
ttcagccaggtgggcacactcgaagcaggaaagcagaaaggcatctgagtaggaccccgtagtttgaggacatctggctggtggctgcacccatacttacmttcccctccttctctctcccagcggagccacactcccttctgcacctgagccgcctgtgtgtgcgccacaacctgggggatacccggctcggccaggtgt

SEQ ID NO: 323184 - DNA, 201 bp, Homo sapiens
tgggagaggatgcacaaagctacacccacgcgcacaaacgagacccctccctccacaccagggggctgggcggggcgacacagagaagcagagcactgtgrattccgggggcaggggaagcaacaaagtctccttacagacaggtggccggcccctcccgtccccgtcctgctccatccccagagtctatcgctgcccctc

SEQ ID NO: 323185 - DNA, 201 bp, Homo sapiens
gtacccaggctgtataccggattccctgggctctaacctgtctctgtgccacatacctacttccttcctcagccacacctcaggatggagacactggggcyctgggcaccagggaggagagcagtggaggaggcagggccttagggtggggcagcaggggaggagcctccccaggaactgactgggtccagggcttggagc

SEQ ID NO: 323186 - DNA, 201 bp, Homo sapiens; identical to SEQ ID NO: 67801

SEQ ID NO: 323187 - DNA, 201 bp, Homo sapiens
ggtttgatgtacaggtccaaaagaaggatgggcagagccaggtacccaggctgtataccggattccctgggctctaacctgtctctgtgccacatacctayttccttcctcagccacacctcaggatggagacactggggccctgggcaccagggaggagagcagtggaggaggcagggccttagggtggggcagcagggg

SEQ ID NO: 323188 - DNA, 201 bp, Homo sapiens; identical to SEQ ID NO: 67802

SEQ ID NO: 323189 - DNA, 201 bp, Homo sapiens
aggagaggtgaggcctggggcagacgtggggagaactttctgtccctggtggcagtggtttgggatggaaactcttctgacaagagcagaggggatggacyttcatccagcctgcctcaacctctgttcagtgctgggaaaggctaggggtcttcacagctgttatttaatttaacccaacagcaatagaggtgaaacagg

SEQ ID NO: 323190 - DNA, 201 bp, Homo sapiens
gcaggaaagcagaaaggcatctgagtaggaccccgtagtttgaggacatctggctggtggctgcacccatacttacattcccctccttctctctcccagcrgagccacactcccttctgcacctgagccgcctgtgtgtgcgccacaacctgggggatacccggctcggccaggtgtctgccctgcccttgccccctgcca

SEQ ID NO: 323191 - DNA, 201 bp, Homo sapiens; identical to SEQ ID NO: 67804

SEQ ID NO: 323192 - DNA, 201 bp, Homo sapiens
tggcccctggaagtgctctccacactctctgcccataccccaaatccacagcccagccaccatgtgccttaagggagcttcacaacctcacaagggtcacrgaccctattatgtcttcagatcctccagtacctttacaaccaccctccacccattccagggaggcagggggttggtaaactttttctggcaagggccaga

SEQ ID NO: 323193 - DNA, 201 bp, Homo sapiens
tgaggacatctggctggtggctgcacccatacttacattcccctccttctctctcccagcggagccacactcccttctgcacctgagccgcctgtgtgtgygccacaacctgggggatacccggctcggccaggtgtctgccctgcccttgccccctgccatgaagcgctacctgctctaccagtgagccctgtgatacca

SEQ ID NO: 323194 - DNA, 201 bp, Homo sapiens; identical to SEQ ID NO: 67809

SEQ ID NO: 323195 - DNA, 201 bp, Homo sapiens
atctgggaggcagaacttccgggtatctcaaattcccctttcagccaggtgggcacactcgaagcaggaaagcagaaaggcatctgagtaggaccccgtaktttgaggacatctggctggtggctgcacccatacttacattcccctccttctctctcccagcggagccacactcccttctgcacctgagccgcctgtgtg

SEQ ID NO: 323196 - DNA, 201 bp, Homo sapiens
ccagtttcccccaacgaagaacttcctggagggcgccatggcgctggagccgaggcgctgaaggtcagtgtctgcgcgcagtcgcggccactgcccacttmtatagagcgccgcgaagtggaactccgcctcctcgccgtcctccgccatggcccgcccagtcccccggagccctgccccccgcccgccctcctgccgccg

SEQ ID NO: 323197 - DNA, 201 bp, Homo sapiens
tccgcccgttcatcttccagtttcccccaacgaagaacttcctggagggcgccatggcgctggagccgaggcgctgaaggtcagtgtctgcgcgcagtcgyggccactgcccacttatatagagcgccgcgaagtggaactccgcctcctcgccgtcctccgccatggcccgcccagtcccccggagccctgccccccgcc

SEQ ID NO: 323198 - DNA, 201 bp, Homo sapiens
gtggccaaaaaacaaggagttaaaggactattttcctgcctttttgttagttttttttttttttttttggagacggagtcttgctctgtcacccaggctgkagtgcagtggtgcgatcttggcttactgcaacctctgactcctgggttcaaggaattctcctgcgtcagccttcagagtagctggaattacaggcatgcg

SEQ ID NO: 323199 - DNA, 201 bp, Homo sapiens
tcaagcatttgtttaaacgagtagtccctaaattctgctacatattagatcacctgggcaacttacaaacatctcagtgcttaggttgtgccctgtctcarttaaatcagagtgtttggcgtcaatattttttaacgatccttgggcatttctactgtgcagcagtttgggaactgctggtttaaaaacttatatccaatg

SEQ ID NO: 323200 - DNA, 201 bp, Homo sapiens
accctacacgacatagctaggagccatggggaggttacagggagacagattccaactcaataccaatggctgagtaaccctcagagtggtggagattgcarggcctgtcagagtggttggactctgggtcttggccctccacacaagtcttgggtagcttggtctgtgaataatgagctcttagtgctggaaatggccaag

SEQ ID NO: 323201 - DNA, 201 bp, Homo sapiens
tttctagtaagagcagctgctgagtctaagcagactcttgactgaactagagggtatggctaacttgtcctggcctcagtgtgcagcctctacatcttgtytcctattatctgctgaggctgggataggttgcagatcatggggccctggccttctctgactttctgttgctctacataagtgggatggctgacttctcct

SEQ ID NO: 323202 - DNA, 201 bp, Homo sapiens
  misc_feature (1)...(201): n = A,T,C or G
tttggattgatcaaggatgttgctcgcttccgacctgagctcaaggtcctggtggcttcagccacaatggacactgcccgtttttccaccttctttgatgncgcccctgtgtttcgaatccccggacgcaggtttcctgtggacatcttctacaccaaggtgccccctcagggaggatgggcttaagtctgtggcagaaaa

SEQ ID NO: 323203 - DNA, 201 bp, Homo sapiens
tttatgccaatctgccctctgacatgcaggcccgtatcttccagcccacaccacctggggcacgaaaggtcagttggagaaacccacactcttcacccctrtgcttcccacaactagtagtgaaaaagctgtgtgcctgccccatgcaaggtgagtcctgcgcactgctgcacacagctgaggagcagccagtcccttgtt

SEQ ID NO: 323204 - DNA, 201 bp, Homo sapiens
tccagcctgggtgacagtgcgagactccatctcaaaaaagaaaaatggctgagaagtcatcagaggaaggcccaaggtatgtttgaggtcagagtgtgagmtagtaggcttagtgggaggttcatgtggtgaaggagtaggagacaaggctaaaaacaatttggggctaagattagggagggcctttgatgacaggaaagt

SEQ ID NO: 323205 - DNA, 201 bp, Homo sapiens
gggagtggagaaggagcctcctgagtccgacctccggcctcctcacaggggtgagcgcgccccagagccggcttcgtgaaggggaaaggaggccggggcgrgggggtagggggggaaggggctgagggagggaaacggagatgtcccgcgcttgcgcactgcaggctcgagggaagcggctgaagcgctctgtcggctgta

SEQ ID NO: 323206 - DNA, 201 bp, Homo sapiens
tgaccatacacataaggatctaggttggggctgggcatagtggctcatttttgtaaaccatcccagcactttgggaggccaaggcaggatcctagcacttygggaggccaagatcagcccaggcaacatagtgagaccccaactatacaaaaaattaatggtgcactgtgatgtgtgcctgtagtctcagctacttgggag

SEQ ID NO: 323207 - DNA, 201 bp, Homo sapiens
cctccctctttgagcaacagccacgctggctgctctaccacgaacttgtcttgaccaccaaagagttcatgagacaggtgaggagaacatcctgtgcccaygcaggtggagactatgtagagagatggtgtcctggcaagctaagaacccaggttcaagttgctgggactggtacagaaagaggaaggtagggtaaaatag

SEQ ID NO: 323208 - DNA, 201 bp, Homo sapiens
tctccttcatttcctaggtcactgcccctttgtttacagctcctgcctcctcccttgaccacagcctggtttacaaattccatcagctcccagccccaccygccaaagtcccaggtttacaagccacgcttacttgctgtgtctgcgtggaattctctcctctgtcccctccagtctcctcattggagtgacctgaaggtg

SEQ ID NO: 323209 - DNA, 201 bp, Homo sapiens
ctttagtcctgctgtatacttaattatctctcctttctttttaactgtcttcccagtgggctgagagtggttactcttcccagtggtgctatgagaacttygtacagttcagatcgatgcgccgagcccgggatgtgcgggaacagctggaagggctcttggaacgtgtggaagttggtctcagttcctgccagggggact

SEQ ID NO: 323210 - DNA, 201 bp, Homo sapiens; identical to SEQ ID NO: 67826

SEQ ID NO: 323211 - DNA, 201 bp, Homo sapiens
ggcctagggagccaagatcagaagacaaaaggaaagactttctgatagagtgtatagggagagaggatacagaggaagcacagtgtggatgctgatggggkggtcaggtttctagaagaggggcttggttgttaggagccagctgaggatagacttatgttgttgagggaaggatccttcttaagttgtagggggaaggag

SEQ ID NO: 323212 - DNA, 201 bp, Homo sapiens
gagtgtgaaggcatcagctgcagggagaaaggttaatgccagttgggggaggcacacaaatgttctaccctttaccccacccagccctacctaggactcamtttatctagacgatggcgacaaatgaggccactggaattcaggtagaaagtggagtaggcatcataggtcctggggaatagagggaggcttactgaggga

SEQ ID NO: 323213 - DNA, 201 bp, Homo sapiens
ataacttttgaccatacacataaggatctaggttggggctgggcatagtggctcatttttgtaaaccatcccagcactttgggaggccaaggcaggatcckagcactttgggaggccaagatcagcccaggcaacatagtgagaccccaactatacaaaaaattaatggtgcactgtgatgtgtgcctgtagtctcagcta

SEQ ID NO: 323214 - DNA, 201 bp, Homo sapiens
aaccgggatgagcagtttgcatccttccagatttcttgcataaatactgcctttttcttttccctgaccaaattgtcagccagcctgttcccctttctttmcaggcctcagccaatcagcgagctggcagggcaggtcgggtggctgcagggaagtgcttccgcctgtataccgcctgggcctatcagcacgagcttgagg

SEQ ID NO: 323215 - DNA, 201 bp, Homo sapiens
gcacagtgtggatgctgatggggtggtcaggtttctagaagaggggcttggttgttaggagccagctgaggatagacttatgttgttgagggaaggatccytcttaagttgtagggggaaggaggctacccataagtcctccttgactcttaactttaggatcaaatatactctattagtgaatgaaattgtgagctttcc

SEQ ID NO: 323216 - DNA, 201 bp, Homo sapiens
ctccaaaatccgggagctcctggtgctgcccatttatgccaatctgccctctgacatgcaggcccgtatcttccagcccacaccacctggggcacgaaagktcagttggagaaacccacactcttcacccctatgcttcccacaactagtagtgaaaaagctgtgtgcctgccccatgcaaggtgagtcctgcgcactgct

SEQ ID NO: 323217 - DNA, 201 bp, Homo sapiens
tccgcggtacgggaagacagctttgggatgtcggaagatcctagaggtcccaaggtagctgacttgcgaagctgaggctccagccgagggctccaggcctstgaccggcccagcagtgagcgcggctgcccgacgcttcagggccgggagcagggagcgtgagtcgccatggcgacgccggcgggtctggagcgctgggtt

SEQ ID NO: 323218 - DNA, 201 bp, Homo sapiens
cccctccagtctcctcattggagtgacctgaaggtgtggcttcctccactttttctcagtattactttgccttagttttccccaagagggaaggctggaamtcttaactctgtaccccttgatagttatttaattctgtttctcctagtggttcacaattgaactgaattgagatggtgtcgggtggctaaggagacacct

SEQ ID NO: 323219 - DNA, 201 bp, Homo sapiens
tggtcccaaagctgaattcaagcatttgtttaaacgagtagtccctaaattctgctacatattagatcacctgggcaacttacaaacatctcagtgcttargttgtgccctgtctcaattaaatcagagtgtttggcgtcaatattttttaacgatccttgggcatttctactgtgcagcagtttgggaactgctggttta

SEQ ID NO: 323220 - DNA, 201 bp, Homo sapiens
gcggaaatttaccaggttgtaaggctcaacatatgagacaggacttttcatttgttcagtacttttgtgtgtgtgtgtgtgtgtgtgtgtgtgtgtgtgtgacagggtttcactctgtcacccaggctggagtccagtaatgtgatcacggctcactgcaacctcaacctcccaggttgaagtgattctctcatctcagcc

SEQ ID NO: 323221 - DNA, 201 bp, Homo sapiens
ggcggaaatttaccaggttgtaaggctcaacatatgagacaggacttttcatttgttcagtacttttgtgtgtgtgtgtgtgtgtgtgtgtgtgtgtgtgtgacagggtttcactctgtcacccaggctggagtccagtaatgtgatcacggctcactgcaacctcaacctcccaggttgaagtgattctctcatctcagc

SEQ ID NO: 323222 - DNA, 201 bp, Homo sapiens
aggcggaaatttaccaggttgtaaggctcaacatatgagacaggacttttcatttgttcagtacttttgtgtgtgtgtgtgtgtgtgtgtgtgtgtgtgtgtgacagggtttcactctgtcacccaggctggagtccagtaatgtgatcacggctcactgcaacctcaacctcccaggttgaagtgattctctcatctcag

SEQ ID NO: 323223 - DNA, 201 bp, Homo sapiens
caggcggaaatttaccaggttgtaaggctcaacatatgagacaggacttttcatttgttcagtacttttgtgtgtgtgtgtgtgtgtgtgtgtgtgtgtgtgtgacagggtttcactctgtcacccaggctggagtccagtaatgtgatcacggctcactgcaacctcaacctcccaggttgaagtgattctctcatctca

SEQ ID NO: 323224 - DNA, 201 bp, Homo sapiens
agaggcaggcggatcacgaggtaaggagatcaagaccatcctggctaacacggtgaaaccccgtctctactaaaaaatataaaaaattagctgggcgtggkggcgggcacctgtagtcccagctactcaggaggctgaggcaggagaatggcgtgaacgcaacccaggaggcggagcttgcggtgagccgagatcgtgcca

SEQ ID NO: 323225 - DNA, 201 bp, Homo sapiens
gtgcttagaggccgaaaaagtacagccccttccgggctccgcggtacgggaagacagctttgggatgtcggaagatcctagaggtcccaaggtagctgacytgcgaagctgaggctccagccgagggctccaggcctctgaccggcccagcagtgagcgcggctgcccgacgcttcagggccgggagcagggagcgtgagt

SEQ ID NO: 323226 - DNA, 201 bp, Homo sapiens
cagaattagaaaaccaaactggcttctaaggaatggggaacagctgtgagaagcagtctaggaacttctctgggaagtgaaaagggtcatgtatatacctytgggtgcttttcctccccagtgccctacctgtgccccaattctcacttggtacgtatgttgaggatctcattgatgaattccacatccaaggaatacaga

SEQ ID NO: 323227 - DNA, 201 bp, Homo sapiens
cccttcaatttgtgtgggggggaagggtgggcagaaggcagaggctctcactcattctctaacattattgccccctctcccacagatgagtcctgccggcrgtgaccatcttccaacatagggatatacctccctccttcttataactgaagatcctggagcccggaagattcagggcagacagaccctgataatgagcct

SEQ ID NO: 323228 - DNA, 201 bp, Homo sapiens
atctcgcccgggagtaccgggcagctggggagcaggagaagctggaggccaccaatcgctaccacatgcccaaggaaacccgaggacaggtgaggtgaagyggcgtctgcttcagccttggtccccaagacaagttgtggggaaggcttcaggggattgggcaacacgtgggtcatcccctttcttgccttgccgttccca

SEQ ID NO: 323229 - DNA, 201 bp, Homo sapiens
aagaacatctaactggggctgaagattgcctcctgttggccccctcactggtttctatctttgtctgaattgttttcggtttgagtcctgtgcttctaaaygctggattagccttttattttccccctttccactaatttgaataaaatggcaagagtaaaatataagctacgcagacatctccctagtgcatctatatta

SEQ ID NO: 323230 - DNA, 201 bp, Homo sapiens
actctggaacaaggtgtcggcaggggtggggaggggccctgtgatttgtcccggtgaggctggcctaacggtccatcgagaagttaagaaagctcagttcrcaagcacttattctttgtccgttgtcgcgtaggtactgtgctagctgctggacgcccagctcagtggagaagattgaggagggcttaggtgtgtcgggtt

SEQ ID NO: 323231 - DNA, 201 bp, Homo sapiens
atctcagtgggccggcccgggacttcgccctgagactctggaacaaggtgtcggcaggggtggggaggggccctgtgatttgtcccggtgaggctggcctmacggtccatcgagaagttaagaaagctcagttcacaagcacttattctttgtccgttgtcgcgtaggtactgtgctagctgctggacgcccagctcagtg

SEQ ID NO: 323232 - DNA, 201 bp, Homo sapiens; identical to SEQ ID NO: 67865

SEQ ID NO: 323233 - DNA, 201 bp, Homo sapiens
tgaagggactctgttccatccatcacacctctttctagggatccatgacctaatgcactttgatttcctggaccctccaccatatgagacactgctgctgrctttggagcagctgtatgctctgggagccctcaaccaccttggggagctcaccacggtgagtcgggggacagcatgggtggaggcaggatgataggggtc

SEQ ID NO: 323234 - DNA, 201 bp, Homo sapiens
agctgcactcggtgttggggctgagcgagcggcacgtcgcccagtttctgatcggtaccgcacagcgctgcacctctgccgaggagttcgtgcagcgcctrcgagacactgataccttggatctcagtgggccggcccgggacttcgccctgagactctggaacaaggtgtcggcaggggtggggaggggccctgtgattt

SEQ ID NO: 323235 - DNA, 201 bp, Homo sapiens
aagagcagctgctgagtctaagcagactcttgactgaactagagggtatggctaacttgtcctggcctcagtgtgcagcctctacatcttgtctcctattrtctgctgaggctgggataggttgcagatcatggggccctggccttctctgactttctgttgctctacataagtgggatggctgacttctccttagagccc

SEQ ID NO: 323236 - DNA, 201 bp, Homo sapiens
ggaccctccaccatatgagacactgctgctggctttggagcagctgtatgctctgggagccctcaaccaccttggggagctcaccacggtgagtcgggggrcagcatgggtggaggcaggatgataggggtcaggatggctccagggacccctgtagtagtagcgggaaacctgagggaggactgggctcaactctctctc

SEQ ID NO: 323237 - DNA, 201 bp, Homo sapiens
gggtctgtgactcagtctacagttccctcaggtccctacagcagaagtcttggtgctgccccacttcacctttccccaagttcctttcagggcacaccagsccacacttggttgctaatggttcccttgaccaggttggctacagcatccgctttgaggactgcacatcagagcgaactgtcctccgctacatgacagatg

SEQ ID NO: 323238 - DNA, 201 bp, Homo sapiens
acatcattttctcaggaaaatgtttataatatatttctatgcctgcctcatggttccaaaaaagaatccagttgactatccctgtacgtccaaggattacscacatccttcccactgtagacgaaggccacttttgcactgacttacctcttgtctcagtctctcatacatgacagacagatgttcctccatactaggatc

SEQ ID NO: 323239 - DNA, 201 bp, Homo sapiens
accggtaatgctcgtctttgtcacgcttgtagaaccgcaaaaagagcaagtggacgggcagccccacaagccgccaccgggcttgcagggtccagttctcmgggtggcgggtcagctgtaaaacctccaaacgaaggtgtgcaaaataattccaggccaggaaacggcagagggtcagtgaaagaatgtaccatgtccggc

SEQ ID NO: 323240 - DNA, 201 bp, Homo sapiens
ctctacataagtgggatggctgacttctccttagagccccctccgtcaacagtcattcttgaactctttgtgtccattactcccctctcatccagttaacyctggtgtctgatactgcattgcctagcgctcttccctcattgctctcctattccctccccagcgtggtgatggtggatgaggcacacgaaaggaccctac

SEQ ID NO: 323241 - DNA, 201 bp, Homo sapiens
ttatctgctgaggctgggataggttgcagatcatggggccctggccttctctgactttctgttgctctacataagtgggatggctgacttctccttagagycccctccgtcaacagtcattcttgaactctttgtgtccattactcccctctcatccagttaaccctggtgtctgatactgcattgcctagcgctcttccc

SEQ ID NO: 323242 - DNA, 201 bp, Homo sapiens
acccacttcaactcaggcccagcagaaagagtccatccaggccgtccgccgcagcctcccggtgttcccatttcgagaggagctcctggctgctattgcaratcaccaagtcctcatcattgaaggcgagacaggctcagggaagaccacccagatcccgcagtatctctttgaggaggtacagtcatctcacccttcagc

SEQ ID NO: 323243 - DNA, 201 bp, Homo sapiens
gctacatattagatcacctgggcaacttacaaacatctcagtgcttaggttgtgccctgtctcaattaaatcagagtgtttggcgtcaatattttttaacratccttgggcatttctactgtgcagcagtttgggaactgctggtttaaaaacttatatccaatgtttgtggctgagtctaacaatttattgggattctac

SEQ ID NO: 323244 - DNA, 201 bp, Homo sapiens
agctccagggtgatgaggtaagaggggagctgggagactttctgaggaagacccgtagcgagctatttagctcacacctccttctctttccttaggagccrtcagctccacccacttcaactcaggcccagcagaaagagtccatccaggccgtccgccgcagcctcccggtgttcccatttcgagaggagctcctggctg

SEQ ID NO: 323245 - DNA, 201 bp, Homo sapiens
atcaggagcccctggggaggagcagcggcgctgggaggaggcgcggcttggggcagcgtccctgaagtttggggcccgagatgctgcctctcaggagcccragtatcaactggtgctggaggaggaggagaccattgagtttgtccgggccactcagctccagggtgatgaggtaagaggggagctgggagactttctgag

SEQ ID NO: 323246 - DNA, 201 bp, Homo sapiens
ctcgagggaagcggctgaagcgctctgtcggctgtaagcgcgcctgcgcccgcgggctcggagactgcctgagtgcgcttgcgcaagttacagcctccccygcccccccaagcgctgtattcacagctgaggcctttgagcaaaaagctgagcaaaaacagggctgaaggctgaatgggtgcaacgacagtgaggggtgag

SEQ ID NO: 323247 - DNA, 201 bp, Homo sapiens
atctgaggagtttgagaccagcctgggcaacatgatgaaaccccgtctctactaaaatacaaaaaattagctggacgtggtggcacgcacctgtagtcccrcctactcaggaggctgaggcaggagaattgcttgaacccaggaggtggaggctgcagtgagccaagatcacgccactgcattccagcctgggcgacagag

SEQ ID NO: 323248 - DNA, 201 bp, Homo sapiens
acagctgtgagaagcagtctaggaacttctctgggaagtgaaaagggtcatgtatatacctttgggtgcttttcctccccagtgccctacctgtgccccarttctcacttggtacgtatgttgaggatctcattgatgaattccacatccaaggaatacagactgtagtcgtgggactgaaggaagagcttgggaagctag

SEQ ID NO: 323249 - DNA, 201 bp, Homo sapiens
taagcggcgagtgcgggatctcgcccgggagtaccgggcagctggggagcaggagaagctggaggccaccaatcgctaccacatgcccaaggaaacccgargacaggtgaggtgaagcggcgtctgcttcagccttggtccccaagacaagttgtggggaaggcttcaggggattgggcaacacgtgggtcatcccctttc

SEQ ID NO: 323250 - DNA, 201 bp, Homo sapiens
gggggtcaattcagcaagaggatataacagttatacatatatatgcacccaacactggagcacccaaataggtaaagcaaatattattagagctgaagagrgagagatgggccccacccaatacaataagagctggagacttcaataccccactttcagtgttggacagataatcgagatagaaaaatttacgtaatctgc

SEQ ID NO: 323251 - DNA, 201 bp, Homo sapiens
agaggatataacagttatacatatatatgcacccaacactggagcacccaaataggtaaagcaaatattattagagctgaagagggagagatgggccccayccaatacaataagagctggagacttcaataccccactttcagtgttggacagataatcgagatagaaaaatttacgtaatctgcactatatatcaaatgg

SEQ ID NO: 323252 - DNA, 201 bp, Homo sapiens
tcaacattgttaaagtgtccgtagcacccaaaacaatctacagatgcaacacaatcctatcaaaaataccaatgatattcttcaaaaaaatggaacaattktgaaatttctatagaaccacagaagacccagaatagccaaagctatcctgatagaaaagaacaaaactggaggaataacattacctgacttcagattata

SEQ ID NO: 323253 - DNA, 201 bp, Homo sapiens
aggtcttttttataaaggaaagtcactctggtagcctgtgtagatggattggtgggtgccagacatgaggccaagaggtcagtaaagaggcagttgtaatygggcaaggaaaagacacaggtatacttaattagaacagtggccactgggctgagagaacaggatagtctcattattttggaggtggaatgaacaagaaag

SEQ ID NO: 323254 - DNA, 201 bp, Homo sapiens
caaatgctggtgaggatgtggaggaaagggaaccttcatacactgttggtgagaatgtaaattagtaaagccactatggagaacagtttgttgattccttaaaaaaaaaaaaaaaactaaaaatagaactaccgtataatgcagcaatcccgctactatgtatatagccaaaggaaaggaaatcagtacatcgaagagata

SEQ ID NO: 323255 - DNA, 201 bp, Homo sapiens
ttagccaaaattaagtttgaggatatcatatatttgtggggatacctatttctccacactttcaccaatacctgataaacctctaagaacctgttttgttygccaaaaaaactgtgctaatattttcccagccgacttcttaagaagataatatgagattatctgagataatctggtgaaattataaagtgatacagaagc

SEQ ID NO: 323256 - DNA, 201 bp, Homo sapiens
cttcatacactgttggtgagaatgtaaattagtaaagccactatggagaacagtttgttgattccttaaaaaaaaaaaaaaaactaaaaatagaactaccrtataatgcagcaatcccgctactatgtatatagccaaaggaaaggaaatcagtacatcgaagagatattacactcccatgtttattacagcactatttac

SEQ ID NO: 323257 - DNA, 201 bp, Homo sapiens
gtggatggggagagggaggtgggaggtggaggataattggggatggttaatgagtacaaaaatatttaaatagaatgaataagatcttgtatttgatggcrcaacagggtgactacagtcaacaatagtttactgtgtattttaaaatagctaaaagggtatagttagattgttttcaacacgaagaaaggataaatgctt

SEQ ID NO: 323258 - DNA, 201 bp, Homo sapiens
ttttcatcctcccataaactcgttactcattagcatcttcccttcctcccagcatgtattgcttctggatcttgagtcacagaaaggcttttccttttttkgggttataaaggaatcatttatattttttcctggtacctgtgtagtgtcctttttttttttttttttttttttgagacagagtcttgctctgtcaccgag

SEQ ID NO: 323259 - DNA, 201 bp, Homo sapiens
ccaattgttaatatctaagacaatgggggcaaggtttcaaagttgtttcagatgtctttgggaaggtccctctcatcacaggtccagagacctaggaggaragaatggtttcagggcccaagcccagggcactgctgccctgctcagcctcaggactctgcaccttgtatcctggctactcatgctccagccagggctcaa

SEQ ID NO: 323260 - DNA, 201 bp, Homo sapiens
taatcctaacttagatgacatgttgtaatctgtttcttgcttatattataagcattttttcatactgcagtatgttctttgtagttattcttttgatgaarcatccttttgccaaccaagtataagaaaggcttaatcttggcactaccacttactagctttgtgatcttaagaaagtttcctaaattcacagaaactaat

SEQ ID NO: 323261 - DNA, 201 bp, Homo sapiens
ttaatataaacatgttttaaactttagtcttttctttaaaaaaaaaaaaacagtttgcccccaaaattgtatccaatattgttttagattaattaattgakcatataattttttctggtctgttattttaatatgcagaattagctttggaatactacctgttttattttttagaaactgtatgtgtaataatttcctctg

SEQ ID NO: 323262 - DNA, 201 bp, Homo sapiens
gcagtaaaacatttgtgtgatttctgaattcagttactgtggaaaaaaaaaaacctcaaaatgggcatacttattatcaactgcagaacctaaatactacytaagaaagtatgtgaaaaagccagaatttgagcttgggtcattctgatattccaatttctgtgatacacagtaatgcttctcagaaaattaacctagcat

SEQ ID NO: 323263 - DNA, 201 bp, Homo sapiens
tgactacagtcaacaatagtttactgtgtattttaaaatagctaaaagggtatagttagattgttttcaacacgaagaaaggataaatgcttaaagtgatrgctacctcatttgcccgatgtgatggttatgcattgtttgcctgtatcagaatatctaatgtactccacaaatgtatacccttactatgtacccaccaaa

SEQ ID NO: 323264 - DNA, 201 bp, Homo sapiens
ttcaccgggttagccaggatggtctcaatctcctgaccttgtgatccacccgccttggcctcccaaagtgctgggattacaggcgtgagccaccatgcccrgcctaagctcatgcagattttaccctgtccatctgtctttcaaagtttttctccttgaggaagctctttaattttctttccatttttttttttttttttt

SEQ ID NO: 323265 - DNA, 201 bp, Homo sapiens
tgaggcaggagaatcgcttgaacccgggaggcagaggttgcagtgagccgagattgtgccactgcaccccagcctgggcgacagagtgagactctgtctcaaaaaaaaaaaaaaaaaaaaaaaacaggctggaagaaattaagtaactttcccaagggacccacagtgattagttaagaatggctttgggacttgcattca

SEQ ID NO: 323266 - DNA, 201 bp, Homo sapiens
atgtgtttaaaaattataaagtactgtataggtgtatgatactgtgaaaagagatattctgactactgatcagttttttgtttgtgggttttttttttttgttttttttttgaattggagtctcactctgttgcccaggctggagtgcggtgggaccaatctcggctcactgcaacctctacctcccaggttgaagcagtt

SEQ ID NO: 323267 - DNA, 201 bp, Homo sapiens
tgatcactactttttattaggtctcacataatctgtagaattatttatttgattccaatgatgtgatacaatagatactgaataaccttctctcttccttycttttctttcccagtgtgaagagtggccagattcgaaatctggagtctgcccgtgtctcaatggttggccaagtcaaacagtaggtcttactcttccccc

SEQ ID NO: 323268 - DNA, 201 bp, Homo sapiens
gcccgtgtctcaatggttggccaagtcaaacagtaggtcttactcttcccccttggtctggttagaggcggaaacatggtgagggaattacagattgcttsttttgtcttacaccaattctaccattccggtaaatgcctttattattttaaataattttaaaggtgagttcagttgggacagacatagattttctttcgc

SEQ ID NO: 323269 - DNA, 201 bp, Homo sapiens
gccaactccaagaccaaagtttcaggctcaggcagaatctgttctagacctttcttccctacttactctccctggacaatttcatggcttccatttatatvttgatgactcccaaagctaaacatccacctcacccctctctcctgagatccagtcctagcctatgtagcaaacctgctggatatctcatgggcctctcaa

SEQ ID NO: 323270 - DNA, 201 bp, Homo sapiens
aaattgtgcctagtctcactccccactgtgatgtgcatttcttcttgaggtgcccctttgaggaggctgggataggaatcagtccttttccaggctcctaragaagttttctttggcttctcctgccctgctgccaaggaaagctgggcaggccatggagcagggcttttttttttttttttttttcttggcacagtcttg

SEQ ID NO: 323271 - DNA, 201 bp, Homo sapiens
attgtgcctagtctcactccccactgtgatgtgcatttcttcttgaggtgcccctttgaggaggctgggataggaatcagtccttttccaggctcctagaraagttttctttggcttctcctgccctgctgccaaggaaagctgggcaggccatggagcagggcttttttttttttttttttttcttggcacagtcttggt

SEQ ID NO: 323272 - DNA, 201 bp, Homo sapiens
tagtctcactccccactgtgatgtgcatttcttcttgaggtgcccctttgaggaggctgggataggaatcagtccttttccaggctcctagagaagttttytttggcttctcctgccctgctgccaaggaaagctgggcaggccatggagcagggcttttttttttttttttttttcttggcacagtcttggttcactgca

SEQ ID NO: 323273 - DNA, 201 bp, Homo sapiens
gggttatgtcctcatgagggcaaagggaatttttttttttttttcattgaacaaaatggtcacacaggcttcatgcttcaaacagagggttagtgtctcaraaaagtctgcttacatctcttacatttggcagtctgcagttttgcatgtaagtttctagcggtattactatgattaaataatgaaaaactttagtgagca

SEQ ID NO: 323274 - DNA, 201 bp, Homo sapiens
aaattatccaagcagtaaaacatttgtgtgatttctgaattcagttactgtggaaaaaaaaaaacctcaaaatgggcatacttattatcaactgcagaacytaaatactacctaagaaagtatgtgaaaaagccagaatttgagcttgggtcattctgatattccaatttctgtgatacacagtaatgcttctcagaaaat

SEQ ID NO: 323275 - DNA, 201 bp, Homo sapiens
cctcctgtaacccaattactccattggtgccagatttttattagaaagatttgttaaataaataaatgaaaattttgtttttaatatttgtagtgattttmtgacaggcacctatgattgtaaatcattgctttcaagttaaaggttggaatttcaaatatatattttgtttctgttttgtaaacctggttctattatcta

SEQ ID NO: 323276 - DNA, 201 bp, Homo sapiens
ttgtatccacaatatcacttcaacatgttgaagtaattatattgattacctaatcaatataaaaattattattgagatatttacatctatttttatactgkaaatttaaaaattttatacttacagcacatctccgtttgggctagccacatttcaaatcgtagctttagtcatttacttcgcaaatagattgcaaagttt

SEQ ID NO: 323277 - DNA, 201 bp, Homo sapiens
tccctgaacatagcactttgttcctggcagcggggattattggggttaagtttaaatctcatcttgtctcttcttttagatcatgaattccttgaaaatarggataatgtgttacacttttttgtttcccaaatggcttgaaatagttctttaaacataggcacatattcaaccactattaaatgatttggcccttgtctt

SEQ ID NO: 323278 - DNA, 201 bp, Homo sapiens
ttccaagataccataaatgttgtatcagtatccttccagagatgttgaaaacatacataaacacttacatatatttcacaattttacccaagtgatagcaygcatatcgtgttcatcttggagttatatatatgaatcttggaattatatattcatatataaagatttttattaatatatttgttcatttttacagttaac

SEQ ID NO: 323279 - DNA, 201 bp, Homo sapiens
tacttaatactaacttcttgacagcagatgcattgtctctctagttttataattgtcccagcatcccccattatcctatgtcagttccagccttatacacktaataggttcttagtaaatattttttgaatgaattaatccttttttttgggagagacagggtctcacggttttgtccaggttagagtacagtggctattc

SEQ ID NO: 323280 - DNA, 201 bp, Homo sapiens
ggataattcttcattgtggggactgtcctgtgcattgtaggatgcttagcagtatccctggcttttacccacctgataacagtagtacccctcccacacamggttttgacaaacagaaatgtctccagattttaccaaatgcctcaagggaggcaaaaattccccctctattggtctagaggaagaaacagggccaggtct

SEQ ID NO: 323281 - DNA, 201 bp, Homo sapiens
aattttatgtatcttaaattggaaaccttttcatatctttatgggctgtttgtgtttcctccttagggaaaagcatattaatgtcttttgcctatcaaaargttttgggaaacagttagtgacactttaatagaaaactaagcaaacaaaattaaaaagacaattattctggaaaaaagcaaaaagttgtacaagaagtac

SEQ ID NO: 323282 - DNA, 201 bp, Homo sapiens
ctaaggcagttagcatttaggagctcaataaacatttgttgagtgaatgaatgacactcagatgcaatggaaacatcacattttcccaatagcaatagttkagaattgtccatcctgaatttaatagagaagtaaatgggagggaggagccatagacttagagtgaaatttaaaaaatatgattattgaaagcttgcaaaa

SEQ ID NO: 323283 - DNA, 201 bp, Homo sapiens; identical to SEQ ID NO: 67873

SEQ ID NO: 323284 - DNA, 201 bp, Homo sapiens
aaaacatcaaaaagtctgtattctgtctgttctcttgctttcattaatggtgtttcagtggcttttttttttgtttgaggccagatcattttagaaaagtkgtcattatatcttttttttttttttttaacttttcgagttgtagaaaaagaagttaataattatgttgttttcctgttgggtgaaaggtggaaataaaat

SEQ ID NO: 323285 - DNA, 201 bp, Homo sapiens
agccacaggtgcactacctaatttttttttgtttttagtagagacgaggtcttgttgtgttgcccaggctggcctcgttctcctgagctcaagcaatcctcccccccttgacctccaaagtgctgggattgcaggcatcagccaccacgtccagcctggctcttcattttctcccatccaagtactaaccaggcctgaccc

SEQ ID NO: 323286 - DNA, 201 bp, Homo sapiens
cctgggacacagagtgagactttgtctcaaaaaaaaaaaaaaaagtcttctttctcactgattaaaatgacacctttgtcatatgccaaatttctatataratccgggtctgtggagtttcttttacgtgccactactgtacttttaattagaggatttattaatatgttttgatgggtggtagaggttgtttacccctca

SEQ ID NO: 323287 - DNA, 201 bp, Homo sapiens
agttacagtctagatttgtaggtaacccttgctacttcatctttattgtatttctctggattttcaggacttatctcaagtaaggtacttgttgactgaawgctctgcttgattttaataacaataaatttctcttggtggtagatgatcaagtgattgatcgtaactaccttctacctgggtaaatatgcctttcttaag

SEQ ID NO: 323288 - DNA, 201 bp, Homo sapiens
actgtaattatccttcttaggataactataaagatttttctgaagaaaatccttgctaaactcattgtgtaaaattgtgaagtccctaatccattgtccamagatgatatttttaaaagagaatacttctgcttttataattcctgtctgtgggaattttatttttaaaatattttcattttaggtgaaacaaaggtcaag

SEQ ID NO: 323289 - DNA, 201 bp, Homo sapiens
tttttttttttttttttttttttgagacagagtctcactctgtcacccaggctggagtgcagtggcgcaatctcagctcactgcaacctccacctcccggsttcaagcgattctcctgcctcagcctcctgagtagctgggattacaggcacatgtcaccacaaccggctaatttttgtatttttagtagagatggggttt

SEQ ID NO: 323290 - DNA, 201 bp, Homo sapiens
atgtcttcatcatcctatcttccttcctattcttctaactccatctccagtctcttcttcagaacattttctcttaagttctccaaaccacccagatgackctttcagcaaaattacaagagacctttaagtctctattatattgcactgtatacccttaagttttccaatactcccttgagggatatggctcatattgtt

SEQ ID NO: 323291 - DNA, 201 bp, Homo sapiens; identical to SEQ ID NO: 67874

SEQ ID NO: 323292 - DNA, 201 bp, Homo sapiens
aggaagaagaagaagatgaggaaggaagtgagtctataagcaagaggaaaaaggaagatgacatggaggtgggtaaaaacattcattcttgaaaagatgcrgtatggaatggttcaaactgtgtgtgggtgggaaggggtgataacattgttctttttgtttgccattaggtattttagggagccaagacactatcataag

SEQ ID NO: 323293 - DNA, 201 bp, Homo sapiens
actccatgctggcgacagagtgagactctgtctcaagaaaaaaaaaaaaaaagagactttactctttaataagatcagccaatcagcaaatacttactaamcccctgctgtgtaccaggcatcgtacaggtgctgtggatacagtggagaattaaacatatgttccatcttcctgttcttacgatgtttaaatctaatagg

SEQ ID NO: 323294 - DNA, 201 bp, Homo sapiens
cagaagttgcagtgagtcgagatcgtgccactgcactccatgctggcgacagagtgagactctgtctcaagaaaaaaaaaaaaaaagagactttactcttwaataagatcagccaatcagcaaatacttactaaacccctgctgtgtaccaggcatcgtacaggtgctgtggatacagtggagaattaaacatatgttcca

SEQ ID NO: 323295 - DNA, 201 bp, Homo sapiens
aggacaactgtgagaataaccctggatgtcacagaagacaagtctctgagtctcagcctgcattgcctgcagcagctgctgtggagcctatgcagatgcarttccaccagctctccaacttctccctggcagctgcttatggtattggttttgtgtatatgtgctgaggagctactgacactctgctatttcatcccaggg

SEQ ID NO: 323296 - DNA, 201 bp, Homo sapiens
gcacaggtttgcagaacccatcggtggattccagtggtaaggcgggtacaagggtttaagaacccagcagtgctggccgaatctgacaagcagacacttgyaggactgtaaatatctctgccttacccctgcctggtttggtcaccatgcctttcttcctcctcctcagtgaagagcctggcatgtctgtttctacaaagc

SEQ ID NO: 323297 - DNA, 201 bp, Homo sapiens
ctgtaaatttaaaaattttatacttacagcacatctccgtttgggctagccacatttcaaatcgtagctttagtcatttacttcgcaaatagattgcaaarttttttggaggcaaattccatggcttattatgcctagcacatattgtatgcttgaagaattttatgtatgtatttattttttaagagatggaatcttgct

SEQ ID NO: 323298 - DNA, 201 bp, Homo sapiens
actgatatactgtcttaggggcccaggggaaggtttcatgagtcaagtgagttgaactagtttcatttctagaatccaggggttatgtcctcatgagggcmaagggaatttttttttttttttcattgaacaaaatggtcacacaggcttcatgcttcaaacagagggttagtgtctcagaaaagtctgcttacatctctt

SEQ ID NO: 323299 - DNA, 201 bp, Homo sapiens
tctttaactattcatacacttttcgagtctacaagagtggttcagagggtccagtcctgctccttctgcatggaggaggtcattctgccctttcttgggcygtgttcacggtaagtaggttgttgatagtacaagttaatgttagcacttttgaactaatgaaagtatagggacaaatcttggaagttaacacattctatt

SEQ ID NO: 323300 - DNA, 201 bp, Homo sapiens
atgggttgtcttttcactttcttgatggcattcttagaagtatagacgtttttaattttgatgaaattcaatttatttttctttttgtcccttgtactttkggtattatatctaagaagtctttgcctaaaagtcatgaagatttatacctatgttttcttctaagaattttcttgttttagctcttacatttaggcctat

SEQ ID NO: 323301 - DNA, 201 bp, Homo sapiens
tcaacgtctgcaaagaaaccaggtgtaattttgataggcattgctttgaatctatagatcaatttgagaagtattgccaacttaataatactcagtgttcyaatccatgaacactggatgtctttctttttatgtcttttttaatttcttcaacagtattacatagttttcagtgtttaaatcttgcatttatttggctat

SEQ ID NO: 323302 - DNA, 201 bp, Homo sapiens
ctacctctctccagcctagaaaaaaagagcaaccccatctcatttcaaatgttaattctggcacagcctatatatttcactcatttgtaaatctcttcatrcaatagtgacttctccttttttgactgatacagtatcctaattacaaggttattttgcacttgtcttaataccttaagtgtaataaaaatggcttgagaa

SEQ ID NO: 323303 - DNA, 201 bp, Homo sapiens; identical to SEQ ID NO: 67871

SEQ ID NO: 323304 - DNA, 201 bp, Homo sapiens
ggactcagtaagtttccacagagggaggatttagaccagccttagccagaggtgaattacccattccagtgttctgaatttgagttctggaaagccttgcyacccaagctaaagggtcctggggtcctaaataaacttgaaaagcagactaggccacaaggactgcaattcttgggcaagtcctggtgctgtgctggtgtt

SEQ ID NO: 323305 - DNA, 201 bp, Homo sapiens
ccttgaccttctgggctcaagcgatcctcctgcctcagccacccaagtagctgggactacagctgtgcaccacgatgcccagctaatttttgttatttgattttttttttttttttttttttgtagagacagggttttatcatgttggctcgactggtcttgaactcctgagctcaagcagtctgcctgcccgcctcggcc

SEQ ID NO: 323306 - DNA, 201 bp, Homo sapiens
ttcttgcacttaacaattgccaagtttattttgttggcaatgccttccattttcttcactttttttttttttttttttttttttgagacggagtctcgctytgtcgcccaggtcggactgcggactgcagtggcgcaatctcggctcactgcaagctccgcttcccgggttcacgccattctcctgcctcagcctcccgag

SEQ ID NO: 323307 - DNA, 201 bp, Homo sapiens
gcaatctcagctcactgcaacctccacctcccgggttcaagcgattctcctgcctcagcctcctgagtagctgggattacaggcacatgtcaccacaaccrgctaatttttgtatttttagtagagatggggtttcaccatgttggtcaggctggtctcgaactcctgacctcgtgatccacccaccttggcctcccaaag

SEQ ID NO: 323308 - DNA, 201 bp, Homo sapiens
ggtggctaagatagtgacaccgttgctttctgatggttcagtttacacaaactttgttttgtgcacaaaattattaaaaacattgtttaaaattacctccrggccatgtgtataaggtctttattaaacataaatgaattgtgtgtttagacttaggtcccatctccaggatatctcattgtgtatatgcagataatccaa

SEQ ID NO: 323309 - DNA, 201 bp, Homo sapiens
aaaataatgtaagattcttgccacttatgtaatgtctaataatactagttacaaaattaattgaagtcttctagtttataaacagtcatgtgttttgtgtgtgtgtgtgtgtgtgtgtgtgtgtgtgtgtgtgtggacgaagtctcgctctgtcacccaggctggagggcagtggcacgattttgactcactgcaacctcc

SEQ ID NO: 323310 - DNA, 201 bp, Homo sapiens
ctggaagaaagcgggacttttcccctgttccttggagtcagtattttgagtccatggaagatgtagaagtagagaatgaaactggcaaggatatatccttkgcaaaatggcttattctttagtgagcttatgatgttgtctaagttaaaagacttgtgtagtttctaaaatgttctttattcctgctacttatttcacctt

SEQ ID NO: 323311 - DNA, 201 bp, Homo sapiens
aatacatttttaatatgatactttgtgatgaactctttatatctttaagagaaaatacctttgctgttttcattactgacttacatttagcatttattgascaagattttatctctttatgcataatttttctgaaatgtctctctcttttttttcctcagccctggaagaaagcgggacttttcccctgttccttggagt

SEQ ID NO: 323312 - DNA, 201 bp, Homo sapiens
tgagggtaagcaactgcattagcctttgcaaaacatcaaaaagtctgtattctgtctgttctcttgctttcattaatggtgtttcagtggctttttttttkgtttgaggccagatcattttagaaaagttgtcattatatcttttttttttttttttaacttttcgagttgtagaaaaagaagttaataattatgttgttt

SEQ ID NO: 323313 - DNA, 201 bp, Homo sapiens
tttggcagtctgcagttttgcatgtaagtttctagcggtattactatgattaaataatgaaaaactttagtgagcaaaaacatagatgttttatctttaaytattcatacacttttcgagtctacaagagtggttcagagggtccagtcctgctccttctgcatggaggaggtcattctgccctttcttgggctgtgttca

SEQ ID NO: 323314 - DNA, 201 bp, Homo sapiens
ctgcttacatctcttacatttggcagtctgcagttttgcatgtaagtttctagcggtattactatgattaaataatgaaaaactttagtgagcaaaaacayagatgttttatctttaactattcatacacttttcgagtctacaagagtggttcagagggtccagtcctgctccttctgcatggaggaggtcattctgccc

SEQ ID NO: 323315 - DNA, 201 bp, Homo sapiens
tcaagaatcctgaagatctgtctgcagaaacaatggcaaagtaagtaaccaaatatttcttatacattgcctgtctcccatcactattataaatagtactrtaactttatcactttcctgatgagattgttggggaataattaccacaaggaaaattttacttctgttctctctcctctacttctggtttctccttactat

SEQ ID NO: 323316 - DNA, 201 bp, Homo sapiens
agatttcagaaaacatctctagttgtttgggaaagactgtttccttcaaactacaaaatagtttttttttttttaagagaagaaacttttaattaatagtyctattaagagggtggccacacttagatattcttcaaatacaatattgattacaagttacaggtatattctaccaatatattttgaagattgaataagaga

SEQ ID NO: 323317 - DNA, 201 bp, Homo sapiens
agtctgtattctgtctgttctcttgctttcattaatggtgtttcagtggcttttttttttgtttgaggccagatcattttagaaaagttgtcattatatcytttttttttttttttaacttttcgagttgtagaaaaagaagttaataattatgttgttttcctgttgggtgaaaggtggaaataaaatttagaaaattta

SEQ ID NO: 323318 - DNA, 201 bp, Homo sapiens
agatttcagccccttgacattcatttcagaacttctgagtaaaagtccgtttttccattgttgcttattgccagcaaatctatttcttcttagtatctccmaaattgggtaatttgctcttttgttttattttaaacctaatgagccttccatgttatgctacttgatgtcagatttcagaaaacatctctagttgtttgg

SEQ ID NO: 323319 - DNA, 201 bp, Homo sapiens
tttcctctcatttcccaatcatactttcctttccaagataccataaatgttgtatcagtatccttccagagatgttgaaaacatacataaacacttacatrtatttcacaattttacccaagtgatagcacgcatatcgtgttcatcttggagttatatatatgaatcttggaattatatattcatatataaagattttta

SEQ ID NO: 323320 - DNA, 201 bp, Homo sapiens
ctttcctgatgagattgttggggaataattaccacaaggaaaattttacttctgttctctctcctctacttctggtttctccttactatttaatcttgaargaaacctgcgtctttcttggtgtgtccaatgcaatggtcatcatataaagcacatgaaaattcttcaaggcacagtttagtttgtgaaggcttttgaaaa

SEQ ID NO: 323321 - DNA, 201 bp, Homo sapiens
ccaggatggtctctatctcctgacctcatgatccgcccacctcggcctctcaaagtgctgggattacagacgtgagccaccatgcccagccaattgtctctttttttttaatgtcaggagccgttgatgtttattacctagattcattaattcatttgcactatctcatttaatccctacaatacctctttaagataagta

SEQ ID NO: 323322 - DNA, 201 bp, Homo sapiens
aataatgtaagattcttgccacttatgtaatgtctaataatactagttacaaaattaattgaagtcttctagtttataaacagtcatgtgttttgtgtgtgtgtgtgtgtgtgtgtgtgtgtgtgtgtgtgtggacgaagtctcgctctgtcacccaggctggagggcagtggcacgattttgactcactgcaacctccgc

SEQ ID NO: 323323 - DNA, 201 bp, Homo sapiens
actgtcttaggggcccaggggaaggtttcatgagtcaagtgagttgaactagtttcatttctagaatccaggggttatgtcctcatgagggcaaagggaakttttttttttttttcattgaacaaaatggtcacacaggcttcatgcttcaaacagagggttagtgtctcagaaaagtctgcttacatctcttacatttgg

SEQ ID NO: 323324 - DNA, 201 bp, Homo sapiens
tgctgagtcactaagattcaaaaaattaaacttcagggtccggcatggtggctcatgcctgtaatcccagcactttgggaggccgaagcgggcagatcacraggtcaggagatcgagacaatcctggccaacatggtgaaaccccgtctttactaaaaatacaaaaattagctgggcatggtggcacacaccagtagtccc

SEQ ID NO: 323325 - DNA, 201 bp, Homo sapiens
actaaaaatacaaaaattagctgggcatggtggcacacaccagtagtcccagctactagggaagctgaggcaggagaaacgcttgaacacggggggcagargttgcagtgagtcgagatcgtgccactgcactccatgctggcgacagagtgagactctgtctcaagaaaaaaaaaaaaaaagagactttactctttaata

SEQ ID NO: 323326 - DNA, 201 bp, Homo sapiens
tgctcccatagtgtcccgtgcctacatctgtcttaaaatgtatcacattgaatggtaatcaactgtattcctatttgaatcctcctgctagactcttaatytcctgaggttaggaatggcatctcactcttttttgtattcttggcctctagcatagtgctgacaatatgacaaattattgcctgttgaataaatggaaga

SEQ ID NO: 323327 - DNA, 201 bp, Homo sapiens
cattctggaaaagacaaaactatggagaaagtaaaaagatcatggtttccaggggttaggggaaagggagggataactaggtggagcacatatttttaggkcagtgaaactattctgtatgatactgtagtggtggatacatgtcagtatgtatttgtccaaatcctgtgggactgttacatgttatgagtgatatgctct

SEQ ID NO: 323328 - DNA, 201 bp, Homo sapiens
gcaccaccacacctggctaatttttaaattttttatggatacagggtcttgctatgttgtccaggctgttctctaattcctgggctcaagcagtcctcccsccatggcctcccaaagtgctgagatgacagtcatgagccaccatacccagccacgaaatgtatagtgtttatccagaagataaagctgacacgtgaaatc

SEQ ID NO: 323329 - DNA, 201 bp, Homo sapiens
ctgaaatggcaattgagagagaagtaaatctcttggttttcaccatagttactttatgtttcctttcccagagtatctttactaaaaaaaaaaaaaaaaaagaaaaagaaaaaacttatatatatacaaaatccatctattttctacactaagttttctgatcttaatattatttggctaaatgacagattaggtgtgctc

SEQ ID NO: 323330 - DNA, 201 bp, Homo sapiens
tcctcccactttagcctcccaggtagctggtagctagtactatgggtgtgcaccaccacacctggctaatttttaaattttttatggatacagggtcttgytatgttgtccaggctgttctctaattcctgggctcaagcagtcctcccgccatggcctcccaaagtgctgagatgacagtcatgagccaccatacccagc

SEQ ID NO: 323331 - DNA, 201 bp, Homo sapiens
ttccaggcctgtaggtgttcttgttaacaaatatctctctcttgtttagtcagctgtgtaaccttagcagctagctccacacatggagcctcaggaagatraagcccttagaattgatgcaggttattttcagctgcttaattgtatatttcacctctgtctcctcttttggtcatttctttcttctcattacagtggggt

SEQ ID NO: 323332 - DNA, 201 bp, Homo sapiens
tctctactaaaaatacaaaaattagctgggcacggtggcatgtgcctgtaatcccagctactcgggaggctgaggcggaggttgcagtgagccaagatcgygccactgcactgcagcctggcctacagagcgagagtccgtctcaaaaaaaaaaaaaaagtgattactacccacccttgtcccatggaatcactcctattt

SEQ ID NO: 323333 - DNA, 201 bp, Homo sapiens
ccattcccagacccctgacaaccactgtacaactctctctttctgtgaaggaactcctttgtttattttttattgtatttaattaattaattaatttatttatttatttatttatttattttttgaaagacaagatctctctgtgttgccgaggctggagtgcagtggtgcaaacatggctcactgcagattccacctccc

SEQ ID NO: 323334 - DNA, 201 bp, Homo sapiens
tgccaagctgtccccaacccctactcctatgaggatttgaagaccagaaaagctaaataacttgctaaagattacaaagtattgacgagaatatatctatcattctcattattttcatgaagataacattctagagagctgtattttaacacgtaaaacaagctattcataatatgccaaactgcttcccctagttgtctt

SEQ ID NO: 323335 - DNA, 201 bp, Homo sapiens
cccattcccagacccctgacaaccactgtacaactctctctttctgtgaaggaactcctttgtttattttttattgtatttaattaattaattaatttatttatttatttatttatttattttttgaaagacaagatctctctgtgttgccgaggctggagtgcagtggtgcaaacatggctcactgcagattccacctcc

SEQ ID NO: 323336 - DNA, 201 bp, Homo sapiens
atgccaagctgtccccaacccctactcctatgaggatttgaagaccagaaaagctaaataacttgctaaagattacaaagtattgacgagaatatatctatcattctcattattttcatgaagataacattctagagagctgtattttaacacgtaaaacaagctattcataatatgccaaactgcttcccctagttgtct

SEQ ID NO: 323337 - DNA, 201 bp, Homo sapiens
ccccattcccagacccctgacaaccactgtacaactctctctttctgtgaaggaactcctttgtttattttttattgtatttaattaattaattaatttatttatttatttatttatttattttttgaaagacaagatctctctgtgttgccgaggctggagtgcagtggtgcaaacatggctcactgcagattccacctc

SEQ ID NO: 323338 - DNA, 201 bp, Homo sapiens
aatgccaagctgtccccaacccctactcctatgaggatttgaagaccagaaaagctaaataacttgctaaagattacaaagtattgacgagaatatatctatcattctcattattttcatgaagataacattctagagagctgtattttaacacgtaaaacaagctattcataatatgccaaactgcttcccctagttgtc

SEQ ID NO: 323339 - DNA, 201 bp, Homo sapiens
tgccccattcccagacccctgacaaccactgtacaactctctctttctgtgaaggaactcctttgtttattttttattgtatttaattaattaattaatttatttatttatttatttatttattttttgaaagacaagatctctctgtgttgccgaggctggagtgcagtggtgcaaacatggctcactgcagattccacc

SEQ ID NO: 323340 - DNA, 201 bp, Homo sapiens
caatgccaagctgtccccaacccctactcctatgaggatttgaagaccagaaaagctaaataacttgctaaagattacaaagtattgacgagaatatatctatcattctcattattttcatgaagataacattctagagagctgtattttaacacgtaaaacaagctattcataatatgccaaactgcttcccctagttgt

SEQ ID NO: 323341 - DNA, 201 bp, Homo sapiens
aagaaaagtagatagctgtgttttaggaagtaggtagtcaataggtatgaagttgtctcttcctactttctaaattttaataaaatttttcccctttcatrtttagttgacatgtaataattgtatgtatttatggaatatagaatggtattttggtgtatgtatataatactgatcaaattagggtaattagcatattcg

SEQ ID NO: 323342 - DNA, 201 bp, Homo sapiens
atggtagacagaggaaaatggaagaaaagattaacaaagattaaatttttgacgttccaaattgacatctattattgagtacccgtgtggcaagcataacrttaaaacattcaaaagagaaaacaataatgtttatcgagtatgtgccgataattaacttttatccctttcttacagatgaggctgctacctctcagtgca

SEQ ID NO: 323343 - DNA, 201 bp, Homo sapiens
actttctcattcttcattcccttgatactgaattttgttcatttatagtcatttgatttttgagatctttttgattatgattcgtgtcttgcatgtttgcrtttctgatgctgttctctatagcattagattgcgttttccatatgtggtcattcctaaaggctcaactgaaataacgactttctacttgactctcttcct

SEQ ID NO: 323344 - DNA, 201 bp, Homo sapiens
gttatctcccacaacaagtgggaattatggaagtacaattcaagatgagatttgggtggggacacccagcaaaaccatatcaacttctttttcattcatcrgtatattcctagtgtaatgcctgggacgtggtggacacctagtatccgtgtggtggatggatgaatggattaatgaatcaaatccaacaaagtttaagac

SEQ ID NO: 323345 - DNA, 201 bp, Homo sapiens
cgtcaaattgaatttagaagtaaccttatcagtagagtgattacacggaagtgcatttttaaatgtcattcatgtttaatgaccattggctgttatatttkatgtagattctattccttttgtattcttggacaaacagaaatccagttaatgtagctctttctccccattattgtagagcattttatggtgtacaatttt

SEQ ID NO: 323346 - DNA, 201 bp, Homo sapiens
ctaaataaattggggttagtcctcttaggttgggtttttcatttagcctttgtgatcttttcttaaatgtcatctatcactctatctcttaaaatgataaygtttttcaaagacatctcttaaaaatttttcccaaagaagatcccagtgttctataaacgtacttcctcatttctgtcacaaggtcttcttcttagttta

SEQ ID NO: 323347 - DNA, 201 bp, Homo sapiens
tgtttgcacggctgtattattcttcctttgtactctctcctttattagcatttggtaacgttaggaactttgataagccttgctagcagttttaaagcagygaaagctgctgggcccttttgtaatgtttagcattagttaagtattaaaaataattcccactaggtgtgtgatttaaaaaaaaatctcagttattttcct

SEQ ID NO: 323348 - DNA, 201 bp, Homo sapiens
taaggaaggaagcaatgtggtaaaacagtcttgaccatgagggaaagggaatacatgtttgggagcaaggtaagaatttcattcctttgaagccattagtmgtatctttgcaaaatgtaagacttttgcctctttcagacagcagcagtagtaaaactggctagccattatagtagccaaagtccattttcagtcattgtt

SEQ ID NO: 323349 - DNA, 201 bp, Homo sapiens
agaattcaagtaatcataaatgaaaagaaaatgtcagcttcataaacactggaaagttttttgagtttatactctttagggccaataccatctaattattwggggaaattgatttttgttggaaattagacatttattttatgcatgccatctttgaaggaagcattccatggcattgttgacttcaagagacactttgat

SEQ ID NO: 323350 - DNA, 201 bp, Homo sapiens
attggtaagattggggcagagtgacctatagtgagaagcaaggggatatagtgaattattgatgtatatcacttacctaatgcaataatttattccttttrtcaattaatattaattgactacatgacatgtgctggaggaaaagtggtgaacaaagaatctctttccttgttgaatgtatatccttgtagaagaggagac

SEQ ID NO: 323351 - DNA, 201 bp, Homo sapiens
acaacagacactggtgtcttcctgaggggggaggatgggaggagggagaagagcggaaaagataactgttgggtactgagcttaatacctgggttatgtartatgtacaacaaactcccatgacacgtgtttatgtaacagaccttcacatgtatccccaaacctaaaatataaaatgaatgtaggggtttttattagact

SEQ ID NO: 323352 - DNA, 201 bp, Homo sapiens
tgattttattaaacagtatctcttttgacttctaatttgttcttttcatttattggcaggatttccccatcaaatataaagagaggcatcctctggagtayctgcgacaatatcctcactttaggtgtaggactaacgttctgggttctatattgaggattcgcagtgaagcgacagctgctattcattctttctttaagg

SEQ ID NO: 323353 - DNA, 201 bp, Homo sapiens
aagtagcacgttgataatagtaatgaattgcaccaattgattatgaatgatatgggctttcaagacatataggtaattttaaaattgaacaccagccttgwgtgtacatctttaatatctacaatattttgaactcctgtgtgccaaacagtggatattttgcataattaatcctaacctatttgtaggaagtggttcaca

SEQ ID NO: 323354 - DNA, 201 bp, Homo sapiens; identical to SEQ ID NO: 67880

SEQ ID NO: 323355 - DNA, 201 bp, Homo sapiens
atatttaaatacttggaggtgatgggtggaatctgaaaaattgggtgaaagtgtttgcttttatttttggcctcttttctggccttcatgtttctacttargagcccctttgctgcgggacagtataaataagtgacactggaaacctatttgaggcacatactgacaatacttaaccactccttgctatttactttcctt

SEQ ID NO: 323356 - DNA, 201 bp, Homo sapiens
acacgcttaccattgtgttacaattgccaaagtattcagtagtatcagtaacatgttatacaggtttgtagcctgggggtagtaggctataccccgtctgygtaaatagactccgtgatgttcgcacaacagtgaaattacctagtgatgcatttctcagaatgtgtctgcctcaggctacgcacaactgtataaagttgc

SEQ ID NO: 323357 - DNA, 201 bp, Homo sapiens
ggtttgtagcctgggggtagtaggctataccccgtctgcgtaaatagactccgtgatgttcgcacaacagtgaaattacctagtgatgcatttctcagaaygtgtctgcctcaggctacgcacaactgtataaagttgcatggttttcagtatgttctcagggttgtacagccaatcaccacggtctaatttgaggacatt

SEQ ID NO: 323358 - DNA, 201 bp, Homo sapiens
cagagcgagactccatctcaaaaaaaaaaaaaaaaaaaaaaaagactgaggatgaggatgccataatgaaccaaataaaatatatatatatgtatatagtygctcatgaaattttcaatataatggagatggatgttaaataatcacatcgattgatgtaaattttttattttgaaaggtgctgtgaacagtaagtagtac

SEQ ID NO: 323359 - DNA, 201 bp, Homo sapiens
accatgtgatccgtagaaaatgatgcacaaagcacactaaaaagccagtcagtaccactatgtacctattgagcggccaacatccataacactgacaacamcaaatgctgacaaggatgtggagcagcagatttaacagccactttgcagtatagtttggcagtttcttgcaaaactagatatactccaaccataagaacc

SEQ ID NO: 323360 - DNA, 201 bp, Homo sapiens
tttagactttttgtttttaagagacaggaccttgctgtgttttccaggctggagggcagtggtgtgatcatagctcactgcagccttgaactcctgggctsaagcaatcctcctgcctcagcctcccgagtaactgagacaactggtgcaggccaccacacccggctgctttagactgttaagtcagatatgcatgttaaa

SEQ ID NO: 323361 - DNA, 201 bp, Homo sapiens
tatactgggactttaacatacttccataatttatgcagtactagagtatatagcttctcagagctaaactattcaaatataatttatttaaacttgttacwttagccatagagaataacattggtacattagcagtgtacatttcttttcaatccatttgtatgaagtgcctgcttctatccctcatttgttgttttctgg

SEQ ID NO: 323362 - DNA, 201 bp, Homo sapiens
tattgagcagccaccaaattgttttccataacagttatacaatttcacgtttacaccaacagtatacaaggagtatctctatatccttgccaacattgttrttttttattttcaaaatttagccatcaaaaaaccttttaaaaagtatattaattagaggtctaaaccttttttagggcagtatttctttatcaggattca

SEQ ID NO: 323363 - DNA, 201 bp, Homo sapiens
ggaaaaattaaaatctttgttgcaatatcaaaacaccataatgacaaaaataaataagaagtgtgagacaatgagataaagtatttttgctggtttatgtycagaaatattttttataatgaataagaattctgattttgagattttatctcaatgtgcagtactttaaaaaatgttttttatattcttttatattgtacc

SEQ ID NO: 323364 - DNA, 201 bp, Homo sapiens
tctggatctctgaatgttatatttctgctgtatcttaaaagcaaacaaaataattaaaaataaaggaaaaattaaaatctttgttgcaatatcaaaacacmataatgacaaaaataaataagaagtgtgagacaatgagataaagtatttttgctggtttatgttcagaaatattttttataatgaataagaattctgatt

SEQ ID NO: 323365 - DNA, 201 bp, Homo sapiens
ggtgttcttgttaacaaatatctctctcttgtttagtcagctgtgtaaccttagcagctagctccacacatggagcctcaggaagatgaagcccttagaaytgatgcaggttattttcagctgcttaattgtatatttcacctctgtctcctcttttggtcatttctttcttctcattacagtggggtgctgacctacgga

SEQ ID NO: 323366 - DNA, 201 bp, Homo sapiens
aacatggagaaaccccgtctctactaaaaatacaaaattagcaaggcgtggtggtgcatgcctgtaatcccagctacttgggaggctcacttgaacctggsggggcagaggttgtggtgagctgagatcgtgccattgcactccagcctcggcaataagagtgaaactctgtctcacaaaaaaaaaaaagagctttctgga

SEQ ID NO: 323367 - DNA, 201 bp, Homo sapiens
atgttaggcatccattcgaaatgttgtgcattattacgaaaacaaaagatagaataccaaagtgtgtatcctattgtgattggaacatataaaattaagtrtgcatattggtgaactaaaagaagttgatttgttgaggcaggattgtgagtacatgttttactttcatttagtctgtgtgtgtatgtgtaatgaaaacgt

SEQ ID NO: 323368 - DNA, 201 bp, Homo sapiens
taggagtacactctaaagtaatgataaaaagtatagtataataaatatgtaaatcagtaacatagttgtttattatcattatatgactggaagtgcagtakgtttgtttacaacagcatcaccacaaatacgtgagtaatgccatgctctgtgacatcactaggaaataggaatttttcagctctattataatcttatgga

SEQ ID NO: 323369 - DNA, 201 bp, Homo sapiens
ctgagatttctgtgcccaacctggaaattactgttgatttagaatcaccaaagaggagatgccttctgggcagcgcagtgagatgaaaccagaaagaaggrcgcaccccacatcctgagaaaggcaccaagatatgtgccctgttatttattgttgggccagagggcagggctctgggaggaaatacctggaattgccaat

SEQ ID NO: 323370 - DNA, 201 bp, Homo sapiens
aaaagaatgcaaaatatctcaatatgtttttatattgattatatgttgataatatttggggcataataggttaaagtgaaatatttcatctatttttatgyttaacgtggccacaaaaagaaattttaaattaaacatgtgactcacattatgtttctgttggacagccctgctccaatggttaaaacaaataattttagc

SEQ ID NO: 323371 - DNA, 201 bp, Homo sapiens
aggaacttacttagaagagaaaaacaaccccattaaaaagtgggcaaatggctaggcatggtggttcatgcctataatcccagcactttgggaggccgagktggatggatcacttgaggtcaggagttcgagaccagcctggccaacatggtgaaaccctttctctactaaaaatacaaacgttagccgggcatggtggca

SEQ ID NO: 323372 - DNA, 201 bp, Homo sapiens
agattaaatttttgacgttccaaattgacatctattattgagtacccgtgtggcaagcataacgttaaaacattcaaaagagaaaacaataatgtttatckagtatgtgccgataattaacttttatccctttcttacagatgaggctgctacctctcagtgcagcagtatagtcactcatgcaaaatcacaccgctagca

SEQ ID NO: 323373 - DNA, 201 bp, Homo sapiens
gggcagaattataatagcatcccagaaaagctcgttgataagaacatgaactttgaagtaagaaattccttttgaatctcaactctactaatcggtgactrtgtcctggactatttagagaggttatcgtgacatctctaaataatgtttcatcagctctaaaatgataaccacttcgttaagtttttctgacgattaagt

SEQ ID NO: 323374 - DNA, 201 bp, Homo sapiens
gcttgcttgttactgcttaagagcccttcccataccccagtacccaactcatttatcccagcttgtaattatcttgattctttattagtttacatgttatwttcttttttccccattagaatgtaagctctttgagagcttatgttctcttatttattgctctctctcatgtagcacagtgcttagatgaatgaatgaggt

SEQ ID NO: 323375 - DNA, 201 bp, Homo sapiens
cttgttgggtgttgtgggtttgcacacagctattgatatcgctttgatcctttgaggtcttgcttatgtgatttgttaagcaggtctgtagcagtgctcaktctagtactatttattcctcactgaggcaaagccttcctcaggtcccgacctacagccttgagaatgatgagtttttctagtttgtggaacaggtattgt

SEQ ID NO: 323376 - DNA, 201 bp, Homo sapiens
ctggataaagaaaatatggtacacatacaccgtagaatattatgcagccataaaaaggaatgagatcatgtcttgggggaacgtggatggaactggaggcyatcatccttagcaaactaatgcaggaacagaaaactaaataccgcatgttctcacttgtaagtgggagctaaatgataagaacttatgaacacaaagaaa

SEQ ID NO: 323377 - DNA, 201 bp, Homo sapiens
agtaggctataccccgtctgcgtaaatagactccgtgatgttcgcacaacagtgaaattacctagtgatgcatttctcagaatgtgtctgcctcaggctaygcacaactgtataaagttgcatggttttcagtatgttctcagggttgtacagccaatcaccacggtctaatttgaggacatttttatcaccccaaaaata

SEQ ID NO: 323378 - DNA, 201 bp, Homo sapiens
gaaaagtaatataatcagtgtattttattatgtaaatactgtggtctagaagaatgtaagtagcctttatatagagatataaagaactgctgactttgacyactataaattaggacttaaacaggtgtgttatattggtgactcacatatcatgaacagtttgctatttgtgatgagaatactggagtgcagtggcgcgat

SEQ ID NO: 323379 - DNA, 201 bp, Homo sapiens
tgggactacaggtgcacacaccactatgcccagctaatttttctttttatttttgtagagacagagttttgccatgttgcctaggctggtcttgagaatawgttcttatatactgatttttgctgtatgctgttttatgttatttttattttggccattagcaaagcaaaaatgtatatatttatatttagatatatcatc

SEQ ID NO: 323380 - DNA, 201 bp, Homo sapiens
gtatggaagttttacttgttctagttcttcattagtaccaagtactgtcaggcatatgtggtggttttaagccattctaagagctgtgtattagtatctcwttgtggttttaatttgcatttccctaatgcttattgatgttgagcatcttttcatgtacttactggccatctatatgtcatctcctgtgagatgtatttt

SEQ ID NO: 323381 - DNA, 201 bp, Homo sapiens
ggtttcaccatgttggccaggctggtctcagactcctgacagcctcagctgattcacgtgccttggcctcccaaagtgctgggattacaggcgtgaggcgycgcgcctggcctcagtcaacttttaaaaaatgtgttgtggcaaaatacacataagataaaatttaccattagtgacattgtacaaccaacatcactgtct

SEQ ID NO: 323382 - DNA, 201 bp, Homo sapiens
tcccaagtagctgggattacaggggcatgccaccacgcctggctaatttttgtatttttagtagagacagggtttcaccatgttggccaggctggtctcakactcctgacagcctcagctgattcacgtgccttggcctcccaaagtgctgggattacaggcgtgaggcgccgcgcctggcctcagtcaacttttaaaaaa

SEQ ID NO: 323383 - DNA, 201 bp, Homo sapiens
atgcgttctactccttattttcctcttatggaaagagataataattgtccctgagtcctgaaaattaaatgaggtaatggaagtaagatatttagaacagyggctcatagtctacaaatgttagctgctattgtttctcttgctgattatattatttgcagcagctccacatagaagaggtgcagaataaacaaggtgttt

SEQ ID NO: 323384 - DNA, 201 bp, Homo sapiens
tttaatgaattcggagaaagactggaatgtagcagtttgaaagagctctggagttaagctgcttaggtttaaatctctgcatagcgtttatgcgttctacwccttattttcctcttatggaaagagataataattgtccctgagtcctgaaaattaaatgaggtaatggaagtaagatatttagaacagcggctcatagtc

SEQ ID NO: 323385 - DNA, 201 bp, Homo sapiens
gaactttgctttcatgattccagggtattacctgtaaacttgttaatcataccaaaagtgtaaatgaacaagccccctttctctatctttatcccttatamtgaatatccaggtttataaagtggttgtcttgacctccctccttgagagcagaaaccgtgtcttacctgcctttgtattcacacatggctgacagcaaat

SEQ ID NO: 323386 - DNA, 201 bp, Homo sapiens
ttatttctcttctttggaaaaatgtctatttaagtcttttgccttaaaagactttaattgggttgtctttttgttgttgggcctgtaggaggtattttatrtattctagatacaagtcttgcccctctcctccctcccaccccctaccagtgtgaagcctctgatgctgccactcagggggaatagccttgagtatgccca

SEQ ID NO: 323387 - DNA, 201 bp, Homo sapiens
ccccgccccctcccgcacgcctccctaagcctgggtcacaagtacgcatgctctcccttcttccccgtagcgtgatgacgtaagcggcgttggcgtggtgwggtaggagtggttgcgcgtgttgcggcccgggttctgttcgtaggtttacaattgtcgcgggtagtggggcgccccagctgccaactgcacgtggtttct

SEQ ID NO: 323388 - DNA, 201 bp, Homo sapiens
ttttgtaaatctttactactctgctagatggaagtagcacgttgataatagtaatgaattgcaccaattgattatgaatgatatgggctttcaagacatayaggtaattttaaaattgaacaccagccttgtgtgtacatctttaatatctacaatattttgaactcctgtgtgccaaacagtggatattttgcataatta

SEQ ID NO: 323389 - DNA, 201 bp, Homo sapiens
agtttcctcatctataaaaaaatactctgccttatattgttgaaaggatttaatgacaatactgttaaaagcaatatgtcagactaggtaatttgaaaacmctctttctgcaaaacatctaaaaataatacttaaaatattataagattcttttaaatacgttgttgaattcactagaaagtaggagaagttccaggtgct

SEQ ID NO: 323390 - DNA, 201 bp, Homo sapiens
ggaataagtgttcaggatttattgcataacaaagtgaccataattaattgtaatgtatatctcaaaattgctaaaggagtagattttaaatcttctcactrcaaaaaaaaaagtgaagcatgtgagacgatagatatgttaattaccttgatatattcatcccacagtgtataataccaaaaacacattgtatcctgtaaa

SEQ ID NO: 323391 - DNA, 201 bp, Homo sapiens
atacaaacttgataaataacagatgagcttcagtgatattagctcagttacttggctaataagtagttgagctagattcaaacctacatgtctctgattcygtcctaccattccacttacctggtggaaataatgtggattaaaatcagttatattaagaaataaagaaggaaaggatcttagtttggttccaaagcgcta

SEQ ID NO: 323392 - DNA, 201 bp, Homo sapiens
cagatagtattttagggactactgtagaaagagttatctcagaagttttcttagccaaaatatatgtatgatttgatgatactggtatttcctatatagcwgtggagggttggctgtaacttgggaatttggagataacggttcaaatagttcaacccagagtttctctgccttttgtataggtcatcccatgatcctatc

SEQ ID NO: 323393 - DNA, 201 bp, Homo sapiens
ttcctgctgtgtattttcccagaagtgattatgttgaatagttcacctctgctagacttttgaacttttaatatagagagaattattttttttcctacaartggttatttccattgctaattaaaagtagaaaagtagcgtttcttctttttaaaaaacgtgaactttcatgttgctagtctggacattagaattcaagta

SEQ ID NO: 323394 - DNA, 201 bp, Homo sapiens
agagtcttactctgttgccaggctagagtgcagtggcacaatcttggctccacctcccgggttcaagcgattctcctgcctcagcctcccgagtagctggkactacaggtgcgcgccaccacgcccagctaatttttgtagttttagtagagacgggttttcaccatgtcggccaggatggtctcaatctcttgacctcgt

SEQ ID NO: 323395 - DNA, 201 bp, Homo sapiens
atcctgtttctgagtctcatcttagcaataaagaagctagagtaaagatcaagttgtaccctacatgaatacaagccacctcttcagcttcctggtactayctgtactctgtctgaggactttatctccctcttggtcacatttgccgagattgatagaaatgaatccaggcactcattcattcatttgtatccacatgca

SEQ ID NO: 323396 - DNA, 201 bp, Homo sapiens
aagttaccatctactcatttgcttaagtaaaaaatctagatgtcagacttaattcatacctcccctgcctgtctccccaaacctcacatctaatttatccrtcctttgttggctcatctttaacataaatcctcaacctctccatttctctgtttccaatgttaccagtttaattcaagctactcttcttgtcttctgatt

SEQ ID NO: 323397 - DNA, 201 bp, Homo sapiens
accactttatattaatctatttgccatcttgagggcttcataaaactccatacacgggagaaagtgaactttgtagaaccttttttttttttttttttttkcaattttgctttttattttccaaagagccatttttgtagctatctaggttgatgtgtattgaatgtacttttgttatactaaacattaactccaagctca

SEQ ID NO: 323398 - DNA, 201 bp, Homo sapiens
agtcattatcttagccgttaaaagcttatactctggagtcagcagatcaagatttactatttacttacatgagtaacctttggaaagttattgatcctctytaaccttctgcttcccttctgtaaaatgctaattttaaaatcgttattactgctactaccaacaccactgccaccaccattattaccttagaaattacct

SEQ ID NO: 323399 - DNA, 201 bp, Homo sapiens
gcagttctgggggcagagctggggcatctaaacaaggacactttaaagagtgaaagggagggctgataacagttattctggagcagtcagcataaaatggktttttcctgggcaaaccaagacctgtgatcaccctaaagttgatagatacgaacagattaaatttctctcttcaccggtgttatatttgcttgtttttag

SEQ ID NO: 323400 - DNA, 201 bp, Homo sapiens
ccattagcattcactccctatcctcttctttgcccccacccctgggcaaccactaattaagttctctctctatgagtttacctattctggaatatttatcrtatatagatagaatcacacagtaaattgtattttgtgactggtttatttcatttagcaaatgttttcaaagttcatccaacttgcagcatgtatcagtac

SEQ ID NO: 323401 - DNA, 201 bp, Homo sapiens
agctcttattattttgagatatgtttcatcaatacctagtttattgagagttttcagcatgaagggctgttgaattttgtcaaaggccttttctgcgtctrttgaggtaatcatgtggtttttgtcattggttctgtttatgtgatggattaagtttattgatttgtgtatgttgaacccgccttgcatcccagggatgaa

SEQ ID NO: 323402 - DNA, 201 bp, Homo sapiens
ccttgtcttgtgccagttttcaaatggaatgcttccagctttgcccattcagtatgatactggctgtgggtttgtcataaatagctcttattattttgagktatgtttcatcaatacctagtttattgagagttttcagcatgaagggctgttgaattttgtcaaaggccttttctgcgtctgttgaggtaatcatgtggt

SEQ ID NO: 323403 - DNA, 201 bp, Homo sapiens
gtaatcatcctttatattgattttcaaacatttttgttcaaaagtgttttccaaacaaaatcttataccaagaccctctatagaagatagataaaaggaawgactttgtttatcagatagctcaaatccacgtggttttgttgatagactatatgaatgccttaacagagcattgggaacttgggagattgcaggaaaagg

SEQ ID NO: 323404 - DNA, 201 bp, Homo sapiens
gatcagcattctgcaaaaaagcagaataaaaatgccttgttgaacatttagagtgggggtattagcatctgtgtatatgagttcaaagaaggcagcaggtracaaaataaccatatgtaaattctggaaaacattctcttctaggtgtttattttctctttgcactttaattttctgcatagtgaagccaagaattactgt

SEQ ID NO: 323405 - DNA, 201 bp, Homo sapiens
aagtctcagtcaatttaggaagttgattttcccaaagttgaggatgcgtgcctgtgacacagcctcaggaggccctgatgacatgtgcccaaggtggtccragtgcagcttggttttatacattttagggagacatgagacatcaatccatatacgtaagatgaacattggttcgatccagaaagatgggagaactcgaag

SEQ ID NO: 323406 - DNA, 201 bp, Homo sapiens
tggcgtgcagtggcatgatcttggttcactgcaacttctgcctcctaggttcaagcaatccttctacctcagcttcccgagtagctgggactacaggcacrcaccaccacacccagctaatttttgtatttttagtagagatggggtttcaccatgttggccaggcttgtctggaatcctgatctcaagtgatccacccac

SEQ ID NO: 323407 - DNA, 201 bp, Homo sapiens; identical to SEQ ID NO: 67879

SEQ ID NO: 323408 - DNA, 201 bp, Homo sapiens
gtttatttttctgagtccttaggtagttgctctttgtattctgaccagagttttttttgtttttttttactttaagttctgggatacatgtgcagaacgtscaggtttgttacataggtatacatgtgccatggtggtttgccgcacctatcaacccatcatctaggttttaagccccacatgcattaggtatttgtccta

SEQ ID NO: 323409 - DNA, 201 bp, Homo sapiens
gtcttatttaattttgtaactattaatacaaaataaagacagttatctattggaaaggggtttctatcaattctatttatcagaaaatattgaaattattwtcttatcttcccattagcctataaagtccttaatctgtatcttgttcctctttgttgtcttagcttctgttactatcatgttgcctgatccagggctcaa

SEQ ID NO: 323410 - DNA, 201 bp, Homo sapiens
aggagaattgcttgaacccagtaggcagagttgcagtaagctgagatcacaccactgcagtccagccggggcaacagagcgagactccatctcaaaaaaamaaacaaacaaacaaaaaaaaaacccaccatcagatctccttagacttactaccacaagaacagtatggggaaaatatccccatgattcagttatctccca

SEQ ID NO: 323411 - DNA, 201 bp, Homo sapiens
attctggaaaattcagagcatattaaaataatacaatttacctaattcactaacatgaatgttccatggcatatttgaaacttggggtagtacccactaartttcagtagctctccccagttatgacaaccagaaacattccctctaaaaaggactttttaggccattataagaatattggctgtgagtctttggagagtt

SEQ ID NO: 323412 - DNA, 201 bp, Homo sapiens
tattagctttcccttgatttacatggaagatgcattctggaaaattcagagcatattaaaataatacaatttacctaattcactaacatgaatgttccatkgcatatttgaaacttggggtagtacccactaagtttcagtagctctccccagttatgacaaccagaaacattccctctaaaaaggactttttaggccatt

SEQ ID NO: 323413 - DNA, 201 bp, Homo sapiens
tcctatacaccaacaacaaccaaactgagagccaaagcagaaagtcagtcccattcacagttgacacacacacacacacacacacacacacacacacacamgcacacacgcctaggaatacagctaaccagggaggtgaaagagctctacatgagaattataaaacactgctcaaagaaatcagagaagatacaaacaaat

SEQ ID NO: 323414 - DNA, 201 bp, Homo sapiens
gtttaaattggatggtcaaggaaagctttactgaaaagatgttcaaaaagcatgagtggaccaggtgcggtggctcatacctgtaatcccagcacgttggkaggccaaggcaggcgtatatatcacttgaggccaggagttcgagaccagcctggccaatacgacagaaccccatctcccatctctactaaaaatacaaaa

SEQ ID NO: 323415 - DNA, 201 bp, Homo sapiens
aggttagggagagagagattctagtttaaattggatggtcaaggaaagctttactgaaaagatgttcaaaaagcatgagtggaccaggtgcggtggctcayacctgtaatcccagcacgttgggaggccaaggcaggcgtatatatcacttgaggccaggagttcgagaccagcctggccaatacgacagaaccccatctc

SEQ ID NO: 323416 - DNA, 201 bp, Homo sapiens
gaataatctttacttgcttaagtgactagcttcactgtgtatattgcaagtagatgaggagttgaggttattgaatggttacttgtcttcaggcagatcaktctttcataggattagatcagccttaattcctgattattcatgacctcacagtgtgatataggagtacgctttttctggttttaaaatgaactagttagc

SEQ ID NO: 323417 - DNA, 201 bp, Homo sapiens
ggtttgaatgtgagggaaacaataagtattaaagaatgacggatgtagtgtccacttcactataggagtttaagaataagggatttttctccccatttggrtggttgagctatagtcctctggaatcaagggaataaagtagttcctcaaaatctctcacctccacatttcaggggtcattcaccattgattgaaagacag

SEQ ID NO: 323418 - DNA, 201 bp, Homo sapiens
ttaaggtaagatcctaaaagttccctcttgaccctttaaacagttttaataactgtttaaaaacagttgtgtctttttctcctgatgttaacatgtctgtwagttatgggttagttttgattggtctcttcattatgggttatggtttcttgactctacatgacctagctttgggtgccagacattgtgaattttaccttg

SEQ ID NO: 323419 - DNA, 201 bp, Homo sapiens
tagcagctccattgtattgacttttctctgcttgtatcctgttttcctccagcatttcttatactgaagcagtggagatcttaaagcaagcatcccagaasttcacctttaccccagaggtagtattttgtgtgtatgtatatatgtgtgtgtgaaaatgcttccttcttgtctttagcttactgtgttaagaatctttca

SEQ ID NO: 323420 - DNA, 201 bp, Homo sapiens
ggaacagggtcaaaattttcattctgcataaggtaggtttagtctttttcaaaacattctagtaggcaagtctgtagctgaatcttggaagaaaggcaacyatagtaatatttttgagttcctactgtttattttttcaataaaaactcaggttctcaggttagcagatcatggtcttaggaaggtagctgtagaaccaaa

SEQ ID NO: 323421 - DNA, 201 bp, Homo sapiens
ggatccttgtgattacattagtcccacccacataatctagaataatctcatcatttaaagattcttaatcacacatacacagtttttttttttttttttttaccaggtaggctaacacactcactggttctgggattggagcatggacagctttggcagagggataaatattattctgccaatcacaattcacataccttg

SEQ ID NO: 323422 - DNA, 201 bp, Homo sapiens
agatggcacagtcacagattggaaactcagggccttgtaattgttgaatttattgtttgggccagacctggattgtttgaccccttttaggtactgagggygtcagtgacatatatctgagtatttttctatatttgtaatgttaccgtttgtgaggatgtgctttttagtttacaactgaggaagcctgtcatcatcatt

SEQ ID NO: 323423 - DNA, 201 bp, Homo sapiens
tctgaactgcagtttcttattctggaagataagtgtattaatacatacgtagactgagttaactatgaagggattaactctaaggttcttgtccatttagygcttggcccataatgatcattccataatggtaaccactagtactactactactattgctactattacttataatagaacacttgatactgaacagtatct

SEQ ID NO: 323424 - DNA, 201 bp, Homo sapiens
ctatcattctcattattttcatgaagataacattctagagagctgtattttaacacgtaaaacaagctattcataatatgccaaactgcttcccctagttrtctttgagaagggggaatatactaaaaatttttctttctaattttctgagtttgcagtgttgttttgagcatcattgttgttagtatcatggttaaggct

SEQ ID NO: 323425 - DNA, 201 bp, Homo sapiens
ataaattaaaatagaagtgattccacatgcagctagagacaaaattattgcaaaagacagtagagatcaatgccaagctgtccccaacccctactcctatraggatttgaagaccagaaaagctaaataacttgctaaagattacaaagtattgacgagaatatatctatcattctcattattttcatgaagataacattc

SEQ ID NO: 323426 - DNA, 201 bp, Homo sapiens
atattaaccagtaatgaccttaggcatatttaatctctccgagtcttgtttttttggctataaaatggaatgatactatctccttcacagagttattgtgyggatgaaatgaaacaatacaggttaagtatctacatagagtggaagcttagtaaatgctagtttcctaccccctttcttttctttgttctgagtcttgct

SEQ ID NO: 323427 - DNA, 201 bp, Homo sapiens
aacttgctgtttgagaactgggaaacaaatctgtaaacacatagagaatgttttggagatgggaagtaaggaatcatgtttcaattgaaccgccactcctrcatatacatttatatgccataatgacttcctaaactaaccatacctgttttccatgattcctactttagtaaaagtactgccagacttaaaaaaaaaaaa

SEQ ID NO: 323428 - DNA, 201 bp, Homo sapiens
atccctatcaatttggtagtcatggggcctttcgccatctggtctgagctgggtacatgaaaaaggaaggatgttaatctataacaaagaattagtaactragaggtaaggggcaccatttaatctttcacaacgttttacagggcaagaaaaataagaaagaaggttaatctgtaataggaagaaacaaaagttgtagtg

SEQ ID NO: 323429 - DNA, 201 bp, Homo sapiens
tacctgctgtgtttagtggtagtcaagtcctttgtgtggatacgtggtttggagacttaactctggagcataggtatcccttctcacagaagtcctagttracggactaggaccatatcttatcatattcatccttaaagccccaatctgacaatgaataagccaaaattaatatttttcaagcaatagtgaaaaaaagtt

SEQ ID NO: 323430 - DNA, 201 bp, Homo sapiens
tggtttggagacttaactctggagcataggtatcccttctcacagaagtcctagttaacggactaggaccatatcttatcatattcatccttaaagccccmatctgacaatgaataagccaaaattaatatttttcaagcaatagtgaaaaaaagtttggttcatttttcaccgacccctttacatttaggaataagtttg

SEQ ID NO: 323431 - DNA, 201 bp, Homo sapiens
aaaaaggttagggagagagagattctagtttaaattggatggtcaaggaaagctttactgaaaagatgttcaaaaagcatgagtggaccaggtgcggtggytcatacctgtaatcccagcacgttgggaggccaaggcaggcgtatatatcacttgaggccaggagttcgagaccagcctggccaatacgacagaacccca

SEQ ID NO: 323432 - DNA, 201 bp, Homo sapiens
tctcctgtaaaagaaaaataaggcagcattgtatattcactttctgttttgcctcaaccttaccctctaatattagactccacgcgtcttttcttgattcwttctttctcagactgctcagcaggaaaacactgtttacaaacagtctgacttaataacttcctttcctgctgatcaaatagttgtttaaatgaaaccttt

SEQ ID NO: 323433 - DNA, 201 bp, Homo sapiens
agacttttgtttttagtgaaaaatgtaacactgaaaatacaaagttgtcatttttttctttttactaatttttcttgcttgaatcccaaacatgtaatcaraatttatttaaattaatcatatttatggaagtaaaggcaatttatagtttatacctgaaccgggtattagtctatttcattttaaagagagtagtatttg

SEQ ID NO: 323434 - DNA, 201 bp, Homo sapiens
caagtgatcctcctgcctcagcctcccgagtagctggaattacaggcaccctccactacacctggcttgttttatgttatatgatcagcatttcatacttrggagagactaatattaaaagcattttaatccaaagctttatttcaacactacaggataaaaaatgcgagagctgggcacagtggtatatgcctgtagtcc

SEQ ID NO: 323435 - DNA, 201 bp, Homo sapiens
caacccatagacttgtgaaagatagcagtagattatcattttaagccgctaaattttagaatgatttgttgctcaccaataggtaatcagaacagatggtkatttgtattgcgaagaaaaataaattgggaaaaaggttagggagagagagattctagtttaaattggatggtcaaggaaagctttactgaaaagatgttc

SEQ ID NO: 323436 - DNA, 201 bp, Homo sapiens
aggatccttgtgattacattagtcccacccacataatctagaataatctcatcatttaaagattcttaatcacacatacacagtttttttttttttttttttaccaggtaggctaacacactcactggttctgggattggagcatggacagctttggcagagggataaatattattctgccaatcacaattcacatacctt

SEQ ID NO: 323437 - DNA, 201 bp, Homo sapiens
aaggatccttgtgattacattagtcccacccacataatctagaataatctcatcatttaaagattcttaatcacacatacacagtttttttttttttttttttaccaggtaggctaacacactcactggttctgggattggagcatggacagctttggcagagggataaatattattctgccaatcacaattcacatacct

SEQ ID NO: 323438 - DNA, 201 bp, Homo sapiens
agaacgggccactgccctccagcctgggagacagagggagactccatctcagaaaaaaaaaaaaaaaaaaaaaaagtactgtggtctatgagagtgagaaragcattgattggggagtttagaacctgacaattctagcactttagacaggctgcttactgtgtaggagctcaacatcattttcttcagagttgataaaat

SEQ ID NO: 323439 - DNA, 201 bp, Homo sapiens
gttagcagtcacttcccattttctcctacccccaacccctagcaaacactactgaatcagaacccctgggagtgggacctcccaacctgtgtcacaggccmccaggtgatgctgatgctgagaaccaatgctttagagaaagatcctttgttccctgagtggtgaggacatctggcttctagctatgctgatgggtgggtg

SEQ ID NO: 323440 - DNA, 201 bp, Homo sapiens
ctgcactccagccagagtaacagaaccagaccctgtctcttaaaagaaataaaagtaaacaattcagtcgtttttactatgatcacaaagttgtataaccrtcaacattacctaattttgtaacatttttatcactccaaaaagaaactccaaacccgttagcagtcacttcccattttctcctacccccaacccctagca

SEQ ID NO: 323441 - DNA, 201 bp, Homo sapiens
aataatctttacttgcttaagtgactagcttcactgtgtatattgcaagtagatgaggagttgaggttattgaatggttacttgtcttcaggcagatcatwctttcataggattagatcagccttaattcctgattattcatgacctcacagtgtgatataggagtacgctttttctggttttaaaatgaactagttagca

SEQ ID NO: 323442 - DNA, 201 bp, Homo sapiens
taggggtaactttggaggagtgctactgcttaatgaacagctaaagcggcatgtaaaaggaggcagaaatagaggtcagagcagtatttagaaggaaaackaggacagtactaggaaaatagtgttaaatgtttcaagaggcgagggtatttcaaggtgtatcaaataaaatctggtcactgcttactgtgtttacaagga

SEQ ID NO: 323443 - DNA, 201 bp, Homo sapiens
tttaaaaaattttaaaattttttaaaagaatatgagatagtctcatatagagggtgaccagtgctgttagagaatgaagtagctactaagataatgttatscttgccaaaaagtactgatcttgttcaaatgaatgattgtgttagttgaggtaaatgcagtacagagataaattggaattctggctactttatatactag

SEQ ID NO: 323444 - DNA, 201 bp, Homo sapiens
gacaggaaagtcacaaaataatacagatagcaaataaatatatatatatttttttgagacaaggtcttgcctgtcgcctagactagagtacaggtggtatratcatggctgactgtaacttcgaactcctgggctcaagtgatattcctgcctcagtttgacaagtagccgggaccacaggcatgcaccaccacacctagc

SEQ ID NO: 323445 - DNA, 201 bp, Homo sapiens
gctgttcttgctcactctgattcagcctagtgatgagggtcagagctgatgtttttctctttaatcatagtaatgaggataaggtatacagcactgggggyacaatcttgaattattctttattgttgattattcataaagtatatctcaatcaaaagtttctaaatcaaaactgggaaggggatggcttaacggcaaagt

SEQ ID NO: 323446 - DNA, 201 bp, Homo sapiens
aggaaataaagataccagacttcctccttgctctgaggacagaagggataactgcagggtcctgattagagcccagccatattaattgtgtagctgttctygctcactctgattcagcctagtgatgagggtcagagctgatgtttttctctttaatcatagtaatgaggataaggtatacagcactgggggtacaatctt

SEQ ID NO: 323447 - DNA, 201 bp, Homo sapiens
aatgtgcataaataaagatacatttggagataactgcattgctaccagggaaatcccataagcagctctgagtgattgtatatatataaaatataagagakatatatatatataatataagatatatatgatatatatacatattttatatatatatcttgacctctaaataacctaagacaaattatcagataagtgtga

SEQ ID NO: 323448 - DNA, 201 bp, Homo sapiens
tcgagaccagcctggccaacatggtgaaatcccttctctactaaaaatataaaaaattagctgagcatggtggcgagctcctgtagtcccagctactcgggaggctgaggcaggaaaatctcttgaacctgggaggcagaggttgcagtgagtgagatcgcaccactacactccagcctggcaacagagtgagactccatc

SEQ ID NO: 323449 - DNA, 201 bp, Homo sapiens
aatcgcttgaacccgggaggtggaggttgcagtgagccgagatcacgccactgcactccagcccaggcgacagaatgaggctacattaaaaaaaaaaaaaacacctgagacttggtaatttataaaacaaagagttttatttggctcgtggttctgcagactgtacaagaatggcatcaacttctcagcttctggtgtggc

SEQ ID NO: 323450 - DNA, 201 bp, Homo sapiens
ttgaacttttaatatagagagaattattttttttcctacaaatggttatttccattgctaattaaaagtagaaaagtagcgtttcttctttttaaaaaacrtgaactttcatgttgctagtctggacattagaattcaagtaatcataaatgaaaagaaaatgtcagcttcataaacactggaaagttttttgagtttata

SEQ ID NO: 323451 - DNA, 201 bp, Homo sapiens
agccatgagcctctctgcctggccggattctggatatatttagaaagtagcttatgcatcttggatcttggtaccagggtacatgttttttgtttttgttrtatctattcctgctgtgtattttcccagaagtgattatgttgaatagttcacctctgctagacttttgaacttttaatatagagagaattattttttttc

SEQ ID NO: 323452 - DNA, 201 bp, Homo sapiens
ggacagcataatgagactccatccccattaaaaaaaaaaaaaaattaacccaatcatgttgtcactcttcttaaagccattcagtggcctccctttgctcytaggataaaagccaaaatcctttatgtcgcctacaatgcctagtagaatgtggctgtgtctccttctctagtctgttatactgtgggactccactttgtt

SEQ ID NO: 323453 - DNA, 201 bp, Homo sapiens
gtatcctttttttttttttttttttttttgtgagacggagtctcgctctatcgcccaggctggagtgcagtggcacgatcttggcttactgcaaactccgyctcccaggttcacgccgttctcctgcctcagcctcccgagtagctgggactacaggcacccaccaccgcgcctggctaattttttgtatttttagtagag

SEQ ID NO: 323454 - DNA, 201 bp, Homo sapiens
cactttgggagcctgaggtgcacagatcacttgatcccaggagttccggaccagcctggacagcataatgagactccatccccattaaaaaaaaaaaaaaattaacccaatcatgttgtcactcttcttaaagccattcagtggcctccctttgctcttaggataaaagccaaaatcctttatgtcgcctacaatgcctag

SEQ ID NO: 323455 - DNA, 201 bp, Homo sapiens
tatccattctataatctgtattctttattttattttcctatattttttctttcagacttagtcttgcagatatattattttcttatcaccctttttttttkttttgttttgtttgagacagagtcttgctctgtcgcccaggctagaatgcagtggtgcaatcttggctcgctgtgacctccacctcctgggtttaagcaa

SEQ ID NO: 323456 - DNA, 201 bp, Homo sapiens
ctctataaagatttttctgggttacccagctactttgagccttccttttttggatttttgttgcgaattagcgaaactatagcattgtgtctatattctgyaatctcttaatgagttttgctttctttcttttcttttttttaaaagacggaatcttgctctgtcttccaggctggagtgcaatggcacgatcttggctca

SEQ ID NO: 323457 - DNA, 201 bp, Homo sapiens
ccaccccaggatctggggcaaaagctgtcaggaccctagtgttctcagcagcaccatgcccaaggtggagcctccatcccccaagtgggactggggctgargaagggaggctccacctctcagccacacttgcccagaacttagcctcagctacaggtggctgtgagaaaggggagaaatgcctgcatgctgcccctcttg

SEQ ID NO: 323458 - DNA, 201 bp, Homo sapiens
tgtatgtatatatgtgtgtgtgaaaatgcttccttcttgtctttagcttactgtgttaagaatctttcaaaatcatcttaattctcttattagcaaaatayggcatttgctcatttgtacacagacttaagattttgatgtttgctgaatcttgttgagatacttaaaacggaattaattaagaataaaaataaattttat

SEQ ID NO: 323459 - DNA, 201 bp, Homo sapiens
taaacacaccaaacagcaccctctgtctagctcagggtttgtgaatgcaccagtggacactctgtttctagctactctgatggggacttggagaacctttrtgtctagctaagggattgtaaatacaccaatcagcactctatctagctcaaggtttgaaaacacaccaatcagcaccctgtgtctagctcagggttgtga

SEQ ID NO: 323460 - DNA, 201 bp, Homo sapiens
caaagaacgggccactgccctccagcctgggagacagagggagactccatctcagaaaaaaaaaaaaaaaaaaaaaaagtactgtggtctatgagagtgaraagagcattgattggggagtttagaacctgacaattctagcactttagacaggctgcttactgtgtaggagctcaacatcattttcttcagagttgataa

SEQ ID NO: 323461 - DNA, 201 bp, Homo sapiens
ggtaagcaaagaacgggccactgccctccagcctgggagacagagggagactccatctcagaaaaaaaaaaaaaaaaaaaaaaagtactgtggtctatgaragtgagaagagcattgattggggagtttagaacctgacaattctagcactttagacaggctgcttactgtgtaggagctcaacatcattttcttcagagt

SEQ ID NO: 323462 - DNA, 201 bp, Homo sapiens
gatacttctatggttcatttccttactcggtgcacgcttctgttcaaatgtcacaaacttaggcctttcttgaccatcatatctaaaatggcaccccaaaycccctctgccttcttattccactttatttttcttcatagcacgaatagctacttgtttatttatctgtctactctctcctcacctgcatctctcgctctc

SEQ ID NO: 323463 - DNA, 201 bp, Homo sapiens
tccaatacataggaataaaaattcctactttataggctacttgagaagatcaggtagataaaatctatatgtgtgtgtgtgtgtgtgtgtgtgtgtgtctrtatatatatatatatatgaagtacttagcataatttatggcacttagtaaatacccaggaattgttaactgttaaattatgaattgtctattcagaagca

SEQ ID NO: 323464 - DNA, 201 bp, Homo sapiens
attccaatacataggaataaaaattcctactttataggctacttgagaagatcaggtagataaaatctatatgtgtgtgtgtgtgtgtgtgtgtgtgtgtmtgtatatatatatatatatgaagtacttagcataatttatggcacttagtaaatacccaggaattgttaactgttaaattatgaattgtctattcagaag

SEQ ID NO: 323465 - DNA, 201 bp, Homo sapiens
aaattccaatacataggaataaaaattcctactttataggctacttgagaagatcaggtagataaaatctatatgtgtgtgtgtgtgtgtgtgtgtgtgtstctgtatatatatatatatatgaagtacttagcataatttatggcacttagtaaatacccaggaattgttaactgttaaattatgaattgtctattcaga

SEQ ID NO: 323466 - DNA, 201 bp, Homo sapiens
caaaattccaatacataggaataaaaattcctactttataggctacttgagaagatcaggtagataaaatctatatgtgtgtgtgtgtgtgtgtgtgtgtstgtctgtatatatatatatatatgaagtacttagcataatttatggcacttagtaaatacccaggaattgttaactgttaaattatgaattgtctattca

SEQ ID NO: 323467 - DNA, 201 bp, Homo sapiens
gtctctaggcctcagtgtcttcatcaaaattccaatacataggaataaaaattcctactttataggctacttgagaagatcaggtagataaaatctatatrtgtgtgtgtgtgtgtgtgtgtgtgtgtctgtatatatatatatatatgaagtacttagcataatttatggcacttagtaaatacccaggaattgttaact

SEQ ID NO: 323468 - DNA, 201 bp, Homo sapiens
aattcttctgcctcagcctcctgagtagctgggattacaggtgcccaccaccacgcgcagctaattttctgtatcctttttttttttttttttttttttgkgagacggagtctcgctctatcgcccaggctggagtgcagtggcacgatcttggcttactgcaaactccgtctcccaggttcacgccgttctcctgcctca

SEQ ID NO: 323469 - DNA, 201 bp, Homo sapiens
gctcatgcctgtaatccctgcactttgggagcctgaggtgcacagatcacttgatcccaggagttccggaccagcctggacagcataatgagactccatcyccattaaaaaaaaaaaaaaattaacccaatcatgttgtcactcttcttaaagccattcagtggcctccctttgctcttaggataaaagccaaaatccttt

SEQ ID NO: 323470 - DNA, 201 bp, Homo sapiens
agctctagactcatatacattcgtccctcagtatcctcagggattggttccaggacaccctacccactagccccctctcagatagcaaaattcgaggataytaatgagtcccttatgtaaaatgacgtagtatgcgtatcacctatgcacatcctcctgtatactttaaataatttataggttacttataatacctaatac

SEQ ID NO: 323471 - DNA, 201 bp, Homo sapiens
aagtggttatgtttctatatttagtaaaaccataggatttgtgaagcagttgcagattccttcaggataaaatggtttctataaatgtaacttttttttttcttttttttttttgtttgtttgttcatttattgagacaggatctcactctcgcccaggccagaatgcagtggcatgaacatggctcactgtggcctccac

SEQ ID NO: 323472 - DNA, 201 bp, Homo sapiens
ataaaattactttttagccatttattttactcatcctcacctttcacacaaaatcatccaaaactagtgagcaacataattgatgtatgattcttatattytcttttttctaccaaccctctagtgtaattggcccccaggttgccagcaaaaaggagacattaggacctagattatctagtcctacataatttagtattg

SEQ ID NO: 323473 - DNA, 201 bp, Homo sapiens
ctatctcaacaaaaaataaattagccaggtgtagtggtgtgcacctgtagtctatctactcaagaggctgaggtgagagaattactggagcctaggaactsgaggcttcagtgagccataatggtgtcactgtgctccagcctgggcgacagagggagccccctatgtgaaaaacaaataattaaattttaaagttggcaa

SEQ ID NO: 323474 - DNA, 201 bp, Homo sapiens
ctgtcttttcccctgaccacacccacctcttaagctccattacttgcagactgattgtgctattgttttcaaagtctggggcataaattgtttcacaaacygatccaatcaaatttatactcctttgtggacatagttttcaagggcagcgtttgagtttgttctgaccccaaaaaggctcttcccagctgtttctgtttc

SEQ ID NO: 323475 - DNA, 201 bp, Homo sapiens
ccatctctactgaaaatacaaaaaaaatagccgggcatggtggcgggcacctgaagtcccagttacttgggaggctgaggcaggagaatcacttgaacccrggagacagaggttgcagtgagccgagattgcaccactgcactctagcctgggcgacacagccagactctgtctcaaaaaaaacaaaagtcaccaagagaa

SEQ ID NO: 323476 - DNA, 201 bp, Homo sapiens
ttatgttggcaatgaggtgtcactatgttccagattcttttgttcttggaaggacgttgttgttgtgccccttctggggttcctggagcctgatacttctscttttatacaatagttggaacaagattatagtttaaataattaagtagcagaataaaccagtttattggtaagttattcctgttatcattgtttgtttct

SEQ ID NO: 323477 - DNA, 201 bp, Homo sapiens
gtgctgtttcagcaactcgtgtagtaatggaatttagcctttatgcagaaattgtattcagtttattttacatttcctttatattattatggttctgaaartgtagagtacttaccttttttatttgctcttcatttatctttgtgtgtgaatttgaggcgaaggatgacaataattatctttgtagttgagcaattttac

SEQ ID NO: 323478 - DNA, 201 bp, Homo sapiens
gacagtgattattaagtcatcaacatcagaggtatcaagttgagaaatagattgtgtggtggtgccctctctaccactttggcatcacctttctgctgttwcatgccttttaaggcattggcactgaaacttctgaaaatactggtgtagctgaatctactattgagttaatcctaaaaacagtaaagagaaaagaaaaaa

SEQ ID NO: 323479 - DNA, 201 bp, Homo sapiens
cccagtgtgggatccactgggtgaagccagctgggctcctgagtctggtggggacgtggagaacctttatgtctagctaagagattgtaaatacaccaatyggcactctgtatctagctcaaggtttgtaaacacaccaaacagcaccctctgtctagctcagggtttgtgaatgcaccagtggacactctgtttctagct

SEQ ID NO: 323480 - DNA, 201 bp, Homo sapiens
aattcctggcctcaagcagtcctcccacctcagcttcccaagtagccaagactacaagcacatgccactgtgcccagccacaaataaacatttaaaaaaawtttttttaattgttttttgggagacagacaaaatctcgctttgtcatccaggctggagtacagtggcatgatcttggctcactgcaacctccgcctcata

SEQ ID NO: 323481 - DNA, 201 bp, Homo sapiens
tgtttaattcatatattgtattgtttctttatcactaccataagtacgtaagattacaaatttaagattacaatcctaaatcttaaatttgcaatcctagkttggtagtttttgaagctactaagattcaataattactttcaagaattgaggtgaaatttatgtcataaaattaagcattttaaaaggtacatttcagtg

SEQ ID NO: 323482 - DNA, 201 bp, Homo sapiens
tcacaaattcatagcacctggccaaaaggtaattagttttatggataaagcccaatacatctactgtttaatgtgttaattatacataatgaataaaattrtatttttaaaattttcttttttgtctttttattaaggacagattagaacatatgctaaaaaacaactttttaatgtaagtagatgttatactttttgaac

SEQ ID NO: 323483 - DNA, 201 bp, Homo sapiens
tgtttaataactgttgcttttcaattttcaaagctgttgagatattacattaagtatttcaactctttaatcactgttgttataatttgtttatatttgaygtttataatttgtctaataaaatagatttttttaatagacacctatggaaaaaaagttatatattttttaatttcatttggtcctttcccagtaaaattt

SEQ ID NO: 323484 - DNA, 201 bp, Homo sapiens
ttgagaatttgtgaatgtatctggaggaggttacactgacaaagttctgatttattcactcattatcagtcagtcagcagcctaaaggaacttacagaacwttccccatgtttcttactttttaggtgtaccaacattccaagaaattctggctcatagattcctaaaaaaaataactgctactcagtgtaatggctgaag

SEQ ID NO: 323485 - DNA, 201 bp, Homo sapiens
tatgaatctttgatcttaagaggtttgagaatttgtgaatgtatctggaggaggttacactgacaaagttctgatttattcactcattatcagtcagtcarcagcctaaaggaacttacagaacattccccatgtttcttactttttaggtgtaccaacattccaagaaattctggctcatagattcctaaaaaaaataac

SEQ ID NO: 323486 - DNA, 201 bp, Homo sapiens
acttagcccagtgcctttaacaggaactcagtaaatactgagtaattgagtggacaaacaagtgacttgagtaactgtggctgtaaaggtattctttaggstggatcctctcctgaggtttcttattggctaatatcactatttatttcagtcactgagggtagtgaaccatgattcagaaaacctggattctaatcctgg

SEQ ID NO: 323487 - DNA, 201 bp, Homo sapiens
ggtggtatcgggaacacagacatgttaagattgagatgcttttcagatatccagccatagatgttggataggcaactgaaagtgtgggtctggagttttayaagacagtcttgggcatgagtatattgataaaagtggtcattaagtagatgaagaaagaagtaatttggccttctcaaggaatctctgctggtgacaaaa

SEQ ID NO: 323488 - DNA, 201 bp, Homo sapiens
ttaagtattttaatattcttattgcaaagttgatattaaaatgaaggttgtatataatgatatcttgtttatcttgttttttgttactatagagaattaamttttgggagttctgtggaagtacaagggcagctgataaaaagtccatccaaaaggcaaaatgtggaactgaaggcagaaaaaattaaagttattggaaat

SEQ ID NO: 323489 - DNA, 201 bp, Homo sapiens
gatctactggtatgcaacagaggaagagaagatacctgcctttaaggcagcctctactttatacatatgtgcacctttatgaatacaccatttagaagacstaatattgtcttgttgatttaaaaccaagaatgttagttgtgaataaaaacattttagaaatatttttcattccagtcacttttttccttctaagaacaa

SEQ ID NO: 323490 - DNA, 201 bp, Homo sapiens
tggccaatacgacagaaccccatctcccatctctactaaaaatacaaaaattagctggccacagtggcatgcacaactgcaatcccagctatttgggaggmtgaggcacaagaattgcttaaatccaggaggtggaggttgcagtgagccgagatcacaccactgcactacagtctgggtgacagagcaagactctgtctc

SEQ ID NO: 323491 - DNA, 201 bp, Homo sapiens
ctccaatagtttagaatctatacattctgtttttattattttagtggtttaccttatattttttacatgaaataaaaagttaggccaggtgtggtggctcmtgcctgtaatcctggcactttgggagactgaggcaggtggatcacttgaggccaggagttagagaccagcctggccaacatggtgaaatcctgtctctac

SEQ ID NO: 323492 - DNA, 201 bp, Homo sapiens
agaatgttctaacaaagaatattttccccttatgagctataagcaattaggtattgctgttatagtacaactaactaacatttttaagacatctgagttaygctaacccttctgttaggtttctgggtttttttcaacttatttgtggagtatattgtgaatgtcaagattagggcagccagagattttcttattctgctg

SEQ ID NO: 323493 - DNA, 201 bp, Homo sapiens
aataaattgacacttaagaatattcatgttttggtgtcatgatttgctactccagttcttatttatttggtactccgctggtggtagtcagggtatatacygttcttgaatgatttagttaattgtgatatacacttttttcctgaagactagaaaaaagtgtgctgtccccaaaagtaatctgcgtctcttaattttctt

SEQ ID NO: 323494 - DNA, 201 bp, Homo sapiens
ggagtgctcttgagaacagtattcataaggaaaggaagaaagtcacattgaacagtgggaagtgtgaactgtgatccatttacaaacagaggccttagctkcttctgtgaagaactttggaactggaatggtcctaaaccagatgggaacagttgtcccatctaaaagcaaggcgttagcactttgtgccttcccatatca

SEQ ID NO: 323495 - DNA, 201 bp, Homo sapiens
ggacagtggctttgtacatattcatactccaataatcacatccaatgactctgagggagctggagaactttttcaacttgaagtaagttttgcttcccatyttgaggggtacattgctgtttaatatttttcatttgagggtttgaaatttaataatagttttgtggacagaagactatgagcagcacctgaaattgtcaa

SEQ ID NO: 323496 - DNA, 201 bp, Homo sapiens
gttgtttctgtatctttactattgtgagtaatgctgcagtgaacattagagtgcagatatcaccaccaatatactgatttctattcttctggatatatatrcccagaagtgggattgctgaggtgtatgttctgtttttaggtttttgaggaacttccataccatttctcataatgacggtactaatttacattcccacca

SEQ ID NO: 323497 - DNA, 201 bp, Homo sapiens
cagtaaagttacactgacatattattattcctccaaagtccatagcttttacgagcattcactcctagttgtctgcattctatgcttttggacagatgacrtacgttcaccattatagtaacatacagaatagtttttgctgccctagaacttttctatgctctgcctagccattcttccttcctaaccactggtaaccat

SEQ ID NO: 323498 - DNA, 201 bp, Homo sapiens
ctaggctcctacagtcaggatctagctcaggtttcagctgatctgtgctatctggcttttatgctgtgtcgacctactgtctttgttgctttcagaagttygactacaaagacttgtcttctgtccctgccaaccctctatcctttgaaagcagagctccttcttatcccacctcacatacttcacttccaagattcattg

SEQ ID NO: 323499 - DNA, 201 bp, Homo sapiens
gtggaaaaatgctatcaaacagcatcacatactacaaagaaatacttcgtgaaagaaagaattaataatggagcagacttcactgttgtcttaagaaactkccacagccaccccagccctcaccaacttccactctgatcagtcagcaaccatcaactttgaggcaagaccctccaccagcaaaaagattatgactcacag

SEQ ID NO: 323500 - DNA, 201 bp, Homo sapiens
cctcatagcacttgccaaaatttttattcttatgtattaatatttatgtgtttgcttccttgcttttgcaccctttttccccaacaagagaagtgatcatrtctatctttattcacaaatgtaatctctttgcatagcaaggatttcaacaaatgtgttgtatgagtgaaagatttcaacataacataatgaggactggga

SEQ ID NO: 323501 - DNA, 201 bp, Homo sapiens
tgttccacggggaggtgtgtggcacgtcattgaaagggatgaagagggccttctgtgatctttttatggatgtcatagaggagagtcacaaggacagagastaaaacaattatctatctttcctgccaactctaaggaagtctgggataataatctttctttctgatatcctttggtgcgtgttttccttcaccatacaac

SEQ ID NO: 323502 - DNA, 201 bp, Homo sapiens
acttctgttttttggggtaattacagtagattttttctttggcttgaaatgaggattcaatgagttattatacataaagaacttcaaacagtaagtggcayaaagaaagcattcaataaatgtaaactattattacttttactactactgctacttctactactattactactattgtaatcttaccgtccatacaattaa

SEQ ID NO: 323503 - DNA, 201 bp, Homo sapiens
ttcctcatatattttggaaattaaccccttatcagatgtatgggccctgctgtggcttacagaagagtcagcatggctccatttgaaagtgactttagcayacagaatgatataggatgattgcttcacttacttgattaaaataagtaaaaacatagatggccctcagatgtatgatttacaaatattttctctcatttt

SEQ ID NO: 323504 - DNA, 201 bp, Homo sapiens
cagaagagtcagcatggctccatttgaaagtgactttagcatacagaatgatataggatgattgcttcacttacttgattaaaataagtaaaaacatagayggccctcagatgtatgatttacaaatattttctctcattttttaggctgtctcctcactctctttattatttcctttgctgtgcagggatttaattcaat

SEQ ID NO: 323505 - DNA, 201 bp, Homo sapiens
tgtgtgtgggtgctattttataatggaaaaaaaagctcatatagaaacaaaaattcatcgaaacatgctatggaagtatgtagtgtgtgccctaatcagaygcttcacttcttgaatgaacaatgtagtcaaaatataaactcaacgtttaaagaaaattcatcttgtgaaaatgatttttcaatcactgtgtattatatt

SEQ ID NO: 323506 - DNA, 201 bp, Homo sapiens
aaaaccagcatgtagcctgttcataaattttatgatgtgtgaagcacatgttcaaggaagtatttattagtaagaccataagttaaattaggaagggtggwtcatatcttaaatattccatcatttttcgtaatgtttatgtacccagacccaagtgtgaaacttaaatttgtttttaatgtattctcctgataaatgatt

SEQ ID NO: 323507 - DNA, 201 bp, Homo sapiens
aagtaagcctaggaaataggcatcacttcactggtaacattgaaacagcaagtctttcatatacaaatgaaaacatacacatttttcttttcttttttttwattatactttaagttctgaggtacatgtgcacaacgtgcagttttgttacaatgtatacacgtaccatagtggtttgctgcacccatcaacccatcacct

SEQ ID NO: 323508 - DNA, 201 bp, Homo sapiens
taggcatcacttcactggtaacattgaaacagcaagtctttcatatacaaatgaaaacatacacatttttcttttctttttttttattatactttaagttytgaggtacatgtgcacaacgtgcagttttgttacaatgtatacacgtaccatagtggtttgctgcacccatcaacccatcacctacattaggtatttctc

SEQ ID NO: 323509 - DNA, 201 bp, Homo sapiens
tacaaatgaaaacatacacatttttcttttctttttttttattatactttaagttctgaggtacatgtgcacaacgtgcagttttgttacaatgtatacaygtaccatagtggtttgctgcacccatcaacccatcacctacattaggtatttctcctaatgctatccttcccctatccccccaccatggaatactatgca

SEQ ID NO: 323510 - DNA, 201 bp, Homo sapiens
tgaaaaccttcagtgttgggctacacaagttggggaggaaggaaaggagcaatattggtgaaaaaataaagataagtgacatgatcctcataggtcatgargaacttacaatctagcggaagagacagagccttgcctgagccagcccttgcctacttttccaccttcatctggtacacgccctcttgccccagttctagc

SEQ ID NO: 323511 - DNA, 201 bp, Homo sapiens
aacaaaggtcccagcgtcaataagtcaaaccgcagactctgacagctgagtgaatagcagaggccagagtccacttgaagtgttcacactctcagaggccragtttagatcttatctgcctgagattccttttaacactgatttgtcatagcaggtagctgacagcatctactcctgaagaccggaaacatggcttgtacc

SEQ ID NO: 323512 - DNA, 201 bp, Homo sapiens
ctttcaagcaggttacacttgtttagaagccccacttgtacattctcagcaatactttcagagttttatggggttaccacctaaagattttatgtatttcktcatcttttaaaatagaaaagtgcactcagacacaatctcatttttcaggggttgctttgagcctctagtcatcattaggaaataaacaaagatttgttt

SEQ ID NO: 323513 - DNA, 201 bp, Homo sapiens
gaaactaacaacaaagtgaacagacaacatatagaatggaataaaatatttgcaaagtatgtatctgaccaaagtctaatatccagaatctataaggaacwtaaatttacaagcaaaaaacaaacaaccccattaataagtgggcaaaaaacatgaacagacacttttcaaaagaagacgtatacacagccaacaagcata

SEQ ID NO: 323514 - DNA, 201 bp, Homo sapiens
ataggacctaattcaactaaagagcttctacacagcaaaagaaactaacaacaaagtgaacagacaacatatagaatggaataaaatatttgcaaagtatrtatctgaccaaagtctaatatccagaatctataaggaacttaaatttacaagcaaaaaacaaacaaccccattaataagtgggcaaaaaacatgaacaga

SEQ ID NO: 323515 - DNA, 201 bp, Homo sapiens
actattacttacttttatttatttatttttgagatggaatcttgctctgttgcccaggctggaatgcagtggggcgatctcagctcactgcaacttccgcytcccgggttcaagcaattctcctgcctcagcctcccaagtagctggaattacaggtatgggccaccatgcccggctaatttttgtatttttagtaaagac

SEQ ID NO: 323516 - DNA, 201 bp, Homo sapiens
aaagcaatgcttaaagaactggaaagactgtagttctttcagttctggttactcctcacagagagaaaagagttaaaattagggattcagaaccagtggcwggatatcacctcaactttcagagatgatacagtaagtcaccgaggcctgtggaatgtgttcagtactaacgaatattagcatagtaaaaaataattaatg

SEQ ID NO: 323517 - DNA, 201 bp, Homo sapiens
gcctagtgacttgggcatttctaatatgaataacatttaataaagtccattataaatcaacaatcaactttaatgaactagccccttctctgaggttatcrtcttatgtaaaaagaatgtaatcccatctgatttcttcattttatcaattcacagaatgccaatactggggctcagagctccagctacccactttggatt

SEQ ID NO: 323518 - DNA, 201 bp, Homo sapiens
tgatttcttcattttatcaattcacagaatgccaatactggggctcagagctccagctacccactttggattttgaagatgttttaagatatgatgaacaygcatacaagtggctctccaccctcaagaaagtaggcatagtaagactcaccggagcatctgacaaaccaggagaagtttcaaaacttgggaaaaggatgg

SEQ ID NO: 323519 - DNA, 201 bp, Homo sapiens
tatcataaaaggatgttgaattttatcaaatgccacttctgcatctattgaaatgaccacctaatttttatcctgaattctgctaatgtgttgtcatattyactgatttgtgtgtgtcaaaccatctttgcatcccagagataaatctcacttgatcatactgtatgatccttttaatgtgctattgaattcattttgcta

SEQ ID NO: 323520 - DNA, 201 bp, Homo sapiens
tcggaaaattgaatacctattgggggaaactgcccccaatatttcaacgtaggttctttctattttccataagtgtcagctggctgagaaatagagagacrgtacaaagagaggaactttacagctgggctgctgggggtgacatcgcatatcagtaggaccatgatgccagcctgagtctcagaccagcaagtttttatt

SEQ ID NO: 323521 - DNA, 201 bp, Homo sapiens
ttatgttgagatacattccctctatacatctttgttgataattattatcataaaaggatgttgaattttatcaaatgccacttctgcatctattgaaatgwccacctaatttttatcctgaattctgctaatgtgttgtcatatttactgatttgtgtgtgtcaaaccatctttgcatcccagagataaatctcacttgat

SEQ ID NO: 323522 - DNA, 201 bp, Homo sapiens
gaggcaagaccctccaccagcaaaaagattatgactcacagaagactaagatgatcattagcaatttttagcaataaagcattttttaattaaggtatacrtatttttcagatgtagtgctgtttcatacttacagactacagtataatgtaaacataaattttatatgcattaggaaaccaaaaattctgcatgactcac

SEQ ID NO: 323523 - DNA, 201 bp, Homo sapiens
aaattatagagtaagtactatttataaatttcccatagcaataaaagaattgacaacaaaagatccactaatctaaagtttaaacagcacaaaacttcaaygaacttcagagctttatttttattaacatttcacccaattttagagtgatagtattttcaccataaaagtttttattaaattacataaaatttatcccta

SEQ ID NO: 323524 - DNA, 201 bp, Homo sapiens
cagaaaacaaggacaattttagttcttcctttcagatttggatgcctttcatttcatcttcttgcctaattgttctggctaggacttccagtactatgttrttagaagtggttagagtgggcattcttgtcttgttcccaatcttagaggaaaagctttcaacttttcatcagtgaatatgatgttagctgtgggcttggc

SEQ ID NO: 323525 - DNA, 201 bp, Homo sapiens
aagtagtggcagagactgagaagatttacccaaattttgaaagaagttccactgtggaaaaatgctatcaaacagcatcacatactacaaagaaatacttygtgaaagaaagaattaataatggagcagacttcactgttgtcttaagaaactgccacagccaccccagccctcaccaacttccactctgatcagtcagca

SEQ ID NO: 323526 - DNA, 201 bp, Homo sapiens
acaatagccatgagaaaataagtataagacattacttgaagtacattaaaaccacacatagaaagttaatgatgacacagaagaaggaacttgaagggatraaggaatgatcctcagaaatgaggtaatacttgagttgcactttggagaatcaatcagtttgtcaggcaaagatagatagaaagtaaggaaattctcaac

SEQ ID NO: 323527 - DNA, 201 bp, Homo sapiens
ctcactttaaatcaagagctagaaattattatgtttagtgagaaaggcatgaaagctgagggaggccaaaagctaggcctcttgcaccagactgtcagccmagttgtgaagaatgcaaaggaaaagttacagaaggaaattgaaagtgctactccagtaaacacacaaatgataagaaagcaaaacagccttactgctgat

SEQ ID NO: 323528 - DNA, 201 bp, Homo sapiens
tggagcacacagaattagggtttaaaaggtatattgtgcctcagcagaagaaagaagctgtgacaattggagctgtttgaaacctgttccacggggaggtrtgtggcacgtcattgaaagggatgaagagggccttctgtgatctttttatggatgtcatagaggagagtcacaaggacagagagtaaaacaattatctat

SEQ ID NO: 323529 - DNA, 201 bp, Homo sapiens
ggggaacttctgtactgttttctataatgactaaaataatttacattcccactaacggtgtacaagggttttcttttctccatattctcaccaagacttaycttttgtctttttgacaatagtcattctaacagatgtgagatgatctcatgaggtggttttggtttgtatttacctgatgataattgatagcatttttat

SEQ ID NO: 323530 - DNA, 201 bp, Homo sapiens
taagttaggcaaattaataaccccacaatgacctctaagtctttcagtgaaaggaagagttgcatgtctctcactttaaatcaagagctagaaattattaygtttagtgagaaaggcatgaaagctgagggaggccaaaagctaggcctcttgcaccagactgtcagccaagttgtgaagaatgcaaaggaaaagttacag

SEQ ID NO: 323531 - DNA, 201 bp, Homo sapiens
cacctcagtgtcttttccccaagtaggaaacctctaaggtatatcctacagtgtccctatgaagtccagtgatgctgaacccctgttgccaaagcagtaaygtgttcattacaacacgttccagaggttttctttcctgtcttaattccccatcttctatgagtgtttctggatagactgcctcaataaatttcttgcatt

SEQ ID NO: 323532 - DNA, 201 bp, Homo sapiens
cattattattgtaaccattttatacacaaaaattaggctgatagaaataaataactagtttgtaatcaaagagacatgaagtatcagagccaaagtttgawttaagggtatctgaactattaaatgccttctattttcctcctcttctatgtgctcacagcaatttgtatgggtcctctctctgtcactaccattactaca

SEQ ID NO: 323533 - DNA, 201 bp, Homo sapiens
aaattacaaaaacagatttcaacaaatcatgttaacatacaagctataattttcagaaagcatttgcttttaaacactgatgatctgcaatgtttttttttaattttcatcacatttgccccagtagacctttaaataatccagaaaaagttaaagtgggaacttattttcccattttgccctgcttttgttttgattacc

SEQ ID NO: 323534 - DNA, 201 bp, Homo sapiens
tataatcccttgggtatatacatagtaatgggattgctggatcaaatggtatttctggttctagattcttgaggaatcaccacactgtcttccacaatggytgaactaatttacactcccaccaacaatgtaaaagcattctgatttctccacatcctctctagcatctgttgtttcctgactttttaatgatcgccattc

SEQ ID NO: 323535 - DNA, 201 bp, Homo sapiens
aaatcattttccatatgccagcaactgagctcagcacttaatatttactgcactgtttaatcctagcaataactcccaggcagcattattattgtaaccaytttatacacaaaaattaggctgatagaaataaataactagtttgtaatcaaagagacatgaagtatcagagccaaagtttgatttaagggtatctgaact

SEQ ID NO: 323536 - DNA, 201 bp, Homo sapiens
gaagtcccagacaaacttctattactctgaagagaaaaaatatggtaggtgaataaattaggagggaaacacaccacagacacacacacacacacacacamtacacacatgtattaatatgaagtaaaagaaacctatcccatcagataagaatatgccaaaaatccaaaggctgtttttcagaacaggtgaaactactgt

SEQ ID NO: 323537 - DNA, 201 bp, Homo sapiens
gctgaagttgcttatcagcttaaggagattttgggctgagaagatggggttttctaaatgtacaattcatgtcatctgcaaacaaagacaatttgacttcytcttttcctaattgaatacgctttatttctttctcttgactgatcaccctggccagaacttccaatactatgttgaatagtagttgtgtcagagggcatc

SEQ ID NO: 323538 - DNA, 201 bp, Homo sapiens
tccaatttggttgcccttttttctttctcttgtccaattacccaagctatgacttgcagtactatgttgaatagaactggtgaaagcgggcatccttaacytgttccagttctcaggaactggaacttttaatttttaaccttttaacttttaatttttgcttttaacttttaagttatgcctttaacttttctccattca

SEQ ID NO: 323539 - DNA, 201 bp, Homo sapiens
tttattaaataggaaatcctttccccattgcttgtttttgtcaggtttgtcaaagatcagatggttatagatgtatggcattatttctgaggcctctgttytgttccattggtctatctgtttttgcaccagtaccatgctgttttggttactgtggccttgtagtatagtctgaagtcaggtagcatgatgcctccagct

SEQ ID NO: 323540 - DNA, 201 bp, Homo sapiens
tctttcatctccctggttaaaaatattcctggattttgttttgcagctattgtaaaaaggactgagttcatggtttgattttcagtttggttattgttggkatagtagtgctactgatttgtgtacattaattttgtaacctgagacttcactgaatttgcttatgaaatctagaagtcttttggaggagcctttagggtt

SEQ ID NO: 323541 - DNA, 201 bp, Homo sapiens
ttttttacatgacttttttcctttggggtagatacccagtagtgggattcctggattgaatagtagttctacttttaattctttaagaaatctccatactsttttccataaagattgtcctaatttacattcctacccacagtgaacgcttcccttttcaccacatccatgcaaatatctgttgttttttgactttttaat

SEQ ID NO: 323542 - DNA, 201 bp, Homo sapiens
aggcaagcctgaacccagagggcactcctcttgtggggatccagtcaccctgaagtgttccagaaaggctgcctataggtgcactcatgctgaactcctaygggagaagccctagctgtgtctgcagtgattggcaggagggaaaagaattcctcttctccaggaccctttgtgagcacaagggctgcctgacagttgggg

SEQ ID NO: 323543 - DNA, 201 bp, Homo sapiens
gtacttagcacagtgtctggcacactgtggatgctcaaaacttgttagatcctttctgtctcccctttttcttctagttaaagcgccataaacataagagmaaaggcacgttaaagaacatttgcgaaaaagacaggagagaagaaaagtgccttataatatcttatgtttgagctccccttacatgaagaacaatcatgt

SEQ ID NO: 323544 - DNA, 201 bp, Homo sapiens
tctattcctgattaagcacatgagagtatctcaaaggtggacaattgccatgaaaaaaactttagtcttacattggtttgatttctagcaaaaatttacckacctggtagatagtttcacttcaatagaattaaagaaggcagtgaagactggtcaattatgaacctaattccaatcaagaatatagaaatgtttggtgaa

SEQ ID NO: 323545 - DNA, 201 bp, Homo sapiens
tctatcagcacatttttccaacagcatgtactcactttttgcctctgtgtcacattttggcaattatcttagtatctcaaactgtttaattattttcatawctgttatagtgatctgtgatcagtgatctttgagcttactactgtaatttttctggggtaccataaccagcactcatatatgacagataatttaataaat

SEQ ID NO: 323546 - DNA, 201 bp, Homo sapiens
tcattccagtcataggcgtgagtatacagactatgttagtattagtgtttcttcatcattttgtgttatttttgttttctccagctagatggtcattctgktcataggactgagcatacagagtatgtcaggttactaacagtccaacatgaaaatgtgtgtctctcctttcaagcaggttacacttgtttagaagcccca

SEQ ID NO: 323547 - DNA, 201 bp, Homo sapiens
taattcttgttttcttcagatagatggtcattccagtcataggcgtgagtatacagactatgttagtattagtgtttcttcatcattttgtgttatttttrttttctccagctagatggtcattctgttcataggactgagcatacagagtatgtcaggttactaacagtccaacatgaaaatgtgtgtctctcctttcaa

SEQ ID NO: 323548 - DNA, 201 bp, Homo sapiens
ttttttaaattatttttcatacactgccatttatggtttctttattattttacgtgtaattcttgttttcttcagatagatggtcattccagtcataggcrtgagtatacagactatgttagtattagtgtttcttcatcattttgtgttatttttgttttctccagctagatggtcattctgttcataggactgagcata

SEQ ID NO: 323549 - DNA, 201 bp, Homo sapiens
tgggttccaagtctttgctattgtgaatagtgccacaataaacatacgtgtgcatgtgtctttatagtagagtgatttataatcccttgggtatatacatwgtaatgggattgctggatcaaatggtatttctggttctagattcttgaggaatcaccacactgtcttccacaatggctgaactaatttacactcccacca

SEQ ID NO: 323550 - DNA, 201 bp, Homo sapiens
ttgttttttaaattatttttcatacactgccatttatggtttctttattattttacgtgtaattcttgttttcttcagatagatggtcattccagtcatargcgtgagtatacagactatgttagtattagtgtttcttcatcattttgtgttatttttgttttctccagctagatggtcattctgttcataggactgagc

SEQ ID NO: 323551 - DNA, 201 bp, Homo sapiens
acagggtctcccccacactgggcactctccaagagtatgcctggcagtcaggctctgaatgctggcatgctgcctattctggcctttcccttttgttgccctaagggctgtgtgttgtgaatcaaatcactgggcaaccaagtaccttcaaaaacagccccaagctctctggaaactacttcctattccagccaaaattgc

SEQ ID NO: 323552 - DNA, 201 bp, Homo sapiens
tgggaagcacactgcagtgccctgtgcttttctcaggtgccactaatctgcaggttgctcccgcaaaatctgcctaattttgggcttcatttgtaagctcyagataaacttatcttcctctttccttttctaaactccatccatacttccagctagaaaacacataccacatgttcagatataaatattaaaaataagtct

SEQ ID NO: 323553 - DNA, 201 bp, Homo sapiens
ctttcccctaacctgatggtctttcattagttttgcaaaggccattgagttcttggggaaggcctattcccatttaaaactataaattaaatatctctcamagacagcttagcctaagcccaggaatgattaagggaaaggcaagatggaggaggtgggttagatcagatctctttcattgccataattttctcactggta

SEQ ID NO: 323554 - DNA, 201 bp, Homo sapiens
actggggcactacctaatggagctgtgggaagaaagccactgtcctgcagactccataatggtagatccaccgccagcatgcatactcagcatggaaaagycacaggcactcaacgacctgtgacagcagcctctggagccgaactttgcaaagccataggggcagagctgcccaaggcattgggaacccatcccttgtac

SEQ ID NO: 323555 - DNA, 201 bp, Homo sapiens
tttactaggattcttattatgctcttgtccacatcccgacttgaggactttactcccagatttcactgcttgctagctagatagaaatgttgtttactctyacatttctcacctgaaaaaaatgagaataatagtagtaccttccccctagagttgtaaagattaaatgtgttatgtctatagtacttgttatggatactc

SEQ ID NO: 323556 - DNA, 201 bp, Homo sapiens
aaaggtaattatctctaaattatgtctcccttctttctcaagttcaataatggggctagtcaacaataatttagataactcttttttatttggtcacgcayatataaccgcatatgaacccacgtttgtatagtacttggtgcgaattaagtatattcagtaaatggaagcttcagctattattattactattatcattac

SEQ ID NO: 323557 - DNA, 201 bp, Homo sapiens
agggaccaatacagctattgactttaagttgaaaccaatgatcatttactattctgaaaattctaggaccattaagaattatactgaatctgttctgcctktgctctatcaatggaaaaacaaaacctggatgaccatacgtctatttacagcatggcttactgaatatttgttcaatagctgttgagactcactgctcag

SEQ ID NO: 323558 - DNA, 201 bp, Homo sapiens
aatatcattcatttcaaagaatttttaaatttccatcttgatttcattattaaccccaaaatcatttaagagaagattgtttaatttccatgggtttgtaytgttttcagggttccttttggagttaatttccagttttattccactgtgttctgagagggtacttgatataattttgattttcttaaatttattgagaaa

SEQ ID NO: 323559 - DNA, 201 bp, Homo sapiens
gtgtcaataatatcattcatttcaaagaatttttaaatttccatcttgatttcattattaaccccaaaatcatttaagagaagattgtttaatttccatgkgtttgtattgttttcagggttccttttggagttaatttccagttttattccactgtgttctgagagggtacttgatataattttgattttcttaaattta

SEQ ID NO: 323560 - DNA, 201 bp, Homo sapiens
aggagaggataatttcattcatttaaaacaacaacaacaacaacaaaaacatttctttgttcttcctagaaattactattagcattttttgctttgccaaracagattttaaggtaggagtaaatcttaaggtctttttgcacatatatttctaagaaagttaagagagaaaatgaaatcagtaaacaaaatgtagggttt

SEQ ID NO: 323561 - DNA, 201 bp, Homo sapiens
ctctttctatttatggccctctgctgtagccagactttttattacccagtgaactgtgcatttttgcacatcattatttctgtcacctgatttgctttctygttctattctgcataacccaaatctcatccattcccctttgcctaacttacccgcctcttccccttgaaatccttccctgcctactccaacatcaagtgc

SEQ ID NO: 323562 - DNA, 201 bp, Homo sapiens
agtacattcatttattcattcaacaaatatttattgaggccagccacttttcttggtacttggaatacatcagtggacaaaacaaagatctctcccctcayatagcttatactctaatgggggaagggaaattttaaagatttttaaacagatgagtaaattataataaaagttaaaaattattaaatgcttaagaaaaaa

SEQ ID NO: 323563 - DNA, 201 bp, Homo sapiens
acactggaagagggaatcgagagatacatagaaagcaaaatctagaggacttgacccactgcatgtaaagaatgagggagagtctagcttgttgtcttatsagtttatagttaggagaaatgggttgtgcacagggaaaagaagccacaatagtaggatcaagcttgttcagcaataaaatcgatttcgaacaaactgaga

SEQ ID NO: 323564 - DNA, 201 bp, Homo sapiens
cactggaagagggaatcgagagatacatagaaagcaaaatctagaggacttgacccactgcatgtaaagaatgagggagagtctagcttgttgtcttatcrgtttatagttaggagaaatgggttgtgcacagggaaaagaagccacaatagtaggatcaagcttgttcagcaataaaatcgatttcgaacaaactgagat

SEQ ID NO: 323565 - DNA, 201 bp, Homo sapiens
ctctcagaggccaagtttagatcttatctgcctgagattccttttaacactgatttgtcatagcaggtagctgacagcatctactcctgaagaccggaaayatggcttgtaccatccaaaaggcagaagcacttgacggggctcatttgatgcagatcctctggtatgatgaggaagagtctctctacccagctgtatggt

SEQ ID NO: 323566 - DNA, 201 bp, Homo sapiens
ctaaggacttctatatttcattaagaaaatgtattgtaaaggtaaaaaagcaaatgatagaacagaaacagcgcaatattctgaattgaagaaacagtgcratattctgaattacagtggtctttaagtaaataataagcattaatattctcttcataaagacgagtttactaatttagtatcataaaaacattttttttc

SEQ ID NO: 323567 - DNA, 201 bp, Homo sapiens
gaatgaaacccaaactccttatcttgctatgcatggtgcttcatgatctggtatcaacatgccttttaatctctctcaaccaccatttcccctcatagccktttgttccagccaaacaacatgttttctactgctcaaacactgtattttcatatctttgttgttggctcagcctgcaccctaaatgtggaatgacctttc

SEQ ID NO: 323568 - DNA, 201 bp, Homo sapiens
gagaatgatgatttccaatttcatccatgtccctacaaaagacatgaactcatcattttttatggctgcatagtattccatggtgtatatgtgccacatawgttatttgggggggggaacttctgtactgttttctataatgactaaaataatttacattcccactaacggtgtacaagggttttcttttctccatattct

SEQ ID NO: 323569 - DNA, 201 bp, Homo sapiens
taccaacatcatatgcccttcttcttcctcctatagcttatttcctattcccatcctgctctttctttttaaaaaatgctttaaaatcattttccatatgscagcaactgagctcagcacttaatatttactgcactgtttaatcctagcaataactcccaggcagcattattattgtaaccattttatacacaaaaatta

SEQ ID NO: 323570 - DNA, 201 bp, Homo sapiens
ccaacatatccccatttctcccacctcccaggccctggcacccactgttctactcatgacttctatgagtttggcatttttagattccatgtataagtgakatcatattgcatttgtctttctgtgcctgacttatttcacttagcataatgcccttcaggttgatctgtgttatcaaaaatgacagaatttaccttcttt

SEQ ID NO: 323571 - DNA, 201 bp, Homo sapiens
tccatctctccagtagcaggcttacccttgactactgtttgtctctcatgatactcatccaacttattagaaagttatatttgctctatcatcaaaataawtcagaatccaaccatatcttgctgcttctactgttaacccgctgtccgcactaccaacatcatatgcccttcttcttcctcctatagcttatttcctatt

SEQ ID NO: 323572 - DNA, 201 bp, Homo sapiens
tttcattattaaccccaaaatcatttaagagaagattgtttaatttccatgggtttgtattgttttcagggttccttttggagttaatttccagttttatyccactgtgttctgagagggtacttgatataattttgattttcttaaatttattgagaaatgttttgtgaactattatatggtctgtcttggaaaaccttc

SEQ ID NO: 323573 - DNA, 201 bp, Homo sapiens
acacggataattatcactccctcataaatttctattcagttgcacatatattgggtatctattttgtgccaggacctctgtaaggaaatatcaagattttyttaaaagacatagattctctccttgaggacttatcaagtctgaaagggaacaatagccatgagaaaataagtataagacattacttgaagtacattaaaa

SEQ ID NO: 323574 - DNA, 201 bp, Homo sapiens
cggataattatcactccctcataaatttctattcagttgcacatatattgggtatctattttgtgccaggacctctgtaaggaaatatcaagatttttttwaaagacatagattctctccttgaggacttatcaagtctgaaagggaacaatagccatgagaaaataagtataagacattacttgaagtacattaaaacca

SEQ ID NO: 323575 - DNA, 201 bp, Homo sapiens
ggataattatcactccctcataaatttctattcagttgcacatatattgggtatctattttgtgccaggacctctgtaaggaaatatcaagatttttttawaagacatagattctctccttgaggacttatcaagtctgaaagggaacaatagccatgagaaaataagtataagacattacttgaagtacattaaaaccac

SEQ ID NO: 323576 - DNA, 201 bp, Homo sapiens
gaatgaatgaaaaaaaagagaatacattgcaccacaggtagccttaatatcttctgtacatgtatttggattttttaatatggtgtttcaaaaatatattygaagaggaattgactcttatcaatgtaaatagatatttcatgaattatatattaattttttctcttaataaaacaggttagatgataaaggccaagtggt

SEQ ID NO: 323577 - DNA, 201 bp, Homo sapiens
taaatatcaggtccatttgttacagagtgtagtttaagtccattgttgctttgttgactttctgtctcagtgatctgtttagtgctgtcagtggggtatcraagttccccactattattatgttgctgtctgtcttacttcttaggtctaacagtaattgttttataaatttgggagctccagagttagaggcatatatat

SEQ ID NO: 323578 - DNA, 201 bp, Homo sapiens
gattaattctgctccacatacagcattttccatctcaactgatgatggcaactccatctctccagtagcaggcttacccttgactactgtttgtctctcaygatactcatccaacttattagaaagttatatttgctctatcatcaaaataattcagaatccaaccatatcttgctgcttctactgttaacccgctgtccg

SEQ ID NO: 323579 - DNA, 201 bp, Homo sapiens
catctaaagagtctaacgtacctatgcaagatggggctgcccttgttctgactgtaaacctaccaggggagactcagaacctgggaagcacactgcagtgycctgtgcttttctcaggtgccactaatctgcaggttgctcccgcaaaatctgcctaattttgggcttcatttgtaagctccagataaacttatcttcctc

SEQ ID NO: 323580 - DNA, 201 bp, Homo sapiens
agtattccctctctgtcaatttttggggaaaatttgagtagaatttgtgttaattcttctttaatgtttggtggaattcactggtgaagccatcaggtccwggagtttccatggttggaaggtttttgattaccgacttaatcttcctacttattctgttcagattttctattcatgattcagtcctggtaggttgtacat

SEQ ID NO: 323581 - DNA, 201 bp, Homo sapiens
cctcctgtgggctaaatcatttctgagtggggccacaggggcaggattggtgggtctaggtagacccatggggtccagtggagccataggtgtcagacaaraaaaaaaaaacaacgaaaaaaacatctcaaaggcccatatacaatagtggtgttacctgcaggaatggctgacaatctgtttctatgccttagcagaatc

SEQ ID NO: 323582 - DNA, 201 bp, Homo sapiens
atccacctggggtaagtgagcttcaacatattttccacaaagcatgatgatgaccagtatcttttcgtattttgagtctagaagattacacatttcaccargtagtttgtcttttataaattttttctccaaacacaatccaagctcacaaaatctctgtacctaaatcctaaatatcttcacattcctaaaggagaggat

SEQ ID NO: 323583 - DNA, 201 bp, Homo sapiens
tggcatgaacctgggaggcagagcttgcagtgagccaagattgtaccactgcactctagcctgggcaacagagcaagactccatctcaaaaaaaaaaaaarggggctaaagataggatcccaatccctttgggcttgtaaggtgatattgtttggctctgcgtcctcacccaaatctcatgtcaaattgtaatccacacgt

SEQ ID NO: 323584 - DNA, 201 bp, Homo sapiens
ctttgttcttcctagaaattactattagcattttttgctttgccaagacagattttaaggtaggagtaaatcttaaggtctttttgcacatatatttctargaaagttaagagagaaaatgaaatcagtaaacaaaatgtagggtttccctcaaagtcacatgggcatcattcatatccattaactactgctgcattaaaa

SEQ ID NO: 323585 - DNA, 201 bp, Homo sapiens
aaattccaaactgaaaattggtacaatctcatcatcatagaagagcagatctcaatagggaatataaaggaaaaatatctaaagaaaacaatatgcccatrtaatgaggaatcacagtctttaagctcaaacttcagtaaggcataataggagattctagcccagaataaattgatgaatcaagatatatgatgggcaatg

SEQ ID NO: 323586 - DNA, 201 bp, Homo sapiens
tatccctaatcagtattagaggaaaagtaactaagatttcacgtatacttcatttttagaatataagttctacatagctataatcaatgtgattatactarttagaaggcttttggccagaagtgaaagaatataactcaaaataggttgatcccaagagttaaacaatgtcatgtgatattggtctcttttttcttctta

SEQ ID NO: 323587 - DNA, 201 bp, Homo sapiens
atcctaggtactttgccaccatccttggtcaccttcagtttgcatgcattcatcctgtttctacctaaagaaaagataaagttgactgacactttaagatygtctgaaggtccaccttcccaataagctacaaaagagtttcctctttttgcctctgtatctgggtgatgttcatgtcttgctaattataaccaccaaagc

SEQ ID NO: 323588 - DNA, 201 bp, Homo sapiens
tatacccaaggactctagaatagttagctcataattagcataaccattcaaatcaaggagctatggtaatagtggaagaaaagtaaagcagatcttgaggrtgactgaaacagacgacccccccagaagttccaaagtcatgacatcccttggcggatgacacagaggataatgttatatgtacagaacacataacaagaa

SEQ ID NO: 323589 - DNA, 201 bp, Homo sapiens
acaatttttaattctctacctcaagaactgacagaacagttttgttgtttttgttattgttgttttatttgcttttttgtttttgttgatattcagagaayaagaaaaataaatattttctctaacattgtcccctttttccatttctctgcatagtaatgtgcaaaagtgatactgaagtctgggtaacgtagatttaaa

SEQ ID NO: 323590 - DNA, 201 bp, Homo sapiens; identical to SEQ ID NO: 67897

SEQ ID NO: 323591 - DNA, 201 bp, Homo sapiens
atcatttctgagtggggccacaggggcaggattggtgggtctaggtagacccatggggtccagtggagccataggtgtcagacaaaaaaaaaaaaacaacraaaaaaacatctcaaaggcccatatacaatagtggtgttacctgcaggaatggctgacaatctgtttctatgccttagcagaatcaggctcctctctttc

SEQ ID NO: 323592 - DNA, 201 bp, Homo sapiens
tatatattaattttttctcttaataaaacaggttagatgataaaggccaagtggttcgcatcaacttcaataacgcaactagggacacaatatttgatgtrcctgttgaaagagttcagcctttttatgctgctctgaaggagtttgttgacctcatgaacagcaaagaatccaagtttaccttcaagatgaatccaggtc

SEQ ID NO: 323593 - DNA, 201 bp, Homo sapiens
ttttacagtaaaaaaggagtttaatagacatgaggccagccatgccatgggggagatggagttagtcctcaaatcaatctatccaacgctcataggttagragtttttcaaaggcattctgggaaaggagtggcagcgactaggcttgctgctgatttgtttgggcagagatgaaatcatagggggtcaaagccatcctcc

SEQ ID NO: 323594 - DNA, 201 bp, Homo sapiens
agtagtaatgttttctcttctgcaagcataacccttggagtgagggttacagagcttttaaaatctggaatcaagatgcagacaatttttccttgatcttmcccctggcactcgctgttgaactcaaaaatgacaagacaaatgatcatcatccaaaaaacttttatcatgggacacagtcatagctgaaaggaagacacg

SEQ ID NO: 323595 - DNA, 201 bp, Homo sapiens
aatggcatgtatatatagtgaacatttttcaagccatatttggtttatttttaaacatggcctcctttcaattacccattgtctggatcttccaagggtartagcttacaaagtctgaataatggtttattttcttgctacagagttgcaagtaaccttagttctttttttaattcacttttttttaacttttaagctaag

SEQ ID NO: 323596 - DNA, 201 bp, Homo sapiens
atcggcagaggtcccaatcttgacagaggtggctgggggagctctcagtgaaatgcactgagatcttaccagggggaaggatggcctctcccttgccaggmcagcaggaaagcaatccacctcccagtcacactcctgacccagtgctacagctattcaaatcagacaggcatctcttttcatctgcaggaatgaaattcc

SEQ ID NO: 323597 - DNA, 201 bp, Homo sapiens
taacgcactcctttgtttcaaaagtagcattccataagaggaagtgaaaactcacaaataactgttaggaccctctaaaatctattcgtcttgtacatggmaagaaaaagtagagagttcttcctttcttgcagagaaccatatatttacttgaagatggagactttatgacagtgcaaaaaccagatttggtttggtgca

SEQ ID NO: 323598 - DNA, 201 bp, Homo sapiens
gataatgttttgcttttgctggttcactgccactatgttgttggtttaagtttaattaatttgtcctttatgtatagcgaatgtatagccagttactcccmtcttttgtggctttttacctttcctcagcatgcaaacttacattagaccctgctgttctgttataaggcatcaaatttcttgctaaccttcaatttttca

SEQ ID NO: 323599 - DNA, 201 bp, Homo sapiens
ttttaacctagcaataaaagtattgtcaggctccatcatcttttttctatttgaagattgtattaaaagtgtaactgtacaaaagaaagtatcaaggggcyttgacatatgtaaataacattaaaaaatgatctttttaaaaattagcacttgaaatattctgtcagttcatgatggcaaaatctaaaaggatttaaagaa

SEQ ID NO: 323600 - DNA, 201 bp, Homo sapiens
ccaccaaagctcaaatctaagaaataatgtgctttccttatttatttattaatttatttttttgagacagagtcatattctgttttccatgctggagtgtsgtggtgcgatctccgctcactgcaacctctgccacctaggttcaagcaggtgcctgccaccacacccaagtagctgggattacaagcatgggccaccatg

SEQ ID NO: 323601 - DNA, 201 bp, Homo sapiens
tactgccacacatgattgaagtaggaattgcagagttaatatatggaagcccctactattgtgcctagtttagaaaatgcagaatacattttagctagttrtaatatgcatgaagtccaacacacttactggggggagatttctatttcaggtctgaatttctagaaaccaaagcaaacagagactataatcagttataag

SEQ ID NO: 323602 - DNA, 201 bp, Homo sapiens
aaatttttatgtcctagtacaaaaatgtcttttatgctgctgactgaattacttataattcagtacaaagaaaaataaatcaataaagaaacaagcaaaawtaatgacggtgagactcagctatcctatcaactacacattcaatcacgtaaattcaagtcttttacttgccagctgtgtaatctctcatgtgattattta

SEQ ID NO: 323603 - DNA, 201 bp, Homo sapiens
acctaagtaatttaacatcagcaacacccaagtctttccagttcttccacattctcccatgtgccttgggcaccctccaatcagacactatcctgacatcrcctctcttggaacaccttcctcaggacatccatttggcaaaatgggttggaaagaatggtctcaggttcccccagtgattggaaatgtgcttctgcctct

SEQ ID NO: 323604 - DNA, 201 bp, Homo sapiens
cagaagtcacatgctgcataaagtaacattcagaaggaaaatatttttggttctgaatgactcatatgaagtaaaattgggttttatacatgacaggcatrtatttgcgttttaacctagcaataaaagtattgtcaggctccatcatcttttttctatttgaagattgtattaaaagtgtaactgtacaaaagaaagtat

SEQ ID NO: 323605 - DNA, 201 bp, Homo sapiens
aactcttaacataaagtaaggcaatttctactttttgttgcagattctatttttagtagtaatacatgcattatattaataaaacaaaatgaacaacactygtgtaagatgtcactactgttttttatgctggactgtagcaatgcatggctttatcatactataattctggtaagataatattgagaaattcagacaatc

SEQ ID NO: 323606 - DNA, 201 bp, Homo sapiens
tttatggttgagtagtattccatggtgtgtatataccatattttctttatccattcattagtcgatgggcacttagattggtcccataactttgcaattgygaattgtgctgtaataagcatacattttcaggtgtcttttttacatgacttttttcctttggggtagatacccagtagtgggattcctggattgaatagt

SEQ ID NO: 323607 - DNA, 201 bp, Homo sapiens
tgggtaagggttgggggcaggagacacccagtgtgattttattctaaatgtggctcagatttttctaaaaccctagagttaagagccaaattaatcagctsagctcttcttccaaacatagcttgagggagttggatggaataaggcttaaagaatgagactagaaaactaaaagttttatttgaatttttaaattatctt

SEQ ID NO: 323608 - DNA, 201 bp, Homo sapiens
aactagagattacaataaaatcagtcatcctcatgtgttttcctccacatttagctgctttggttcaagtgaagatttaaccagacagcaggcacacgatsttaaattcttgatagatattatctcattcaaattttacagctccgtaggttgttctcatcctatattttccagataaggaaactgaacttagagaatttc

SEQ ID NO: 323609 - DNA, 201 bp, Homo sapiens
aagtcaccagaagagcataaatatgaggatgaagtgtggaagatttgaggatagaaaacataagaaacagtcagataggaacatgtaagttagagttaacyagagattacaataaaatcagtcatcctcatgtgttttcctccacatttagctgctttggttcaagtgaagatttaaccagacagcaggcacacgatgtta

SEQ ID NO: 323610 - DNA, 201 bp, Homo sapiens
gtcacaatgacaggctgcaatcatgaataatataagaactggctgctatttagacactggaaaatattttaatagtttaaaacaagatcagatttttaaamtacattctcaagctgtgcagttggtgggtaaaaaaaagaaattaatgagccatttttggaatattggttctatggctttttgcctgtagaatttgatacc

SEQ ID NO: 323611 - DNA, 201 bp, Homo sapiens
gaaagtttgaggggtctgaatagaagatcaaaccagccacatttccttaagccaaagcctaattcagagcaaggccctaactctgtttaattctgtgaagmctgagagaggtaaagaagctatagaagaaaagtctggcagtagcagaggttggttcatgaggtttaaggaaagaagttttctttataacatgaaagtgca

SEQ ID NO: 323612 - DNA, 201 bp, Homo sapiens
gtatgctagtatttcctagcctctttctacttctgttttttggggtaattacagtagattttttctttggcttgaaatgaggattcaatgagttattatayataaagaacttcaaacagtaagtggcataaagaaagcattcaataaatgtaaactattattacttttactactactgctacttctactactattactact

SEQ ID NO: 323613 - DNA, 201 bp, Homo sapiens
gacttttgagttaatgctagaatgagttaagactttcagggactactgggaaggcatgactgtattttgcaatgtgagaagtacatgagatttggggggcraggagcaaaatgatatggtttgcatgttccacccaaatctcatgttgaactgtaatctccaatgttggaggtggggcctcgtgggaggtgactggatcac

SEQ ID NO: 323614 - DNA, 201 bp, Homo sapiens
gattgccaaggtcttggagaagggtagaatggaaagaaactgcttactaaaataagaggttttgatctggagtaatataaacgttttgaaactagctatgyagaggtggtggttgccaacagtgcgaatttactaaatgccactgaattgttcactttaaagtgattcattttctgttatgtgaacttcacctcaataaat

SEQ ID NO: 323615 - DNA, 201 bp, Homo sapiens
gggattacaggcataagccaccacacccagctgcaccattactatttctaatactcttggcaggaatcttaattgacaactagcttcagttatcacagaawgtttggggatcccaggtttagaggatgtaggtcaagaactgtagatctatccatgctctatttcttgagtgctatttaagggcctcagacctcagatgta

SEQ ID NO: 323616 - DNA, 201 bp, Homo sapiens
aatactccccaaagcagtctacaatccctaccaatatttcagtatcattttcttgttttagaaatggaaaagccagtatcaaatttatatgaaattgtgakggcctccaagtgggcaaaacaatatttaaaaagaagactgaaattaaaagactcatacttcctgattttgaaatttaactacgaatctacagtaatctaa

SEQ ID NO: 323617 - DNA, 201 bp, Homo sapiens
caattattggataactctatatgtgaagctaaagggacaaagcaatatttttcctattgactctgctccataacttgactaaattatccaagccaatgatytgaggaagcatatgtgaaaccacctagaagtattttactttcatgttgtgtaaggtatattttaagttatcttaatgttgcataaagtcttcccataatc

SEQ ID NO: 323618 - DNA, 201 bp, Homo sapiens
gaaaatataaataaatactttggaaactttacgcccaaaacgtttaggaagaattggggacccagtgccccccagcatctgtactggattacgtccttgasagctgctcataggatcaacagggaagcagtctaatcatggcttcaccatgggctgtttgtaagcgagaagtcgatctgagcttttcatgtgatttcccag

SEQ ID NO: 323619 - DNA, 201 bp, Homo sapiens
caatcaaacagagtatctttcttgaatactaataatacgtgcatggcactgtaccaggcattttgttgggtttagatttgggtttctactttatgaaaaartaccttttgtaattgctgtatgtgggtaaatgtaaatacttgaattggcttcctttaaataatctaggccaataaaaattccataaagcgaaggaacaga

SEQ ID NO: 323620 - DNA, 201 bp, Homo sapiens
gacaacaaactttttgtatctgttccaaggcatttcacaatttcataagagtggccaaatttggggatctttgttggagttctctaaactaccctgcaaamccatcacactaggggtcacaatctaagcttgatttattacgtgtgttgttttgtttttgcaggtcctataaaagggcttaataatttggccactgatcta

SEQ ID NO: 323621 - DNA, 201 bp, Homo sapiens
tctcgtaaattcctaaggaaggcctcataggaacagtattctctgaattcttgcatgttgacagcagttttaaggcctttatacttgaaaattggcttgaytaaatataaattattgggtcacagcatctttaatatgtcacttatagttttactggcaatatgattttcttttccttaaaaataatttgatggccaggca

SEQ ID NO: 323622 - DNA, 201 bp, Homo sapiens
tcttcaacaattgtaaggagcacagcttgaaggaaaaacttgaagattaatagacttaaagcatatagcagttgttattaatgagcaagtttaaacacagygtccttggatgaacatttggttgataaaattgtaaagaaaagcaaggaaatgatagctatagaagtcacagtcatagttactttggagaagacagaagtg

SEQ ID NO: 323623 - DNA, 201 bp, Homo sapiens
caaatctcttctaagtcgttttacttagtttttatttgctgacaacaaactttttgtatctgttccaaggcatttcacaatttcataagagtggccaaatktggggatctttgttggagttctctaaactaccctgcaaaaccatcacactaggggtcacaatctaagcttgatttattacgtgtgttgttttgtttttgc

SEQ ID NO: 323624 - DNA, 201 bp, Homo sapiens
tctaccttgctgtcaataatatgaagaaagcacatggaaaagaagagcttttagccactggtgttaaacaggacactttgaaacaaatctcttctaagtcrttttacttagtttttatttgctgacaacaaactttttgtatctgttccaaggcatttcacaatttcataagagtggccaaatttggggatctttgttgga

SEQ ID NO: 323625 - DNA, 201 bp, Homo sapiens
gccctagagattacagcaacaacaacagacaaaggaaagagggggaaaagtctcaaaattattaagagccttaactgtattatgtattgttcatttaattstcacaacaactttctgaaataaatattatccttcagttcactgataaggaaactgaagcgcagagaattaatctgtaacccaagtgcccacagatagtaa

SEQ ID NO: 323626 - DNA, 201 bp, Homo sapiens
aatatggtgaaaccccatttctactaaaaatacagaaattagccaggcgtggtggcatgcgactgtagtcccaggtactctggaggctgagacaggagaaytgcttgaaccccgaggctgagacaggagaattgcttgaacccaggaagtggaagttgcactgagccgagatcgcgccactgcactccagcctgtacgaca

SEQ ID NO: 323627 - DNA, 201 bp, Homo sapiens
ggttctgggataactggatagccataagaagaagattgaaatgggataccttccttaaaccacatacaaaattcaactcaagatgaattaaagacttaaaygtaaaacctaaaactatacaaactttggaatataacctaggaaataccattctagacataggacctggcaatgatttcatgatgactataacaaaaacaa

SEQ ID NO: 323628 - DNA, 201 bp, Homo sapiens
tgagcaagtttaaacacagtgtccttggatgaacatttggttgataaaattgtaaagaaaagcaaggaaatgatagctatagaagtcacagtcatagttaytttggagaagacagaagtgtctgtgactgtgacagggcacacgtaggtgcctaaagttttatttattgacctgagcaatagtttcaagagtgtaatttaa

SEQ ID NO: 323629 - DNA, 201 bp, Homo sapiens
ttttacgttaaacttgttttccttaactattaaaaggagacatgattcagaaacctttttaaattcatggttttaagctatgtttcaaaactggctaacarctttctaagaccttctagttcgtctccttcactttatcaggaccttgtttttttctttgtctacatttttcctatactactcaatatgcactcttctcag

SEQ ID NO: 323630 - DNA, 201 bp, Homo sapiens
gaaattcaaatgtcctacccattccacagagaaactgatgttaggacttccataatgctcctcactcagacttatgagctaaatttccaggtttgaaagtrcactataatttttgattatttttaagtaatagtgttctcctaccactatacaaatttaaagaaaaaaattatagttccaaagcagaaataagcatgagag

SEQ ID NO: 323631 - DNA, 201 bp, Homo sapiens
ataaaaacaggaatatgtagcagggactgtatataaactgcaaagcctaaaagatatgccgtccggcattttacagaacatatttgccatcccttgacacmggttaaaatgtactacatttcttttttttagtgttatttaaggatctagttgtattattccagggtcattggagccatctttgtcttttgaaacaatgta

SEQ ID NO: 323632 - DNA, 201 bp, Homo sapiens
aactaatcttagctacaaagaaagctgacaaaatatttcctagtcaaaaaatgttgtactagtgaggaaggaaaataaggtgaaaccgatatgcattcagmaatgttggccttaatatttgtttattttcataattgtcttctcctggttgtctggaacttcaaagtcatctttgtaccttctagtgcagcatgcacaaag

SEQ ID NO: 323633 - DNA, 201 bp, Homo sapiens
agctagagtcaggcttttcctgaattcagttggtaatatctgttttagtttccttggcaaatttgcatttcctctgtgttccacttcctttgggagagccyggtttgcaagccaattattttttacatttttctttctgttttctcaattaagcatttttatgagcatttaatcatgaagaatgagagagctaacggaaag

SEQ ID NO: 323634 - DNA, 201 bp, Homo sapiens
acacagagaagaagccaagaaatgatagcacctggtaagaggctggacaatgattcaaacccaagtctcttgcctccatgctcttttcttcatgcatgacstatctagtgcagtaccagtcacatacatatggctatttatttaaattaattaaaattaaataaagtaaacactttagtgcctctgtttcgccagccagat

SEQ ID NO: 323635 - DNA, 201 bp, Homo sapiens
agtatgtagtgtgtgccctaatcagatgcttcacttcttgaatgaacaatgtagtcaaaatataaactcaacgtttaaagaaaattcatcttgtgaaaatkatttttcaatcactgtgtattatatttccctgccacatggtcactgaaactctctggaaagtgataatgaccttaagtaaaaccaaaaaggcatggatca

SEQ ID NO: 323636 - DNA, 201 bp, Homo sapiens
aaaatctaaaaggatttaaagaacactgtgatcctccaaaaacaaagttatgctattgttttgctactctgaccagttccttcctcaaaaaaaaaaaaaaacataatcctatgtaacaccactggcctaatactttgcagctcagttccgactacattactttcatattcaaaagccttcagtgaattccctctatgcaca

SEQ ID NO: 323637 - DNA, 201 bp, Homo sapiens
atctcctttgactccatatctcccattcaggccacaagaggtggactcccaaggtcttgggcagctctgcctctgtgggtctgcagggtatagcccctgtrgctgctttcacaggctggcattgagtgtctgtggcttttctaggtacatggtgcaagctgtcagcggatctaccattctggggtccggaggacgtggcta

SEQ ID NO: 323638 - DNA, 201 bp, Homo sapiens
atgagttcatgtcttttgcagggacatggatgaagatggaaaccatcattctcagcaaactaacacaggaacagaaaatcaaacaccgcatgttctcgccyataagtgggagttgaacaatgagaacacatggacacagagagaggaacatcacacactggggcctgttgggggggttgggaggataggggagggatagca

SEQ ID NO: 323639 - DNA, 201 bp, Homo sapiens
acattccctttgaaaactggtcacaagacaaggatgccctttctcactactcctattcaacatagtgttggaagttctggccagggcatcggtcaagagaragaaataaagggtattcaattaggaaaagaggaagtcaaattgtccctgtttgcagatgacatgattgtatatttagaaaaccccatcatctcagcccaa

SEQ ID NO: 323640 - DNA, 201 bp, Homo sapiens
atcattcaatagagaaagaacaacctctttaacaaattgttctgaggcaactgaatacccccatgcaaagaattaaattggacccacaactcatatcatatgcaaaaattaattcaaaatgaacaaattatctaaatataagagttaaagccataaaactcttagaagaaaacatagaggtaaatcttcatggctttggat

SEQ ID NO: 323641 - DNA, 201 bp, Homo sapiens
tctcaataaattaggtattgatgggacatatctcaaaataataagagctatttatgacaaacccacagccaatatcatactgaatgggcaaaaactggaarcattccctttgaaaactggtcacaagacaaggatgccctttctcactactcctattcaacatagtgttggaagttctggccagggcatcggtcaagagaa

SEQ ID NO: 323642 - DNA, 201 bp, Homo sapiens
tatcattcaatagagaaagaacaacctctttaacaaattgttctgaggcaactgaatacccccatgcaaagaattaaattggacccacaactcatatcatatgcaaaaattaattcaaaatgaacaaattatctaaatataagagttaaagccataaaactcttagaagaaaacatagaggtaaatcttcatggctttgga

SEQ ID NO: 323643 - DNA, 201 bp, Homo sapiens
tgcagtactatgttgaatagaactggtgaaagcgggcatccttaacttgttccagttctcaggaactggaacttttaatttttaaccttttaacttttaawttttgcttttaacttttaagttatgcctttaacttttctccattcagtatgatgttggctgatggtttgttatatatggcctttattcacctcctagcat

SEQ ID NO: 323644 - DNA, 201 bp, Homo sapiens
ttatccattcattagtcgatgggcacttagattggtcccataactttgcaattgcgaattgtgctgtaataagcatacattttcaggtgtcttttttacawgacttttttcctttggggtagatacccagtagtgggattcctggattgaatagtagttctacttttaattctttaagaaatctccatactcttttccata

SEQ ID NO: 323645 - DNA, 201 bp, Homo sapiens
atatcattcaatagagaaagaacaacctctttaacaaattgttctgaggcaactgaatacccccatgcaaagaattaaattggacccacaactcatatcatatgcaaaaattaattcaaaatgaacaaattatctaaatataagagttaaagccataaaactcttagaagaaaacatagaggtaaatcttcatggctttgg

SEQ ID NO: 323646 - DNA, 201 bp, Homo sapiens
aatatcattcaatagagaaagaacaacctctttaacaaattgttctgaggcaactgaatacccccatgcaaagaattaaattggacccacaactcatatcatatgcaaaaattaattcaaaatgaacaaattatctaaatataagagttaaagccataaaactcttagaagaaaacatagaggtaaatcttcatggctttg

SEQ ID NO: 323647 - DNA, 201 bp, Homo sapiens
tcctttgtttcaaaagtagcattccataagaggaagtgaaaactcacaaataactgttaggaccctctaaaatctattcgtcttgtacatggcaagaaaaagtagagagttcttcctttcttgcagagaaccatatatttacttgaagatggagactttatgacagtgcaaaaaccagatttggtttggtgcagaggccat

SEQ ID NO: 323648 - DNA, 201 bp, Homo sapiens
gtattattaacctttaaaaataaatgtacaacaaagatttctttttttattttatttttaaattatttttgcagttttattgaggtacaagagacaaaaaytgtatatatttacagtgtacaacatgacattttgattgccacaatcaagcttattaacatatccattctttcacatagttatctttatattttgtggcaa

SEQ ID NO: 323649 - DNA, 201 bp, Homo sapiens
caatatcattcaatagagaaagaacaacctctttaacaaattgttctgaggcaactgaatacccccatgcaaagaattaaattggacccacaactcatatcatatgcaaaaattaattcaaaatgaacaaattatctaaatataagagttaaagccataaaactcttagaagaaaacatagaggtaaatcttcatggcttt

SEQ ID NO: 323650 - DNA, 201 bp, Homo sapiens
ctatgtggtttagtaagtaacagggagatataattgattttaactttggaacaagaggctgtttgcataagaatttcctgggaggtaacattaattatggrtggttaaacactaacaacaggaaacacttatgtagatgtgggagtataactgtatttctttagagtgagtcccttatgtgggattaatgcaattattctt

SEQ ID NO: 323651 - DNA, 201 bp, Homo sapiens
tttgtaacctattcatgtctaggcagagaaagaaaaagcttttttgggagaggaagtcaagcagactgtggatcaaccacttattagagatatttgtatakaagaagaagccagtgctaatagccaagacaacaagaaaaagccttcgaaggcatttcatagacctgcacagcagcctctcccatcacagacccagaggcc

SEQ ID NO: 323652 - DNA, 201 bp, Homo sapiens
tgtgtcctcgcatagcctttcttctgtgcatagcacactcctgctgtctcttcttcttctgatatggacaccagtcctattagcttagggcccagggctcmatctccaagcattgggggttagggcttcaacatatgaatttggggggacataatttattccgtaacaggtgagatgaaagactgtgtttctccaagactt

SEQ ID NO: 323653 - DNA, 201 bp, Homo sapiens
gctctcccttcaccttccatcatgattgtaagttcctgaagcctctccagaagttgagcagatgtcagtgccatgcttcctgtatagcctgcaaaaccatragccaatttaacttcttttctttataaattacccagtctcaggtatttccttataatgatgcaagaacaaactaatacagaaaattggtcctgagaagtg

SEQ ID NO: 323654 - DNA, 201 bp, Homo sapiens
tgcttgaacaagttcagacaaaatgttcctaattgtaacttgctctgctttcatttttatctagtagatttcctttatgagggacagactaagctatggayattcagacacaggacataaaaatacccatgatgatagtacttcaaggcatcaagtgtttattttatatgcagttgttaaaattatagatttttgaatcag

SEQ ID NO: 323655 - DNA, 201 bp, Homo sapiens
tttgtctaaggccagaacaacacaaatcaacaaagcaagaattcctaacctggtattcatagatggaattatgggattgatgaacccatgaaacggtacgmatagcactgcaaatgccagtgagtgtgggacaatttgtctgtgtgtgtgcatgtacacacacatgcacacaaagccacgtttgtctaggaagaatttata

SEQ ID NO: 323656 - DNA, 201 bp, Homo sapiens
taacctgctcatcttgttcttttaaaacagaatgcgattcacacctttgtgcagtccggatctcacttggcggcaagggagaaggcaaatctgtgaggccrgggccctgcacctgtgcagcgaagcttagcgttcatccgtgtaacccgctcatcactggatgaagattctcctgtgctagatgtgcaaatgcaagctagt

SEQ ID NO: 323657 - DNA, 201 bp, Homo sapiens
agcatctttttacatgcttattgaccattggtatatattcctttgaagtatatgttcaaattttctgtctttttaaaaattgaattgcttttaaattattrattcatagcccatattttaagttcaatcatgtggaatcatgtgtaggctaagtgttataataataaatctcaacatgtatcatggtataaacatattaga

SEQ ID NO: 323658 - DNA, 201 bp, Homo sapiens
agaacagcatttttaaaataacatttttatttatatcaataaaaatacccatgaattcatatgactaaaatattaaaacctagaacccaatttgtttaccyaaccaatcacttgcaattacctttaggtaattgtattggtttggtttcaagtattttttaactagggctgattttaagaagtgttttcatttaagctgta

SEQ ID NO: 323659 - DNA, 201 bp, Homo sapiens
ttactctgaggtcagctcttttcatgcagtaaatgcacctcacttctcagcatttttctcacagcatcctgtgaggtaggttgtgtgggttttttttttttaagatggagtcttgttctgtcacccaggctggactgcagtggcatgatctcggctcactgcaacctctgcctcctgggttcaagagattttcctgcctca

SEQ ID NO: 323660 - DNA, 201 bp, Homo sapiens
ttttaagttcaatcatgtggaatcatgtgtaggctaagtgttataataataaatctcaacatgtatcatggtataaacatattagaaatttatggccgggygcagtgactcacacctataatccagcactttgggaggctgaggtgggcggatcacctgaggtcaggagttcaaaactagcctgaccaatatggagaaacc

SEQ ID NO: 323661 - DNA, 201 bp, Homo sapiens
gggcgtggtggcgggcgcctgtagtcccagctactcaggaggctgaggcaggagaatggcgtgaacccgggaggcggagcttgcagtgagccgagatcgcrccactgcactccagcctgggcgacagagcgagactccgtctcaaaaaaaaaaaaaaaaaaaaaaaagaaaatagatgactgcttgaagaatttagtaaga

SEQ ID NO: 323662 - DNA, 201 bp, Homo sapiens
gctggctaaaattccaaccccagattggtttgctcaaaccacttaatatgtttctgggccactcctgtttaggcagtgtgtgctcgggtaatgaaagcttytgctaatgtcagccaaagcatagttgagaaaataaatatgctaaaacgaaaaaaaagccttataatttatttcaaaagtcatagaaaatattttgattgt

SEQ ID NO: 323663 - DNA, 201 bp, Homo sapiens
tactaaaaatacaaaattagctgggcgtggtggcacatgcctgtaatcccagctgcttgggaggctgaggcaggataatcacttgaaccctggaggcggargttgcagtaagccgagatcctgccattgcactccagcctgggcaacaagagtgaaactccatctcaaaaagaaaaaaaaagaaatgtattcctttcctac

SEQ ID NO: 323664 - DNA, 201 bp, Homo sapiens
agatacaggttttaaaatgactgattaataggtttgagaaaatagatgggctgggcgcggtggctcacgcctgtaatcccagcactttgggaggctgaggygggcggatcacgaggtcaggagatcaagaccatcctggctaacacggtgaaaccccgtctctactaaaaatacaaaaaaaaaattagccgggcgtggtgg

SEQ ID NO: 323665 - DNA, 201 bp, Homo sapiens
ggtaaaggtgctccccaggtgctgctaactgggcgcttttttgcccagcagtgaagatttaggctgcctgaggactctccatgctttttatctattttatrtattttattgagcatttccacctcagatgttacttgtatccagtagttaaaagcagggagaaagatctttcacactggctagagtacagtaacatccagc

SEQ ID NO: 323666 - DNA, 201 bp, Homo sapiens
gtttagtttattgcttgctttgtatcatcgttgctaagtgttgaaaagattctttctcttatgttttcatctcctcttctctctgttcttcactttctctyataggtcctacctgtacttcaggcccctctgagaccctgtgtccttgggccaaccttgacgacttctagcctcactcacctccttctcttggctccagct

SEQ ID NO: 323667 - DNA, 201 bp, Homo sapiens
cacatctttgggatgtggggggaagctggagtaccaggagaaaacctatctagacatggggagaacatgcagactccacacagatggtggcctcagctaggaatagatttttttctcatcaacgttataatgaaacaacgttgaacaaaacaatgttgtttgaggacctgctgtacagaaatacagacatagacacatgca

SEQ ID NO: 323668 - DNA, 201 bp, Homo sapiens
ccttggtcaggctctagttaaccgccccagggcaaatgctcatcctctttccagttgcctatggctgccctaagagctgtttcagcacatgctatgaaggmggcccttggacttggaagggctgtaggtgggcagctgcctccttaatgtgtccagtgcaacttataccacacacaataaaataataaagttaaaggtata

SEQ ID NO: 323669 - DNA, 201 bp, Homo sapiens
aaaagctgagaatagtccctggtatatagtaagtgctcaataaattatggatgggaggatcctgacccacatggagtttacagtcttggcagtatggatcrggcaggtagaaaaagacaccaaattacacagccaacagcatctttataattgtttttaatataggaaaagtatagggtgctaaagatcaatttgtggctt

SEQ ID NO: 323670 - DNA, 201 bp, Homo sapiens
gtgggttttttttttttaagatggagtcttgttctgtcacccaggctggactgcagtggcatgatctcggctcactgcaacctctgcctcctgggttcaaragattttcctgcctcagcctccccagtagcttggactacaggcatgccccaccatgcccgactaatttttgtgtttttagtagagatggggttttgccat

SEQ ID NO: 323671 - DNA, 201 bp, Homo sapiens
ctataactcaattcaattctaacagtagctcctggagctagagtcagaacccaaagatttaggggtcatttcccactttagataacaaatgaggtaccctrgctatgcacacttctgcagattctgactgcaaatcaaaccctttcctcaggtttgataatttgctggaaagactcatagaactcaggaaaatgatttact

SEQ ID NO: 323672 - DNA, 201 bp, Homo sapiens
atacagcagtgtcatcagaagataacttgagcaccgtcatggcttaatgtttattcctgataataattgatcaaattcatttttttcactggagttacatyaatgttaattcagcactgatttcacaacagatcaatttgtaattgcttacatttttacaataaataatctgtacgtaagaacagagatggtattttcttt

SEQ ID NO: 323673 - DNA, 201 bp, Homo sapiens
tgggggaaggcctcggagcttctgtgcctccctgagtggaccacccttctagctcctggatgtgtgcactaatccagacactccctgaccttgccagttgygggtttttctggaggttttatgacataggcatgattgatgaaattattggctatgggtgattgaatacaatctccagcccctctcccatccctggaggtt

SEQ ID NO: 323674 - DNA, 201 bp, Homo sapiens
gacttagttaccacttagcattacagtctgcaggggccattacctgccactgttagatttcttaggcagctgtgcagaaattcatttgagagataaagaaytcactggcaaaacacatactcttcattttagcgctgggcaatttaagacagttaaagtgaatgaattctgaattattattttcatttgcatacatattaa

SEQ ID NO: 323675 - DNA, 201 bp, Homo sapiens
catcttaactctgaggctggcattgttaaacacctgtagtactgcctcctgctgaaacgtctttcctcccctatggaataaacactgggaaaccacagtcmctggggagtgatatagtagggagttagagtaatgcttgcatttattttcctttggccttaggtcaagaacttcactgaggtccaccctgactacgggagc

SEQ ID NO: 323676 - DNA, 201 bp, Homo sapiens
tgatgaaatggctcattttgaccgagagagaattcctgagagagttgtgcatgctaaaggagcaggtaagtgctgtgtttatttgctgtaaaaagattgtktcacagcacctgggtcaagtgttatttcccaaaggattggaagacctttaacacaagtgtcaaatctccatttgtgggagaaaggaaaaacatccagcag

SEQ ID NO: 323677 - DNA, 201 bp, Homo sapiens; identical to SEQ ID NO: 67914

SEQ ID NO: 323678 - DNA, 201 bp, Homo sapiens; identical to SEQ ID NO: 67916

SEQ ID NO: 323679 - DNA, 201 bp, Homo sapiens; identical to SEQ ID NO: 67917

SEQ ID NO: 323680 - DNA, 201 bp, Homo sapiens
gcttggtaaatgcttttatctaagtgggcagctttgtgctaatatgatgtcttccacttcccaattagttgtgatgctttactgatctaggagagctttayggtttgggactactataggcgaacactctgttgcctcctctctcaagaatcagagtgtcctattttggaaacacagtcaaccatgtgaaagcaatttatt

SEQ ID NO: 323681 - DNA, 201 bp, Homo sapiens
gagcagttcaggagaggtacgtatggatgtcatgggagctagcagccaggaagatgtaaacatgttaacaaggacctctccagagagaggtcttaaaattrtccagccatagagaagcttttctctctttaaaaatattctggctctaaagttattcattgagttaaaaacaataattgcaagttggaggaaatctctttg

SEQ ID NO: 323682 - DNA, 201 bp, Homo sapiens
catgtaacaagtaaacctgtgccacaacactgacatctctgcaaagttacttaagttttctgagtttgtagtatcgcccattaaatgggattaataatatygatctctggattattgacaggcttaagtgagataacttgcgtggtccattttctagccccaccctctcatttcatctagtaaatcttcattgcattaatt

SEQ ID NO: 323683 - DNA, 201 bp, Homo sapiens
acttaagttttctgagtttgtagtatcgcccattaaatgggattaataatattgatctctggattattgacaggcttaagtgagataacttgcgtggtccrttttctagccccaccctctcatttcatctagtaaatcttcattgcattaattattttcatcttaaatacaccgcatcctgctcctcaccttctaatatta

SEQ ID NO: 323684 - DNA, 201 bp, Homo sapiens
gccccaccctctcatttcatctagtaaatcttcattgcattaattattttcatcttaaatacaccgcatcctgctcctcaccttctaatattaatactctrtctttcagtttagatcagttcctcttatccaatgttgcgctaaacatcccctgaagttgggggatcttttcctttctagtttttgctccctggcttccct

SEQ ID NO: 323685 - DNA, 201 bp, Homo sapiens
taaataacactctcatctgtttagcgttccttttactgagcttcttggtatcttttctcatacttgtaccttttatgggatgtccccccctttttttttttgagacggagtttcgctgctgttgcccaggctggagtgcaatggcacgatctcagctcaccgcaacctccgcctgctgggttcaagcgattctcctgcctc

SEQ ID NO: 323686 - DNA, 201 bp, Homo sapiens
ctgcagcctcccgaagtgttgggattacaggtgtgagccaccgcgcccagcctggatgtccctttattttttaaaggcttccttaaataccttgtttgtawgttgaaaagagcatttaaagagtgaacagatttggtttgctctggctctctaattattttaactttgttatcacccaatagttctaggttagtggttttc

SEQ ID NO: 323687 - DNA, 201 bp, Homo sapiens
atattgagcagtgtattagggatcaggtatatagatgtaaaaggagtacacagtctagagaggaaaaatagtgacaggctgggcgcggtggctcacgcctrtaatcccagcactttgggaggccaagatgggcggatttcttgaggtcaggagtttgagatcatcagcctggccaacatgatggaaccctgtctttactaa

SEQ ID NO: 323688 - DNA, 201 bp, Homo sapiens
aggctttaaaaagctcctcaggtgattttagtgcattgccaaggttgaaaaccaaggctttaggtttaaactaaaggtgaaattgctctttttctggttcrttttctactttagaaagtagaaattttttttctggttcattttctactttaaattaaaaataaacctacagagggtaacacgtattagcacgtcacagag

SEQ ID NO: 323689 - DNA, 201 bp, Homo sapiens
cttggcctgcctagcgccgagcagccaatcagaaggcagtcctcccgagggggcgggacgagggggtggtgctgattggctgagcctgaagtcgccacggwctcggggcaacaggcagatttgcctgctgagggtggagacccacgagccgaggcctcctgcagtgttctgcacagcaaaccgcacgctatggctgacagc

SEQ ID NO: 323690 - DNA, 201 bp, Homo sapiens
tgaagggaacttaaatgggaactttattgctcactgcttagaatgccatgggctcttcttttgagatacttacctttaacccatttcctttttttttttttaagtgcagcttgctgccagtgctcttttcttgggggtaaatgggaaatgttaataagtagcctctgatccctttaaaatgggagaatttgaacatttcaa

SEQ ID NO: 323691 - DNA, 201 bp, Homo sapiens
gcatctgtcatgattactagaaaaataaaacttcaaatgctttgctccttctgctgcgaggtcatgttctcacagccagtgaagtgacagcatatatgtgytgaatgtgtggcttgcattttacatttaactcttttaattcatgtgttaaccttaggaggtacttattattctattttgcagatgaaaatggagactcat

SEQ ID NO: 323692 - DNA, 201 bp, Homo sapiens
tgctgattggctgagcctgaagtcgccacggactcggggcaacaggcagatttgcctgctgagggtggagacccacgagccgaggcctcctgcagtgttcygcacagcaaaccgcacgctatggctgacagccgggatcccgccagcgaccagatgcagcactggaaggagcagcgggccgcgcaggtacactctgtgctc

SEQ ID NO: 323693 - DNA, 201 bp, Homo sapiens
tttttttcactggagttacattaatgttaattcagcactgatttcacaacagatcaatttgtaattgcttacatttttacaataaataatctgtacgtaaraacagagatggtattttctttctttcgactccatatgtaactgtaaactgctaccagactcttaatttgaacatcatcattttcagatgtttacccttaa

SEQ ID NO: 323694 - DNA, 201 bp, Homo sapiens
acttcaaatgctttgctccttctgctgcgaggtcatgttctcacagccagtgaagtgacagcatatatgtgttgaatgtgtggcttgcattttacatttarctcttttaattcatgtgttaaccttaggaggtacttattattctattttgcagatgaaaatggagactcataaataagtaacttaccagcagctacatag

SEQ ID NO: 323695 - DNA, 201 bp, Homo sapiens
ccttctagagaagaggcaggaatttattttaatgtacaggacagacatgcatggggagtaaaactacagactccactctaggtgtgtggaaatactaaaamtagtgcttttctctgtgtgtgaagttggtctgttgagttttgtcatagacagcgttgagttcctctcccaggtggaggtggcgtagctttgcgtcactta

SEQ ID NO: 323696 - DNA, 201 bp, Homo sapiens
gtggctgtactgaagttcttttcaactctatgagctatgattctatgatttattaaaaaaaaaaaaaaaaggaataggacaggggtgaagggatactggcygagcacagtctcagtaattgatttgagctgtcatgaaatggaattaaaacattacttcatgataaaaggcaagtagtcctttaattttattaatcttttg

SEQ ID NO: 323697 - DNA, 201 bp, Homo sapiens
ttctgttgctgactgttgaagctttcctgccccactggctttgaaggtaaattgtatatacatgagcttgtggggaaagctgttatataaatgaggacaawtgatctaactgttagagtggggaaatggaagagattctgaagcctccatttgtaacttaaaaactcaggtttcatttcttaacaggattgatgttaagga

SEQ ID NO: 323698 - DNA, 201 bp, Homo sapiens
tctttgagctccagttcttttcactgtgaagttggcataatattaccagctatacaagtcctggaaagattggattgcttgtgggtcttttatcctagggycctaaggtagcctgagatctacatggattcatcagtctggattattctgacctaagattattcttttctaaacctaaaggattcagttaaaatcagaaag

SEQ ID NO: 323699 - DNA, 201 bp, Homo sapiens
cttggccctgttctttgttatataccattaggttggttcatgagctcttaaagtaaaccagagagaggtagagtcttagtaaaggatgtgccactacttastggcagagacaaggttagaattcagcttcttggacccaagactctttccttacccagtgggtgcaaatcctggttcacactgaagttttcatgaatactc

SEQ ID NO: 323700 - DNA, 201 bp, Homo sapiens
caactacttgggaggctgagacgggagaattgcttgaacccgggaggaggtggaggttacagtgagctgagaccatgccactgcactccagcctgggcaayagagcgagactccatctcaaaaaaaaaaaaaaaaaaaaaaaaaaagaaaaacagtgacataaacaggcaattacaatattttgttatatggggcacaaga

SEQ ID NO: 323701 - DNA, 201 bp, Homo sapiens
gatttatatttatagccacagatgtctatattcaaacaaagtttatttttctatgataaaaataatacaagtgtcctaaagaaaatttggaatatataggwaaaagaagaaaaaagaaaaattcccatatagtcccaacacccaaaggtcatagctattacattttgctatatttatttatctatttatttattttttaga

SEQ ID NO: 323702 - DNA, 201 bp, Homo sapiens
aaaattaatgaggctattgcttacacatgaaaatttattatgtgctcattcttattgagagaatttcttatcactatataggatatagtgtggtttttaaktaatcacaatactattgttatagattcatagcataattctgtgatgatgtatcacatgggaaatacataagaaggtccagatttattctcttaaaaatga

SEQ ID NO: 323703 - DNA, 201 bp, Homo sapiens
ttcccttattttaattaaaagttcaattacctgtttgaacaaagttatcttattatggtaaatgaatgacattgtcagctgttattacatgtgttctcttrttgctctcaattaattattttgtttgatttgtggactgaattagctggtgggtagaaataataacccgggcacttaaatacctaatttagttcttggaag

SEQ ID NO: 323704 - DNA, 201 bp, Homo sapiens
ttgcatgatttctggaataagaactgcaatgcttccaaaaggcaggctagactttcatgctaaggtgctggggtatttctgatggccgctcatcgagctgmgtgaagccctctcacttctggtttcctggcctgtcccagagctaagctttttgcaaatctagaaatccccctttttccttggcccctagttgctgcttct

SEQ ID NO: 323705 - DNA, 201 bp, Homo sapiens; identical to SEQ ID NO: 67930

SEQ ID NO: 323706 - DNA, 201 bp, Homo sapiens; identical to SEQ ID NO: 67931

SEQ ID NO: 323707 - DNA, 201 bp, Homo sapiens
cagaagacttgatagatgagaccctttgaagtgtcaaaagggactttgagattcattcataaagtgcggcagcctgtgcaagcatttagcagatggcagcrttccctaagaatcttcatactacctgtagctaaatgcgggaaattaaaaataatatgtgtgcgttgtgtttatatctgtgtatgtgtacgtgtgtatttg

SEQ ID NO: 323708 - DNA, 201 bp, Homo sapiens
ggggagtgatatagtagggagttagagtaatgcttgcatttattttcctttggccttaggtcaagaacttcactgaggtccaccctgactacgggagccayatccaggctcttctggacaagtacaatgctgagaagcctaaggtaagctgggagcagcctggccatgcagaggctgtgtgtgctgggttggagtaggcat

SEQ ID NO: 323709 - DNA, 201 bp, Homo sapiens
aaaaaaaaaaaaaaaaaaaaaaaagaaaaacagtgacataaacaggcaattacaatattttgttatatggggcacaagaagatgcccttggccctgcttcmtgagtggtgtggggcagggtagagagagcagttcaggagaggtacgtatggatgtcatgggagctagcagccaggaagatgtaaacatgttaacaaggac

SEQ ID NO: 323710 - DNA, 201 bp, Homo sapiens
taatgaggctattgcttacacatgaaaatttattatgtgctcattcttattgagagaatttcttatcactatataggatatagtgtggtttttaagtaatyacaatactattgttatagattcatagcataattctgtgatgatgtatcacatgggaaatacataagaaggtccagatttattctcttaaaaatgattcac

SEQ ID NO: 323711 - DNA, 201 bp, Homo sapiens
gtggaatgaatgaatgaaatgtaagaataaaatcatagctacaaccttttgatttcagaatggggcagaggctgctcggattcacatatctgatactaagytcctatttttcattttaatttatggatatttattttagaggtcaacccaataatctagcaaaatatcactattaatatgtcttgcttaagaaatattggc

SEQ ID NO: 323712 - DNA, 201 bp, Homo sapiens
tattaacaaatgaattttacttattttgcttaaaacaaaaagtgaaggacacaacccaaatttaaaatttaaaattattcttaacttctaaagtttttttwatcattgatttcctaagtgttgtagtaggtgaattttgttggtgataaactggtgattcaattctctgcacttgctcttttctctgagcaggtgcgggca

SEQ ID NO: 323713 - DNA, 201 bp, Homo sapiens
tattaacagggaacagattatgaaaagctgatgtactttttcctggggaaactgtcagtatttaccacttactattgtgaaagatttaactaaggcactcrtcttaaattcttatgttttattggatttaaaaattattttcattggcttgattgtatttgaaatctggtatttttgtgggtagctttgatttccttcagt

SEQ ID NO: 323714 - DNA, 201 bp, Homo sapiens
caggcaatggcccatcctgtcagattttagtactttggacacaggaaattaaaaaagagggcagatggtataaacattgcaaagctatgtacccgtgacartgtaaatgaaaggtttgattgtgctaactctcctgcactttctttctgtgttcctgtagaaagctgatgtcctgaccactggagctggtaacccagtagg

SEQ ID NO: 323715 - DNA, 201 bp, Homo sapiens
ctaggaatagatttttttctcatcaacgttataatgaaacaacgttgaacaaaacaatgttgtttgaggacctgctgtacagaaatacagacatagacacrtgcactgcaattgcaactaagtttaaatgatgtacttactgggtaattactggaatgagctgcaaaatttggggtagttatgttagggtggtgggtttgt

SEQ ID NO: 323716 - DNA, 201 bp, Homo sapiens
accttggagcgtatcccaatctcattatcacttccaacatccaatagtgtctttccaatatcatttcttttaactttttaagtcatccatctatttacttwgcatttattgaggttttattatgaacaaggcatataagtaaaatcaattacaaatgtcagaaaacaaaattatactgtttttaaaaatttgcattcatat

SEQ ID NO: 323717 - DNA, 201 bp, Homo sapiens
ctctgatgactaatgatgcaaagcatctttttacatgcttattgaccattggtatatattcctttgaagtatatgttcaaattttctgtctttttaaaaaytgaattgcttttaaattattaattcatagcccatattttaagttcaatcatgtggaatcatgtgtaggctaagtgttataataataaatctcaacatgta

SEQ ID NO: 323718 - DNA, 201 bp, Homo sapiens
ggaggtggaggttacagtgagctgagaccatgccactgcactccagcctgggcaatagagcgagactccatctcaaaaaaaaaaaaaaaaaaaaaaaaaargaaaaacagtgacataaacaggcaattacaatattttgttatatggggcacaagaagatgcccttggccctgcttcatgagtggtgtggggcagggtaga

SEQ ID NO: 323719 - DNA, 201 bp, Homo sapiens
tccaatagtgtctttccaatatcatttcttttaactttttaagtcatccatctatttacttagcatttattgaggttttattatgaacaaggcatataagyaaaatcaattacaaatgtcagaaaacaaaattatactgtttttaaaaatttgcattcatatagccagatcaaatcagttacatctggggagggttttgag

SEQ ID NO: 323720 - DNA, 201 bp, Homo sapiens
ttcttttttaagtctcttcttacctaattagaaaaaaaatctagtcaaacaattataataatggggaagtcatatacaaaatacagagggtaccacttcasagtgtcctaagctgtgaatgagtgcttaccagcatcttacttccacgttcctgtttgtcatttcattgagtatgtgtatgtggcttcatatattgttatt

SEQ ID NO: 323721 - DNA, 201 bp, Homo sapiens
gacagattgacttaatgggaagtgagtttagttttccttgcagagcatcgaagattagtaaaaagagggactttactttggaaacaagcagagggtgtctytacatgctctgagtcagcaggagggggtgtgtgtgcgtgcgcgcatgcgggagggtgggtatattttttccgtgaagaaatactataaatcccagcactt

SEQ ID NO: 323722 - DNA, 201 bp, Homo sapiens
caaataatataatacaagtcatagagagactgtcctgtcccctgagtacctgaggacacaggtgcagcctttcttgctctcattctctgcattttgccaakagttggagaagttgggccggttgcttgggtgggaaaggctttcccactcacgcaggtccagcaagggagttcaggcacagggccttggggaaggcctaga

SEQ ID NO: 323723 - DNA, 201 bp, Homo sapiens
atactcttcattttagcgctgggcaatttaagacagttaaagtgaatgaattctgaattattattttcatttgcatacatattaaaactgagtaaatatcacgttgctgcccatgaggtgattaacctgctcatcttgttcttttaaaacagaatgcgattcacacctttgtgcagtccggatctcacttggcggcaaggg

SEQ ID NO: 323724 - DNA, 201 bp, Homo sapiens
ttgcctatcctgacactcaccgccatcgcctgggacccaattatcttcatatacctgtgaactgtccctaccgtgctcgagtggccaactaccagcgtgayggcccgatgtgcatgcaggacaatcagggtaggcctaaagacgttgggctccccctgcgtgggcagagggcacgtggagcagatgggcgggaggccaggc

SEQ ID NO: 323725 - DNA, 201 bp, Homo sapiens
gaagtataggagtgtgccaccacgccagctaatttttgtatttttagtagagacagggtttcattggccaggctggtcctgaactcttgacctcaggtgayccacccactttggccccccaaagtgctgagattacaggcatgagccaccgcgcctggcttgattgtaaaagtagagcatttgggctgtgaccctgaagct

SEQ ID NO: 323726 - DNA, 201 bp, Homo sapiens
agtgtaaggtaaagctctgtattaaggaagtggggggaaagtagtaccaaacaaatttgctatgcaaataaattttgaataacaaattaggccagttttcwggttgttttggctttccttcatagaattttgagtcatagtattagtgatttgcatatcattttgatttaaaatttttctgtttgttattttctacaagtg

SEQ ID NO: 323727 - DNA, 201 bp, Homo sapiens
tttaggtttctttcttgttcagtgatcgggggattccagatggacatcgccacatgaatggatatggatcacatactttcaagctggttaatgcaaatggrgaggcagtttattgcaaattccattataaggtatgtgttacctttggggcagagggtacaaggctcctaccgcatacctccttatttttcctgaaggatt

SEQ ID NO: 323728 - DNA, 201 bp, Homo sapiens
acacctgttgtaaatatttgcttgctactgagtcctactcaagccatctccatatcaccatgaatgaagtcagacttttagggaaaagtggttaacaatckggatttctgcggtagcagggtggatcatataatgcttactcctgacaccacgcctgacacctattcagtttctcagctttactcaaagcctccatgactt

SEQ ID NO: 323729 - DNA, 201 bp, Homo sapiens
ccacagcagtcaatatctagaccacccttattattttcccacagaccaagaaatttgaaggtcaggacagtctttggtttcctgtacgtgggtgtatacgwtgtaggcacttgaatctttgttgaataaatggagaatgttaggcagttatttgctagaaaacgctaggcacattctttatcacagaatgaaaagacgtca

SEQ ID NO: 323730 - DNA, 201 bp, Homo sapiens
caaaggttaaagattgtaccctaaatcagaccacagcgactgaaggttacttcttatgtaagtatctgattccagttcaggtttcagtctgcatggaggayaagctaagattccgtttttaaaaaataacttttttgcttatgacattggggaacatctgaggcttttatagaaagtaagtttttcattagtttttagtcc

SEQ ID NO: 323731 - DNA, 201 bp, Homo sapiens
gttagtggttatggctgaacataacatgagaggccttctctctcagaagaatgtgatgaaatatgcaattgatgaacatccagaatccagatattcacctrtcttgaaaattgcacttccaatccacactctcagtgcccgtgacagtataaactagctcgagcattgcagaaaacaatcaacaacatgtcacaagaacct

SEQ ID NO: 323732 - DNA, 201 bp, Homo sapiens
agcgtacatttcatatttggtgaaaatctgtccagccattttcttgtgatgcggcaatggacatgcaacataatttctttttaaagaatatgtcatttttrctttctgacattaagatattctgttagaaaattatgacagtaacagatggtattaaaaaaaaatctccccttgcttggtaaatgcttttatctaagtggg

SEQ ID NO: 323733 - DNA, 201 bp, Homo sapiens
tgtcttgtgccagtatattttattttcattgagttctgaaaattgacttcagagaacagcatttttaaaataacatttttatttatatcaataaaaatacmcatgaattcatatgactaaaatattaaaacctagaacccaatttgtttacctaaccaatcacttgcaattacctttaggtaattgtattggtttggtttc

SEQ ID NO: 323734 - DNA, 201 bp, Homo sapiens
taagtattccgtctgcaaaactggcaggccaccaacggccgcgtcccagggcggcctgaaggatgctgataaccgggagccccgccctgggttcggctatyccgggcaccccgggccggcggggcgaggctctccaattgctgggccagagcgggacccttcctttccgcaccctcctgggtatctccggtcttcaggcct

SEQ ID NO: 323735 - DNA, 201 bp, Homo sapiens
gactctccatgctttttatctattttatatattttattgagcatttccacctcagatgttacttgtatccagtagttaaaagcagggagaaagatctttcrcactggctagagtacagtaacatccagcttgggagttaggttttgaagacacttcaccaaaatggacaattccttaactcactgtgaaatcaccaagact

SEQ ID NO: 323736 - DNA, 201 bp, Homo sapiens
tcattttaagacagattgacttaatgggaagtgagtttagttttccttgcagagcatcgaagattagtaaaaagagggactttactttggaaacaagcagygggtgtctctacatgctctgagtcagcaggagggggtgtgtgtgcgtgcgcgcatgcgggagggtgggtatattttttccgtgaagaaatactataaatc

SEQ ID NO: 323737 - DNA, 201 bp, Homo sapiens
tggcttaactcaacttcaccttttggggatgtttataacttaaagaaaaagttattagaaaataggaagcaagcacttctccaaattatgtcaaggttttrcagtagaagacatatttggagacacataggaagttacttgtatttctgtttgttgaggtcttaggaaatcacacttacacagaggctacctctgcaattc

SEQ ID NO: 323738 - DNA, 201 bp, Homo sapiens
taatttttgtatttttagtagagacagggtttcattggccaggctggtcctgaactcttgacctcaggtgacccacccactttggccccccaaagtgctgrgattacaggcatgagccaccgcgcctggcttgattgtaaaagtagagcatttgggctgtgaccctgaagctcagtgaaagagcttaattgttcctgtggt

SEQ ID NO: 323739 - DNA, 201 bp, Homo sapiens
ctgaactcttgacctcaggtgacccacccactttggccccccaaagtgctgagattacaggcatgagccaccgcgcctggcttgattgtaaaagtagagcwtttgggctgtgaccctgaagctcagtgaaagagcttaattgttcctgtggtcagtgctttaaagacaactaccactttgagtaaaggtcagggctcattt

SEQ ID NO: 323740 - DNA, 201 bp, Homo sapiens
aaaacactgtgatggctggtttttggagcattttgcttttcatgtagatgtgactgatctgttgaatttgttgagtgaataattgggctctataatagtayggtgttcttccttcccctacacacacacttggtgtcttgatgaatgtcatacataggcacctcttgattatccactgtggataatctattacggcagtga

SEQ ID NO: 323741 - DNA, 201 bp, Homo sapiens
tacaagtgaaataataatggtaacccttcccatgggaaattggctagtatgttttatgtcattaagggactttctggaaactaaggaatatcttaaaaatmaaggatgttttgatttaaatgaaaacattttaggctttatatttctgttctttaggtttctttcttgttcagtgatcgggggattccagatggacatcgc

SEQ ID NO: 323742 - DNA, 201 bp, Homo sapiens
aagtaagtgctgatatacaattaccacattttaaaaaattctttgtttattggtctgtggagggtatgaaagtgaagctacaatggaacaaagtcatcatygtcagtaaaggagagataccctgagaatcctaaaaacactttacggaatagcaaagtagagttctgtaatggaaatactgtatatgctgggctggaggag

SEQ ID NO: 323743 - DNA, 201 bp, Homo sapiens
caggctggtctcaaactcctgggcccaagcgatcctctcaccttggccttccagagtgctgggattataataggcatgggccactgtgcccagttggaagwgcttatttgaagaatttcccatgctgttggttttgtagaaatgtgttgctttttgtaaagagcaaatgattggttccttccctggagtgggggaatgagg

SEQ ID NO: 323744 - DNA, 201 bp, Homo sapiens
tttcttattcctaagtgcatctgggtggttttgttttgaaggtggtgctccaaattactaccccaacagctttggtgctccggaacaacagccttctgccytggagcacagcatccaatattctggagaagtgcggagattcaacactgccaatgatgataacgttactcaggtaatgacttctctttatctgctatggaa

SEQ ID NO: 323745 - DNA, 201 bp, Homo sapiens
ctctagttatactcaaggctttcagttgaaatccttaaagggccatgcctaggaataagggcaaacatgaaataaacttgctttcacaatacaggaaacayaactttgcctctgctcagtctcagattggattaaggtgatctctttctacgccatctgtcagaagcaaacaaaattttctttggtggaaaatagaaactc

SEQ ID NO: 323746 - DNA, 201 bp, Homo sapiens
aggtagatttgaaaaataaccaaataatattttctagaaacaaaaattacaatctgtgaaataaaaagtcaacagatatagtgacccagtcgatgttttcrcgcaatatgtcaaatacagctgaagagagaattagtgaattggagataggtctgaggaaatccccaggatatagtactttgattagattgtgttaatcga

SEQ ID NO: 323747 - DNA, 201 bp, Homo sapiens
ggtagatttgaaaaataaccaaataatattttctagaaacaaaaattacaatctgtgaaataaaaagtcaacagatatagtgacccagtcgatgttttcaygcaatatgtcaaatacagctgaagagagaattagtgaattggagataggtctgaggaaatccccaggatatagtactttgattagattgtgttaatcgaa

SEQ ID NO: 323748 - DNA, 201 bp, Homo sapiens
tcaatcagtcaatcagtctgtctttcttttttgcatttttatggtttaaaacctgcctaaaggcttaatgtcataatacctcgatcctccttcagatgcaractagaaatttgcatgatttctggaataagaactgcaatgcttccaaaaggcaggctagactttcatgctaaggtgctggggtatttctgatggccgctc

SEQ ID NO: 323749 - DNA, 201 bp, Homo sapiens
ggaaggagcagcgggccgcgcaggtacactctgtgctccccgagcgggcccgaaggtccgtttagaaagcgggggcgtcggcaagtaaaggcccggcttcycccggggcggcgcttggagggactgtaccgcggctcactgggcaggggggatccccttcggtgcagacggacttttacattcgccgaagcaggggagggg

SEQ ID NO: 323750 - DNA, 201 bp, Homo sapiens
aaagcgggggcgtcggcaagtaaaggcccggcttcccccggggcggcgcttggagggactgtaccgcggctcactgggcaggggggatccccttcggtgcrgacggacttttacattcgccgaagcaggggaggggggtccgggtagtggggcgcgggactgcaggctttgttgtccgcgacaggctcgggtggttgcttc

SEQ ID NO: 323751 - DNA, 201 bp, Homo sapiens
ggaatttttttaaatgagtaggattttaacttggtggtgggggaggcattcctggcctgtgcccacggctgcagagtctcagagggcatctatgaggaggktggattagatgagaccacatctggtctgagtctactgttggcagattggcccagggagtctaaaggtcttgccctgttccctggctgctggttaatggta

SEQ ID NO: 323752 - DNA, 201 bp, Homo sapiens
ctgttggcagattggcccagggagtctaaaggtcttgccctgttccctggctgctggttaatggtagacagaggactgcagccctgttttccctattctgmctagtgctcttgctcaaaactcaggttcgtgaactggggtattaatgctaagtgctcatggattgctttaatggttccctgtttgggaaaaggctgccat

SEQ ID NO: 323753 - DNA, 201 bp, Homo sapiens
gcttacttcttttaggcacttctccctccacccagggccctccaaaaggaattatgcatatgccttatagcctatataattttcaaacactttttttaaaygaaaaatttcaaatattcagaaaagttgaaaaaattttgcagtgtatatctatatatctgccatctagattctacaaggaacattttgccctgtgtcttt

SEQ ID NO: 323754 - DNA, 201 bp, Homo sapiens
accaccatttggatatcctgttgctggacacctgggctatttaattttttttctattgtaagtaaagctgctgtggctgggcatgaaggcttatgcctatwaccctaccacttttggaggctgaggtgggaggatagtttgagctcaggagttgagaccagcctaagcaacatggtgaaaacccatctctacaacaaataa

SEQ ID NO: 323755 - DNA, 201 bp, Homo sapiens
caaagtggttgtaccattttatacttcatcagcagtgtatgggagttccagttgctccacatcctaccaacttttggtgttgtcagtcttttacatttagytgttgggtgtgcagtggtatctcattatggttttaatttgctttgctctgatgactaatgatgcaaagcatctttttacatgcttattgaccattggtat

SEQ ID NO: 323756 - DNA, 201 bp, Homo sapiens
gggattacaggcgtgagccactgcgcccggccacaaataatattttgatgaacagaatttcttctttttatttttaaaaatatagagacaaggttttgctrtgttgcccaggttgttcttgaacgcctggtctcaagtgatcctcccaccttggcctcccaaagtgctgggattataggcataagctactgcacccatctc

SEQ ID NO: 323757 - DNA, 201 bp, Homo sapiens
tggaaatacaagaagcaaacacattacctgcctggaaggagcttacagtctggggtggggtcagattggcaattttactatagtttgatagtgccacaggrggggtaagtgcagagggcttatgggagcatggaggggcttataggatctcaccttcatctagaaggtgacagaagcaggtggcccagaggatgagctagg

SEQ ID NO: 323758 - DNA, 201 bp, Homo sapiens
ttggatctatgggcctgtgtaaatctttgtcacttagctaaaaggatttcttgaaaatccttgtagttgtttattgagcatttactgtgtactaggcactrttgtaggtactagggatacagcagtgaaaaagaaaaaaaaaaaacttgttatagagcttatatcaggggaaatagggaataaacaacgctaagcatagtt

SEQ ID NO: 323759 - DNA, 201 bp, Homo sapiens
ctgggattacaggcgtgagccactgcgcccggccacaaataatattttgatgaacagaatttcttctttttatttttaaaaatatagagacaaggttttgstatgttgcccaggttgttcttgaacgcctggtctcaagtgatcctcccaccttggcctcccaaagtgctgggattataggcataagctactgcacccatc

SEQ ID NO: 323760 - DNA, 201 bp, Homo sapiens
ccaaagtgctgggattacaggcgtgagccactgcgcccggccacaaataatattttgatgaacagaatttcttctttttatttttaaaaatatagagacarggttttgctatgttgcccaggttgttcttgaacgcctggtctcaagtgatcctcccaccttggcctcccaaagtgctgggattataggcataagctactg

SEQ ID NO: 323761 - DNA, 201 bp, Homo sapiens
tgatcttcctgcctcatgctcccaaagtgttgggattataggcatgagccactgtgcccagctctagtgtaccattttaattctctctctcttttttttttaaacatactaacaccaaccggaatctcttgtttcttttgctttattcttttgagttattttctggattgttacctttctcccacctagttcaacccctca

SEQ ID NO: 323762 - DNA, 201 bp, Homo sapiens
gtgatcttcctgcctcatgctcccaaagtgttgggattataggcatgagccactgtgcccagctctagtgtaccattttaattctctctctcttttttttttaaacatactaacaccaaccggaatctcttgtttcttttgctttattcttttgagttattttctggattgttacctttctcccacctagttcaacccctc

SEQ ID NO: 323763 - DNA, 201 bp, Homo sapiens
tggcctcaagtgatcttcctgcctcatgctcccaaagtgttgggattataggcatgagccactgtgcccagctctagtgtaccattttaattctctctctcttttttttttaaacatactaacaccaaccggaatctcttgtttcttttgctttattcttttgagttattttctggattgttacctttctcccacctagtt

SEQ ID NO: 323764 - DNA, 201 bp, Homo sapiens
ctcagtcctcaggagctggaggttgtagtgaaccgagatcatgccactgcactacaggttgggcaacagcaagactccctctcaaaaaaaaaaaaagtgtrtgtccttattttgttcctgtagggggaaagcgttcagtctttcatcatcaaatatcatgctagctgtgggttttttatagaggttgaggaagttccctct

SEQ ID NO: 323765 - DNA, 201 bp, Homo sapiens
tctttttatttttaaaaatatagagacaaggttttgctatgttgcccaggttgttcttgaacgcctggtctcaagtgatcctcccaccttggcctcccaargtgctgggattataggcataagctactgcacccatctcagaatttgtctatgtttacaatattatcaatgggtagacagctaattgcacagaatataaat

SEQ ID NO: 323766 - DNA, 201 bp, Homo sapiens
cccatctctattaaaacacaaaaactagctgatgtggtggcatgtgcctgtcgtcccagctacttgggaggctgaagcagaagaatcgcttgaacccatgrggcggagtttgcagtgagccaagatttcgccactgtacttcagcttgtgcgacagagcgagactccttctcaaaaagaaataaaattaaaaaattaaaag

SEQ ID NO: 323767 - DNA, 201 bp, Homo sapiens
gtgtttggtcttttcactttcttgttagtgtcttttgatatacaaaagtttaaaatttttatgaagtccaatttatttttcttttgttgcttgtgcttttrgtatcatgtctaagatactgacaaatctaatgtcatgaagattttcttctatgttttcttctcacagtattatagttttaatgcttatgtttaagtctga

SEQ ID NO: 323768 - DNA, 201 bp, Homo sapiens
gcagctcacgcctgtaatcccagcaatctggaaggccaaggcgggtggatcatttgaggtcaggagttcgagaccagcctgaccaacatggtgaaaccccrtctctattaaaacacaaaaactagctgatgtggtggcatgtgcctgtcgtcccagctacttgggaggctgaagcagaagaatcgcttgaacccatgaggc

SEQ ID NO: 323769 - DNA, 201 bp, Homo sapiens
gcaccatcatgcctgactaatttttaaagtactatttgtgtcttttaatctacagtgagtctcttgtagacagcatacagtggatactttaaaaaaaaaaagtttgttctcacaatttctgccttttaattagagagtttaactcatttacctttaatgtcattatttctaatttgattttttttttttttttttttgaga

SEQ ID NO: 323770 - DNA, 201 bp, Homo sapiens
aagcagaggggttgataaatgaatttatgtttgcaattctttatcagtctccagctctttaaaatccatacctccctatctctcctttacacagggcccakatattacactgtcaaaactttacaagttaattgaagagtcttgtccacagctggcaaattcagtgcagatcaggtaaacttcattttcttctttatatat

SEQ ID NO: 323771 - DNA, 201 bp, Homo sapiens
attctcctgtctcagcttcccgagtagctgggactacaggtgcatgccaccatgcccaactaatttttgtatttttagtagagatgggatttcaccatatyggtcaggatggtctcgaactcctgacctcaggtgatccacctgcctcggcctcccaaagtgctgggattacaggcgtgagccactgcgcccggccacaaa

SEQ ID NO: 323772 - DNA, 201 bp, Homo sapiens
cagttgtcttacaccagagatatttacagcgtttaaaatacattgattatttcttgttttagcattatctcagctacttaaacaacctccgtgtccaagaygttttcagttcaacacacagtctcctccattattttgatcgtctgattcttaccggagccgaaagcaaaagtaatggggaagagggctatggccggagct

SEQ ID NO: 323773 - DNA, 201 bp, Homo sapiens
gaagaaaataagtatctcccagagataatcattaacatgctgttatctataattccagaatttttcctgcatgcgtgtgtgtgtgtgtgtgtgtgtgtgtktttgtgtatacacagcatgctcacatacatgctcacacacacattcatacacacatacaatttattctttcaacaacaaaaacattttttttttttgagg

SEQ ID NO: 323774 - DNA, 201 bp, Homo sapiens
gaagctgttttattctgcctctagggagaagattaagctaaactatgaccatcttattagaagggtatgggatacactagtgtttgtagacagtggaactstctgcagttgtcttacaccagagatatttacagcgtttaaaatacattgattatttcttgttttagcattatctcagctacttaaacaacctccgtgtcc

SEQ ID NO: 323775 - DNA, 201 bp, Homo sapiens
aaagccctgctggctctttcccgtgtaccctctgcctctctcccagacccagtttttcaggaacacatctcgtatggctcagggttaaggccaggttatargtactttccttttaaatagtgctgtcactgtgcatgtgctgaaatgtgaaatccaccacatttctgaagagcaaaacaaattctgtcatgtaatctctat

SEQ ID NO: 323776 - DNA, 201 bp, Homo sapiens
cggtttgctcagctttgggtagtatatggctggggagcgatgggtgggaggcttggtgtttctggaagaggaaacagtgttgtagatggtcaagaggagakcatgtggcagggtccaccttcagtgttacctagagtgagggaaggccagccaaggctggcgagatgaggggccagagcctgaagggacccctgtagaaaa

SEQ ID NO: 323777 - DNA, 201 bp, Homo sapiens
cgcgcccggcccgaggatttcttacagaaagtgtgaagctgtgccttgatggataagcattgtctgttgagtaacagtgatggcagaaacagatctgggtycctgggcctccatattatgggatcttaaaagataaacctaataaaattagtgtctagagttgcatttatattccttagtatagtttataaaggctttttt

SEQ ID NO: 323778 - DNA, 201 bp, Homo sapiens
cggaggttgcagtaagctgagatcgcaccactgcactccagcctggggcgacacagtgagaccctgtctcaaaaaaaaaaaacataaaataatttcaaacrgcaacggcagagccttaaaccaatatagggcccttctgagcccacagccctgcacagtttgcacacctgaaaagccagcctgcccaaagcgcctctcagc

SEQ ID NO: 323779 - DNA, 201 bp, Homo sapiens
agcaccatcatgcctgactaatttttaaagtactatttgtgtcttttaatctacagtgagtctcttgtagacagcatacagtggatactttaaaaaaaaaaagtttgttctcacaatttctgccttttaattagagagtttaactcatttacctttaatgtcattatttctaatttgattttttttttttttttttttgag

SEQ ID NO: 323780 - DNA, 201 bp, Homo sapiens
ctgcctcagcctccggagtagctgggactataggctcccgccaccacgcccggctaatgttttgtatttttagtagagacggggtttcaccgtgttagccrggatggtctcgatctccagacctcgtgatctgtccgcctcggcctcccaaagtgctgggattacaggcgtgagccaccgcgcccggcccgaggatttctt

SEQ ID NO: 323781 - DNA, 201 bp, Homo sapiens
gtgcctggctacctgggtaatatttgtatttttagtagagatggggtttcatcatgttggccaggctggtctcgaactcctgccctcaggtgatccacccscctcagcctcacagagtgctgggattacaggcatgagccactgcgcccagccagagtctgtggtatttttatacacctcattgcattttctaatttccct

SEQ ID NO: 323782 - DNA, 201 bp, Homo sapiens
ggtcgagcctttgtctctttttctgcccacctctgtcattaaccagcgatagatttagaatgggtttcaaagtgtggttttattcttggcagtttcatatractttaattattaatcagaccactaaattctgtgtggtaggtttctctctgttccctgtatcctaataacatctgtggaaattccctttaccaatttgat

SEQ ID NO: 323783 - DNA, 201 bp, Homo sapiens
caaaattagctgggtgtggtgggacatgcctgtgatcccagctacttaggaggctgaggcaggagagtcgcttgaacctgggaggtggagattgcagtgarccgagattgtgccattgcactccagcctgggacaacaagaatgaaattccatctcaaaaaaaaaaaaaaaggaagcacaagcttggagaaccttattctc

SEQ ID NO: 323784 - DNA, 201 bp, Homo sapiens
tcaattctattcccttgatctatatgttacccttatgccagtactactttgttttgattactatagctttgtagtaagttttgaaatcaggaagtgggagttctttgttctttttcaggattgttttggctattcagcatcccttgcaattatatgttgattttagaattagcttgttcatttctgcaaaaacagtagttg

SEQ ID NO: 323785 - DNA, 201 bp, Homo sapiens
gcctgtagtcccagctactctggaggctgaggcagaagaattgcttgaacctgggaggcggagtttgcagtgagccgagattgctgcactgcactccagcmtgggcgacagagcaagactccgtctcaaaaacaaccctaaaaccaaaaaacaaatctgtagcttgtccattgattcacacctgggaaagaaactcatacg

SEQ ID NO: 323786 - DNA, 201 bp, Homo sapiens
actgtgttagccagggtggtctcgatctcctgacctcgtgatccgcccacctcggcctcccaaagtgctgggattacaggcgtgagccaccgcgcccgggsttgaatacctgttttcatttgatgcctacgaacggaattgctgagtcatgataattttgtgtttaacttcttaaggaaatgccacagtggctgcaccatt

SEQ ID NO: 323787 - DNA, 201 bp, Homo sapiens
aaatatttaaggctcctcaaaactccatgatttttgcaacattccatgatatcttgtaataactaacttcttttggtcttcccacatttaataacctctckatcagagcctttctttttttatgtactcaaaaataatagaaatgccatttttaatatttaccaataacctatttaacttagtaaggaactgcttcccctg

SEQ ID NO: 323788 - DNA, 201 bp, Homo sapiens
ctccagcctgggcgacagagcaagactccgtctcaaaaacaaccctaaaaccaaaaaacaaatctgtagcttgtccattgattcacacctgggaaagaaamtcatacgtacagaattgattataatgacaaaagtggctccttgaagtaagcgcaggcttaactacaatttttgccatgaatttaagctggcattttttag

SEQ ID NO: 323789 - DNA, 201 bp, Homo sapiens
ttagcctggaaaaaaatgacttatccaagcatgtgtttgacatcttcatgtagtgaaaagtcatgtgaaaagagcttagattgattgagggtatggctacrggagaagattgagagctggtaagtaagtgtaggttaaaggacaaaatatttctgctcattataaggaaacagtttccccttattgaaccctctgaggaag

SEQ ID NO: 323790 - DNA, 201 bp, Homo sapiens
tctcttctgctactgtaggctttatcttccctttattcaaaatatcttctttcatgggaaagagtcagggaaaactattttatctaaagccctccatctcrgtaaacactgctgtggcaatccagatgtttccttgatcatatttttctcttcctctttgtgatacctgttactgttagattgcatcataacactcaacat

SEQ ID NO: 323791 - DNA, 201 bp, Homo sapiens
ttttggaggtaaaaatggggatgcagaagctatttttagtatttcaaaaagccagaaggcagttgtacctttactggatgaaagactacataggcttactraaagtcaggtttgctttcaggtagaattcaggctgctcagtcaggtgacactggtttatactgttgcctcagtgtgcctctgtttttaatgaatagaaat

SEQ ID NO: 323792 - DNA, 201 bp, Homo sapiens
gaaaaagagtctaaatttagttttaaatctcaactagactgtaatcttcttggtagctgaggttgcatactctttattccttgtggtactctttttttttwattggagacggagtcttgctctgtcgcccaggctggagtgcaatggcgtgatcttggctcactgcaacctccacctgccaggttcaagccattctcccgc

SEQ ID NO: 323793 - DNA, 201 bp, Homo sapiens
ataaagatttgctattttgggagaaaagaaaagggaaaagaaatggaagaaatgaattctcaaatgttaattgtgatgcatttttaaaaaatgtatttttwaaaaagaagataggaaagcagctcatcaacctggactagtcagtaacttccatagagggaaccttattggcactggaacagtttatgaaaaccttctgcc

SEQ ID NO: 323794 - DNA, 201 bp, Homo sapiens
aaaaagaaaaaaaaaataaagatttgctattttgggagaaaagaaaagggaaaagaaatggaagaaatgaattctcaaatgttaattgtgatgcatttttwaaaaatgtattttttaaaaagaagataggaaagcagctcatcaacctggactagtcagtaacttccatagagggaaccttattggcactggaacagttta

SEQ ID NO: 323795 - DNA, 201 bp, Homo sapiens
ggtaagcccataaataagttatggggctcagaactgctttctgagcttcctcttgcaacccagaggaggtagagtgaattctttttctaatataaccattytcctttgctctttccatgtaattctagctcatcttatatcactcctctctcagtctcaggaattgcaggccacgatgggaatatttttgggggatactgc

SEQ ID NO: 323796 - DNA, 201 bp, Homo sapiens
ttgaacccgggaggtggaggttgcagtgagccgagagcacgccattgcactccagcctgggcaacaagagtgaaactccgtctcaaaaaaaaagaaaaaawaaataaagatttgctattttgggagaaaagaaaagggaaaagaaatggaagaaatgaattctcaaatgttaattgtgatgcatttttaaaaaatgtattt

SEQ ID NO: 323797 - DNA, 201 bp, Homo sapiens
tccttgcgcaaattgaaggaaccgatgacaataaaaagtctgctgtttggcctggtgcggtggctcacgcctatagtcccagcactttgggaggccaaggygggtggatcacgtgaggtcaggagttcaagaccagcctggccaaaatggtgaaaccccatctctactaaaaatacaaaaattagccaggtgtggtggcag

SEQ ID NO: 323798 - DNA, 201 bp, Homo sapiens
ttaataaaacttaattttataatttgtatatgaattcaggttttaggatctttaattctgaacactcagttttcctcaatatttgaactaggtaaggcccmgtattctcatctatcactcatgtaaccagtggcatagtggagtatatttgagataaaactgacacaaatactaatggaactcccatttttaatttgtgga

SEQ ID NO: 323799 - DNA, 201 bp, Homo sapiens
taggtcagtttggagaacattgccatcttaatgctattctcttccaacccatgaacacaggatgtctttccttttatttggatctttaacttacttcaacmatgttttgtagctttctgtatataaatctttcacttctttggttaaatttatccctaagtattttattctttttgatggtaatttaaatgaaattttttt

SEQ ID NO: 323800 - DNA, 201 bp, Homo sapiens
tggtaaacattgaataatattaaaggctatgtagtaaaaagtaattcttcagcctgtaatcccagcactttgggaggctgagatgagtggatcacctgagrttaggagcttgagaccagcctgtctaacatggtgaaaccccgtcgctactaaaaataaaaaaattagctgggcgtggtggcgggcgcctgtagtcccaac

SEQ ID NO: 323801 - DNA, 201 bp, Homo sapiens; identical to SEQ ID NO: 67935

SEQ ID NO: 323802 - DNA, 201 bp, Homo sapiens
actatgaccatcttattagaagggtatgggatacactagtgtttgtagacagtggaactctctgcagttgtcttacaccagagatatttacagcgtttaaratacattgattatttcttgttttagcattatctcagctacttaaacaacctccgtgtccaagatgttttcagttcaacacacagtctcctccattatttt

SEQ ID NO: 323803 - DNA, 201 bp, Homo sapiens
actggactcatataaatgtggccttttttgattggcttcttttacttagcttgatgttttcaggttttatccatgtagcaataggtatcagtgcttcattstttttcatggctgaagaatatttcactgtatggttagatcacattttgcttatccattcatcagctgatgggcatttgagtcgtttccaccttttggctg

SEQ ID NO: 323804 - DNA, 201 bp, Homo sapiens
cgggccataggcgatttcttcttactcttgatgttctctttcagtcatcatcctcctgatgttgtaaagtttggactggagataatatactagactgatgsaaaaaacagtgtttgtttgtttgttttggagactgagtttcgctcttgttgcccaggctggcgtgcagtggtgcgatcttggctcactgcaacctctgcc

SEQ ID NO: 323805 - DNA, 201 bp, Homo sapiens
tgcaacaggcccagatgttgctgagcatgaacagcctggaggcggtgaatgcgggcgtgcagcagaacaacacagagtcctttgctgtcgcactctgccayctcgcagagctacacgcggagcaggtaggcaggtggccgggcccacgtgcttctggagcaatggaggctctaccatttctttcctctaatgcttgaggaa

SEQ ID NO: 323806 - DNA, 201 bp, Homo sapiens
gagaacacctgcatcatattaatgattagctgacacagagtgatgcttgatttagcaacaaggggatgtgaataaagaaatgaggaacacagatgttcatygaaagcttttggaaatcaaattgtattttatgtttgttttctttctcccccagtaaaggccatgaaggaattgactcttcattttcatctatattcccta

SEQ ID NO: 323807 - DNA, 201 bp, Homo sapiens
gacgtctggaaaggtagtcttcctgtgcaagccctccaaggaggcctgtggaggtgtgaacctggtgacaaactgacactttccagtggcactggctttcytgagctgtgtattcagtaaggaggactcgcctcttcagtgagaacacctgcatcatattaatgattagctgacacagagtgatgcttgatttagcaacaa

SEQ ID NO: 323808 - DNA, 201 bp, Homo sapiens
gttgtccaggctggtctcgaactcctgacctcaagtaatctgcctgcttcagcctcccaaggcgctggtattacaggcgtgagccactgcgccaggccccraatggtctttttaatggctgcattatatttcacagtaagaaaagcaacataattcaactctgtattataaattaagtctttattggacttacaggctcct

SEQ ID NO: 323809 - DNA, 201 bp, Homo sapiens
cgtgggaggatcacttgagcctaggagttcaagagcagcctgggcatgggatttcaccatgttgtccaggctggtctcgaactcctgacctcaagtaatcygcctgcttcagcctcccaaggcgctggtattacaggcgtgagccactgcgccaggccccgaatggtctttttaatggctgcattatatttcacagtaaga

SEQ ID NO: 323810 - DNA, 201 bp, Homo sapiens
aattgactcttcattttcatctatattccctagtaccttataggccctacacatagaaggctttcaataaatattaatcaatgaatgagtgaaggtcaaaygcactggaagaatttattaattaaagtggaggttctccaaactggctgtacattagaattattgcggagatttaaaaaatatcttcgtacctgaggcctt

SEQ ID NO: 323811 - DNA, 201 bp, Homo sapiens
agcctcatggagcggcggaggctcaaccagctgctcctgcccctgctgcaggtgagaggctcccgctggctcctgctcgtgcagcaaacttttactgagcwtctgctctgtgcggaaccctgggcttggggacactcgtgtccatcagatactctccctgcctggaggaacgtgaagaaataaagatagctactaccggta

SEQ ID NO: 323812 - DNA, 201 bp, Homo sapiens
gctgctgaacgagatgagccgcacaggcgagggcgccgtcagcctcatggagcggcggaggctcaaccagctgctcctgcccctgctgcaggtgagaggckcccgctggctcctgctcgtgcagcaaacttttactgagcttctgctctgtgcggaaccctgggcttggggacactcgtgtccatcagatactctccctgc

SEQ ID NO: 323813 - DNA, 201 bp, Homo sapiens
ggtttttgttttgttttattttgtctgagacagagtctcactctgttgcccaggctagaataccatggcacaatcatggctcactgcaccctcaactgccygagctcaagtgatcctcccacctcacttttctgagcatctgggattactggtgtgccttaccataaccagctaattttttatatttttgtagagatgggt

SEQ ID NO: 323814 - DNA, 201 bp, Homo sapiens
tatctctcaggttgctgcatcaagaacgggaacaggtgaatctgtcaccatctgtgcatggtacagcaggtgtggattcaacacaggttatgctgatcaarttgtgtgtttctactttagggctgttttgctgcagcttctgaagtgttaaagcacttgaaggaacgatttccgcctaatagtcagcacgcccaggtaatc

SEQ ID NO: 323815 - DNA, 201 bp, Homo sapiens
catggcctcaagtgatcttcctgcctcatgctcccaaagtgttgggattataggcatgagccactgtgcccagctctagtgtaccattttaattctctctctcttttttttttaaacatactaacaccaaccggaatctcttgtttcttttgctttattcttttgagttattttctggattgttacctttctcccacctag

SEQ ID NO: 323816 - DNA, 201 bp, Homo sapiens
tggtgcaatcttggctctctgcaacctccgcctcccaggttcaagcaattctcctacctcagcctcccgagtagctgggattacaggcgcatgctaccacrcctggctaatttttgtaattttaatagagacggggtttcgccatgttggccaggctggcctcgaacgcctgacctcaggtgattcatccgccttggcctc

SEQ ID NO: 323817 - DNA, 201 bp, Homo sapiens
tatagatgtgagccaccatgcctggcgaaattatttttttttactattagaatagaaaactacttttcaaaaaccttagtcttggttcaattctttttttwtttttaatttttaatttttaatttatttttaatttaattttatttttttgagagggagtctcactctgtcacccaggctggagtgcaatggtgtgatctc

SEQ ID NO: 323818 - DNA, 201 bp, Homo sapiens
agtccaggaattcaaggctgcagtgagctaggattgtgccactgtactccaacctgggtgacagagggagaccctgtctctaaaaaacaaacaaacaaacataaaagtgattttgaaaaaatgataaaagtaacaaatgcacatagtaagaaaaaaggtcaaataatgtaggagagaatgccatgaaaagtaaaatattat

SEQ ID NO: 323819 - DNA, 201 bp, Homo sapiens
gagtccaggaattcaaggctgcagtgagctaggattgtgccactgtactccaacctgggtgacagagggagaccctgtctctaaaaaacaaacaaacaaacataaaagtgattttgaaaaaatgataaaagtaacaaatgcacatagtaagaaaaaaggtcaaataatgtaggagagaatgccatgaaaagtaaaatatta

SEQ ID NO: 323820 - DNA, 201 bp, Homo sapiens
tgagtccaggaattcaaggctgcagtgagctaggattgtgccactgtactccaacctgggtgacagagggagaccctgtctctaaaaaacaaacaaacaaacataaaagtgattttgaaaaaatgataaaagtaacaaatgcacatagtaagaaaaaaggtcaaataatgtaggagagaatgccatgaaaagtaaaatatt

SEQ ID NO: 323821 - DNA, 201 bp, Homo sapiens
ctgagtccaggaattcaaggctgcagtgagctaggattgtgccactgtactccaacctgggtgacagagggagaccctgtctctaaaaaacaaacaaacaaacataaaagtgattttgaaaaaatgataaaagtaacaaatgcacatagtaagaaaaaaggtcaaataatgtaggagagaatgccatgaaaagtaaaatat

SEQ ID NO: 323822 - DNA, 201 bp, Homo sapiens
ggtccatcgcctgagtccaggaattcaaggctgcagtgagctaggattgtgccactgtactccaacctgggtgacagagggagaccctgtctctaaaaaamaaacaaacaaacataaaagtgattttgaaaaaatgataaaagtaacaaatgcacatagtaagaaaaaaggtcaaataatgtaggagagaatgccatgaaa

SEQ ID NO: 323823 - DNA, 201 bp, Homo sapiens
aataatattttgatgaacagaatttcttctttttatttttaaaaatatagagacaaggttttgctatgttgcccaggttgttcttgaacgcctggtctcargtgatcctcccaccttggcctcccaaagtgctgggattataggcataagctactgcacccatctcagaatttgtctatgtttacaatattatcaatgggt

SEQ ID NO: 323824 - DNA, 201 bp, Homo sapiens
atgccgcgagcacgcggatgtctgtttcctgggatattgtgagggcgggcggagatgtagacccggtagtgttgtgccttgtggtgacaactggcggcagygcgccgcgggcccgagacttagtctcgggccgccatggccagcgtccacgagagcctctacttcaatcccatgatgaccaatggggttgtgcacgccaat

SEQ ID NO: 323825 - DNA, 201 bp, Homo sapiens
acgtgctggcttatgccctttttacccttccagatctgggaagttaactgataagggctgcaccagtgggtcccttgccctctgacttgtgattggccaaygggaggcactggcaggaaatcccaagggccagggagaatgacgtggagtgtggattcattggctccctttcttgggggtcctggggggctggctgtaggg

SEQ ID NO: 323826 - DNA, 201 bp, Homo sapiens
aaaattttaaatccccccaaaaaagaatatgtgtgaattattgtaaggatatttgctaagcaatccaaaatactttcatatactcattaagatgaacattygccattttgtacttaattgtgtttttttttcttactagttatggatgctatgtgatcaaaaaatacagtttgacagagcaatgaatgatggcaaatatca

SEQ ID NO: 323827 - DNA, 201 bp, Homo sapiens
gataaagcaaaatgtgagttgacaaagttgatgattggcacacatgtatctgctattttattctctgtgctttttcacatacttgagatattttaaaaaawttttaaatccccccaaaaaagaatatgtgtgaattattgtaaggatatttgctaagcaatccaaaatactttcatatactcattaagatgaacattcgcc

SEQ ID NO: 323828 - DNA, 201 bp, Homo sapiens
tgcttacaagtatgatattatttatataaagtttaaaaacacaggctcatactctatgttgtttagagacaagggtatatgttgtaaaagtataaaaaacmtgaatgagaatgataaataccaaattgagtgcctactttgaaaaaagagaaagagacgtagaatttgcaaaggacttcattggtatctaatagtatatga

SEQ ID NO: 323829 - DNA, 201 bp, Homo sapiens
ttttaatcaaaatgtatgtagagttcatctagtagcatcccagccagacctcaactcctttactaactgtttgatttcttaaattagttaatttttggctkggtgcctagactttgggaggccaacgtgggaggatcacttgagcctaggagttcaagagcagcctgggcatgggatttcaccatgttgtccaggctggtc

SEQ ID NO: 323830 - DNA, 201 bp, Homo sapiens
gtgggaggatcacttgagcctaggagttcaagagcagcctgggcatgggatttcaccatgttgtccaggctggtctcgaactcctgacctcaagtaatctrcctgcttcagcctcccaaggcgctggtattacaggcgtgagccactgcgccaggccccgaatggtctttttaatggctgcattatatttcacagtaagaa

SEQ ID NO: 323831 - DNA, 201 bp, Homo sapiens
tggccaggatggtcttgatctcctgacctcatgatctgcccgcgtcggcctcccaaagtgttgggattacaggcgtgagccactgcgcctggccaaggctrctttttatattgagtagctgtgcaaatgagaatcagcccattggcccaggttcttgaaggaaatcgtgttcttggtaggcaaacaactcggtataggttg

SEQ ID NO: 323832 - DNA, 201 bp, Homo sapiens
agaaactgaagaacacagaaatggtgatcaggtaaggggtctcttgtacatctcacggagatgtggtggtggatcttctcatcctgtgttttcctctttayggtcagtgtcctactgtccgtggcagagctgtactggcgatcttcctcccctaccatcgcgctgcccatgctcctgcaggctctggccctctccaaggag

SEQ ID NO: 323833 - DNA, 201 bp, Homo sapiens
gtggcacgatctcagctcactgcaatctctgcctcctgggttcaagcgattctcctgcctcagccttctgagtagctgggattacaggtgcccaccactaygcccagctaattttttgtatttttagtagaggcagggtttccccatgttggccaggctggtctcgagctcctaaccttgtgattcgcccgcctcggcctc

SEQ ID NO: 323834 - DNA, 201 bp, Homo sapiens
caagcgattctcctgcctcagccttctgagtagctgggattacaggtgcccaccactacgcccagctaattttttgtatttttagtagaggcagggtttcmccatgttggccaggctggtctcgagctcctaaccttgtgattcgcccgcctcggcctcccaaagtgctgggattacaggtgtgagccaccgcgctcagcc

SEQ ID NO: 323835 - DNA, 201 bp, Homo sapiens; identical to SEQ ID NO: 67934

SEQ ID NO: 323836 - DNA, 201 bp, Homo sapiens
taggtactagggatacagcagtgaaaaagaaaaaaaaaaaacttgttatagagcttatatcaggggaaatagggaataaacaacgctaagcatagttgtamtatctcagatagtgatagaccaggataagaggttagaaagtgaaggtgaagtgctcttgttttcctgagtaacactcttactccagatacatatacaggt

SEQ ID NO: 323837 - DNA, 201 bp, Homo sapiens
ttttctattttagaccattccactgactagacaaaaatggtatgcaaatgtgaagtattactttagtgttttaggtagatagaaaaatccttatttgcatktttggagtgattattaaagcagaggggttgataaatgaatttatgtttgcaattctttatcagtctccagctctttaaaatccatacctccctatctctc

SEQ ID NO: 323838 - DNA, 201 bp, Homo sapiens
cgaggatttcttacagaaagtgtgaagctgtgccttgatggataagcattgtctgttgagtaacagtgatggcagaaacagatctgggttcctgggcctcyatattatgggatcttaaaagataaacctaataaaattagtgtctagagttgcatttatattccttagtatagtttataaaggcttttttaaaaaatttat

SEQ ID NO: 323839 - DNA, 201 bp, Homo sapiens
aaataatattttgatgaacagaatttcttctttttatttttaaaaatatagagacaaggttttgctatgttgcccaggttgttcttgaacgcctggtctcragtgatcctcccaccttggcctcccaaagtgctgggattataggcataagctactgcacccatctcagaatttgtctatgtttacaatattatcaatggg

SEQ ID NO: 323840 - DNA, 201 bp, Homo sapiens
taagcccagaaatagttacagcttccaacccagagacctgcatttggatgactgtgtacagatgacttcctgctatggttgcttatgcatgtttgtgattrttaatgggatattaatgtttagtctgtcattagtcaacaggcagagctcgccctgcaggaggcaattaggattgcccaggagtccaacgatcacgtgtgt

SEQ ID NO: 323841 - DNA, 201 bp, Homo sapiens
caatgctcagctaattttttgtatttttagtagagacggggtttcaccatgttggccaggctggtctcgaactcctgacctcaggtgatccaccctcctcrgcctcccaaagtgctgggattacaggcatgagccatcacgcccagcctaaatgacagttttgaggctgaaaaactcttttcctttctcttcttttgtcag

SEQ ID NO: 323842 - DNA, 201 bp, Homo sapiens
acaccactgcactccagcctgggcgtgagagtgagactccatctcaaaaaaataaaaaaggaaggttcatctgttcacatagtccgtgacctgtcattgcygttaatatttaacagtacatctctgatctataaaagcttcttagaattccctcgttatttccgtgagagatacattctctaatttgtaaaacattacttt

SEQ ID NO: 323843 - DNA, 201 bp, Homo sapiens
cagacgggacaaggaccgtaaacgatccaggtacatgaaggaatgagagggggctttaggggaatgctcccatttcttctctgcacctgagtttgctcagyttcttatgaaagtagatttctcgccaggcgtggtggctcacgcctgtaatcccagcactttgggaggctgaggctggtggatcacgaagtcaggagatcg

SEQ ID NO: 323844 - DNA, 201 bp, Homo sapiens
gggcaattgctctgctgtgttgaagagctgctgttttcttgggcagaatgtcatgggcattaaagaccctgaaagtagtgttcatagatgagggttgggcrtttcacttggagtgggaggtattatgcatcttgtttttctcctcttccttccaggaaaaagctgctggcaatcttggagcaaggctttgacccacccatc

SEQ ID NO: 323845 - DNA, 201 bp, Homo sapiens
cctgggctagaagccggtcttgggggtcatgcccgttagcactaggcagccccgaggtgtgttggcggtgaggctggtacaggtcctggtaggcatctgcrtagtcctcctccaggtggcgggagctacgctgtgaagatcctgtccaggcttggcgggagctctcgctggcctcatcagagggcatcaagctgtcccgct

SEQ ID NO: 323846 - DNA, 201 bp, Homo sapiens
gctgcgcctgtgcctgccagggtagggcagcaggaggctgtcagtagctatccttgggccaaggccggttgcgctgccagttccggtcactgtggttgtgytctgagtcctgggctagaagccggtcttgggggtcatgcccgttagcactaggcagccccgaggtgtgttggcggtgaggctggtacaggtcctggtagg

SEQ ID NO: 323847 - DNA, 201 bp, Homo sapiens
ttctttcactatgctgcctacttaggtaatatcatttagtgtcccatggctttaaaagctatctgtgtattggtgactcaagtttttgtctacagaccctstcccctaagttcagatttgcatttctctttgccttctgggaatctccacagatattctcacactcaacctggccaaaatgaaacgtttgatttcctctta

SEQ ID NO: 323848 - DNA, 201 bp, Homo sapiens
aaactgcagtagcatcattgccctagatgccccaggagacctggcaccatgaggattacagacagtggaatcttactgtcatctggacagctgttttcctktttggatggtaaaggaagttgagagtctttagacctgtgcacagccccgcaccaaggggtgctgtatgctctaggcatcccctcccccaggggattttct

SEQ ID NO: 323849 - DNA, 201 bp, Homo sapiens
ggggtttcaccctgttagccaggatggtcttgatctcctgacctcttgatctgcccgcctcagcctcccaaagtgctgggattataggcgtgagccaccaygcccagcatgagactttgttttctttactgctttgtctccgttacctacaacaatttctggcaccttgtaggtgctcggtgaatatttgttgaaagaatg

SEQ ID NO: 323850 - DNA, 201 bp, Homo sapiens
cctgacatcacgcctggctaatttttgtatttttagtagagacggggtttcaccctgttggccaggctggtctcgaactcctgacctcatgatctgcctayctcagcctcccaaagtgctgggattacaggcgtgagccactgctcctggcctccggctgatttttaactgtttataaatgtaaaattttattgttcaaaa

SEQ ID NO: 323851 - DNA, 201 bp, Homo sapiens
agatacagtgtctcttaggagagatagaaacctgttcactctggagtttggaaaggggaaggatggtgggagtttatgagaaaacatttttctgttagatytccatttaccccatatcataagtctacccctttttttcttcatttggggttcctcgtctggattccctccattccctctcctcttttcttccatgagctc

SEQ ID NO: 323852 - DNA, 201 bp, Homo sapiens
tggggttcctcgtctggattccctccattccctctcctcttttcttccatgagctcttctgcagctttgctttctttggtctgcagaagatcctcaggaaygggaacgtcgggaacgcagggagaggatggaacgggagaccaatggaaatgaggatgaggaagggcggcagaagatccgggaagagaaggataagagcaa

SEQ ID NO: 323853 - DNA, 201 bp, Homo sapiens
actggcttctccccaccccttccaatccctccacaaacccttcccacacagttcacttgggcaggatcccctctttccctgtgtcttagctacccacctayccaaaatgggtgggttggggggaggctacctagagatggcggaggggagcgtcggttgccaatgtcactcaggctggaagggttcccagatctcctgaga

SEQ ID NO: 323854 - DNA, 201 bp, Homo sapiens
tgaggattacagacagtggaatcttactgtcatctggacagctgttttcctgtttggatggtaaaggaagttgagagtctttagacctgtgcacagccccrcaccaaggggtgctgtatgctctaggcatcccctcccccaggggattttctaagtagatggggggacacggtgaactggctgtgtccatctttgtcactg

SEQ ID NO: 323855 - DNA, 201 bp, Homo sapiens
tttctcatctttatacaatctttcttaaggatatatggcagggaatggcatgagaaaggggcttgtaagctaaagcttaaggaaccattcgagctgaaccmtttggggataaaataagttgcgagaaatgtatcccaagtctttgggatgatgatgaggtggttgcagattcaggcttgctgcagttttagctcctggctg

SEQ ID NO: 323856 - DNA, 201 bp, Homo sapiens
ctagcactgtgccttgcgtacagtagatgcttgttaaatacgtcattgagtgaaaaaaaagaatgtgcccctgccctgcaagaactgaggacctgaagatmtggaggtttgagaggaaggctgctgggaagcatggccagagtcagcctggttatttggcccttgtgataatagaacctgtaataaaagttgcctgtattt

SEQ ID NO: 323857 - DNA, 201 bp, Homo sapiens
atagaacctgtaataaaagttgcctgtatttactgtcttcttctcatttttcattctcttccaaactcattccactcaggcttccattcccgcaatgcaamtgaaacagctcttgtcaaggtcaccaataatctccatttttccaaattcagtggttacttccctgtcccttattccctctccacttcggtggtacttgac

SEQ ID NO: 323858 - DNA, 201 bp, Homo sapiens
ttactcagctcccactaactcttcccttagagaagactagctacaggcatctggaagtaggccatgagcttctccttggttctcaggccacctcaggccasggcagcttacctgccatcaaatctgtgtttgaggaagtcgaagagagccttctgcatcatgtctgtgacctgggggaaggcatggcactgatgaagggcc

SEQ ID NO: 323859 - DNA, 201 bp, Homo sapiens
ttgggggtcatgcccgttagcactaggcagccccgaggtgtgttggcggtgaggctggtacaggtcctggtaggcatctgcatagtcctcctccaggtggygggagctacgctgtgaagatcctgtccaggcttggcgggagctctcgctggcctcatcagagggcatcaagctgtcccgctcaaggggggagtgctcctc

SEQ ID NO: 323860 - DNA, 201 bp, Homo sapiens
ccaagatgtgtctatggttgtcaactatgatatggccaaaaatattgaaggtaagttccagggaaagcagcttcaatccagggtgaagtcagattccttayggtgtcccactggaagtcagggtgctgtccatggaaggctgttactgcctccctcagttccaagtctgggattgcttgctcccatgagaagcactcctgt

SEQ ID NO: 323861 - DNA, 201 bp, Homo sapiens
ttttagtgcaggtgcagggcagggcaattgctctgctgtgttgaagagctgctgttttcttgggcagaatgtcatgggcattaaagaccctgaaagtagtrttcatagatgagggttgggcatttcacttggagtgggaggtattatgcatcttgtttttctcctcttccttccaggaaaaagctgctggcaatcttggag

SEQ ID NO: 323862 - DNA, 201 bp, Homo sapiens
ctagcagatgtgcttactactatcagtggttgcccaggtggtataactctccctgtacctattactctttcttggggtcactgcaggaaccaacacctatmcagcgtcaggcaattcccattgggctacagaatcgtgacatcattggtgtggctgagactggcagtggcaagacagcagccttcctcatccctctgctgg

SEQ ID NO: 323863 - DNA, 201 bp, Homo sapiens
cactgcactccagcctgggcaccattgagcactgagtgaacgcgactccgtgtgccatcccggcacctcgggaggccgaggctggcggatcactcgcggtyaggagctggagaccagcccggccaacacagcgaaaccccgtctccaccaaaaaaatacgaaaaccagtcaggcgtggcggcgcacgcctgcaatcgcagg

SEQ ID NO: 323864 - DNA, 201 bp, Homo sapiens
taacagctccttcttttttcttttcctctatctcaatcccaggtacaaagaacggcaccaggtgcagttgttagggcgaggcttcattgcaggcattgacytcaagcagcagaagcgagagcagtcacgtttctatggagacctaatggagaagaggcgaaccctggaagaaaaggagcaggaggagtgagtgatcaaggc

SEQ ID NO: 323865 - DNA, 201 bp, Homo sapiens
acgtgtatgtgtatttcagggggatatgcatgtgtatggcatgcatggtgacgtgtcctgtgggtacagtgcaagtgtttggggtgtgtttactgactcayggcccaactctcacctggccttctgctcctgtttgagccggatgctctccaggcgctgggggctggggatgaaggcgatgtccccgccctctttcactag

SEQ ID NO: 323866 - DNA, 201 bp, Homo sapiens
ggctgtgtccatctttgtcactgagtgaaatctctgttttctattctctgagaagataagtttgtatgttctgagaataaatacatgaatattaagactgytagatctagttctagttaaacttcccagcttctccctggcaggagggacaccactgggtgcggggtgggttggcttggaaaatgagagacagccacatta

SEQ ID NO: 323867 - DNA, 201 bp, Homo sapiens
gtgtctggcaggggagaacaaagtctagcctctgtggcactgctttctgaatctagcagggccccctaggctcttcctttcaagtctcaccctttctttavcctgtccagcaatcaacaagttaggaccagggtgaagggtggtttgagggaataaagagaatggaatcaattgctgggaccccctgtctgctgcagtaat

SEQ ID NO: 323868 - DNA, 201 bp, Homo sapiens
agtgagctgaggtcgtgccactactccattccatcctgggcaacagagtgaggccctgtctcaaaaaaaaagaaaagttgtacaaggttgccaacctcctkttgggcctttcttgccttaggtgggctcagagtacatgtttctagaatgaagtgtgcctaggtacagtcctctgacagtcctaagggtggagccatttag

SEQ ID NO: 323869 - DNA, 201 bp, Homo sapiens
gtcaggcgtggcggcgcacgcctgcaatcgcaggcactcggcaggctgaggcacgagaatcaggcagggaggttgcagtgagccgagatggcagcagtacrgtccagctttggctcagcatcagagggagaccatggaaagagagggagagggagaccgtggggagaggggagaggggagagggagcctgaagcttttcta

SEQ ID NO: 323870 - DNA, 201 bp, Homo sapiens
agagtgtctctgtcacccaggctggagtgcagtggcgtgatctcagctcactgcaacctctgtctcctgggttcaagcgattcttctgcctcagcctcccragtagctggtattacaggcgccggccaccacgcctggctaatttttgtatttttattagaggcagggtttcaccatgttggccaggctggtctcaaactc

SEQ ID NO: 323871 - DNA, 201 bp, Homo sapiens
tggcctctggacttatttttatttttattttttttggagacagagtgtctctgtcacccaggctggagtgcagtggcgtgatctcagctcactgcaacctmtgtctcctgggttcaagcgattcttctgcctcagcctcccgagtagctggtattacaggcgccggccaccacgcctggctaatttttgtatttttattag

SEQ ID NO: 323872 - DNA, 201 bp, Homo sapiens
gaatcgaccaggcactgtggctcacgcctgtaatctcagccttttagaggctgaggcaggaggattgcttgaggtcaggaatttaagaccagcctgggcarcatagtgagaccctgtctataaaaaaaataaattagctaggcaaggcaggaggatggcttgagcccaggaagttgaagctgcagtgacctatgattgcac

SEQ ID NO: 323873 - DNA, 201 bp, Homo sapiens
agagtcagaaaagaggtatgagggcagctgagccaggggaaacagggtggagaataaaatggctctgagaacttttttagtgcaggtgcagggcagggcarttgctctgctgtgttgaagagctgctgttttcttgggcagaatgtcatgggcattaaagaccctgaaagtagtgttcatagatgagggttgggcatttca

SEQ ID NO: 323874 - DNA, 201 bp, Homo sapiens
cgggagaacctaatgccgaaagcctattggcgaaaaactcttccttcccggacgctaacgtctggcaaaccacattgcccggcagaccccgcagcctgggrccggcgctcaagtcatgcattctgggattggtagtttccaggcctcagtgtcggcctgtgccgcccagctccaggaactcgccttcccagcttgcctcgc

SEQ ID NO: 323875 - DNA, 201 bp, Homo sapiens
gccgccacgcccggctaattttttgtatttttagtagagacggggtttcaccgtgttccccaggctggtctcgaactcctgagctcaggcaatccacctgyctcggcctcttaaagtgttaggattacatgcgtgagccaccgcgtccgacctcataaccctgttgttctaaacacttcctgtgaacagaatttatttttg

SEQ ID NO: 323876 - DNA, 201 bp, Homo sapiens
ttcccggacgctaacgtctggcaaaccacattgcccggcagaccccgcagcctggggccggcgctcaagtcatgcattctgggattggtagtttccaggcytcagtgtcggcctgtgccgcccagctccaggaactcgccttcccagcttgcctcgcggccgggggggtggggggtgttcatctccgcgaccaggaaacgg

SEQ ID NO: 323877 - DNA, 201 bp, Homo sapiens
ggtatccgcactgtggctgtcattggtggcatctccagagaagaccagggcttcaggctgcgcatgggttgtgaggtttgtttttctatctagcagccagsctgctgtctgggaaggctatcttggggctttgtttctagtttctggaatatatgtgcagtagtatgaagaaaggagctggtttatatatatgtgctattt

SEQ ID NO: 323878 - DNA, 201 bp, Homo sapiens
aagagcggcagaggatgcttgaagaagagaggaagaaaaggaaacagttccaagacttgggcaggaagatgttgggtttgttattctaccctgtgtagccyctagatggaagaggaaagagtgggatgagatacagtgtctcttaggagagatagaaacctgttcactctggagtttggaaaggggaaggatggtgggagt

SEQ ID NO: 323879 - DNA, 201 bp, Homo sapiens
taaaactcatggattcccctctatggcgattccccactataccctgttactagaccggatacagatagccccaattcccatttgcctcataagtgactagmtgaaatgcttggcccattgatcagctggaaaaaaaatgctcattaatgaaactttggttaagcttttgtccttccccaaggcctctgaattttggcccac

SEQ ID NO: 323880 - DNA, 201 bp, Homo sapiens
atgccttatatttgaggaaaacaggcttggagaagctgcatggcttatggtgtacagttgaggttccatcccttttctgtgaacctccattctgagcataygtattcttgggcctgcacaaagagccctgggaaactggccttgcttcttggggtaacaggcctctcactaggcctgcaggcagtgatgtgttggctctcg

SEQ ID NO: 323881 - DNA, 201 bp, Homo sapiens
ctaagagggctagagggggttgctggcccatggccctgggcgtggcctccctggtgtatgaggagggccacccagcagggaagggaggtacacattgtgcrggcagccagagctgagcaagagagcaggttaagaggatgaggaggagttggtacacagcagggcaagggggcagagtcctgaagacagggattatggccc

SEQ ID NO: 323882 - DNA, 201 bp, Homo sapiens
gggcagagtcctgaagacagggattatggcccttaatgctcataagagctgctgctatggtgtgtctaccagtgacaggcacggttctgttgacttcaccyagctggtctttattgatcacctcctgtgataagtaaataatcaataaatgtaatgctttctactacaggaaaaagataggcattaaaaaaaaagaataaa

SEQ ID NO: 323883 - DNA, 201 bp, Homo sapiens
gtatgcccctgggtatagacagtagaagggtctgggttcagacttggggcagcatggttgactgtggagctcgtgatctccccactcggtgctgcctcccyccacagggatccatgcatctattggccaggggttctcagggcgtgtctcctgccaacctgatggggtgtggggtgacctccctgactcctctttctgctc

SEQ ID NO: 323884 - DNA, 201 bp, Homo sapiens
ttacaacagtgattcacctgtgtttacagtatgaatgcttttattagtgaaatgggtcctcaactcaatctgggagccacgagctacggtgcagggctctsgggcatccccaccgtggtgcactgcagggagggagggagggtgggtgggctgcctggcacactctcacccagcccctctgcctgtgtgttctctcttcag

SEQ ID NO: 323885 - DNA, 201 bp, Homo sapiens; identical to SEQ ID NO: 67961

SEQ ID NO: 323886 - DNA, 201 bp, Homo sapiens; identical to SEQ ID NO: 67963

SEQ ID NO: 323887 - DNA, 201 bp, Homo sapiens; identical to SEQ ID NO: 67965

SEQ ID NO: 323888 - DNA, 201 bp, Homo sapiens; identical to SEQ ID NO: 67959

SEQ ID NO: 323889 - DNA, 201 bp, Homo sapiens; identical to SEQ ID NO: 67952

SEQ ID NO: 323890 - DNA, 201 bp, Homo sapiens; identical to SEQ ID NO: 67953

SEQ ID NO: 323891 - DNA, 201 bp, Homo sapiens
attattcatctgatctgcaagcctttgaagcaagagatttttagcatgccttatatttgaggaaaacaggcttggagaagctgcatggcttatggtgtacmgttgaggttccatcccttttctgtgaacctccattctgagcatacgtattcttgggcctgcacaaagagccctgggaaactggccttgcttcttggggta

SEQ ID NO: 323892 - DNA, 201 bp, Homo sapiens; identical to SEQ ID NO: 67973

SEQ ID NO: 323893 - DNA, 201 bp, Homo sapiens
acgccagccggcggggaggtcgtgccaggatagcagactttagttgttgtcgttgttccgtggactttttagcagcacaggggaccttatcgagccaggtwttttcaggtttgggcgattatcagaattgtggcttgagggtaggggtcgtccgcgctctttttaaaaatctagattctcaggcccctttccccaaaatag

SEQ ID NO: 323894 - DNA, 201 bp, Homo sapiens; identical to SEQ ID NO: 67960

SEQ ID NO: 323895 - DNA, 201 bp, Homo sapiens
agaccagcagggcaacatgatgaaaccccatctctactaaaaatacaaaaaaagtagccaggtgtggttgtgtgtacctgtagtcccagctacccaggagrctgaggtgggaggatcacttgagccctgcagtgagctgtgatcacgccactgcacttcagcctgggtgacagagcaagaacttatctcaaaataaataaa

SEQ ID NO: 323896 - DNA, 201 bp, Homo sapiens; identical to SEQ ID NO: 67956

SEQ ID NO: 323897 - DNA, 201 bp, Homo sapiens; identical to SEQ ID NO: 67957

SEQ ID NO: 323898 - DNA, 201 bp, Homo sapiens
gcattgatataaaatttgtaaagcccacagtggcatcacgttcaggtatggatgttttggcatatttccttatgttagtttcttagtgcttagaaaaaatkaattagtggttgggaccacactgatgcaccaggaattcccaaacatgcttgaccttagaaacacctaagtcctttttaacaatctaggatccttgtcccc

SEQ ID NO: 323899 - DNA, 201 bp, Homo sapiens; identical to SEQ ID NO: 67958

SEQ ID NO: 323900 - DNA, 201 bp, Homo sapiens
aatggagaaagggaacagtattaaaaaggccatcagtgacaccccaaaaataagatagaaacctaataaaaaggtagtccagttttacgcatcttgtttctttttttttttttttttattccacacatcttaaatggttaagaaatgcacaatacaccaataagtatggcactttaccttgaaaaagacctgaacttgctt

SEQ ID NO: 323901 - DNA, 201 bp, Homo sapiens
ctgttgacttcacccagctggtctttattgatcacctcctgtgataagtaaataatcaataaatgtaatgctttctactacaggaaaaagataggcattamaaaaaaagaataaatgtgacgctttccttggagcatcactaagaagtccaacatggtccctgcactcacagaccttacagtgcggtgggggagagttggg

SEQ ID NO: 323902 - DNA, 201 bp, Homo sapiens; identical to SEQ ID NO: 67968

SEQ ID NO: 323903 - DNA, 201 bp, Homo sapiens
tccagaactttgttctagattccttaaaagtcggtagctgatgtcaaactcaattgagcagtagctttgatcccttggtctgggggtcgaaggaagatggygctgttatcagcggggaaatgtactatttaagatcagctttgttgtaaaaccatttgttctagaataaaactcaattggaaacgtgggtgaagtggccct

SEQ ID NO: 323904 - DNA, 201 bp, Homo sapiens; identical to SEQ ID NO: 67970

SEQ ID NO: 323905 - DNA, 201 bp, Homo sapiens
ccctgggtttgaatcaccactttgcttcactgggggcaagaaaccttgggaaagtcacctaactgctccaaacagtaggttccttctccatagaacagggraaataaaaataaaatcctgaccttgcctccagataaggattgctggcctgttgcacaggacaatgtagaaaggctacaccaactgtaaggtgataaatag

SEQ ID NO: 323906 - DNA, 201 bp, Homo sapiens
gctgctactgctcaggttttcatcttctccagacctctttctacacccttctgaagaggacctgccacatgctagcttctaggctggctgttggggaaggkacaatcaaggctctaacctgccttcttacagctctgaggtagactgtgtgtaccaatggactttgaagggtgtaataattctcaaattgtgctataagag

SEQ ID NO: 323907 - DNA, 201 bp, Homo sapiens
cccagtgacttgaggctgctggtgggccctcttcctccaccctgggttagtcctttttaaggcctttgcccctaacatggccactgattcttctcccttcwacctggaaggttactgttgtacatgcacacagatgtagcctcttccaggaagcctccagagaattgtcctccagcctgttttgcctccctagcacctctg

SEQ ID NO: 323908 - DNA, 201 bp, Homo sapiens
cccttccaggtggcccagaaagaggtaagggcagggatggggacttgtttgggaggtgtggtgggctggaaagagccaccctgggtttgaatcaccacttygcttcactgggggcaagaaaccttgggaaagtcacctaactgctccaaacagtaggttccttctccatagaacaggggaaataaaaataaaatcctgacc

SEQ ID NO: 323909 - DNA, 201 bp, Homo sapiens
actgtgagatggtgggcacgggaccccgagggcgggtaagcgagctggcccgctgttccattgtgagctaccatggcgatgtcctctatgacaagtacatyaggcctgagatgcccatcgctgactaccgtacccgctggagtggcatcactcggcagcacatgcgcaaggctgtccccttccaggtggcccagaaagagg

SEQ ID NO: 323910 - DNA, 201 bp, Homo sapiens
tactacaggaaaaagataggcattaaaaaaaaagaataaatgtgacgctttccttggagcatcactaagaagtccaacatggtccctgcactcacagaccytacagtgcggtgggggagagttgggtggagtgggaggcctggtgacgtcttccaggctgagaggagagccaacaccagcaatagagttgcttgtatctgg

SEQ ID NO: 323911 - DNA, 201 bp, Homo sapiens
gctgcacaagaagatccaggtgcgtggtgggagagtggctggaagggagggaggcccgcctggcctccatgccacctgagccacagacaaggctttgggcygtgtctccagcctccttgtcattctcttccctagtccaggtccagggaccttgcttaaatgggtctccctcctgtacacgcagctccaggtgtttctctc

SEQ ID NO: 323912 - DNA, 201 bp, Homo sapiens; identical to SEQ ID NO: 67955

SEQ ID NO: 323913 - DNA, 201 bp, Homo sapiens
tagagtgcagggtgcaatcatggctcactgcagcctcgacttcccaggctcaggagatcctcccacgttggcctcccaagtagctgggatgacaggcatgygccaccccgcccagctaatttttttggtatttttagtagagacggggtttcaccatgttagccaggctggtctcaaactcctggactcaaggaatccact

SEQ ID NO: 323914 - DNA, 201 bp, Homo sapiens; identical to SEQ ID NO: 68009

SEQ ID NO: 323915 - DNA, 201 bp, Homo sapiens; identical to SEQ ID NO: 68010

SEQ ID NO: 323916 - DNA, 201 bp, Homo sapiens; identical to SEQ ID NO: 68011

SEQ ID NO: 323917 - DNA, 201 bp, Homo sapiens
ttcagtctgctgagatcttgcttttctttttgtgttcacagatgaagcccggggcaagaactgtggtgtcttggtacattgcttggctggcattagccgckcagtcactgtgactgtggcttaccttatgcagaagctcaatctgtcgatgaacgatgcctatgacattgtcaaaatgaaaaaatccaacatatcccctaa

SEQ ID NO: 323918 - DNA, 201 bp, Homo sapiens; identical to SEQ ID NO: 68014

SEQ ID NO: 323919 - DNA, 201 bp, Homo sapiens
gacaggaattccagcattgctttataatttaaaaacatctaggagttattttaggacatcaagttagttgttggaaagcagtatgaatgctgaatgttatscagttgaatgatgcggtgatactggtaacagtgagacagtgggtaacctgagcccagcaggaagaactgtgggctggaagcctgggagaagtgaatctcc

SEQ ID NO: 323920 - DNA, 201 bp, Homo sapiens
cgtcgctctgacatttaaatgcaaaattcctagccattcatagagtttaagctgttaatcgttcttgctgcttgctaatttgtctgactgcaggtctctamtgttcctagagcgtccttaattctggtttatcttcttgctaaaggaagaaaacctgccttttgacatggctgcagatcacaggtgtatttgaaacgctgt

SEQ ID NO: 323921 - DNA, 201 bp, Homo sapiens; identical to SEQ ID NO: 68017

SEQ ID NO: 323922 - DNA, 201 bp, Homo sapiens
ctgaaacgtctcggggtgggaacttctgtgacagatcgtggaggacagggggagtcaactccagcgcaggcctcccccggctgaaactagaagatacccartgaaatatacgagttttgttccaaggactgcccaaaaatggtgcggagaggagctcggcaatccccacctttgtcgaacacgctcctccaggggcggcct

SEQ ID NO: 323923 - DNA, 201 bp, Homo sapiens; identical to SEQ ID NO: 68020

SEQ ID NO: 323924 - DNA, 201 bp, Homo sapiens; identical to SEQ ID NO: 68023

SEQ ID NO: 323925 - DNA, 201 bp, Homo sapiens; identical to SEQ ID NO: 68025

SEQ ID NO: 323926 - DNA, 201 bp, Homo sapiens; identical to SEQ ID NO: 68026

SEQ ID NO: 323927 - DNA, 201 bp, Homo sapiens; identical to SEQ ID NO: 68028

SEQ ID NO: 323928 - DNA, 201 bp, Homo sapiens
gattcaagcgaataagggttccctggcgaggcgggcccgttcgttccattcccgatggtgcacatttaaagtgtgtttctcttatagatggttctgtatgwagggggttcgtaggatgcttgtggtgtttcttgcgccgggctgcggttcttacaagctgtgaaaactactacggcttctcaggttagatgattgcttttc

SEQ ID NO: 323929 - DNA, 201 bp, Homo sapiens
agcataatttaatagacccttgcagtctggttgtctgtgtaaaaggcattcacgaacatattgcagggtttctggtattcacatgccgaggcaaagaatgyacccattaaggagttttttgttggcagaaacttaatacaaaagctctcttttcagaaaatatctgaaatatgtaattgtgtccagtgtacatgtttcatt

SEQ ID NO: 323930 - DNA, 201 bp, Homo sapiens
ccattgttagctgcacaacatttggagcataatttaatagacccttgcagtctggttgtctgtgtaaaaggcattcacgaacatattgcagggtttctggyattcacatgccgaggcaaagaatgcacccattaaggagttttttgttggcagaaacttaatacaaaagctctcttttcagaaaatatctgaaatatgtaa

SEQ ID NO: 323931 - DNA, 201 bp, Homo sapiens; identical to SEQ ID NO: 68008

SEQ ID NO: 323932 - DNA, 201 bp, Homo sapiens
ggcagccggcgaggtaggggccgcgaaccgcgcgttccgcaccagagaaccgggccggctcagaatccactcgcttccggctgcgggtaccggcggtttcyttctaacgggttctgcgccttcttagccagaacatcctccaccatcaccctgttttctatcgttcgattttgaattaagatttgcaggacgggagagatt

SEQ ID NO: 323933 - DNA, 201 bp, Homo sapiens
aaatggtgcggagaggagctcggcaatccccacctttgtcgaacacgctcctccaggggcggcctgcctgaagcagagctccaaaattggcaacctaggcstcgcagccgcctttttttagcctacatttcccaaaccagggaagaggcgggtgactaaaaatgcaaattgcagcgggggtgttagcaggcatgcccgtgg

SEQ ID NO: 323934 - DNA, 201 bp, Homo sapiens
ttccgccggggtttagggagggaaggccggattagggcccgcgccttccggctgcatccctctcgcgccgcgccggccgcacacaggtggttttccgctcrggaggggcaggcttcggcacttttatataacaatagagctctgcgcgccgggaacgcgcctccccgccgccgcggcccccacccggccacgcctccatcc

SEQ ID NO: 323935 - DNA, 201 bp, Homo sapiens; identical to SEQ ID NO: 68013

SEQ ID NO: 323936 - DNA, 201 bp, Homo sapiens
ggagcataattgagcctggcccattcagcaagtgtctgactgcaatttggggagagggagctcgctgcatctaagcagctcaagctgtgaaaaaaaaaaaagtttccaataaattgggagcaaatggtctttgtcaccagtctgaataaaggagagagagagtatgaagagcttagagcctccataaagttgcaatgtttg

SEQ ID NO: 323937 - DNA, 201 bp, Homo sapiens
ccactatgttgttatttcatgatatgtccagatataacttttataatgaacccaccaacagccttaagcagtgttgtttagactggagtttggggctcccwagggttctattaatatattcttgggggatctgcaagttcttaaagtttgaaaaactgagctaaagcattcctgtattgtggacacacacagttacttcca

SEQ ID NO: 323938 - DNA, 201 bp, Homo sapiens; identical to SEQ ID NO: 68015

SEQ ID NO: 323939 - DNA, 201 bp, Homo sapiens; identical to SEQ ID NO: 68016

SEQ ID NO: 323940 - DNA, 201 bp, Homo sapiens; identical to SEQ ID NO: 68018

SEQ ID NO: 323941 - DNA, 201 bp, Homo sapiens
tatgccgacgtggaagactgcaacttagaacggctaaatgatttaactaagggcgcttacctaggaagaagcgggggacataatgcaaacgagggccgtcycactccagaagcccttttcgcagcatttctagtactgagcagtcagaacgccactttaatcaatgcgccaggaaacactggcattcccttggcgataaag

SEQ ID NO: 323942 - DNA, 201 bp, Homo sapiens; identical to SEQ ID NO: 68021

SEQ ID NO: 323943 - DNA, 201 bp, Homo sapiens; identical to SEQ ID NO: 68019

SEQ ID NO: 323944 - DNA, 201 bp, Homo sapiens; identical to SEQ ID NO: 68024

SEQ ID NO: 323945 - DNA, 201 bp, Homo sapiens; identical to SEQ ID NO: 68022

SEQ ID NO: 323946 - DNA, 201 bp, Homo sapiens; identical to SEQ ID NO: 68027

SEQ ID NO: 323947 - DNA, 201 bp, Homo sapiens
attgctttataatttaaaaacatctaggagttattttaggacatcaagttagttgttggaaagcagtatgaatgctgaatgttatccagttgaatgatgckgtgatactggtaacagtgagacagtgggtaacctgagcccagcaggaagaactgtgggctggaagcctgggagaagtgaatctccaggcattgtaatgca

SEQ ID NO: 323948 - DNA, 201 bp, Homo sapiens
tgcggttcttacaagctgtgaaaactactacggcttctcaggttagatgattgcttttctcgttctggcaggtggcttcagtaagttccaagccgagttckccctgcattgcgagaccaatctagacggctcgtgtagcagcagctcgccgccgttgccagtgctggggctcgggggcctgcggatcagctctgactcttc

SEQ ID NO: 323949 - DNA, 201 bp, Homo sapiens
ggttctgtatgtagggggttcgtaggatgcttgtggtgtttcttgcgccgggctgcggttcttacaagctgtgaaaactactacggcttctcaggttagaygattgcttttctcgttctggcaggtggcttcagtaagttccaagccgagttctccctgcattgcgagaccaatctagacggctcgtgtagcagcagctcg

SEQ ID NO: 323950 - DNA, 201 bp, Homo sapiens
cgaggaccgggaccgcttcacccggcgctgtggcaccgacacagtggtgctctacgacgagagcagcagcgactggaacgagaatacgggcggcgagtcgktgctcgggctgctgctcaagaagctcaaggacgagggctgccgggcgttctacctggaaggtacgcgcccagggaactccgcgcgcggggcagggctagg

SEQ ID NO: 323951 - DNA, 201 bp, Homo sapiens; identical to SEQ ID NO: 68072

SEQ ID NO: 323952 - DNA, 201 bp, Homo sapiens; identical to SEQ ID NO: 68073

SEQ ID NO: 323953 - DNA, 201 bp, Homo sapiens
cacgttgacctttaaagacccagatggtacgtatgcttcatggtggaacgaattttggctaatttagacctagctgcaacactgttcctaggtacatgcayagatgacttctgtcacagagtcaaaggactttcatgccagcagggaccttggaggtcatggcctccgttccttcatattacagaggtgtgaggggaggta

SEQ ID NO: 323954 - DNA, 201 bp, Homo sapiens
gggaagaagagaaggctccagatggaaaggaggggatagaccagcaggagcggctctgcttggcccggtcctgcctcctttaatggtccctgggcctcttytgctctgtgtcacctgcagccaactgggaaggagcttccagacagccagctcgttcagcccctggtctacatggagcgcctggaactcatcagaaacgtc

SEQ ID NO: 323955 - DNA, 201 bp, Homo sapiens
ggtcagtttttactgggggtctgcaccaggccaggtgggtgctggttttttgtctacattgtctcatttaatcctcatggccactctgaggtagtggtagsaggagggccttctattagagatgggacattgaggcttagagaggttaagtgacttatggagtcacagagctaatgggtgtgagcagggatttgaaccaag

SEQ ID NO: 323956 - DNA, 201 bp, Homo sapiens
cctggagcctgcccttccagcactgtgctttagagagtgtgtcccggagcctggatcttgggcagcacaggaacccctctaagctcgtggccataaagggyttctcacatgttggagtttatttcacacacgttcacggtgtttttgattatgaaccagaagcccattgtgaagtgtcaagaccaggaaataacagacacg

SEQ ID NO: 323957 - DNA, 201 bp, Homo sapiens
ttggtcttgtgttgagaaccactacagagaaatgcccagagctgagatgagatttgattttcacagtggctgactgggtgcacacgaaggtgtgcactcayggcctgcagggcacccaggtggcctctgccctgggttcctgaaaagaagagcctctgacacagcactggggggggtcctccctttcaccccccagctttc

SEQ ID NO: 323958 - DNA, 201 bp, Homo sapiens
gtgtcctgctgttgccctgagcactcatggggcttttgtgagactcagtgagtgaagacacggcaaagcacagagagcagtttctggcctgtcttaatcayaccgtgttctgtgatgtcactgttgtcatcgtctttgtcatcgtcactgctgccggccctcctccccagggccatgctctgctgccgcccgcttgcagct

SEQ ID NO: 323959 - DNA, 201 bp, Homo sapiens
tctctgtcttccagtgtacagtgccaaacaggagtttctgttcctgacaaccatgccggaagtgaggaagttgccagaagagaagcacattcctgaggaaytgaaggtgggcacagccaggccgtggtccttgtcctcttgaacacggcacccttgtcgcggggagctggccttcccctgtggctggttccgcttgtcatc

SEQ ID NO: 323960 - DNA, 201 bp, Homo sapiens; identical to SEQ ID NO: 68080

SEQ ID NO: 323961 - DNA, 201 bp, Homo sapiens
cacaaggaagtggtcttctctcattatcatgtctctccattagggtgttctaaatttgattttattattgaatcaatcatttatattattaattcaatatraaatgttaaatgccaagtcaaactacctattgtagcagtggaaaaaaacggaaatatttgtgctgatacttactgactgaaatcacctgtcgttttcatt

SEQ ID NO: 323962 - DNA, 201 bp, Homo sapiens
gttttgtgaagcggagaaaaggagtggtaaggagtgttaggagataaaacctatgaagaaagatgaagggctttcggattttacacctggagaggagcacygcagcggtccttaatactgcctgtgagatctttccagccggctgccttcaggcgagtgaaagggggcactttccctgccctgtgagatctggtgtggtgt

SEQ ID NO: 323963 - DNA, 201 bp, Homo sapiens
gtgttttactgttatctggcagaatggcctctaaagaatgccttgtttcccagcggcatctggtaaatgaggtctcattctcctttgatgtatcaagtttygtgctgaatgttttcagtgtagacactgatcctggaagctaagcaggggtaggcccggttagaaaaaaagcaagtgtaggcgcagaacagggttttgtga

SEQ ID NO: 323964 - DNA, 201 bp, Homo sapiens
ctctggaggaaggaagctgctctttgtggctgaggcctgggtggtgcctaggagcaaggagcagggtctcctcccagcagcacagtggccttatgccttgyagcagggcgcctctcaggctcgcagttgggaattctctttgcctcatgtcatcatgagaggtgcagcctcaactgcttggcatgcccgtgtggtggccac

SEQ ID NO: 323965 - DNA, 201 bp, Homo sapiens
cctggtctgtctagttctcatctcacctgtcatcctcctggggttaccagttccttgtacattaccaggtttttgtgtgtgtgtgtgtgtgtgaagtttcctttagagtctggctgtgttttaaaagttgagccctggacatgtgatccctggtatgtgtatgaggtgaggttgtcagtaaagggccattgacaggcctcc

SEQ ID NO: 323966 - DNA, 201 bp, Homo sapiens
gctcatgtaggatgtgacttgtagaacaagtcccagttttctaaatttttaactaggccgggtgtggtggctcacgcctataatcccagcactttgagagkccaaggcaggtggatcacttgaggtcaggagttcaagaccagcctggccaacatggtgaaaccccatctctactaaaaatataaaaattttccaggtgtg

SEQ ID NO: 323967 - DNA, 201 bp, Homo sapiens; identical to SEQ ID NO: 68084

SEQ ID NO: 323968 - DNA, 201 bp, Homo sapiens; identical to SEQ ID NO: 68085

SEQ ID NO: 323969 - DNA, 201 bp, Homo sapiens
ccagaccactctgcccaaggcacatcccattgtattttctccccacagcaccatgtccctctcacaccatcaagtaccactcctcagatagcttctttccwtcgtgtgggcctgttagacgacaagctctgtaaggacaagaactgtgtgtgtttagttagggactcagggtcatatccttggcagctgttttactgcatg

SEQ ID NO: 323970 - DNA, 201 bp, Homo sapiens; identical to SEQ ID NO: 68087

SEQ ID NO: 323971 - DNA, 201 bp, Homo sapiens
caaagaaatacctgagcagaaaattctcttcttcgctgaaatgaaaattggagtgtttgcaaaactgaacaaagaaaggaaagaatttgtaaacatcacargcaacttgcagttatattcggatcatttttcagtgtttgaggagttcatacaataaaaaggtgagagagagccaggaatagaaacaggggagagaggtgg

SEQ ID NO: 323972 - DNA, 201 bp, Homo sapiens
tttagagcttctctaggtgtggctacatcttgtcagccagttagaattttaaacacagccagctcctaattgccccagcatggcttctgcccactatgaaygaccctcagctaaggcctagtccttggcaggcctcttcctgccacctgcttccagaccatcgtgggagctcactgggaccttagcctgggcccaacagga

SEQ ID NO: 323973 - DNA, 201 bp, Homo sapiens
agaagcggtgagaacagcttcctcaaaggggaggggggagtttttgtaaacctgagaagaaatttggggaaaaccccaggctgagttctgtacttggcagrttgatcggaggaccacagagggctgtcggtttgcatcagtgagaggcagctaagctacaccccccattcggcgcctcaaaactctcagttccttctgaga

SEQ ID NO: 323974 - DNA, 201 bp, Homo sapiens
ccgaaaacgtggtgcacgaccacgagaagaacggccttcctcggctctcttccttcagtgatgcagaaattcagaagcggtgagaacagcttcctcaaagkggaggggggagtttttgtaaacctgagaagaaatttggggaaaaccccaggctgagttctgtacttggcaggttgatcggaggaccacagagggctgtcg

SEQ ID NO: 323975 - DNA, 201 bp, Homo sapiens; identical to SEQ ID NO: 68090

SEQ ID NO: 323976 - DNA, 201 bp, Homo sapiens
atacaactcaggaacagtcagatggcagagatgcatggggcaaggtaagtggaaagggtgcagagcttccctgctctcactgggcacaccactctcccagsacctgaatgtgttcaccaacctggaaactctctgaactctgtggtctagaggtttccatggaggctttatcatgcagacatgatccattattaacttaat

SEQ ID NO: 323977 - DNA, 201 bp, Homo sapiens
gaggcccaaggtaaagatgaggtaaggacatgcccttctctaaggggcgtactggagcagccaacctgccttcctttccgtttacttcccaggagcatttycttccattgaggagatccccgaaaacgtggtgcacgaccacgagaagaacggccttcctcggctctcttccttcagtgatgcagaaattcagaagcggtg

SEQ ID NO: 323978 - DNA, 201 bp, Homo sapiens; identical to SEQ ID NO: 68075

SEQ ID NO: 323979 - DNA, 201 bp, Homo sapiens; identical to SEQ ID NO: 68077

SEQ ID NO: 323980 - DNA, 201 bp, Homo sapiens; identical to SEQ ID NO: 68076

SEQ ID NO: 323981 - DNA, 201 bp, Homo sapiens; identical to SEQ ID NO: 68078

SEQ ID NO: 323982 - DNA, 201 bp, Homo sapiens
ggccacagtctaagcctcagtttcttgaagggaagttagcagttgctggaataagagtgtgtcttgtttttttctctcttcttggtgtagaccctactgtygcattaatttctggcaaccacactgagaaaggtgtagattaagctggaaaatcacgaagagtgccaagggattggtcagtttttactgggggtctgcacc

SEQ ID NO: 323983 - DNA, 201 bp, Homo sapiens
gtgaggagtgtcctgctgttgccctgagcactcatggggcttttgtgagactcagtgagtgaagacacggcaaagcacagagagcagtttctggcctgtcktaatcataccgtgttctgtgatgtcactgttgtcatcgtctttgtcatcgtcactgctgccggccctcctccccagggccatgctctgctgccgcccgct

SEQ ID NO: 323984 - DNA, 201 bp, Homo sapiens
agctacaccccccattcggcgcctcaaaactctcagttccttctgagaatttccagccttaccttcacacagtccattaacatgaaggtgacatcattttrttaatagaaattagcaggcaactttgttctgctttggtaaagttttatagattgcttgctgaatatgatcttttctttataagaaagggatttggattgc

SEQ ID NO: 323985 - DNA, 201 bp, Homo sapiens; identical to SEQ ID NO: 68081

SEQ ID NO: 323986 - DNA, 201 bp, Homo sapiens
cactagtgcacctggatggggacaggtgcatgaatgggcccatatgtggacccacagagctggttctgtcattgtccccttgagagcagtgctccccacgyctagtttacagccatccatagcatgtaccgcagagttctggactgggctttaaacactcgggggaggaatcaataaaacagacaagactgtgtccactgg

SEQ ID NO: 323987 - DNA, 201 bp, Homo sapiens; identical to SEQ ID NO: 68083

SEQ ID NO: 323988 - DNA, 201 bp, Homo sapiens
gtgttttccaggaagagtcagtgaatggctgcggtgtgacaacatgcaccaccagtggcttctgctggccgcatgcttttgggtgattttcatgttcatgktggctagcaagttcatcacgttgacctttaaagacccagatggtacgtatgcttcatggtggaacgaattttggctaatttagacctagctgcaacactg

SEQ ID NO: 323989 - DNA, 201 bp, Homo sapiens
tacactgcagttttgattactcactactctttttagagatgtctatttatttaaattccaattagtctgaaccgatcctaataattatgggctctgcttaygaaatttagcttcagacaggagttagttccagtcaacagcagtgggactcctgggtcagaaatcggattttggggcaccatgggtaggtggccctaaggc

SEQ ID NO: 323990 - DNA, 201 bp, Homo sapiens
ccccagggggattcatgtaggcattaaaatttaagaaggggtgaggtcctggaccagcaattctcagtcccagctgctcattagagtcacgaacagagctyttaaaaaatgcctgggtactgcctccagagatttgtgttgtcttggctggggtattcttggggcccggggtatcactgtatttcttggaagtttcccagg

SEQ ID NO: 323991 - DNA, 201 bp, Homo sapiens
caaggaggagtcacaagagggctggtttgacctgaagggactggtggccttccagacaggcctgtttttgttgtttcctgttagtgttgtgccttacaagktagtggggctcgtttagacaccgattcttttcaaaggggcacagccacagtccagctctcctcacctgtcacagcagatcctcactttaggtggctcgcc

SEQ ID NO: 323992 - DNA, 201 bp, Homo sapiens
cctggtttgtgtttgtaggcgctggtttttcctctcctggttgacttcctcattggttctgagccgcttgagggcagagcctgtgatgtgaaggtctctgyagccttgaccatctttgcatgtacttatttgccatctgcggatactctccagtgaaatgtctgggtgtatcgtacctattttctaattagattggttggt

SEQ ID NO: 323993 - DNA, 201 bp, Homo sapiens; identical to SEQ ID NO: 68086

SEQ ID NO: 323994 - DNA, 201 bp, Homo sapiens
gtgctgaggaggctggggaggacagcaaggaggagtcacaagagggctggtttgacctgaagggactggtggccttccagacaggcctgtttttgttgttycctgttagtgttgtgccttacaagttagtggggctcgtttagacaccgattcttttcaaaggggcacagccacagtccagctctcctcacctgtcacagc

SEQ ID NO: 323995 - DNA, 201 bp, Homo sapiens
ctgggcccctctccccgccgcggggcgcacggaaaaaccggagaacccgcgggttttgtcctggcgagccacatcccggtgtgttttggcgacttgaagayctccctagttcgcgggagtagcgggaagagccttcctcgcgttaattatgcaataagaaggcgtccttgtgcgggatgctgtgacccgcggaattattga

SEQ ID NO: 323996 - DNA, 201 bp, Homo sapiens
tccactgggaagggtcttggtggccggtgctgaggaggctggggaggacagcaaggaggagtcacaagagggctggtttgacctgaagggactggtggccktccagacaggcctgtttttgttgtttcctgttagtgttgtgccttacaagttagtggggctcgtttagacaccgattcttttcaaaggggcacagccaca

SEQ ID NO: 323997 - DNA, 201 bp, Homo sapiens
gacgagcgccgctccagtagggtgagctcggggacgcgcaggcgggtgggtttcagcgcctgggcccctctccccgccgcggggcgcacggaaaaaccggrgaacccgcgggttttgtcctggcgagccacatcccggtgtgttttggcgacttgaagatctccctagttcgcgggagtagcgggaagagccttcctcgcg

SEQ ID NO: 323998 - DNA, 201 bp, Homo sapiens
caggccgctgctggcaagtgggcggaggcgagaagcgtcagtgttcattcctttgcttttttagagcttctctaggtgtggctacatcttgtcagccagtyagaattttaaacacagccagctcctaattgccccagcatggcttctgcccactatgaatgaccctcagctaaggcctagtccttggcaggcctcttcctg

SEQ ID NO: 323999 - DNA, 201 bp, Homo sapiens
cgaatatttgtctgtgacaagcacaagattcttttctgccagactcccaaagtgggcaacacccagtggaagaaagtgctgattgttctaaatggtgtgtrtgggtctactgaatgtccactgggaagggtcttggtggccggtgctgaggaggctggggaggacagcaaggaggagtcacaagagggctggtttgacctg

SEQ ID NO: 324000 - DNA, 201 bp, Homo sapiens
ccaggtgctaaaggtgtaaggagtacgaaaatccagagaacattttgcattggaagaattgatcatcttgtataggaatcctataactatttcaaacataygaaacaggcataattggatttgattatttttgctacaaaaaatgtttcatttttcacactaagttacatggaagagtcttttaaacagctagtggttttg

SEQ ID NO: 324001 - DNA, 201 bp, Homo sapiens
ataccagcactttgggaggccgaggtgggcggatcatttgaagtcaggagttcaagacaagtgtgactgacagaaaccccgtttctactaaaaaaaaaaaatagcccgctgtggtggcacacacgtgtagtcctagctactcaggaggctgaagcaggagaatcgcttgaaccctggaggcaagggttgcagtgagccaag

SEQ ID NO: 324002 - DNA, 201 bp, Homo sapiens; identical to SEQ ID NO: 68089

SEQ ID NO: 324003 - DNA, 201 bp, Homo sapiens
ctgccccaggctgggaggaactctgtaaggactcactagaagcttctgaagtgatcaggccactggaggacaagttgagggctgggtcacaaaagtgagtycaggagggcagtgagagtcactcaaggtcacaggtcacgctggcacgcctggcaggcagcctgggagagataggagtcccggctctgcaggtggagacat

SEQ ID NO: 324004 - DNA, 201 bp, Homo sapiens
tggtggtggggaggggcttcaggtaggaaggttctaagcttagcctgcatggccccctgtgggggagagccacctccagagggcatgggaagcagattgcygttcattctccatcacctgcccacattcctgcctctgggacattgaggggctggagtgggctggggtgtgtgggagacagaagcagagaaaggctcctca

SEQ ID NO: 324005 - DNA, 201 bp, Homo sapiens
tggggtaaggattgagtgtcccagtgcatgtggagcacagagatcagagcttgcacaagagaagcacacacaggtgtctgtgttcttggctgcagcccgcrtgggccaaggagttcagatccagtgccccccacctcccctttcctgccgccatgctctgtaggcttggcccctcctgctgtgatcctgatcacagccttc

SEQ ID NO: 324006 - DNA, 201 bp, Homo sapiens
ggtcttcgtggaggtggcatggggccattgctgccttgaggcaaaaagccaggcccgggacagaagggttggtgcactttggcccaagcatgaggtgaccrggcaaagccaagcggtgccagccccaagctggggatcagatggaaaagccatcccggggaacaacagagcccaggggtttgctgggcctgcgtggggcac

SEQ ID NO: 324007 - DNA, 201 bp, Homo sapiens
tgttattggcttgttttgaggaaatattttagatatgtggcacaaagtgaatcagcccccagtggtggagcagagtgggcccagcaggggtgccaatgcaygggaggtgaggaaaggcctcacgttctgccttcttgagaggagcaggtggcactctgcagggagcaggggagtccagaccagggagttctgcagccactg

SEQ ID NO: 324008 - DNA, 201 bp, Homo sapiens
cgcgcgtggtggcaggtgcctgtaatcctagctactcaggaggctgaggcaggagaattgcttgaacctgggaggcgaaggttgcagtgagctgagatcccaccattgcactccagcctgggcaacaagagcgaaactccctctcaaaaaaaaaaaaaaaaaaaaaaaggataccacctgacctgaagccaaccgagtctt

SEQ ID NO: 324009 - DNA, 201 bp, Homo sapiens
cctcccccaggcctcccgcagtgcatgtccgtctgctctggggagggaattggctgatatcccaatctgtctaggggacaccatcacctggggcatcagakttctcatgcccagctggtgctgtgcctggggactagaagggctggtgctgcgtggggtcaagaggtttacctgataaaccggtaagggatgccctcttcc

SEQ ID NO: 324010 - DNA, 201 bp, Homo sapiens
ggagctctttcctcctctcagttccccatgtcctttgggtgtggcctgtgacactcaactcctgccctcggctgactggccctgattcaccatgcttgccrcatgcacctgggctggcaggagttccaggagagtttgtgcattgaagtgacatgagtccctgaagccagagcccccatggtttcctttgggcctgttact

SEQ ID NO: 324011 - DNA, 201 bp, Homo sapiens; identical to SEQ ID NO: 68162

SEQ ID NO: 324012 - DNA, 201 bp, Homo sapiens
agtcttccctttgtcgtttgaatgtcagtgtccctcctgctctcaaagtgatttttccttttttgctttatgttctttttttttcttttttggtagagatrgggggtggggggggggtggcgatctcactgcccaggctggtcttgaactcctggcctcaagcactcctcctgcctcaccctccccaagcgctgagatata

SEQ ID NO: 324013 - DNA, 201 bp, Homo sapiens
gactgagggtgcacaggcaggcagacgggctggagctgcctggcacctacagggggttcacccatgggagcaggccacagtgtggcaagtgggggtggggrtggaggtgaaaggggtgtgagccaacccctcagtcaggagggggccaaacctggagctaagtctagcacagacagctgaggccagagtctgcctggggaa

SEQ ID NO: 324014 - DNA, 201 bp, Homo sapiens
atccccaccaggaccctgtgaaccgcgcctactttgctgtgtttgatggtcacggaggcgtggatgctgcgaggtacgccgctgtccacgtgcacaccaaygctgcccgccagccagagctgcccacagaccctgagggagccctcagagaagccttccggcgcaccgaccagatgtttctcaggaaagccaagcgagagg

SEQ ID NO: 324015 - DNA, 201 bp, Homo sapiens
ggcgaaggccatactgattctcccagactctaccccatcagtgcctggcgccacgccccactgggagcaccctgggtcccgcgggtctgtgactcccaccrcatccccaccaggaccctgtgaaccgcgcctactttgctgtgtttgatggtcacggaggcgtggatgctgcgaggtacgccgctgtccacgtgcacacca

SEQ ID NO: 324016 - DNA, 201 bp, Homo sapiens
cagcgaggcctcagctggcttggttggcacttccctgacaatccctccattgtgcccatcagtgctggatgcccaaagcctggcacagagtttctttaacygcctttgggaagtcgccggccagtggcagaagcaggtgccattggctgcccgggcctcacagcggcagtggctggtctccatccacgccatccggaacac

SEQ ID NO: 324017 - DNA, 201 bp, Homo sapiens
aacaggctgccatgtgcgcgttattgagttgatgtgctcacaatgccccgggaggtgatgggggctttgcaggcccctgtgggagctgtcagggagccagygaggcctcagctggcttggttggcacttccctgacaatccctccattgtgcccatcagtgctggatgcccaaagcctggcacagagtttctttaaccgcc

SEQ ID NO: 324018 - DNA, 201 bp, Homo sapiens
tggagggcgagctggctgagctggccatgggctttctgggcagcaggtaggcctgtgcacccccaaaggggacggggagtaagggcacggcaccagggccracaagggatgtggctgctgctcccctacacgtccagccccacacggggatctgcagccccggatccctatgcagcaccatgtggaactcccgtggctgct

SEQ ID NO: 324019 - DNA, 201 bp, Homo sapiens
cacagccagatagtggctcagtgctctctgtctgcccctcactttcacagagctgatcccggagagcaccctctctcaggacctctgggtgggggggggggaggcccaagggactgagggtgcacaggcaggcagacgggctggagctgcctggcacctacagggggttcacccatgggagcaggccacagtgtggcaagt

SEQ ID NO: 324020 - DNA, 201 bp, Homo sapiens
caagaaggtccatttccccacagtctcaccaggctgcaggattcttcctgtcaggtaagaagcctgtcttggggcaattgttaagtttgcttttctgttayagagtgagtttgagcgtgttttcaaaagctgaagatcatttacacagcctttcctgcaaacactgtttttttcctttgcctgtttttcttatcagtttat

SEQ ID NO: 324021 - DNA, 201 bp, Homo sapiens; identical to SEQ ID NO: 68155

SEQ ID NO: 324022 - DNA, 201 bp, Homo sapiens
accggatctctggatgcccacaagtccccacctggactcatgtcaaaacagtggccagggttgtccctccaccctctagtggccctgaaccatgaggccawgcacctgccacatggtgcttgcaggtgggcacctgcattgctggtgccatggccccctgattctgctgactctgacatttctccccagggtgaagcctgg

SEQ ID NO: 324023 - DNA, 201 bp, Homo sapiens; identical to SEQ ID NO: 68157

SEQ ID NO: 324024 - DNA, 201 bp, Homo sapiens; identical to SEQ ID NO: 68160

SEQ ID NO: 324025 - DNA, 201 bp, Homo sapiens; identical to SEQ ID NO: 68159

SEQ ID NO: 324026 - DNA, 201 bp, Homo sapiens
gagttcgagaccagcctgaccaacatggtgaaaccccatctctactaaaaatacaaaaaacattagccgggcgtggtggtgcctgcctgtaatcgcagctrcttgggatgctgaggcagcaggatcacctgaaccctggaggtggaggttgcggtgagccaagattgcaccattgcactgcagcctgggcgacaagagcga

SEQ ID NO: 324027 - DNA, 201 bp, Homo sapiens
ggaggcgctgcttcctctgcagctcctcgccgtctgcaggcgccttcacgcgtgtgtgtgggcacatgtatgtgtgaacattcgtgcgtactctgtgttcrtccacctgcctctccccgtgccctttctcctgccctcttcttggctgtctcctgctcttccctccttcctggtcctccttgcctttcccttgccctgctc

SEQ ID NO: 324028 - DNA, 201 bp, Homo sapiens
tcttcggcttgtctgtgagtgctcccgtccagaccctggggacagcttcggaggaccggggcgagggtgggggccccccaggtaccgagaagagctgcccrccaaggctgagacaggagagacacccgtcagcccctgtacttgcccagcaagagactaagaagggcaacagtgtgagtctgttatgagggaggcctggat

SEQ ID NO: 324029 - DNA, 201 bp, Homo sapiens; identical to SEQ ID NO: 68163

SEQ ID NO: 324030 - DNA, 201 bp, Homo sapiens
ctcagttcagcctccaaacactgagtgcccactctgcacaagatactttgttgaggcagtgagataacacaggacccacttcctgcctctaagtctaatgrgggagcaggaggagggcaaggacctgggcaggatgaggcagagagatgaatggaatggagccgcatctcaggcagttgcaattcctgcaggccaggggag

SEQ ID NO: 324031 - DNA, 201 bp, Homo sapiens
cagcctgggcgacaagagcgaaactccatctcaaaaaaaaaaaaaaaaagtgggtccagcctgcatctcattgtctcagcatgcggtcagtgccgggtctyaggctgtgggcactgtgaccacacctccttcctggtacttagaaaatctctccctccccagctgattgccagggatttggcacctacccctctgaaacat

SEQ ID NO: 324032 - DNA, 201 bp, Homo sapiens
ccaaagaggccgacccaagtgggagaaggtctctcggaagcccaggcctcgagtgtggcccgcggctcaccaggggttcagggaggcagtgtgatgggccragggggatttgtcatgcactggggtgataccctcgtagtgtgaagggaacagggcagattcagagactgcagcaccagtgtctgagtgtaagttacactg

SEQ ID NO: 324033 - DNA, 201 bp, Homo sapiens
gatgctgttgtgcaggcttcagtcagcaggctctcatcggggcagcctctcctttgggcagaggctgataggaccaaagaggtttctagaggacttgtggstggaccaagcctctgtcctgtccctggaggaacccaggcctggggtgttgtggtccccagctgagtggagactgtgcctgtgctgagcttgggtagagga

SEQ ID NO: 324034 - DNA, 201 bp, Homo sapiens
tggctggcaggacgtgccgcctcctcattgacctactagggctcccagcctctgctcatttctccagctcacagtcttccctttgtcgtttgaatgtcagygtccctcctgctctcaaagtgatttttccttttttgctttatgttctttttttttcttttttggtagagatggggggtggggggggggtggcgatctcac

SEQ ID NO: 324035 - DNA, 201 bp, Homo sapiens
agaccctgtcttcaaaaaacaaaaacaagccccagaatcagtgggtagaagactcggggcaggggagaagaccacccacctgctgctccttcagctggaaragctggactgccccaggctgggaggaactctgtaaggactcactagaagcttctgaagtgatcaggccactggaggacaagttgagggctgggtcacaaa

SEQ ID NO: 324036 - DNA, 201 bp, Homo sapiens
cgtttgaatgtcagtgtccctcctgctctcaaagtgatttttccttttttgctttatgttctttttttttcttttttggtagagatggggggtgggggggrggtggcgatctcactgcccaggctggtcttgaactcctggcctcaagcactcctcctgcctcaccctccccaagcgctgagatatagacctgagccacag

SEQ ID NO: 324037 - DNA, 201 bp, Homo sapiens
cagctacattccttggcctttcactgcggctcacggtctggtatgggccccctgtacgtcctctccccattgtacagaggagaaaactgaggctcagtcayttgcccagagcacaccgccaaagtcacagatagtctctgccactcccctgcctccaccaccgtgggggaatttggcacctgctccctagtgggctctcct

SEQ ID NO: 324038 - DNA, 201 bp, Homo sapiens
ctcttctgccctgcctacctgctaaaagacgctaaccctcctgtcggtttgctttcagcctgctgcgacctccctttctacccactacgcctcctcaactrctcagctctgttctatgacattgaaagcagtgacccaatctcacttcttaaaacatttccttcgtggcacccagaaggccactcctggagtcatccccac

SEQ ID NO: 324039 - DNA, 201 bp, Homo sapiens
aagggggtagcaacgtcccacccagctgaatagttgtccctggacaggccagcaggcagcagagttgcagtggattttcccttccttgccatttcctgtckgccatttcctttcccttcctttgccatttcctttcctttccctgttgttctaaattcggcattactagtgcatgcgtgcatccggggaaaaggaacaagg

SEQ ID NO: 324040 - DNA, 201 bp, Homo sapiens
tggggagtccgtgggctgggcagcactgcctcagccgctggcctttcctgagcagagtctaggctaagcggctgttggaaatagcagtagcacccggggcragaccgtgagccacagcggcggccggagtctcccccagcccgagctcaggcctggtaagcaccaggagcccacagtttccagagggagtgaggaggagtc

SEQ ID NO: 324041 - DNA, 201 bp, Homo sapiens
tagtaatcctggcacctttcaagagggagggctccctgcctgatttgagtggccgggggtcccacgtgagcccttcctgagagctctgtgggtcacagctmtatggagcccagagctccgggggagagcagagccctctgcactgacaggcatcccagtgcagtcagtgcagcccagtgcagaccagagcccatcatacac

SEQ ID NO: 324042 - DNA, 201 bp, Homo sapiens
tcctgccccgtgtcatcctctgcccttccctacctcctctcaactctcatgggccctctctccctgcagcggctgcagagcggcaccacaggtgtgtgtgygctcattgcaggagcgaccctgcacgtcgcctggctcggggattcccaggtcattttggtacagcagggacaggtggtgaagctgatggagccacacaga

SEQ ID NO: 324043 - DNA, 201 bp, Homo sapiens
ccagagctgcccacagaccctgagggagccctcagagaagccttccggcgcaccgaccagatgtttctcaggaaagccaagcgagaggtgaggactggccrctgggcctcaggtgcagtttggaggccagtgagagtcccagcctctgcagcgggaaaaacgccaaaggggctggtggtgctggaaggtcctcactaaaca

SEQ ID NO: 324044 - DNA, 201 bp, Homo sapiens
agtggtgtaatcggagatcgccgtaacctcgacgtccttggctcaagggatcctcctgccccagcctcccgaatagctgggagtagatataccaccacacrcagctaattttttttggtttggtgttgttcatttgcgactgagtttcgctctgttgtccaggctggagtgtagtggctcaatcttggctcactgcaacct

SEQ ID NO: 324045 - DNA, 201 bp, Homo sapiens
atattatttgttgctacataacaaattgccccaaatgtagtggcttaaaacaacagacatttattctcccagtttctgtgggtctggaatctgggagcagsttagctggttctggtccagggtctcttactgggttgtggtgacatggttgctggctgggctggagggcctgcttccacggtggtttcaacacacggccac

SEQ ID NO: 324046 - DNA, 201 bp, Homo sapiens
gcaacccttggcattccctggcttgtaggttcatcccccaggtctctgcctcatgttcccctggcattctctctgtgtgtgtgtctgtgtccaaattcctcccccaacctgttttttttttttggagacagcatcttgctctgtcgcctaggctggagtgcagtggcacaatcttggctcactgcaacctccacctcccag

SEQ ID NO: 324047 - DNA, 201 bp, Homo sapiens
cttctggtggtttgtgggcaacccttggcattccctggcttgtaggttcatcccccaggtctctgcctcatgttcccctggcattctctctgtgtgtgtgkctgtgtccaaattcctcccccaacctgttttttttttttggagacagcatcttgctctgtcgcctaggctggagtgcagtggcacaatcttggctcactg

SEQ ID NO: 324048 - DNA, 201 bp, Homo sapiens
cctctggggatcccttcctgctcccactctggcctatctccaaaacagccctgggccggcctcccgcatcttggcccttctctttcctcccctgaacaccrctagagccccaacaggtgtccctcctgccatctggtcaccacgtccaggctcacagacctggtggcttcactccctcacctcagagccctcctggctgct

SEQ ID NO: 324049 - DNA, 201 bp, Homo sapiens
ccacgttgaaggacatctaggctgactccagattttggctgttccagataaagctgctatgaacatttgtgttcatgtgttcaagcttttatgtgaacagycttcattgttctgggataagtccacaggagtgccacggtggggtcgtatgggagttgcatatttcgttatgaaaatcatatttaatagcagcttaattct

SEQ ID NO: 324050 - DNA, 201 bp, Homo sapiens
gcttcaacgggggtccagcagcggcccagagcagcttccaggagtacgtggggggagtgcgtggtgctctgccttgttctgcggctgtctgaacagtctcstgcctctgcactcagttcagcctccaaacactgagtgcccactctgcacaagatactttgttgaggcagtgagataacacaggacccacttcctgcctct

SEQ ID NO: 324051 - DNA, 201 bp, Homo sapiens
aggatgactgtcttccctattcttagggacaagtcccaagatgccagaaaggcagtctcccaaggacccaccatgcagaagtgtcaataaaccacaagttytgaactctgtcgcccgagtcctgccttcttcctgacttctgagcatcttgtcccctttgatgtccagatgtgtttggaagctgctttaatattggggacc

SEQ ID NO: 324052 - DNA, 201 bp, Homo sapiens
cactgccctccttctcagccacagatggcttcagtgtttctttccctgatctgccccgtggctctcttctgccctgcctacctgctaaaagacgctaaccytcctgtcggtttgctttcagcctgctgcgacctccctttctacccactacgcctcctcaactgctcagctctgttctatgacattgaaagcagtgaccca

SEQ ID NO: 324053 - DNA, 201 bp, Homo sapiens
gaaggttgcagtgagctgagatcccaccattgcactccagcctgggcaacaagagcgaaactccctctcaaaaaaaaaaaaaaaaaaaaaaaggataccayctgacctgaagccaaccgagtcttttaagacctggcgctgctgcccactgcacccttcagagtggtgtagcttcctcagcccacgccacccgccagtcac

SEQ ID NO: 324054 - DNA, 201 bp, Homo sapiens
ccaggacaggatgactgtcttccctattcttagggacaagtcccaagatgccagaaaggcagtctcccaaggacccaccatgcagaagtgtcaataaaccmcaagttctgaactctgtcgcccgagtcctgccttcttcctgacttctgagcatcttgtcccctttgatgtccagatgtgtttggaagctgctttaatatt

SEQ ID NO: 324055 - DNA, 201 bp, Homo sapiens
ctgaaccctggaggtggaggttgcggtgagccaagattgcaccattgcactgcagcctgggcgacaagagcgaaactccatctcaaaaaaaaaaaaaaaaagtgggtccagcctgcatctcattgtctcagcatgcggtcagtgccgggtctcaggctgtgggcactgtgaccacacctccttcctggtacttagaaaatc

SEQ ID NO: 324056 - DNA, 201 bp, Homo sapiens
cttccaatattccggaaatgaggtttatcctcctcccgcgttcatgctgacaatccttttttctcttttgggaaaaaagtgggttcgctgggcgcggtggytcacgcctgtaatcccagcactttgggaggccgaggtgggtggatcacctgaggtcgggagttcgagaccagcctgatgaaaccccatgtctactaaaaa

SEQ ID NO: 324057 - DNA, 201 bp, Homo sapiens
gcaagggagtgggaggaggccccaggcactggcagttgctgggggcagctctgcatcgttcacattctcccagaagctccaggggccagggcagtcccagscagaagaggggcccttggccgcttgcactgcttgagggcagccaagcttgctgggaaattcacgccatcttcgaatgccttacagctctgctggggcatg

SEQ ID NO: 324058 - DNA, 201 bp, Homo sapiens
cctcatacgcacataagccgggcgaaggccatactgattctcccagactctaccccatcagtgcctggcgccacgccccactgggagcaccctgggtccckcgggtctgtgactcccaccacatccccaccaggaccctgtgaaccgcgcctactttgctgtgtttgatggtcacggaggcgtggatgctgcgaggtacgc

SEQ ID NO: 324059 - DNA, 201 bp, Homo sapiens
gcgagctgtccttttccaaacctaccccctcatacgcacataagccgggcgaaggccatactgattctcccagactctaccccatcagtgcctggcgccaygccccactgggagcaccctgggtcccgcgggtctgtgactcccaccacatccccaccaggaccctgtgaaccgcgcctactttgctgtgtttgatggtca

SEQ ID NO: 324060 - DNA, 201 bp, Homo sapiens
aaaaaaaaggataccacctgacctgaagccaaccgagtcttttaagacctggcgctgctgcccactgcacccttcagagtggtgtagcttcctcagcccaygccacccgccagtcactcttccctctgccatcacacttaccacctgctgtacacaaagggccatcgtgggctccctgactacagggagcttacagtctat

SEQ ID NO: 324061 - DNA, 201 bp, Homo sapiens
gaacagtctcctgcctctgcactcagttcagcctccaaacactgagtgcccactctgcacaagatactttgttgaggcagtgagataacacaggacccacytcctgcctctaagtctaatgggggagcaggaggagggcaaggacctgggcaggatgaggcagagagatgaatggaatggagccgcatctcaggcagttgc

SEQ ID NO: 324062 - DNA, 201 bp, Homo sapiens
agagagccaaagcccagagctggtggccaatgagggacaggtcagggatagaaggagtcagaatgacttcccaggtgtcatcacagttaaggcccaggttycccagcatgaaccccaccctgggactttgggcaagttccttagctcttctgctacagcctgccctgtgaagtggggataaccacaagaggttgttgggag

SEQ ID NO: 324063 - DNA, 201 bp, Homo sapiens
gggaccttaaataggttctaggagggtgagcacccatttggtgtgcagtggggccctgatccaggaggaaccagctgccagtcgcatttggtcagactggyccaggcaggcggtgctgggatgcaggagtccaatgtccctcccatgcccaccccgggctcttggtgatttgcacaggctcatgcacacgtccctcttatt

SEQ ID NO: 324064 - DNA, 201 bp, Homo sapiens; identical to SEQ ID NO: 68150

SEQ ID NO: 324065 - DNA, 201 bp, Homo sapiens
acaaagcaagaccctgtctccaaaaaaaaaaaaaaaaaaaaaaaaaaacaaaacaaaaaacagaatcaagaatcagtgactaggagactcagggggaatgrgacaagaccccttagcctggggatatgttagtcccggaccagactgagcctggccagtgtgtgacggaggtgggagccactggaggggaggaggacccag

SEQ ID NO: 324066 - DNA, 201 bp, Homo sapiens
cctgctcgtctctggccacgctggccaccctctgccaggaacagtcttcctcctctgtcacttcttgacaatgtccacccagctgctgctcctggcaccayctcctgagaccggatctctggatgcccacaagtccccacctggactcatgtcaaaacagtggccagggttgtccctccaccctctagtggccctgaacca

SEQ ID NO: 324067 - DNA, 201 bp, Homo sapiens
ggtccatttccccacagtctcaccaggctgcaggattcttcctgtcaggtaagaagcctgtcttggggcaattgttaagtttgcttttctgttacagagtyagtttgagcgtgttttcaaaagctgaagatcatttacacagcctttcctgcaaacactgtttttttcctttgcctgtttttcttatcagtttataggttc

SEQ ID NO: 324068 - DNA, 201 bp, Homo sapiens
actcttccatccccatcagggtaattaactgtaccacgagccttctagttgctcagaatagaaacttcaacactgtccctgcccctccatttatactgccygactctgtctgctcctgtttgtcaccatggccctgcccagcccaggtcttagactctctcctttagacagtcgtccccttcttgccagcccaccctccac

SEQ ID NO: 324069 - DNA, 201 bp, Homo sapiens
actgtttttttcctttgcctgtttttcttatcagtttataggttccttgtatatgtgaaggaggttggttccttgtctgtgatgatttgcaaatgtttttrcatgcatcttttatttttgtttatgggcttttgccacatggaggctttgtgtttttctgtagttgagtagtctttttgtggcttctggtttggaaagcac

SEQ ID NO: 324070 - DNA, 201 bp, Homo sapiens
ttgccactgaagagcagcgagtggctgaaacctctgtgtggctgccagtcagcccctccccggtgactggatcagcgaagaatccagaagcgaggttgcgrggctgcagcccttggcatggggagtccgtgggctgggcagcactgcctcagccgctggcctttcctgagcagagtctaggctaagcggctgttggaaata

SEQ ID NO: 324071 - DNA, 201 bp, Homo sapiens
ccgccccagtgagaagacaccaggggaaaggtgcacttttgtcacacgctctgagcacagaccttcatggaaattagcagagccaggctttgcatctcaayagaaaaccatgcaatctctgcagctgcaaggaccccagtgaaaagcaggcaagcctccactcctggcctctcacctcagccccaggaagtgacaaaggcc

SEQ ID NO: 324072 - DNA, 201 bp, Homo sapiens
agcccacgaggcaggggtgggtggtgcagacaccctcctgtgtcctgtctgactgaagttccagaacagcccaggaaattaaagatgcttatcccgtttcrcagaggatctcacaggtgatcgatctctggtcatgcagccaggttcaagtgccctcagtgttgtaactcagttaacatgcgcccgggcaggcgaagtcag

SEQ ID NO: 324073 - DNA, 201 bp, Homo sapiens
aaactgttccccaaattctccaccctagaactcggggtgttcctcagagtctcatgtccgtttgtcaccataaaagaatgcagtttttctccctggcttaktaactgtgtaggatttcttttttatttttttctggatccaatctcatccactactgcgtaggactcgctgaataaagtttcccagcctgagtgttagaca

SEQ ID NO: 324074 - DNA, 201 bp, Homo sapiens
cgccaccacttgctgctgctctggcccacgaagcagtttcacagctgctacagacagacctttccgaattcaggaagttgcccagggaggaagaagaagargaggaggacgatgacgaggaggaaaaggcccctgtgacctgtgagttctgtttcttctgaggtggccccagggctgcttagcaggcaacaaagggtgacg

SEQ ID NO: 324075 - DNA, 201 bp, Homo sapiens
agcggcagtggctggtctccatccacgccatccggaacactcgccgcaagatggaggaccggcacgtgtccctcccttccttcaaccagctcttcggcttrtctgtgagtgctcccgtccagaccctggggacagcttcggaggaccggggcgagggtgggggccccccaggtaccgagaagagctgcccgccaaggctga

SEQ ID NO: 324076 - DNA, 201 bp, Homo sapiens
tcctgtgcaagggggagctttgctccaggacaggatgactgtcttccctattcttagggacaagtcccaagatgccagaaaggcagtctcccaaggacccmccatgcagaagtgtcaataaaccacaagttctgaactctgtcgcccgagtcctgccttcttcctgacttctgagcatcttgtcccctttgatgtccagat

SEQ ID NO: 324077 - DNA, 201 bp, Homo sapiens
caggggcagctacattccttggcctttcactgcggctcacggtctggtatgggccccctgtacgtcctctccccattgtacagaggagaaaactgaggctyagtcacttgcccagagcacaccgccaaagtcacagatagtctctgccactcccctgcctccaccaccgtgggggaatttggcacctgctccctagtgggc

SEQ ID NO: 324078 - DNA, 201 bp, Homo sapiens
gcaaacactgtttttttcctttgcctgtttttcttatcagtttataggttccttgtatatgtgaaggaggttggttccttgtctgtgatgatttgcaaatrtttttccatgcatcttttatttttgtttatgggcttttgccacatggaggctttgtgtttttctgtagttgagtagtctttttgtggcttctggtttgga

SEQ ID NO: 324079 - DNA, 201 bp, Homo sapiens; identical to SEQ ID NO: 68186

SEQ ID NO: 324080 - DNA, 201 bp, Homo sapiens
acctggataaccagagaagaagggaaggatgtcattggacggaaactagtgatttttaacatagcttataattgaggggaagcattcctccatctttttctttttttttttttttttgttgttgggacagagtcttgctctgttgcccaggctggagtgcgatggtgcaatcttggctcactgcaacctccacctcctggg

SEQ ID NO: 324081 - DNA, 201 bp, Homo sapiens
ctctgtggaatcttgtagaatatattttgatctcagggctctgaaatttcatggtggtggtgtctactttgcttagcatgggacattccctttcaatctaraaacccttgtactttagctgtgggaaaagttcgtgaattactgtacttcgctgatgttttctttccgtatttttcttctctctttctctctctagcttct

SEQ ID NO: 324082 - DNA, 201 bp, Homo sapiens; identical to SEQ ID NO: 68194

SEQ ID NO: 324083 - DNA, 201 bp, Homo sapiens
ttctaggtgtttgggattctttactaacaaaacagatcactttccccttagagtttgcatcctagattttgaaggtctgagtcttaagaagtgagaagttytgcctgtggaggagtggagaaacagtcttatttgggatcagatgggctgcctctagagaaaattactttacaaaagcaattaaaacaggccctaaggaat

SEQ ID NO: 324084 - DNA, 201 bp, Homo sapiens
ttgctgttcattttgtgtgctttccccttgtaggtttataccttttcggatatatttcctgtaactttagaagggtttttgggtgggaaggacaaaaactrtatgctatatatataattggaaattcccacataaagtaggtttgtaagatattttcctcccaaatatgtaatgggtgtgttttctgtctaatgtagatca

SEQ ID NO: 324085 - DNA, 201 bp, Homo sapiens
tttcctgcatctccacttggcacatgtctagtgcacacgtggaacaccaggcttggggctgttgttgccaaggacaatcgggccatgcttcacagactgaraagtcactcaccacggggcagtgagtggagagctgtaacagggatgggtttggagtacccaagggtcaggggaatgagcgactgaccatcaggaaggtcc

SEQ ID NO: 324086 - DNA, 201 bp, Homo sapiens
acagtaaagcactgggtattgaggctcttgagtgatagagcttttgcacatcccctttcctgcatctccacttggcacatgtctagtgcacacgtggaacrccaggcttggggctgttgttgccaaggacaatcgggccatgcttcacagactgagaagtcactcaccacggggcagtgagtggagagctgtaacagggat

SEQ ID NO: 324087 - DNA, 201 bp, Homo sapiens
ctctttctacttccctgcattccccaaagagatccattataaacagtttagctttttagacttgtttgcgaatatatacatataaagcaattttgcctttytttttttgagatagggtctcactgtattgcctaggctggagtgcagtggtgccgtcacggctcactgaaacctctgcctcccaggttcaagcgattcttg

SEQ ID NO: 324088 - DNA, 201 bp, Homo sapiens
tccaacttcaaagccagtgttctctgcactgctgcctctgggagcacctgctctgttctagcctggcatcagatgtaggggtggcaagacgaaggtgccarggtccctcccttgcggagctctctgcagggtgagttagcccaggcacagtaaagcactgggtattgaggctcttgagtgatagagcttttgcacatcccc

SEQ ID NO: 324089 - DNA, 201 bp, Homo sapiens; identical to SEQ ID NO: 68196

SEQ ID NO: 324090 - DNA, 201 bp, Homo sapiens
ttggggaccgaaggactgtcattgacaaatgctctccacccctagagttcttggatgactctgactctcatttagaaatccaaaaggtgagtaaagcttgyaccaggcatctgactttttagttctgttgatgaaatgtgttccatctttctagtttgatcctaagtgttactaattaaaaatagtactttacttaaccag

SEQ ID NO: 324091 - DNA, 201 bp, Homo sapiens
accaggcctccaggaaacaaactgatggttttcttctaacatacttttcagattttcagagttattaataaacctaaactaagtgcttttttttttttttraaggatttatatgttaggatatgggtttagctgctgtgtaaaaggccaaaatcacagtggcttaaacagaatataagtttggcttaagaaggatggctcc

SEQ ID NO: 324092 - DNA, 201 bp, Homo sapiens
gagcaagaccctgtctgaaaaaaaaatacaactgccacagctgttgtaattttacattttgaatatattgacgacagtgtcagagaggaaaagctgggcastgcttttctctaaaatctccaatccggagtgtgttctagagagcagtttttctcaagagaaagggatgcaggtagagcaccacctttaggagtagcatga

SEQ ID NO: 324093 - DNA, 201 bp, Homo sapiens
gaaaaaattctaagttgttagccaatcaagacaaatacagaatgtgaagtcccgtttcagccaatggaaactggacccagaggtagggtggatacgtcagrttataaatgaccctgtctcctttgttgggtgtactcgtggcaaaactgctggcgagtgtaccctttctgcagaaagtgtaaaaatggccttgctgagaaa

SEQ ID NO: 324094 - DNA, 201 bp, Homo sapiens
caagaccctgtctgaaaaaaaaatacaactgccacagctgttgtaattttacattttgaatatattgacgacagtgtcagagaggaaaagctgggcactgyttttctctaaaatctccaatccggagtgtgttctagagagcagtttttctcaagagaaagggatgcaggtagagcaccacctttaggagtagcatgatga

SEQ ID NO: 324095 - DNA, 201 bp, Homo sapiens
tttggttgtctgtttatgatcaagaatgggaggattaaaaagctgtttggaagctctgagcgtaaagactttgagctttgctttgggatgatcgggagaayataaccctcttccccttgccatgtcactgcttttaggaaagcctcgagactggtcaccttgcccagaggagtgtttttcagcctgcttaggaggaaaggt

SEQ ID NO: 324096 - DNA, 201 bp, Homo sapiens
gagggagaagtactttgtgacttcttatggatgatatcaatgtcaaaacatttgttttctttctttcttgggaagcaataaactttaggttttcttaattkattttttgagagggagtcttgctcttttgcccaggctttggagtgcagtggtgcgatctcagctcgctgcaacctccgcctcctgggttcaaactgtttt

SEQ ID NO: 324097 - DNA, 201 bp, Homo sapiens
gggacggggtttcattttggccaggctggtctcgaactcctgacctcaggtgatctatccgcctcggcctcccaaagtgctgggattacaggcgtgagccmccgcgcctggctcaagtttatcttctaacgtttatgttgattttttttttttggtcttttttttttttttcctgtgcgtggtttttttttttttttattg

SEQ ID NO: 324098 - DNA, 201 bp, Homo sapiens
gggattacaggcgtgagccaccgcgcctggctcaagtttatcttctaacgtttatgttgattttttttttttggtcttttttttttttttcctgtgcgtgktttttttttttttttattgctgccaatttttttttcttttttgtctttttgagacagagtctcactctgtggcccaggctgaaatacagtggtgtgatct

SEQ ID NO: 324099 - DNA, 201 bp, Homo sapiens
gcgtctccaaaagtttggagcgtctccacaggctggagtgcagtggcacaagctcggcttactgtgaccttgaccttccacactcaagcaatccttctgtstcagctcctggagtagctgggactacaggtgtgggtcactgcacccagctaatttttgtatttttcttgtacagatggggtcttgctatgttgcccagac

SEQ ID NO: 324100 - DNA, 201 bp, Homo sapiens
tgttgcagcttttcaactctgcatgaaaatggccatagacaacgtacaagtgaatgggcctgactgtattccaataaaaccttatttacaccagcaggcaktgtgttgttcagtgaggtttcaggaaagagtaaaataagatgaatttgttcaatccatctttagcctagaaatgttcttgtgggctgcagcatgtggaac

SEQ ID NO: 324101 - DNA, 201 bp, Homo sapiens
tggctcactgcaacttctgcctcccaggttcaagtgattctcatgtctcagcctcccgagcagctggggttacaggcgtgcacaaccgcatttggctagtkttttgtatctttagtagagatggggttttgccatgttgcccaggctggtctggaattcctcagctcaagtggtctgcctgctttggcctcccaaagtgct

SEQ ID NO: 324102 - DNA, 201 bp, Homo sapiens
cagcctctgttgcagcttttcaactctgcatgaaaatggccatagacaacgtacaagtgaatgggcctgactgtattccaataaaaccttatttacaccakcaggcagtgtgttgttcagtgaggtttcaggaaagagtaaaataagatgaatttgttcaatccatctttagcctagaaatgttcttgtgggctgcagcat

SEQ ID NO: 324103 - DNA, 201 bp, Homo sapiens
atgcctgtaatcccaactactcaggaggctgaggcaggagaatcacttgaacctgagaggcggaggttgtaagtgagctgagatggcgccactgtactccrgcctgggcgacagagtgagactgtctcagaaaatagaatttatgactccagtctaagtccctaccttgaactgaagaattgaatgacatcacctccccat

SEQ ID NO: 324104 - DNA, 201 bp, Homo sapiens
cttcccactcaccatctttcagacacttaccttgcactctcatgcctctcagccttagcctctaatgggattgctgataaaagctgtggtgccccctagtrtgagattttttttctcccttgcagttttgaagacaaaaggttgagtcaccaatggcagcatttcaggccctggcagggggtctgcccagcattctcagca

SEQ ID NO: 324105 - DNA, 201 bp, Homo sapiens
gttcaagtgattctcctggctcagcctcctgagtagctgggattacaggtgcctgccaccacacccggctaatttttttttttttttaaggcagagtttcrctcttgttggccaggctggagtgcaatcgcatgatattggctcactgcagcctccagttcccaggttcaagcgattctcttgcctcagcctcctgagtag

SEQ ID NO: 324106 - DNA, 201 bp, Homo sapiens
tttttttttttttttaaggcagagtttcactcttgttggccaggctggagtgcaatcgcatgatattggctcactgcagcctccagttcccaggttcaagygattctcttgcctcagcctcctgagtagctgggattatagactcccgccaccacgcccagctaattttttgtatttacaggatcacacctgtaatcccag

SEQ ID NO: 324107 - DNA, 201 bp, Homo sapiens
gtgtgtaaaatgggctagctcttcaaatgttaccacttgtaaaaagctaatacagggtcagatgcatttttgggtttacagcctctgttgcagcttttcarctctgcatgaaaatggccatagacaacgtacaagtgaatgggcctgactgtattccaataaaaccttatttacaccagcaggcagtgtgttgttcagtga

SEQ ID NO: 324108 - DNA, 201 bp, Homo sapiens
caggcggatcacctgaggccaggagttggagaccagcctggccaacgtggcgaaaccccgtctctattaaaaatacaaaaattagctgggtatagctgggygtggtgactcatgcctgtaatcccagcactttgggaggccaaggcgagcggatcacctgaggccaggagttggagaccagcctggccaacatggtgaaac

SEQ ID NO: 324109 - DNA, 201 bp, Homo sapiens; identical to SEQ ID NO: 68190

SEQ ID NO: 324110 - DNA, 201 bp, Homo sapiens; identical to SEQ ID NO: 68192

SEQ ID NO: 324111 - DNA, 201 bp, Homo sapiens
gtttggaaccttcttctttttctcttccaccctccagggcgaccagcagcctgacagaacacaggctggcttgaagtctgtgtctcaggtcgaggatgtgwttagagagctgattggaacacagaaaaccaggacaggatgttttcctccaagcgggtcataaggcttcagcttctgggtggtgggtggggtggggtgggc

SEQ ID NO: 324112 - DNA, 201 bp, Homo sapiens
tgaggccaggagttggagaccagcctggccaacatggtgaaaccctatctctaccaaaaaaaaaaaaaaaaattagctgggtgtgatggtacatgcctggsgtcccagctactcaggaggctgaggcaggaggattgcttgagcctgggaggttgagctgcagtgacccatgattatgctccagcctgggtgacagagtga

SEQ ID NO: 324113 - DNA, 201 bp, Homo sapiens
ctgtattttttaaaaaccaggacaagtcttttgttgcattttgttaatgtaaagaatataaacatagtatgagcattaagcctgatttgttttgagtgacrtggtttggaaccttcttctttttctcttccaccctccagggcgaccagcagcctgacagaacacaggctggcttgaagtctgtgtctcaggtcgaggatg

SEQ ID NO: 324114 - DNA, 201 bp, Homo sapiens
agtttttgaaggattgttctcccttatagataagtttttaaaggttttaggggaaattgcaaacattcaaagtaaacagaatagtgtattgaatcaccagrtgcccatcacccagcttcaagagttcagattaaattaaaaatgtgctacatttaagttagcttgcattttagaaaagattcttgtttggatatttctgcc

SEQ ID NO: 324115 - DNA, 201 bp, Homo sapiens
ggaaaccgagcaaacccagtccaggcaggactcacctttggcctcttcccagaggatgtcctgaagaaacttccccagggcctggctgtgctgctggtacwgaacccctgacagcttgattccaacatcaaagggggcgttgaactaggaggcagggcagggaggacccaggagatgtcagaggtcatgcccatccccatc

SEQ ID NO: 324116 - DNA, 201 bp, Homo sapiens
ctgactttttagttctgttgatgaaatgtgttccatctttctagtttgatcctaagtgttactaattaaaaatagtactttacttaaccaggcctccaggraacaaactgatggttttcttctaacatacttttcagattttcagagttattaataaacctaaactaagtgcttttttttttttttgaaggatttatatgt

SEQ ID NO: 324117 - DNA, 201 bp, Homo sapiens
gaggtttcaggaaagagtaaaataagatgaatttgttcaatccatctttagcctagaaatgttcttgtgggctgcagcatgtggaactctgaattcatacrtgattactctttgctcagtgcccagtagtaggtgctcaataaatgtaactttaaattttaccatacaggcttaaactaactaaggcagtctttttttttt

SEQ ID NO: 324118 - DNA, 201 bp, Homo sapiens; identical to SEQ ID NO: 68195

SEQ ID NO: 324119 - DNA, 201 bp, Homo sapiens; identical to SEQ ID NO: 68197

SEQ ID NO: 324120 - DNA, 201 bp, Homo sapiens
gattcagaaaggttaaataagctgaccaaggccatgcagctggtaaatggccgagctgtggggtaatatcagattagtccaacttcaaagccagtgttctytgcactgctgcctctgggagcacctgctctgttctagcctggcatcagatgtaggggtggcaagacgaaggtgccagggtccctcccttgcggagctctc

SEQ ID NO: 324121 - DNA, 201 bp, Homo sapiens
atgtgctcaagagaagaatgtatttattttagttgtcagtttaaagaattgtgtgcccttgtactttgaaccactctgaatcacagaaccaagaattgcgsttcttggtgtagcttttctccaaagtcatagtttccagcatgttggggttttgcttggtggtgctagttttttttttttttcttttttttttggaggtta

SEQ ID NO: 324122 - DNA, 201 bp, Homo sapiens
tgaggctcttgagtgatagagcttttgcacatcccctttcctgcatctccacttggcacatgtctagtgcacacgtggaacaccaggcttggggctgttgktgccaaggacaatcgggccatgcttcacagactgagaagtcactcaccacggggcagtgagtggagagctgtaacagggatgggtttggagtacccaagg

SEQ ID NO: 324123 - DNA, 201 bp, Homo sapiens; identical to SEQ ID NO: 68200

SEQ ID NO: 324124 - DNA, 201 bp, Homo sapiens
ttcactgtgttagccaggatggtctcgatgggcccgcctcggcctcccaaagtgctgggattacagacattagccaccgcgcccagctaggtttatgattsttttaagttttattttcctttggcccttgattcaggataatgattaaaaaaaaatatgatgtgctcttcggaaaaaaatttcaaatgatacaagaagctt

SEQ ID NO: 324125 - DNA, 201 bp, Homo sapiens
tgacctgaggtgatccacctgcctaggcttcccaaagtactgagattacaggtgtaagccacttcgcctggcctcttctggttttcttgatgtctgaagcyatgctggttcctgaaccttggtatatgattttttattttttattttcttttgctttgagacagagttttgctctgtcgcccaggttggagtccagtggcg

SEQ ID NO: 324126 - DNA, 201 bp, Homo sapiens
gttgcagcttttcaactctgcatgaaaatggccatagacaacgtacaagtgaatgggcctgactgtattccaataaaaccttatttacaccagcaggcagkgtgttgttcagtgaggtttcaggaaagagtaaaataagatgaatttgttcaatccatctttagcctagaaatgttcttgtgggctgcagcatgtggaact

SEQ ID NO: 324127 - DNA, 201 bp, Homo sapiens
tttggcacccaaatgaggtgaatggtggtgactggcaactgcacctagttggatgtcagtgctgagttgcatttacctaaaagagcagttagcaagttctkgatgtgtcctgctgaatgttttatcttgtgaagggaagaagaagaacctatagagggctgggcgaggtggctcacgcctgtaatcccaacactttgggag

SEQ ID NO: 324128 - DNA, 201 bp, Homo sapiens; identical to SEQ ID NO: 68201

SEQ ID NO: 324129 - DNA, 201 bp, Homo sapiens
tcttccttggtttactctcacattttggtggaatactttttctagtagcttcttgagaaagggtacatggagaaactttttttggtaaacatgtgtctgarattgcctttattttacctttaaccttgattacaagcttggttggttttggaattccaggttggaaattgttttgtttgggattttgaaggcattgctcct

SEQ ID NO: 324130 - DNA, 201 bp, Homo sapiens
gacccaacgaggtggtattgcaggaggaggccctaaatttacagattggtaactatatatatggcaccaagaacatgaacaggtatcagattaagaaaatycacctgtagttcgactccccagtattttgttagatttcctttcagttcatttgactacttgggcatagtttttatatgctgtcgttgtcatcataggggc

SEQ ID NO: 324131 - DNA, 201 bp, Homo sapiens
tgtctgtggtcattttcctttctttgaaaacacagattaaacaaaagttacatcagaattggtattggcttagtgttgctattttgagaagaggcagtacrggtgttagacttgtaaatattctcaagtgaatatcacctgactcaaattacaaaaagtatctcattgtttgatgctgaaaacataaacacaaattatgtt

SEQ ID NO: 324132 - DNA, 201 bp, Homo sapiens
attgtttgatgctgaaaacataaacacaaattatgttccacagttgtagaaactactcatggaaacattaatatgaggtaatttgcttataatgaattaattttttttttttttttttggagacagtcttgctctgtccaggctggagtgcagtggcatgatctcagctcactgcagcctttgcctcccaggttcagggga

SEQ ID NO: 324133 - DNA, 201 bp, Homo sapiens
ttataatgaattaattttttttttttttttttggagacagtcttgctctgtccaggctggagtgcagtggcatgatctcagctcactgcagcctttgcctsccaggttcaggggattctcctgcctcagccacccaagtagctgggattataggcacctgccaccacacccagctaatttttgtatttttagtagagacag

SEQ ID NO: 324134 - DNA, 201 bp, Homo sapiens
cggggagagttaaatgcagattccttggccccaccttggacctattgaatcacaatatctcagggtggaatgggccttaaaaatctgtttttaaaatgctrcccagttgatggagatgtgatgctaagttgaggcaccatttattctaaaaattaattcagcagatattcatgagcactcagtatctgccaggcactgttc

SEQ ID NO: 324135 - DNA, 201 bp, Homo sapiens
atcccagcactttgggaggctgaggcgggcagatcagttgaggttagtttgagaccagcctgaccaacatggcgaaaccccatctctacaaacaaatacaraaattagccaggcaaggtggtgcctgcctgtaataccagctacgcgggaggctgaggcaggagaatcgcttgaacccaggaggtggaggctgaagtgagc

SEQ ID NO: 324136 - DNA, 201 bp, Homo sapiens
acccaggaggtggaggctgaagtgagctgcaattgcaccactacactccagcctgggcgacagagcaagattcggtctcaaaaaaacaaaacaaaacaaaacaaaaaaaaaaaagcaagttgtagaaaataagtgtagtatttgtttctttaacaaatatttgagtaccttctgagagccaggcaccttgctggagatgca

SEQ ID NO: 324137 - DNA, 201 bp, Homo sapiens
tccttgctggggaagggacagggagggagttctagattatgactgtgcacacatggcacaatgatgttatgaccacttgatgtcttccaggttcccaaaarcctttgccagtatgcccacccgggcctggccttgcatacggtccgagagattgccagagtcaaagatcagccactctccctcaccttggctgccttgcgt

SEQ ID NO: 324138 - DNA, 201 bp, Homo sapiens
gccttgcgtgagaacaccagtcgcctctacagtctttaagcagagaaggtacagtcctcgggagtctcctagaaaaggtcgtaaaactcacattctgtatkttttaaaaaccaggacaagtcttttgttgcattttgttaatgtaaagaatataaacatagtatgagcattaagcctgatttgttttgagtgacatggttt

SEQ ID NO: 324139 - DNA, 201 bp, Homo sapiens
cccaggaggtggaggctgaagtgagctgcaattgcaccactacactccagcctgggcgacagagcaagattcggtctcaaaaaaacaaaacaaaacaaaacaaaaaaaaaaaagcaagttgtagaaaataagtgtagtatttgtttctttaacaaatatttgagtaccttctgagagccaggcaccttgctggagatgcac

SEQ ID NO: 324140 - DNA, 201 bp, Homo sapiens
ccaggaggtggaggctgaagtgagctgcaattgcaccactacactccagcctgggcgacagagcaagattcggtctcaaaaaaacaaaacaaaacaaaacaaaaaaaaaaaagcaagttgtagaaaataagtgtagtatttgtttctttaacaaatatttgagtaccttctgagagccaggcaccttgctggagatgcaca

SEQ ID NO: 324141 - DNA, 201 bp, Homo sapiens
tgtttcctgttagagtgtagttaggggtatgaaatattagtacagccaacataaacagttttgttccattttaatcaggtaattcagctagaatgctcttycattgtgaatgtttgttttattatgtgaattacatatactcataaaagtattaagagaactttgtaaggcctcttgctcatcaagccttctgtcattggc

SEQ ID NO: 324142 - DNA, 201 bp, Homo sapiens; identical to SEQ ID NO: 68188

SEQ ID NO: 324143 - DNA, 201 bp, Homo sapiens; identical to SEQ ID NO: 68189

SEQ ID NO: 324144 - DNA, 201 bp, Homo sapiens
tggaggctgaagtgagctgcaattgcaccactacactccagcctgggcgacagagcaagattcggtctcaaaaaaacaaaacaaaacaaaacaaaaaaaamaaagcaagttgtagaaaataagtgtagtatttgtttctttaacaaatatttgagtaccttctgagagccaggcaccttgctggagatgcacacaaacacc

SEQ ID NO: 324145 - DNA, 201 bp, Homo sapiens
agtagctgggattaccggcacatgccaccacgcccagctagtttttgtattttaagtagagacggggttttgccatgttggccaggctggtcccgaactcstgacctcgtgatctgcctgcctcggcctcccaaagtgctgggattataggcgtgagccaccgtgcccggcctatacactatcttttctaaagaattaact

SEQ ID NO: 324146 - DNA, 201 bp, Homo sapiens
tcatggctaatactctgttaatatttttttctttttctttttggagacagaatctcactctgtcacccaggctggagggcagtggcacgatctcggctcaytgcggcctccacctccgcctccgcctccgcctcctgggttcaagcgattctcctgcctcagcctcccgagtagctgagactgcaggtgtgtgccaccttg

SEQ ID NO: 324147 - DNA, 201 bp, Homo sapiens
tttgtattttaagtagagacggggttttgccatgttggccaggctggtcccgaactcctgacctcgtgatctgcctgcctcggcctcccaaagtgctgggrttataggcgtgagccaccgtgcccggcctatacactatcttttctaaagaattaactattaggttaaaccacttgaaatttctcatatttgacctttttt

SEQ ID NO: 324148 - DNA, 201 bp, Homo sapiens
ccaggctggagtgcaatcgcatgatattggctcactgcagcctccagttcccaggttcaagcgattctcttgcctcagcctcctgagtagctgggattatrgactcccgccaccacgcccagctaattttttgtatttacaggatcacacctgtaatcccagtattttgggaggccgaggcaggcggatcacctgaggcca

SEQ ID NO: 324149 - DNA, 201 bp, Homo sapiens
agaagagggaaaggtcagtgaggctagcccctggctctgcccttatgtcttgccgtcctcctgggcccggggtggcgggaatctgaggtggggtcgccagraagggtggtgttggaatccaggccccctgtaccttgcaggtgcccatggcgtccgagcggggcaaggtcaagcacaactggagcagcacgtcggaagggt

SEQ ID NO: 324150 - DNA, 201 bp, Homo sapiens; identical to SEQ ID NO: 68193

SEQ ID NO: 324151 - DNA, 201 bp, Homo sapiens
tatttcacttgtcttacctttctcctggttttcccttcccttaccagctaaaatgtgagctccaggaggcagacgttcttgtgtgttattactattatttwtttttttgagacagcgtctccaaaagtttggagcgtctccacaggctggagtgcagtggcacaagctcggcttactgtgaccttgaccttccacactcaa

SEQ ID NO: 324152 - DNA, 201 bp, Homo sapiens
gatgcatttttgggtttacagcctctgttgcagcttttcaactctgcatgaaaatggccatagacaacgtacaagtgaatgggcctgactgtattccaatraaaccttatttacaccagcaggcagtgtgttgttcagtgaggtttcaggaaagagtaaaataagatgaatttgttcaatccatctttagcctagaaatgt

SEQ ID NO: 324153 - DNA, 201 bp, Homo sapiens
ggaattaagttgtggaacataagagtcaaggctcgtgtctgctgtgaactggagttgagggaatgtttggggatcccacctggtatcagtaagggaaccayggcgacggccagccttgcccatgtgaggcatttgctttgtcaggccttctcagtagtggagaagggaggaaggagaatgcagctctttcagtgctgtcta

SEQ ID NO: 324154 - DNA, 201 bp, Homo sapiens
aatcatgaaaaagtttgtgccccctgactacaagatccataggttagaagactggaacttcagcgggcaaatgaaagaaacacttcctctgtcaagttgatgaggacagcaatgatcgtattctgtcattatacactatctattcttttttttttttttcgagacggaatctcaccctgtcgcccaggctggagtgtagta

SEQ ID NO: 324155 - DNA, 201 bp, Homo sapiens; identical to SEQ ID NO: 68198

SEQ ID NO: 324156 - DNA, 201 bp, Homo sapiens; identical to SEQ ID NO: 68199

SEQ ID NO: 324157 - DNA, 201 bp, Homo sapiens
gcctgcctcctactccagagaaactgatttattgggctgaggtgtggtctgggcttccagatttttcagtgctccccaggttattgtaaacgtgcagcccygttggagaatcactgcagtagaaggtggattatgtgctcaagagaagaatgtatttattttagttgtcagtttaaagaattgtgtgcccttgtactttga

SEQ ID NO: 324158 - DNA, 201 bp, Homo sapiens
tgtgaggattcaaggtgaatgtgcattttgtgccccaaatgggacctggcctgttgcgaacactttacaattataagcagggtgtttccagggctgtttgmgcaatagagggctgacaccaataggtttgtggttatccagacatacttacatttctagactaggatttcatatatttttggagaagtcagtaaatcccct

SEQ ID NO: 324159 - DNA, 201 bp, Homo sapiens
aggcttcacttccgtcttggaggaggtttgttgttgggagcagtctatcttgactgaccctggtgcagtcactgagaaactgaggtattttccaaaaccargttgattatttgaggggaagtgtttgcagagaactttcaggaggctttgggtatggtgggaaaaacactgcactcagaactgggggattggagttcctgg

SEQ ID NO: 324160 - DNA, 201 bp, Homo sapiens
gagggtttagtttgtgccaggcaatgttctaggtgtttgggattctttactaacaaaacagatcactttccccttagagtttgcatcctagattttgaagstctgagtcttaagaagtgagaagttctgcctgtggaggagtggagaaacagtcttatttgggatcagatgggctgcctctagagaaaattactttacaaa

SEQ ID NO: 324161 - DNA, 201 bp, Homo sapiens
  misc_feature (1)...(201): n = A,T,C or G
acagggtgagctaatgagccaatgcaaagccatcaccatggccagaagaacaagccagggtttatgttcagctgatgacagcctgggaggccatcttcacntcggaaggctaacccactgttgtatgccttcttttctgcagcataaagatagggaggtggtgatggagcacccctcttctggaagtgactggtctgatgt

SEQ ID NO: 324162 - DNA, 201 bp, Homo sapiens
gattattctgtaggcaaatgtggagccctggaagggttctaaactaaggctgaagtggtggggtttgcattttagagctcctctggcacgctgcagagaargggtaggagggagaagacagggagctggtgaggagctgttgaaatccttcaggctactggtgatagggctggagcaacatctccacttatctttccttct

SEQ ID NO: 324163 - DNA, 201 bp, Homo sapiens
acttgggtacagcataaaataataccagttgattcaatttagcttcactgacaatttgtagatagagtgaaacctgttactgggagaggcaggaaatttaytttacatagtctttcaggtgtgctgaatccctggctgtcctaaagacctggaactcaggtttgagggtgtggtctctaatctgggtgggtctaattgtag

SEQ ID NO: 324164 - DNA, 201 bp, Homo sapiens
ggaaggctggggccagtctgtgaagggttcctgatgagctcaggggtagggattattctgtaggcaaatgtggagccctggaagggttctaaactaaggckgaagtggtggggtttgcattttagagctcctctggcacgctgcagagaaagggtaggagggagaagacagggagctggtgaggagctgttgaaatccttc

SEQ ID NO: 324165 - DNA, 201 bp, Homo sapiens
tgtgcgctaccgtgcccagctgatctttgtatttttagtggagatggggtttcgccttgttggccaggctggtctctaactcctgactgcaagtgatctgmccgcctcagcctcccaaagtgctgggattacaggtgtgagccaccatgcccggccaattgtattcttattttaaaaaaattattttatttttttgaaacg

SEQ ID NO: 324166 - DNA, 201 bp, Homo sapiens
gtggtgctagttttttttttttttcttttttttttggaggttaaattgttaattccctaatggaaacatgcaagagggtttcataagtactttgagcagaccaaggagtgcttcacagagaagatacatttcgctcatctactcaatcaaggctttgaacaaatatgtgttgagggtttagtttgtgccaggcaatgttct

SEQ ID NO: 324167 - DNA, 201 bp, Homo sapiens
ttaataaacctaaactaagtgcttttttttttttttgaaggatttatatgttaggatatgggtttagctgctgtgtaaaaggccaaaatcacagtggcttraacagaatataagtttggcttaagaaggatggctccatcatgtcagagatactggtaccttttgtcttgattctctatcacccctcaacacagtgtccat

SEQ ID NO: 324168 - DNA, 201 bp, Homo sapiens
cttcagcaagcacagccgaggggtactcacaaaaatggcatgttcatcctcaggtccttctagagtcctctcactgctctcctgtgtctgctctgtaaactttttttttttgtttgagacagggtcttgctctgtcacccaggctggagtgcactggcatgatcatagctcactgcatctcaacctcctgggctcaagcga

SEQ ID NO: 324169 - DNA, 201 bp, Homo sapiens
ccaaagtgctgggattacaggtgtgagccaccatgcccggccaattgtattcttattttaaaaaaattattttatttttttgaaacgatttcccaggctgragtgcagtggcgcaatcatgtctcactgtagcctcaaactcctggggtcaagcaatcttcttaaataggtgagaatatgggcatgtgccaccacaccctg

SEQ ID NO: 324170 - DNA, 201 bp, Homo sapiens
tcatagctcactgcatctcaacctcctgggctcaagcgatcctcctgcctcagcctcccaagtaggtggaactcaggcgtgtgccaacctgcctggctaatttttttttttttttttttgagacagaatcttgctctgtcacccaggctggagtgcagtggtgcaatctcggctcactgcaagctccgcctcccgggttca

SEQ ID NO: 324171 - DNA, 201 bp, Homo sapiens
tgcccaaaatgtcaggaaatgctgcttgtctggagtgcttggggcactgctggccctcccttctctcatccgtgctctcctgcgttccctggacacttgcrtgtttggaggaaggcaggagatgaggctagacaggaaggctggggccagtctgtgaagggttcctgatgagctcaggggtagggattattctgtaggcaa

SEQ ID NO: 324172 - DNA, 201 bp, Homo sapiens
caggcgtgcaccaccatgcccagctaatttttctgtattttttgtagagaggggtttttttgccatgttgcccaggctggtgttgaacttgtgggctcgartgatctgcctgcctcagcctcccaaagttctgagattataggcaggagccaccatgcccagccaacagtgtttctcactttcatatttcattactccttt

SEQ ID NO: 324173 - DNA, 201 bp, Homo sapiens
gtagttatagaccctcaagagaaacccagtgaggagccccttggggaccgaaggactgtcattgacaaatgctctccacccctagagttcttggatgactstgactctcatttagaaatccaaaaggtgagtaaagcttgtaccaggcatctgactttttagttctgttgatgaaatgtgttccatctttctagtttgatc

SEQ ID NO: 324174 - DNA, 201 bp, Homo sapiens
tcctcctcctccttctccccacatttcttgggccctggtgtgggcggggccgcctccaaaggctgcctgattcggaacactcgggggttcctgtcttcagrgggatcccctctgcgtcctgccaacgcctctttggaagaaatggcttctctagaggaggaagcctgcagccttaaggtaggtggctgccacgctttgcaa

SEQ ID NO: 324175 - DNA, 201 bp, Homo sapiens
ggtcagtgaggctagcccctggctctgcccttatgtcttgccgtcctcctgggcccggggtggcgggaatctgaggtggggtcgccaggaagggtggtgtkggaatccaggccccctgtaccttgcaggtgcccatggcgtccgagcggggcaaggtcaagcacaactggagcagcacgtcggaagggtgtccccgcaagc

SEQ ID NO: 324176 - DNA, 201 bp, Homo sapiens
aaatgctctccacccctagagttcttggatgactctgactctcatttagaaatccaaaaggtgagtaaagcttgtaccaggcatctgactttttagttctsttgatgaaatgtgttccatctttctagtttgatcctaagtgttactaattaaaaatagtactttacttaaccaggcctccaggaaacaaactgatggttt

SEQ ID NO: 324177 - DNA, 201 bp, Homo sapiens
ctgcattctaatgagttcttcttccttcttaacatttttgaaatctggatgtgtttcatgaaacattataaatgtaatgttattgttccttggaaaattgyaaggtacaatacaattgcaaggaacagttgcacagtggcttgtcttccatgcacctgtcgtaggttggatgtgtgtgcttgtgttaaagaaagaaattag

SEQ ID NO: 324178 - DNA, 201 bp, Homo sapiens
tctcttggtgtgaaatggatactctgataggactcagggtttgttatctgggcattctggccagtgggaaggggagaagaggagagtgcattccttccctkttaagagcttggctcaagagttgcacatgttgtatctgctgttgacaagagcggggaaacccggctgacacctggctgcaagggagtctggaaaatcagc

SEQ ID NO: 324179 - DNA, 201 bp, Homo sapiens
ggtggacagatgttggctgtcagccagtaagtcagccaggctgtaaactggcacacctacatgtggcctctctagcaggatgtcatttgggttgccggacktcttacatggtgcttggcttgctccagagtgagcaagtggagtgaaccagatggaagctacaaggcccttctgacctggccttggaagttacacagcttc

SEQ ID NO: 324180 - DNA, 201 bp, Homo sapiens
ctgcggcagccggcggggggcgtcctgagttggcggtcgagggcgctgccagctcccgaggggccgctcgggccccttccggcccgggtctggttgggcckcaggagcagggcgggctgcggcgcccgggtctggccctggcctacgggctaagcgcccggccccggggccgcggatccggcagccatgtgtggatcttga

SEQ ID NO: 324181 - DNA, 201 bp, Homo sapiens
tgtcgttgtcatcataggggccacagttgttgattttgctcctcttcagtgttagaagcatttcctatcccagtgtgttctctgtggtggtcatctcaggkgactgcagagcactctgtggtgtgcgtggtatctctgagtgatctctgatcactcaccaagtgccatctcggggcttcctgtgttggagccagcccttgt

SEQ ID NO: 324182 - DNA, 201 bp, Homo sapiens
taatctttggttgtctgtttatgatcaagaatgggaggattaaaaagctgtttggaagctctgagcgtaaagactttgagctttgctttgggatgatcggsagaacataaccctcttccccttgccatgtcactgcttttaggaaagcctcgagactggtcaccttgcccagaggagtgtttttcagcctgcttaggagga

SEQ ID NO: 324183 - DNA, 201 bp, Homo sapiens
ttgaactaataaccctaaatcaccagtgagcacaaggggccttttgtgcccccatcctggggatgggcagaaatggagtttcagttctcagcagtgaggaytgctgatcttgagaggttgctgtggggtgtggtggcttagcacacagagcatcttagggtacttgaaaggacattttctttcctcttttgaacttgaaag

SEQ ID NO: 324184 - DNA, 201 bp, Homo sapiens
cctggccggctccttaaagatggttgagaggggttggctgaataacaaggactctagcacccaaatcgggtcttgtcagatggcagaaaaaggaggatggkgctgtcagggcctttgggtacctaagcagaatgagtgaagcctctgacccctggctgctgcacacaccaatgatgaggcagtcagttggcttttctgggt

SEQ ID NO: 324185 - DNA, 201 bp, Homo sapiens
cttaaagatggttgagaggggttggctgaataacaaggactctagcacccaaatcgggtcttgtcagatggcagaaaaaggaggatggggctgtcagggcytttgggtacctaagcagaatgagtgaagcctctgacccctggctgctgcacacaccaatgatgaggcagtcagttggcttttctgggtcggttggttttt

SEQ ID NO: 324186 - DNA, 201 bp, Homo sapiens
ttgcccagactggtcttgaactcctaggctcaaatgatcctcctgccttggcctcccaaagtgctggaattgcaggcatgagccaccacacccagccttgtttttttttttattgaacgctaaacccacaggtccagaaccgtgcctgctggcacagagtaagtgcttagtaagtgcttgcttaatggttgaaaagtgcac

SEQ ID NO: 324187 - DNA, 201 bp, Homo sapiens
tggcagatgcctgtaatcccagctacttgggagggaggctaaagcacaagaattgcttgaacctcagaggcggaggttgcagcgagctgaggttacacccygcactccagcctggacaacagagtgagattttgcctcaaaaaaaaattatatatatatatatatatgaattccttaaatataaaaagatacaaagaaaac

SEQ ID NO: 324188 - DNA, 201 bp, Homo sapiens
attgccataatgtgaccacctccaattattttgcagacatgttaatgatgtgttactgtatatgataaacattttaactttcaggtgcacctatacaaaastagacttgtagttccaatatgtttcactagaaaattcagcagggaaaaaaaacaaaacagaacacaaaagccttgtcaaacttaggcaagactgtaattt

SEQ ID NO: 324189 - DNA, 201 bp, Homo sapiens
atcccagctacttgggagggaggctaaagcacaagaattgcttgaacctcagaggcggaggttgcagcgagctgaggttacaccccgcactccagcctggrcaacagagtgagattttgcctcaaaaaaaaattatatatatatatatatatgaattccttaaatataaaaagatacaaagaaaacaggctgagcgcggtg

SEQ ID NO: 324190 - DNA, 201 bp, Homo sapiens
agattttgcctcaaaaaaaaattatatatatatatatatatgaattccttaaatataaaaagatacaaagaaaacaggctgagcgcggtggctcacacctrtaatcccagcactttgggaggccgaggtgggtggatcaccagaggtcaggagttcaagaccagcctggccaacatggcgaaaccccgtctactaaaaata

SEQ ID NO: 324191 - DNA, 201 bp, Homo sapiens
ccaccgcgccccgtgtgttttatagagatggggtttcgccatgttggccaggcttgtctcgacctcctgggttcaagcagtccacctgcctcggcttcccraagtgctggattacaggcatgagccactgtacctggtctgtatttacttttgagaggaatttaatagaaatgacttaggaatgcaaatgggataatggtt

SEQ ID NO: 324192 - DNA, 201 bp, Homo sapiens
tagtactttacttaaccaggcctccaggaaacaaactgatggttttcttctaacatacttttcagattttcagagttattaataaacctaaactaagtgcttttttttttttttgaaggatttatatgttaggatatgggtttagctgctgtgtaaaaggccaaaatcacagtggcttaaacagaatataagtttggctta

SEQ ID NO: 324193 - DNA, 201 bp, Homo sapiens
aggacatttcgggcatagggagcaatacatgcccaaaatgtcaggaaatgctgcttgtctggagtgcttggggcactgctggccctcccttctctcatccrtgctctcctgcgttccctggacacttgcgtgtttggaggaaggcaggagatgaggctagacaggaaggctggggccagtctgtgaagggttcctgatgag

SEQ ID NO: 324194 - DNA, 201 bp, Homo sapiens
agtggaaagaagagggaaaggtcagtgaggctagcccctggctctgcccttatgtcttgccgtcctcctgggcccggggtggcgggaatctgaggtggggycgccaggaagggtggtgttggaatccaggccccctgtaccttgcaggtgcccatggcgtccgagcggggcaaggtcaagcacaactggagcagcacgtcg

SEQ ID NO: 324195 - DNA, 201 bp, Homo sapiens; identical to SEQ ID NO: 68237

SEQ ID NO: 324196 - DNA, 201 bp, Homo sapiens
tacacctgaatacatctggaaaaatataagcatgaagtccacaccttaatttgaccttcacacaccagccttttccattttacctttttctagttgtgtgytgggtggaagggtgggaagggaaaattatcacctcctatcattctcatcgcctttatacttattgatgaataaattatttatcttcttaagtcatcagtc

SEQ ID NO: 324197 - DNA, 201 bp, Homo sapiens
tacattcttaacttgatctttgctctgggacactttaatccattcattggctttaaaagtgacagaaagcaggtcagtggttgcctggcagagttgggtgsggggggtaagggtagaggagggatggattacaaaaatcacaagaaaacatttgagggtaatgacaatattgctaatcttctttgtggtaatggtttcttg

SEQ ID NO: 324198 - DNA, 201 bp, Homo sapiens; identical to SEQ ID NO: 68238

SEQ ID NO: 324199 - DNA, 201 bp, Homo sapiens; identical to SEQ ID NO: 68239

SEQ ID NO: 324200 - DNA, 201 bp, Homo sapiens; identical to SEQ ID NO: 68240

SEQ ID NO: 324201 - DNA, 201 bp, Homo sapiens; identical to SEQ ID NO: 68241

SEQ ID NO: 324202 - DNA, 201 bp, Homo sapiens
tgtaccaggacaattgccaaaaacaagaaataatttttaatgtagtcatgctgaatgtggagtataaaattgcagttaagaggtgaggtttttagattcaraaggttgagctgcacctgtacctattacctgagtgatccaggacatggttttttaacttttctaagcctcagtttcccaaaccataaaatatcatttcac

SEQ ID NO: 324203 - DNA, 201 bp, Homo sapiens
aaattatcaaatcgaggggtgtattttttcaatcataaaattattataatagcttatttagtcatttatttatttatttatttatttattgtttttgagayggagtctcactctgtcaccaggctggagtgcattggcacaatcgcggctcactgcaacctccacctcccaggttcaagcaattctcctgcctcagcctcc

SEQ ID NO: 324204 - DNA, 201 bp, Homo sapiens
agattctaatcctgaaaggagaaatatgatcttatgaaaaatacatataattgaattttatcaaacttgggacaccatgtaaaactgagttattaatgtgsttcatattcctctaaaaagctaaaaaaaaaaaggcctattgattatcagtttaagtaacctttattaagaagaaatatgttgagcatttttgggcatcac

SEQ ID NO: 324205 - DNA, 201 bp, Homo sapiens
aactgtcataatgactattgctcatttattaaaagttgcgctgtgtgtgtttgtagaattgcatttaaaaattttatgttcttggacttaatgcttaactrttaaaagtacagtaattaaaaaaatgttttgtaaacaggaaactaaaattacctggcccatattttattgtaaaaatgtcctctgttaactttttatccc

SEQ ID NO: 324206 - DNA, 201 bp, Homo sapiens
tttcctagcctcatattgctttttaaaaatattttgttcaaaatttatgctctgttaatacagtactttttcttaggtttcagttttggtattccacttgsagttaatgtctgtaaaattatcttgtttatggttgttctttagcagttgtctttaaattttcataattttatctatcaaattggctttgttaagctcgcc

SEQ ID NO: 324207 - DNA, 201 bp, Homo sapiens
gggctcctccccactgcaaacaacactaacttcccagccaaacatgccacagagcatacctctcccggggcccagactggttggagtttctctgggcaccscttccctcctggctatctcaatatggccaatgatcaagagaggctggaagaggcttagttcaaaatggtggagtggactcgcccgctagtgatgggaggc

SEQ ID NO: 324208 - DNA, 201 bp, Homo sapiens
tataacttgccagtattttcctaaacttgggtccctgatttctgaaatgggagtgaggaaagatgtgaaaattgatggcctcaagctttttaaaatccaarttgaaacttgtactacaaagagagaagtttaacctgagagtttatgcctgtatcagcatgacatagagtagcaattgaagttttcttacaccctacagat

SEQ ID NO: 324209 - DNA, 201 bp, Homo sapiens
cccagtttcaagcgattctcctgcctcagcctccagagagctgggattacaggcatacgccaccatacacgggtaattttgtatttttaggagagatgggktttctccgtgttggtcaggctggtcttaaactcctgacctcaggtgatccacccacctcagcctcctgaagtgctgggattacaggcgtgagtcactgcg

SEQ ID NO: 324210 - DNA, 201 bp, Homo sapiens
ttggtgaatgtatttgtgcagagttaagacttgcttgttaacataatatatccgtattgattttctttttctaaggtcaaggtttctcaggtgattacagkgaatatttcggactacaagtagatgaagatgccttgacttacctcatgttggcaaatcatttggttcacacgctgtgtcccgattctataacaatagctg

SEQ ID NO: 324211 - DNA, 201 bp, Homo sapiens
aataataccacactttttttcagcaagaaggaatgaccttcaatattgatgtcattgtcttttaacaaccatggacacataagtgagttttaacccaaatyttgaaggcctgttaatactctcgctttttgtatttattttatttctttctttttcattctaatattttaaaagttgagggatattcatataacataacat

SEQ ID NO: 324212 - DNA, 201 bp, Homo sapiens
gtttttggggaacaggtggtgtttggttacatgagtaagttctttagtggtgattgagattttggtgcacccatcacccaaacagtataaaatgtacccarttttttaaatgcatatggggaaatgtttactttgaatctttctcctcacaataattaatctgatgtagttatgggctatgtgcccagaagtgctcaggaa

SEQ ID NO: 324213 - DNA, 201 bp, Homo sapiens
tcgtgatctgcccgcctcggcctcccaaagtgctggaattacaggcgtgagccactgcgcccgggcaagttctctgtttaattccacattactttcttatraattttattttagaaatattataatattgggggatttttaaaagctaaagtcagggagattaaaaaaaaaactaactggatattccattgaaagaaatat

SEQ ID NO: 324214 - DNA, 201 bp, Homo sapiens
tcgattcttatgctttttaataaggtgcttctcaaaatattaaaagttctgatttaaagtattcatacgtattcaggcaaagggaaaatatgattaatatmatgttagctgtataaatggaattttgcattatcaatgcaattatatgaaacttcagtgctctatatttaatacatattagacttcattacagcattcatt

SEQ ID NO: 324215 - DNA, 201 bp, Homo sapiens
gtcatgtttgctttgcaccttcattctggttctaacctctgaaagctttttttttttaaaccatcaggcaagctttcatttagagataaagtgactgaaartagtaaaatatcagcaaagtcagaagtgaagacagattgtcacaatgacaaccatctacaatattatttttactgtttgctttgttaatacttagataag

SEQ ID NO: 324216 - DNA, 201 bp, Homo sapiens
atggcgccctctagtggtggttgctttatggtagtcatgttgctgccagaactgttggaactgtgaaattgagccttctaagagcttgtaaaattgtaaargtaactgtaactttaggcagatgtgagactgcgtcatgcctatgtttctttgacataatgacaggccgtttggtactttcttcaattgcactgacataat

SEQ ID NO: 324217 - DNA, 201 bp, Homo sapiens
gtgcagaaaatttaacatagcataactaagactactatccttagaaactgacaattcattttttcttatgcaacaaaggctagttatttataaaatgttayccttataagactagttattttttgcataactgatacaaataatctagttttagaaaatcgacttagcggggagagatagcatttggagatatacctaatg

SEQ ID NO: 324218 - DNA, 201 bp, Homo sapiens
ctatcatttttgcagaaattggccatttaacgcaaacatgattttttcaggtgtctcctctaattgttaagaaaatgtaagtaaagcaggggttgggtaaycaaggcccatgggccaaatcctacctgctgcctgtttttgtaaataaggttacttggaacacagccatgctgatttgtttacgtattctcctttgtgcca

SEQ ID NO: 324219 - DNA, 201 bp, Homo sapiens
gattgtaaaagaaatgcaaatcaaacctacaatgagaaatctcaccccagttaaaataacttttttccaaaagacaggcagtaacgatcctggtgaggatrtggagcaagtagaaccctcatacactgttggtggggttgtcaatcagtacagccagtatggagaacagtatggagattactcagaaaagctaaaaatata

SEQ ID NO: 324220 - DNA, 201 bp, Homo sapiens
tgggagctgtatatcccaccaaagcagaataaatctgtactcgtgcctcatggatccaaattaaaggtactttcctccctcctattttttcttgaacttaycattttctttttatcttgtttgccaagtttgatttaaactattagaatgtacaactgatgcatgataattgtgggagaaacagtctaaatgtacaaatag

SEQ ID NO: 324221 - DNA, 201 bp, Homo sapiens
ggctaatgtactggatttttttgggtgggggtaaatattgtaaagattttctaagtcttgctttaaagatttgtgtttggcaagaaaagagtacctgcagygaaagccaacacctgagttcccatgaggaaaggggcattactaaaatgaaactcttgaagatgcaaagaaaaaaagttttttacagtgtataattacaag

SEQ ID NO: 324222 - DNA, 201 bp, Homo sapiens
tgtcatggagaggcaattattgttcagtcgtttaaacatgtcaatatactaagtgtttccaggacacacaattaagaataccttctcccagctttggggaratgatcttcttaggcgacggctcagactcttttgaggtgggcagaaaatatcttggcatcctttcaattttgtgagagtaaagatctgctggcataatta

SEQ ID NO: 324223 - DNA, 201 bp, Homo sapiens
ggaaaggattgcattagcagtgaaattctgatgtggtatgatagttatgagatattaaatacaatgtgtaaactctagggaaacagtttgtagcactgaartacatggttttctcacacttagtgactacatggatgtaatatttatctttttggaaatactgtattgcaaaacagaacatgagacattgagttacacagc

SEQ ID NO: 324224 - DNA, 201 bp, Homo sapiens
gttatgaagaacctgaaggtatagtgaaaagatcacaaaacgccatggcacaggacctggaatcctgacccttgtctgccatttactcactgagaaattgrttaatttaactttttttgcactgcagtttcccccacctgtaaaatgaagatgattcatattatcttccctacagcaagagattcttaggaagcagaaact

SEQ ID NO: 324225 - DNA, 201 bp, Homo sapiens
aaggatatttaggggacaattggcaaaaattaaatattaataggattcaaaactgtttctcaagaaatgagcagaaggcagttttttatttttctttcaaytatgaacatttctattctttatgcaacatttcactttccttctgttcttgttttctccataacattttatattaagcagatttctacattattgactagc

SEQ ID NO: 324226 - DNA, 201 bp, Homo sapiens
tccttctttatcttctgctatattatccttagcatatggtctcctttcttatgcttagaggttgattgggcacagcttggcaccacatccatgtttctagmtggaacacgtgctagcttactatgtcttttttagtgaagcatatgttagctttcttgtaaacttcaactggttcttcccatttacaggttattgatcaga

SEQ ID NO: 324227 - DNA, 201 bp, Homo sapiens
tttatctccattacttttatttctgtaggcattggttggggataagtcgctggcattttggttgatggatgccgaaatgtatacaaacatgagtgtcctgrctccttttactccagttattgatcgtggaatacagcttcataaaatgattcgactcattacgcatgggcttggtggagaaggctatctcaatttcatggg

SEQ ID NO: 324228 - DNA, 201 bp, Homo sapiens
agtcccagtgatagatctgttttattactgtttgtttcaataaccatttcctgtctccctcttacttccagcaacattctcaaaaccacgctcacaaacartaaatactaaaagcagtggcactgaagcatgacgtactcatcttcattctcctctaagcctggttaccaccaaagcacaaaagcccagctccacaccctc

SEQ ID NO: 324229 - DNA, 201 bp, Homo sapiens
cttttgttgttatcctccacaaggctataacaccaaggttaatgctaggcatgttgtaatcattaacagaacactttgttgtcatttaaggttgaatatcsagagagtagcctgagtcatgctctgtcacttacttggctggggatggtgacttatcgcagcagtgtggttgaggggatcctctgttttcacagactgatg

SEQ ID NO: 324230 - DNA, 201 bp, Homo sapiens
agatttttctaagtactgaaattaacctcatgtaattaaatttctccatttaaaaattagttactttttaaaaataatttcaacttttattttagatgcayggggtacatgggcagtttgttatgtggatatattgcatgacactgaggtttggggtgtgaatgtctgtcacccaggtggtgaacatagtacccaataggt

SEQ ID NO: 324231 - DNA, 201 bp, Homo sapiens
agctgtttttattagatattttgagaaactcatataaggcaggaactggttttattggaaaaaatcctttgtgtgatgtagtgtggtagaagtggatattytggttggtgcccatgtttttaatggaaagaagaaacactaataaaggaatgagaaagaggagaatttagggcttagcaatgattggagaaagagccaagg

SEQ ID NO: 324232 - DNA, 201 bp, Homo sapiens
aactatgccttcatcggctcagtgataaagtgggtgcctgcttcgtcagattgttttgagggtgaaatgacttaatactgttatacttatataaaacacaragtatttgcaggcatatagcttatagttaactattatttaaattgacggttactatattttaatattatcagttactccattaactatatggtacctgaa

SEQ ID NO: 324233 - DNA, 201 bp, Homo sapiens
ataatctagttttagaaaatcgacttagcggggagagatagcatttggagatatacctaatgttaaatgatgagttactgggtgcagcacaccaacatggygcatgtatacatatgtaactaacttgcacgttgtgcacatgtaccctaaaacttaaagtataataaaaaaaaaagaaaattgacttagccagagaattaa

SEQ ID NO: 324234 - DNA, 201 bp, Homo sapiens
aatcaagaaaaccagcaacatttcacttctgtaatgtagctcagtgctccatataactgaaaacctgtgttgtcattataaaacatattccccatgacatsagatgttaacacataagttgaaatatcagaagaaatctggaatcaactaaacccattggtttatttgtttgctcattcattccttaattcattcaaatca

SEQ ID NO: 324235 - DNA, 201 bp, Homo sapiens
tgaggaaatattttaaacaaaaagtcattgaaagtactttttctactgataatgaaaatgcattttctgaaaggagaaaaatcacataattatggttataytacatgaaaatcctttttaaaaattcagggactggtaatagattttattcctttgcttttttcgagcactactatgtagtaatcacttttccggttgctg

SEQ ID NO: 324236 - DNA, 201 bp, Homo sapiens
ccattggtttatttgtttgctcattcattccttaattcattcaaatcaaactcattatttccatgtctaatgtcttccctcttcaacggagaaaagtaatmaaaggaggaaataagtaaaaaggtatatgaggagctgtgtgtgcagataacgctatgggacatgatgtaggaagtcagactcctggaattctgtctcttt

SEQ ID NO: 324237 - DNA, 201 bp, Homo sapiens
taatttgtgtgttgaaaattattttcaggagaatctactaacttgtgcctgtatcttcgaatcatgagcagtgttcaaaacttgggaaatgtttgatcctagaatatctgctgtttacctttgagcagatattatatttattcagtttatgttagggaaatatcagacaggtgtacaaagatacatataaaagactggtga

SEQ ID NO: 324238 - DNA, 201 bp, Homo sapiens
tggtagctggaatgtttatggcattttaatagtcaatagtttctcctagatagctcacaatctgtgtatacatgttatctctccatttagctcacaatctstgtataaatgttatctctccatttatatatgtatatatatacacacacatacatatatatgtcttcacatatactcacatgcacatatatatatatacac

SEQ ID NO: 324239 - DNA, 201 bp, Homo sapiens
atacctattgatatgcaaaatgctcattttaaatttcaaaataatatataatgcaagtctatctttgttcaaaaacaagttgtaggtagttggtagatagrtatgaatgtatgtataggtatcaatatagatatagatataaatatacagatgtggatatagacaaaaataaatacaatgtttatcaaaagaaaaacagat

SEQ ID NO: 324240 - DNA, 201 bp, Homo sapiens
gtaggcattggttggggataagtcgctggcattttggttgatggatgccgaaatgtatacaaacatgagtgtcctgactccttttactccagttattgatygtggaatacagcttcataaaatgattcgactcattacgcatgggcttggtggagaaggctatctcaatttcatgggtaagtgtgagttaaacacatatgc

SEQ ID NO: 324241 - DNA, 201 bp, Homo sapiens
ggtgttgccctaaatgtatgtgtgtgcatatgggtgtatgttgatgatgacactgatacagctttagatatatttggagaaagatatatatttttaagagwgagggctcaagggtgctatcacattcttaaaggaattattactgtagtctgtgagaacattcaattttgacacgtaaaataagtttgataaaaatagttt

SEQ ID NO: 324242 - DNA, 201 bp, Homo sapiens
gagtcatatgtgctgggatccagtggagttgcttgaacatgatcataagtgctgtaggtcttataccacttccagtgagatcactcatacctcccatactygcagactaaaaggaggaaggaagaacaaaacgcaacttttccttcttccatgaaatttttgcccatcataactagtacacagcatttgctaaagcttaat

SEQ ID NO: 324243 - DNA, 201 bp, Homo sapiens
caaggtgaacatgtagaatagtgaggctttcatgagggtggatataggattcctaacatagtaatctgatttacccaatcagtctgtgtcttgtaacaacrttattttcattttcaattctgtcttttaagatctaaaacagtagatgattcaaagcacattaatacttggctttgggatatatgtttgtattattaaaat

SEQ ID NO: 324244 - DNA, 201 bp, Homo sapiens
acataatgatagcttttattaattttgctgtaatatgctaatactatctaacaacttattgtgaaaaatcagatgttcagtacagatgcaatgatgcattycttttttgaatattttttatctgaaattgattcaattcacagatgcaaaatccacagatatggaggactgactgtatgtatttagtaatatatctagcag

SEQ ID NO: 324245 - DNA, 201 bp, Homo sapiens
cctgatgggtagtttttccatactcaccctcccccagccttctaccctcaagtaggccctggtgtgtgttgaattaacgcagggacggaaaaccaaatacytcatgttctcacttacaagtgtgagctaaacattgagtaacatggacacaaagaagggaacaatataatctgcattttaatagtaaaaacatgtacgttc

SEQ ID NO: 324246 - DNA, 201 bp, Homo sapiens
tcagtttcccccatatatttcctcgttgttttcccacaatttactgcccccggcacaagctcttgtgtcttgtcacattcccataattgatcattcgttgygtaaaaggcacattaaatgtttgggtctaatggtttctttccttttttctttttaacttttaggttcagggggtacatgtgcaggtttgttactgggcaa

SEQ ID NO: 324247 - DNA, 201 bp, Homo sapiens
aagcatgttttagaaggagttagtgctcaaaatgccagctgcatttgcagagtttaatttagatgaggattgagaattggccattgatttagcatggtggycatttatttggactaaaaatggttttgttggaatgattggtctgaaattctgattcatatgggttaagaagaaaatggaaagtgagaaagtgaaggcagc

SEQ ID NO: 324248 - DNA, 201 bp, Homo sapiens
catagggaggtagctatggataacagatgaccttttaaggtgtcctgctaaatttattttgtgtgctatgtattggaaaccatataacgaaggtagtttamaataagtatacattggctttgagtcatattttcagagataaattttcacagaaaaaggatgatgtaggaattgtggtgctgtgtgggtcccatatcatgt

SEQ ID NO: 324249 - DNA, 201 bp, Homo sapiens
ggaacctattaggagaaggtcctctgctaggcatagggaggtagctatggataacagatgaccttttaaggtgtcctgctaaatttattttgtgtgctatrtattggaaaccatataacgaaggtagtttaaaataagtatacattggctttgagtcatattttcagagataaattttcacagaaaaaggatgatgtagga

SEQ ID NO: 324250 - DNA, 201 bp, Homo sapiens
atgtacttagtaaatgaatgggggagtaaagataatttattgtactttcctcaattataaaaaacaatatatgtaatttggcttttcttggtaagtcagtrttgtcattctgaatatcagtttcaaagttttattgggaaattgggaacctattaggagaaggtcctctgctaggcatagggaggtagctatggataacag

SEQ ID NO: 324251 - DNA, 201 bp, Homo sapiens
gatattttctgccttcggtataaattctctttcctggggtcacttagctcctgggcattattttaatcatggtaatatgaatggattgattaaagaattaratataaaataacatgctaaattcatattccaaaaacctacattatttcacattttagcctgtcttcagttggaatgtatcttacaatattgatgtggtag

SEQ ID NO: 324252 - DNA, 201 bp, Homo sapiens
ccctcaatagatgacatgggaacaattattattattattattattattattattgttcttgagacagagtcttgttctgttgcccaggctggagcgcagtrgtgtgaactcagatcactgcaaactccatctcttgggttcaagcaattctcctgcctcagcctcccgagtagctgggattacaggtgcccatcatcacac

SEQ ID NO: 324253 - DNA, 201 bp, Homo sapiens
caccctgttggctaggttggtctcaaactcctgacctcaggtgatctgcccgccttggcctcccaaagtgctgggattgcaggagtgagccaccacacccrgccaattattattattttttaatggccaaatgttcactagcaataaacagaaaaaaagaaaaaaacaaagggggtgaaaaacgtgactgtaaatcttgaa

SEQ ID NO: 324254 - DNA, 201 bp, Homo sapiens
agtgagccaccacacccagccaattattattattttttaatggccaaatgttcactagcaataaacagaaaaaaagaaaaaaacaaagggggtgaaaaacrtgactgtaaatcttgaaaagtgactgccaaggaaagaagctaaacattcaaagtgtgctactgcttgatcttactcatgatgctgcccacttgaaatgtt

SEQ ID NO: 324255 - DNA, 201 bp, Homo sapiens
tatacacacacacacgttcgtgtctaacacagatacagacacacaatattttttaagtctttttcctcccttaagtcaaccttttaagaacaatccttaamgcatttgggaacttttggaatgcttgctttcattcactcattcattaactcaggtagttactaagtacacattccgtactaggaattgttttagttactc

SEQ ID NO: 324256 - DNA, 201 bp, Homo sapiens
aattattattattttttaatggccaaatgttcactagcaataaacagaaaaaaagaaaaaaacaaagggggtgaaaaacgtgactgtaaatcttgaaaagygactgccaaggaaagaagctaaacattcaaagtgtgctactgcttgatcttactcatgatgctgcccacttgaaatgttcctgggaaagaagttgaatct

SEQ ID NO: 324257 - DNA, 201 bp, Homo sapiens
taaattcttctatttttctgatagataggaatacaataaagatttaaatgtcttcctgctaagcgctggaattaaggcagttatagaaagacaaaatacaytctcctgaacagtgggaatgctaatttttggcattttcttttagcttgttgaggcaagtttgctgaatgtaacatgactcatagaagtctataaaactga

SEQ ID NO: 324258 - DNA, 201 bp, Homo sapiens
ccttccttccttccttcgtcccttccttcctccctccctcactccctccctccctccctttctccgtctctccctccctgaatgtattcattatccacacractctggcttagaaggttacttatatatctaaacctctccagctccattgttaggttatagacaattgagtttgcagaatggaggtatggtttactttaa

SEQ ID NO: 324259 - DNA, 201 bp, Homo sapiens
ggctgtatcgtggggtgggtgtgtgtttgtgtgtgtgtgtatgtgttttcctggggagcagttacttagcttttaatcagattgtgcgatgagttaatacygtcctctgatagttttagtcaaactcaccattcatttctgtactattgaaaactccactacaaagtcaagatactaagagcaagcaaaactatacagtga

SEQ ID NO: 324260 - DNA, 201 bp, Homo sapiens
gaaaacaacattaatttccttgtacatctcagtcagagctcttgggtgaccagatgctttcatcaatcaggtaatatttgaaaggaatcttttttctgagmaataggtctcaagcttgggcttacaggctcagtaaaccatgctgtaaacagacatgctgtcatccaggctttgtggttacatttatagagcacaagcaga

SEQ ID NO: 324261 - DNA, 201 bp, Homo sapiens
catttgtgcatctgatacatacctggaatctctgtccaggtatgagaagttggtcattcttagccctgtatttccatagaatttacttgtgcacaacatgytatggtagtaattaagagtcagggggctgaaaccagactaactgggttcacaggcccaactccttaattactgtgtaacatctttgtgcctcagtttcct

SEQ ID NO: 324262 - DNA, 201 bp, Homo sapiens
agaactcgggacaactcagctattaaaggattaacagctggcaaatactctgtggccatcatctcatctgattggtagaaacaaaaaatatacatgttgtkaaaatatgttgggtttatgtgtacatatatcaaaacattgttttacaccttgaatatatacaatttttgttaattataactcaataaagctgaaatttta

SEQ ID NO: 324263 - DNA, 201 bp, Homo sapiens
gaagtttacaagatatttgcctaatgtgatgtggtaggaaaaactggattttaatgagaggaactcaattttaatggttgctttcccactatgtgaagttsggcaagtctcttaactggccagagctttggatttctcatctgtgaaatgaatataatagagagttcctttgaggatcaaaaaataacctacatacaaagc

SEQ ID NO: 324264 - DNA, 201 bp, Homo sapiens
tatgacattgataattgtcttcagtttgtgcttgaggaaaccaagatgtgcaacaagtaatgagcagccaaactgaagctggaccctgggcttctgagtcyaaaggtggtacttcctgtgctagaccgtgctatttttgagctacacctgtacatcattcacaggacacaggtctagtaaatgatagcctaaactaaattt

SEQ ID NO: 324265 - DNA, 201 bp, Homo sapiens
gcacatttaatgtcataaacttttgtgtctgtattctagtagaatatagtaaaatcattcaaattagtctgtatgctaaaactcagaaatgttagccttgmattaatttttcagtttaaatttaaatttataggctgggcatggtggctcatgcctgtaatcccagcactttgggaggccgaggtgggtggatcacttgag

SEQ ID NO: 324266 - DNA, 201 bp, Homo sapiens
catagtaatccaataattaacctggtagatagtgacatttgagcccctcatcctttgagcttgtcttattgctattttgcattgtacagtttctaaaaatrtatggccgaagaagcatacttgcagggattggagtttattttgtagtgtaaaaccagaaaccttttgttgaagaaatgagcacatcctagactataatag

SEQ ID NO: 324267 - DNA, 201 bp, Homo sapiens
tattagaatttttacacattcattttttactgtcaaacaatcaggtcaaattgactgtcataaatatgcactgttatgtgcgtttccatgtatctttagasgtaaagcacccaagcttgagaagtatttgtttaagtagccatattttggtgacacttggccatttctgcattaataacatgcctggatgttggaacttct

SEQ ID NO: 324268 - DNA, 201 bp, Homo sapiens
gcatagtaatccaataattaacctggtagatagtgacatttgagcccctcatcctttgagcttgtcttattgctattttgcattgtacagtttctaaaaaygtatggccgaagaagcatacttgcagggattggagtttattttgtagtgtaaaaccagaaaccttttgttgaagaaatgagcacatcctagactataata

SEQ ID NO: 324269 - DNA, 201 bp, Homo sapiens
tatttttcatctcttgagacagcaatttaagtgagccagggtctatagtaataatagccacagcagctagtaatttgagtacttttcccagtgctacatarggtgttaagcactcagtaatagattgcttcagttaatctctacacccaccctctgatgtgttacctccatttacagatgagagactgagcctccaggaag

SEQ ID NO: 324270 - DNA, 201 bp, Homo sapiens
aattaaaacccaaggaggagactgcaaaggaaaataatgaaaagacactcactcaaatgccagattctaatctaggtcctatatggcagagaaaaaaaagraatttcttatatagattgtattttaatagtgagagacaaaaattcaactgataagaacagatactacacttgatcttagccaaaaggctgagaagcaaaa

SEQ ID NO: 324271 - DNA, 201 bp, Homo sapiens
acagatcttacatgttaactctgtgaaacaaagggaaaaattcaagtttggtctttgatgaccaaagtagtatgaaattatttctcaaagtttagcaaaawcatgcatagattaaaaattaaaacccaaggaggagactgcaaaggaaaataatgaaaagacactcactcaaatgccagattctaatctaggtcctatatg

SEQ ID NO: 324272 - DNA, 201 bp, Homo sapiens
ccctgttcttcggctttctaaagcactgagtgagacctgtactgtgattttctatctagtcttaaaagagaaagaggactatacattaactatatgttacrccaagtaagttaagacttcaaataaagaaaaattatgtttctaccaccacagctaaaataatcagatttccagattttaaatatattaaagtttatgcac

SEQ ID NO: 324273 - DNA, 201 bp, Homo sapiens
ttcttacatttaaatcttttgtccatcttgagttaatttttgtatatggtgaaaggtcgaggtctactatcattcttcttcatatgactagtcaattaccyagcaccatttattaaatagggagtcctttccccattgtttatttttgttttaaagcataactgataaataaaaattatctatatttaaagtacagtgtga

SEQ ID NO: 324274 - DNA, 201 bp, Homo sapiens
acatataccacattttctttatccaatccaccattcatgggcacctacgttgattccctgcctttcctattgtaaatcgtattgtgataaacatacaagtkcatatgtcttttttttttttttcttgtaggacaatttattttcctttggatatgtagccggtagtgagattgctgggttgaatggtagttctgttttcag

SEQ ID NO: 324275 - DNA, 201 bp, Homo sapiens
ttcagttttgaaagtggaataactggaaaaaataggccttggtaaaggttcttgatacaaggaaaaggaatatcaaaatgatcataatcctttaataccayagaatggtataatatttaaaatttgatttcactgggctcaaaagtctacatgctgtgttattcaatttttatgacgttttagaaacagcaaaactgtggg

SEQ ID NO: 324276 - DNA, 201 bp, Homo sapiens
tgcaaaagatatggtttcatcttttcaatggctgtgtagcattccatggcatacatataccacattttctttatccaatccaccattcatgggcacctackttgattccctgcctttcctattgtaaatcgtattgtgataaacatacaagtgcatatgtcttttttttttttttcttgtaggacaatttattttcctttg

SEQ ID NO: 324277 - DNA, 201 bp, Homo sapiens
cctatttcaggctccagctctcagaagacatttctagacccaccctatgccttaagggaacttgcttccctgaagggaagaactcagtcctggcaggattmtttaattaatgacggaggaacacttggaccttgagtaaacatcaacagtagccaagtagcaattgccacaggcctttgatgagacccagaaccatgttgg

SEQ ID NO: 324278 - DNA, 201 bp, Homo sapiens
tgtactagatgctgaggacataattttaaacaaaacatgatccttggctttatggcacctataatctggtagggaaaatatgtcagcagataaatttatartactgtataattatataccatttgagcagtttggtcaaagctctccgtgaactcagtcttgggaaaggttgacccataagtaatgaggtgcctatgtgag

SEQ ID NO: 324279 - DNA, 201 bp, Homo sapiens
ggcattttggttgatggatgccgaaatgtatacaaacatgagtgtcctgactccttttactccagttattgatcgtggaatacagcttcataaaatgattygactcattacgcatgggcttggtggagaaggctatctcaatttcatgggtaagtgtgagttaaacacatatgcaatttgtgtttaaaatgttaacttata

SEQ ID NO: 324280 - DNA, 201 bp, Homo sapiens
aacaacaaaggcctctttcttgttcattttcgctgtagtggtcagctgtggctctcccgcaactgtcaaattcactccagaatacaggttaatggagtaaycccaatatggggagccactgatcacatgagagagagaaagagcaatgaagaaactctaggatggctctaaaaacttcagcttgtaagtaacatatgtgat

SEQ ID NO: 324281 - DNA, 201 bp, Homo sapiens
ggatcagaaagatttataattttcacaaggtcgtatttctagtcattgaataaatgtgatttaaatctagtttctctaaattcagtacagttttacatttsgtcaccagataattcatctttttgttgccctctagaaatgccattgaagtacatgaagtgtgtctcactaattttggtttttttctctatttatatttgt

SEQ ID NO: 324282 - DNA, 201 bp, Homo sapiens
ccttcaatacagtaatgctaataagtctttagcatttcaaataaaacttgtttataagtgtgtttatattcattctaccacatttatgtggaatatagaartctgattttgcacttatggacattgctgatgaagattattttttgtttgtttattttgacagccttctttttttttttttttttttttttttatataaga

SEQ ID NO: 324283 - DNA, 201 bp, Homo sapiens
tgagaatttaattagtcgtatgaatcatgtgtctgaaatacaagcttattttaagagatcaaaattagtaccaaaagttaaatttgcatggcaatttacartatgcgaatacttttacttacattaacccatcttatcctcacatcatctccagtgatactggttaggcaagcattttttgtcctcaatctacatgtgagg

SEQ ID NO: 324284 - DNA, 201 bp, Homo sapiens
caggatcccagaggaacactgatatctcaacaaagagaaggcataaaagcagactgagaaggaatgatagggaaaaaagaagacatatcctgagatttcarcaccttgaaaaccaaaatatagtatttgaaaaaagaggagatggccatccatgttgaataatgttaagcagctgaatgaaatgaggacaaataagttgcc

SEQ ID NO: 324285 - DNA, 201 bp, Homo sapiens
gcttcattcaccttcactgttaaaattcgatgtggatttcctaagaaggtttcctttttgtgtttatggcatagcaaatgatggggcgcctatgccttctytgatattatttggttcacaaaaatattatttcatttttattactaaggggaagacatgcatgcccagttttcatatttatttcaaatctgtttcagttat

SEQ ID NO: 324286 - DNA, 201 bp, Homo sapiens
tcccattggctcatgtaacaaaggtctccagaggtaataggtatttcttgttcttatatttgtaaacataaagaaatttgctctcattgcaaggatagtgkttagcttgagctctagaatattgactatctgaggttcaagttccatctctgccacttagttttgttttgaaaatagcctctttgtttcttggttattatc

SEQ ID NO: 324287 - DNA, 201 bp, Homo sapiens
cactttctaacactcttaggcagtacagtgggagtttgttgtaatttccagattcagccactaaacaggtgatccggaggcactattcttagcagtttgtrtagttggagaaagacagcaaaatcttataatggctttaagtatttcatactcctcattttcaattctgggccttattgactggcctttgctggttattgt

SEQ ID NO: 324288 - DNA, 201 bp, Homo sapiens
tctacttctaacatttttatttcccattggctcatgtaacaaaggtctccagaggtaataggtatttcttgttcttatatttgtaaacataaagaaatttrctctcattgcaaggatagtggttagcttgagctctagaatattgactatctgaggttcaagttccatctctgccacttagttttgttttgaaaatagcct

SEQ ID NO: 324289 - DNA, 201 bp, Homo sapiens
tttaaaagtatgttcatatacccagttttttccaaacaaaattaagaggtttccagtaactgacttgaataacacttttaaaatttaaattaataacttargataaaataaaatataaaattcagtttctaagttgcactagcctcagttcaagtgctctatcgcctcttgtagctactggcttctttactggaaagtaca

SEQ ID NO: 324290 - DNA, 201 bp, Homo sapiens
gttaaatatgcacctattgatccactattattcctttgttcattgttcatttttttaattcagtcatcaacatctaccttgttcagtggcaccaactgagrgttagaaataaaacgtatgacttttgcctttgtaaagctcatagtctaatgagggaaacagatggtaaacctgaaaaatcattcacaaattgtgttaagt

SEQ ID NO: 324291 - DNA, 201 bp, Homo sapiens
aggtgtgagcagtagaaataaccagggagaatgtttttgatgttctctatgtattcatttactccttttttcatgcattttacagatacttactgagtacmtatttactgaacaccttatagatacttactgagtacctatttactgaacacctctgtgacagctctgagctgattactgtaaatataggaattctcctag

SEQ ID NO: 324292 - DNA, 201 bp, Homo sapiens
gaactgaaaggctcctgcggctggagtgtagtgggtgaggatgcaagcaaggagctgagctgggataccagatgtaggcagggaggagcgagtcagggctktgcatgccatggagagaatctgaatcctagtttaagtgcagtggcaagcttattcattggtttaaattgagagttaggattccttgtattacatttcagt

SEQ ID NO: 324293 - DNA, 201 bp, Homo sapiens
aaattaattatggttattttttgtagttatgtggtatcagctgttgaataaggaaagtgtttagataatatcaaataaaattatttaattaacatataacygaatgaaatgattacactcagtacgttttattgtcacacaatgatcattttatttcaagaacattaattaaaatgaaaaattattatgtttgtatgtaaa

SEQ ID NO: 324294 - DNA, 201 bp, Homo sapiens
atatgtttttttttctatttaaaaaataaattgtattagtcatctttatacctgataccagtgtgttttaaatagagcattctatgtctaaactaaatttmtgacatggatgttatattacttttccttctggccagtagaaattacctttttcaatgagtatctcctgcctgcctacgtgagatattattcgtgtttctg

SEQ ID NO: 324295 - DNA, 201 bp, Homo sapiens
ttttatatatatataattttgaagtaaatgaatatatatatttatatatataaatatatatttatatatatatataaaaatatatataaatatatataaawatatatttatataaatatttattttgaagtacatgaatatatatatttatataaatatatatataaatattcatttacttcaaaatttatatctataccc

SEQ ID NO: 324296 - DNA, 201 bp, Homo sapiens
tttgttagtggtaacttctattgttaacacttgaagaataaaacatttttccttcatacaatctggtcttagttccttgtccaattttccatttatttctkataatccatttggactgtgtgtctttggcctaacacaaatacataaccagtcaaacacttaggtgcaaagtatgcttactaaggagtgaagaaaatttga

SEQ ID NO: 324297 - DNA, 201 bp, Homo sapiens
ctctctcttctcccctctctcctcctcctctctttccagtagtaattagaatatatttttgttgtataatccattgcaatatatggctaaactaaaggtckcagctctagactagactggttatccactgctagccgcatttactgtgtccagtttcttttctgttattacctgcctctcttggctcttagaggaaaagtt

SEQ ID NO: 324298 - DNA, 201 bp, Homo sapiens
agagccaaggagatggaaaaactgatggtggggtagctgaagagggatttatttggagagaaaacggactaatggaaaagtcttaaatagtttcatacatrtatgcttgcagaccttctttctctcccatatgaaatctttagtatgctctacatagtttatgatggctaatgtactggatttttttgggtgggggtaaat

SEQ ID NO: 324299 - DNA, 201 bp, Homo sapiens
cagtagtaattagaatatatttttgttgtataatccattgcaatatatggctaaactaaaggtcgcagctctagactagactggttatccactgctagccrcatttactgtgtccagtttcttttctgttattacctgcctctcttggctcttagaggaaaagttggatgatgtgattttgcattatttttgttatctatc

SEQ ID NO: 324300 - DNA, 201 bp, Homo sapiens
ctgatttaaagtattcatacgtattcaggcaaagggaaaatatgattaatataatgttagctgtataaatggaattttgcattatcaatgcaattatatgraacttcagtgctctatatttaatacatattagacttcattacagcattcatttatgcctacagatcatgcattaatgtaaaagttactccttaattccca

SEQ ID NO: 324301 - DNA, 201 bp, Homo sapiens
aatgggacgtttgaaaatactttaagaaacttcctaaaaatgattattttttaaacttaaactttacataaatctaaaaatttatcataaggtatgatacsaacattgaaagtaaaattactaccacatttgtttatcctcccaacgttatacctttttggaaaatcagtagttttccttgtattatgagggtgtatgtgt

SEQ ID NO: 324302 - DNA, 201 bp, Homo sapiens
atagaacatttctttgcagccatgtcgacattcatgggttgaatatatataaggagtcagatatatatacaaataatcatagctttctgatgagccctttrtttcagacatgaactggtgccatgagaccacagttgtagaagggcttaattttgggtagaaaaactgtagcgcctactcttaaggaagtggttactataa

SEQ ID NO: 324303 - DNA, 201 bp, Homo sapiens
gatttaaattattttctaacttgatggttttaaatttgcttaatatttgatattaagcaaatttgagttgtatccaggtatcatgtcacatgctgtttggrtatttaaagtatctagtactgcgatggtgaaacaattgctgcacaatcggctgtttcctctaaatgtgatgtaatcttctttttgctgtgttcttcattg

SEQ ID NO: 324304 - DNA, 201 bp, Homo sapiens
agattgtgcgatgagttaataccgtcctctgatagttttagtcaaactcaccattcatttctgtactattgaaaactccactacaaagtcaagatactaasagcaagcaaaactatacagtgaaaatgaatttgttgttttcacctcattaatctacccaaggcagttggtaaagatagcaagcagcaacagcgtgacctc

SEQ ID NO: 324305 - DNA, 201 bp, Homo sapiens
ttgatcaagcagaagaattagtgagcttgaagacaaggtatgtgaaaatgcatagaaaagacaaaaaacaaaaaagaatgaagcatgcctacaggatctasaaaatagcctcaaaaaagcaaatctaaaagtgattggccttaaagaggatggagagagagagagagagagactgattcattcaggtagaaagtttattca

SEQ ID NO: 324306 - DNA, 201 bp, Homo sapiens
atcagatgattatgctcttatataaaccatatgaggagcagccttgtgaaattgttttcagaatttacagtatatgctttcagagaaacttagtgcataaycgtcataggtttaaggttggatttgatttagaaatagtcagaaaaaatttagaacaaaagatagtgattaaaggtagtggttagattttttttttgatgt

SEQ ID NO: 324307 - DNA, 201 bp, Homo sapiens
ttacattcattgatttattatacaattaaattttagctcttataactattaaatagctttgagtcctagggaaaattaatcaacctctgtgaacttatttyttcatccataaaagttggatagaatccactttgtagggtgtcttgaggactaagaatacatgtgaagatgctcagtaaacaaataatagtttgatgataa

SEQ ID NO: 324308 - DNA, 201 bp, Homo sapiens
cacgagatctgataattcagattagcttggcctgatggtaattattaaatgtattttgaggataagagactactcacttaagtcatggttgttattaatawttttttcttttacataaacacaatatttccccatcttctctaagtgactgccttgactttttgttactagaccatttagaaatctgcctataatcaaggc

SEQ ID NO: 324309 - DNA, 201 bp, Homo sapiens
ttatttttaaataataaattttaaagtaatattatagatcctttcataatttacttaatattttgtctttgtatgtttatagtaggaaaaaatagaaaaayagagataaaagcaaagaaaaatcattaaccccattatcaagagaccatagttacattctgatatacagtgtatcagataacttttctatatattagtata

SEQ ID NO: 324310 - DNA, 201 bp, Homo sapiens
taaatgaggaagcagaaattctgagattgttaagtgaaaattgaaggtcagttgctaatgggactagcaatatataactcagtcttttatttgtgaatctrttctttcttgtgtagtaccatgcctggcacatagtaggtggtatataccaattagtcttagagtaattccatatatgaaacaactcatttaatagctagt

SEQ ID NO: 324311 - DNA, 201 bp, Homo sapiens
tttgaaggaggctgacatttgagaattttatgtgaggattagtacatttgaaaaggaaaggttgttgggtatgagataaacatagagtttgtgtgcctgayacagtgaccttagttaatgtttgatcacctttgccgaatgtgtgtttgcagttcatattaaactgtgcatcacactgtttcttttccatatctcgattta

SEQ ID NO: 324312 - DNA, 201 bp, Homo sapiens
attttgaagaacattggagaaaatgaaggtggtattgataagttttccagaggctatgaatcatttggcgtccacagatgtgctgatggtggtttatactscaaagaatgggccccgggagcagaaggagtttttcttactggagattttagtaagtacttgaaagcattgaactaaatagtaatatcttattaactattt

SEQ ID NO: 324313 - DNA, 201 bp, Homo sapiens
acatcgtgtaaccttttagggttaacagagttaatagaagctgaacattttcttttactaaggtcatagactctcttctcctccagccttagaaattgtcsttgattttatgttactcctcgtgggatgatttgtgatatagaatgtccagttacctgctgaaattgtcactcatttggagcccacgttttagtcagaaaa

SEQ ID NO: 324314 - DNA, 201 bp, Homo sapiens
aacgtggtgaaaccctgtctctactaaaaataaaaaaattagctgggcatggtggcgggtgcttgtaatcccggctgcttgggaggctggggcaggagaaytgcttgaacctgggaggtggaggttgcagtgagctgagatcatgccattgcatgatcaaaccaaaaaacaaacaaacaaacagaagacaacaacaaaaat

SEQ ID NO: 324315 - DNA, 201 bp, Homo sapiens
ctgttttttgaggatcgtgtttgattgcatattttttttggtaatattttatgtgtttatttttaaaccaaaactgttggactgaaagtttgaggtatatktccagagaatctgtaattgatttaaatgatacatgagaccttttttgtcaagctgatctgagctagaaaaaatctcttagaatagctgcatttagagttt

SEQ ID NO: 324316 - DNA, 201 bp, Homo sapiens
tagtacctagatttttatattccaagcttttattattattttttctctaattatggactaaactctttgttttggtaatggaatgtcacagcatgtatagrtgagatgtatttgaggtttttaggtgaagaggagtatagcagcaccaaacttgtagagctgcccttgaagataaactgctgttagacattttcaggttgt

SEQ ID NO: 324317 - DNA, 201 bp, Homo sapiens
gccctataattttagttaatagcaaacatttataacagttaaggaaaatgctcttcacattttgcttaaatacatatttctcttatattttagctgggaarttttaagattccttctgtcaaacataagatggtggttggaagaatatcgctttgatggatttcgttttgatggtgttacgtccatgctttatcatcacca

SEQ ID NO: 324318 - DNA, 201 bp, Homo sapiens
cataacagaggtaattagacccaaagaaattctgacttagcctaagatagggactctgcaattattgaccagtgacttttttatatttgaagataaataartagatgatatgttaagtgtaaacatggagatatgccacatacttaacagtggctaagtaggtggtcatgtttgccctaagttacttggcatggctagtcc

SEQ ID NO: 324319 - DNA, 201 bp, Homo sapiens
tctgtgtctagctcagggattgtaaacgcaccaatcagcgccctgtcaaaacagaccacctggctctctgtaaaatggaccaatcagcaggatgtgggtgyggccagatgagagaataaaagcaggctgtgagccagcagtggcaacccattggggtcccttcccacactgtggaagcttcgtttctttgctctttgcaat

SEQ ID NO: 324320 - DNA, 201 bp, Homo sapiens
acattgaggtaggttttgaaatatctttttatagtatcaagattttcaagagattctagggaatatagatggggaggtggagggctaaactaaaattagarctctagttataatatatattatatattatatataaaaaactatatattatatataatctatataatatgtataatactctatattatgtagagtataata

SEQ ID NO: 324321 - DNA, 201 bp, Homo sapiens
ttttgcattaatggaaagatctggctgaaaatacaatgataaatattaaggttttagacacttaatattttatggcatcaaagatgtttttatatagacgktattgttaattgttatttgttaatgacattgtggtttaattttattttggtttttagttaaggctcaattataacccaggaaatactaaaaatttgaata

SEQ ID NO: 324322 - DNA, 201 bp, Homo sapiens
aatctccaagtaagtgctatataataatacttcatttttcaaatgtattagaccttgaaacacttcaaatgcacatagaagagatttttttttttttttttttaatgagtctgaacatggcttatggggttttgaaggatctggctctagtctcatcttgacatcctttttctcttgcttactacgctctagccactccag

SEQ ID NO: 324323 - DNA, 201 bp, Homo sapiens
gaatctccaagtaagtgctatataataatacttcatttttcaaatgtattagaccttgaaacacttcaaatgcacatagaagagatttttttttttttttttttaatgagtctgaacatggcttatggggttttgaaggatctggctctagtctcatcttgacatcctttttctcttgcttactacgctctagccactcca

SEQ ID NO: 324324 - DNA, 201 bp, Homo sapiens
ttgcaccactgcccactgcattccagcctgggtgacaaagtgaaaataacaagaacaacaacaacaacaaatatatatgttttatatatatatatatatawgtaaaatatataattttcttataacagttcttggcatattataagaattagtattgtttcttataactgccatggtttattctaaaattagacttctcag

SEQ ID NO: 324325 - DNA, 201 bp, Homo sapiens
attgcaccactgcccactgcattccagcctgggtgacaaagtgaaaataacaagaacaacaacaacaacaaatatatatgttttatatatatatatatatatgtaaaatatataattttcttataacagttcttggcatattataagaattagtattgtttcttataactgccatggtttattctaaaattagacttctca

SEQ ID NO: 324326 - DNA, 201 bp, Homo sapiens
ttatttaaatcttatttcttactcctgttttacccccggtattcagactggctgagagagaagagtgaaatatgtaatggaagaaaaaatggcataaaatkagtttcctgattattcctttattatgtccttagttgagaatgtaatgtcttagcgacccagtatatgccacaaggctgcttgattttttgttaatgccat

SEQ ID NO: 324327 - DNA, 201 bp, Homo sapiens
tgactcataggatcacaaggtgaattcccacaataggtcatctgcaagttgaagagccagggagctagtctgagtccccaaacctcaaaagtagggaagcmgatagtgcagccttcagtctgtggtgaaaggcccaagagtccaaaagctgaagaacttggaatttgatattcgaggacaggaagcgtccagtacaggaga

SEQ ID NO: 324328 - DNA, 201 bp, Homo sapiens
agttacagtgaggtatgattgcaccactgcccactgcattccagcctgggtgacaaagtgaaaataacaagaacaacaacaacaacaaatatatatgttttatatatatatatatatatgtaaaatatataattttcttataacagttcttggcatattataagaattagtattgtttcttataactgccatggtttattc

SEQ ID NO: 324329 - DNA, 201 bp, Homo sapiens
attcaccactttttaaaaatatacttgatcaggtagtgtcataccagaattcctggcttaactctatacataattttatattctgtagtttaagcattccrgaccaaagaagccacggagtctaagaatttatgaatctcatgtgggaatttcttcccatgaaggaaaagtagcttcttataaacattttacatgcaatgt

SEQ ID NO: 324330 - DNA, 201 bp, Homo sapiens
aaatttagttatcctgggattaagatgaaataaataatttagtaacatactctgttgctatatatatatatatatatatatatatatatatatatatatawgcaattgttctttctcctttatattttaaagggtaggctatttgcttaaatgatgggtagaatatataaatatatggtgaaacagactgttcaattgagt

SEQ ID NO: 324331 - DNA, 201 bp, Homo sapiens
atcttctctaattcagtaaatgacattttcatcttctagttgttcaagccaaaaatcttggcattatactggacttgtccctttctgttcctccctacackctagctattaaaaaatctagccatctgtaacttcaaaatatatcccaaatctggctgcttcaactgcccccactgccaccacccatgtccaacttgcaat

SEQ ID NO: 324332 - DNA, 201 bp, Homo sapiens
tcttggtttttattagttccattacatatgctttctctgtagtaatttattatcccattttggcaaaaggtagattataagtacattttataagtaaacaraaggtaatcatttcctttgaaatatatctgctgaatatgctataattcgtgtgtagcttaaaatttttttgaggaaaccatttattgtaacactctcagg

SEQ ID NO: 324333 - DNA, 201 bp, Homo sapiens
cactgtgcagacatcaaaataacagtaaaaggatactaggaataactctacatacatacatttggtaatttagatgaaatggatctatttctaaaaaaackctaccacaacttaccaaatctgaaatactataattaccctgtaactattaataaaatttaatttgtaacttaaaagcatgtaacataggaaaacctacat

SEQ ID NO: 324334 - DNA, 201 bp, Homo sapiens
tatagaagttagtttttgtgttgtctatgtttttgaggttaaagaaaacagaatactaaattgctatatactaatctataagggatactggttttttttttaaactacaatttctgattgatcagagactctttagtgcagtatttctcagggtttgaattaggatcaatgtccttagaaacacggaatggggaagaccat

SEQ ID NO: 324335 - DNA, 201 bp, Homo sapiens
ggccgaggtgggcggataactagctcaggagtttgagatcaacctggccaatatggtgaaaccccatctctactaaaaatacaaaaaaaaaaaaaaaaaaattagccgggcgtggtggcatgcacctgtagtcccagctacttgggaggctgagacagaagaatcccttgaacctgggaggtggaggttgcagtgaggcga

SEQ ID NO: 324336 - DNA, 201 bp, Homo sapiens
ttattatgtccttagttgagaatgtaatgtcttagcgacccagtatatgccacaaggctgcttgattttttgttaatgccatgaaatattttaggcataarcaaatagtaaataatgtaataaacatctatgtgtatacaactcactttaacaaaaaataatacagatattattgaagcttcttgtgttccctttcttcta

SEQ ID NO: 324337 - DNA, 201 bp, Homo sapiens
tagcagattgtttgcctactccaggtaggtacatacaatatagaaatgttttctattgttgctgtttaacattaatttttaagaatttcactaaattcatkgtgtgtgtactctctcactggtacttaatgttcttaattggatttatttttgttgtacaggggattttaccttgttttgtatagcacatgtatttgtggt

SEQ ID NO: 324338 - DNA, 201 bp, Homo sapiens
atgtattgaaatacctgttcatgtggaaatattatttactcagccatatttctgttatgagaattatcagagagttatgtctgaaatagccattttttttwaaaaaaaatacacctttcattataaaataatgccattgtaattagaaaatttaaaaaggcacacaaaattcaaaataaaaaaactatatttgaaaaatgt

SEQ ID NO: 324339 - DNA, 201 bp, Homo sapiens
ttcaaaatgttggggcgttttaggcccagctgctctcaggtttggacatatctgtactatttgtcttcgtagtgctggcaggtttttttttttttttttttgacacattcaagttttctatttttgccatttaattttccaggctctgtcatttccttaccattctttaagccttcaatccaggttctgcctccagctttg

SEQ ID NO: 324340 - DNA, 201 bp, Homo sapiens
ctttgcctggagtagttccctggtatccatctcctgtttattttctggtcctcagtgtaaaagccccttctccttatcttcgctggtctaaaatcagttcstcaggaacgcttgctcaaggcttcctctttttatcctttacttacttataatctgtagttaaaagttgcaattgtatttgtgttttatattctgaaatac

SEQ ID NO: 324341 - DNA, 201 bp, Homo sapiens
ctttaaatctgttgtttttataggtaatgatatttaaaataatacaacagtatatttaacacctgcttcaatgactaggcaggaggataaagcacatgtarttatgctgcttctgctagagagtccaaattttggctagaagaaaggtttgtaaggcatggttaaagttttcagttatgtatggattatctgtgatggtaa

SEQ ID NO: 324342 - DNA, 201 bp, Homo sapiens
ttgacatttgctactgataataggagccctttggagccccttgattgaaggtgagactgatttcccttgagaaaggacatgaaatactaccacaaatgtayactttaaatcttccaaggctttcctaaagggacttgctgtttactgggaaaaagcccagacttttgaaaattaataaaaatgggtcctggattaatccct

SEQ ID NO: 324343 - DNA, 201 bp, Homo sapiens
gtgtaagctcatcatctatatagtatgccctctggtcacaggccctgttgtgtcatgtaacacagcaattgacaaaggataagttaagtctgttgatggcrttggaaacactgtaggcaacaaagacaaatctacacccagaataagtatttcttcttgggaggacacaaatattccccttccttcatgtggggtatccag

SEQ ID NO: 324344 - DNA, 201 bp, Homo sapiens
caggaaattaggaagtgtgatacatgaaaggtgttcagtgatcaaatgcacttggaaaaccccaaattaaatcaaattcagcacatttctttagaatcaamattcttggaatctaattagctaatatacattttgaatctccaagtaagtgctatataataatacttcatttttcaaatgtattagaccttgaaacacttc

SEQ ID NO: 324345 - DNA, 201 bp, Homo sapiens
taccttaaccaatacagatatagtgataatagcttgagctagtgagtggatgaaattagaatagatgtgctttggcattcaggctctgctgtttccgagcrtgagctgctccttactgagcagtgccggcattgttttgttgtttactttattgaaatcttaccgcccctaaactagcatcaacatgtagtactatttatt

SEQ ID NO: 324346 - DNA, 201 bp, Homo sapiens
agctttatcaacattttatgaggattaaataatgggataatccatgtaaagactggctggcaagaagtacgtgctctgtaaatattattaattgtgattargagatacggaaaataaaatgacccaaggaattacattccagggtatggaatttttttagaatttttctttagatttatttctgcaagtaattacattcat

SEQ ID NO: 324347 - DNA, 201 bp, Homo sapiens
catagagtttgtgtgcctgatacagtgaccttagttaatgtttgatcacctttgccgaatgtgtgtttgcagttcatattaaactgtgcatcacactgtttcttttccatatctcgatttaaattttgtcagcttgttttgagtctgtggacaaatagaatcttatgccttatcagatatgatgaatttaaacctgttaat

SEQ ID NO: 324348 - DNA, 201 bp, Homo sapiens
atcccttaacgtttctagctgtgcaggtaggaggaaagtgaaatggcacaatacatttattatatgcagtcctctcctgtacctcctcactccaacccttstgagattccagaggacatacccatgattaagaattgagaaatgtcttggtgaggggagcagacctgtatggtatctctcagctgggaaatcttactggga

SEQ ID NO: 324349 - DNA, 201 bp, Homo sapiens
tgtcattatccttagatcctaaataatgtttatttttggtcaattatagatggcatgaattgtgtgaaattggagaaattttcttttttttttttttttttgagacggagtctcgctctgtccccaggctggagtgcagtggcgtgatctcagctcactgcaagctccgcctcccgggttcacgccattctcctgcctcag

SEQ ID NO: 324350 - DNA, 201 bp, Homo sapiens
agatgaacatcttacaagaaggatcttgtttcacgtaactgaattattagcacacaataaatatgtttatcctgcaataagtatgttgggtatttttgtcraataattgccctgattgaggaacataaaatactcactttaaagtctcgagtggttaaccttcatttggcagccttaatatatgaataattttgtatattt

SEQ ID NO: 324351 - DNA, 201 bp, Homo sapiens
atatatataggtggttgtgtgtgtgtgtttgtgtgtttcaaaaatctgtcagggttcttgatattagaagactatatgaaagatccagaatttaaattcartagcttctttctcatctacccctgctttccttcccttaagtaacagtacttattgagtctcttctgtgtgccaaatactgtgttaagtaagtcttggaaa

SEQ ID NO: 324352 - DNA, 201 bp, Homo sapiens
gggttgtcttggttattgatgctcttaccaaattcaatattttgctgtgttggtcatttccttatttgccctatgatcctttcactcatccttctctgccrtactctccacatttccaagccgagctcccttggcttctgcttctgttgagttggtttagtgggtagcactagtggaagactggagagtagaaggaggcgg

SEQ ID NO: 324353 - DNA, 201 bp, Homo sapiens; identical to SEQ ID NO: 68255

SEQ ID NO: 324354 - DNA, 201 bp, Homo sapiens
gccagagacccccctctcattagggactcctgaaaaaatgacttagccatcttacttgcttgtaaatcagtggcggaatcgcttcagatgtattatttagygatcaggaagctgaaaataataccacactttttttcagcaagaaggaatgaccttcaatattgatgtcattgtcttttaacaaccatggacacataagtg

SEQ ID NO: 324355 - DNA, 201 bp, Homo sapiens
acttatttgaaagatattgtggaattagaattgataatacttagcacatattttcctaaagttgtcttaatatcttttgttacatctgggtccctgtaccwatctttgaaacccatttttaaattacttttatttatttgattaattattggatacttattgtctagagtagaaaggaccccctgtcaaaaagcttgatat

SEQ ID NO: 324356 - DNA, 201 bp, Homo sapiens
cctaatgggattatttttactgaaaagcatctttaccttctgggattttaggagattgctgttagagaccttgtcgtgttgtaagatatatatatatatayacacatatatatatataaaactaatatatatataaaattatatatataatatataacacctaatatattatacctaatagatatcatacctaatataata

SEQ ID NO: 324357 - DNA, 201 bp, Homo sapiens
cactgttggtgggactgtaactagttcaaccattgtgaaagtcagtgtggtgattcctcagggatttagaactagaaataccatttgacccagccatcccrttactgggtatatacccaaaggactataaatcatgctgctataaagacatatgcacacgtatgtttattgcagcactattcacaatagcaaagacttgga

SEQ ID NO: 324358 - DNA, 201 bp, Homo sapiens; identical to SEQ ID NO: 68256

SEQ ID NO: 324359 - DNA, 201 bp, Homo sapiens
gcaacttgatgagatagatagatagatagatagatgatatatatttgatacctaagttgtttttgtttttaaattgtaattaaataaaacagtaaatgtcktcttttttagggtggctaaaatatgcaatatcagcagtaagcattggactgaacatggttctttttaaccatgattttaatactcatttgttttaattat

SEQ ID NO: 324360 - DNA, 201 bp, Homo sapiens
ctgactggtttgctctaggtactaactagattgtgaatgtgagaaattttgtaccttaatcagtgctacagaaatgttaattggcagtattaaaaaaaaaaccctcttatttgcaaaggtctttttatttatttcagaaaattactgttaatttcaaaaggcatttgaaccttgcaaaagtaaaatagtctgttttgccaa

SEQ ID NO: 324361 - DNA, 201 bp, Homo sapiens
caacctacgtgaaaatatactcttagataactgaactaaccatgccttaacacacacacacacacacacacacacacacacacacacacacactctctctmtctctctctctctctctccagggattctgtattttatttttcccttattaacataaaatccgttttttcctaataatagttgagcaaaaagaaagatttt

SEQ ID NO: 324362 - DNA, 201 bp, Homo sapiens
acaacctacgtgaaaatatactcttagataactgaactaaccatgccttaacacacacacacacacacacacacacacacacacacacacacactctctcwctctctctctctctctctccagggattctgtattttatttttcccttattaacataaaatccgttttttcctaataatagttgagcaaaaagaaagattt

SEQ ID NO: 324363 - DNA, 201 bp, Homo sapiens; identical to SEQ ID NO: 68259

SEQ ID NO: 324364 - DNA, 201 bp, Homo sapiens
tgagctgagatcacaccactgcactccagcctggtgacatagcaagactccatgtaaaaaaaaaaagaaagaaagaaaaggaaggaaggaaggaaaggaaraaagggagaaagggagaaagggagaaagggagaatgggagaaggggaaggaagaaagaaaaagaaagaaaggaaggaaggaagagaaaaggaaagaaaga

SEQ ID NO: 324365 - DNA, 201 bp, Homo sapiens
gtgcttgatacaaggtatcagccaagaagaatgaaactaatatctttgtttataagtgtatttacaaatatagttgtatagttacatgaactgccattaamaatgagcttatataaaccttaagaaaattataaagcttatatgaattggactttgagagcagaataagaatatttactatgtatgttacagaactgtaac

SEQ ID NO: 324366 - DNA, 201 bp, Homo sapiens
gtgagctgagatcacaccactgcactccagcctggtgacatagcaagactccatgtaaaaaaaaaaagaaagaaagaaaaggaaggaaggaaggaaaggaagaaagggagaaagggagaaagggagaaagggagaatgggagaaggggaaggaagaaagaaaaagaaagaaaggaaggaaggaagagaaaaggaaagaaag

SEQ ID NO: 324367 - DNA, 201 bp, Homo sapiens
tgttagatatctgattaggtattagagatttgaatagattatatgtatgcaagtatgagattatatatgtgtatataagtacatatatatttacttgtgtrtatatatatatatatatatatacacacacacacacacgtgtgtgtgcccatgcacataccctagagcctaaacattttttgaatgagttaataagtgggt

SEQ ID NO: 324368 - DNA, 201 bp, Homo sapiens
gtaatggaggagatgtaataaattgagacatgcacacaatgcagaggaccactgtacttgccaaactgtacctgtgctttcagacctattctgtttcatcrgagttaggttattggctgtaaaatcaatgggtttgtgtatataagatatatatatatatatatatacacacacacacatacacacacacacacagtgtgt

SEQ ID NO: 324369 - DNA, 201 bp, Homo sapiens
cactgctctagggattgtaagggatgtgaagtttcattcttgagcttgtatatagtagtgaatgaggcctctgtaaaataatcaccttgagctgtccctcrcttaatcagatgattatgctcttatataaaccatatgaggagcagccttgtgaaattgttttcagaatttacagtatatgctttcagagaaacttagtgc

SEQ ID NO: 324370 - DNA, 201 bp, Homo sapiens
tgacaacctacgtgaaaatatactcttagataactgaactaaccatgccttaacacacacacacacacacacacacacacacacacacacacacactctcwctctctctctctctctctctccagggattctgtattttatttttcccttattaacataaaatccgttttttcctaataatagttgagcaaaaagaaagat

SEQ ID NO: 324371 - DNA, 201 bp, Homo sapiens
gatgacaacctacgtgaaaatatactcttagataactgaactaaccatgccttaacacacacacacacacacacacacacacacacacacacacacactcwctctctctctctctctctctctccagggattctgtattttatttttcccttattaacataaaatccgttttttcctaataatagttgagcaaaaagaaag

SEQ ID NO: 324372 - DNA, 201 bp, Homo sapiens
gtgatgacaacctacgtgaaaatatactcttagataactgaactaaccatgccttaacacacacacacacacacacacacacacacacacacacacacacwctctctctctctctctctctctctccagggattctgtattttatttttcccttattaacataaaatccgttttttcctaataatagttgagcaaaaagaa

SEQ ID NO: 324373 - DNA, 201 bp, Homo sapiens
cttggagcattttttaaccattaagtgccacaatgggaatatattgcagtgcatatgttacaaacctggaactttgttatggcatcctttaaaaaaaaaaaccctctcggatgggtgtggtggctcacacctgtaatcccagcctgccgaggcaggcagaacagctgaggtcgggagttcgagaccagccttaccaacatg

SEQ ID NO: 324374 - DNA, 201 bp, Homo sapiens
ttgtgatgacaacctacgtgaaaatatactcttagataactgaactaaccatgccttaacacacacacacacacacacacacacacacacacacacacacwctctctctctctctctctctctctctccagggattctgtattttatttttcccttattaacataaaatccgttttttcctaataatagttgagcaaaaag

SEQ ID NO: 324375 - DNA, 201 bp, Homo sapiens
ttataacagttctttatatctatacaaaatgctagttcctgtagtagtttcattttatgttcttggttaccagaaatttgacctagtttttaaatatcctstaaatccatagcaaaatattaggagagatgactgtagtaggagagggcacaggcatgatgagcttgctgtatcctcaggcattttcctttttgagccaca

SEQ ID NO: 324376 - DNA, 201 bp, Homo sapiens
taccagaattatatgtgtatgtgctatttctaaacttaacaatttctaagggaattttttaaattgccctttaaagtattaaatattttttcattttaaasttttctttttttaaatgtttgacactgtgttttcaaaaactgtgtaattaaattttgcaagtcaattattagtcctagaggaaaatacagtcctagagga

SEQ ID NO: 324377 - DNA, 201 bp, Homo sapiens
tattgtgatgacaacctacgtgaaaatatactcttagataactgaactaaccatgccttaacacacacacacacacacacacacacacacacacacacacacactctctctctctctctctctctctctccagggattctgtattttatttttcccttattaacataaaatccgttttttcctaataatagttgagcaaaa

SEQ ID NO: 324378 - DNA, 201 bp, Homo sapiens
gtggcgtgatcttgactcactgcaacctctgcctcccaggttcaagcagttttcctgcctcagcctcccgaatagctgggattacagccgcacaccaccasgcccagctaatttttgtatttttagtagagacgaggtttcatcatgttggccaggctggtctcaaactcctgacctcaggtgatccacctgcctcggcct

SEQ ID NO: 324379 - DNA, 201 bp, Homo sapiens
ttattgtgatgacaacctacgtgaaaatatactcttagataactgaactaaccatgccttaacacacacacacacacacacacacacacacacacacacacacactctctctctctctctctctctctctccagggattctgtattttatttttcccttattaacataaaatccgttttttcctaataatagttgagcaaa

SEQ ID NO: 324380 - DNA, 201 bp, Homo sapiens
actttttttctgaggcttttgaacataatgggcgtccctattctcttttggtaagtaagtttctcaacatatttcctgctattttaatttactcttttatyatagtaatgtttttgttcaaataaacaactcttcaaataagcaacatggaaaaaaagcatgaaggaaaggggttagggagaggggactacgcttggccag

SEQ ID NO: 324381 - DNA, 201 bp, Homo sapiens
tttattgtgatgacaacctacgtgaaaatatactcttagataactgaactaaccatgccttaacacacacacacacacacacacacacacacacacacacmcacactctctctctctctctctctctctctccagggattctgtattttatttttcccttattaacataaaatccgttttttcctaataatagttgagcaa

SEQ ID NO: 324382 - DNA, 201 bp, Homo sapiens
ctataacattgaaaataacgattaaatattatttaattctgtgtcagagaaataattttgttgagaacattctcctttattaagagaaaaaaaaaaaaaaagcattccaggcatggtagctcattaatcccagcactttaagaggccgaggtgggcagattgcttgggctcaagagttcgagaccagcctgggcaacatgg

SEQ ID NO: 324383 - DNA, 201 bp, Homo sapiens
gcttactaatttttcaataccattatatggtattgaaatgacaaatattttaaattgatgtatcttagagggcactaaaatgaaacattaaatatacatgwtgaaaaatacttttaaagtagaatcctaaacatatacattaagaaatataatttgtgtgttgaaaattattttcaggagaatctactaacttgtgcctgt

SEQ ID NO: 324384 - DNA, 201 bp, Homo sapiens
tggagcactttttagaactgagttccatgtggtgggctctgagagggagggtaagaaatgaggagaaagcgcggccagatagaggcatttcagccagatcwgctctgtttttatatgctttgcatagttttagtgttggagttctccataaaatctattttgagataattgaatggtttctactcctgcaagtaaataggt

SEQ ID NO: 324385 - DNA, 201 bp, Homo sapiens
tactctgggtgactatattgaaaatagattgtaggaggcaaggatgtaaacaggacgactagttatggctattatgtgatccaaatgagagatgatggtgrcttgaatcagtatcttaggagtgatggtaagaaattataaaattgaattcattctgattctgttatgaaagctgagtcaaaagcacttcctggtggattg

SEQ ID NO: 324386 - DNA, 201 bp, Homo sapiens
tttaaaataagtatacattggctttgagtcatattttcagagataaattttcacagaaaaaggatgatgtaggaattgtggtgctgtgtgggtcccatatyatgtatgtacatatgtgtgcatctgtgtgtatgtgtgtgcacatgagagagagtgagggagtacccaagtgagagaatgtgtaaaacaaacaaatcagtt

SEQ ID NO: 324387 - DNA, 201 bp, Homo sapiens
aacacattagggcttaattctcttagtgaaccctgattgatcaaggcaggcataccctgttattaagatgataattcccagagttgatgaggttatgggtrgttgaatatcctcatatccagctgattggagtatgaatggaaactacctatccagaaagtagtttgttaatctgtattcagaaccataagtgtattaaac

SEQ ID NO: 324388 - DNA, 201 bp, Homo sapiens
tcctgtctgggggtgatgggagacagtgacagatcatcaggcattagattctcatgggaacacgcaacttagatcccttgcatgtgcagttcacagtaggkttctatgtgaaccctgttagattctgctatgggaatctaatgccaccgctgatctgacaggaggtggagctcaggcagtaatgcaagcaatggggagtgg

SEQ ID NO: 324389 - DNA, 201 bp, Homo sapiens
tagtcccagctacttaggaggctgaggaagaagaatcgcttggaccggggaggaggaggttgcagtgagccaagatcgcgccactgtattccagcctgggygacagagccaaaaaaaaaaaaatacatatatatatatatatatatatatacgtatatatatatatatatatatatatacacacacacacatatatatata

SEQ ID NO: 324390 - DNA, 201 bp, Homo sapiens
aatcaccacactgtcttccacaatgttcaaactaatttattggtaggaatatatctttcctactaatggtgtttaagtgttccttcttctccacaatctcrccagcatctgttattttttgactttttaataatagcccttctgcctggtgtgagatggtgtctctttgtagttttgcattcctctagggatcagtgatgt

SEQ ID NO: 324391 - DNA, 201 bp, Homo sapiens
tagaaagtaccataatgtaaatactgttttagaaataaagacacatacttttatttaaaaccacagttttttgataataaaactattttctcccataaatsccttaaataacaatttagtaagtgaagctctaggtcttagtcatatgctgcatgacattttggttgatgagggactgcgtgtacaaaggtggtcccatag

SEQ ID NO: 324392 - DNA, 201 bp, Homo sapiens
tcaggtgactgctgtctgctttaatagccctagacctttctggatgttccaatttcacttggattcggcccagattaacagctgtttctaacttcgttgtyccatgaatcttgctaaagtgaggtgactcattatgacttgcattatttttgagttggtctttgcctgtaagagaggggggttggaaagattgattctctg

SEQ ID NO: 324393 - DNA, 201 bp, Homo sapiens
gtaggtatttaattttcaggtaggattgtcaccaaaagctctctcagtatttctcataaacttgagaagtaccttcttttttataaaaaaaaaaaaaaaaagacaaaccctaaaatttaaaaaaagactctagtcctcaaagagttctatgtactgtatgattaaactttaatgtaaaaatttttaaatagcaaattctag

SEQ ID NO: 324394 - DNA, 201 bp, Homo sapiens
aaaatctacctttattccagacttaagactgcaaattaaaatacgctggactccaagaatgccacttagtcacaatgtaaacaaaaacattaatatgccaycccaaaagtttctatcaagagaaactagacaagcataagagtatcagaatcctttctacattcttggaggttcctaaatgttgctccaagactatacagc

SEQ ID NO: 324395 - DNA, 201 bp, Homo sapiens
ttttgcagtacttcctttggctttccaacctgatttcgttgctctcaccaccttagtttattttacctaatgggttgttcactttcaatggagtatatgtrcaatggaggtttacttaaccaatctctgtttactagacatagtgaacttacttttgcttaacagatttcattgtaaatgccgctgactgattcccacaga

SEQ ID NO: 324396 - DNA, 201 bp, Homo sapiens
gcattttggttgatggatgccgaaatgtatacaaacatgagtgtcctgactccttttactccagttattgatcgtggaatacagcttcataaaatgattcractcattacgcatgggcttggtggagaaggctatctcaatttcatgggtaagtgtgagttaaacacatatgcaatttgtgtttaaaatgttaacttataa

SEQ ID NO: 324397 - DNA, 201 bp, Homo sapiens
ttataatagctaacataattttataacaattgtatgctttcttgaggtattaaaatcagggctgcaccttcattaccactgcttagaagaacaaaatgttmattttctaccctccctgcttcctgcatttgggtcatagaagtgctctgaatttaccctgtaaattgttcaacaatgttgagtgttttgcgggatgtggtt

SEQ ID NO: 324398 - DNA, 201 bp, Homo sapiens
gcccaagtgcaaaccaaactctttagcacattggaatcttcctgaaaaatggaaggccctacatactaaattggaaccttttcagccatgtttaaggaaamtttatattaaactcaaaaacgctgcagaaatgaagtggctaagtgctgatgaagagtagtgctccactgtgaatcaaagagtttgggaatgtttgaagga

SEQ ID NO: 324399 - DNA, 201 bp, Homo sapiens
aaatcgtattgtgataaacatacaagtgcatatgtcttttttttttttttcttgtaggacaatttattttcctttggatatgtagccggtagtgagattgytgggttgaatggtagttctgttttcagttatttgagacatttacaagctgctttacacgggagctgaactaatttacttcccaccaacagtatataagtg

SEQ ID NO: 324400 - DNA, 201 bp, Homo sapiens
tcctcctgccttccagctgcttacgctgatgtggtcctctcgacgtctggccacctatgtgtctgcccactggggtcttgggtttttataggcccatgatsgttcctggcgggccagggtggtattggaaaatgcaacatttcggctggaagggcaggagtgcttgtcctcacctaggtccatgagagtggagccctagcc

SEQ ID NO: 324401 - DNA, 201 bp, Homo sapiens
gtttttttttcatttaatgtttgcctaaaggactaaagtcattatgtagacttaggtttgatatagaacatttctttgcagccatgtcgacattcatgggytgaatatatataaggagtcagatatatatacaaataatcatagctttctgatgagccctttatttcagacatgaactggtgccatgagaccacagttgta

SEQ ID NO: 324402 - DNA, 201 bp, Homo sapiens
tttattgtcacacaatgatcattttatttcaagaacattaattaaaatgaaaaattattatgtttgtatgtaaaattataaacattactgggtttttttttctcatgtgttctttattatttagagagagagccaattttcactttgccagcctccctattaacatctgtcctttttgccagctgaagaaaacaaaggaaa

SEQ ID NO: 324403 - DNA, 201 bp, Homo sapiens
aaaaaattgaaatttaacctaataaacattttattacattgtatgatgaaggtaatgcattaggcaatgtatcatacttacttattatacatgataactayaataatcatagttatcaaatagaaaaatattttatcctaaatttaggatatgaccatcctgttttagattgtaaattctctgaaagcagttatcatcttc

SEQ ID NO: 324404 - DNA, 201 bp, Homo sapiens
gtttgtattccaggcacgtcggagtatacaaatcaatctcaacaagtgtttaatgcgacaggtggttgtgggatacattttagaaaaataattataaaaarcattctttttctctgttttatttaatgcttgtacaaatgaatcaccattatctaaaaaattatactgtccataaagttctgtttcctgattgatccctta

SEQ ID NO: 324405 - DNA, 201 bp, Homo sapiens
aaatgtatttgtcacataataaaaaccctaacgtctagtttccccagcacttgtgacagtatcaagttccccagttcattctttttgctttcaattctcarggtgccagcaatgtccaaatggtggcacctgttactaatcattagataagagccatgactccaagtgtcacccaccttcagatacaacaaaatgcaaaca

SEQ ID NO: 324406 - DNA, 201 bp, Homo sapiens
aatactccttaactaggctagaagataggggaactagggtataaaccttgggggataatactcctttttataggtgcagaagcttctgtctctctaaatcrttctaagtcaggacctggtttcagaagtgactactgacctttatttactttcacaatattctgcagtttcttctttctcatgtgtaagtattacagaaat

SEQ ID NO: 324407 - DNA, 201 bp, Homo sapiens
cattggaactcattgctgccctgtcacagcagaaggtaacatgggcagaattcagccagcacccgcaaagagagccattagaccagccctaggcagagggrtattttctgctgtcccagcatttggaacctgagttccagctagacccaacactgcacactaaagtaccctggggttccagataaatttgaaagtctagac

SEQ ID NO: 324408 - DNA, 201 bp, Homo sapiens
gatactagtagaataaatgaaaagttgaacatgttattttgcttgcaacattggaaagctactgttttgttattcattagtcattccaaatatttttggarcagacttttctgatagcttctaaagagagtttgatggtgtactccttttgtattctctttgaagaggtataatcaaacaattacttgattgcttgataca

SEQ ID NO: 324409 - DNA, 201 bp, Homo sapiens
tccagataaaattaacagaaaattaaaataatttcaagaaaacagttatgtttatttggtacccatagcaggcttaattaaataatatataatgtcatttrtagcctaaatattaccctaatttatataatcttaccgattaactatgtacagttttagaaaaattcacccaggaagtggtcttttatatattaaggtctg

SEQ ID NO: 324410 - DNA, 201 bp, Homo sapiens
caggtaatgaatttgggcatcctgaatggttagacttcccaagaaaaggaaataatgagagttaccattatgccaggcggcagtttcatttaactgacgaygaccttcttcgctacaagttcctaaataattttgacagggatatgaatagattggaagaaagatatggttggcttgcagctccacaggtaagctcttcac

SEQ ID NO: 324411 - DNA, 201 bp, Homo sapiens
tttctctctcaggccttaagaatggttcactattatcccaaggtcactttgaaagtctttctgtgatttgcttccatttattttatgcttgtgtttatggktttgaaccaaatatgaaatttaatgttgcgtttgtctacattaaacttaatttgccccttgtcagctcgtttacaacagagaaaacattcagagccaccc

SEQ ID NO: 324412 - DNA, 201 bp, Homo sapiens
tcagaggagagagatgtagagattctgttccattacactgtcttgacatggaagttgctataatgctagtttttaaaaaaattcatgaaatagtataaccrtcatatttcctctctcataccagtgcttgaagttacaaaaaatgctagttagattagctcagtttattttaaataagaatgattttatcctaccaggtag

SEQ ID NO: 324413 - DNA, 201 bp, Homo sapiens
tttaaaaatatacttgatcaggtagtgtcataccagaattcctggcttaactctatacataattttatattctgtagtttaagcattccagaccaaagaarccacggagtctaagaatttatgaatctcatgtgggaatttcttcccatgaaggaaaagtagcttcttataaacattttacatgcaatgtactaccaagaa

SEQ ID NO: 324414 - DNA, 201 bp, Homo sapiens
ttttgccttatgtatatttgaattttatatgtcaaacatcaaaaaattaattattttgtcaatgatatttatggcaatccaaagcagagatattacaaatkacaaattactacaaacaattaatgacagcacaaatcaaaagtgagtactgaagaaaaagaagcaatgatttaatacatgaaagttaaaattgttacattg

SEQ ID NO: 324415 - DNA, 201 bp, Homo sapiens
tacagtctcatactcccatatttattctttgtgttattaatcactattgtaattaaatgtgtttgtgttagtagttgtaaaatgtctgtttctcctgttaraccctaaactccacacaaagtgatactttgtatttgctgttcatagctgtgtccctagcacctggcattgtgcctggtacaaagcaggtagttaagaaat

SEQ ID NO: 324416 - DNA, 201 bp, Homo sapiens
cttaaggtgattcagtcacttcagctacttggccctagctccactatcttctttttttaatttcatgaatattcttagaaaatataagaatgttgccaggygcagtggctgacgcctgtaatcccagcacttttggaggctgaggtgggcagatcacgaggtcaggagtttgagatcagcctggccaatatggtgaaacct

SEQ ID NO: 324417 - DNA, 201 bp, Homo sapiens
gtaatatccagaagaatccccattgtgttttgtgtttagggcaacaggaacccggtaccttgacaaaaggtaagactctatgttaaacacatgattatgtrgagttttaaaatatgttatacatcttacattcattgatttattatacaattaaattttagctcttataactattaaatagctttgagtcctagggaaaat

SEQ ID NO: 324418 - DNA, 201 bp, Homo sapiens
aggtacctttcattgtaaagtgagctgattttcttcttatggcaatatgagctcatcagtttatgttcaccactgttttgaatccagggctcctttgtgtktaatatccagaagaatccccattgtgttttgtgtttagggcaacaggaacccggtaccttgacaaaaggtaagactctatgttaaacacatgattatgta

SEQ ID NO: 324419 - DNA, 201 bp, Homo sapiens
tgattcctaggtattttgtattcgttgtaggtattgtaaatgggattgctttctggatttatctttcagatggttctctgttggcatatataaatcatacwgatttttatatttcgattttgtattctgcaacttcactgaatttgtttaccacttctaacagcttttgggtggagtctttatgtttttgtaggtatataa

SEQ ID NO: 324420 - DNA, 201 bp, Homo sapiens; identical to SEQ ID NO: 68257

SEQ ID NO: 324421 - DNA, 201 bp, Homo sapiens
ttagattgccttaatatatattcataagattataggcagtaatgaatagtgagcaagtccttactgcacacgaatgtatttagttttggggttttttcttgaagggggaccaggggcctgttgttttgaatagccatcacggtgctgtcaaatatttaacagcagttctggtttttttgtttcatagctcagttgtgcaat

SEQ ID NO: 324422 - DNA, 201 bp, Homo sapiens
cctaacttttaagtatgtagcatgctgccttcctactgctgccatcctagttcaggttgctagcatctctagtatggtttacagaaacaacctcatagctrttgttcttttttcaaatcttcactccattctaacttctccactcctcttcattccaaacagagtaagtagaatggattttgaaataaacaaatctgatca

SEQ ID NO: 324423 - DNA, 201 bp, Homo sapiens
acttttagattgccttaatatatattcataagattataggcagtaatgaatagtgagcaagtccttactgcacacgaatgtatttagttttggggtttttycttgaagggggaccaggggcctgttgttttgaatagccatcacggtgctgtcaaatatttaacagcagttctggtttttttgtttcatagctcagttgtg

SEQ ID NO: 324424 - DNA, 201 bp, Homo sapiens
aaaatcagagactcattgtgttcatttttattttgagccaataatttaaagaaacaaaatgaaattgttcattttttataacatcgtgtaaccttttaggkttaacagagttaatagaagctgaacattttcttttactaaggtcatagactctcttctcctccagccttagaaattgtccttgattttatgttactcctc

SEQ ID NO: 324425 - DNA, 201 bp, Homo sapiens
ctgttctgttccattggtctatatctctgttttggtaccagtaccatgctgttttggttactgtcaccttgtagtatagtttgaagtcaggtagcgtgatrcctccagctttgttcttttgacttaggattgacttggcaatgcgggctcttttttggttccatatgaactttaaagtagttttttccaattctgtgaaga

SEQ ID NO: 324426 - DNA, 201 bp, Homo sapiens
agagggcttttgaagggttttgcaggagattggcatggtcagatccagtttagatatgttacttgattgataatgtaaaagatggatttgaaggggctgtyacctcaaactaaatatagaaatgaccttttgccaccagaattctttcatattagtttaaagttgtaggtctaaattctttccacacttgtcatgtcagtc

SEQ ID NO: 324427 - DNA, 201 bp, Homo sapiens
tatttcattttcttaggaatcagaggagagagatgtagagattctgttccattacactgtcttgacatggaagttgctataatgctagtttttaaaaaaawtcatgaaatagtataaccatcatatttcctctctcataccagtgcttgaagttacaaaaaatgctagttagattagctcagtttattttaaataagaatg

SEQ ID NO: 324428 - DNA, 201 bp, Homo sapiens
aaataccaccacattaagagttaatatttcaacatatgaatttgggcgaggtggcggggggggcaacttgcagcccatcaccattatttatgctgtagattataagcatgtgaatttttcacactggaatgttagaaataaatgataataatgtaatttcacatttttatggagtccatgaaccctctgaggctgtatcgt

SEQ ID NO: 324429 - DNA, 201 bp, Homo sapiens
agaatttgaacccagctggtctgtctccaaaatgtaggctctgcatcactaccctatataagacagtagtattattttgcccaaaaatgaatgctaatgtwggtagtggtgttggtgcagctctaactacagtcattcatccagaggagatgcaacaaagaggaaaacaacagatcaaattttgtattgtactgtggtcta

SEQ ID NO: 324430 - DNA, 201 bp, Homo sapiens
cttctcctcttctatatgtaaaatctccctctgtgattgcccccctgcagaatctggaaatggagtaagaatctctccatttccagatttgtactttaatyacatctgcaaagaccttcttttgtcacagaaggtatcattcacagattcttggcgtagggtgtggatatcttttgggaggccattttcagcctcacacaa

SEQ ID NO: 324431 - DNA, 201 bp, Homo sapiens
ccctcctgaactaatcacctcccaaagccccatcacctaaataccaccacattaagagttaatatttcaacatatgaatttgggcgaggtggcggggggggcaacttgcagcccatcaccattatttatgctgtagattataagcatgtgaatttttcacactggaatgttagaaataaatgataataatgtaatttcaca

SEQ ID NO: 324432 - DNA, 201 bp, Homo sapiens
cctcccatttgacagtatcaagtgaactcttttaaacattagctaccagacttattgttgaaagatcaatcaagccagttctttctttcagtttgctccayagcatgctgacattttgaggttgtgagttaaatgacataaagttttctctaaaaatttttccgactggaatttgaactcattggagcataacacaaatgc

SEQ ID NO: 324433 - DNA, 201 bp, Homo sapiens
acatttgtgtgtacagcaagatgaatggattagtgttccaaaggatgtgggggttaaattcagcatgaagtagattcttcatgtcttaaaattgcaagtaytttctctgccaacagacacctttagaaattattattagtttatgatgggcctttggaggtattatagagccgtttacaaaacagagaaagcataggtgga

SEQ ID NO: 324434 - DNA, 201 bp, Homo sapiens
gggctcaaccctcctgaactaatcacctcccaaagccccatcacctaaataccaccacattaagagttaatatttcaacatatgaatttgggcgaggtggsggggggggcaacttgcagcccatcaccattatttatgctgtagattataagcatgtgaatttttcacactggaatgttagaaataaatgataataatgta

SEQ ID NO: 324435 - DNA, 201 bp, Homo sapiens
ttatgagagctgagacagatgatcctactaacaattttatatttaatataggtcctccttttttaaaatagctttataatggatgcatgctcattgcttargttcactttctttagttttgaaatgactaatacttttaaacatagaggtccttttgatcattttttcattgctaaacactgtctaacaatccctatgatt

SEQ ID NO: 324436 - DNA, 201 bp, Homo sapiens
aaaagcatagctttacaccatcttatttctgcatcagaggggagatcatgtagcaagttcttatttatgattttatttttcggtagcatttaatgctactsaccaccatccttgggacttttcttagccttctatgttttcttctaatgtcccctttaccctgctaaccattgctctcagtcttccctaacatggcttctt

SEQ ID NO: 324437 - DNA, 201 bp, Homo sapiens
tttgtgtgttgaaaattattttcaggagaatctactaacttgtgcctgtatcttcgaatcatgagcagtgttcaaaacttgggaaatgtttgatcctagaatatctgctgtttacctttgagcagatattatatttattcagtttatgttagggaaatatcagacaggtgtacaaagatacatataaaagactggtgattt

SEQ ID NO: 324438 - DNA, 201 bp, Homo sapiens
cggaatggggaagaccatctcatgaatgtattaactagggtaatttttaccgccatattagtgacaagtgttctgtgattgtttgaactcactttctgtcytttaaatcattggagtttgttgatatatactttgcattagataattacatatgtatttcatggctcttacattttctctaaggcctaagttaaaaaaaaa

SEQ ID NO: 324439 - DNA, 201 bp, Homo sapiens
tgataagctattatcaataaaatacatcataattttgtagaattcacaattaatatattattatactatgatgtgcttgctgagcagatcttcataataagatctactgtctcttataaacttaatatatgtcctgcactctgaaagtattttatactcattaccacattagctaaccatttcttttcctagactgcaaat

SEQ ID NO: 324440 - DNA, 201 bp, Homo sapiens
atacatttttacaaggttctccattagcaaattattttctgagttatttttaacttacttgcaaaaaatctgaattcagtttgaattttataaaataacatttttttccccccaccatttcctttgtgtggctaattttctcccaatagagtattttgagtctcctgttccatgcaacatcaaaatggcctcaaaatgact

SEQ ID NO: 324441 - DNA, 201 bp, Homo sapiens
ttccagttagagtagcctgtttggttttcttcaaatgctcttagctcaaccctgccccagtcccctgcacctgctgttcctttctgtctgaatgctcttayccttagatattattatgccttgcttcttactttttttcttgctcaaatgttgccttttccgtgaaactttaactgatgaccctatttaaaatagcaaacc

SEQ ID NO: 324442 - DNA, 201 bp, Homo sapiens
gtagttttcaattttctcaccttggtataaggttcctcatcagccccatctcttactatttctagttttttcatgtagacttttttccctcacaagtgacmaatcttactttttaacctcctgctaaaagccttaatcattctttgttcacattcaataatgttttaaggtgtacgtcaacctagaattatttttcagtca

SEQ ID NO: 324443 - DNA, 201 bp, Homo sapiens
cccctgcacctgctgttcctttctgtctgaatgctcttacccttagatattattatgccttgcttcttactttttttcttgctcaaatgttgccttttccrtgaaactttaactgatgaccctatttaaaatagcaaaccttccctccccaccagtggcttttctttgttttctttaggacacttattattatcgacattc

SEQ ID NO: 324444 - DNA, 201 bp, Homo sapiens
aataatcatagttatcaaatagaaaaatattttatcctaaatttaggatatgaccatcctgttttagattgtaaattctctgaaagcagttatcatcttckattttatgtaattatttaaaattcttattgtatcaccaaactgggtccccccttagttaataaaactaaagttaaaatagtattacaataaaacccttag

SEQ ID NO: 324445 - DNA, 201 bp, Homo sapiens
taatcatttaaaaattttactgtgaatcatttttttttaatatctaaaaggccactttatcaatttgacttaaaccatagccagtctccttttactagagraatacattgttttaagtaggccatttaaaaaaatcatacttcattgcttcatatcttaaaattacatggttttgattacagctaaattaatttataacta

SEQ ID NO: 324446 - DNA, 201 bp, Homo sapiens
tggatggatttttatgttatacaacatttttattttattcacatgtttattgtagtgtaccttgttgtaccaaagtgcatttaaacttagccaattttctraacaaaagggatcatacatcattgttttcaaaaacatttctatcacagaaattgagacaaacttaacattgttatttaatactcggcttcttttttattg

SEQ ID NO: 324447 - DNA, 201 bp, Homo sapiens
atagttgatgtgtatttaatattcataattttacagcaaaaagttgattcacctacctgagttgtttcaaacatacttaaattttgtagtaatggaactgrgtgccagtttttaaatctacatcaatataaaatagtttgaagtcaggtagcgtgatgcctccagctttgttcttttggcttaggattgacttggcaatgc

SEQ ID NO: 324448 - DNA, 201 bp, Homo sapiens
gcttaataatgataatacatgttaccagttatgtatttattatactatactttaaattgttattttacagtgtactactactatgtatattaaaaaattarttaactataaagcatcctcaggcaggctcttcaggagggattccagaagaaggcattgttatcataggagatgacagttccatgtgtgttactgctcctg

SEQ ID NO: 324449 - DNA, 201 bp, Homo sapiens
tcaaagactgaataccggactctgccagtgttattcatgcaggctggaaggatccataggctgaaaaatgtgagatgtattgtcaaactggtgagctatayggctgtcatctcatagaacgtagtgatgagtgctctaaacacagatatcttgctctggcaacctttctcctgaacaactcgacaataggagactaggagt

SEQ ID NO: 324450 - DNA, 201 bp, Homo sapiens
agattactcagaaaagctaaaaatataactaccatatgatccagcaatcccactgctaggtatacacccaaaagtaaagaaatcagtatatggagcagatrtttgcgctcctcttttattgtagcactgttcactatagccaagatttggaatcagcctaagtgtccatcagtacacgaatgaacaaagaaaatatagtac

SEQ ID NO: 324451 - DNA, 201 bp, Homo sapiens
ttcacattggtatctattaaaattagaaagtaatttggatttggtacgttagcaaccactccaagaaattaaaaaaaaattgtattgaggtaaaatgtacrtatataattcaccatttttaccatttttaaccacagttcagtggtaataaataaatttatatatattttcctcctttatcttccttccccactgtccttc

SEQ ID NO: 324452 - DNA, 201 bp, Homo sapiens
tttggtttctatagctttgtaatacattttaaagccaggtagtatgatgcctccagcttttttctttcttcctttttttttttttgctaagatttatttgrctatttggggtcttttgtggtttcatttaaactttaggatttatttttatatttctgtgaagaatatgataatcagcgttttgatagggattgcattgag

SEQ ID NO: 324453 - DNA, 201 bp, Homo sapiens
ggaaatttacaagtttaggtacaattacgttaaatagactttactgtatatctacatgtacagaacatctcactgtacaaagtaaggcacacaactgaaawgtccttcctacatagtccagatcaaagctctaaaccagaaggaagaagaggagcaaaaagagactatttatattggacttagctcctttgaaataatttt

SEQ ID NO: 324454 - DNA, 201 bp, Homo sapiens
tcaggctttgcaagtcaaagaactaactggacagaaggcttcgaagcaggaaacctgggtcctgatcagattattacatgtcatctggctctttgaagcarggtctgcatattgggagatgaagtacaaaagatagcaaagaaactttactcagccaggtgtgaatagtagagatgagcacctccagatggcataatttaa

SEQ ID NO: 324455 - DNA, 201 bp, Homo sapiens
atctcactgtacaaagtaaggcacacaactgaaaagtccttcctacatagtccagatcaaagctctaaaccagaaggaagaagaggagcaaaaagagactmtttatattggacttagctcctttgaaataattttcacataacaaccctgtttgtgtgtcgttgaagaagacaaggagccataaagggacgttaggaaatg

SEQ ID NO: 324456 - DNA, 201 bp, Homo sapiens
taaatatgtaagatatttgatctgtgataatagcatattttattttaagtctccttctgcactacccaggtttcttactggaagcttggaaatttacttggaaatttacaagtttaggtacaattacgttaaatagactttactgtatatctacatgtacagaacatctcactgtacaaagtaaggcacacaactgaaaag

SEQ ID NO: 324457 - DNA, 201 bp, Homo sapiens
ttaaatatgtaagatatttgatctgtgataatagcatattttattttaagtctccttctgcactacccaggtttcttactggaagcttggaaatttacttggaaatttacaagtttaggtacaattacgttaaatagactttactgtatatctacatgtacagaacatctcactgtacaaagtaaggcacacaactgaaaa

SEQ ID NO: 324458 - DNA, 201 bp, Homo sapiens
atagcaaagtagatctaatgctcatgtttttcctccttaaacttatgtttggacacaaaattaatatagttatatttcatcagcttgagttcataatatgrtaaccattaggctaaaagatactctcttttcttgagcaactagagttgttttcagaaacaaaagtgagtccaattggtctttttagggtcataagtatgt

SEQ ID NO: 324459 - DNA, 201 bp, Homo sapiens
attaaatatgtaagatatttgatctgtgataatagcatattttattttaagtctccttctgcactacccaggtttcttactggaagcttggaaatttacttggaaatttacaagtttaggtacaattacgttaaatagactttactgtatatctacatgtacagaacatctcactgtacaaagtaaggcacacaactgaaa

SEQ ID NO: 324460 - DNA, 201 bp, Homo sapiens
tggaaagtttggagttatactttcagatttttactaaaggataaaagcaggactcgcgaacgaggcaggtaactgagagaagcaggccaggtggttcttaytggcaacctggcaaacggatctcctctgaggtggctgccattcacaaaccatttcgaatacaattgtcagttgctttcgtgttgagaatgtggacccatg

SEQ ID NO: 324461 - DNA, 201 bp, Homo sapiens
cattaaatatgtaagatatttgatctgtgataatagcatattttattttaagtctccttctgcactacccaggtttcttactggaagcttggaaatttacttggaaatttacaagtttaggtacaattacgttaaatagactttactgtatatctacatgtacagaacatctcactgtacaaagtaaggcacacaactgaa

SEQ ID NO: 324462 - DNA, 201 bp, Homo sapiens
ttcttcctctccttctctttctttctcattacctttccttttctccccgtactccaatagatatcagctgtacatttggtgattaagctttgtgatatttraaagaagatagccaaaaaccagaaataaaagtcaagggctaggcatggtgactgtcctgtaatctcagcactttgggaggctgaggtggcagaatcactt

SEQ ID NO: 324463 - DNA, 201 bp, Homo sapiens
tgatatttaaaagaagatagccaaaaaccagaaataaaagtcaagggctaggcatggtgactgtcctgtaatctcagcactttgggaggctgaggtggcagaatcacttaagcactggagtttaagaccaccctaggtaacatagcgaaaccctttctctacaacaaaattaaaatgaaattacctgggcatagtggtgca

SEQ ID NO: 324464 - DNA, 201 bp, Homo sapiens
tctctaggtgaggaatttcatttatctatgaatagctttgtttatattgtttaaagttgaatatattatgtttatttgacattaagtaaacattaaatatktaagatatttgatctgtgataatagcatattttattttaagtctccttctgcactacccaggtttcttactggaagcttggaaatttacttggaaattta

SEQ ID NO: 324465 - DNA, 201 bp, Homo sapiens
tttcccccatgttttctcatgatagtgagtgagttctcacaagatctgatggttttataaggggcttgtcctccttcgctcgggacttctctttcctgccrccttgtgaagaaggtgccttgcttcctctttgccttctgccatgattgtaagtttcctgaggcctccccagctatgtggaactgtgagtcagttaagcct

SEQ ID NO: 324466 - DNA, 201 bp, Homo sapiens
ggctcatgcttgtaattttcgtactttgggaggccaagacaggaagaatgcttgaggtcaggagttcaagagcagcctgggcaacatagtgagacccccayctttatttaaaaaatgaaaataaaaatagccaggcatgatggctctcacctgaagtcccagctactcaggaggctgaggcaggaagactgcctgagccca

SEQ ID NO: 324467 - DNA, 201 bp, Homo sapiens
aatgatagcaacaataaaaagattcacaattttctaggtcgaatctattaaattatagcattaaataataagccacagcaggaggtataattataaggtawccttgagagacagttgattcgaatacactcaatccatcaccaaatgtattctccaaagtgcagagtaagctttctaaaatgcaaatttgacatgtgactc

SEQ ID NO: 324468 - DNA, 201 bp, Homo sapiens
aaataaaaattatgatttatttttaaataaattaatttgcaaagtatatttttttaaatatggagatattttagctcataaatgtatatgttttttaatgrtgatgacattttaatgctacgttttttaacttgctatgaaaaggttttactctaagagatctacaaaaaaaggtaaaaagaaaaacttcattttaaatgt

SEQ ID NO: 324469 - DNA, 201 bp, Homo sapiens
taaagagtcattttttttaaaaagaatctcatatataagttcaaagatttccaaaagtatattaggtacagtgtttcttttctgggtgtgtagcagttttycaggctgagaaaatgactgatgagtagatttatgaagagcaaatatcactaaaggaacatcaataactttagctgtagtcttaatttttcaagtaagtat

SEQ ID NO: 324470 - DNA, 201 bp, Homo sapiens
aacgaaaactaagataatttgttgccagcagacttatcctagaatggttaatggacattctatgaaatggagaagaaaaaatggaaagagtaaaagtacgrctaaatacaataaagtttccttctctttaatttttaacttatgtcactgtgcagacatcaaaataacagtaaaaggatactaggaataactctacataca

SEQ ID NO: 324471 - DNA, 201 bp, Homo sapiens
aaaatgcaaaagcacactttaaaatgcattttttataaataaattaagaataacctgccttttctaaaccactagtattttgattaacacttcagaaaacrattattttagacaatttgattttttgtgcaagtaaagcagtattttgtttttcttgaaattcattaactattagtcctatcatgctgttgttaactgatc

SEQ ID NO: 324472 - DNA, 201 bp, Homo sapiens
ctgacgtgcccgaactggccagactcctggagatcgacccgtacttgaagccctacgccgtggacttccagcgcaggtaccgccggaatcccaccaccccyacttagacaggcagcccgcctcccaggagccgtctcgggacacgggccgcccctcggccctcgcgcgccaaccccgccccaggcggggaggaacctgagt

SEQ ID NO: 324473 - DNA, 201 bp, Homo sapiens
gctgagatctttactaactccagtcattcctgaattctctacagtgatggtcaacaggctctgacctcttctcattttcaaagtgccttcaaatgacttcrtggagcatcttggtttagtttaggctctggcacctgctgcaccacctcctgagaaatgactgtgtgtgttgtaacttacagtattcctttcagctctcat

SEQ ID NO: 324474 - DNA, 201 bp, Homo sapiens
ctttcttatgcttagaggttgattgggcacagcttggcaccacatccatgtttctagctggaacacgtgctagcttactatgtcttttttagtgaagcatrtgttagctttcttgtaaacttcaactggttcttcccatttacaggttattgatcagaattgtcccatggtcatccttagctgaaagtgagcctggatcat

SEQ ID NO: 324475 - DNA, 201 bp, Homo sapiens
tctgtcttactactttttggttggtatttttgtatctagtgcttcctgtcttatttggttgatagtgttacaactgagatatagtttattcatttctttgygaagcttagtaagaggaatttagagacgaagtatgcacacacagtgttagcgctgaggggatgaacatatgactttggttggtgttgagtgtctagtgga

SEQ ID NO: 324476 - DNA, 201 bp, Homo sapiens
tgttctttctaagcaaataatgtctcactttccagctgtaatcattagttttcctctggtttactgttactgagagattacaaaatgaaaggatagtcagrttcagaccaaaaccaaacccaagtatctgagtggatttgggctgttacaacaaagtagcacagactggatggcttctaaacaacagacgtttatttcttg

SEQ ID NO: 324477 - DNA, 201 bp, Homo sapiens
tctgacatgctggtggtatggtcttgtttatcatattcttctgtgataaagccacctgaattagcccaggggtctccctgttggaggcaggctgagcgtcytccacactccctctgctttcgttgaccatgtggttttgcattcaaggtctgcagagcagttagagtcggctgctcttgtctcatcaagggatgtctgaag

SEQ ID NO: 324478 - DNA, 201 bp, Homo sapiens
gcagagcagttagagtcggctgctcttgtctcatcaagggatgtctgaaggatgggttccaaagtctggattacagatttaaggcatttgattataagagmagcgatctaaatcttttcacacttacttgattttactccatggtcatataattatataatatttccatgtcccttgtgtcttccttccttagacatttac

SEQ ID NO: 324479 - DNA, 201 bp, Homo sapiens
taggcattggttggggataagtcgctggcattttggttgatggatgccgaaatgtatacaaacatgagtgtcctgactccttttactccagttattgatcrtggaatacagcttcataaaatgattcgactcattacgcatgggcttggtggagaaggctatctcaatttcatgggtaagtgtgagttaaacacatatgca

SEQ ID NO: 324480 - DNA, 201 bp, Homo sapiens
tttctttcagtttgctccacagcatgctgacattttgaggttgtgagttaaatgacataaagttttctctaaaaatttttccgactggaatttgaactcawtggagcataacacaaatgcaggatgtaccctccccctcaccaaaagagttttgtgagcaaagtttagtccgtaaaggctatagtctttactctttgcatt

SEQ ID NO: 324481 - DNA, 201 bp, Homo sapiens
tagacaaatgtactagtaagtaaaacctaagttactataacaaaaatacttgcaaaatccaggggcctaaagagtagagatatttattatgtaacaatcayaggtcagtgttccggatttggtagaaagctttgctctccttaacagttggttgcaattccatgaataagagagaaggagaaaatggagaaattaaaatac

SEQ ID NO: 324482 - DNA, 201 bp, Homo sapiens
gtgtatatatgcatcagatagagcatcagatgaaatttactgtttttatggtacctgtgcacagaatttctacacacacacacacacacacacacacacasagagagagagagagagagagaaggcaaattgacttagagcaaattcagtctgaaaagttagtgtatttgaggtgtatattaatttaaactataaatttaa

SEQ ID NO: 324483 - DNA, 201 bp, Homo sapiens
gaaggaacactacccaattcattttatgaagccagtattgccctaatattagaaccagataaagatagtaataagaagataactacgggtcaatattcctygtgaattaggagcaaaattcttaacaagatattagcaaatacaattcagcaatatataaaaagaattatacaccataaccaagtagggtttattctagaa

SEQ ID NO: 324484 - DNA, 201 bp, Homo sapiens
ttaaaaagagcaatttaagaaattttttcaaaactaagaaacaacttgattgtttacttatcttttaggcatttctaaacttgttaattttctggaatttyattttttattttcctccaggagagaaacagtgagtcaaaagaaataaaacaactatacatttgtatagcacatatttttataaaaacatgtttacgtaaa

SEQ ID NO: 324485 - DNA, 201 bp, Homo sapiens
aaattaatattaatctacacacctcttctacgatgtttcctaacatttgtaaccatgcattgttctattgtaaatcacaactacttagcacttttttttttcatttatctccattacttttatttctgtaggcattggttggggataagtcgctggcattttggttgatggatgccgaaatgtatacaaacatgagtgtcc

SEQ ID NO: 324486 - DNA, 201 bp, Homo sapiens
ttacttttatttatttgattaattattggatacttattgtctagagtagaaaggaccccctgtcaaaaagcttgatatctgaatccggctctaccattaaraatcctctctctcgactgggtgtggtggcttgtgcctgttgtcgcagcactttgggaggccgagatgggagttcggactcccgtctcgaacggtcaggag

SEQ ID NO: 324487 - DNA, 201 bp, Homo sapiens
gctaaaatccctctggttttctaagttctctaactaggaattattattaaaattgaatttagcatgttaaaactgttctatacaaagtatagtggttgagrtataaaaatagtaagactactgttaaaaatagttagaattaaggtgtgtttttacattgttggtgtttagcttattggcatgaaatggaatagtctcctt

SEQ ID NO: 324488 - DNA, 201 bp, Homo sapiens
ttctatagaatttagaatagagatttgtactcaggggtgttttgcaaatgtgtattgactaggggtctggtctagcttgttctgtaatattaggaatctakaaatatttattactgtcgttgttggagggtccctagaaacagttgggagtaattcttttatcatgtagtggcctgtggtgggcaaaacctctctcacata

SEQ ID NO: 324489 - DNA, 201 bp, Homo sapiens
taaatgaatatgtgcataaattcatttatttctctctctctctcttcctccttccctctccttaataacatatttaaatataaacatatcgaaatataaayctctgtagttactataatgtgtgtatgtgtgtgtgtgtattaatatatatctttacaggaaaactacgtatattggaaaaaatgttaaatttgtagatgg

SEQ ID NO: 324490 - DNA, 201 bp, Homo sapiens
ttttataatagaatcagagattgtagaaataaataattatagctaaaaacataattaaagaattcaaaacaagtagagaaggtgagttgtttaagaagtartgatataaatcctataacaatttttaaagaaagatcattttaattaaagtaggttaaagatagaaaagattgtaaacaaatttcttttctagaaaatgaa

SEQ ID NO: 324491 - DNA, 201 bp, Homo sapiens
gtagaatattttgatttggcttttcagatttagaatataaaattacaactatttatttcatatactgtcgtgtaaattgcaagaataaaattaaatcactrtaaggttattatattaatatatgatacaaaagtatagtctaaaagctgatatttaattgaatattgctgtcaagcgggcttacctgtttttaacatccgg

SEQ ID NO: 324492 - DNA, 201 bp, Homo sapiens
taagccaatggagtaatctaagtcctggcttgtctgttggaacgcaccaaaataaaactgtgtcttaaattctgctgtatatttttatgagattctaatcwactggatatatcaactgtgttatgggctgtttgatgccattttgaggtagaaaaagtaaattgccttttttattgtactttttaccagacattgttatac

SEQ ID NO: 324493 - DNA, 201 bp, Homo sapiens
gagataatgggaaattatcaaatcgaggggtgtattttttcaatcataaaattattataatagcttatttagtcatttatttatttatttatttatttattgtttttgagacggagtctcactctgtcaccaggctggagtgcattggcacaatcgcggctcactgcaacctccacctcccaggttcaagcaattctcctg

SEQ ID NO: 324494 - DNA, 201 bp, Homo sapiens
tgagataatgggaaattatcaaatcgaggggtgtattttttcaatcataaaattattataatagcttatttagtcatttatttatttatttatttatttattgtttttgagacggagtctcactctgtcaccaggctggagtgcattggcacaatcgcggctcactgcaacctccacctcccaggttcaagcaattctcct

SEQ ID NO: 324495 - DNA, 201 bp, Homo sapiens
gtgagataatgggaaattatcaaatcgaggggtgtattttttcaatcataaaattattataatagcttatttagtcatttatttatttatttatttatttattgtttttgagacggagtctcactctgtcaccaggctggagtgcattggcacaatcgcggctcactgcaacctccacctcccaggttcaagcaattctcc

SEQ ID NO: 324496 - DNA, 201 bp, Homo sapiens
ccaaagaagccacggagtctaagaatttatgaatctcatgtgggaatttcttcccatgaaggaaaagtagcttcttataaacattttacatgcaatgtacyaccaagaatcaaaggccttggtaagtaataactgtgatttttattcagataaaattttaatgagtctgttctcttattagaaaagctaattacaagtgtc

SEQ ID NO: 324497 - DNA, 201 bp, Homo sapiens
aaggtagcaggggaaaaaaaatcactctttagtgacaattttttttttctaacctgacttaatctccattgagagtactataaagattactttttttttttaaagccccagtatatgtctggcaaaatcttaaaatcaatcatttaatttaaattggatttcaaaagaaggtcactagatgaaatcccttgctgtagttag

SEQ ID NO: 324498 - DNA, 201 bp, Homo sapiens
tttgaccattgccttatataggatacaactgcattcagttgatggcaatcatggagcatgcttactatgccagctttggttaccaaatcacaagcttcttwgcagcttccaggtaaaatcagagactcattgtgttcatttttattttgagccaataatttaaagaaacaaaatgaaattgttcattttttataacatcgt

SEQ ID NO: 324499 - DNA, 201 bp, Homo sapiens
caaaaaaaagtaactcagattttggggttcactaagcaacttacctttgtttcagagtttatgaatgctatcagtagttttaagggtttttttttttttttggtgtgtgtgtgtgaacacgtttagttttattgtaacaaagcttgtacactttcaatgtttaaaactgagcatcatctttcctttccagtgaaacaaaga

SEQ ID NO: 324500 - DNA, 201 bp, Homo sapiens
tatatactagtaatgaacaggtggttattaaaattaaaaaatatactatttataaacacttattctctccctccttctctctttcccttcctacatccctyccttgaagttgtttctctcttaaaagaagtagtaagatgtaaatccaataaaatatatacaggaatgtataatgaaaactataaaacactgatgaaaaaa

SEQ ID NO: 324501 - DNA, 201 bp, Homo sapiens
gacatagagatcagaatggataaataaaactttcctttctctttgtggttgacatgattgtatatatagaatatagaaaataccaaggaatctaaacaaaacccctccagaatttaataaatgagatgagcaaggttgcagttgtatttctatatactagtaatgaacaggtggttattaaaattaaaaaatatactattt

SEQ ID NO: 324502 - DNA, 201 bp, Homo sapiens
tctccaagtaagtgctatataataatacttcatttttcaaatgtattagaccttgaaacacttcaaatgcacatagaagagatttttttttttttttttttaatgagtctgaacatggcttatggggttttgaaggatctggctctagtctcatcttgacatcctttttctcttgcttactacgctctagccactccagtg

SEQ ID NO: 324503 - DNA, 201 bp, Homo sapiens
atctccaagtaagtgctatataataatacttcatttttcaaatgtattagaccttgaaacacttcaaatgcacatagaagagatttttttttttttttttttaatgagtctgaacatggcttatggggttttgaaggatctggctctagtctcatcttgacatcctttttctcttgcttactacgctctagccactccagt

SEQ ID NO: 324504 - DNA, 201 bp, Homo sapiens; identical to SEQ ID NO: 68248

SEQ ID NO: 324505 - DNA, 201 bp, Homo sapiens
ctgcctcacagtaaatacttagtgtaatacttgaatgagccagtggctgagtgaatatcttctgacttcatttttcctttgtgccataccagtgagtctayggtcaattcacctggagctaaaaatgtctggattactagggtagatgaacagggaacaggagtagttactagaggtttcatgtgacaatctgggtaaggg

SEQ ID NO: 324506 - DNA, 201 bp, Homo sapiens
tcccgcggctcggcccgaggactacgaggcggcgctcaatgccgccctggctgacgtgcccgaactggccagactcctggagatcgacccgtacttgaagmcctacgccgtggacttccagcgcaggtaccgccggaatcccaccacccccacttagacaggcagcccgcctcccaggagccgtctcgggacacgggccgc

SEQ ID NO: 324507 - DNA, 201 bp, Homo sapiens
gtgccttcaaatgacttcatggagcatcttggtttagtttaggctctggcacctgctgcaccacctcctgagaaatgactgtgtgtgttgtaacttacagkattcctttcagctctcatcaaactgggccttggtcagctagtgaggtgataatattgtctctgtgaaatatgctatagttttagactgataagtatatca

SEQ ID NO: 324508 - DNA, 201 bp, Homo sapiens
aactaacaggcttctttttgctttacttctccaaagtgcctttaattaaaaactgtatggtacccatgcagtattaggcaaacctctactcacaaatacarcatataaacaagaagtacatagaaataagagtagtatcaaacctaagggttggttttagcaggttccaagtacctataaagtcagaggacatttgaaaac

SEQ ID NO: 324509 - DNA, 201 bp, Homo sapiens
gcctttaaacagaaaggtaaagtggagtaatttttccactattcaacctaatgtattcaaattatcatttcaacatgtaacttaaaagattactgatgagwtattttacctgtcatttgtgctaagtttttgaggaaatatttattctacaattgtaactcattataatgaatttgaagcactaaacatccaaaagtgatc

SEQ ID NO: 324510 - DNA, 201 bp, Homo sapiens
ttgcattatttttgagttggtctttgcctgtaagagaggggggttggaaagattgattctctgttaaaacttaaaactagtgataatattgtgggggtgtrtgtgtgttcatgattgtgtgtgtgccttgtgtctttttatattcttttcttcatgacttgcttttcttgttttctctagatggtagtttcttcagtgttc

SEQ ID NO: 324511 - DNA, 201 bp, Homo sapiens
taagccaaggtaaaattggcttaaccagttttggaagcctcatggaaaaactcaagtcagtaatgaaacctctcaataaaaaaaggtaactagagaatccrtgaccacattattgtgttacctaagctgatgaacagggtaagatattttatttttctattaaggaaagatcaattcctaggtcccagtgctcttgagaca

SEQ ID NO: 324512 - DNA, 201 bp, Homo sapiens
cttttgtactttagcttgaaatttgttaaagtttctcataatttgaagaattgcactggagacatttggctttacattatgcaatgaatgctaattgacarctgattcataattagttaattgtaaacacttaactacagaaatttgttcagtgcactaaaagcccagacatcaccactgtgcaatgtatgcatgtaagaa

SEQ ID NO: 324513 - DNA, 201 bp, Homo sapiens
caccatgacgtagacccataatcaaaatgtcagccccaccccagaaactgacacatatccttggtattaaatgaaagtaatttttaaaaagaagtctgcartatcagccgggcacggtggctcacgcctataatcctagcattttgggaggctgaggagggcagatcacgaggtcaggagtccgagaccagcctggccagt

SEQ ID NO: 324514 - DNA, 201 bp, Homo sapiens
ccaaagcagaataaatctgtactcgtgcctcatggatccaaattaaaggtactttcctccctcctattttttcttgaacttatcattttctttttatcttktttgccaagtttgatttaaactattagaatgtacaactgatgcatgataattgtgggagaaacagtctaaatgtacaaatagagggaaatttaggaggaa

SEQ ID NO: 324515 - DNA, 201 bp, Homo sapiens
tcaatgccgccctggctgacgtgcccgaactggccagactcctggagatcgacccgtacttgaagccctacgccgtggacttccagcgcaggtaccgccgkaatcccaccacccccacttagacaggcagcccgcctcccaggagccgtctcgggacacgggccgcccctcggccctcgcgcgccaaccccgccccaggcg

SEQ ID NO: 324516 - DNA, 201 bp, Homo sapiens
ttgtttttcttgaaattcattaactattagtcctatcatgctgttgttaactgatcttcttcatttttttagatggttggaatccattttcgtacccatayaaaaaactggattatggaaaatgggagctgtatatcccaccaaagcagaataaatctgtactcgtgcctcatggatccaaattaaaggtactttcctccc

SEQ ID NO: 324517 - DNA, 201 bp, Homo sapiens
caaaatcatatcaaacacactctaggaccacagcacaataaaaataaaagttgagactatgaaaattgctcaaaaccaaataattacatggaaattaaacaatacaatatgtcctgagtgacttttgggtaaataatgaaattaaggcagaaatcaggaagttctttgaaaataatgagaacaaaaatacaatataaaata

SEQ ID NO: 324518 - DNA, 201 bp, Homo sapiens
aaaatcatatcaaacacactctaggaccacagcacaataaaaataaaagttgagactatgaaaattgctcaaaaccaaataattacatggaaattaaacaatacaatatgtcctgagtgacttttgggtaaataatgaaattaaggcagaaatcaggaagttctttgaaaataatgagaacaaaaatacaatataaaatac

SEQ ID NO: 324519 - DNA, 201 bp, Homo sapiens
aaatcatatcaaacacactctaggaccacagcacaataaaaataaaagttgagactatgaaaattgctcaaaaccaaataattacatggaaattaaacaatacaatatgtcctgagtgacttttgggtaaataatgaaattaaggcagaaatcaggaagttctttgaaaataatgagaacaaaaatacaatataaaataca

SEQ ID NO: 324520 - DNA, 201 bp, Homo sapiens
gttcttcccatttagctcccacttataagtgagaacatgtggtatttggttttctgttcctgtgttagtttgctaaggataacagcctccagctctatccrtgttcccgcaaaaggcatcacctcattcttatttatggctgcatagtattccatcgtgtatatgtaccacattttctttagtggatctgtcattggttgc

SEQ ID NO: 324521 - DNA, 201 bp, Homo sapiens
atgtactgctcctgttctattcattgtaaacgcagaacactgtcagagatcctttccagacttctgctgtatgttattaggaaggagtgtgtcagccgggygcagcggctcccacctgtaatcccagcactttgggaggctgaggagggcggatcatgaggtcaggacatcgagaccatcctggctaacatggtgaaaccc

SEQ ID NO: 324522 - DNA, 201 bp, Homo sapiens; identical to SEQ ID NO: 68299

SEQ ID NO: 324523 - DNA, 201 bp, Homo sapiens
accaaaatcatatcaaacacactctaggaccacagcacaataaaaataaaagttgagactatgaaaattgctcaaaaccaaataattacatggaaattaaacaatacaatatgtcctgagtgacttttgggtaaataatgaaattaaggcagaaatcaggaagttctttgaaaataatgagaacaaaaatacaatataaaa

SEQ ID NO: 324524 - DNA, 201 bp, Homo sapiens
ccaaaatcatatcaaacacactctaggaccacagcacaataaaaataaaagttgagactatgaaaattgctcaaaaccaaataattacatggaaattaaacaatacaatatgtcctgagtgacttttgggtaaataatgaaattaaggcagaaatcaggaagttctttgaaaataatgagaacaaaaatacaatataaaat

SEQ ID NO: 324525 - DNA, 201 bp, Homo sapiens
actgtttgctcagagtacaaagccagttaaaggaagaaagtagactagcttagagccctttggacttctacttgggtagaggtagaagtcacttcagccaycctacagccctggcagaggatatttggccaacgaagtcactctcccatgcaaccttccacccatccatgtgagcaaatacttactgaatgccaggcaagg

SEQ ID NO: 324526 - DNA, 201 bp, Homo sapiens
ctagtcatgagaaaaagcagttcgaagaaggtggtgcctagctgctgtgtctggctggaaggcttcggcagggacacagggcagggcttttgatctttctyagatatgccctgcagctccagaaggcattcgtggccccttccagcagctgggaccactccagaattctagcatttcttggacatcctctagggccttgga

SEQ ID NO: 324527 - DNA, 201 bp, Homo sapiens
ttagggggtttccaggtgagcgatggcagtttttgtgtaggggacaaagagtacacaaaaggaatgtgcagtgtggttagccaagaatgtttaacagtatraaataataaagcaatattaaaaaaataataggacaaaataaaataatgtctttggaaaacagtcttattgctcatagctaaaatttaatgcaaaattttg

SEQ ID NO: 324528 - DNA, 201 bp, Homo sapiens
ggttcaactgtttgctcagagtacaaagccagttaaaggaagaaagtagactagcttagagccctttggacttctacttgggtagaggtagaagtcacttmagccatcctacagccctggcagaggatatttggccaacgaagtcactctcccatgcaaccttccacccatccatgtgagcaaatacttactgaatgccag

SEQ ID NO: 324529 - DNA, 201 bp, Homo sapiens
gtgtgcagctccaggcatgtgtgctatattcattatctattgcagtgtaacaaaataccacaaaacttagcagcttaaaacataagcattattatctcccrtagtcacagtgggtcaggaatctggtactgacttcattgggtggttctggctcggtatctgtcatgaaatagcaatcaagaccccggccagagctgcagt

SEQ ID NO: 324530 - DNA, 201 bp, Homo sapiens
aataagacacgtggaaatctcaaatatcagtgctagaaggcatgtagagatcatttcagacttgtgaaatggaactacagaaatggttcaactgtttgctyagagtacaaagccagttaaaggaagaaagtagactagcttagagccctttggacttctacttgggtagaggtagaagtcacttcagccatcctacagccc

SEQ ID NO: 324531 - DNA, 201 bp, Homo sapiens
tggttattgacttgagtattttgctgggagttgtctttttgctggattttgagtcaatgcaaaaagggcccatatttgggagactgggctttctttagctsgttggatcttaccaaaccagccatgtgtcacaaaaggtatagagctaaggcttatgttggagacatgctgagtgtgtgttcctttaataagacacgtgga

SEQ ID NO: 324532 - DNA, 201 bp, Homo sapiens
gaaccagctcttcaggcatggtagcgcgctcctataatcccagctactcaggaggccaaggcaggagaatcgcttgaacttgggaggcggaggttgcaatragccgagatcgcaccattgcactccagcctgggcgacagggtgagactccatctcaaaaaaaaaaaaaaaaaaaaaacccagctcttttttaaaagatgt

SEQ ID NO: 324533 - DNA, 201 bp, Homo sapiens
ctcagaaagatgacacggttctcccagcagtcccaactggctgaagacataaccaagactacagtgaaatcggccacctctcctccccatgccttctctgmagtagcgagattagcaagattcacattccattctagccataggacatgtcagttcatctgtatgtgtcagaatcctttagatgagagtgacagaaaaccc

SEQ ID NO: 324534 - DNA, 201 bp, Homo sapiens
ttttttaacagaaggaaaaaatatgctcaggatcctcgccaaaagttattagacctaatagagtttttacatgtagacattcttccttttgtaattaaccytccaaagatgcctattaagttgtaagagtagggggaaaagctttgtttgttcttggacaagttaaacaagggatttgctttatctagggagagcgagcgg

SEQ ID NO: 324535 - DNA, 201 bp, Homo sapiens
ctgtactcagattttagttttcttttataccccttaggtttcaatgtttcagagaaagcttcacagctgggatccactcagtcaattaaagccaatcagtrtattttatgttccagccgcatgcgtgaacatgtaacctaggctggttcaatgagagggaattcaagactcgtgcgtagaatatcaggacaggagtaccct

SEQ ID NO: 324536 - DNA, 201 bp, Homo sapiens
aaagggatttcagaaattccagtgtcttatttttgtaagcagggcaattagttcttattgtggtcagtttcacaagagtttgaatcccacaccccaacttkaggttaaatgaataaaatgtaaatattgcttgtgcccttgcagagttgctttaccctcataaaccactttatgatggtcagttgttccaacgattttttt

SEQ ID NO: 324537 - DNA, 201 bp, Homo sapiens
gagggagtagaattaaattaaattgttatgaacaaatctgtatcagcccttgccagcttcctcttaaaaagttggagctggggtgatggagggagaagagyagagttaactcaggtttcagatttatcagtatcctgcttgtaagtggcttggtctaagtacctcttgttaaataggagatgagataacctgccccatctg

SEQ ID NO: 324538 - DNA, 201 bp, Homo sapiens
catctggaatttgggaaacaggcagacttgtctggctcatttgacatggtcattcccccgccccctcctcaaaatgccacttcagtaatctacacattacrggcaatatctccaaggggctgctaccttccctgagcactttcaacggcctttctttttgccttccctctttctggagtgtgtagatttttgtcctaaact

SEQ ID NO: 324539 - DNA, 201 bp, Homo sapiens
tgaatgtttcccacaggtctttataaagtgagtactgggagacgtcatttaggatgtccttgacatttttcgttgctcttcctcaggacatccctccaggtagttagttattcaatctcatctgttttccaaattgaaataaaaaggcatgcaaaagcaaggcaatccttatgaccttagacccaaaagaaataacgatgg

SEQ ID NO: 324540 - DNA, 201 bp, Homo sapiens
gaatgtttcccacaggtctttataaagtgagtactgggagacgtcatttaggatgtccttgacatttttcgttgctcttcctcaggacatccctccaggtagttagttattcaatctcatctgttttccaaattgaaataaaaaggcatgcaaaagcaaggcaatccttatgaccttagacccaaaagaaataacgatggg

SEQ ID NO: 324541 - DNA, 201 bp, Homo sapiens
aatgtttcccacaggtctttataaagtgagtactgggagacgtcatttaggatgtccttgacatttttcgttgctcttcctcaggacatccctccaggtagttagttattcaatctcatctgttttccaaattgaaataaaaaggcatgcaaaagcaaggcaatccttatgaccttagacccaaaagaaataacgatgggc

SEQ ID NO: 324542 - DNA, 201 bp, Homo sapiens
gtggtggagctagcactagttccagatctcctgacttcccctgcagtacttgtatcgcccttgcctcccactgctggcctccaggggaacgagtccctgcmctgccccaggagccactgaccacgaggcctcaaagggaccaatagtcccaagaacttggacaaagctaccatccctaggcccccgtggcttcttgtgcac

SEQ ID NO: 324543 - DNA, 201 bp, Homo sapiens
atgtttcccacaggtctttataaagtgagtactgggagacgtcatttaggatgtccttgacatttttcgttgctcttcctcaggacatccctccaggtagttagttattcaatctcatctgttttccaaattgaaataaaaaggcatgcaaaagcaaggcaatccttatgaccttagacccaaaagaaataacgatgggca

SEQ ID NO: 324544 - DNA, 201 bp, Homo sapiens
tgtccagactaatttcccccaagacttcaatattctgtaaaaattctaagcatgctccttgctcaattgctggcacaatggacaccaggtcatctcttagrcttcgaggttgtaggggcctcctgtcaccttttgaagtacttgcacatatgctacatgttgcagactcagagcagtcctcttaggattccattttgacct

SEQ ID NO: 324545 - DNA, 201 bp, Homo sapiens
caaacctagctctctgccggggtcccgcggctgccaaatcccttttccagggaggtgtgttattaccacctcttcccactgtttctgtcccaaatatcaartgagcttaaggcagccttgggaggtggaacctcccagctcaggagcacaggcccagccttcagcgacccctgatgtgccttctctctcgtttccagctgt

SEQ ID NO: 324546 - DNA, 201 bp, Homo sapiens
aaatacaaaaattagccaggcgtgagtggctggtacatctagtcccagctactcaggaggctgagacacgagaatcacttgaaactgggaagcagcggttscagccagccaagatcacaccactgcactccaacctggacaacagcgagactttgtctcaaaaaccaaacaaacaaaaaacaaagaactggttggaagaat

SEQ ID NO: 324547 - DNA, 201 bp, Homo sapiens
cacagcaagggtcactcctcaccaccccactttctgcttctccttctctgttggttttcctccctgcacactcagaaatgctgctgaaaatccacgcttcsctggtgctccccacagccgccttcattaccaacccaagcaggccagggctctccatttgccgcagctggaagataatatataagccatttgaagcctcat

SEQ ID NO: 324548 - DNA, 201 bp, Homo sapiens
taaaatgctttgggatctttaatgtccagtagacttcccgttttttgtgtgctttgccccaagtttcttgggtattaaattatgcacaattttgtttcctktctttgggaaggtgaaatgctggactcccttcagtgcatgtgtttgaagtggcatatttatggaaattactacccacttttgaaattcagggcatagctc

SEQ ID NO: 324549 - DNA, 201 bp, Homo sapiens
cagtcggcagcagatggaggagagccccttgcccttctggcttggctgttttcctcatcagcctgcctcatactcacagcaagggtcactcctcaccaccycactttctgcttctccttctctgttggttttcctccctgcacactcagaaatgctgctgaaaatccacgcttcgctggtgctccccacagccgccttcat

SEQ ID NO: 324550 - DNA, 201 bp, Homo sapiens
caaatgattgcacttctgtgggccttcgcttcctcatcagccaaatggggaccataatggtgcctaccgcatgggggcgctgtgaaaagtaaagagagtcrgtgatcgttaagcatgtagaacagtgcctggcacgaggcaagccctagaaaaaggggtggttacatgcaaaaacatacaaaatgcaggaattgaatgtgg

SEQ ID NO: 324551 - DNA, 201 bp, Homo sapiens
attagcctagcctaggcttcttcacgtggtggatgggttcccatcagtaagagaagacaatcaccatacaatcatagcaagccaacgccacttatccagtsaaccagctcaaacaaacacttctcaccctctgcttgtatcacatttgctaatatccccttggccaaacaaattgcgtgactaagcttggattctatggat

SEQ ID NO: 324552 - DNA, 201 bp, Homo sapiens
tttctgtactaatttaggtccttaacattataaagcaatacaagtacatcataattatttgggtctgtgagaggcctttgaattatgcaatatgcagcatygccatggtgatgtgccttgccgtcaaccagcatgttatggtagagccatgttctggttttgttaatggccaaatgttgcataccaaacttctaaaagaga

SEQ ID NO: 324553 - DNA, 201 bp, Homo sapiens
aacccctggatgaggatatttaaggtgtagtttacaaaatggaagctttaacctattttttttttaacctccattgtcatatttatggaaacacacgaatkctggagtacaactgggtttaaaacatgacttttcatttttgaaagctgggaaggttataaatatgagtcttagcttccttcatttatagtcatattaata

SEQ ID NO: 324554 - DNA, 201 bp, Homo sapiens
ctgtgcatggtcagggtggtgaactcctgttgactctgaccaaaattctctttggcctccatttggaagtcgtctatgggcctttaattgtaccctctggkaagggagaaagagcacttgaaacaggcatgaattctgtacatatttctaaggctgggctgttttaaaaatgttgctgtctgtctgtcttctttttttttt

SEQ ID NO: 324555 - DNA, 201 bp, Homo sapiens
tctgaaaagcagatgggaactgagacagactgagggagctgtgggttcccaccacccatcttgccctacttcaggggacacactcactcagttaaacggcrgatggacatgtggctaccacccacctttaagctgctgtgagtgcgttctggctttcctggtgactgagaaaaatgcagtacccttagtatcgacatgacg

SEQ ID NO: 324556 - DNA, 201 bp, Homo sapiens
atggaaacctggtcagcagagaccctttattgtcggtgcagaaatgtggttctgggtggggaagtgctctgcaatgcacggagctccttaccagcatttasgcttaatagggcagtggaaacatgaaccaggattgagtatctacagaagcaaggcatttttagtttgttttgctctgagtgaggcctagaggcacagggc

SEQ ID NO: 324557 - DNA, 201 bp, Homo sapiens
gtgagtatcatttgggctttagggcctcataaattcaagctcaactcttatccctgctacttaggagtcatgtgactttggaaagttacatcatcatttgyacctcagctccttcatctgtataatgggagttttaaaaacatccacctcctgcctggagggttccatgagaaaaatatatggagcgccttgcacagtttc

SEQ ID NO: 324558 - DNA, 201 bp, Homo sapiens
agaaaaatctgtctttttttttttttccttctggtgtatggataaacaggaagttgggggcggggggagtgaattctgaattagcccgcaactctgcgtgttttttttttttccttgagttggcgtggtaaaaatagtttatttaatttggtggttttaagaggcttataaattttttaatggttaaacgttcaggaatgc

SEQ ID NO: 324559 - DNA, 201 bp, Homo sapiens
gtgtgtggtctctcaacaagacaaggtaatgcttccaactgcacgcctgccagggctggcactttcacaggaagatgcggtcagctgcgggacacgcagcygaggctctccaggaagggttgattcagaatcatgaggtgagagccctcataatacaggcagatggggatggaaggcctcacctgtcctgcccttgctcac

SEQ ID NO: 324560 - DNA, 201 bp, Homo sapiens
tctttttttttttttccttctggtgtatggataaacaggaagttgggggcggggggagtgaattctgaattagcccgcaactctgcgtgtttttttttttwccttgagttggcgtggtaaaaatagtttatttaatttggtggttttaagaggcttataaattttttaatggttaaacgttcaggaatgcttgtgtagatg

SEQ ID NO: 324561 - DNA, 201 bp, Homo sapiens
actggaaaggcttggcccagactcaattaaggcacagaatttcattctggaagcacagccccgggtaagggggaggtctgcgggtcctcttagagccgtcrggcatctccattcctgtcttgccctcttcaaccacacctgaggtatattttgaaactgtatgttatggccctaggtgcttggcttaaggttctgtccgca

SEQ ID NO: 324562 - DNA, 201 bp, Homo sapiens
ttggagcagttcttggtgagcatggggtgtagtgcgctaggatgttggtggtatctgtaacacaataatggtgaccaggagcaggcccagaggggcgcccrtggaatctggggccagcacaaacctaggtggcttctcagatgaaaatgagactacacagttgggtggcaccagcttctgaagggctggcacccaccttaa

SEQ ID NO: 324563 - DNA, 201 bp, Homo sapiens
cccccaagaggatcaaatccattcctaaacatttagaaatcttgatatctgaagataacatccatattcacctcagtgtaaaagaccataatcaggggtcrgcctatgagccaaatctggcctgctgcctgtttttatcaataaaattttactggaacagccacatgcattcacttatgtattgtctgctgctgcctcctt

SEQ ID NO: 324564 - DNA, 201 bp, Homo sapiens
ggagttggaggaattacattatgaatcaagggctcttagatgttggaactgggaaacgtgacccttgggtgaaaactgattgaagaggtaaagcccctgtwgccaaccagaggcattactctgagggtgctcagctgggaatcttgccctctgctgggagctattgctcagggattgtagcagatgtttgttggtagccca

SEQ ID NO: 324565 - DNA, 201 bp, Homo sapiens
ggtagacatctgtttgcctaaacttaagctatggaattgacttggaagctttagttagaatttgatttgccagccaataatgtaaagcccttgcattgaakcaggtcttttttccttaatagataaatgaccagaatggctatttctgataggctagctgacctgaatcagaagtttccttctcatttctagaagcctggc

SEQ ID NO: 324566 - DNA, 201 bp, Homo sapiens
cagcagaagtgaacttgagtttggcacagcgaagaatttcctgcctatgaaaattgattatggaagagatactaagccttttttttttttctagatcagargttttttaaaaacaaggtgaattgatcatacagtaagtgtgtgagtttattcctggttaaaaagcagagggccagccacagtgtctttaatttccttttt

SEQ ID NO: 324567 - DNA, 201 bp, Homo sapiens
tgtctagttgccagatgatgacagtttgtgatactcagccccaacatatggagtgagaggtatgctttgagatcctccgggaaagtgtcttatttctgcayagccacacacttagtgatcagggtgcagtctccacaagatttaaatccccttcctcaatttagaaatccccttcctgcctccagcacctctcttcccaca

SEQ ID NO: 324568 - DNA, 201 bp, Homo sapiens
atccagtggtacaggcataagattttaagtgttttaaaaggatgaatccgaccggacacagtggctcacgcctgtaatcccagcactttgggaggccgagrcgggtgaatcatgaggtcaggagatcgagaccatcctggctaacacggtgaaaccctggctctgctaaaaatacaaaaggttagctgggcatggtggcac

SEQ ID NO: 324569 - DNA, 201 bp, Homo sapiens
tgagtgtgataaaagtatacagtcacataacctgactccagtcaagatgtagaatatttccattgctccagagagtttccttgtgcacctgtggtcagtcsccacctgccttcccgctcctggaaaaccactgaactgttctcaatcactatagttttgccttttccagaacgtcatataaatggaatcgttttgagtatg

SEQ ID NO: 324570 - DNA, 201 bp, Homo sapiens
tccatcacaaaaaaagattgttacatccctgcctgcaaaggactccggtttcaaagaagaaagagacacaaagatcaattgttgcactgttgtagagagartgttccaacagcatatgctggtagtgggggcttggcgggagcctgacccctcttgggggctgtattttggagcatgagcagtcctgaaccaaagaacaag

SEQ ID NO: 324571 - DNA, 201 bp, Homo sapiens
atatactccatcacaaaaaaagattgttacatccctgcctgcaaaggactccggtttcaaagaagaaagagacacaaagatcaattgttgcactgttgtakagagaatgttccaacagcatatgctggtagtgggggcttggcgggagcctgacccctcttgggggctgtattttggagcatgagcagtcctgaaccaaag

SEQ ID NO: 324572 - DNA, 201 bp, Homo sapiens
caggaagttgggggcggggggagtgaattctgaattagcccgcaactctgcgtgttttttttttttccttgagttggcgtggtaaaaatagtttatttaayttggtggttttaagaggcttataaattttttaatggttaaacgttcaggaatgcttgtgtagatgcttactttgcttgttgtttgaaaatatctagaaca

SEQ ID NO: 324573 - DNA, 201 bp, Homo sapiens
tacaccacggtaagagatactcctgccccaggctgctgggagtgtggaaaccttgtacgtgcatgtgtgcagacacacacacacacacacacacacacacwcacacacacactttgcactgggcctggcaggggcttgcatgctagccagctggggctatgtagtagccacttctttctgtgaggtagcctttgggcgtgg

SEQ ID NO: 324574 - DNA, 201 bp, Homo sapiens
cgttgtttttccttaactcctatttcctggagattcatttgtattgaatttgatcaatccatgagggattgggggaaagactaagaaatggtgcttcaccrttgatagtctgaaaagcacgaatttaaagcaaatgtccttctccctaacctcaagaattcccctgctgcaggccacactttgaggaacattgatttaaaa

SEQ ID NO: 324575 - DNA, 201 bp, Homo sapiens
catatactccatcacaaaaaaagattgttacatccctgcctgcaaaggactccggtttcaaagaagaaagagacacaaagatcaattgttgcactgttgtrgagagaatgttccaacagcatatgctggtagtgggggcttggcgggagcctgacccctcttgggggctgtattttggagcatgagcagtcctgaaccaaa

SEQ ID NO: 324576 - DNA, 201 bp, Homo sapiens
ttagaggactgtttctcaaaatgcaatccggagacctgtgcccgtccgcaaggagagaagttcagacattgagagcaagtgtttcaaaacttttggagcartttgacagggtaattttatgtccattaaatctaattttttttaaagagttggagcttgtgctttggacgtcgttgtttttccttaactcctatttcctgg

SEQ ID NO: 324577 - DNA, 201 bp, Homo sapiens
aggtaattagtaaatttatggagcacttactaagggccctcccaagtccttacatccattttcttacataatccttacaataactctgtgaagtgtttagkattgtttctgtttgcagatagggaatcagaatcaagtggtgtgttcacatagttagtggtggtggtggtaatctgattcccaagcctgtgctcttaagca

SEQ ID NO: 324578 - DNA, 201 bp, Homo sapiens
ttcatctcatgccctgtgttgcttgtcagacactgatgtttagctgaacacaccaaaaaatcctcctcctcttccttctcctggtagattgtagaactgcycatctggaatttgggaaacaggcagacttgtctggctcatttgacatggtcattcccccgccccctcctcaaaatgccacttcagtaatctacacattac

SEQ ID NO: 324579 - DNA, 201 bp, Homo sapiens
aggagacctgatgggaatatgggcaggatggagagggctttactactcctcctaggtagaggtcctgtgtcttcctcagaggccactcctctctgcacatrgctgtgtaacaggaataatgcaggcctttctgatcacatctgccctcctgtaggttgacactgaggtggacattcacaggactatacccagtcaaattga

SEQ ID NO: 324580 - DNA, 201 bp, Homo sapiens
aattgagtaacagacgaaattcccagaatcatgagaaaaactagtcaaagacttcccctggggagcacccggatcaaaaagctgactccggggcctctctmtacaggttgctgaggaggggcctgctgcagtaggaggctggaaggggtggtttggaactgagtcaagaaaagaccccaaacccacagggacagaggaagt

SEQ ID NO: 324581 - DNA, 201 bp, Homo sapiens
agcatttgtaaaatgtgagtaatcatagtacctaccttaacagtagagaagtttggatgggtacctatgtaccgtgcttgggtactttgtacctggtatayagtaagtactacattcaataaatattaattattattactattattaatgggtcctcagttaccttactgagtctgagaagtactcagggtttttatactt

SEQ ID NO: 324582 - DNA, 201 bp, Homo sapiens
tgagagacctaataaaaaagcaatgtttttatagcacttcaaaagctgattttactttccctatgttctgatgcatccctggaggccagtcccccatcccrctttctccatgggcctccctgcgtacatacgtctaatgggagctgctcccatccaaggaaacagtcccagcctgaagcccccaccagggaaagagagggt

SEQ ID NO: 324583 - DNA, 201 bp, Homo sapiens
cctctggaagccctggccagactctcagtcggcagcagatggaggagagccccttgcccttctggcttggctgttttcctcatcagcctgcctcatactcrcagcaagggtcactcctcaccaccccactttctgcttctccttctctgttggttttcctccctgcacactcagaaatgctgctgaaaatccacgcttcgc

SEQ ID NO: 324584 - DNA, 201 bp, Homo sapiens
ttgaatctcccgagtaggagaaagtgagtccaaagttcccaactcagctttgtataatgtagggttccttttctttgccaacgatataaatttctattttstttgcagggaagagggatggggaagattagaagcctcagaacccacagaataataaaagggttaacaagtgaaagctggaaataatacgtttttaacaaa

SEQ ID NO: 324585 - DNA, 201 bp, Homo sapiens
gacccttcccttacaatgtcactcagggcatcccatttgagggtaaagctcttggaaaaatccttctctcttcaagagatccagtccacagaaaaagttcyctcacaacaagccaagactctgagcctcctgggtgagcccaagctctccaaacaactgacgggcacatgcatatacagaaagacaaacctagctctctgc

SEQ ID NO: 324586 - DNA, 201 bp, Homo sapiens
gctgggccccagagaacatggactccctggagggggtggcatggtctgtttcgcctgtctgcctccctgggtttcagtttctttcctcgcgagatcctagscaggggctagagctttgagttacactcggatttgaagtcatcccagaggtctgtgctgcaggaggaagcacgggcttccatagcactgtgtcctgggccc

SEQ ID NO: 324587 - DNA, 201 bp, Homo sapiens
gtggcccttgccacacaatcactaaagggtagtgaggctgctgctgtgttttaatgtagctgtaggtgtcatctcagcttcagaatcgactcaaacagttyctggtatttagcgatgtgtcacctcccacagggctctgggttttttgttggtgttgttttgtgatataattcacgtagcataacattcatcattttaaac

SEQ ID NO: 324588 - DNA, 201 bp, Homo sapiens
tttgagcctattttttgctaatttggaataaatcagtaagttaacattgctgcctgaatttatgatattagagttttaccaatgaaaatataacttccttyttcctttccttgcatataaagtattttggtttaaatttacatttctttgctgatcttccttttcttccttttccttctacatggaatatccatatgatat

SEQ ID NO: 324589 - DNA, 201 bp, Homo sapiens
cttgcacaaatgattgcacttctgtgggccttcgcttcctcatcagccaaatggggaccataatggtgcctaccgcatgggggcgctgtgaaaagtaaagmgagtcggtgatcgttaagcatgtagaacagtgcctggcacgaggcaagccctagaaaaaggggtggttacatgcaaaaacatacaaaatgcaggaattga

SEQ ID NO: 324590 - DNA, 201 bp, Homo sapiens
ggcttctcctccctctcagggcttcatgtaatgtttcatttataacagagattggtggatttgcaaagtaaatatttcaataagaaaaaagcaagatcttyggtgaccctctcggttctgcttctatggaggtattttctatgtctggcaggaaaaaaaaaaaaaaaaaaaaaacctttatcttggctgcaactctgaact

SEQ ID NO: 324591 - DNA, 201 bp, Homo sapiens
aggtggtgtagcccccacccccagctcgtgctgtctgctccgggccgcctctgctcccggcctcccactgctctgccgtgtgcgggccgctcatcaccagstggggcctggcgggaggtaagctgtcctccgaggggcttgtgaatatgaactatgaagatttaagaagcccttaacctgctcagaaaaatgaccacaaac

SEQ ID NO: 324592 - DNA, 201 bp, Homo sapiens
aagtaaatatttcaataagaaaaaagcaagatcttcggtgaccctctcggttctgcttctatggaggtattttctatgtctggcaggaaaaaaaaaaaaamaaaaaaaacctttatcttggctgcaactctgaactggagcgtgtaaaatgtacttctcaggttctgtgagccttaaaataatgagcagtagaaaactctg

SEQ ID NO: 324593 - DNA, 201 bp, Homo sapiens
ttaaggggaagaacaatggagaattgcccacttgcactggtatctttctactgaatctcaaacacatcatttccactcacaactcattgactaaagcagtyctcttggcctcacctaatccaaatggagtagatgaaaatgcaaacataccatgtgtctagaagaaggagaatgggcagttgccaatgtttactcctttct

SEQ ID NO: 324594 - DNA, 201 bp, Homo sapiens
ttcacatttgggctccggtagatgtgtgagtcagttttacaagcaatttgagaaaaagagacccattgcattacaggaggtgaggtgtattgagcagaccrtctttagagaccagtgttaccatatcagttagctggagaaatgaatgaacacctcttttcttttttctttttttttggagacagaatcttgctctgtcgc

SEQ ID NO: 324595 - DNA, 201 bp, Homo sapiens
tcgctaaaacaactctcaagagaaacttttgaaccacggtttgcttccccacccccatgatttaaagttgcgattgatttttattaaagtaaaacaatcastatcataattaatatttattaagtgcttattatgtgtcaggtgcttaaaatgaaccatgtcatctagtcctcagagcagcctgaagagaaaggccctgtt

SEQ ID NO: 324596 - DNA, 201 bp, Homo sapiens
ccattaagagggctgtaataagaaagacgagcaataacaaatgttaggaagatgtacagaaatttggacactcgcacactgctagtgggatcataaatggwacattgccactatgggaaacagtttggcagttcctcaagaacttaaacagagagttattatgggacccattcattttactcctaagtatatactcaagag

SEQ ID NO: 324597 - DNA, 201 bp, Homo sapiens
caacttcctagagaattaaaggttcagtttattcttttataatcaatcatcagaaaatgagattattaacagtatagactttggaatcagtccatgttagytgaaaacccagcttcaccatttgttgacctaagactttgagcaaataaccaagagcatttgtaaaatgtgagtaatcatagtacctaccttaacagtaga

SEQ ID NO: 324598 - DNA, 201 bp, Homo sapiens
tccttccatttgtccattgtttctttcatattatttaagacctatggggaacagtgccataatttctgtgtgttgtaacagatgtgggtgggatctttgastggtaggaatgaccaattgttttctttcttgcctcaaatgctgaatagagggaaccatgtattcaaatatcctgtagcataaaaggcatttgggcacgtg

SEQ ID NO: 324599 - DNA, 201 bp, Homo sapiens
tcctgagcttacatagttagtacaataaatgacgagctaaaatgcaggcctttgaaattttatcccagggtccttccatttgtccattgtttctttcataytatttaagacctatggggaacagtgccataatttctgtgtgttgtaacagatgtgggtgggatctttgagtggtaggaatgaccaattgttttctttctt

SEQ ID NO: 324600 - DNA, 201 bp, Homo sapiens
acattaagagactatcctgagcttacatagttagtacaataaatgacgagctaaaatgcaggcctttgaaattttatcccagggtccttccatttgtccawtgtttctttcatattatttaagacctatggggaacagtgccataatttctgtgtgttgtaacagatgtgggtgggatctttgagtggtaggaatgaccaa

SEQ ID NO: 324601 - DNA, 201 bp, Homo sapiens
tattgaagggagaacccctcatgctttatttgactctgtttctttagtggctacaggactcaataaatgtttggtgaataaacaaattggtatagggctcycactatttttgttcatgttacattgtgttgcaatcatgtatatatctaaatatatatgagatcctgtgtgcaatgaacaaaaactgatgtcctcattttt

SEQ ID NO: 324602 - DNA, 201 bp, Homo sapiens
gaaatgctgtaaagtgaggtttttcatttaaactaactatgtgatataaacacctatatctacatgtagaccatttctctaatgatttggatttctaaaaytgacaacatgaaagagcttctctacattaatatcttaacggtatttggcaaacatctggcaaaattataagccatttgtctatctctctcagatgtctta

SEQ ID NO: 324603 - DNA, 201 bp, Homo sapiens
tgtgaggaaccagtagggagggggtgacgtggtgcactggtgggaagcctaaacaccccaacccaactgtgtgggtgaatcccacaccctccggttcgccygcgggatcttgcacaaatgattgcacttctgtgggccttcgcttcctcatcagccaaatggggaccataatggtgcctaccgcatgggggcgctgtgaaa

SEQ ID NO: 324604 - DNA, 201 bp, Homo sapiens
atttacatagaatttaagtgaatgcatatttcaagatctcattccatattgaccctccagtgagcctctctctgcaaatgagcaattttggattctccggsaagttcaaacagcctttttgtgtttgtaaacatgggtagtttcactgacttctcctacaggttggattacacaaaaaacatgttttcaagcgcttggcct

SEQ ID NO: 324605 - DNA, 201 bp, Homo sapiens
tagaaatatgtgaggaaccagtagggagggggtgacgtggtgcactggtgggaagcctaaacaccccaacccaactgtgtgggtgaatcccacaccctccrgttcgcccgcgggatcttgcacaaatgattgcacttctgtgggccttcgcttcctcatcagccaaatggggaccataatggtgcctaccgcatgggggcg

SEQ ID NO: 324606 - DNA, 201 bp, Homo sapiens
ggacagtgaagcagaatgcttaggagcagacacaggtcctgcagacttccctgtggatgggattatggggactccttctgtgggttgttagtttgttttgkggtttctctttctgcacattgggttgactattttcaaacatggtattgttgggcctcaagttccttgagtgtagaaatggggtcataaggcccacctcac

SEQ ID NO: 324607 - DNA, 201 bp, Homo sapiens
atttccattggattgggaatcacatagcctgggttcaaatcttggctccatcgtttggacaaaccactgaaatccagtttcatcttttgtgtaataacatrtgagcactggaataattttgagaagtagacagtgtagtatatacacagtgcttctttagtgccaagagcacgtatctagaatttgctatattccagaccc

SEQ ID NO: 324608 - DNA, 201 bp, Homo sapiens
ctatgggcctttaattgtaccctctgggaagggagaaagagcacttgaaacaggcatgaattctgtacatatttctaaggctgggctgttttaaaaatgttgctgtctgtctgtcttcttttttttttgcctttgaacttggatgtgaattttcgtgaagtacagtgtgtcaagggaagggcaatgagaaaatatgcaggg

SEQ ID NO: 324609 - DNA, 201 bp, Homo sapiens
ggggtcagtaaactgtggcctgtgggccaaatctagctggtcacctgcttttgtaaataaagtttttttggaacacaaccatgcctattcatttatactcrttgtctaaagctgctttcccaggacaaccacaaaattgagtagttgtgacagagatggtatgacccgcagagatcattttgctgacccttgctctctatt

SEQ ID NO: 324610 - DNA, 201 bp, Homo sapiens
tatgggcctttaattgtaccctctgggaagggagaaagagcacttgaaacaggcatgaattctgtacatatttctaaggctgggctgttttaaaaatgttgctgtctgtctgtcttcttttttttttgcctttgaacttggatgtgaattttcgtgaagtacagtgtgtcaagggaagggcaatgagaaaatatgcagggg

SEQ ID NO: 324611 - DNA, 201 bp, Homo sapiens
tttaagttctctaatgacctaaatcaggggtcagtaaactgtggcctgtgggccaaatctagctggtcacctgcttttgtaaataaagtttttttggaacrcaaccatgcctattcatttatactcattgtctaaagctgctttcccaggacaaccacaaaattgagtagttgtgacagagatggtatgacccgcagagat

SEQ ID NO: 324612 - DNA, 201 bp, Homo sapiens
atgggcctttaattgtaccctctgggaagggagaaagagcacttgaaacaggcatgaattctgtacatatttctaaggctgggctgttttaaaaatgttgytgtctgtctgtcttcttttttttttgcctttgaacttggatgtgaattttcgtgaagtacagtgtgtcaagggaagggcaatgagaaaatatgcaggggt

SEQ ID NO: 324613 - DNA, 201 bp, Homo sapiens
gcacttactttgaggtcacagaaatagattttctgatggtacttcctgttagccaggacattattgctcccccttgtcccccccaccacccctttttttttggcctatccctagaaatggtgtgaagaaagtaaataaaaataaagctaaagcgcgccggtaatctcagctactcaggaggctgaggcaggagaatcgctt

SEQ ID NO: 324614 - DNA, 201 bp, Homo sapiens
accacatattggaagggaagtttgcgaatcagttcactggacttcgtataaagcctaatttcacggagtaccccagtcccaggcctgtaacaatgaggtttctccaccccgccagtagagggcgcactctcgtgaatggcttttgtggccagtttcttcccggatgcttttccacgggttggattttcgagtagtgtgctt

SEQ ID NO: 324615 - DNA, 201 bp, Homo sapiens
gataagataaaatgataggcatgaatgttaacagtagtcataatttgcccttttttaggagggaaggattgtataacttgtggaagaaacatttcaaaatytgggacactggcatttttccaaacttgatttcgtttttcttctccaagccatcttttccaaacaataatgcactttattagtgcaaaagatattttaaaa

SEQ ID NO: 324616 - DNA, 201 bp, Homo sapiens
gatcccagagccattagcagtaactcaagcatattacacagtcacacggtgactccatttcccctatcttgacaatgggtataaggatcttcgcctgtatyggtgaggataagataaaatgataggcatgaatgttaacagtagtcataatttgcccttttttaggagggaaggattgtataacttgtggaagaaacattt

SEQ ID NO: 324617 - DNA, 201 bp, Homo sapiens
gatgatgtccctgatttccaaaagcagatttctttgaagagaacaaagaaaaactgggaggaagaaagtcgtttaataaaagtggattctgagattataaytgtcattttacattgtcatagaatagatatttgtgttccagctgtcaacaattcactgctgatgtctcattagacagtctatccagcaatcaccaaatat

SEQ ID NO: 324618 - DNA, 201 bp, Homo sapiens
aacatgaagagagtaatagtacctacttcatgtggctattgtgagaaggaaatgaattaatacatggcaggggctaaaaacagtacttagctaagcgttarctcctgttactgttccggtatctgttatgatactgagccatcctggtctctaaagattggtgtattcattcatcagcggtccttagtgattgtacaggac

SEQ ID NO: 324619 - DNA, 201 bp, Homo sapiens
atggagaagatactggactgtgcactgaggatttctgagtgaataagacctagcatattcttataagggtattcagctcaagattcctctcttctgagatkttttttccctatggccccacaggctaaactatcagcttcctcatctgtgagtctcagtaccatcttacaacctgtcccttaggttttgaattcatattgc

SEQ ID NO: 324620 - DNA, 201 bp, Homo sapiens
ttatggagaagatactggactgtgcactgaggatttctgagtgaataagacctagcatattcttataagggtattcagctcaagattcctctcttctgagrtgttttttccctatggccccacaggctaaactatcagcttcctcatctgtgagtctcagtaccatcttacaacctgtcccttaggttttgaattcatatt

SEQ ID NO: 324621 - DNA, 201 bp, Homo sapiens
aatgttttttcctccccttttggcctcctgaatgagaccccatcctttaaaggccaccgcaaacctaaattccatcatgtagccacgtttttccaaccctyaggcctttgcgcacattggtcccttcatccagaatgtctcctagcctctctaagccccattcatttaagaaatatatgttgaacattccttatggagaag

SEQ ID NO: 324622 - DNA, 201 bp, Homo sapiens
ttggaagtcagggcaggacactctgagaaagtcaaggccaagggggagatcgatatacagatagataggtagatagatagataggtagatagatagatagrtagatagatagatagatagaagatagatagatacagatagatttatatatgtgtgtttgtgtgtgtgcgtgcgtgtgtatatctcaaattattaaagtct

SEQ ID NO: 324623 - DNA, 201 bp, Homo sapiens
agagctagaagaaacaaaacccggagggactaaggaattcctcttcattttccatggataccattccaatcataaatgggcttttcccaaggctctctccrcagcctatcacttctctggagcctgaaacccagatagccaattacataaagcacacactggataactccacttgggtggcacatgggcacttggaattct

SEQ ID NO: 324624 - DNA, 201 bp, Homo sapiens
aagaaatagatggccccggggatgttggagttctctactgcttgctgatctaccattgcctttcctctctccaccaagggctggaggctgcctctaccttwgaaggcattagcagatgtcttttttattaaaagggaaagaaagcccattctgggcatgggtgtgggtgttaaaggaagggaaaaggaagggcaaagggaa

SEQ ID NO: 324625 - DNA, 201 bp, Homo sapiens
ctgttggaggcatctggtcctaaggaaaatgctgcaggcgtgttgggggccttctcctctcttctcttctgttgggggcagacgttcccgaagccatgctstcatagtgcctagataatgtgtgtattgaccacaaagagatgttggccggcacataacattctcttcatagctgtgctggagctcttgtagccacctgat

SEQ ID NO: 324626 - DNA, 201 bp, Homo sapiens
tctcatctcaaaactgccacattgcggattaagtttcaacatgagttttagaggggaaaaatattcaaaccatagcaggttccctgtaaatatttgaatamaattagtgaatgaatgaatgaatgagtaaattgacaaatagctactctagcttgtttatttaatttatgggaaaacttttccctcaatacatgcaatagt

SEQ ID NO: 324627 - DNA, 201 bp, Homo sapiens
ccagagctacagggtggctgccaagctgccttctccccacctgttggaggcatctggtcctaaggaaaatgctgcaggcgtgttgggggccttctcctctsttctcttctgttgggggcagacgttcccgaagccatgctctcatagtgcctagataatgtgtgtattgaccacaaagagatgttggccggcacataacat

SEQ ID NO: 324628 - DNA, 201 bp, Homo sapiens
cccattgccctttgctcgaagccctctctagccacaggctgcaccatgcctttaagatcacgccctcctgtctacccagagctacagggtggctgccaagstgccttctccccacctgttggaggcatctggtcctaaggaaaatgctgcaggcgtgttgggggccttctcctctcttctcttctgttgggggcagacgtt

SEQ ID NO: 324629 - DNA, 201 bp, Homo sapiens
acagtgcttctttagtgccaagagcacgtatctagaatttgctatattccagacccatgtttttaactcatttaatcctcataacagctctataaagtagwtgctgttgctgcaacattttccaggtagggtgtagcacctgggccaagtctgtgaacctcccggttacttctctttccctttccctttaggaacatgatt

SEQ ID NO: 324630 - DNA, 201 bp, Homo sapiens
gtttgcaacaaaggaagaaactattgatatctcacgaggattttaaggtttatgtaagttaacttttctgctgccatcacttcgttactcaaaaagagcarttaatgcattgataaggttggctttgatttctgatgaagctcatttgctttactgagttttttcatcttcttgcttgcttgcagggctttttccgcagaa

SEQ ID NO: 324631 - DNA, 201 bp, Homo sapiens
ggtttgcaacaaaggaagaaactattgatatctcacgaggattttaaggtttatgtaagttaacttttctgctgccatcacttcgttactcaaaaagagcrattaatgcattgataaggttggctttgatttctgatgaagctcatttgctttactgagttttttcatcttcttgcttgcttgcagggctttttccgcaga

SEQ ID NO: 324632 - DNA, 201 bp, Homo sapiens
gtcacttgcttggagtgatgtcagggcagtattgtctggtgtttagggacacaacctagctttatatcttggctctaccacctgctggccatgggacatcrggcaaataacctcttcatgtctctgtgtccttatctctttttttttttttttatgctttaggttctggaatacatgtgcagaatgtgcaggtttgttaca

SEQ ID NO: 324633 - DNA, 201 bp, Homo sapiens
agtgttatctaccccttatatcccctgggtctggcacatcataggagttcagaaggacttgtgaagttttgttgagatatgcaggaatcccctttgattcygtagggggaaaaacaatgggaagaaatgggtaagaggtggagagtctacatggtgataattacttcagacttggccagttctacaggccaagggtttgat

SEQ ID NO: 324634 - DNA, 201 bp, Homo sapiens
ttaaaaggggcttttgggtttgcaacaaaggaagaaactattgatatctcacgaggattttaaggtttatgtaagttaacttttctgctgccatcacttcrttactcaaaaagagcaattaatgcattgataaggttggctttgatttctgatgaagctcatttgctttactgagttttttcatcttcttgcttgcttgca

SEQ ID NO: 324635 - DNA, 201 bp, Homo sapiens
agatttttgcactgtcagagcagtgtctgtggtgaagagaagcagaaggctacatccaataaatccctgttatttttcagttgtcagacttgacttaaatrtaaatgcctgactagctttccttctcccattctcatagactctatgagtttttcctttttactccaggttcaggatggaaccatgtataagcgagaaaaa

SEQ ID NO: 324636 - DNA, 201 bp, Homo sapiens
gaggacaagagtgattccatttgagtgacttaagcttcttgacctctagaccctggttttctagatcagaaagtcataaattttaaaatcatatttcttctttttttttttttttttcactcaaaaaaagagagtgtgtggctttagttcccatagagcttctggttcagatggtgcaaatgaagcactggctttctcagc

SEQ ID NO: 324637 - DNA, 201 bp, Homo sapiens
gtcacttaacatctgtgtacaccaagttgcttgtctgtaacatgaagagagtaatagtacctacttcatgtggctattgtgagaaggaaatgaattaatayatggcaggggctaaaaacagtacttagctaagcgttagctcctgttactgttccggtatctgttatgatactgagccatcctggtctctaaagattggtg

SEQ ID NO: 324638 - DNA, 201 bp, Homo sapiens
aggtcacttaacatctgtgtacaccaagttgcttgtctgtaacatgaagagagtaatagtacctacttcatgtggctattgtgagaaggaaatgaattaawacatggcaggggctaaaaacagtacttagctaagcgttagctcctgttactgttccggtatctgttatgatactgagccatcctggtctctaaagattgg

SEQ ID NO: 324639 - DNA, 201 bp, Homo sapiens
ttaggatagaggtcaaaaaagctgtgctttgaaattagtcagctgtgggttcaattccatctccaaattgtctgtgaactggagtttccttaagtacaaartggggctgagctgaccttggtagtgtgttatgttcatacatgcttgtacatgaagcatttagtcccaaaccatccaagcacagggtaaatgaaacaaagg

SEQ ID NO: 324640 - DNA, 201 bp, Homo sapiens
ctgaattggcaggtctggaaggggacctgacattctggattccaacagtctcctacatcgtgctgatccttctggtcctcaggtccttctttgagcagcaygggcttagagcagtgatcagcaagtggctagatggcaaatatttgcagctctgcaggcaacagctccagaaatgccctgtgagctgccttctcatgtaaa

SEQ ID NO: 324641 - DNA, 201 bp, Homo sapiens
tcccccctcccttcctccctccctgcctccctccttcctccctccctccttccttccttctttcttcctcttcctatcctcttctttctgtccctttttcytcccatgtttttatttttcttttttatcattattttttttcatgagatacagtctcgctttgtcacccaggctggagtgcagaggcacaatcttggttca

SEQ ID NO: 324642 - DNA, 201 bp, Homo sapiens
cttgtttgtacttgatttctcatctaatgggggtaagaatcacattcttataaatagaaagactttttcaaacacagggtgtgatcattgtctcaaggaastgtgggtaagttttttggcaaagcgaatgatatgaattatcacctccaggtagtttgattttggcagctgtcatacgaggaaaacaagggagatacggaa

SEQ ID NO: 324643 - DNA, 201 bp, Homo sapiens
atgtttgatttggtgacaactatgtgtttattgtaatcccactatgcgttgaaaactggattcggtttttcaacacacagtggaatcacagccaatatgtrcccaaatgtattgagaatatcactggtttccagtaagtttccccaatgttgtcagaagcattatttctttgcatatatggaattgagggatgtcctccca

SEQ ID NO: 324644 - DNA, 201 bp, Homo sapiens
gaaattaatgagaaaaatattattttagagtccagtgttcctttccagcttaagatctagacaaccttaaatgcatgcacagttaaaccatatgttctcargataatgaaaatggctggggttgggggagggcggccaattcttgctgactgtgctttggttgttaattggaagggacttggtaaggggcggggggaacat

SEQ ID NO: 324645 - DNA, 201 bp, Homo sapiens
acctggttatgaacaagagccctgggatgagacagcaaagccaataatcatagttgaccacgggcccctctgtagtcaaggtacatggtagcaaaaacagwctgtgtgattaaaaatggcagttcctggagctgaccaaccattgtgcaatttcctgaatttggtcaaaagattatagggtaagtgggcaaacaggctggg

SEQ ID NO: 324646 - DNA, 201 bp, Homo sapiens
tcccattgccctttgctcgaagccctctctagccacaggctgcaccatgcctttaagatcacgccctcctgtctacccagagctacagggtggctgccaasctgccttctccccacctgttggaggcatctggtcctaaggaaaatgctgcaggcgtgttgggggccttctcctctcttctcttctgttgggggcagacgt

SEQ ID NO: 324647 - DNA, 201 bp, Homo sapiens
aaatactcgaaagattctagagaccctccctacctgccctctcccattgccctttgctcgaagccctctctagccacaggctgcaccatgcctttaagatsacgccctcctgtctacccagagctacagggtggctgccaagctgccttctccccacctgttggaggcatctggtcctaaggaaaatgctgcaggcgtgtt

SEQ ID NO: 324648 - DNA, 201 bp, Homo sapiens
tcttagacgatggtggtccaggagcacgcctgaaacgtgacctccaggggaatcctgcggcatcactcttgctttttagccaggctgctaggaaatactcraaagattctagagaccctccctacctgccctctcccattgccctttgctcgaagccctctctagccacaggctgcaccatgcctttaagatcacgccctc

SEQ ID NO: 324649 - DNA, 201 bp, Homo sapiens
aaccatttcattgctgatctcagtgtgtagaggtcgatactcttagcattatcaggcgtcagcctggactcaccacagcttttccatacaaggacagaatycattttgagagctggagcttaagtaatattttctcaataaacttagtgagatttttgcactgtcagagcagtgtctgtggtgaagagaagcagaaggcta

SEQ ID NO: 324650 - DNA, 201 bp, Homo sapiens
gctttaccctcataaaccactttatgatggtcagttgttccaacgatttttttttttttttagcataaataaaactaaaacttttttttttttttttttttagagattctaacaaatgtcttgtgccatgcagtgtttggttcagggtggtacagctagttagggctattgaaataaaagtatattagggctacatttgtg

SEQ ID NO: 324651 - DNA, 201 bp, Homo sapiens
taccatagcatgctattctttggagaggggtttttcaccagctgaactgaataaactacaaattaggattgtctgaaagtgagggacaatgtttaccccayatactttatgtggttccctcaaaaaaggcttaacgaatgttttttgaaaatggtaagcaaatagctttcttcttattttcctatttgaataaagaatcag

SEQ ID NO: 324652 - DNA, 201 bp, Homo sapiens
ccctcttgggggctgtattttggagcatgagcagtcctgaaccaaagaacaaggcagggaaaggactttcaagtcctagggcctgtggaaaggcactgagmagagagaaaacactctaggtttggggggcctgggtaagtatgactggacaaaggcatgagcaactttgaggggcaggtgggctttaaaccatttcattgc

SEQ ID NO: 324653 - DNA, 201 bp, Homo sapiens
tcaaacccagtagggatcatctgactattcctcagggaaatgagaatttttgtttggatcttacttctctgtattgtactcaaattgtacatgagctatgycacatctggggactttgcgattatggtcatgttttcaataagaaatacttctgaaagctgctgctctaatttatatgtgtcattcctcattaacataaat

SEQ ID NO: 324654 - DNA, 201 bp, Homo sapiens
atagtaaaaagtaagtcaaacaaagttatatttcctgtgagtgttagatgacacttcgatgggcttgtcagtcagtgctgtagtacattactacccggtarcgctttctgcaatgatgaaaatattttgtatatgtggtgtttaatatggtagctatgggccagatgtggctcttcagcatttgaaatgtagctaatgtaa

SEQ ID NO: 324655 - DNA, 201 bp, Homo sapiens
atctggtcagaaatgttttgcacctacactagacaaaaattatgtgtaatttaccaattttctacagtctgtatagaatctgggtccaatcaatagtaaawagtaagtcaaacaaagttatatttcctgtgagtgttagatgacacttcgatgggcttgtcagtcagtgctgtagtacattactacccggtaacgctttct

SEQ ID NO: 324656 - DNA, 201 bp, Homo sapiens
cagttgctggtcagatcccactgacatgcccctgccttactgcctgccgctaacccttcctcacatgctgaactctgtgcacaacttgaggatgggaaggrgggtcttgcttttttgcatcctcaaggtttagacctttcctgataaaacaaggggtcaatgaatgggtggatctgtcacagtggattttaagcatccggg

SEQ ID NO: 324657 - DNA, 201 bp, Homo sapiens
gtacatggagaatgttagatggactggatggacggatggatggctggatggatggatgagtgggtgaatgaatggctggttactagttctctggcttccartgcaattctggcaggccactctcaaactttaaagagaacagggtgatatctaagctggtacttagcggtgttccccttcttcaggtagatctttagtttc

SEQ ID NO: 324658 - DNA, 201 bp, Homo sapiens
cctctgttttgtcagctgtagcacaaaagtcctcattcctaccctttatacacctaagggagtttgtgacaataaaatatcaagagtatcaaaaagctgtsaaagtgctttgagaaatcaaaatgctttagaaacagaggatataaatgtggttaattttattaactcagagccttcagagcaacctatgtctgggtctcc

SEQ ID NO: 324659 - DNA, 201 bp, Homo sapiens
tttttactgttcattgtcatatatggtattttcccacctttggaagatgagctattgtctgcaaagcatcattcaaagagggagtgagtttgagaaacagyagatagactcatcagaccctggtagatatactggataaggaagagaggaggataggtctgcctcttccatttgactcatgggccctcagatggattatgg

SEQ ID NO: 324660 - DNA, 201 bp, Homo sapiens
aagtataaaacaaaattatgcacagtttgatctcatatttgtaacaacacataagatttgaaagataaaacccaaaatgtcaaaagttattgccacgtttkttaagcttacctgtatttttatcacttatcattttagtgcacatttgtttgtgtgattaaaaaaaagaaaagctacttttaaaaagcgaattaactcaga

SEQ ID NO: 324661 - DNA, 201 bp, Homo sapiens
cctcctgggtctgaagtggtagctcattgtggttttaatgtgcattttcctgatgactaatgatgttccatttctttttaatttaataaaaaatttattargttagaaagtataaaacaaaattatgcacagtttgatctcatatttgtaacaacacataagatttgaaagataaaacccaaaatgtcaaaagttattgcc

SEQ ID NO: 324662 - DNA, 201 bp, Homo sapiens
gtcattcccccgccccctcctcaaaatgccacttcagtaatctacacattacaggcaatatctccaaggggctgctaccttccctgagcactttcaacggmctttctttttgccttccctctttctggagtgtgtagatttttgtcctaaactgaagtcagtttttcaagcagttgctatgacagaatctacagttgtcgt

SEQ ID NO: 324663 - DNA, 201 bp, Homo sapiens
ggattccctgtggaaaggtggaaagcaggagagaagctatttatagatgagctttccaaaatagaatcaggactgaaccagaggtaacatcctcgctctgrggacgtgttctccgcttccttagggtgaaccctagtgagtatcatttgggctttagggcctcataaattcaagctcaactcttatccctgctacttagga

SEQ ID NO: 324664 - DNA, 201 bp, Homo sapiens
tgttgctatatctgcccattggccatctgtggccatttggggaactattaagcaagcagcgctgacctaagtgagatggacgatggcaatgttccttggartgatagattgaccagagggatggtgtaatagcctgccagtgggggctagcagatgggcaactttgacgagaagagcagtcagctccccacagggaggagc

SEQ ID NO: 324665 - DNA, 201 bp, Homo sapiens
cgagcggtccctcaccactgatgagcagaacgtggagagataaacccccccagcttccttattcgttgggcaggatactcttaggtatcctctaaaccacrtcccagagtttcccaactagatcgagctctgactgcccacagtgatgatctccgctggccgccttccttccctgcccactctgttcttccagtgcttcct

SEQ ID NO: 324666 - DNA, 201 bp, Homo sapiens
cgctcctggaacatgcgccctggtgtgaccgggattcctacaggatggctcacatgtgaggcattgccactcctgcgagcggtccctcaccactgatgagyagaacgtggagagataaacccccccagcttccttattcgttgggcaggatactcttaggtatcctctaaaccacgtcccagagtttcccaactagatcga

SEQ ID NO: 324667 - DNA, 201 bp, Homo sapiens
cttcgtctgccaggacaaatcatcagggtaccactatggggtcagcgcctgtgagggatgtaaggtgagtattcacacttctgtgcctgatgaactctcaktctccatgtactttatggaggtgacctacccagttccaaaaatgggctggatgtgtaacatcacctcccataagtgtggtgaattcagttatattcagtg

SEQ ID NO: 324668 - DNA, 201 bp, Homo sapiens
gttgaggctgcagtgagccgggattgcaccactgcattccagcctaggcaacagagggagatcctgtctaaaaaataaaaaaaaaaaaagaaatttatttwaaaaaaaaatccaggccaggcatggtggctcacacctgtaatcccagcactttgggaggccgaggcaggtggatcacaaggtcaggaattcgagaccaga

SEQ ID NO: 324669 - DNA, 201 bp, Homo sapiens
gatggagttacttctgaaggaggaggaaatgggaaaggaaacttcaaaggaaaacatgatatgctttgtcttaaaagtatgtgagggaacttcgggggtgwtggaactattccatatcttgatcatagtggttttcccatgactgtatacatttgttaaaactcatagaactgtatgccaaaaagggtgaattttgtagga

SEQ ID NO: 324670 - DNA, 201 bp, Homo sapiens
tggtctttctgaagctaaatcaataaataataatcaatgtgtggctctctcctgctcaaaattgttcaattgttcaattttgagcaggagagagctcaaaygtgacaatgagatgaggagtaattagaatattacagctggttggaggataagtggatacaacagttttgaaaaacaatttagcattagttagtaaagtga

SEQ ID NO: 324671 - DNA, 201 bp, Homo sapiens
ggatgtccttgacatttttcgttgctcttcctcaggacatccctccaggtagttagttattcaatctcatctgttttccaaattgaaataaaaaggcatgsaaaagcaaggcaatccttatgaccttagacccaaaagaaataacgatgggcatgaaattgagagagtacaataaagatggcttcctcaaaacaagagttg

SEQ ID NO: 324672 - DNA, 201 bp, Homo sapiens
gttcagaagaatcacagattttctagatactgatgtttgagatgaatgtttcccacaggtctttataaagtgagtactgggagacgtcatttaggatgtcmttgacatttttcgttgctcttcctcaggacatccctccaggtagttagttattcaatctcatctgttttccaaattgaaataaaaaggcatgcaaaagca

SEQ ID NO: 324673 - DNA, 201 bp, Homo sapiens
ggaaaatagccttgttgttcagaagaatcacagattttctagatactgatgtttgagatgaatgtttcccacaggtctttataaagtgagtactgggagaygtcatttaggatgtccttgacatttttcgttgctcttcctcaggacatccctccaggtagttagttattcaatctcatctgttttccaaattgaaataaa

SEQ ID NO: 324674 - DNA, 201 bp, Homo sapiens
ggtggtgactgtttcacaatttgtgaaatttgtgaatatattaaaaaccactgaataacacattttaaaagggcaaatttatagcatttgaattgtatctyaattttaaaaaaccgatgattttaaaatgttaggttaattgatgtaagggaaaatataaaagtaaaccttggagtcagattcgtatactaagttgtgtat

SEQ ID NO: 324675 - DNA, 201 bp, Homo sapiens
agagtctctgtagtgcctcagttgctggtcagatcccactgacatgcccctgccttactgcctgccgctaacccttcctcacatgctgaactctgtgcacmacttgaggatgggaaggagggtcttgcttttttgcatcctcaaggtttagacctttcctgataaaacaaggggtcaatgaatgggtggatctgtcacagt

SEQ ID NO: 324676 - DNA, 201 bp, Homo sapiens
aacacctctgttaaaatatatgaaaattggtccctggttatctgtcatagcttaactccttatcttaaccatatttccattatctcttttgaaaaggtgcrgagcgtgtaattaccttgaaaatggaaattcctggatcaatgccacctctcattcaagaaatgctggagaattctgaaggacatgaacccttgaccccaa

SEQ ID NO: 324677 - DNA, 201 bp, Homo sapiens
agaaagtggcccacagttatattttttgtagggaaagatatgttttcagatgaccactctgcacagattctgggaggatttcacagtatttgtaacctgtkattttagattctaagcacatttgtagttccagtggcacaaaaataaactgtgttttcttggaaaatgtgtgtgtctgggatatgtgacaggacttgcaac

SEQ ID NO: 324678 - DNA, 201 bp, Homo sapiens
ctcccctaccagtagacacacccagcttccagccacactacaccatgctgacttatgagccgtatgtctccatttttctgaggatttacctccttctccakcagttgaaccccaggagcctgatgaaatgtcatttcctctttgaagcctcccctaagcctcattccacactctaggcagaattattcattcttccctccc

SEQ ID NO: 324679 - DNA, 201 bp, Homo sapiens
gagaccgaggcaggcaaatcgttcgaggccaggagttcaagtccatcctggccaacatggtgaaaccctgtgtctactaaaattacaaaaattagccaggygtggtggcaggtgcctgtgatcctagctactcggaaggctgaggcacaagaatcgctggaacccaagaagcggaggttgtagtgagccaagaatgcaccg

SEQ ID NO: 324680 - DNA, 201 bp, Homo sapiens
agagttgactctcctcttcattccatttcaaattctatactttaaaatagttctccttcaaataatgcatttatgggtattgtctatttctgtttgatttkcccttttaaagtagaaatcaactttttattttagaacatttttctctttattaaggtataacttacatatcttaatggcacagacttttaagtgtactgt

SEQ ID NO: 324681 - DNA, 201 bp, Homo sapiens
cccaaaagaaataacgatgggcatgaaattgagagagtacaataaagatggcttcctcaaaacaagagttgactctcctcttcattccatttcaaattctrtactttaaaatagttctccttcaaataatgcatttatgggtattgtctatttctgtttgatttgcccttttaaagtagaaatcaactttttattttagaa

SEQ ID NO: 324682 - DNA, 201 bp, Homo sapiens
agcatccagccagcgagaccatggaattctgtaatatctgcttcgtgattttaatcctgtaagatatttcgagaagaaatcatgcttagtggaaggaaagyggtttaggctttttaatcttcctagttaatttgatctggagcctcagtgtctgggcaggccccaactctttggtccacacctcggggtatggttacccaa

SEQ ID NO: 324683 - DNA, 201 bp, Homo sapiens
acaagtaaaatatgatatatccttacaacagaatatttttcatccataaaaaggaatgaaatattgatatatggtacgacatggatgacctttgaaaataytacgctaagtgaaagaagccagacacaaaaggccccatattctatgagatcatccatacaaaatgtccagaaagggcaaatccatagaaacacaaagtaa

SEQ ID NO: 324684 - DNA, 201 bp, Homo sapiens
gtgtggatcaaaaatacggtatttatgggatgcaaaccccacatatacaaagggccaacttctcgtacacacaggttctgcagggccgactgctggacttyagtatgcccagctttggttctacacaggggtcctgaaatcccctgcatataccgagtgacaactgtaaaaggataataatgctaagtccttttcatatgt

SEQ ID NO: 324685 - DNA, 201 bp, Homo sapiens
gacctaagggaaaccgcacagctacctggcaatgatcctctggcagacacatcagttaccatgggaagaatgtctcatggttgacagcattctatttgagsgaagcagggacaattagaaagtccccacctctacctatttaactcctacctgttggccctatatctaccttctcaaggtactgagaataattctcaatat

SEQ ID NO: 324686 - DNA, 201 bp, Homo sapiens
aggagagagctgtgacccaggaataaatcaatcttgtagctccaagaaagtcagaggaaaagagatgagagtggggaggtcttcctgaaagaggagacttytgatccaggtcatgaggtgagcgactttatatggcaatacctagggccagtaactgctacatcagggtccccctccgcctcctccaggtggtatcttagc

SEQ ID NO: 324687 - DNA, 201 bp, Homo sapiens
agaaaggctcgataactttccccttgtctcttagtcaacaagtggtcagaggtgagacttgaacctaaacagtctgactccagggcagctcttttaaccastatactatacacagaatcccttgagagggttgccaaaaagggagaatggaagctggggccattggcggcatctagctaggaggagagagctgtgacccag

SEQ ID NO: 324688 - DNA, 201 bp, Homo sapiens
tcattgtaatcattattacatctcatatttattgagcatttactatgtactagggaccatgctaagtactataagtatactaattcttttattccttatgmggactctgtgatttgggtttcgttgccctcatattacagatgcaaaagccaggtacagaaaggctcgataactttccccttgtctcttagtcaacaagtg

SEQ ID NO: 324689 - DNA, 201 bp, Homo sapiens
gagctattttgtcttccactaccaaaagcaaaaaagtaaaagacaaagaggaagaaagaaaactttctgatagtaaagtcgaattaatgtttatttgctasgtattttaagtatctattgtgtgcagaggatcccaaacctagttaaccattaccatttagtgaaacttacatgaatcatagtgcatctaattggcctctc

SEQ ID NO: 324690 - DNA, 201 bp, Homo sapiens
catgttactctagtttactggtaacccttatctaaagatgggtgctaagtgtttgtgctagagagtgtctcttcattaagtggagctattttgtcttccaytaccaaaagcaaaaaagtaaaagacaaagaggaagaaagaaaactttctgatagtaaagtcgaattaatgtttatttgctaggtattttaagtatctatt

SEQ ID NO: 324691 - DNA, 201 bp, Homo sapiens
gaggtcaaatgcagccctcgcctctagctatctcaacttgggcacatggcaaaattttgcttcacgtgaaatgaactaacccattgcgtggagattatcayagaaatgttgcaggattgttttgtggattggactcatggggtaatgcatttagcaccgtgcttggcacatagtaagtgccgaatgagagtggttgtctgc

SEQ ID NO: 324692 - DNA, 201 bp, Homo sapiens
tatgaatatttgcctgcatctgtttaggagatttaaaaaaaaaaaaaattatgtttgggtaccagcagcccggtgatgtcagtgccactgtgggactcaargcccattaacactcagactgaaaaggaagtattaaaattccttcagctttactaatatatttctccccactgcctgtctcctggagaggggacactcagt

SEQ ID NO: 324693 - DNA, 201 bp, Homo sapiens
tcgtttatctgctaggggcccagaacaagttactcaacttcttggaggctgtgttttctacctggatgagagaaacattggtattgactaacagcccaggygtgacatgagaattgatgcttttaatcctgtttagacagcagtgtttccataagctgcttcctcttcccagttccctcccccagaagacattagatcttc

SEQ ID NO: 324694 - DNA, 201 bp, Homo sapiens
cagtttaatgatgaaacatttctctgttgctttgcattttaattatatatacattatattacagtagtcgtgccatggagctactaaaataccgttgttgmcattttattacaaaaaaaatcacgattaatgcctagaaattgaaagctgaaaaatgtagctagacacatctccaaggaagtaaattaccggttccattaa

SEQ ID NO: 324695 - DNA, 201 bp, Homo sapiens
aatggactgggtcatcagacaggaaagcatcctgcatgtgccattccttctgggaagctctttttcctctggacaattccatctgcagatcatgggtcacwtttcatccagttcctttccctctctccaaattttagagccattgagttactcaaaatccatacatttgaagataggaagctaacattcaattggctcagg

SEQ ID NO: 324696 - DNA, 201 bp, Homo sapiens
agtgttattgctgaatttggggcagaagcatatgaattcactgttgaaaaaagtaatgaactaaaatacattttctcttttttctccctctaccccatctstattatagcaattgaaacacagagcaccagctctgaggaactcgtcccaagccccccatctccacttcctccccctcgagtgtacaaaccctgcttcgtc

SEQ ID NO: 324697 - DNA, 201 bp, Homo sapiens
tcgagtgtacaaaccctgcttcgtctgccaggacaaatcatcagggtaccactatggggtcagcgcctgtgagggatgtaaggtgagtattcacacttctrtgcctgatgaactctcattctccatgtactttatggaggtgacctacccagttccaaaaatgggctggatgtgtaacatcacctcccataagtgtggtga

SEQ ID NO: 324698 - DNA, 201 bp, Homo sapiens
ctcgggtgctgtgaggaagggagagtagtataccctggatgcccctgaggttaggctaggttcccatgggtcattggcctcctccaagactgggtgccccyaccctgtgtctgtaacagaaacaccatggaaggtactgttgctgccaccccctcattccagctcctttctttctgaaaaccactggccgtgaattcacac

SEQ ID NO: 324699 - DNA, 201 bp, Homo sapiens
gtgttttctacctggatgagagaaacattggtattgactaacagcccaggcgtgacatgagaattgatgcttttaatcctgtttagacagcagtgtttccrtaagctgcttcctcttcccagttccctcccccagaagacattagatcttctagggcttttgccagtgaaaaaggctgagctgagcaggtgtcttggggag

SEQ ID NO: 324700 - DNA, 201 bp, Homo sapiens
cacaccagtgagtctccctggctggattataaactcttaaaaggcatgcatcatgtctttctcaccttgtagcccctgaatatagcatgaagctttgctcrgtgaagttagattgatcaaggggttaaatgtgaccagttttaaaggcaaacccatcttctccctggctttactttctgaaaagttgtcagaggcaaaaca

SEQ ID NO: 324701 - DNA, 201 bp, Homo sapiens
ggctcatgccttcatgaattgactcattcatttattcacatattttctgagcacttactatgtagactttcaacaaccagtatttattgtgtgctgttttrgatgaaagtcagcatagactaaagggttcctgatgtcctgaagtttatgttcagggttgggagagggtagacacaggcagataataagcaattttacata

SEQ ID NO: 324702 - DNA, 201 bp, Homo sapiens
ggtaacaaattaccgcacatttagcggcttgaactaacacaagtttactatcttgtagttctggaggtctgacgtccacaatgggtctcactgaactaagrtcaagaatttggcagcgctgcattcctttttggaggctctaggggagaaaccactttcttgtcatttccagctcctagaagctgcctgcattctttgact

SEQ ID NO: 324703 - DNA, 201 bp, Homo sapiens
aagagcctgcccaccatggagttcaaggaagcttgtcaaactgttttgaaatggtcggttaaacccctgaaggacagtgtgcccagatggccagcatttgmtttagctgttcaggacagcaagagactgagacaggaagatgagcaaagtctcagatgtgccctcctgagtccagacagcttggtgtaaaattgtcctgtg

SEQ ID NO: 324704 - DNA, 201 bp, Homo sapiens
ccaggcgggaggcctgtggatgaggtgctctgcaagctgagccagaagccttaggaaaatgcttgccaaacactgatgtttgactaattggtaatgtctgyggagttggcaccaggagaaaagaaagtaaagaggctggtggatgttgaggaaggaagacagacagacttgaagccaagcctcgagtgtttggagaaagag

SEQ ID NO: 324705 - DNA, 201 bp, Homo sapiens
tagaaatatatttatctcttgttgctgtcttcaatgaatacaatgaggcttacaaaagtaatgtgaaaaaaatgacaactcaacagtaaaaagataaatasctcaattttaaaatgggcaatggatttgagtagacattccaccaaagaaaatatacaaataactaataaatacatgaaaagatgttcaacatctttagtc

SEQ ID NO: 324706 - DNA, 201 bp, Homo sapiens
gaaattgtgttatcatcaagaagagtaatacctctcattagaagaatcttccttcctgttaataccttaacatttcttcaggcagtgttttaacatcttgrcattttgccttttcctctggtttgagacccttttcacttcagctttgaatgtgtaaggagcaccagaaatgcactatgggccatgatctactcctagttc

SEQ ID NO: 324707 - DNA, 201 bp, Homo sapiens
tttttgggggaaggggattataacgtcagttggtctgacttctaaacaatattttggtttagcaacattgtttaaatcttaaaataaaactgaggaacttmactagtgtttgaaaatggacccatttaggagccagtcatgatatggcccttccaaagggaaagataaaagttgcttctagtaaactctgtggactcaaga

SEQ ID NO: 324708 - DNA, 201 bp, Homo sapiens
ccaagcagttaaagggcacctgctatccttgtctttatgtgagagacccagtcgtgggcctacaactgtcccattctgtgtaaacaccattttttccacartggcttgttgagtcttccctggagtagaagtgctggcagccatcctgaggttgcaagtttcctgtagtggaactttcattgtggtactgattactatttg

SEQ ID NO: 324709 - DNA, 201 bp, Homo sapiens
tttttttgtgtcacccaggctggagtgcagtggcgtgatctcagctccctgcaacctccacctcctgggttcaagcgatactcctgcctaagcctcccaartagctggcattataggcgcctgccaccacgcccggctaatttttgtatctttagtagagatggcgtttcatcaagttggccaggctattcatcatgttgg

SEQ ID NO: 324710 - DNA, 201 bp, Homo sapiens
ccaatgctactacgtcagtgtccagaaagattggaatccacctgccaggatgggaggtttacacccatttcataattatatagaactttcttgttattccyataattcgactcagttatatcattaaacccatctggttatcaaaaggaaagggattgacttggtaatgcgggctccttttttttgctaagcatcattttg

SEQ ID NO: 324711 - DNA, 201 bp, Homo sapiens
ggggagcacagtcaatggatgtgggtaaatgtttgtttctgaatccttgctggaacccaagtcacctctcctctcatggaagtcctctgccatatccacgytgaccaataacattctaaagtaggcttcaagatcagtctccttggctctgcagtgctattactcctgcaggaaatgcatctggcatttgttactctcaca

SEQ ID NO: 324712 - DNA, 201 bp, Homo sapiens
cctaagtaatttagaaaacagatgtctttagttggttcaaattctcagaaccagatttaaagaaagcatgtggagaagagcgaaatcttgcattttagagrcttcgtttccccttgtcatacagtttttcttcctaccacatcttaattcaaactcttgagaagagacaaagtagtccccaagatatcatatttatgatat

SEQ ID NO: 324713 - DNA, 201 bp, Homo sapiens
ggactgtgggttttagtgtgtatttctgcagctcccttttataaggaggctctcttctatgggcccaactctgaatcatgatgccgtttgatttacgactstcttcttgaatgcctggagcagaatccctcagttcataaagctgaggacagaagttttaactataatcaaaatgaagactcttgctcttctttacccagg

SEQ ID NO: 324714 - DNA, 201 bp, Homo sapiens
agtgacctccaaggaactaaatgtttacctgtattatatcggggtggataagctattatccaaataacaaagggggggggatcccctgcaaaaaatcactrtagataagttatgttgaagtatattactattaagtaattagtattttagtaacttattttaaataataaagctgacattcctataagaatatataaaaca

SEQ ID NO: 324715 - DNA, 201 bp, Homo sapiens
tagagccatgttctggttttgttaatggccaaatgttgcataccaaacttctaaaagagattttaaaattcatgctctttggtaaagggtttcagtatatwtgagcatgttttggctctctctccttctgcttacctttttctcccccgcttctcagtacagatgagaaaatttaatttgggtccagatgagatttagtaa

SEQ ID NO: 324716 - DNA, 201 bp, Homo sapiens
tattttgttttatccaaagagtccttacctgttggctttgggactagcacctaagccatcatctttaactaaaagatgggacaggctaatgctgggctgcyagtgccctgaacactggaagaagttccagcttctgctgaggaggtggaggccatcactcctccagagacccttccttcaggtgcacccagatgtgtcatt

SEQ ID NO: 324717 - DNA, 201 bp, Homo sapiens
atctgtcttatttcttatgagctctgggcctcagaaagaatatttctgttctccactacgtacactatcagaaatatgagcattggatgagggatggtaakagtgacctccaaggaactaaatgtttacctgtattatatcggggtggataagctattatccaaataacaaagggggggggatcccctgcaaaaaatcact

SEQ ID NO: 324718 - DNA, 201 bp, Homo sapiens
gtgaccccatgtatccagaacagaggcctggaaccacacgaatgtacttcaagtcctactcagccaccatcagccccatgacggtgaacaaattacctaaygtctctcagcctcagttttcccatctctaaatgggaataatgtgaaatagttgggaggatgaaatgagacaatttatgaaaagctgctgtgatggaaccc

SEQ ID NO: 324719 - DNA, 201 bp, Homo sapiens
tcaggtattcctttgttatttgattatttttatctgtcttatttcttatgagctctgggcctcagaaagaatatttctgttctccactacgtacactatcrgaaatatgagcattggatgagggatggtaagagtgacctccaaggaactaaatgtttacctgtattatatcggggtggataagctattatccaaataaca

SEQ ID NO: 324720 - DNA, 201 bp, Homo sapiens
aaatgagccgggctttgagaagcaacacccagggtggcactctggggtccacctcgcccattggtgtcagccaggagaaacactggcatgtctgccaggcygagggagagtctcggcttaacctcaaccagtcttcactgagtttggggaacactgtcccatcccagagcagggacacaggccaggacaagactggacact

SEQ ID NO: 324721 - DNA, 201 bp, Homo sapiens
tggcaggggcttgcatgctagccagctggggctatgtagtagccacttctttctgtgaggtagcctttgggcgtgggcaatcagtgagtaggctgagtgcygcctcactgcagtcatgcacacatgcattcactctagatgcattaactgagtatttgctatacgacaggctgtgttctaagccctggcaacatgaactat

SEQ ID NO: 324722 - DNA, 201 bp, Homo sapiens
gataaatgcacagtgcctattgggctccctgaggctggggccaccagccacaggttggcattcccccatgtcacctatgtaacctctaaagcagacagtgstattgttttagactttaagtatcatccttgaataggtataacatggaaggaaaagcaaaataccatgattgcctaggagaggaagcatccatgtatgctt

SEQ ID NO: 324723 - DNA, 201 bp, Homo sapiens
ctctccttttgtgctgggatggtgatgtgaggtgtctggtgtccctgacgcagtcagctaacagcttccttaagaagcctggccctgtgctaccctcagtsgcgtttgacacagtaatagacacacattacagacgtaaatagcaactccaggttttcgcttccatggaagtgtgttaaagttatgtccactaaatgggtt

SEQ ID NO: 324724 - DNA, 201 bp, Homo sapiens
gaaaggagggaaggaaaagagaataccggaataagattgcaaagctagatacaaaatggttcatttcctacagggcaataaaacaataatatttggggttrttgttcatctggtcagaaatgttttgcacctacactagacaaaaattatgtgtaatttaccaattttctacagtctgtatagaatctgggtccaatcaat

SEQ ID NO: 324725 - DNA, 201 bp, Homo sapiens
attaaatactttaaatgagcttaatgattttatttgaccaaggccatttaaaaccacattgttgtttttaattggagtggataaacatgaacatgatgctstctttggagaatatttttagctttcctcactctgatagttgcttctgttttaggggtttgctgcagtattgatcccaaagaacaaaataacatatccaaa

SEQ ID NO: 324726 - DNA, 201 bp, Homo sapiens
aggagagagaggagggatgctggactagttcccctgctcagtcacacactttctctccttttgtgctgggatggtgatgtgaggtgtctggtgtccctgaygcagtcagctaacagcttccttaagaagcctggccctgtgctaccctcagtggcgtttgacacagtaatagacacacattacagacgtaaatagcaactc

SEQ ID NO: 324727 - DNA, 201 bp, Homo sapiens
ctcccgagtagctgggactacaggcgcgtgccaccatgcccggctatttttttgtatttttagtagagacggggtttcaccatgttagccaggatggtctygatctcctgacctcatgatccgcccagctcggcctcccaaagtgctgggattacaggcgtgagccacccgcctagccctctagctgccacatttttaaaa

SEQ ID NO: 324728 - DNA, 201 bp, Homo sapiens
caattcagtttggaaattagcagtttgcaacctctgccttaaatgccaggaagaaataatggatgaaaataaaagaattatgttttttgaatttttctgcrtttaaaaatttttgaaaaacactggccaaatatttttaaagctagcccagaagctagtccagaaatgtgctttccttttataacctaaaaggcagatcca

SEQ ID NO: 324729 - DNA, 201 bp, Homo sapiens
tctccagacatttcactactaaaaaccactcagatcatacaatgattaggcaagaaatattaggaaagaacattaagtcaatctcttgcatattttaaatmtattctttaagtattggcaatgtatttaaaagtttttaaaagactgtgtcggccaccactgagccaaaataaacatgtctgttagctcaattcagtttgg

SEQ ID NO: 324730 - DNA, 201 bp, Homo sapiens
aggtaggagccacatggccttttattccctagccttgcaagtcccatagtgttcctcctgtcaaattctattggttaaagcagccacagatccatccaggyacaagaggaggggacataaaccctcctttcattgggatagtgccatagtcactttaaaagagcatctgggaaggagctattattgtggccatctttggaa

SEQ ID NO: 324731 - DNA, 201 bp, Homo sapiens
gttgtcagacctattacatgggggctcaggggtccaaaaacgaaggttgcagaggacaaggtaggagccacatggccttttattccctagccttgcaagtsccatagtgttcctcctgtcaaattctattggttaaagcagccacagatccatccaggtacaagaggaggggacataaaccctcctttcattgggatagtg

SEQ ID NO: 324732 - DNA, 201 bp, Homo sapiens
gtgttgtgtgtggtctctcaacaagacaaggtaatgcttccaactgcacgcctgccagggctggcactttcacaggaagatgcggtcagctgcgggacacrcagccgaggctctccaggaagggttgattcagaatcatgaggtgagagccctcataatacaggcagatggggatggaaggcctcacctgtcctgcccttg

SEQ ID NO: 324733 - DNA, 201 bp, Homo sapiens
ttcaggaggcccgaggcaggcagatcacttgagcctaggcacttgagaccagcctaggcaacacggcagaaccctgtctctacaaaaagaattatgtggcygtggtggcacgcacctgtagtcctagctactcgggaggctagggtgggaggataatcggagcctgggaatgttgaggctgcagtgagccgggattgcacc

SEQ ID NO: 324734 - DNA, 201 bp, Homo sapiens
aaatggtggtctcagagttgtcagacctattacatgggggctcaggggtccaaaaacgaaggttgcagaggacaaggtaggagccacatggccttttattycctagccttgcaagtcccatagtgttcctcctgtcaaattctattggttaaagcagccacagatccatccaggtacaagaggaggggacataaaccctcc

SEQ ID NO: 324735 - DNA, 201 bp, Homo sapiens
tatccccactttgcagacgcagattcctaggcactgagaggttcaaatacctaccttgaatctcccgagtaggagaaagtgagtccaaagttcccaactcrgctttgtataatgtagggttccttttctttgccaacgatataaatttctattttgtttgcagggaagagggatggggaagattagaagcctcagaaccca

SEQ ID NO: 324736 - DNA, 201 bp, Homo sapiens
tagtcctcagagcagcctgaagagaaaggccctgttatccccactttgcagacgcagattcctaggcactgagaggttcaaatacctaccttgaatctccsgagtaggagaaagtgagtccaaagttcccaactcagctttgtataatgtagggttccttttctttgccaacgatataaatttctattttgtttgcaggga

SEQ ID NO: 324737 - DNA, 201 bp, Homo sapiens
aaatagattgtttttacatatatacatagttgtcaataagaaacttgttttaggcttgcatggcgactcataccggaaattctagcacttcaggaggcccraggcaggcagatcacttgagcctaggcacttgagaccagcctaggcaacacggcagaaccctgtctctacaaaaagaattatgtggccgtggtggcacgc

SEQ ID NO: 324738 - DNA, 201 bp, Homo sapiens
gagtgactaaaactgtaaaactaactgtgattatctttgcttctatggatttaagagaaaacaaaacaactcactctgtaaacctccaaagaaaagccctycccttcgccccccacagattttcttgctgtttgtttctttacctcagtgtctcctactcaaagcataatgagtgctgtttttgctccagcaacaaggccc

SEQ ID NO: 324739 - DNA, 201 bp, Homo sapiens
gatgctcagtaaatagattgtttttacatatatacatagttgtcaataagaaacttgttttaggcttgcatggcgactcataccggaaattctagcacttyaggaggcccgaggcaggcagatcacttgagcctaggcacttgagaccagcctaggcaacacggcagaaccctgtctctacaaaaagaattatgtggccgt

SEQ ID NO: 324740 - DNA, 201 bp, Homo sapiens
aatgtcatttcctctttgaagcctcccctaagcctcattccacactctaggcagaattattcattcttccctccccaaccctgttttctcacagtgcttcrcacaaagctccatgaaccgcaaacttattatattatacagatagtatgattcttcacacaccagtgagtctccctggctggattataaactcttaaaagg

SEQ ID NO: 324741 - DNA, 201 bp, Homo sapiens
atggcgtttcatcaagttggccaggctattcatcatgttggccaggctggtcttgaactcctgacctcaggtgacccacccacttcagcctcccagagtgytgggattacaggcgtgagccaccgcgcctggcctgcattaaccacttttaatgctttatcccattgatcttcataacaaccctatgagatagattagtta

SEQ ID NO: 324742 - DNA, 201 bp, Homo sapiens
tgatacagtgaggttgggtagacattcttcgtgcactgtacctgctgtggaagcttgagctccaggttttgttttggtttttttctaatctttaaaatgawtccataacacctcccttgaaagcctaagatcagtcttaaagccttaaataagacaatgtatttgacacatgatgctcagtaaatagattgtttttacata

SEQ ID NO: 324743 - DNA, 201 bp, Homo sapiens
tctattgagatgactttcagagtcaaactgttttttgggtggtccaggagcttttggtgtctgtgtgtgtgtataggtgttgagagagggaaaactcatcrcacagaaggtccctcactggctgggggtgcttcaagaacaagtatggagtttggtttttatttatatctttaattgtgagcctagtgccttgtacttaat

SEQ ID NO: 324744 - DNA, 201 bp, Homo sapiens
aatctgccatatataatgtggaaatgcttgaccaactgatttggttagcaaatggcctctggctaacatccaggaagaggagctaaatatttaactctcarattattatgaacatggtccaaatgtctggagccctaaagaggcttcctataactgcttctaatgtgagaatttaacttcattctttgttgagagtggctc

SEQ ID NO: 324745 - DNA, 201 bp, Homo sapiens
ctattcatttcaatacagtctgataggtgggggtggggaggggagattttgagctgtgcagttttaatgaaatgtttaaggctgaaataatggttctatayagctcttgacatgatttattttattttgtgtcaatttgcctaaaatgtgtaatgttgtggcattccactgagggagggctgcaaagggctctcactgagt

SEQ ID NO: 324746 - DNA, 201 bp, Homo sapiens
aaaaaagcagataccactttcatggcctgcaaattataaaaattttgtgtcagaattcttttctgccaggtaggaatttgagaggggcaaagaagagctcratttaatttccctcagggtctttgctgaagggagaagaacagaaatctggattcagttttgttagtaaaaataatctttccaccagaaaatgtaaaaagc

SEQ ID NO: 324747 - DNA, 201 bp, Homo sapiens
gctaactggagcatcaatacaagcagcttcttgatgtggcttgggcctccttacaaaatggtggtctcagagttgtcagacctattacatgggggctcagrggtccaaaaacgaaggttgcagaggacaaggtaggagccacatggccttttattccctagccttgcaagtcccatagtgttcctcctgtcaaattctatt

SEQ ID NO: 324748 - DNA, 201 bp, Homo sapiens
gtctcttctgacaaccttattcaccaatcattcatccttaagcatatgtttgttgaacacctactaagtttcaggccctatgccgggtgctagagatacarcagtgaacatgacaaagttcctcatggaatttagtgtctcacacaagggacagatgataatttaaatttggaaaacaataaacagaatggtctaataaag

SEQ ID NO: 324749 - DNA, 201 bp, Homo sapiens
ggagctgcatatgaagctgtttcatgatctgtatagcacaaactgctttaatcagctcatagtcagtgagttctctgagcttagtttgggattctgactcytttttaggaaaaaccccaataaaaacaaaacccataccggcacaaacaactttgataagctcagttaagtgatacagagtcatattatggtgtatctttt

SEQ ID NO: 324750 - DNA, 201 bp, Homo sapiens
tgtgagctacaaagaaaatttacttttggttaagtgagcaacaaggtcaagtcgtttgagattctacatgaatcagaagctactggggtttgtagtatgaytatctgaatttgtgtcttggctctaccactgctctgctggtcttagttagacaagtcacttccttcctttgagtttctgtttctgttgtggctaaaattg

SEQ ID NO: 324751 - DNA, 201 bp, Homo sapiens
agttaatcctcacaaccctataagtgagatgtcatcttcattttacagatgaggaaatggaggctcagggaaggtgaataacacggattgtaaggggcagwgtgtggtttcaagtcccatgaaaggcttttctctaggctccatgtgctgttactcacttgggggtcctcagcttcaggagttgtcatcctgtcagctgag

SEQ ID NO: 324752 - DNA, 201 bp, Homo sapiens
tgtattcaaatatcctgtagcataaaaggcatttgggcacgtgttactgttgcataaaaacactctttacacagactgtattacacagattattgctgtgyaacaaactacccccaagctcagtggcttaaaactataagcttttgttactgttcacagcaccatggatcagtcgggttgtacttctgggttcactgggct

SEQ ID NO: 324753 - DNA, 201 bp, Homo sapiens
ggaagaaacatttcaaaatctgggacactggcatttttccaaacttgatttcgtttttcttctccaagccatcttttccaaacaataatgcactttattartgcaaaagatattttaaaaatacattaaaaattggctactggtccataaatatctgatgatggggatttgaaatataccggctttagtataaaaagagta

SEQ ID NO: 324754 - DNA, 201 bp, Homo sapiens
ctttacagtttattttttgaattaaaatttagataaggtttacaccatgcaattggttgtcagttttctcagtatcttaagtcaggtttattgcagtatawtttacataatgtaatttttatcttttttaaaggtatagtttgatgagtgtgataaaagtatacagtcacataacctgactccagtcaagatgtagaatat

SEQ ID NO: 324755 - DNA, 201 bp, Homo sapiens
tggggttctggcaggccggccccattagagccttgtttcttgttccatattgaaaagatgacattcctttgctagcagcgtcctgcctggatttctggcascagttctgtggctagcactattgcctggggcatttttgttggggttggttttgttttatttcaaaagcagcaaaatgcaggctttataaatgttcaaggt

SEQ ID NO: 324756 - DNA, 201 bp, Homo sapiens
tgtaaggttccctgaaatttatcaaactatcttttcaaggcctctgattctaaacatccccatattcctagttcattcagctttgacattttgagaaactkggaaagccttacccaatagaggtagacctttatcaggggttagattccagtgtcatcacacaaggcaaagattacacgtagacaaaattaccccagaaaa

SEQ ID NO: 324757 - DNA, 201 bp, Homo sapiens
aagagtaccattacggtgtcagcagttccagagttggtagcagaaaaccaggtgttgtttttttgtttgtttgtttgctttttgagacggagtttcactcytgttacccaagctggagtgcagtggcacaatctcagctcactgcaacctctgcctcccgggttcaagcgattctcctgcctcagcctcccgagtagctgg

SEQ ID NO: 324758 - DNA, 201 bp, Homo sapiens
ttggcgtggtaaaaatagtttatttaatttggtggttttaagaggcttataaattttttaatggttaaacgttcaggaatgcttgtgtagatgcttacttygcttgttgtttgaaaatatctagaacactttcatttgctgtttttgttataacaaactaaaggtctgctattattgcaattatcctctttgtttctccac

SEQ ID NO: 324759 - DNA, 201 bp, Homo sapiens
caacagctccagaaatgccctgtgagctgccttctcatgtaaacccagcagtgggcctttgtctgtgactcgatttcctccttagggagacctagctggcraggcctgcaactgagaaacaccaaaaatggtagtgaaagagcattgtatttttcaactaaaccaatttcctttaggatagaggtcaaaaaagctgtgctt

SEQ ID NO: 324760 - DNA, 201 bp, Homo sapiens
gcaaggaatagttattattttctcatagtaattcttgtaaacaattcctgatgtgcaaggtaggtcaacaaattacatggaaccattcttgcataaggcaktttctcacaatgacgtgctgtttgggtgtctttagagtaaacttgaaagaagttctccttctttgtgttttgcttccacatggcattgcattcacacaca

SEQ ID NO: 324761 - DNA, 201 bp, Homo sapiens
aaacatatggaagtcaccaggtaggccttctgccctgattttggcatgacacctgtggcttacgtgcctttgctaaaagcaaactttttttttttttttttggtcatatctaaattaggtatctcttttctttggtgaaatgatccctcggtctatagctcataacctaggtggcagtcctttctgtttgtcaggtagcac

SEQ ID NO: 324762 - DNA, 201 bp, Homo sapiens
gctgaatcgtaagtggttaaaaagtaatggttttaattaaggagcagatttattttatgctaaaataaccatcctgctcaagatttgttttaattcagttyggtagtgacaccttctggtcaaaggaggtaattctttccctgggacaaaagcaaccaggcatcaaaatgtttatactaccaagggggggcagtttttttt

SEQ ID NO: 324763 - DNA, 201 bp, Homo sapiens
tggagtgcagaggcacaatcttggttcactgcaacctctgcctcctgggttcaagtgagtctcctgcctcagcctcctgagtagctgagattacaggtgckcaccatcacacccagctaatttttgtatatttatagagacagggtttcatcatgttggcccgactggtctcaaactcctgacctcaggtgatccaccccc

SEQ ID NO: 324764 - DNA, 201 bp, Homo sapiens
agtagctgagattacaggtgctcaccatcacacccagctaatttttgtatatttatagagacagggtttcatcatgttggcccgactggtctcaaactccygacctcaggtgatccacccccctcagcctcccaaagtgctgggattataggcttgagccaccacgtccagccctttgtatatttttaaaaggtcttcttt

SEQ ID NO: 324765 - DNA, 201 bp, Homo sapiens
actgtataccaccaaggtccttgaggaaggaataaaataaatctggaggatgcatgtctactctccacaaggaacgtcgtggaaggcaaagttgaccaccwtcgtttttacagtgtctgtggcacctcgtgcaaactcttctttctggctttccatgcagacgttcaaagcaagagctagttttattcacttcctgtagac

SEQ ID NO: 324766 - DNA, 201 bp, Homo sapiens
ccttactgataattaagcatgcaactggaagcagggtgtgtgtgggaggtggggatgaggggcaggtgtatgtttatgtgtttgtgtgtaattactacttwattcagtgtcagcagtgggaaagattgagttacttagagcagtgcttctcaaatggactatgtacaccagtcatctggggatcttgataaaatgcacatt

SEQ ID NO: 324767 - DNA, 201 bp, Homo sapiens
ctctcttccgtgtcatcttcctacgaaccggataaactgcctattaaatttaattacggcccaaatggccacacatcttgatctcatgttccctcaagtgyactgtataccaccaaggtccttgaggaaggaataaaataaatctggaggatgcatgtctactctccacaaggaacgtcgtggaaggcaaagttgaccacc

SEQ ID NO: 324768 - DNA, 201 bp, Homo sapiens
agatagaagatagatagatacagatagatttatatatgtgtgtttgtgtgtgtgcgtgcgtgtgtatatctcaaattattaaagtcttctggtagtttctytggtgataatgtatttaatctttgtagcactttgcctcccaagagcaatgtatgtttgaaatctgccataaataatgtgaaaatgcttgaccaactgatt

SEQ ID NO: 324769 - DNA, 201 bp, Homo sapiens
tatcaaaaggaaagggattgacttggtaatgcgggctccttttttttgctaagcatcattttgaattctatctttacatccgggttttagatgtcttatarttgtgatttttaaaatgtattaagatatagaattacgttcataataatattcttcaacagtttagagtagtgctattcaaagtatggtccatggaccaga

SEQ ID NO: 324770 - DNA, 201 bp, Homo sapiens
ataaaacaggtccccctacatccattaggctgcctttaattgaaaactggagaacaatctaactaattggcaggtacctcttttattacggagactgtttytccccttctctccagtgtaatcaaaaggctgctcctctttttatcaactaaagtcaggtatgaaatggaaaagcagagaggtaacacttaaaaaattaat

SEQ ID NO: 324771 - DNA, 201 bp, Homo sapiens
attcaggtcatggtgggggcttcctccttaatggctgtcatgacccactcatttcttaactccttgcattctggcttctaccccaaccactctgcagaggaaaaaaaaaatgccttttttaagttctctaatgacctaaatcaggggtcagtaaactgtggcctgtgggccaaatctagctggtcacctgcttttgtaaat

SEQ ID NO: 324772 - DNA, 201 bp, Homo sapiens
gagcttcacaattgagcatggctttgttccaataaaactttacaaacacagtcacttgacctgaaaaccctgtttattttttgttttttgttttggtttgtttttttttgagatggcgtcttgctctgttgcccaggctggagtgcagtggcacgatctcggctcactgcaagctccgcctcctgggttcacgccattctc

SEQ ID NO: 324773 - DNA, 201 bp, Homo sapiens
cagtaaaaatatgcttatttagacattaaaatcctagggtgcccacgtaagtatcctaagcaatgtgtgttacatgagcattctttgctaatgtgctttakctttgaacgttcttagctctggctcctgcagtgttaatgtactgcagggaaagttgaactcagatggtggggcttagtttctgttcaacacatttgatga

SEQ ID NO: 324774 - DNA, 201 bp, Homo sapiens
aaaaatcctcctcctcttccttctcctggtagattgtagaactgctcatctggaatttgggaaacaggcagacttgtctggctcatttgacatggtcattcccccgccccctcctcaaaatgccacttcagtaatctacacattacaggcaatatctccaaggggctgctaccttccctgagcactttcaacggcctttct

SEQ ID NO: 324775 - DNA, 201 bp, Homo sapiens
cattaattcagaatctccttctgaggggctcctaaaacacctttctgttttcttggcaggatgaaagcattacttttgtgtcactgcctggtgttttcacrgggtctattctaatgctcactaaggcgtcatgctctgttctaatgtgcctcttgtagccatctttggtttgaaccaactaaacttcaggtgatgttgaaa

SEQ ID NO: 324776 - DNA, 201 bp, Homo sapiens
gcctcagcctcccaagtagctgggactacaggcgcccgccaccacgctcggctaattttttgtatttttagtagggacaggtttcaccgtgttagccaggrtggtctcaatctcctgacctcgtgatctgcccacctcagcctcccaaagtgctgggattacaagtgtgagccacagtgcccagccaaccctgtttatttt

SEQ ID NO: 324777 - DNA, 201 bp, Homo sapiens
cctcctcctcttccttctcctggtagattgtagaactgctcatctggaatttgggaaacaggcagacttgtctggctcatttgacatggtcattcccccgccccctcctcaaaatgccacttcagtaatctacacattacaggcaatatctccaaggggctgctaccttccctgagcactttcaacggcctttctttttgc

SEQ ID NO: 324778 - DNA, 201 bp, Homo sapiens
tgagtgacatgatcacatttgcagtttgaatatactgattgtgtattctactgtgtggagaatagattgggcaaggggctgggaatggaagtggggtggtyagttaagttgtccaggcaaagcataatgatggcttggactaatggagttaaaagagaaatgaaaaattaagttaaatttaaaaataaagagaagtgaatg

SEQ ID NO: 324779 - DNA, 201 bp, Homo sapiens
aattacacattaattcagaatctccttctgaggggctcctaaaacacctttctgttttcttggcaggatgaaagcattacttttgtgtcactgcctggtgytttcacagggtctattctaatgctcactaaggcgtcatgctctgttctaatgtgcctcttgtagccatctttggtttgaaccaactaaacttcaggtgat

SEQ ID NO: 324780 - DNA, 201 bp, Homo sapiens
gtgcagtgtagcccattgataagtgataaacattgagtgacatgatcacatttgcagtttgaatatactgattgtgtattctactgtgtggagaatagatygggcaaggggctgggaatggaagtggggtggttagttaagttgtccaggcaaagcataatgatggcttggactaatggagttaaaagagaaatgaaaaat

SEQ ID NO: 324781 - DNA, 201 bp, Homo sapiens
tgaaagaagactgctggggctggaatatagtaagtgaggaaggaagtggtccaatatgtcattgaagaggaagccaaagggtggtgttcttgtagcccacytgaaggagtttgatttttattctcagtgcagtgtagcccattgataagtgataaacattgagtgacatgatcacatttgcagtttgaatatactgattgt

SEQ ID NO: 324782 - DNA, 201 bp, Homo sapiens
tggagcagctaaagagtccattttagggagaagatcaatgtgaggtgccagtgatatctaatgggcaatgggatggtcacatctgacgcttaggagaaagrtctgggctagagattgagattcgagtctcctggatatatgtccttaatagtggagggcttgggcatggatctcattacacatagaataagaagagggcta

SEQ ID NO: 324783 - DNA, 201 bp, Homo sapiens
agacaaccttaaatgcatgcacagttaaaccatatgttctcaagataatgaaaatggctggggttgggggagggcggccaattcttgctgactgtgctttggttgttaattggaagggacttggtaaggggcggggggaacattctcgtgccagtggcttgttagggcaacttgacctctctgcctgcattccagatattt

SEQ ID NO: 324784 - DNA, 201 bp, Homo sapiens
gtctacatttaagcttgctgggaaaatacagtgacaaaattcacagaactgagaaacatgaggaggtaatggtaaaatacaacagccaaagaaaaagaaayataactttaaaaaaattaaatataattttattgtcatttaaaaaaattatcaatacagtatagaatttattgtataaaaatagaaaattaaaacaaccat

SEQ ID NO: 324785 - DNA, 201 bp, Homo sapiens
atataactttaaaaaaattaaatataattttattgtcatttaaaaaaattatcaatacagtatagaatttattgtataaaaatagaaaattaaaacaaccrttattctaccctgggagggaacccctgtaaaactcagcttttctgtaagtatatgcatattgttattgtttcagaaaaatggaattttgtgttgtatact

SEQ ID NO: 324786 - DNA, 201 bp, Homo sapiens
gaaaaatggaattttgtgttgtatactggttttaacttaatctttaataatattttatgacccaaatttaagcaactgcatagcttttatggttatacaaytaatatagtagtttacggttatgtcataatttatttaactgattaaggtgcttacagtttttttcgattataaataacactttaaattatggcctttaag

SEQ ID NO: 324787 - DNA, 201 bp, Homo sapiens
atctgtgctggctatgttaactccttaaaggagggaaagacatgatttctaatttagagtgggaattttctttatgagaaagggcgaggaggaaagaggtstctttttcctaccacccttgtaacatttcttcaaggctgaggttttcttcatgtcctggttcatagcaaaagagacatgcttgaagccacattttttctg

SEQ ID NO: 324788 - DNA, 201 bp, Homo sapiens
cagagcctggtatatcttcaagaagtaatgcctacggtggcttctgcctgtcataaccaggatgacctaattgactattatttggggaagagaactttccrtcctcctagggactgggtgacagtctcagcctctgctgcagccatacgatggtggtcagaatttaacaaatgggtgtggtccatctctgggaatgaatgg

SEQ ID NO: 324789 - DNA, 201 bp, Homo sapiens
gttagatttacatgccgttaagacggctgtgcattatttttaatagaaggtacgacaggctcctctctctcagccctggcgcgtgataaagttacctcatscaatgttgatgaaggtttcgttcacacttgctgggtcggggcaatgtctttttttccagatggatactctattgtaaaatgatttccctccataagcttg

SEQ ID NO: 324790 - DNA, 201 bp, Homo sapiens
actttgcatggctttaagatcttccccagtttaaacattagcccccttttccagctgtatcttacacacacacgcacacacacacacacacacacacacaygccatcatttacatctctgccagcctggaccactggctgttccctgcactttcttactcctgatctctgttgcttacccataatattcttgggggaaagc

SEQ ID NO: 324791 - DNA, 201 bp, Homo sapiens
tcctaggggctttgggtgctgggataaggtgtgtgaacattagccctagggagccaagggaagtttctagtcatgagaaaaagcagttcgaagaaggtggygcctagctgctgtgtctggctggaaggcttcggcagggacacagggcagggcttttgatctttctcagatatgccctgcagctccagaaggcattcgtgg

SEQ ID NO: 324792 - DNA, 201 bp, Homo sapiens
ataaagctaaaggaccggttgcggtggctcatgcctgtaatcccagcactttgggagtctaaggtgggcagatcacctgagctcaggagttcaagaccagsctggccaacatggtgaaaccctatttctactaaaatacaaaaattagctgggcgtggtgatgggtgcctgtaatcccagctactcgggaggctgagacag

SEQ ID NO: 324793 - DNA, 201 bp, Homo sapiens
agctgtgtttttattgtgagccacttaaaatcctttctggaagtcggtggtataaataaataacagcagccataacacattctctgcaagctcttagttcsgagttgagcatttttaaaaagagctttttttagacaggcagttgcttccacggcaggaaacttcctgtcatcttcaccagagtggcatccctgtcagatg

SEQ ID NO: 324794 - DNA, 201 bp, Homo sapiens
ctgctttatttcatcggtgtttcccagaaaatcaggataaattgcttcttttgtcaaaatgtgattttcaaaaagttaaaaagcaaaaaactctttcaagkgtttagtaaacacatgccaaaaatttatttaactcattgatgaagggaatagtaggatgacaaagctggtttaaaggaggatatgagaaagatattcagg

SEQ ID NO: 324795 - DNA, 201 bp, Homo sapiens
cccgggaggcggaggttgcagtgagccaagattgcaccatcgttctctagcctgggcgacagacagacagtccatctaaaatatatataaaaaaaaaaaaatgataaagctaaaggaccggttgcggtggctcatgcctgtaatcccagcactttgggagtctaaggtgggcagatcacctgagctcaggagttcaagacc

SEQ ID NO: 324796 - DNA, 201 bp, Homo sapiens
ttaggaggtggggtctttgggcgggggcgattaggtttaggtgaggttacagggtggagccccaagatggaatcagtgcccttatgaggagatgaagccascagagctccctttctctttcttgtgaggatatagcaggaaggcagctgtgacctaagatgagagccctcaccaagaacccagccatgccagctccctgac

SEQ ID NO: 324797 - DNA, 201 bp, Homo sapiens
ctttttagccaggctgctaggaaatactcgaaagattctagagaccctccctacctgccctctcccattgccctttgctcgaagccctctctagccacagrctgcaccatgcctttaagatcacgccctcctgtctacccagagctacagggtggctgccaagctgccttctccccacctgttggaggcatctggtcctaa

SEQ ID NO: 324798 - DNA, 201 bp, Homo sapiens
attcacttggtgaatactatgaaatgcatgaggagttaaagtacttacatattcaaaattttagttctatagagatgatttttttcctgccatcttttgctttttttttttttgaaagatttgagtaaataaaacacaactatattgattgctacctacagacttttctggctacctagtctctcgttgccctttcactgg

SEQ ID NO: 324799 - DNA, 201 bp, Homo sapiens
tttttttttttttttttttgccttgcattgttctcagtgttataggccacatagaggaaataaaagaccactgaccatcaattctgagggtgatatttgaatatatatatatatatatatatagagagagagagagagagagagagagagagagagtcaaatacttaattttttactaccagtgggaaaatttttccaaag

SEQ ID NO: 324800 - DNA, 201 bp, Homo sapiens
ttttttttttttttttttgccttgcattgttctcagtgttataggccacatagaggaaataaaagaccactgaccatcaattctgagggtgatatttgaatatatatatatatatatatatagagagagagagagagagagagagagagagagagtcaaatacttaattttttactaccagtgggaaaatttttccaaaga

SEQ ID NO: 324801 - DNA, 201 bp, Homo sapiens
tttttttttttttttttgccttgcattgttctcagtgttataggccacatagaggaaataaaagaccactgaccatcaattctgagggtgatatttgaatatatatatatatatatatatagagagagagagagagagagagagagagagagagtcaaatacttaattttttactaccagtgggaaaatttttccaaagat

SEQ ID NO: 324802 - DNA, 201 bp, Homo sapiens
ttttttttttttttttgccttgcattgttctcagtgttataggccacatagaggaaataaaagaccactgaccatcaattctgagggtgatatttgaatatatatatatatatatatatagagagagagagagagagagagagagagagagagtcaaatacttaattttttactaccagtgggaaaatttttccaaagatg

SEQ ID NO: 324803 - DNA, 201 bp, Homo sapiens
ctcggcagaagagcgatggaggtttctgtaaactgagtttctacatctggcagcagaaagtggcccacagttatattttttgtagggaaagatatgttttyagatgaccactctgcacagattctgggaggatttcacagtatttgtaacctgttattttagattctaagcacatttgtagttccagtggcacaaaaataa

SEQ ID NO: 324804 - DNA, 201 bp, Homo sapiens
tttttttttttttttgccttgcattgttctcagtgttataggccacatagaggaaataaaagaccactgaccatcaattctgagggtgatatttgaatatwtatatatatatatatatagagagagagagagagagagagagagagagagagtcaaatacttaattttttactaccagtgggaaaatttttccaaagatga

SEQ ID NO: 324805 - DNA, 201 bp, Homo sapiens
ttgcattgttctcagtgttataggccacatagaggaaataaaagaccactgaccatcaattctgagggtgatatttgaatatatatatatatatatatatagagagagagagagagagagagagagagagagagtcaaatacttaattttttactaccagtgggaaaatttttccaaagatgattttttttggggatcgta

SEQ ID NO: 324806 - DNA, 201 bp, Homo sapiens
tgcattgttctcagtgttataggccacatagaggaaataaaagaccactgaccatcaattctgagggtgatatttgaatatatatatatatatatatatagagagagagagagagagagagagagagagagagtcaaatacttaattttttactaccagtgggaaaatttttccaaagatgattttttttggggatcgtac

SEQ ID NO: 324807 - DNA, 201 bp, Homo sapiens
tacacgagggcagcttgggcttcagcagaagtgaacttgagtttggcacagcgaagaatttcctgcctatgaaaattgattatggaagagatactaagccttttttttttttctagatcagaggttttttaaaaacaaggtgaattgatcatacagtaagtgtgtgagtttattcctggttaaaaagcagagggccagcca

SEQ ID NO: 324808 - DNA, 201 bp, Homo sapiens
atcataaaaagaccctctctatcaacatactatgagtctgagctggttgagaacccaatctaactaactttgcaataaactaacacatgatttttggtggrtgcagttcccattccaaatacatttatctttctttgtatttatgagtgtgatagtaatcgatagatctttttcaacaaaaagccacctgatatctacatt

SEQ ID NO: 324809 - DNA, 201 bp, Homo sapiens
agggcagcttgggcttcagcagaagtgaacttgagtttggcacagcgaagaatttcctgcctatgaaaattgattatggaagagatactaagccttttttytttttctagatcagaggttttttaaaaacaaggtgaattgatcatacagtaagtgtgtgagtttattcctggttaaaaagcagagggccagccacagtgt

SEQ ID NO: 324810 - DNA, 201 bp, Homo sapiens
aggaatacatttaagaaactaaggtataatccaagacggttactatggctctggttatagctaggacttcatcaacaattacaattacaattgactaacarttgttagtcaacaattattatttgaatatcttctgtgtgttgggttctgtcccagccctgagctattcagctggtgtgtcccagtacaatttattaggtg

SEQ ID NO: 324811 - DNA, 201 bp, Homo sapiens
agccagcagaagctatgatgtataacaaaagacatagtcaacgtgcacaagtcacagccaacagaggccctgactgagctgattccaactcagatcagtgkgtctgctactaacagctgagaaatctgattgtttaattgcgtaaatacaaatgatatcaccctcaaggaatacatttaagaaactaaggtataatccaag

SEQ ID NO: 324812 - DNA, 201 bp, Homo sapiens
gtttctgtttccaggccacaagctctgcacccctctacagcaggcaggccaacgtgaatagttatgcagttatgtgctgcacaaaagtgcccagtaaggcygatatcgaaatcagtactgggctaaagattatctaaccttagagaggtgtctaggtttgactattggcgtggagagaaaatgaggcagctgtggagcaat

SEQ ID NO: 324813 - DNA, 201 bp, Homo sapiens
atatttctccccactgcctgtctcctggagaggggacactcagtacattctcaccttagaaaaatgagaaatttccattacacaatagaacagcacagggsaaagaacaaagggctttgaagttagcctgagctgaggtcaaatgcagccctcgcctctagctatctcaacttgggcacatggcaaaattttgcttcacgt

SEQ ID NO: 324814 - DNA, 201 bp, Homo sapiens
gtaagtgaaaggctggaaacttcctacttttatacctaaaaatgtcctagaagctggaaaataaaaatctgctgcccctttctacttgccaaatatgaatrtttgcctgcatctgtttaggagatttaaaaaaaaaaaaaattatgtttgggtaccagcagcccggtgatgtcagtgccactgtgggactcaaagcccatt

SEQ ID NO: 324815 - DNA, 201 bp, Homo sapiens
tgcctcctctcccactttgcaccatatgagtgatagcatgttacccctttcatgacatgacatcccaatgctgttttttccatggtggatgtaaacagatkaagcttgtaaataggtcctaacagagatttactttctctcaaaactcacaccacacacacacacacacacacacacatttcatcaaatcgatcatttctt

SEQ ID NO: 324816 - DNA, 201 bp, Homo sapiens
ccataagctgcttcctcttcccagttccctcccccagaagacattagatcttctagggcttttgccagtgaaaaaggctgagctgagcaggtgtcttgggkagttgtgcatgacagaagcccagttaagagggagaagcaaagatggacatgtattggggtttggaccttacttttgccaaaccttagctatcaaagaagg

SEQ ID NO: 324817 - DNA, 201 bp, Homo sapiens
tcttctaattctttgctactgcatgcctcaatggagtacaagcttataatgatgagaatcacctggatggcttgtcaaaggatcgattaattgatcctatwcccagagtttcaggttcagggggtctagaaatgtgcatttctaacaagctcccagggaatgctgagtgctagcccaggaaccacattttgagagccactg

SEQ ID NO: 324818 - DNA, 201 bp, Homo sapiens
ttttattccttatgaggactctgtgatttgggtttcgttgccctcatattacagatgcaaaagccaggtacagaaaggctcgataactttccccttgtctyttagtcaacaagtggtcagaggtgagacttgaacctaaacagtctgactccagggcagctcttttaaccactatactatacacagaatcccttgagaggg

SEQ ID NO: 324819 - DNA, 201 bp, Homo sapiens
ttattacatctcatatttattgagcatttactatgtactagggaccatgctaagtactataagtatactaattcttttattccttatgaggactctgtgawttgggtttcgttgccctcatattacagatgcaaaagccaggtacagaaaggctcgataactttccccttgtctcttagtcaacaagtggtcagaggtgag

SEQ ID NO: 324820 - DNA, 201 bp, Homo sapiens
aatcattattacatctcatatttattgagcatttactatgtactagggaccatgctaagtactataagtatactaattcttttattccttatgaggactcygtgatttgggtttcgttgccctcatattacagatgcaaaagccaggtacagaaaggctcgataactttccccttgtctcttagtcaacaagtggtcagag

SEQ ID NO: 324821 - DNA, 201 bp, Homo sapiens
acttctgattaatgcctgtgggcctgggaaggaaaggacagctgagagagggaaaactgacatgacttgctttcctcacattagtttttagagaatctctyaggtacatcagaagggaaaattattttgagagggaaaatggaagtgaaggtcaccaaatcaagatggggaaagaagggaaggtgaatagcattgagattc

SEQ ID NO: 324822 - DNA, 201 bp, Homo sapiens
ccagtaaaaatatgcttatttagacattaaaatcctagggtgcccacgtaagtatcctaagcaatgtgtgttacatgagcattctttgctaatgtgctttwgctttgaacgttcttagctctggctcctgcagtgttaatgtactgcagggaaagttgaactcagatggtggggcttagtttctgttcaacacatttgatg

SEQ ID NO: 324823 - DNA, 201 bp, Homo sapiens
acacggttctcccagcagtcccaactggctgaagacataaccaagactacagtgaaatcggccacctctcctccccatgccttctctgcagtagcgagatkagcaagattcacattccattctagccataggacatgtcagttcatctgtatgtgtcagaatcctttagatgagagtgacagaaaacccagctcaaactgg

SEQ ID NO: 324824 - DNA, 201 bp, Homo sapiens
aactccagcatcagccctcaaggagcttatcaccttaattagatttaaaaatatagaaatgggaagaaaatgggatcattatgtccaagtacacaaaaataaatgtatttttgttagaaggaaattgaagggaaagaaataaacacttggaatgtagagattgagagtctaattggatatttttaaagttgaaacagaagg

SEQ ID NO: 324825 - DNA, 201 bp, Homo sapiens
atgactcagttctaagatgaatataaaagccctcatgatggtgtcctttaagccacaggctggtttccagaagttgctattcttgcccatgcagatagacrgtctctctttccttagtctgcaaataccacctcttctttcgccaaaataccacctcttctttcgccaatttctttgcccgcagaaactccccaagtctca

SEQ ID NO: 324826 - DNA, 201 bp, Homo sapiens
tgggattacaggggtgagccaccgcgcctggccgaaaaccaggtcttaagacttctagccacaatctcttgggatagtattgaaacattccaacttcagtscagcacagatacctgcctgaggccctcacagaggtgttacgatgactcagttctaagatgaatataaaagccctcatgatggtgtcctttaagccacagg

SEQ ID NO: 324827 - DNA, 201 bp, Homo sapiens
tctgagggtgatatttgaatatatatatatatatatatatagagagagagagagagagagagagagagagagagtcaaatacttaattttttactaccagkgggaaaatttttccaaagatgattttttttggggatcgtacataacgtttttccctttctgtttttgtggcatttgtagcattcaaattatgttcattta

SEQ ID NO: 324828 - DNA, 201 bp, Homo sapiens
tgaagctttatatcttccctctatagatatgttaaatctcaagttaccaggataatgtgattcatggcttattttccagcctggagggagtggttggtccratctggagggatttattcagctgctataactactgttgacagtatggggaattggccccacaattccccaaagtctagggactgtgctatcccacagaaa

SEQ ID NO: 324829 - DNA, 201 bp, Homo sapiens
tttatactaccaagggggggcagtttttttttgtttttcaagtatcactgcttaaagcaactgcataagtctgcaaatttgtgtatgtaattgaattaccmaattaatgaactcataacagtaggaataaggaaacaaggaagaggggaaaagggcataaatcctgattttgtttaatactttattcctggtatccagacc

SEQ ID NO: 324830 - DNA, 201 bp, Homo sapiens
ttacattgctttacaacacacctgagacttggagaggagagagaggagggatgctggactagttcccctgctcagtcacacactttctctccttttgtgcygggatggtgatgtgaggtgtctggtgtccctgacgcagtcagctaacagcttccttaagaagcctggccctgtgctaccctcagtggcgtttgacacagt

SEQ ID NO: 324831 - DNA, 201 bp, Homo sapiens
tgccctcaggggtcctgttattgtccacattttgcaggtgaggcagctgaggcccaaggggaaggcaaagacccatagagctccctggaagagtttccagcctctggataaaggagggcaaaattgcttttgcaaaatagaaaaccttgaacaaattttcggatgagaaaatgacttgctttgccagggtttgtttaaaga

SEQ ID NO: 324832 - DNA, 201 bp, Homo sapiens
cagttccagagttggtagcagaaaaccaggtgttgtttttttgtttgtttgtttgctttttgagacggagtttcactcttgttacccaagctggagtgcartggcacaatctcagctcactgcaacctctgcctcccgggttcaagcgattctcctgcctcagcctcccgagtagctggaattacaggcatgcgccaccat

SEQ ID NO: 324833 - DNA, 201 bp, Homo sapiens; identical to SEQ ID NO: 68303

SEQ ID NO: 324834 - DNA, 201 bp, Homo sapiens; identical to SEQ ID NO: 68304

SEQ ID NO: 324835 - DNA, 201 bp, Homo sapiens; identical to SEQ ID NO: 68306

SEQ ID NO: 324836 - DNA, 201 bp, Homo sapiens
gtatgcttagatcagtcagagaaggcttcctggccaagtgacctcatagaattttcctgggtttactgagaaaaggaagttcccagaaaatgaaagagtamcattacggtgtcagcagttccagagttggtagcagaaaaccaggtgttgtttttttgtttgtttgtttgctttttgagacggagtttcactcttgttacc

SEQ ID NO: 324837 - DNA, 201 bp, Homo sapiens; identical to SEQ ID NO: 68300

SEQ ID NO: 324838 - DNA, 201 bp, Homo sapiens; identical to SEQ ID NO: 68302

SEQ ID NO: 324839 - DNA, 201 bp, Homo sapiens
aacagagacaatgtgggcgaatcaataatgatgttaacaatgagctattagaataatgaatgaaaattactgggccttttaatgctttcctgacaagaacytaaaatgtaacactcagtagaatttcccctaaacctcataacacttccaagatattagcagagactggagttaccaccacagtgtctgagtggtctgtga

SEQ ID NO: 324840 - DNA, 201 bp, Homo sapiens
aaaacagaaaaatttctttgcagcaaaattctgagtaagccaagcattattttattgagaaaaagagggttttggctaaattctagtgtaatcaatcatasttgaacttccttagatcttagacgagtggcaaggtatgtgacaaagcataatttcatcgttgtcttccaagtatttcccttttggttttctgtcagactg

SEQ ID NO: 324841 - DNA, 201 bp, Homo sapiens
aaaagaggatatgaagcataaacaggagcccttagggatagcagagatgagagagttgtgggccacagtgagctagaccaccagagagtaacagagacaawgtgggcgaatcaataatgatgttaacaatgagctattagaataatgaatgaaaattactgggccttttaatgctttcctgacaagaacttaaaatgtaac

SEQ ID NO: 324842 - DNA, 201 bp, Homo sapiens
ttcatttgtccaaaggaaaattttaaaatttttatttatttatttatttatttatttttgagacggagtcttgctctgttgcccaggctggagttcagtcrtacgatttcagctcactgcaacctctgcctcctgggttcaagcgattctcctgcctcagcctcctgagtagctgggattacaggcgcacaccaccacacc

SEQ ID NO: 324843 - DNA, 201 bp, Homo sapiens
cctctcctgagctgtttacatttgtcagagaaccaaacgtcagccttttgttggatagtaaattacaaatatctcatcattttatctgtaaatatcttaakatgtattctaaatgaaagaagctcctgcaaacgaaagtaaagcatcagtgccattattaccatcctaaaataaaatgatctctaacacctaatagctcat

SEQ ID NO: 324844 - DNA, 201 bp, Homo sapiens
agcgaaatcttgcattttagaggcttcgtttccccttgtcatacagtttttcttcctaccacatcttaattcaaactcttgagaagagacaaagtagtccscaagatatcatatttatgatatttagcctactgcacagaaattctttgggtaactactcaacctcatactcttcaccttctttttaagtcacctttattt

SEQ ID NO: 324845 - DNA, 201 bp, Homo sapiens
aaccccaggagcctgatgaaatgtcatttcctctttgaagcctcccctaagcctcattccacactctaggcagaattattcattcttccctccccaacccygttttctcacagtgcttcgcacaaagctccatgaaccgcaaacttattatattatacagatagtatgattcttcacacaccagtgagtctccctggctgg

SEQ ID NO: 324846 - DNA, 201 bp, Homo sapiens
tcacaaaaaaagaaaatatttgtccctgtcttcattacttaactctgccattatagcgcaaaagtagccatggaaaatataaacaaacaagtgtggttatrttccagtaaatctttatttacaaaagcagatgaagggctaggtttggcccacaggccatggtttgccaatgtctgctttaagtggctcatccggtggcca

SEQ ID NO: 324847 - DNA, 201 bp, Homo sapiens
cttgggaggcggaggttgcaataagccgagatcgcaccattgcactccagcctgggcgacagggtgagactccatctcaaaaaaaaaaaaaaaaaaaaaamccagctcttttttaaaagatgttagaaattttagaaaatatttttgaggccctgtgcagtagctcacacttgcaatcccagcaatttgtgagaaggagat

SEQ ID NO: 324848 - DNA, 201 bp, Homo sapiens
aagtcatccttctcaccctgtgtaagctgaatatactcaaaaggaaaaagatcaatgaacccccaagttggcagtgtcttggtaacctgtgttggagtttwataattgtttatggatggatgtatggatgagtagatggatggacgaatggacatagagaaggcagagagggaagaaaggaggatagacggtgggtggatg

SEQ ID NO: 324849 - DNA, 201 bp, Homo sapiens
agttgggaggatgaaatgagacaatttatgaaaagctgctgtgatggaacccaaaaatatctacccagcagtggagtggcagaaacatcatccagacacgyaccttctactggatactaactgaccctccagagacctggcccccatgctgggtgcatctgacaatacagaaaagtaacatgatgaataaccaatacctga

SEQ ID NO: 324850 - DNA, 201 bp, Homo sapiens
ctgtgatgtactttcactggctctgtttgtacattgagattgtttgtttaacaatgctttctatgttcatatactgtttacctttttccatggagtctcckggcaaagaataaaatatatttattttaaaggtgtgtgggagcttttactacacctttatcttcagtaaagagacagagaacacagttccatttttaatgt

SEQ ID NO: 324851 - DNA, 201 bp, Homo sapiens
atggggtgtagtgcgctaggatgttggtggtatctgtaacacaataatggtgaccaggagcaggcccagaggggcgcccatggaatctggggccagcacamacctaggtggcttctcagatgaaaatgagactacacagttgggtggcaccagcttctgaagggctggcacccaccttaaacagacaagtctcctggctga

SEQ ID NO: 324852 - DNA, 201 bp, Homo sapiens
ggaatttgggaaacaggcagacttgtctggctcatttgacatggtcattcccccgccccctcctcaaaatgccacttcagtaatctacacattacaggcawtatctccaaggggctgctaccttccctgagcactttcaacggcctttctttttgccttccctctttctggagtgtgtagatttttgtcctaaactgaagt

SEQ ID NO: 324853 - DNA, 201 bp, Homo sapiens
aaatgaaaccaagaataatagatactcatagaatgttagaagtgaaaagggatcttagagattgattttcactcacctctctcatttgacgtacaagtacwctaggactcagaaagatgacacggttctcccagcagtcccaactggctgaagacataaccaagactacagtgaaatcggccacctctcctccccatgcct

SEQ ID NO: 324854 - DNA, 201 bp, Homo sapiens
ttctttcttcactcaagagttggtagcatcctagggctgtgttcaggcaagtgagggagccccggagcaggagtgaccccttcacctggctctgcccccaygtttccttctcgttcaatctcctttatgccttttcttccactctctctcacctgcctcttctcctctgcacgtaattaggatcaagtctctctcaactta

SEQ ID NO: 324855 - DNA, 201 bp, Homo sapiens
cctctctcatttgacgtacaagtacactaggactcagaaagatgacacggttctcccagcagtcccaactggctgaagacataaccaagactacagtgaartcggccacctctcctccccatgccttctctgcagtagcgagattagcaagattcacattccattctagccataggacatgtcagttcatctgtatgtgtc

SEQ ID NO: 324856 - DNA, 201 bp, Homo sapiens
ggcttccttcacgaggttgggtccagaagattctgaggccacactttgagtttcatgttttcccacaggagccaagtagccaaaaatgtctctattaagayaggcagcctcttcataaccactgcagatgggttttttatgtttctttcttcactcaagagttggtagcatcctagggctgtgttcaggcaagtgagggag

SEQ ID NO: 324857 - DNA, 201 bp, Homo sapiens
agatgacacggttctcccagcagtcccaactggctgaagacataaccaagactacagtgaaatcggccacctctcctccccatgccttctctgcagtagcragattagcaagattcacattccattctagccataggacatgtcagttcatctgtatgtgtcagaatcctttagatgagagtgacagaaaacccagctcaa

SEQ ID NO: 324858 - DNA, 201 bp, Homo sapiens
acctaacgtctctcagcctcagttttcccatctctaaatgggaataatgtgaaatagttgggaggatgaaatgagacaatttatgaaaagctgctgtgatrgaacccaaaaatatctacccagcagtggagtggcagaaacatcatccagacacgtaccttctactggatactaactgaccctccagagacctggccccca

SEQ ID NO: 324859 - DNA, 201 bp, Homo sapiens
tggctgaagacataaccaagactacagtgaaatcggccacctctcctccccatgccttctctgcagtagcgagattagcaagattcacattccattctagycataggacatgtcagttcatctgtatgtgtcagaatcctttagatgagagtgacagaaaacccagctcaaactggcttaagctacacaactctacgcatg

SEQ ID NO: 324860 - DNA, 201 bp, Homo sapiens
cacggacaatgggagaagggctaattttgaatttctaataatgaatccttgtatccctctgtataattttatttcaatcaggttccaatcacagattattrattttattatctaagtatattcttcttactctaaatatttttcttagattaggacaaggtttggattaggtcaagtatacctatgatgacctctgattta

SEQ ID NO: 324861 - DNA, 201 bp, Homo sapiens
gctgaaaaatcaataaccatttgatgccaacagcctggctgtctgacttaacattttgtagagccataagcagggcaaaaagaatatcgttttcagaaggygccttaatcttcagctgctccccaaatgccttttcttttttggtgcccattttatttctggagaactcaaagaaactggagtgttacaaaataattttct

SEQ ID NO: 324862 - DNA, 201 bp, Homo sapiens
ttttcacctgggagagaaagtggaatgtgaccccatgtatccagaacagaggcctggaaccacacgaatgtacttcaagtcctactcagccaccatcagcyccatgacggtgaacaaattacctaacgtctctcagcctcagttttcccatctctaaatgggaataatgtgaaatagttgggaggatgaaatgagacaatt

SEQ ID NO: 324863 - DNA, 201 bp, Homo sapiens
aaggcacagagaggttatgtaacttgtctgagatcacacagctaataacaggcagaggccgaacttgaacctagggtatctggcagcaggacccaagcccmcaaccactagactacctctgcaataagaagcctctgctttcagctcccttttttttcctacagaacctggctggacatgtggggatgcttagcacatagc

SEQ ID NO: 324864 - DNA, 201 bp, Homo sapiens
ttggaaattagcagtttgcaacctctgccttaaatgccaggaagaaataatggatgaaaataaaagaattatgttttttgaatttttctgcatttaaaaawttttgaaaaacactggccaaatatttttaaagctagcccagaagctagtccagaaatgtgctttccttttataacctaaaaggcagatccataaactgtt

SEQ ID NO: 324865 - DNA, 201 bp, Homo sapiens
tgttgactctgaccaaaattctctttggcctccatttggaagtcgtctatgggcctttaattgtaccctctgggaagggagaaagagcacttgaaacaggmatgaattctgtacatatttctaaggctgggctgttttaaaaatgttgctgtctgtctgtcttcttttttttttgcctttgaacttggatgtgaattttcg

SEQ ID NO: 324866 - DNA, 201 bp, Homo sapiens
ataaaataaatctggaggatgcatgtctactctccacaaggaacgtcgtggaaggcaaagttgaccaccttcgtttttacagtgtctgtggcacctcgtgsaaactcttctttctggctttccatgcagacgttcaaagcaagagctagttttattcacttcctgtagactgattttaactgaggtggggaactaaagata

SEQ ID NO: 324867 - DNA, 201 bp, Homo sapiens
tcagggtggtgaactcctgttgactctgaccaaaattctctttggcctccatttggaagtcgtctatgggcctttaattgtaccctctgggaagggagaargagcacttgaaacaggcatgaattctgtacatatttctaaggctgggctgttttaaaaatgttgctgtctgtctgtcttcttttttttttgcctttgaac

SEQ ID NO: 324868 - DNA, 201 bp, Homo sapiens
aataaaataaatctggaggatgcatgtctactctccacaaggaacgtcgtggaaggcaaagttgaccaccttcgtttttacagtgtctgtggcacctcgtscaaactcttctttctggctttccatgcagacgttcaaagcaagagctagttttattcacttcctgtagactgattttaactgaggtggggaactaaagat

SEQ ID NO: 324869 - DNA, 201 bp, Homo sapiens
tgacacctggctctgccagctttatggaaacagaccgcaagctgatctctcagggagtggtctcaagttcaggccccctgctttctcctggcttgcatcasatcatatcactattctcatattgattctaggccactgggtgaattttttatttttaccaaatgtgggctctaatgtaagctgctccagtccttgcgtttt

SEQ ID NO: 324870 - DNA, 201 bp, Homo sapiens
ggtgaccaaagtctagctcatttcttagtaatttctgccttctacctcagttaaccttcattgcaaaacgtatgtcctctctgatactatctttaggcaawctcttaagaactagtgcctggaatgatatactgacgtggaagagtactgagggctgttagtgctttaagaaaaatctcagcttagagaatctacctccat

SEQ ID NO: 324871 - DNA, 201 bp, Homo sapiens
cgttaagacggctgtgcattatttttaatagaaggtacgacaggctcctctctctcagccctggcgcgtgataaagttacctcatgcaatgttgatgaagrtttcgttcacacttgctgggtcggggcaatgtctttttttccagatggatactctattgtaaaatgatttccctccataagcttgactctccgtccctct

SEQ ID NO: 324872 - DNA, 201 bp, Homo sapiens
gtttggccccatctaacttgacttgttcaatgttcttttcattacatttatgcccaccctccctgcctagaaggaaactcactgtcatcaaaataataggktgtttttctactttctccctccctctcacccattgtctttcagtggggtgaaaaggtcttcacttttctctttctccccccaaattttgctatgaataac

SEQ ID NO: 324873 - DNA, 201 bp, Homo sapiens
tcattctgaaaagcagatgggaactgagacagactgagggagctgtgggttcccaccacccatcttgccctacttcaggggacacactcactcagttaaayggcagatggacatgtggctaccacccacctttaagctgctgtgagtgcgttctggctttcctggtgactgagaaaaatgcagtacccttagtatcgacat

SEQ ID NO: 324874 - DNA, 201 bp, Homo sapiens
ccaacgccacttatccagtgaaccagctcaaacaaacacttctcaccctctgcttgtatcacatttgctaatatccccttggccaaacaaattgcgtgacyaagcttggattctatggatgaagaaataaacttcacctcctaaggggagaagtgacaaagtcaccttgcaaaagggagagcctaccagaacttgcatttg

SEQ ID NO: 324875 - DNA, 201 bp, Homo sapiens
ctactcaacctcatactcttcaccttctttttaagtcacctttatttcagtggcttccaagtagtggtcagagacacctaggggatttataatgaactttwagatatcctcttgaaaccgtgcgtagatatgtgtgctgtttcgaaggaaattttatctagtttcaaagaagttctttgtgttcttttggcttctcccact

SEQ ID NO: 324876 - DNA, 201 bp, Homo sapiens
caagtacatcataattatttgggtctgtgagaggcctttgaattatgcaatatgcagcatcgccatggtgatgtgccttgccgtcaaccagcatgttatgrtagagccatgttctggttttgttaatggccaaatgttgcataccaaacttctaaaagagattttaaaattcatgctctttggtaaagggtttcagtatat

SEQ ID NO: 324877 - DNA, 201 bp, Homo sapiens
caacattggggctcagtatgccacctgatgagatggctttttggtgtctgccaagggtgactgtttcctttacacaatggttgaacttatcaattattcasgttacttcttagccccaagttgaactggttttgggtttcaaatattggtctttccctgtttgtcatatacaacagtgaaataacagatgccttctgttca

SEQ ID NO: 324878 - DNA, 201 bp, Homo sapiens
tattccgagagagagtgtttcgagagtgaaccttccaggaaggaggcagcagaggctcccagtcctcttaaaacctagacccagagagtggtatacagtcrctttcactatattctgctggtgaagcagacacagggccagcccagattcaataactacctttcagtttgggagagaaaggcaaagaatgtccaccataac

SEQ ID NO: 324879 - DNA, 201 bp, Homo sapiens
tttttcagttgtcagacttgacttaaatgtaaatgcctgactagctttccttctcccattctcatagactctatgagtttttcctttttactccaggttcrggatggaaccatgtataagcgagaaaaattccagtgagaagattccaacatggccctgaaaattaaatagacttggaaaaaatgcaccaagctctagaca

SEQ ID NO: 324880 - DNA, 201 bp, Homo sapiens
gtgcctgccccatctgtcttgctgtatcttcctagctgcctattgccatgctgctcttgggcatggggtaggtgactcaagaacaacattggggctcagtwtgccacctgatgagatggctttttggtgtctgccaagggtgactgtttcctttacacaatggttgaacttatcaattattcaggttacttcttagcccca

SEQ ID NO: 324881 - DNA, 201 bp, Homo sapiens
tgatgatggtcttcacggacaatgggagaagggctaattttgaatttctaataatgaatccttgtatccctctgtataattttatttcaatcaggttccartcacagattattgattttattatctaagtatattcttcttactctaaatatttttcttagattaggacaaggtttggattaggtcaagtatacctatgat

SEQ ID NO: 324882 - DNA, 201 bp, Homo sapiens
attcttcgtattcctagtacctaaagcatggtattctgtgtttgccaacaacattcagtgaatgccaatatcaggtggggtggcaaaaaaaaaaaaaaaaaagaaaagaaaaggtggaattttggagcatttgtggccttaggcaagtcactttgcgaattttcctgagcctcagcttccttgtctgtagaatgggaattg

SEQ ID NO: 324883 - DNA, 201 bp, Homo sapiens
tggcttatgcctgtaatcccccagtactttgggaggctgaggcgggccgaccacctgaggtcaggagttcgagaccagcctgcccaatatggtgaaacccygtctctactaaaaatacaaaaattagccaggtgtggtggcactcacctgtaatcccagctactcaggaggctgaggcaggagagttgcttgaacctggga

SEQ ID NO: 324884 - DNA, 201 bp, Homo sapiens
aggggggaggtcacacctgtaatcccagcactttgggagattgaggcgggtggattgtctgaagtcaggagttcgagaccagcctggccaatatagtgaarccccatctctactgaaattacaaaaaattagctggatgtggtggtgggtgcttgtaattccagctacccaggaggctaaggcaggtcttgaattgcttca

SEQ ID NO: 324885 - DNA, 201 bp, Homo sapiens
caggtgatttgcccgccttggcctcccagagtgctgggattacagggatgagccactgcacccagccaatttgctaagtttttttttttttttttttttttgagatagagtctcgctctgttgcccaggctggagtgcagtggcacaatctcggctcactgcaagctctgcctcctgggttcacgccattctcctgcctca

SEQ ID NO: 324886 - DNA, 201 bp, Homo sapiens
ttgctttttttttttgagacctcaggtgatttgcccgccttggcctcccagagtgctgggattacagggatgagccactgcacccagccaatttgctaagkttttttttttttttttttttttgagatagagtctcgctctgttgcccaggctggagtgcagtggcacaatctcggctcactgcaagctctgcctcctggg

SEQ ID NO: 324887 - DNA, 201 bp, Homo sapiens
acttgggaggcggagcttgcagtgagccaaggtcgcgccactgcactccagcctggccgacagagcaagaccccatctcaaaaaaaaaaaaaaaaaaaaaacggaccagaagagtgcggttgcaagatttaatagagtgaaatagagtgaaaacagagctcccatacaaagggaggggacccaaagagggtagccattgcc

SEQ ID NO: 324888 - DNA, 201 bp, Homo sapiens
actttgtattttgttttcttataaaattgggaataggtctaaatgatctcttatgaccctgaaattttatatatacatacatattttaatatatgttttartatgtaaaatatgtaacaatgtatacattgttatatatacattgttatatataacacacaaataggtattgatgtatgtaataaacacatatgtaacatg

SEQ ID NO: 324889 - DNA, 201 bp, Homo sapiens
gtcttgctgtgttgcctaggctggtcttgaactcctggcctcaagcagtcttactgcctcagcctccactgcacctgccttgccttgtttagcgttttttkttttgttttgttttgttttgttttgagacagagggagttttgctgtgtcgcccaggctggagtggagtggagtgcagtggcgcgatctcagctcactgca

SEQ ID NO: 324890 - DNA, 201 bp, Homo sapiens
ttttagaatatttcaccggcgggggaggggggaggtcacacctgtaatcccagcactttgggagattgaggcgggtggattgtctgaagtcaggagttcgrgaccagcctggccaatatagtgaaaccccatctctactgaaattacaaaaaattagctggatgtggtggtgggtgcttgtaattccagctacccaggagg

SEQ ID NO: 324891 - DNA, 201 bp, Homo sapiens
catcttattctccttttagaatatttcaccggcgggggaggggggaggtcacacctgtaatcccagcactttgggagattgaggcgggtggattgtctgargtcaggagttcgagaccagcctggccaatatagtgaaaccccatctctactgaaattacaaaaaattagctggatgtggtggtgggtgcttgtaattcca

SEQ ID NO: 324892 - DNA, 201 bp, Homo sapiens
gtctctacagaatgcagtgaagaatatgatataccttgtctctcattcaaggagtcataattaaacattaaaggggtagagaagagtttgtgcagaggttracttttggtagttgtggataaattaaaaatgaaacatagggaggctgagggaggggaatcacttgaacccgggaggtggagattgcagtgagtcgagatt

SEQ ID NO: 324893 - DNA, 201 bp, Homo sapiens
ctgaaattacaaaaaattagctggatgtggtggtgggtgcttgtaattccagctacccaggaggctaaggcaggtcttgaattgcttcaacccatgaggcrgaggttgcagtgagctaagatcgtgccattgcactccagcctgggcaacaagagtgaaactccatctcaaagaaaaaaaaagaatatttctccaggagaa

SEQ ID NO: 324894 - DNA, 201 bp, Homo sapiens
tttaagcttttacctacaactagctattattcttgagtaagataatactaaggatgatagtatgtgtgtctgtgtctgactttctactgactcatacttgygaaatcaggtctttatttatttttttcttgagacagggtctcgctctgtcaagcccgggcctggagtgcagtggcgtgatctcagctcactgcagcctct

SEQ ID NO: 324895 - DNA, 201 bp, Homo sapiens
caaaaaattagctggatgtggtggtgggtgcttgtaattccagctacccaggaggctaaggcaggtcttgaattgcttcaacccatgaggcagaggttgcrgtgagctaagatcgtgccattgcactccagcctgggcaacaagagtgaaactccatctcaaagaaaaaaaaagaatatttctccaggagaactccacact

SEQ ID NO: 324896 - DNA, 201 bp, Homo sapiens
gctcaagtgttacgcccacctcagccttccaaagtgctgagattacagtcgtgagtcaccctgcctggccaatcctatcattttgaatggctgaggagagwggatggcttgagtccaggagtataaggccagctgggacagcgtaacagagtgagaccctgtttctacaaatttttttcttttttgaaacggagtctcgct

SEQ ID NO: 324897 - DNA, 201 bp, Homo sapiens
atggggtttcacgttgttagccaggatggtctcaatctcctgacctcgtgatctgcccgcctcagccttccaaagtgctgggattacaggtatgagccacygcgcccagccagtaaattctttttattactgtagtagatgatacttgattaaatgccatctcgggtgctttcattgtcaacaaaggtgctcccatctcta

SEQ ID NO: 324898 - DNA, 201 bp, Homo sapiens
aaacttgcccatccacgtaacccaaagatgatttttttttttgagacggactacagacacgtgccaccacgcccggcaaattttttgttttttagtagagwtggggtttcacgttgttagccaggatggtctcaatctcctgacctcgtgatctgcccgcctcagccttccaaagtgctgggattacaggtatgagccacc

SEQ ID NO: 324899 - DNA, 201 bp, Homo sapiens
accgcaacctccacctcctgggttcaagtgatttttctgcttcagcctcccgagtagctgggattacaggcacgcaccaccacacctgtctaatttttgtrtttttagtagaaacggggtttcaccatgttggccaggctgatttctagttcctgacctccggtgatccacctgcctcagcctcccaaagtgttgggatta

SEQ ID NO: 324900 - DNA, 201 bp, Homo sapiens
ggattacaggtatgagtcactgtgcccagccaacttttatttcttttttgagactgagttttgctcttgttgcccaggctggagtgcaatggtgcaatctygactcactgcaacctccgcctcccgggttcaagtgattctcctgcctcagcctcccaagtagctgggattaaaggcagcaccaccacgcctggctaattt

SEQ ID NO: 324901 - DNA, 201 bp, Homo sapiens
gagcttgcagtgagctgagatcacgccactgcgctccagcctgggcgacagagcgagactgtctctaaataaataaataaataaataataaaaaatgtctytctcctagatataagtcaattgggaatgagtacacttgaaatatttaatatataataagcttcgattaaataacttctctcttttttttttttgagacga

SEQ ID NO: 324902 - DNA, 201 bp, Homo sapiens
caattggatatttaaactgtgtcctggaacctgaagatcttcctcaacttccctttatatgattggcaaggttgctcatactgcttgaaactgcaaatttmggcttgacacagtggctcatgcctgtaatcccaacactgggaggccaaggtgggaggattgcttgtacctaggagttcaagaccagcttggtctgtaatg

SEQ ID NO: 324903 - DNA, 201 bp, Homo sapiens
tggctaatttttgtattttttgtagaggctgggtttcactgcccaggctggtctcgaactcctgaggtcaagtgatccacccaccttggcctcccaaagtrttgggattaaaggtgtgagtcactgcacccggcctaacttgcatttccttgatgattaatgaattccaaataattttaacattatttgaaaattatttga

SEQ ID NO: 324904 - DNA, 201 bp, Homo sapiens
gctgctgtctggaaaggccgtgtgacctaccaggtaagagtaggtctgaattgagaacctggatttcttgactgtccagtgtattttctggcaagccatgygttatccttacatagctgttaggtatataaatccagaggatgcagccttttttcttttgttcaaacaattggatatttaaactgtgtcctggaacctgaa

SEQ ID NO: 324905 - DNA, 201 bp, Homo sapiens
atttatttatttatttaaattttttgagatggaatcttactctgtcacccaggctgggctgcagaggcgcgatcttggctcactgcaacctctgcctcccrggtttaagcgattctcgtgcctcagcctcctaagtagctgggactacaggtgcccgccaccacgcctggctaatttttatatttttagtagagatggggt

SEQ ID NO: 324906 - DNA, 201 bp, Homo sapiens
cgccaccccctgctccgcggcgccccatcccatcgaccgcccaagggctgaggagtgcagctgcgcagagcgggactagcgggcaactccgccccggcccrgcacaggatccactaggcgaagccagctgggctcctgagttgggtggggacttggagaacttttatgtctagctggaggagtgtacatgcgccaatcagc

SEQ ID NO: 324907 - DNA, 201 bp, Homo sapiens
gccaggctggtcttgaactcctgacctcctgatccactcgcctcgacctcccaaaggtctgggattactggcgtgaaacactgagcccagcctacattttkttttttttggaaacagagtcttgctctgtcgcccaggctgcagtacagtggtgtgatctctgctcactgtaacctccatctcccaggttcaagtgactat

SEQ ID NO: 324908 - DNA, 201 bp, Homo sapiens
atagtgcacatttaagtgtgcagctcctttaattttttacatatgaatacatcattgagactttctgtaacccactttatactgtagtttgctttttttttctttttttagacagtcttgctcttttgccaggctggagtgcagtggcgcgatctcggctcactgcaacctctgcctcccaggttcaagcgattctcctgc

SEQ ID NO: 324909 - DNA, 201 bp, Homo sapiens
cctattttgttaacctatggcatgatacagtttttttgtttgtttgtttgtttgttttgtggagatagagtctcactctttcaccttgggctggagtgcartggcaggatcttggctcactgcaaccccgcctcctgggttcaagcaagcatatgtggctaatttttgtatttttagtggagatggggttttgccatgttg

SEQ ID NO: 324910 - DNA, 201 bp, Homo sapiens
gggcgtggtggctcacgcctgtaatccccaacactttgggaggccaaggcaggtgtatcacctgaggtcaggagttcaagaccagcctggccaacatggcragttcctgtctactaaaaatacaaaaattagctgggcgtggtgtctggcgccgttaatcccagctactcgggaggctgaggcaggagaatcgcttgaacc

SEQ ID NO: 324911 - DNA, 201 bp, Homo sapiens
gcactcggggagatcggattttaaggcagtagcttgccgatgctcccagctgaataaagcccttctacaactcggtgtctgagaggttttgtctgtggctygtcctgctacaagctgagattgcatcacatacccctgcactccagcttgggtgacagagtgagaccctatccaaaaaaaaaaaaagaaagaaaaagaaag

SEQ ID NO: 324912 - DNA, 201 bp, Homo sapiens
accgcgcccagccagtaaattctttttattactgtagtagatgatacttgattaaatgccatctcgggtgctttcattgtcaacaaaggtgctcccatctytaagcttacataaaatgtaattttaaaaagacatttctttagatgtacctgttcacatttttgttaatagtctctcatgtctagttttggaggctggaat

SEQ ID NO: 324913 - DNA, 201 bp, Homo sapiens
tccctttgccaaacttaacttttgctttccatccttttctctctctctctttccctctttccttccttctctccctccctccctcacttcctccttccctyactcacttcctccctccttccttcctttttccttttcttgtttttgctctccggtaattgtctttgttttcatacttccaatctcttctccactaactcc

SEQ ID NO: 324914 - DNA, 201 bp, Homo sapiens
attgcttggcttctataattgatcttgaaccttcccaattatcattccctgaaaaaataattctacttaaataccttcttgacttaaatgtcatgagttgytacatctgggttctgataagatttttctaagaaaaactacatttgacatgtgacatcttcaggaattcaatatcttgtttctttgacagagggacgctat

SEQ ID NO: 324915 - DNA, 201 bp, Homo sapiens
cataaaatgttagcactgcagcacatctcagggctgctgtctggaaaggccgtgtgacctaccaggtaagagtaggtctgaattgagaacctggatttctkgactgtccagtgtattttctggcaagccatgtgttatccttacatagctgttaggtatataaatccagaggatgcagccttttttcttttgttcaaacaa

SEQ ID NO: 324916 - DNA, 201 bp, Homo sapiens
tgttggaattacaggcatcaatcagccactgcacacggcctatacctgtagctacttagaagtaggtactggggttatccattctgaatgatgggatgggratgcaagaggaagagaaccagtttttagcttgtcttaaactaagtcagaatacagattgatgatttaaacacctcagctcagcggttggtcctcatttca

SEQ ID NO: 324917 - DNA, 201 bp, Homo sapiens
ggggttttactagattttgtattaaaaaggatttctttgctctttaaagtgaagggttatttagttatcaataaggaggttttcctaataatacatctagrctataagattggcttaaaatttattttttttccctttctgatgttgtaacctcttagtgccactttcatgttttttttcttagaagtagggaggcaccac

SEQ ID NO: 324918 - DNA, 201 bp, Homo sapiens
tccgtatctcacaccagtcatggtgtagggctgggcacagggtaggtgctcagtgatttagctttttgtctccatctcctaaaaaacaattccaaatattytaggtttgattttcagcggaccctcctgatgggtatctggagcacgaggttggttttttttttttttttggagatggagttttgctcgtcgcccaggctg

SEQ ID NO: 324919 - DNA, 201 bp, Homo sapiens
cacttgaacctgggagggagaggttgcagtgagccaacatcacaccactgtgctccagcctgggcaacagagcaagagtctgtctcaaaaaaaaaaaaaaagtaatactgatgaagaatatatataggtaaaagttcagtgaagagactatacaggttatagaaataagagttactatctttacagaagaaggtatagtat

SEQ ID NO: 324920 - DNA, 201 bp, Homo sapiens
ccggcgggggaggggggaggtcacacctgtaatcccagcactttgggagattgaggcgggtggattgtctgaagtcaggagttcgagaccagcctggccartatagtgaaaccccatctctactgaaattacaaaaaattagctggatgtggtggtgggtgcttgtaattccagctacccaggaggctaaggcaggtcttg

SEQ ID NO: 324921 - DNA, 201 bp, Homo sapiens
gagaggcatagatacgtttttgtttttagtggaggtaacactgggaatgggatattctaacagtagttggttcttgctttttcctatttgtgaatttattstcaaatttttttgattagagaactgttttgtccgatatttagaattgtgggtctgaatgcttaccagaagtcatttcccaagtcatcatggagtaatgtt

SEQ ID NO: 324922 - DNA, 201 bp, Homo sapiens
ctgagattgggaagttaccgaagcatgatcttaaagaaagtagttgtaacgctgaacagtactgtattttaaaaaattgcttaggctgggtgcggtggctyatgcctgtaatcccccagtactttgggaggctgaggcgggccgaccacctgaggtcaggagttcgagaccagcctgcccaatatggtgaaaccccgtctc

SEQ ID NO: 324923 - DNA, 201 bp, Homo sapiens
aaaatctgtgggcccagtgttgcaatatcttccattcaaaaaaaaaagagaagccacaaatccagattttttggcaaccgattcaacttaaaaaaaaaaaraacaacaaaatacgcatttttggtcgacatcagtttagtatgtggattaaagtaaccagggattggggttcattaagtaatcaggagtgtaaaaagatta

SEQ ID NO: 324924 - DNA, 201 bp, Homo sapiens
ctggcctggcctgaacttttagaattcaatattaaccattttcccctagtttattccctagagctcttcacaaagtatggcttgacttctctgagacagcyagtgataagaaaaatgaagtttattttggtataccactcaaaaagattgtgaaaacaaaatggagattaattttttttttccaaactctttgtaccacaa

SEQ ID NO: 324925 - DNA, 201 bp, Homo sapiens
gtgagcccttaaaagggacagaaattgtgcactcggggagatcggattttaaggcagtagcttgccgatgctcccagctgaataaagcccttctacaactyggtgtctgagaggttttgtctgtggcttgtcctgctacaagctgagattgcatcacatacccctgcactccagcttgggtgacagagtgagaccctatcc

SEQ ID NO: 324926 - DNA, 201 bp, Homo sapiens
tgaccaccggtgcatgcagcccctgtcacgtaccgcctgcctgctcaaatcaatcacaaccctttcatgtgaaatctttagtgttgtgagcccttaaaagsgacagaaattgtgcactcggggagatcggattttaaggcagtagcttgccgatgctcccagctgaataaagcccttctacaactcggtgtctgagaggtt

SEQ ID NO: 324927 - DNA, 201 bp, Homo sapiens
tgtgggaacacctttgccaagggaaagcctctaaatactaaaatgtttgcagcactaggttaacaaccaagaggggagatcaaactccaggaacatgcagkgtgcttgcaatttcagtaaggtaacagaaggtaaaccagggcctgtatgatccacatggggtgagtgggaagaaaaatgaccccaaggcaaaatcaatta

SEQ ID NO: 324928 - DNA, 201 bp, Homo sapiens
tagaagaacattgtgaaattccctgccctgttctgtttctctctgaccaccggtgcatgcagcccctgtcacgtaccgcctgcctgctcaaatcaatcacraccctttcatgtgaaatctttagtgttgtgagcccttaaaagggacagaaattgtgcactcggggagatcggattttaaggcagtagcttgccgatgctc

SEQ ID NO: 324929 - DNA, 201 bp, Homo sapiens
cacagcagaaaataagtacatctgtcaaaaatcatatttatgcgagatgtgtcaatactggtcttgtgtcatttgagctacttaaaaagaaaataaaaaawgatcctgtttggctccaaaaatgaaaagtcagcccctcctgcacaagtgggagctgcatccttttaaaattgataatcacaaacccctcagacccaagta

SEQ ID NO: 324930 - DNA, 201 bp, Homo sapiens
taacgtttggcatacatagctttcaaacaaagtaatgccaggattatcacttgatctatttctgtgatagagattttttttctttctttttttttttttttgaggcagtcttgctcaggctggagtgcagtgtcatgatcttggctcactacaaactctggctcccagggtcaagcagttctcttgcctcagactcccaag

SEQ ID NO: 324931 - DNA, 201 bp, Homo sapiens
agtaatagctagaacagaagaaaaaggggtccccaaaaatgtaatcttaaaatttgatgcctgtgctgctattaatagtaaacagcatgggataagatgcrgttctctagattggaaaaaaagttacacagcagaaaataagtacatctgtcaaaaatcatatttatgcgagatgtgtcaatactggtcttgtgtcatttg

SEQ ID NO: 324932 - DNA, 201 bp, Homo sapiens
taaggactggtccttttctaggtgacacaagtaaagtaatagctagaacagaagaaaaaggggtccccaaaaatgtaatcttaaaatttgatgcctgtgcygctattaatagtaaacagcatgggataagatgcagttctctagattggaaaaaaagttacacagcagaaaataagtacatctgtcaaaaatcatatttat

SEQ ID NO: 324933 - DNA, 201 bp, Homo sapiens
aagtaagactaaggactggtccttttctaggtgacacaagtaaagtaatagctagaacagaagaaaaaggggtccccaaaaatgtaatcttaaaatttgaygcctgtgctgctattaatagtaaacagcatgggataagatgcagttctctagattggaaaaaaagttacacagcagaaaataagtacatctgtcaaaaat

SEQ ID NO: 324934 - DNA, 201 bp, Homo sapiens
ttttcaagagcttatcaatcagtcagcccttgttcatccccgagtggatgtgtggtggtattgtggtggacctttactgggcactctgccaaataactagwgtggcacttgtgctttagtccatttggctatccctttcaccctggcatttcatcaaccaaaaaaaaaaagaaaaaagaaaaactcatgtcggccccagcc

SEQ ID NO: 324935 - DNA, 201 bp, Homo sapiens; identical to SEQ ID NO: 68314

SEQ ID NO: 324936 - DNA, 201 bp, Homo sapiens
tatcccaaagtctctgcgggtcagcccccaagggccatgcagcttctgtctcccaacactaagttcacttcgtgtctctcacggcagagaggaaacttagyattccttggagacctgaagggatgcagtgagcttaagaattttcaagagcttatcaatcagtcagcccttgttcatccccgagtggatgtgtggtggtat

SEQ ID NO: 324937 - DNA, 201 bp, Homo sapiens; identical to SEQ ID NO: 68315

SEQ ID NO: 324938 - DNA, 201 bp, Homo sapiens
tttccaggattctacagcctggagtaataagtcatgccaagctctctctgctatatcccaaagtctctgcgggtcagcccccaagggccatgcagcttctrtctcccaacactaagttcacttcgtgtctctcacggcagagaggaaacttagtattccttggagacctgaagggatgcagtgagcttaagaattttcaag

SEQ ID NO: 324939 - DNA, 201 bp, Homo sapiens
gttcaagtgattctcatgcctcagcctcccgagtagatgggattacaggcgcaggccaccacgccaggttcgttttttttgtagttttagtagagactttyaccatgttggccaggctggtttcgaactcctgacctcaaatgatctgcctgcctaggcctcccaaagtgctgggattacaggtgtgagccaccacaccca

SEQ ID NO: 324940 - DNA, 201 bp, Homo sapiens
gactttgcacaaaggggcttatatttgtatctgggagaccaagatgtcatttaacattaattttctgctatttgttttattttattttttattttttattwtaattattattttttggagatggattttttgctgtgtcgcccaggctggagtgcaatgctacgatctcggctcactgcaacctccacctcccaggttcaa

SEQ ID NO: 324941 - DNA, 201 bp, Homo sapiens
ggaggctgaggcaggagaatggtgtgaacccgggaggcagaggtttcagtgagcagagattgtgccactgcactccagcctgggcaacagagcgagactcygtctcaaaaaaaaaaaagaagatggacactggtatgaatgtttttttagagcataaagtagagcacaattaacatctcttccaaccttgagattcatgaa

SEQ ID NO: 324942 - DNA, 201 bp, Homo sapiens
tttcttaatttgagtattatctaccttgactttactgttttgtcccccgtataccagcattataaaaggagtcatgcctgtaattccagctttgggaggcygaggtgggtggatcatctgaggtcaggagtttgagacctggccaaacgtggcaaaaccttgtctctactaaaaatacaaaaattagccaggtgtggtggc

SEQ ID NO: 324943 - DNA, 201 bp, Homo sapiens
atatatgtagttaccttttgaccccgtgggggaaaatacatctaacagagaactatcaataacagaaagaagaaaaataattgttttttttttttttttttgaacatgaaatgtttcccaatcttaagcacagtctccatgtaattggcatgctagctggatgtcttttggcatacttgttacatatttggcatgagttac

SEQ ID NO: 324944 - DNA, 201 bp, Homo sapiens
ttttttttttttttttttttttttttgagatggagtttcgctcttgtttcccaggctggagtgcaatggtgcaatctcagctcactgcagcattcacctcygagtttcaagtgattctcctgcctcagcctcccgagtagctgggattacagacgcccgccatcacgcccagctaattttttatattttcagtagagacgg

SEQ ID NO: 324945 - DNA, 201 bp, Homo sapiens
ctctactaaaaatacaaaaaattagccgggtgaggtgttgcacacctgtaatcccagctacttgggaagctgaagcaggagaattgcttgaacctgggagkcagaggttacagtgagctcagattgtgccattgcactccagccttgacaaagtgagactgtctcaaaaaaagaaagaaaaaaaagaagggtattctgggt

SEQ ID NO: 324946 - DNA, 201 bp, Homo sapiens
gtagcgtgggtatgaaagattgcaatattagttgaaaatatttatttttttccccatcttctatcaagaagggtattctggcccggcgtggtagctcacgsctgtaatcctagcactttgggagaccaaggtgggcggattgcctgagctcaggagtttgagaccagtctgggcaacgtgacaaaaccccatctctactaa

SEQ ID NO: 324947 - DNA, 201 bp, Homo sapiens
tctttttgaggcagggtctcactctgtcacccagattggagtgcagtggtgtgaacacagctcaatacagccttaacctcttgggcgtaagtgatcctccyacctcagcctcctgagtagctgggaccataggagtgtgccaccacatccagctaatatttttattttttgtagagacagaatctcactctgttgcctagg

SEQ ID NO: 324948 - DNA, 201 bp, Homo sapiens
cttggcttactcagtccattaaatggtcagcagagagtaatataagtgtttgtaagtactagtgagggctaatctaaggaagggagcctcagcaattcctrtcctttacctttaacccctaatcaacaagctgctatttttaggttcaagtcccagtgagcaacaaaccaactttagggattaatttgatattaaggaggt

SEQ ID NO: 324949 - DNA, 201 bp, Homo sapiens
gcatgcgtgtgagcatgtgcgtgtgtgtgttttagtcttgtttttaatttttttcagaaacagggtcttgctatgttgcctgggctggacttgaactcctkggctcaagtcatcctcccatctcagcctcctgagtaggtgggactacaggtgcccacttttgtgtctttaaacaacatacaaggggctttttataggact

SEQ ID NO: 324950 - DNA, 201 bp, Homo sapiens
cagcctggtgacaaaggaagactccatctcaaaaaaaaaaaaaaaaaaaaaaaaaaaaaaggccaggcacggtggctcacacctgtaatcccagcacttcrggaggctgaggtgggcggatcacctgaggtcaggattttgagaccagcctgaccaacatggagaaaccccgtctctactaaaaatacaaaatcatctggg

SEQ ID NO: 324951 - DNA, 201 bp, Homo sapiens
tgcatgcgtgtgagcatgtgcgtgtgtgtgttttagtcttgtttttaatttttttcagaaacagggtcttgctatgttgcctgggctggacttgaactccygggctcaagtcatcctcccatctcagcctcctgagtaggtgggactacaggtgcccacttttgtgtctttaaacaacatacaaggggctttttataggac

SEQ ID NO: 324952 - DNA, 201 bp, Homo sapiens
ttgtgactttaacttgcatttcctcttatttttttttgttttttgttttttttttttgagacagggtctcactctgtcacccaggctggagtgcaatggcrcaatcttggctaactgcaacttctgcgtcccaggttcaagcgattctcctgcctcagcccctgaagtagctgggactacaggcatgtgccaccacacctg

SEQ ID NO: 324953 - DNA, 201 bp, Homo sapiens
gtgatcttggctcactgcaacctccttttcctggcttcaagcgattctcctgcctcaacctcccaagtagctgggattacagctgcccaccaccatgcccrtctaatttttgtatttgtagtagagacgaggattcaccatgttggccaggctggtcttgaactcctgacctcatgatccgccctccttggcttcccaaag

SEQ ID NO: 324954 - DNA, 201 bp, Homo sapiens
ctgtgattgcagctgcgagctaccgcacccagctttcttttcttttgaacagttggtaaatgtgactctcttgagatctgtgcattcaagtgtaggtctcyggggattcagtctcatactatcaaatattctcactgtcccctgctgttttgtttgtttgtttgtttttttgagatggagtctcactctgttgcccgggct

SEQ ID NO: 324955 - DNA, 201 bp, Homo sapiens
gtctgaagtcaggagttcgagaccagcctggccaatatagtgaaaccccatctctactgaaattacaaaaaattagctggatgtggtggtgggtgcttgtrattccagctacccaggaggctaaggcaggtcttgaattgcttcaacccatgaggcagaggttgcagtgagctaagatcgtgccattgcactccagcctgg

SEQ ID NO: 324956 - DNA, 201 bp, Homo sapiens
aaatattaaagaaattttcatggggctgggggaagaaggtaaactttgtgtgacacccctcctttatgaactaatggagaacatataccctacattagttrcattattctggaagatgaacgcttggcacagtgagctgccaaactgttagggtgtcctcctttccccgctccactttatatccatctctttggccattct

SEQ ID NO: 324957 - DNA, 201 bp, Homo sapiens
cgtgaacccgggaggtggagcttgcagtgagccaagattgtgccactgcactccagcctaggcgacagagcaagactccatctcaaaaaaaaaaaaaaaaagaataatagctatctaattatctgttattatcccagtataccttagaggaaaccaatgtgcaggtttgattgttagcctgtattcttaaccactatgaca

SEQ ID NO: 324958 - DNA, 201 bp, Homo sapiens
tctcatattgttttatattattttatactcagtacctgttttaagaaaaaacaacaaagaagtaaaatcaaagacaggcagcccggcaccaggcctgaaascaggcctgggcctgcctggcctaaacccagtagttaaaaatcaacccataacttagaaactgatgttattcatagattccagccattgtatagaagaaca

SEQ ID NO: 324959 - DNA, 201 bp, Homo sapiens
ggtagctcttttccaggattctacagcctggagtaataagtcatgccaagctctctctgctatatcccaaagtctctgcgggtcagcccccaagggccatscagcttctgtctcccaacactaagttcacttcgtgtctctcacggcagagaggaaacttagtattccttggagacctgaagggatgcagtgagcttaaga

SEQ ID NO: 324960 - DNA, 201 bp, Homo sapiens
ggactgcatggtagctcttttccaggattctacagcctggagtaataagtcatgccaagctctctctgctatatcccaaagtctctgcgggtcagcccccragggccatgcagcttctgtctcccaacactaagttcacttcgtgtctctcacggcagagaggaaacttagtattccttggagacctgaagggatgcagtg

SEQ ID NO: 324961 - DNA, 201 bp, Homo sapiens
tatagacagaaaatacattagtaattgccagggcttagggagataggggtgtatgtgtgtgattctaaagagatgacatgagggagatctttgtggtgatrgaatagttctgtatcttgattatggtgatggttacgggaatctgtacatatgataaaatggtataaaactatatacacacattgtaccaacatcaatttc

SEQ ID NO: 324962 - DNA, 201 bp, Homo sapiens
acattaaacaaaagcaattgttatgcttgtgcacatggcaggccagaggccctgattgtcccccttccactaaggtggtcctctagtcgaccaggcgtggrctgcatggtagctcttttccaggattctacagcctggagtaataagtcatgccaagctctctctgctatatcccaaagtctctgcgggtcagcccccaag

SEQ ID NO: 324963 - DNA, 201 bp, Homo sapiens
taagtactagtgagggctaatctaaggaagggagcctcagcaattcctatcctttacctttaacccctaatcaacaagctgctatttttaggttcaagtcscagtgagcaacaaaccaactttagggattaatttgatattaaggaggttggaaggaactttaggatttggactgacattctggtggatttttatatggct

SEQ ID NO: 324964 - DNA, 201 bp, Homo sapiens
ctgggaactatgttaaaaaaaaatttcaagatttaagggagattacggtgttactatgacaccagaaaaacttagaactttgtgtgaaatagactggctarcattagaggtgggttggctatcagaagaaagcctggagaggtcccttgtttcaaaggtatggcacaaggtaacctgtaagccaaagcacccggaccagtt

SEQ ID NO: 324965 - DNA, 201 bp, Homo sapiens
ttattctccttttagaatatttcaccggcgggggaggggggaggtcacacctgtaatcccagcactttgggagattgaggcgggtggattgtctgaagtcrggagttcgagaccagcctggccaatatagtgaaaccccatctctactgaaattacaaaaaattagctggatgtggtggtgggtgcttgtaattccagcta

SEQ ID NO: 324966 - DNA, 201 bp, Homo sapiens
gctaatctaaggaagggagcctcagcaattcctatcctttacctttaacccctaatcaacaagctgctatttttaggttcaagtcccagtgagcaacaaascaactttagggattaatttgatattaaggaggttggaaggaactttaggatttggactgacattctggtggatttttatatggcttcttagtcttcatgt

SEQ ID NO: 324967 - DNA, 201 bp, Homo sapiens
accggcgggggaggggggaggtcacacctgtaatcccagcactttgggagattgaggcgggtggattgtctgaagtcaggagttcgagaccagcctggccratatagtgaaaccccatctctactgaaattacaaaaaattagctggatgtggtggtgggtgcttgtaattccagctacccaggaggctaaggcaggtctt

SEQ ID NO: 324968 - DNA, 201 bp, Homo sapiens
ccagcctggccaatatagtgaaaccccatctctactgaaattacaaaaaattagctggatgtggtggtgggtgcttgtaattccagctacccaggaggctraggcaggtcttgaattgcttcaacccatgaggcagaggttgcagtgagctaagatcgtgccattgcactccagcctgggcaacaagagtgaaactccatc

SEQ ID NO: 324969 - DNA, 201 bp, Homo sapiens
gtggcacgacctcggctcactgcaacctctgcctcctgggtttaagcgattctcctgcctcagcctcccgagtagctgggactacaggcacgtgccacgaygcccggctaattttttgtatttttagtagagatggcgtttcactgtgttagccaggatgggtctcgatctcctgacctcgtgatctacccaccttggcct

SEQ ID NO: 324970 - DNA, 201 bp, Homo sapiens
aggagttcgagaccagcctggccaatatagtgaaaccccatctctactgaaattacaaaaaattagctggatgtggtggtgggtgcttgtaattccagctrcccaggaggctaaggcaggtcttgaattgcttcaacccatgaggcagaggttgcagtgagctaagatcgtgccattgcactccagcctgggcaacaagag

SEQ ID NO: 324971 - DNA, 201 bp, Homo sapiens
tctccatgctggtcaggctggtctcaagctcccgacctcaggtgatccacccacctcagcctcccaaagtgctgggattacaggcatgagccaccgcaccygacccatggtgggtattttctatacttttagttgctttgaatctttttagagggaatacacagtttaatctcagataagcttaccatgtctgcttatagt

SEQ ID NO: 324972 - DNA, 201 bp, Homo sapiens
ttccagcgactcagcctcctgaatagctgggactacaggtgcacaccaccatgcccagctgatttttaaatgttttgtagagacaaggtctccctatgttrcccaggctggtctcaaactcctgggctgaagctatcctcccttggcctcccaaagtgctgacattacaggcatgagccaccacagtcagcctcccttgct

SEQ ID NO: 324973 - DNA, 201 bp, Homo sapiens
ttcaaactcctgaccttgtgatctggccgccatggcctcccaaagtgctgggattgcaggcgtgagctactgtgccagctgtttttttggggttttttttkgtttttgtttttttttgaagatagagtctcactttgttgcccaggctggagtgcgatgcaatagtgtgatcatggctgatggcagtcttaaactccagtg

SEQ ID NO: 324974 - DNA, 201 bp, Homo sapiens
tagtattaggttgctgcaaaagtaatggcagttttgcccattaacctaataaaaggaaaaataaaaggatattatgagtaactttattctaataaattggrcaacataaatgaacaaattccttgaaaaacacaaattatcacaattgacacaagaagaaaaagaaaatctgaatagttccatactttttttttttttttc

SEQ ID NO: 324975 - DNA, 201 bp, Homo sapiens
tttttttttttgttttgttttgttttgttttgagacagagggagttttgctgtgtcgcccaggctggagtggagtggagtgcagtggcgcgatctcagctyactgcaacctccgcctcccaggttcaagctattctcctgcctcagcctcccaagtagctggggctacaggaatgtgccaccatatctggctaatttttgt

SEQ ID NO: 324976 - DNA, 201 bp, Homo sapiens
actatctctttgacacaaaacatacgttttaattaataatacttgctctggtaatatagtttcttatgagttgctacatattttctagaatagattttccytaaaatatgcctttgtaagatttttttaataaaatcaagtttagaaataatttgaacttttttgggggatagagtttcagtcttgtcgcccaggctggaa

SEQ ID NO: 324977 - DNA, 201 bp, Homo sapiens
tcattgtccctcctgctgtgctctcaggcagtagatgattagctatttctttacctcctgtttttgcctaattagcattttagtgagctctctgattggtygggtattagctaagttgcgagccccgtatttaaaggtggacgcggtcaccttcccagctaggcttagggattcttggtctaggaaatccagctagtcctg

SEQ ID NO: 324978 - DNA, 201 bp, Homo sapiens
aggcggatggtttgagcccaggagatcaaggttgcagtgagctacaattgcaccactgcattccagcctggatgacaaaggaagactctgtctcaaaaaawaaataaataaataaacgttcccttcaaataatacctccaaaaatgacagattttgtaggcaactcatatatgcacggcctctcattcaagtgttcctcgt

SEQ ID NO: 324979 - DNA, 201 bp, Homo sapiens
atttttgtatttttagcagagaccgggtttcaccatgttggtcaggctggtctcgaacgcctgacctcaggtgatccacctgcctcggcctcccaaagtgytgggattacaggcgtgagccaccgtgcctagcccaaaacacctttttcattcaagttcagtaattacatcataatatattgtgtatgtcactataaacta

SEQ ID NO: 324980 - DNA, 201 bp, Homo sapiens
ggaggctgaagcaggcggatggtttgagcccaggagatcaaggttgcagtgagctacaattgcaccactgcattccagcctggatgacaaaggaagactcygtctcaaaaaaaaaataaataaataaacgttcccttcaaataatacctccaaaaatgacagattttgtaggcaactcatatatgcacggcctctcattca

SEQ ID NO: 324981 - DNA, 201 bp, Homo sapiens
tgcagtggctcaatctcggctcactgcaaactccacctcctgggttcactccattctccagcctcagcctcccaagtaggtgggactgcaggcatccgccrccacgcccagctaattttttgtagttttagtagagatggggtttcaccgtgttagccaggatggtcttgatctcctgacctcatgatctgcccgcctcgg

SEQ ID NO: 324982 - DNA, 201 bp, Homo sapiens
ggagtcttgcctgtcacccaggctggagtgcagtgacatgatctcggctcactgcaaccaccacctcctgggttcaagcagttctctacctcagccttccragtagctagaagctggaattacaggtgcctgccaccacacccggctaattttattttatttatttttttattttttttgagacggagtctcgctctgttg

SEQ ID NO: 324983 - DNA, 201 bp, Homo sapiens
agggtcttgctctgttgtccaggctagactgcagtggcacaatcacggctcactgcagccttgaccctctgggcttaagtgatcctcccacctcagccttyccagtagctgggacagcaggtgtgtgctaccatacctggctttttaaaaaaatttttgtagagatagggtcttgctgtgtggcccaggctgctctcaaac

SEQ ID NO: 324984 - DNA, 201 bp, Homo sapiens
ttggctctggttgccaaaattctaaacttctgttttgtgttttgtgtgtgtgtgtgtgtgtgtgtgtgtgtgtgtgttttgacagggtcttgctctgttgyccaggctagactgcagtggcacaatcacggctcactgcagccttgaccctctgggcttaagtgatcctcccacctcagccttcccagtagctgggacagc

SEQ ID NO: 324985 - DNA, 201 bp, Homo sapiens
aagggagccacaaaaatctctgtcagttggtgttttgaataattgttctgaaatatactcccaggcttgaaacttggatctggccttttttttttttttttaacttgaatttttttttttttttttgctcttatgttattcatatgaattttgcaaatagagagccagtcttgtagcatagtaaaatttaacagtttatgt

SEQ ID NO: 324986 - DNA, 201 bp, Homo sapiens
ctttctcataaaatagaaagttgaaattaatgtatacgtttaaagccaactgttaaaacacagccttatatatttgggtattatttttttctgcccacatrttccgactagatcgatgcctttattaaattttaagattcaacttcagttttcatcatgatgtagagatatcagttttatagattgtatgtttatttgcca

SEQ ID NO: 324987 - DNA, 201 bp, Homo sapiens
ctaggctggggtatagtggcacgatccactgcagccttgaactcctgggctcaagcaatcctcctacctcagcctcccaggtagctaggactacaggctcyctccaccatgctgggctaattaaaaaaaattttttttgtggagatagagtcttactgtgttgaccaggctggtctggagctcctggcctcaagccatcct

SEQ ID NO: 324988 - DNA, 201 bp, Homo sapiens
cccaaatactttcggttttttttgtttttgtttttgagagagtcttgcagtggcgcagtcatggctcattgcagcctccacttctcaggctcaagcagtcytctcacctcagcttctggaagtgttgggattacaggtgtgagccaccacacctggctctaaatatttttcattgagcaccttatcagtgttctaggccat

SEQ ID NO: 324989 - DNA, 201 bp, Homo sapiens
aatcccagcactttgggagattgaggcgggtggattgtctgaagtcaggagttcgagaccagcctggccaatatagtgaaaccccatctctactgaaattrcaaaaaattagctggatgtggtggtgggtgcttgtaattccagctacccaggaggctaaggcaggtcttgaattgcttcaacccatgaggcagaggttgc

SEQ ID NO: 324990 - DNA, 201 bp, Homo sapiens
gttcgagaccagcctggccaatatagtgaaaccccatctctactgaaattacaaaaaattagctggatgtggtggtgggtgcttgtaattccagctacccrggaggctaaggcaggtcttgaattgcttcaacccatgaggcagaggttgcagtgagctaagatcgtgccattgcactccagcctgggcaacaagagtgaa

SEQ ID NO: 324991 - DNA, 201 bp, Homo sapiens
taacggggttaagtgaactaggagtaggcaatgtagtgcagtggttggaagcctagactggcatcagatgatgctacaagagtgcttagtgccatgcatgwcctgtagggagtgatcaataaatatttacctgatgctatttacccaagatgctattgaagaagcaaagcttattttacaagccttctgcaatttccccaa

SEQ ID NO: 324992 - DNA, 201 bp, Homo sapiens
agggcctgggaaatgttcttgtctgtttcaagtttatcttgtattttggggccctggtctcctcagtcttccagcccaacaggtgtgagcgtccagggccrccacccggaagccagctgcctcttcatggggaaatctttgaaattcaaggcttggccatctggatatgcaaatgttccagatttgctgagcccaccaagt

SEQ ID NO: 324993 - DNA, 201 bp, Homo sapiens
aatttttttttttttttaaatctcagaatttcatattggtttctcctttgtgaaactttaaacgtggtaggcaaattttaatgtgtaaactgcaatttatkggatataaataacttataagatggaactcactgactttaaaactgcttttcccatagctgacttttcttacttaacagtgatagaccttattctctgact

SEQ ID NO: 324994 - DNA, 201 bp, Homo sapiens
atgttgatgttttaaaaccataactgctgttgtgaagataaagattatctggggtctagcttagaatttttttttttttttaaatctcagaatttcatatkggtttctcctttgtgaaactttaaacgtggtaggcaaattttaatgtgtaaactgcaatttattggatataaataacttataagatggaactcactgact

SEQ ID NO: 324995 - DNA, 201 bp, Homo sapiens
tatgttttctctctacagctacagattagcacctaagtatcatttcccaattcaatttgaagatgtatataatgccttaaggtggttcttacgtaaaaaarttcttgcaaaatatggtgtgaaccctgagagaatcggtatttctggagatagtgcaggagggaatttagctgcagcagtgactcaacaggtatgttcata

SEQ ID NO: 324996 - DNA, 201 bp, Homo sapiens
atatgtgagaggtctttgatttttttcttggagtctttatattaatttttatttatttaagcaattatatatatattcttctctggtagccttttaattarttaattcattcatttacttacattctgtccacaatttatgaaagtaatgtattttcagagctctcagtcgatataccttttaaaagttgttttaatgccc

SEQ ID NO: 324997 - DNA, 201 bp, Homo sapiens
ccattctgaagaggaaacagctacttagggaccagaagaatgaaaagaaaccaaccattctaagtgctaagaaaaatgttttccagcagagacaccaacargtaaaaacaccccagctacagaatattgacaagtccaagaaatcatatgaaacatttgggtttaatggggaaattgttgcaattagtttggagaggttag

SEQ ID NO: 324998 - DNA, 201 bp, Homo sapiens
tgataattatagttaaaatgtggataaatactacaatttgcaaaatatttggggttacatctaataatatctgtacttttatttagaagttctatacatcytttatagtatattacacacttcaaaaacacaaaattattttttaacctatatgttttcacaatttaaaacatattttgtaatatttcattcttataagtc

SEQ ID NO: 324999 - DNA, 201 bp, Homo sapiens
actctcaaaatctccaacccccgtcagacccaagtcacgggagaaacatcaggattctgcaataactgacacaggccctgcatagaaatcgcagggtggarcacttgcctaaaccccgtccccacttcccaatgcatggaaatcccactgcctaacacaccctcaaacaaactacttattgacacaaaacgcttcttatgg

SEQ ID NO: 325000 - DNA, 201 bp, Homo sapiens
ttccataacctatgattagccagatattaatcagcagtaacagttgcagcaaaagctggttacaaacaatccatagaaacaggacgtaaaggtagacaacyggttagaccagatattctcagaagggagtatgccttaaccctaaagaggcctagaagagctgtggcaagatgagggcagttatagccctatcttaccata

SEQ ID NO: 325001 - DNA, 201 bp, Homo sapiens
tctgagtgctggttatatggctgtgtttagtttgaaaattaaagaaattatatacttatgtgcacctccagcatgtattaggttggtgcaaaagttattgmggttttgtcattacttttgcaccaataatatattacagtctaatcaaaacaaacaaaaaaatgtgtaaactatgttttctctctacagctacagattagc

SEQ ID NO: 325002 - DNA, 201 bp, Homo sapiens
ttggccaaagcaccaccattcacagccctcacaacttacaggatctcctctcctcctgggcattaagctccctctctccttcccaaattcagtcgctctaygccctctttatcaaaaatcctgaattcagccttgccaaaagtgcccccctcaacctggcatccctacttcccatatcctcttcccctcctactcattctt

SEQ ID NO: 325003 - DNA, 201 bp, Homo sapiens
ttttttccttaatgtgtgtgtgttttattaaatttttcttaaggattctctcttcttacccactgtcatacacccagaagtatagggataacagaagaccygcacttctcactttctatatttttgtttttctctaggctaagctcatttaatctgcctgagaggccttctgctaagtttgttgtccaaactctactttcc

SEQ ID NO: 325004 - DNA, 201 bp, Homo sapiens
gtaaaatgcaattagaaaatccaagcttatgctgttttgcattccaactttatacttaaagagaattttcttaaacatggcaagtcaaattatagtataaraccgacatctgtgtttaattcattgcaatgactaataaatcactagtacatgaaagataaaatatactttaaaatatttatgcaaatatatgccttgcct

SEQ ID NO: 325005 - DNA, 201 bp, Homo sapiens
ttctatacatcttttatagtatattacacacttcaaaaacacaaaattattttttaacctatatgttttcacaatttaaaacatattttgtaatatttcaytcttataagtctccttttttcctccctggtattggtatatccctctttacagaccactgattattacaaatattagcacaacagacttgatataaaagat

SEQ ID NO: 325006 - DNA, 201 bp, Homo sapiens
aatccacctatggaaagagcacttagggacagcaaaattaggggcggattgctgggtagactcatgccagagcagtatatatttaaattgaaatttcagaragtaaatgaacagttaaaaaaataacatactcatcaccatttgtcaagttaaatcattattataaagttgggacataatcttgatcaatatttggttgta

SEQ ID NO: 325007 - DNA, 201 bp, Homo sapiens
agaaaataaaatggttagaataattgctggccttaaaaggacttagttgtgaaataaataagcaagaaaattatagattgaaatgagagttaagtaggagmattttcttttatttttgtgcaggagaaatataaacaagttggtagactgaaataaatgaaggcaataagtagaaatatgttagccaagtaatgggctggg

SEQ ID NO: 325008 - DNA, 201 bp, Homo sapiens
gtatattaaaaatgtattatcaaattaaacaaaatagatgagttcatataaaattatgttagataaataatccacctatggaaagagcacttagggacagyaaaattaggggcggattgctgggtagactcatgccagagcagtatatatttaaattgaaatttcagagagtaaatgaacagttaaaaaaataacatactc

SEQ ID NO: 325009 - DNA, 201 bp, Homo sapiens
atcccactgcctaacacaccctcaaacaaactacttattgacacaaaacgcttcttatggactcagcctgggtgacagaggaagattctgtatcaaaaaawatatatatatacacacacacatatatatgtatatatatgtgtgtgtgtatatatataatttgttttttccatgataagctattttaaaacaaagattctg

SEQ ID NO: 325010 - DNA, 201 bp, Homo sapiens
caacaagtgttatacactgcgctaagtatattaaaaatgtattatcaaattaaacaaaatagatgagttcatataaaattatgttagataaataatccacytatggaaagagcacttagggacagcaaaattaggggcggattgctgggtagactcatgccagagcagtatatatttaaattgaaatttcagagagtaaat

SEQ ID NO: 325011 - DNA, 201 bp, Homo sapiens
ccactcttccctcatgaaccatagcagataagttatcaccccttaccattaagtatccaaacccttattaatggaaatcatccattacgctgcccttgcakgaatcaccctacttactctactctttgccataggaatatatactgtcttgcctcctgggtggaatttcagacaaaaaaaactcaatattcgtaacctctt

SEQ ID NO: 325012 - DNA, 201 bp, Homo sapiens
gttaatctagagaatgagtctgacacagaaggatcaatggcaaaatgtgcaagacaaaagataaaagggaggaagagcattaggaggttcactgggaaacytgaattccactgagtcatgaatggatggcttcttataaatacagtgttaaatttgtctctcgtattttaaggtaaaatagaactgccagaacgtgaaaga

SEQ ID NO: 325013 - DNA, 201 bp, Homo sapiens
tgtgagaggtctttgatttttttcttggagtctttatattaatttttatttatttaagcaattatatatatattcttctctggtagccttttaattaattmattcattcatttacttacattctgtccacaatttatgaaagtaatgtattttcagagctctcagtcgatataccttttaaaagttgttttaatgcccttt

SEQ ID NO: 325014 - DNA, 201 bp, Homo sapiens; identical to SEQ ID NO: 68327

SEQ ID NO: 325015 - DNA, 201 bp, Homo sapiens
tttgtgggcactggtagtaagttttgatttaattctgtatgtgatgcagagctattaaagagctttaagaaagggacacatttttttccctcatatttgcygtctgtgctacaatatgtgagaggtctttgatttttttcttggagtctttatattaatttttatttatttaagcaattatatatatattcttctctggta

SEQ ID NO: 325016 - DNA, 201 bp, Homo sapiens
cctcccatagacctaagccccaaaggccaaaagtaaaacctcctaccccaaacccgcctgtaactgtctgaccagttcccggatgcagtcaagacgtctaycttacacaacagaactggcaagaaaaacatccccaggaagcggtcagacacctggcacaaaggaccctacaactcttttctttttccttcaccttgaccc

SEQ ID NO: 325017 - DNA, 201 bp, Homo sapiens
taaggagcagatttcccttaaatgcacaagtggccaaaaatgagggtgaaaatggcatttctgagcactgtcctcaaaatactagaaaaccacagcagccyaccatgaacctggagcttggatatttttttcttttatttaaagtttcacttgcattaaaaaaaaagaattcacccagtcaggtaatgtcaatgactttca

SEQ ID NO: 325018 - DNA, 201 bp, Homo sapiens
ctttgtatacccatcatctaaaacagagccaaatcagtacctccttccagtatacacagttgggttaatctagagaatgagtctgacacagaaggatcaawggcaaaatgtgcaagacaaaagataaaagggaggaagagcattaggaggttcactgggaaacttgaattccactgagtcatgaatggatggcttcttata

SEQ ID NO: 325019 - DNA, 201 bp, Homo sapiens
caaaagataaaagggaggaagagcattaggaggttcactgggaaacttgaattccactgagtcatgaatggatggcttcttataaatacagtgttaaattygtctctcgtattttaaggtaaaatagaactgccagaacgtgaaagaagtgcagcaggatttttgtgaaggaaacagccttgtcttcatttgtctgtttta

SEQ ID NO: 325020 - DNA, 201 bp, Homo sapiens
gagtgccctggagtcacaggatcatctataaaagtgcatcataaataatttccatctcagatggtcactgtgaagagtaagtgataacatccttgaaacaragtccagcgtatatagcacttggtgagcctaaaatgtaggctatataattttaaatatttaaaatatagcgtatagtttaggctcaacaagtgttataca

SEQ ID NO: 325021 - DNA, 201 bp, Homo sapiens
tagcatacataatagacttacaaaatataaaatctcaaagaaatggccagatggttgacactttttttttactatcttgaggttacagaaagaatggtggmttggccaaaaaatgatatggtggcaagacaggttatgggaaggagagaagaggagacatggttagcaaaagtggtcttgttatatagatggatcctcaca

SEQ ID NO: 325022 - DNA, 201 bp, Homo sapiens
ggtggctggagccgaagacatcattcgagtccacgttcccttctccctctctgacctctcccaaattgcaaaacgtctcgggtcgttttcctctgatcccracacttatatcaaagaatttaagtaccttacccaatcttatgaactcacttggcatgatctctacattatcctctcttctaccctccttccagaaaagaa

SEQ ID NO: 325023 - DNA, 201 bp, Homo sapiens
tcaggctattttacttaggtgaggtacaacgtatttcttgcctctctattcagtgagaactattcagtgaccataatgtcagatataccaaaacctgatastccaagtttgtgagcagattccagtattcctagaaagaaagatatgtactgagaagcaacataaattaattgaatttttgaaatttcaatctaatatgta

SEQ ID NO: 325024 - DNA, 201 bp, Homo sapiens
tccagtttaactccaagttgaaattcttttccttctcttacgtctttatgattatcccaaataactttgtctatatctatggtaagaccttgttttgtcaktcatgtctctcatttggctctgacgtttttgttggtggtggttttgttttgttttaggatgatgaatttacctgattctgcttggtcttcacagtatttc

SEQ ID NO: 325025 - DNA, 201 bp, Homo sapiens
ttcttaaagtagtagtacagatgcaagcagtaagttccagtgtttgtttaaggggacctagttctattccacttatattcaggtgccttttctattgtccyatgcagacttaggtgatccttctatattgcaacaattctgtctatatctccttggctcacatatctgacaacgtattgatcaagttagcgacttgtcttt

SEQ ID NO: 325026 - DNA, 201 bp, Homo sapiens
aaatcacctaacccacctgagtcctagggctcttgagattcatctgtttacctccaatgaatacagtatagattaactggaggagtgaagattggactggrcctactaagttaagaactctgaactctagagaggaagaataaattagtcctgaaaagaaaaggttacaggcttgaaattaagcaaatttgtccattgatg

SEQ ID NO: 325027 - DNA, 201 bp, Homo sapiens
aaataggcggattggttacagctcagcgtttgccttatttgaaactggttccacaagttggttacctttggctgaaactcagtgattgggacaagagtagrttacacatccaattaagttacaactcactgtgtatcaagaaacctttaaaatatgcaaagaggcagctttaggctaaacttagtttatttggcaagagta

SEQ ID NO: 325028 - DNA, 201 bp, Homo sapiens
actgaggtagttcgcaaacattttactaagtcttcagtaggtacacatgcccttcggcatggacattactgcctcttttatcttctcgtgctttgttctgkcaaagttttacttttccctgaagctttatatcactcttttccacatatgcatttcctcatcaacccaggtagaggtgagaagaaactttttttttctatt

SEQ ID NO: 325029 - DNA, 201 bp, Homo sapiens
cctaagtaaaatagcctgactcataaaagtactatgtatgaaatgcactgttatgggatattgagaatcagaggccaccaaataaacctacctttattgcygcagaaaaacactaaccctgctaagccagcactaaaactgctgtaaatcaatacagcatattatcatagctatttgaatttaaaacagtattgacagcac

SEQ ID NO: 325030 - DNA, 201 bp, Homo sapiens
ttatggactgtgacaacattgggatacatttctgataacatttaaaatataaatttcagtacatctggagttgattcctttgaaagaattctttaaaaaakatttaactcttgatgtaatgggttttataaaagtttgaattaattttaaatgtacaatttgtaccatgaaatgttaatatttgctctgatattacctata

SEQ ID NO: 325031 - DNA, 201 bp, Homo sapiens
gggttcacgccattctcctgcctcagcctcccgagtagctgggactacagacgcctgccaccacacctggctaattttttgtaattttggtagagatggcrtttcaccatgttagccatgatggtctcgatctcctgaccaggtgatccacccgcctctgcctcccaaagtgctgggattacaggcatgagccatcacacc

SEQ ID NO: 325032 - DNA, 201 bp, Homo sapiens
gcccaactatctgccccaacagtaacatacttaggagtccaactctcccctggggcccaagccatgaccccagcacaagcaaccttaataaacagcttgcytctgccttcctcaaaaaatgaaattctctctttcttaagactagaaggtttctttagaatatggattcccaactttgccctcctggctcaacccctctac

SEQ ID NO: 325033 - DNA, 201 bp, Homo sapiens
ccagtccaaaggccccctccttcctcagtccattcgacttaatgtatggatgccctttcctcttacaaaacagaccccctcctgagtatcaattagaatamctcccaacactctccctcatccatcatctcctctgcgaacaagctgaccaggcccccacaaaaccccaccaaggcaccactgaccaaacactccttccag

SEQ ID NO: 325034 - DNA, 201 bp, Homo sapiens
aatgagaatattatagttaagaaaataaccttaagctgggcacagtggctcatgcctgtaatcccagcactttgggaggccgaggccagtggatcatctgyggtcaggagtttgagaccaacccggccaacatggtgaaaccccgtctctactaaaaatacaaaaattagccaggcatggtggcacatgcctggaatccca

SEQ ID NO: 325035 - DNA, 201 bp, Homo sapiens
attcccctttagtctcttctggggctttcctggcttcttttttatgttcaaatctttgcttcagttggaatttatgttgataagtagtgagaagtttagaytgaacttttacttttctccaattttctatcccagtcccatttattggaaagtcccttgtgatttaagatcatataaaagattcatgcaagtcaggcatct

SEQ ID NO: 325036 - DNA, 201 bp, Homo sapiens
ttgccaaaagtgcccccctcaacctggcatccctacttcccatatcctcttcccctcctactcattcttgcactgacattctggatcacttgcagccacamttccctaacatctcctccaagcctctcactaatccagatgaccaactatttatagatgactcctcttccagagcccccggctctcccaaaattgttgggt

SEQ ID NO: 325037 - DNA, 201 bp, Homo sapiens
tggaggagtgaagattggactggacctactaagttaagaactctgaactctagagaggaagaataaattagtcctgaaaagaaaaggttacaggcttgaarttaagcaaatttgtccattgatgtgggaagttagaggagaaaaagacagaagattaaaaaaatagatctgaatgagtgcctcatttctgacaggatgact

SEQ ID NO: 325038 - DNA, 201 bp, Homo sapiens
aatacatatatacattttcaaatccaaaatataaaaacacctaccaattaatagaagtataggcgaaagactcagaaagacaatttacagaaaaggatatygaaatcatcaaacaatatatgaaaatgtactgtatacatcaggaaaatacaaattaagactattataagatacctgcatatactcgagattatagataaa

SEQ ID NO: 325039 - DNA, 201 bp, Homo sapiens; identical to SEQ ID NO: 68325

SEQ ID NO: 325040 - DNA, 201 bp, Homo sapiens; identical to SEQ ID NO: 68326

SEQ ID NO: 325041 - DNA, 201 bp, Homo sapiens
aagaaccaccctaggcataacctttgcatttctggtttcttttaaaaggaccaagcaggattcatgcatgaaaatttagttcattccatttgagtttattwagggttaatgtctacctataagtccatagatctctttgccatttgatacttgaatttcaggaggtttgtgaatttcatttttaggctacatttgtggagc

SEQ ID NO: 325042 - DNA, 201 bp, Homo sapiens
tggccttattatgccaacccttaaactaagtgagcaactctgttttcaaagcttttgggtggagctgaagcacactgcttattaaagtacactattcaggyatatcatgtaggtttactttctgtgtttctagagaccaagaagcgggacgttcaccatgggaagaaaatcgctgtaccttctgattgtggggatcctcat

SEQ ID NO: 325043 - DNA, 201 bp, Homo sapiens; identical to SEQ ID NO: 68324

SEQ ID NO: 325044 - DNA, 201 bp, Homo sapiens
ccaccatttgacccagagaattaagtttttcaagattctattcttttgatttattgacttattcatcttttaaaataactgctgtggcctttgacaatgtrttacttagaaatgttgtttgttttctgtcttatgtattggaatcatgttaaaaaaatatcaagaacagcaagcaaggagtcatttgaataggttttgcta

SEQ ID NO: 325045 - DNA, 201 bp, Homo sapiens
catcatctcctctgcgaacaagctgaccaggcccccacaaaaccccaccaaggcaccactgaccaaacactccttccaggagaatatgtcttcctaaaaaycaacaagtctcatgccaaagtgcgaaatccctttccaagtccttctcgctacctccactgcagccaaactttgagaacacaagtcttggtaccatctttc

SEQ ID NO: 325046 - DNA, 201 bp, Homo sapiens; identical to SEQ ID NO: 68329

SEQ ID NO: 325047 - DNA, 201 bp, Homo sapiens; identical to SEQ ID NO: 68322

SEQ ID NO: 325048 - DNA, 201 bp, Homo sapiens
agacaatttacagaaaaggatatcgaaatcatcaaacaatatatgaaaatgtactgtatacatcaggaaaatacaaattaagactattataagatacctgyatatactcgagattatagataaaatgagaaagacataagataccaagtgttggtaaggttttgaatcaacagcacttccataagctctagtttgagaata

SEQ ID NO: 325049 - DNA, 201 bp, Homo sapiens
cctcctgagtagcttcaatgacaggtgtgcgttaccatacctggctaatttttgtatttttagtcaagacgggtttttgccatgttagccagctggtctcraactcctgacctcaagcaatccacacttcagccttgcaaagttctgggattacaggaatgagccaccataccaggcctattttaataaactcttacatga

SEQ ID NO: 325050 - DNA, 201 bp, Homo sapiens
gaataattgctggccttaaaaggacttagttgtgaaataaataagcaagaaaattatagattgaaatgagagttaagtaggagaattttcttttatttttrtgcaggagaaatataaacaagttggtagactgaaataaatgaaggcaataagtagaaatatgttagccaagtaatgggctgggagtgttgactgatagat

SEQ ID NO: 325051 - DNA, 201 bp, Homo sapiens
aggctctccacaaggctcacattccattcccagagctatgaacatctgcttttctggaataggattcttggtgatgtgaaacctccctgactgcaagtccrttcataggctttctgcatggggaagcacatcacgcactattggctcattctggcagtccaacctggcattgtctttacacaatcctgaatgcaattttgt

SEQ ID NO: 325052 - DNA, 201 bp, Homo sapiens
agacagcaaagcactgaggtggtcaaaaatgtcagaaaatgaaaagaaagccgaagaaggtgagaacctcaagaaagaggaaataatagaagtcctgcatmgtgtagagatgtcaagtaagtaggatggaagtatgtctcttggatgttgaactttctatgttaatattgttgaggagagacttgctgacatgatgggata

SEQ ID NO: 325053 - DNA, 201 bp, Homo sapiens
gtgtgcgttaccatacctggctaatttttgtatttttagtcaagacgggtttttgccatgttagccagctggtctcaaactcctgacctcaagcaatccayacttcagccttgcaaagttctgggattacaggaatgagccaccataccaggcctattttaataaactcttacatgaacagaagataatatttatgcaatt

SEQ ID NO: 325054 - DNA, 201 bp, Homo sapiens
agacagtgtgtcactctgtctcccaggctggagtgcagtggtgttttctcagctcactgcaacctccacctcatgggttcaagcaattcttgtgtcttagmctcctgagtagcttcaatgacaggtgtgcgttaccatacctggctaatttttgtatttttagtcaagacgggtttttgccatgttagccagctggtctca

SEQ ID NO: 325055 - DNA, 201 bp, Homo sapiens
gatgaaatatttttatttccttcacagtgtattccctcttttttaagaaccaccctaggcataacctttgcatttctggtttcttttaaaaggaccaagcrggattcatgcatgaaaatttagttcattccatttgagtttattaagggttaatgtctacctataagtccatagatctctttgccatttgatacttgaatt

SEQ ID NO: 325056 - DNA, 201 bp, Homo sapiens
ttgagacagtgtgtcactctgtctcccaggctggagtgcagtggtgttttctcagctcactgcaacctccacctcatgggttcaagcaattcttgtgtctyagcctcctgagtagcttcaatgacaggtgtgcgttaccatacctggctaatttttgtatttttagtcaagacgggtttttgccatgttagccagctggtc

SEQ ID NO: 325057 - DNA, 201 bp, Homo sapiens
taatttctatgctttttaaaaatagcgtttctacgctgttttaaaaacatatttataaacatattgaatgcatgtattaaaatatgaatgcaaataggagmtattgattttttgaaactattaaagagaatattgagaagaaatgactaaaacattataatatcaatccctgcttctgtcatagatttttttttcttcctt

SEQ ID NO: 325058 - DNA, 201 bp, Homo sapiens
actgattattacaaatattagcacaacagacttgatataaaagatgatgttaatagaccatttcacacagaagtcttgcccaaatctcctaaagtaacatktcgctttagcatcaaagccatgtcagaaacctctattaagtgatccttcttcttcatggcaaagcttattgatatactggtatattttaataatatattt

SEQ ID NO: 325059 - DNA, 201 bp, Homo sapiens
tctatgctttttaaaaatagcgtttctacgctgttttaaaaacatatttataaacatattgaatgcatgtattaaaatatgaatgcaaataggagatattrattttttgaaactattaaagagaatattgagaagaaatgactaaaacattataatatcaatccctgcttctgtcatagatttttttttcttccttaaggg

SEQ ID NO: 325060 - DNA, 201 bp, Homo sapiens
atagcctgcatgtggtagctcagcactgcaatcccagcgctctgggaggccaaggcaaagggatcacttgagaccaggagtttgatagcagcttgggaaamacagtgagaccctgtctctacaaaaaaaaaaaaagaaaaaagaaaaattagcctggcataatagtgtaagtttgtagtcctagctacctaggaggctgag

SEQ ID NO: 325061 - DNA, 201 bp, Homo sapiens
tacgctgttttaaaaacatatttataaacatattgaatgcatgtattaaaatatgaatgcaaataggagatattgattttttgaaactattaaagagaatrttgagaagaaatgactaaaacattataatatcaatccctgcttctgtcatagatttttttttcttccttaagggaatgttaattctttggataaatcatt

SEQ ID NO: 325062 - DNA, 201 bp, Homo sapiens
cttgaacctgggagtgggaggttgcggtgagccgagattgtgccactggactccagcctgggcaacagaactagactctgtctccccgcaaaaaaaaaaaattaagaaattatgttcatcaaaagacattaatagaagtcttaaagtttgtgtgtgtatatatatgtgggtatagacatatgtatactataaaagttttta

SEQ ID NO: 325063 - DNA, 201 bp, Homo sapiens
ggcaggagaattgcttgaacctgggagtgggaggttgcggtgagccgagattgtgccactggactccagcctgggcaacagaactagactctgtctccccscaaaaaaaaaaaattaagaaattatgttcatcaaaagacattaatagaagtcttaaagtttgtgtgtgtatatatatgtgggtatagacatatgtatact

SEQ ID NO: 325064 - DNA, 201 bp, Homo sapiens
catttgacccagagaattaagtttttcaagattctattcttttgatttattgacttattcatcttttaaaataactgctgtggcctttgacaatgtgttayttagaaatgttgtttgttttctgtcttatgtattggaatcatgttaaaaaaatatcaagaacagcaagcaaggagtcatttgaataggttttgctaaaaa

SEQ ID NO: 325065 - DNA, 201 bp, Homo sapiens
gttattaaaacatgataagttctttgatagaaatatatgtgtgagtgtatgggtacatagattagagttcggtctgttttgatgctctcttgagtgggctrtatacactagttcacatcctaaacctcatggcatttatgttttctaagccacaaagcttggcatattgagagaattagaaagaaaggtgaagacatcggc

SEQ ID NO: 325066 - DNA, 201 bp, Homo sapiens
gctgaggcaggagaattgcttgaacctgggagtgggaggttgcggtgagccgagattgtgccactggactccagcctgggcaacagaactagactctgtcyccccgcaaaaaaaaaaaattaagaaattatgttcatcaaaagacattaatagaagtcttaaagtttgtgtgtgtatatatatgtgggtatagacatatgt

SEQ ID NO: 325067 - DNA, 201 bp, Homo sapiens
actctgtgacatttaatcattaatagaagatttggggtatacactacagatgggtaagttcttatgaaaatatactatagcttcactgactggaaaatgcrtagaaactatgagagatgtggttagtagttttggaagaatgtttctctctctactatgactatttcattgagaacctgacccagtctatctcctcaaacc

SEQ ID NO: 325068 - DNA, 201 bp, Homo sapiens
ataaatactacaatttgcaaaatatttggggttacatctaataatatctgtacttttatttagaagttctatacatcttttatagtatattacacacttcraaaacacaaaattattttttaacctatatgttttcacaatttaaaacatattttgtaatatttcattcttataagtctccttttttcctccctggtattg

SEQ ID NO: 325069 - DNA, 201 bp, Homo sapiens
ataatatgtgtcagtaaaatattatattaagtaggtgaatgagatcatgtaattgtgagactaatgaccctattacgctattagagattcagacgaattcrtataatcttcgatggtgtattcctttattaccataataatcatcctattttaagaaaattatcaacacattcaaagattcccatgctacttacaaagaag

SEQ ID NO: 325070 - DNA, 201 bp, Homo sapiens
tgtactccagcctgggtgacagaataaggccctgtctcttaaaagcataaaaaataaaataatatgtgtcagtaaaatattatattaagtaggtgaatgakatcatgtaattgtgagactaatgaccctattacgctattagagattcagacgaattcatataatcttcgatggtgtattcctttattaccataataatca

SEQ ID NO: 325071 - DNA, 201 bp, Homo sapiens
ataaatttatataaaaatacctggcaacttgtaacaatctttacaaataggctccacaatggtctattttgataattatagttaaaatgtggataaatacyacaatttgcaaaatatttggggttacatctaataatatctgtacttttatttagaagttctatacatcttttatagtatattacacacttcaaaaacaca

SEQ ID NO: 325072 - DNA, 201 bp, Homo sapiens
caaacaaactacttattgacacaaaacgcttcttatggactcagcctgggtgacagaggaagattctgtatcaaaaaatatatatatatacacacacacayatatatgtatatatatgtgtgtgtgtatatatataatttgttttttccatgataagctattttaaaacaaagattctgaattctgtatgttttctatgga

SEQ ID NO: 325073 - DNA, 201 bp, Homo sapiens
ctaagaagggggttgttttacatccatggtggaggctggtgcgtgggaagtgctggtaagtgaatgctttgaaaaatctctgtcactgaggtagttcgcaracattttactaagtcttcagtaggtacacatgcccttcggcatggacattactgcctcttttatcttctcgtgctttgttctggcaaagttttacttttc

SEQ ID NO: 325074 - DNA, 201 bp, Homo sapiens
tatgtttcatttattacttaagtctttttgagatcatgaatagatagatagataaaaacaagatagatagacagatagataatcttattagggatattttwttggtttaaatgaaaatgatttgtgcaaatcatcttgcttctcagctccttgatgacccagatgtcaagatcaaactcaagatccagtctttaatttatc

SEQ ID NO: 325075 - DNA, 201 bp, Homo sapiens
tttcatttattacttaagtctttttgagatcatgaatagatagatagataaaaacaagatagatagacagatagataatcttattagggatattttattgktttaaatgaaaatgatttgtgcaaatcatcttgcttctcagctccttgatgacccagatgtcaagatcaaactcaagatccagtctttaatttatcctgc

SEQ ID NO: 325076 - DNA, 201 bp, Homo sapiens
tacttattgacacaaaacgcttcttatggactcagcctgggtgacagaggaagattctgtatcaaaaaatatatatatatacacacacacatatatatgtrtatatatgtgtgtgtgtatatatataatttgttttttccatgataagctattttaaaacaaagattctgaattctgtatgttttctatggataattttgt

SEQ ID NO: 325077 - DNA, 201 bp, Homo sapiens
gccgggtgtggtggtgggcacctgtaatcccagctacgcgggaggctgaggcaggagaattgcttgaacctgggagtgggaggttgcggtgagccgagatygtgccactggactccagcctgggcaacagaactagactctgtctccccgcaaaaaaaaaaaattaagaaattatgttcatcaaaagacattaatagaagt

SEQ ID NO: 325078 - DNA, 201 bp, Homo sapiens
taaaagttcaaacagagttaccatattgacccagtatttccatttctaggtgtatacacaagagaaatgaaaacatgcccatataaaaacttgtatgttcrcagaagcagtattcataaaccttaaaagtggaagcaacccaatgttcattaactgataaatggatgaataaaatgtggtatatctatacaattgaatatt

SEQ ID NO: 325079 - DNA, 201 bp, Homo sapiens
attagtcctgaaaagaaaaggttacaggcttgaaattaagcaaatttgtccattgatgtgggaagttagaggagaaaaagacagaagattaaaaaaatagrtctgaatgagtgcctcatttctgacaggatgactgggagggtgagaacagatttctggggaatgcaaacaaaattgttgggtgaaggaataagcagacag

SEQ ID NO: 325080 - DNA, 201 bp, Homo sapiens
ccaaaattgattgtggcaatggttgcacaactctgaatatattgaaaatcactgaattgcatacttataatgtgttaattttatgggttatgaatatctcrgtaaaatggttatattaaaaattaagggcatacttttaatgtgttaattttataggttatgaatatctcagtaaaatggttatattaaaaattcaggctg

SEQ ID NO: 325081 - DNA, 201 bp, Homo sapiens
ctgggcaacagagcaagactctgcctcaaaaaaaaaaaaaaagaaaaaaatcctgtcttcctgtattcttggatcttacattctaatggagacaatctttratcgataaataagtaaataatacagtgtgttttaaagtgataaatgtaggaaataataggccagaatgttagaagaaaaaccttagacaaattaaattta

SEQ ID NO: 325082 - DNA, 201 bp, Homo sapiens
tttcatctcgggtcccagtgcccccagaggatatgacggggacaccctcagcacagtgttggggtgggggaaggagctgcagagatgaaggttgttggccyttcacctcactccacactctgtccctttctccagggcattgatgattccagcaaagacaagtaagtcaggttactgaggagggagaaggcacttgcaccc

SEQ ID NO: 325083 - DNA, 201 bp, Homo sapiens; identical to SEQ ID NO: 68337

SEQ ID NO: 325084 - DNA, 201 bp, Homo sapiens
cctaggcttcctggaattgcgggtgccccagactgctcctactttttgatgagacctcaggagatttcctcagttttggctttctctgtctttgaggtctstctgtcactgggaaggggaatctttctccaacctgtgcaaagacccatgcggacccctagactcccagccagccgagatggggccgggagagcctatgca

SEQ ID NO: 325085 - DNA, 201 bp, Homo sapiens
cttgctgtccctgccttccttagggagggcccagcactcagctcagcctcctctccctcagtactcccggaaggtggatccccgcttcggagcctacgttkcctgtgccctgttggtcttctgcttcatctgcttcatccagcttctcatcttcccacagtgagagccctgcctttcctctcttagcttctctcttcacca

SEQ ID NO: 325086 - DNA, 201 bp, Homo sapiens; identical to SEQ ID NO: 68340

SEQ ID NO: 325087 - DNA, 201 bp, Homo sapiens; identical to SEQ ID NO: 68341

SEQ ID NO: 325088 - DNA, 201 bp, Homo sapiens
cctgccttccttagggagggcccagcactcagctcagcctcctctccctcagtactcccggaaggtggatccccgcttcggagcctacgttgcctgtgccmtgttggtcttctgcttcatctgcttcatccagcttctcatcttcccacagtgagagccctgcctttcctctcttagcttctctcttcaccacttcccaga

SEQ ID NO: 325089 - DNA, 201 bp, Homo sapiens
agtacctgaacggggactacgaggtggagccaggccgtggtggcgagcgcaacgcgtacctcaaggagcagcacattgagactttcctcatcctgggcgcmagccagaaacgggtcagggccagggcagggctgggggcaggggagcaagaagagggacaaatggggaggagcaggccaaggcctcctctgggcccctctt

SEQ ID NO: 325090 - DNA, 201 bp, Homo sapiens
ttgtgtgggagcaggagccacccccctggctctccctccctccctcaggtgctgtccatacctttcctttcattgtttctcacatggccatgcccatgcawctggtgaaaccatgtctcctgccctcagccggggcacccaagatgccctgaaccctgaggatgaggtggatgagttcctgagccgtgccatcgatgcccg

SEQ ID NO: 325091 - DNA, 201 bp, Homo sapiens
ggagtgtctggctacagcttcatgtagtggatctcgataggcacattcttggggcagtggcgaaattcactgctgcccctgtgccagtccttggggccagrgctgcccatacaacttcctctgggctgagaaacattccctgtgcccatttgggtatgtgggtttctagacaggtggggtttgtggcctccttcctcgtct

SEQ ID NO: 325092 - DNA, 201 bp, Homo sapiens
gggcctgggttgtgggctgggggaggggaagactgccaggagctgatctggggctgcatcctcccaggctggtacgtgaggtgacaggtgtgaatgtgaayatgcgcgtgggcatccacagcgggcgcgtgcactgcggcgtccttggcttgcggaaatggcagttcgatgtgtggtccaatgatgtgaccctggccaacc

SEQ ID NO: 325093 - DNA, 201 bp, Homo sapiens
gacctcatgatccacccgccttggcctcccaaagtgctgggattacaagcgtgagccaccgcacctggccagaatgccagaatgccagaacgtaccttttwaaaagtaactttatagcccgtttgtttgtggagcacgtgcccttagggcactgtcagacatcttaaagggccaggtccttctgccccaaagcttctcttc

SEQ ID NO: 325094 - DNA, 201 bp, Homo sapiens
tcttttccgtcctgcttgtgtttacttctgccattgccaacatggtaagggtccagtgggaattctcccacctctgctctgtgccaagcactgtcctggasactgggagtacagcggagaaaaggacatattttctgccctcagggagccccctcccagaataggggaaggttaactccggttctccttccttgttctccc

SEQ ID NO: 325095 - DNA, 201 bp, Homo sapiens
aggctggagtggtgcagtggcgcgatctcagctcactgcaacctctgcctcccaggttcaagcgattctcctgcctcggcctcctgagtagctgggactasaggagcgcgccaccatgcccagctaatttttgtatttttagtagagacaagtttcaccatgttggccaggatggtctcgatctcttgacctcatgatcca

SEQ ID NO: 325096 - DNA, 201 bp, Homo sapiens
gctggtgtttgcgctggcgctgtatctgcatgctcagcaggtggagtcgactgcccgcctagacttcctctggaaactacaggtgactgtgtgggcctttsggggaagaggaggaacctaggggcggagcctgggccaggccagaaatgtatcttgtgctagctggctaaggctcaggccacacctaggcccaccctggtt

SEQ ID NO: 325097 - DNA, 201 bp, Homo sapiens
tgtggatctgccatctcctgttacccccctgcccagggagcagaggccagggtccttcaggcgctgctgtaggcacagccccgccatcagcacagcgcctkggtcctccactggaccctaactagagagtgctgtcttgctcaaggttttgaaggcttgtggcctgttgcccaccctgcctcaggcacagagaggaagttg

SEQ ID NO: 325098 - DNA, 201 bp, Homo sapiens
cctgaatggcccggtctataggtgcataccaccacaccaggctaatttttttttttttgagacggagtctcactctgtcacccaggctggagtgcaatggygcgatctttgctcactgcaacctctgccacccgggttcaagcaattctcctgcctcagctcctgagtagctgggattacaggcgcccgccaccacgcccg

SEQ ID NO: 325099 - DNA, 201 bp, Homo sapiens
agacttcctctggaaactacaggtgactgtgtgggcctttgggggaagaggaggaacctaggggcggagcctgggccaggccagaaatgtatcttgtgctwgctggctaaggctcaggccacacctaggcccaccctggttccattccttctctgtgcccatcccttactccctgccccatcctctacctgccccctttac

SEQ ID NO: 325100 - DNA, 201 bp, Homo sapiens
ctgtctccagcagctctggggactgacagccaaggacacagggactgatagaaccaggcatctgactggctagaaagacgtgtgttcttgctcatgatttyctcatctttccatctcttgacgatgacagaggtttgggtttaaagtgttgtagagtgaggagaagaactaatatttttcaagtgtgtacttcttgacagg

SEQ ID NO: 325101 - DNA, 201 bp, Homo sapiens
gcagccttctgctcatgtccaaccaaggctgtgctcccgtcccctgcatctgggtctgtccttgcccgctgggccctgagaggagtgaagggcctgggttrtgggctgggggaggggaagactgccaggagctgatctggggctgcatcctcccaggctggtacgtgaggtgacaggtgtgaatgtgaacatgcgcgtggg

SEQ ID NO: 325102 - DNA, 201 bp, Homo sapiens
tttcctcatcctgggcgccagccagaaacgggtcagggccagggcagggctgggggcaggggagcaagaagagggacaaatggggaggagcaggccaaggyctcctctgggcccctcttctgagcctgtacccatgctgcccgcacagaaagaggagaaggccatgctggccaagctgcagcggactcgggccaactccat

SEQ ID NO: 325103 - DNA, 201 bp, Homo sapiens
gataacagtgattcctcttctcctagctcagttccataagatgctgctgggcccctgctgttgaacacagccttaacatttgtccttgagccccatgcagscttctgctcatgtccaaccaaggctgtgctcccgtcccctgcatctgggtctgtccttgcccgctgggccctgagaggagtgaagggcctgggttgtggg

SEQ ID NO: 325104 - DNA, 201 bp, Homo sapiens
tgatagaaccaggcatctgactggctagaaagacgtgtgttcttgctcatgatttcctcatctttccatctcttgacgatgacagaggtttgggtttaaartgttgtagagtgaggagaagaactaatatttttcaagtgtgtacttcttgacaggcattattagattctttcctgaggaccattatcatttccattttgc

SEQ ID NO: 325105 - DNA, 201 bp, Homo sapiens
ctggggtctttgccttgacagccaggtctccttgtgttgttcagattatcagcgaggagcggttccggcagctggaaaagatcaagacgattggtagcacytacatggctgcctcagggctgaacgccagcacctacgatcaggtgggccgctcccacatcactgccctggctgactacgccatgcggctcatggagcaga

SEQ ID NO: 325106 - DNA, 201 bp, Homo sapiens
cccaaaaggtaaggattggagaaattgcttaatattgcacttgtgggtctgtgttctgtgagtgagctactggagggaccttctgaagctgtatgcccaaktcctgcctggagtcctaggctgcctgttttcccagctcctcagtcttacactgatagcagcagctggaagggggctcttgagacagggaagtggggaagg

SEQ ID NO: 325107 - DNA, 201 bp, Homo sapiens
ctgactacgccatgcggctcatggagcagatgaagcacatcaatgagcactccttcaacaatttccagatgaagattggtaagagggctttgttgcttggygggttttcccaggactttttccaggtgaagctgggattataggctggggatgggatcacagatttcccatcagggctcctgtggggttttcttccctctg

SEQ ID NO: 325108 - DNA, 201 bp, Homo sapiens
acttcccagaagcttcctaaatacccacacaagcccacaatccctggagcctgcatccctgcttgttccagagggtgggacaagaatgcccagatcttccrgaattaaatgatttttctggccctgttctgccccagctccaccctgatgcttgggatctatgccagcatcttcctgctgctgctaatcaccgtgctgatc

SEQ ID NO: 325109 - DNA, 201 bp, Homo sapiens
cctgcctttcctctcttagcttctctcttcaccacttcccagaagcttcctaaatacccacacaagcccacaatccctggagcctgcatccctgcttgttycagagggtgggacaagaatgcccagatcttccagaattaaatgatttttctggccctgttctgccccagctccaccctgatgcttgggatctatgccagc

SEQ ID NO: 325110 - DNA, 201 bp, Homo sapiens
tcccggaaggtggatccccgcttcggagcctacgttgcctgtgccctgttggtcttctgcttcatctgcttcatccagcttctcatcttcccacagtgagrgccctgcctttcctctcttagcttctctcttcaccacttcccagaagcttcctaaatacccacacaagcccacaatccctggagcctgcatccctgcttg

SEQ ID NO: 325111 - DNA, 201 bp, Homo sapiens
gctgggaggaacatgggcccggagggcttccacaggtgtctctgcagtctgctaggacaggggtagggtggctagtgttctgtgtatggtggggcagggaytgggggaagggagctagcctgactagagaacccctgggcccctgcaaatgcagcaggaaggattccaggctaagcgggctcccctcccactcccccaggt

SEQ ID NO: 325112 - DNA, 201 bp, Homo sapiens
tactcccggaaggtggatccccgcttcggagcctacgttgcctgtgccctgttggtcttctgcttcatctgcttcatccagcttctcatcttcccacagtragagccctgcctttcctctcttagcttctctcttcaccacttcccagaagcttcctaaatacccacacaagcccacaatccctggagcctgcatccctgc

SEQ ID NO: 325113 - DNA, 201 bp, Homo sapiens
cttctgtccttatctgtgaccagtccaataagaggtatttcctctcaaatgaactggtggatgggagtggttaatagcatggctactagagatggactatktggtttgaattctggctgctccatttactggcttatttgagaagtcttctaacttctctaagcttcagttaccttatctataaaatggggataataatac

SEQ ID NO: 325114 - DNA, 201 bp, Homo sapiens
gggatttctgaggctgttggggagggcaggctggactccagacagggaggaggtcacatggggagagggagaaggccatgcctcttccactgggccccatmcctggttgccattcctccttggctgatacaaccttcaactcttggtctcttgatgcctctagctgttccctaaggccctgcaacgtctgtcccgcagcat

SEQ ID NO: 325115 - DNA, 201 bp, Homo sapiens
aggctgcctgttttcccagctcctcagtcttacactgatagcagcagctggaagggggctcttgagacagggaagtggggaaggcagccaaggcgtggcargaaatgagtgttggggcagggctgggtctggggtctttgccttgacagccaggtctccttgtgttgttcagattatcagcgaggagcggttccggcagct

SEQ ID NO: 325116 - DNA, 201 bp, Homo sapiens
gagacctcaggagatttcctcagttttggctttctctgtctttgaggtctgtctgtcactgggaaggggaatctttctccaacctgtgcaaagacccatgyggacccctagactcccagccagccgagatggggccgggagagcctatgcagtaggggagttgggctagagggaatgccatctgtgcaggccagaggggat

SEQ ID NO: 325117 - DNA, 201 bp, Homo sapiens
agcttgttgtagtagaaaaagcctctggtctctgctgggtttgaatccctgctctgctgctcattagctgtgtgactttagacaggtgagttagcttctcygagcctcaatttcttcatctgtaaaatggcaatgtcacctaaatcacagggtagttgtaaagattatagtaactaacatttatggaaggctgactatatg

SEQ ID NO: 325118 - DNA, 201 bp, Homo sapiens; identical to SEQ ID NO: 68346

SEQ ID NO: 325119 - DNA, 201 bp, Homo sapiens; identical to SEQ ID NO: 68347

SEQ ID NO: 325120 - DNA, 201 bp, Homo sapiens
gcaaaaccccattcctttgatatgtggccatagcttgttgtagtagaaaaagcctctggtctctgctgggtttgaatccctgctctgctgctcattagctrtgtgactttagacaggtgagttagcttctctgagcctcaatttcttcatctgtaaaatggcaatgtcacctaaatcacagggtagttgtaaagattatag

SEQ ID NO: 325121 - DNA, 201 bp, Homo sapiens
attctcaggtcctttaataccccaggagcttccctcacctttctaggtcactgtgagcctctctggtgcccatgccccttgtgccttggaatgccacaacwcccctgtgggggaaagggaggagatggaggagctcccagcatgtgaccccaaatagttacccccaaggaaaccctagtcctgggaaatccttgtgtcttt

SEQ ID NO: 325122 - DNA, 201 bp, Homo sapiens
cccagccaccatctttgacaactatgacctactgcttggcgtccatggcttgtgagtttattctcaggtcctttaataccccaggagcttccctcaccttkctaggtcactgtgagcctctctggtgcccatgccccttgtgccttggaatgccacaacacccctgtgggggaaagggaggagatggaggagctcccagca

SEQ ID NO: 325123 - DNA, 201 bp, Homo sapiens
ctctctgggcctggatgctcccctgtgtgagggcaccatgcccacctgcagctttcctgaggtgttcgagcagtgctcaggcggtgggggggctgtcctgkcacagacattggcccttctgtgccaggcctggtgatgggcgctggggacccaggaactcaccagagtctcccacactaggagcaaccaggggccctggtg

SEQ ID NO: 325124 - DNA, 201 bp, Homo sapiens
gcgctgcccatctggcttgagctctcattctatggccacctggggcaagtgctgagtattcctccatcctgtccccgagtgagtacaaatgtcagtgctgstagctcagcaggtttaattacaagggacccctcagggtactctgtgagcatagaggagtgtggccctggtggggacacaggcatgcatggatgacagtgc

SEQ ID NO: 325125 - DNA, 201 bp, Homo sapiens
ttgagccaactgcatctcctccctgttgagacccctggtagtgccctgtccttgctgtccctgccttccttagggagggcccagcactcagctcagcctcstctccctcagtactcccggaaggtggatccccgcttcggagcctacgttgcctgtgccctgttggtcttctgcttcatctgcttcatccagcttctcatc

SEQ ID NO: 325126 - DNA, 201 bp, Homo sapiens
tgggtgttgaccgtggtgagagcatagctttgctggcagcagctggggatttgagggcagatagagtatgcgtggagggtggtgggccatgcaggctgggwgggcaagagagtaaaggttacccttccctccaattccttcccattcaggagaatcactgcctgaggatcaagatcttgggggactgttactactgtgtgt

SEQ ID NO: 325127 - DNA, 201 bp, Homo sapiens
tgaagcacatcaatgagcactccttcaacaatttccagatgaagattggtaagagggctttgttgcttggcgggttttcccaggactttttccaggtgaarctgggattataggctggggatgggatcacagatttcccatcagggctcctgtggggttttcttccctctgacctcctatatcaagtctgatattaagaac

SEQ ID NO: 325128 - DNA, 201 bp, Homo sapiens; identical to SEQ ID NO: 68338

SEQ ID NO: 325129 - DNA, 201 bp, Homo sapiens
gcaagttctgcgggatgggcagtgcctggagtggagcccagggtgggatggttgcagttggttggacaattacatagctctgaagctatccccttgggggsggtcagagtgttcctgggagggtcatgcattctcctggatagcatttgcccctttctctgtgagtatgagccagatgctaggatgtgtttccagggggct

SEQ ID NO: 325130 - DNA, 201 bp, Homo sapiens
gtgccctgtccttgctgtccctgccttccttagggagggcccagcactcagctcagcctcctctccctcagtactcccggaaggtggatccccgcttcggrgcctacgttgcctgtgccctgttggtcttctgcttcatctgcttcatccagcttctcatcttcccacagtgagagccctgcctttcctctcttagcttct

SEQ ID NO: 325131 - DNA, 201 bp, Homo sapiens
tgggaagccgaggtgggcagatcatgaggtcgggagttcaagaccagcctgaccaacatagtgaaaccccttttctactgaaaaaaaaaaaaaaaaaaaaattaggccgggcgcagtggctcacgcctgtaatcccagcactttgggagtccgaggcaggcggatcacgaggtcaagagatcaagaccatcctgactaaca

SEQ ID NO: 325132 - DNA, 201 bp, Homo sapiens
caaccaggggccctggtgtgttgtaggggctgggcatggaaggtggaggatatgggggtttgaggggtgtggtgggaaggttaggtcaggcaggagagtgsagggctctccctgcccaagggtgctgtggcctctgccttcacccaacgctgcctctgccacccccgcagtacttcatcgggaacatgctgctgagtctct

SEQ ID NO: 325133 - DNA, 201 bp, Homo sapiens
tcatctatttggtgctgcttctgctgggtcccccagccaccatctttgacaactatgacctactgcttggcgtccatggcttgtgagtttattctcaggtyctttaataccccaggagcttccctcacctttctaggtcactgtgagcctctctggtgcccatgccccttgtgccttggaatgccacaacacccctgtggg

SEQ ID NO: 325134 - DNA, 201 bp, Homo sapiens
tgactttgatgaggtacttttccagttggctggtggtggcagagagtggggggtacttggagaccagggattggaatgggtgagtggaactgggaagagaragagagatttgatgggacccagagtcatcaggggtaagggtatgcacagtggaggcagaggcaagaacccatgaaggtgtcagaggcagcaagggggtca

SEQ ID NO: 325135 - DNA, 201 bp, Homo sapiens
ggctctccctccctccctcaggtgctgtccatacctttcctttcattgtttctcacatggccatgcccatgcaactggtgaaaccatgtctcctgccctcrgccggggcacccaagatgccctgaaccctgaggatgaggtggatgagttcctgagccgtgccatcgatgcccgcagcattgatcagctgcggaaggacca

SEQ ID NO: 325136 - DNA, 201 bp, Homo sapiens
gtgtgtggggggagataagaacagggaaggggactggtgaatggaggaggctgaagcaaaatgttgtgggtggtggatggtggtgggaaacctgctcactstgggctctgtctccagcagctctggggactgacagccaaggacacagggactgatagaaccaggcatctgactggctagaaagacgtgtgttcttgctca

SEQ ID NO: 325137 - DNA, 201 bp, Homo sapiens
tgagccagatgctaggatgtgtttccagggggcttggaacatggccagaaactagtcctttgggaacaggtccgggccagtgctggtgggggtggtgtgtkgggggagataagaacagggaaggggactggtgaatggaggaggctgaagcaaaatgttgtgggtggtggatggtggtgggaaacctgctcactctgggct

SEQ ID NO: 325138 - DNA, 201 bp, Homo sapiens
atagtcagcagctcccatcacaggcatgacctgctcaattaggtaggacttaccctattagaggaattagaatgcaataataaataaaatacaatatgctyaattggtatgagaaataacaagatttgtcttgttcaggactgtgcagtgtccaggtctgggtgtgctcgcaggaccttttctggggcagcagtagcgtgg

SEQ ID NO: 325139 - DNA, 201 bp, Homo sapiens
ggagaaagcaagtgggtttgggggatgtggaatttcaccatccctctggtctgcaaagtcagggctctctaaaatgtgtttatccttttgagaaaatgctrtgtaaatgcacagtgacagtagtagaatagttgtcattagctgaaagtgatcagaatgttctggtgacatctcagggtttagcaaagaaaaagtggctgt

SEQ ID NO: 325140 - DNA, 201 bp, Homo sapiens
agacgttgggctttcgcccgggttgacggtggttcttgccaccgaagaggggctccgactgggtccacatccaaccagattaggggagagagctcagtggytcagcagcccctccacacggcccagaagacgaggaaagggtattctgtttcatacatttctgcccacctaactgtgaggtggaactgcaggactggggaa

SEQ ID NO: 325141 - DNA, 201 bp, Homo sapiens
gaaagcatagcctgtaccatataagccctgataaagggtgtggatcccatttgcaaagaggtaagaagacgtaaggagagtgcagggccagaaactccaaggaagtgagtgttttgagaaggagggagtacaagaacattggatgctactgagaggtcaagtaaagtgaggactaggaagtgcccattggatttattaaga

SEQ ID NO: 325142 - DNA, 201 bp, Homo sapiens
tgctgctgctgccattgcgtgtcgagtctgagggtttatttatttaggcgatgagtggggtctttcggggtctgtgtgacaggtactgatctttgtcatcrtctgactcaagtttagccctggcatatgtggaattaacatgtgcagtctgccagacatccctatgggtgtgaggaagcctgtgacacaaatatgatgacc

SEQ ID NO: 325143 - DNA, 201 bp, Homo sapiens
aaagaaaaagtggctgtctcagaggaggcagaggggacagtttcagatttgccttcagaatgctgatctttcatttttggggaggctttatgtaattttctttttttttttttaacagaacgaagtcggcctactggagttcttccaaaatgtgataaaagaaactagggcagagccaaaaaaggtgactagttgggtcct

SEQ ID NO: 325144 - DNA, 201 bp, Homo sapiens
cataccacctgttccagtgctcttacccaatgcattatcttgcctgccaaggagagagagggagagggagggggagagagagagagagagagagacacacmcacagagagacctagtatttttaacaatacaccctagagaccacacctcgtgtcaacacatacagagctgtctcatctcaggaccacaaaatattagatt

SEQ ID NO: 325145 - DNA, 201 bp, Homo sapiens
cctggcatatgtggaattaacatgtgcagtctgccagacatccctatgggtgtgaggaagcctgtgacacaaatatgatgacctactgtgtgacaggcatygtagggacagaaaagtgatggagaaatcccaagtgtgattacgtcagtggaaagattttgtagtctaaatttatgacccaactgatgaattaaggtcctt

SEQ ID NO: 325146 - DNA, 201 bp, Homo sapiens
ggacccagcaagaggacaccggagccacctggcatgaactggcaaggagcagcagagggacaggcaaggaagaggaggacattccggaggcccaagaaggrggtttcacaaggagcttacggtgcagccccaggagtcagggtgcagcgggatggggagaagctgaatgtttggccacaagcaagggggttgatttttaag

SEQ ID NO: 325147 - DNA, 201 bp, Homo sapiens
gacctactgtgtgacaggcatcgtagggacagaaaagtgatggagaaatcccaagtgtgattacgtcagtggaaagattttgtagtctaaatttatgaccyaactgatgaattaaggtccttagatgaacttctcaaaggcgacgttatttttagttattttgtgttccttttctgtccctctccacccctacgtctttta

SEQ ID NO: 325148 - DNA, 201 bp, Homo sapiens
aactgatgaattaaggtccttagatgaacttctcaaaggcgacgttatttttagttattttgtgttccttttctgtccctctccacccctacgtcttttaygtcattgcggcgatctgaatgttgggatcctcccccaaattcctgtgttgaaatcctgacccctaaggtgatggtgtgaggaaatgggacctttggtggg

SEQ ID NO: 325149 - DNA, 201 bp, Homo sapiens
ggttagccttttgcaggattctcaaagtgtggtccccagggcactgacatcatcatctcctgggaactggtaagaaatataaatcttcaggccccaccctygacctactgaatcggaaacctttgaggtcgggccaagcagtctgtcttttgacaagcacagtagtatttctgatgcagttaaagttcttaaactgggggc

SEQ ID NO: 325150 - DNA, 201 bp, Homo sapiens
ctgtccctctccacccctacgtcttttatgtcattgcggcgatctgaatgttgggatcctcccccaaattcctgtgttgaaatcctgacccctaaggtgayggtgtgaggaaatgggacctttggtgggcgattaggtcatgagggaggggcttttatgaatgggattagcaccctcatcagagaaacttctgagagctcc

SEQ ID NO: 325151 - DNA, 201 bp, Homo sapiens
ggttaacacacactccattggtttagagcccgggaaatcggcatagggactaagctgtagtttcctttgtattttctaagcacatccaaagaaattaattktgcatgatgggaaccaagacttaaatagaagatgttttcaagtggcatgaagcatttcagaagccctcatttacacagtgtaacactaatgtgctattga

SEQ ID NO: 325152 - DNA, 201 bp, Homo sapiens
cgatgatgtgcaaaggaaatgctcactggagcatttcagatttcagactttcggattagggatgctaaactggtaagtataatgcaaatattccaaaatcyaaaaatatccaaaattggaaacacttctggtcccaagcatttcagatgaggtaactcaacctgtatttagaagtcagaaaaccgtgcattttaaaagaaa

SEQ ID NO: 325153 - DNA, 201 bp, Homo sapiens
atgctaaactggtaagtataatgcaaatattccaaaatccaaaaatatccaaaattggaaacacttctggtcccaagcatttcagatgaggtaactcaacytgtatttagaagtcagaaaaccgtgcattttaaaagaaatagtttgtaattcactgttgtcttttccataatttaggcactcacccctaccattaattca

SEQ ID NO: 325154 - DNA, 201 bp, Homo sapiens
agagtacaggaacttcagcttcatgcttctaagaggtgggaagaaaggcagaagggaaaagtattcataaattgtggagaaaatccctgacaggagcatgrctgaaaaccaggtcattttgtgttcttagcacagcacaagacataaaagctaaaacgagtggcatccctccctccccaagtctaatcatattgtctagag

SEQ ID NO: 325155 - DNA, 201 bp, Homo sapiens
aggtgcttgaggagcacataggaagagtattcaacacagatataaggaattgatgaaattggccaagtagaaagtgaataggatgtacaaagaccagaagraaaacaacgtggcttgctctagaaactgaaacgttttccatgtgttgtagcatagaatttgaatatgggcattgcaagaggtgaggctagagcagaaagc

SEQ ID NO: 325156 - DNA, 201 bp, Homo sapiens
acctcgctgtcagtgagaggtgagtgaggtctgggatttctttcttcctttgtgatgagctctgtccagaagtgctggaaatagggcaggtccattttttkgctcctgctgttctccctcaggatatcctgacatgacacaaacatcccctgtggactccacattctaaatatgttctctagcccgtgtaaaaatgtattt

SEQ ID NO: 325157 - DNA, 201 bp, Homo sapiens
tctggcactggataatcacagaggagcatcccatcagaatgattcctgctttacctcacctgaaacgcaagtcagacacaaaaatgaggggacagcaagcyctcaaaaaaaacttagtgtgcggtgagagaaaatttagcaagaagataaaataaacagactaaactccttctctgttttccttgctttttggttttctta

SEQ ID NO: 325158 - DNA, 201 bp, Homo sapiens
ctgtcagtgagaggtgagtgaggtctgggatttctttcttcctttgtgatgagctctgtccagaagtgctggaaatagggcaggtccatttttttgctccygctgttctccctcaggatatcctgacatgacacaaacatcccctgtggactccacattctaaatatgttctctagcccgtgtaaaaatgtatttattcct

SEQ ID NO: 325159 - DNA, 201 bp, Homo sapiens
gtgtgaaaactcagaaaaatagcatcatcctaagcagccttttgtctgtctatacctctgcctaagtgctaggcagttgacagactcgtggaattcagaarattcttacaaatacatacccagagggccgggcacagtggctcacgcctgtaatcccagcactttggtaggctgaggcgggtggatcacgaggtcaggagt

SEQ ID NO: 325160 - DNA, 201 bp, Homo sapiens
gctggatgtatacctataggaatggaatttctgggtcatatggtaatgctgtgtttcattcatataatgaggaagtgccagactgtattctaaaatggccrcaccatcttacagtctcacctgttagtgtgcaagggttccagttgctccatgtcctcaccagcacttgttattgtccatctttttgattctatagccgtc

SEQ ID NO: 325161 - DNA, 201 bp, Homo sapiens
cacctcctgacacagtgtcagtgcacaataaatactcgctgctgacccttcctgaagccaaaaagaagcctctgaaggctcagctgagaaaggtgtgctgygtgagtaccaaaaattactgccttctttccaaacgagagctgctatggctaaccctgagatcctttgtagtcatttaattacagagaaattctggaacat

SEQ ID NO: 325162 - DNA, 201 bp, Homo sapiens
ccgcaccatcttacagtctcacctgttagtgtgcaagggttccagttgctccatgtcctcaccagcacttgttattgtccatctttttgattctatagccrtcctagtgggtgtgaagtcgtatcagggaggatttgatttgcatttccataatctgttgagaatatttttgtatcttatttttatagtgtacttttttaa

SEQ ID NO: 325163 - DNA, 201 bp, Homo sapiens
ctcccaggtgtgaggaagttttgaggtttggttgtcaaaggttgaggaaacacctctctgatttttttcttttttctttttgttttattatatatatatawttatacttgaagttctagggtacgtgtgcacaacgtgcaggtttgttacatatgtatacatgtgccatgttggtgtatttacattaggtacatctcctaa

SEQ ID NO: 325164 - DNA, 201 bp, Homo sapiens
tatttacattaggtacatctcctaatgctatccctcccccacccccaccccacaacaggccctggtgtgtgatgttccccttcctgtgtccaagtgttctyattgttcagttctcacctatgagtgagaacatgtggtgtttggttttctgtccttgcgatagtttgctgagaatgatggtttccagcttcatccatgtcc

SEQ ID NO: 325165 - DNA, 201 bp, Homo sapiens
ttatgtctaatactagtggaaataagcggaatttaattttcagtaaacttaagccttagtttgggatttgggggcatgaatcccttcattttctcctcttdagtaagtaatttctgtccttctaggtaatggatgtgaagaacagaaaccccagagctataaataaactgattgggttggtccggaaagcgactcaaagcc

SEQ ID NO: 325166 - DNA, 201 bp, Homo sapiens
tgaggcagaagaatggcatggaccggggatgcagagcttgcagtgagccgagatagcgccactgcactccggcctgggcgaaagagcaagactccgtctcaaaaaaaaaaaaaaaaccatatccctcccttcccattgtaattcttctgtgttgttgtgtatgtattgcagttcacactagttagggccaaggttggtgca

SEQ ID NO: 325167 - DNA, 201 bp, Homo sapiens
atttttcaacactcttctcagagtgttgcttaactacagtactaaaaattcttgacatttatagtactttccacatctcactactatagtctttagtgttaaaaaaaaaaaaaaaaaacaacttccacttgactgctttaaatatccttttagattaaggcttatcacagctttaatgccataaagaactggaaaagttgc

SEQ ID NO: 325168 - DNA, 201 bp, Homo sapiens
gctctgggggctctgactccacatttcccttctgcactgcccagcagcagaggttctccattgtgaccccgcccctgcagcaaacttttgcctggacatcyaggcatttctatacatcgtctgaaatctaggtggaggttcccaaaccttggttcttgacttctgtgcacccacaggctcaacaccacgtggaagcttcca

SEQ ID NO: 325169 - DNA, 201 bp, Homo sapiens
gtttctatttgtctgtgtcatttgtgatttctttcagcagtgttttgtagttttccttgtagaggtccttcaactcttttgttaggtgtattcctaagtatttttttttttttttggcagctattttaaaaggggttgagttcttgatttggttctccatttggtcactgttgctatatagaagagctactgatttgtgta

SEQ ID NO: 325170 - DNA, 201 bp, Homo sapiens
gctcctcacttctcagacggggcggccgggcagagacgctcctcacctcccagacggggtcacagccgggcagagacgctcctcacatcccagacggggcrgcggggcagaggcgctccccacatctcagacgatgggcggccgggcagagacgctcctcacttcctagacgggatggcagctgggaagaggcactcctca

SEQ ID NO: 325171 - DNA, 201 bp, Homo sapiens
tcctttagggactctccttcttctcttcatagttaatagattccttgagttttgtgtgggaggcttgtaccatctcacctagatagaagaattacccaacmcttccactctcttcaacattttttgttttgaaaaaattaaaacttacagaaaagttgaaagaatagcacaatgaaatccatcctgcacctagattttttt

SEQ ID NO: 325172 - DNA, 201 bp, Homo sapiens
ctagtcacaaaaatttgttatatcctaagatataaaataaataagtaaaataaaagagagcccagttggcctgctgttttcatccctaggcgtgggtccgmtatttacccccactagagcaagtgttctgattccgaacagccattcatggatgccctgacagtgtgcaatgtaaatgtgttttctcttttgggggccacc

SEQ ID NO: 325173 - DNA, 201 bp, Homo sapiens
gaagccaatatgtgcaatgcaggcagtttgcttctcgtcatcaccgctaacctggggaaatagttattgtctggtcttgccctgaacatctccgcctgacrtgtctcctgtagcccttttacacctgagaactttccctcgtgcccaaggcagcctcagctcagctctcagcctgctggggctcttgtcccgcccccacac

SEQ ID NO: 325174 - DNA, 201 bp, Homo sapiens
atgttttcttatttaactattgcaggtgcaccatgtcaatgagagacaaagaaggaaaacaggactacaggtggttactccttatggcaaaataccgctayatatcgggggctggggcgtatttcaagttcatttaaagttcaacataatgatcctgaacaatttttagaaaccactttttgtcattgttgtaacatgatg

SEQ ID NO: 325175 - DNA, 201 bp, Homo sapiens
tgttttctcattaatccaagtactccagattcaggtcccgtctcctctgtctgcccaggttcatgccagaacccaacctgcctcccctggtgctctacgaygccacatctctgcccgcaggtgcagacccacagcaagtgatcaatattgaccagattcgggagacactcccggagctccccagtgtgacccgagagaagc

SEQ ID NO: 325176 - DNA, 201 bp, Homo sapiens
tattggtgttgcctctggcagaactggaagaggctccaataagtgattagatagatgaccaggggataaggaagaaaggtgactgagtgactgactcctakggatgacagacacacagaaagaagaatcatgtcctgagagcagaattccgaattccaaagaacctcccactttgtgctctaattggttatgaatctgcct

SEQ ID NO: 325177 - DNA, 201 bp, Homo sapiens
caaaagctgaggatttatgctgcagcacagggctcggcagccacagaggccactctgtgagcgtcaagagggccaggagcaggagagtctggcctggagayagggccgctccactaccacccagtggctcccaccctcctggactccagccaggagtgcacaatcctcgtcttaaataggattgagcaaaggatgggacaa

SEQ ID NO: 325178 - DNA, 201 bp, Homo sapiens
tcccaccctcctggactccagccaggagtgcacaatcctcgtcttaaataggattgagcaaaggatgggacaaccggcgtctgttgtataagcctaggggrctggggactgggggcctcgactgtcatggccactgcactaatttgtggagttaactaacattatgtattctaactctgggaggaaaggacatttcagcca

SEQ ID NO: 325179 - DNA, 201 bp, Homo sapiens
caatcctcgtcttaaataggattgagcaaaggatgggacaaccggcgtctgttgtataagcctaggggactggggactgggggcctcgactgtcatggccrctgcactaatttgtggagttaactaacattatgtattctaactctgggaggaaaggacatttcagccaccgggctcccatgtgttccaggaggctgctga

SEQ ID NO: 325180 - DNA, 201 bp, Homo sapiens
tgggagtctgtgcagatgaacaaaatcaacactggtcaaagtctagatatctacgaggaggggataaattatgataaatacatctgatggatactagctasatctttttattaagaaagtacttctgtgctaaatgaaagaaagcaggacacaaactgaatatacgttatgatcccaagtatgttacaaaacagaaagaaa

SEQ ID NO: 325181 - DNA, 201 bp, Homo sapiens
cagcactccactgataagcatgttgagagtgaggaagtttcttcccgcttctgtgccccctttctcccaatggtttcctcattgtcaggccacgtacatayctgctgaattgagttggaggcacgtgcattctgtatttttctaagagtagggccaggcttttcctgagcagtcgggcagcggcagaggggtgccctgtag

SEQ ID NO: 325182 - DNA, 201 bp, Homo sapiens
caggacctgccaagcacacctccttggccacagtcacagcgcacgttctgaggcaccaggctgaaggcgcagtgcctgtcccagcagtgataagtatttgwggtttgtttttgaatcagactggggaagactttgagccctgctgagactcagagcatctcccttttatttgctttgctgttcgtgctaattatggaagag

SEQ ID NO: 325183 - DNA, 201 bp, Homo sapiens; identical to SEQ ID NO: 68369

SEQ ID NO: 325184 - DNA, 201 bp, Homo sapiens
cttgctttggccaacagaatgctgcagaatggaccttacgtgagctccgagtctgagcttcaaaagattttctatgcttctgctctcactcttggaacccyattaactgtgacatggaccagcctgggctaatctgctggatggtgagaaacacccccatcacctccatcactccagccaacagccacagatgtgagtaag

SEQ ID NO: 325185 - DNA, 201 bp, Homo sapiens
tatctctgaatgcttctaggatccagaagccagtgcagcatctgtgaactgaggccagtaggccagggacgtggaggaggaatttaaggaggggcgctgtrgagaaacctggcttacctttggttagtgctgcaggggtcatatcagacatgtccacacggaagagcaggtactgctgagcttgaatgaggagccctggga

SEQ ID NO: 325186 - DNA, 201 bp, Homo sapiens
aagtcatcctcctcatcttctagctccttcttcccctccttctccttttctcctttactctcttccttcccttcttcctccttagtgagaagcaagggatmaggtgtggggtaattctgttccatcaagccctcggcgccggaatccagctctttaatgatttggtcatactgggcaatgagctcctcgctctccgggtgg

SEQ ID NO: 325187 - DNA, 201 bp, Homo sapiens
tctcttttgggggccaccagtcctgtcacaccctctgcactcgctgagcttcttgacctgctggacagcagaacaatttcttcatcagcagctaaacaggkatgtccacactcccgacagcttctgactgtgctactgtcccaagaaatgttttctgtgacacccaaatgccatcactgagtgactttcatcatggaagta

SEQ ID NO: 325188 - DNA, 201 bp, Homo sapiens
ctctacagtttgtctagaataaactacacagtgagcttaataggacagggaaggaaagcaaatgaattagagcaaaggaatttttgaaaaacaaaataaaragaaatagatgccctgcaaattagcacccacaaaatcaacaggtgtggatgtgggttcagctaacatacctgatagagagagcggacgcttggctggaag

SEQ ID NO: 325189 - DNA, 201 bp, Homo sapiens
aggatctgggtttaccaaaaagaaggaaagatgtacaccatggtctaaccaggagtttctagagttctgtgcagagattcggggctaaatcatgagctaayaaggaagcatcattgctttccttcacaaaaacagatgcttctcacagcgttccagagaagaagagggattgctgggccaaggcaagatttggtgttcctg

SEQ ID NO: 325190 - DNA, 201 bp, Homo sapiens
gctaaccttgcttctctagcttatgtcaagttgccttcatttcatatatatatatatatatatatatatatatatatatatatacacacacacacacacayatatatgaaatcgatttttgtttgtttgtttgtttttgagacggagtctcgctttgtggcctaggctggagtgcagtggcgccatcttggctcactgcaa

SEQ ID NO: 325191 - DNA, 201 bp, Homo sapiens
ttatgtcaagttgccttcatttcatatatatatatatatatatatatatatatatatatatatacacacacacacacacatatatatgaaatcgatttttktttgtttgtttgtttttgagacggagtctcgctttgtggcctaggctggagtgcagtggcgccatcttggctcactgcaagctccgcctcccaggttcac

SEQ ID NO: 325192 - DNA, 201 bp, Homo sapiens
attcctacctttttaaaaccagtccccaaatgatctcagataggcagcatctcatgagcctagttgctataaatacaggttgagtatccctaacctggaartccaaaatgcttcaaaatctaaaactttttgagcattgacgatgatgtgcaaaggaaatgctcactggagcatttcagatttcagactttcggattaggg

SEQ ID NO: 325193 - DNA, 201 bp, Homo sapiens
aaataaattgcactgggaagagtgcttttcatggtctgcccctgcttctgaaacaaactacttccgtctttgtgtttcctgatgttttctagtcccatatrtgaagcactcctaatgctgccctgggatgcacactgtgtcttttctttattacctcaatgcaatgcacaaagcctggcacataaaatgtacttcttcctg

SEQ ID NO: 325194 - DNA, 201 bp, Homo sapiens
ttagctggtttttttttttttttaagtaatttttaggctgatctttccgttgaaaatatttaattactggagtttgttttccctttcctgttgtggttcaygaattttgcagccacctccttttcttgactaattacactgagcagttgtctgttgctacaacttctgccaaacagctgttattgttgggtggtgaaagaa

SEQ ID NO: 325195 - DNA, 201 bp, Homo sapiens
gcattagtatctaacgagaagtcattccacagtggtctgagtacatatcatagcgcaaatccccttcccctagctcggtgccaacaatgcaagttctcagwcattcaatacaccactatgtcatctgaccaactgtaaagagctctctgtggcccatatacagcaacagaaataggcaaccatcaaacatttaacaaataa

SEQ ID NO: 325196 - DNA, 201 bp, Homo sapiens
cctacacagttcaaagaacgtttagctggactgatatactaggctacccatagagcaaacattaattaatgaacagcctcagctatgagtgctaatgtttscagagcttagaagggcagtagctgcaaaactagctatagtctcacaatgatacccaggcaaggaacactctggagatcaaattggtagagaatgattacg

SEQ ID NO: 325197 - DNA, 201 bp, Homo sapiens
ccccttcccctagctcggtgccaacaatgcaagttctcagtcattcaatacaccactatgtcatctgaccaactgtaaagagctctctgtggcccatatayagcaacagaaataggcaaccatcaaacatttaacaaataaattgcactgggaagagtgcttttcatggtctgcccctgcttctgaaacaaactacttccg

SEQ ID NO: 325198 - DNA, 201 bp, Homo sapiens
gggatacagctctaccagagtcttcaaggctcaacaggatttggtgagggagagggcagtgcctacctggagcccaggtgcaggaacagcaaagaactggmatgattgggaaggagaggagcgtagctggcaggagcagagggtggaaagaggccaagaggtgtggctgtgtgcagagccagagctgagccggaataggga

SEQ ID NO: 325199 - DNA, 201 bp, Homo sapiens
aggaggtcacgtggtggccctaagagtcagtggctatctgataggaattcagcacctcctggcttcctcactccccctgcccacacagcacactccccccracccagcgctctggaagactcggccagtgtgtagatctgctttctgataaaggaatcttcttggtggggagcagggggagaaggaaagccacacatttca

SEQ ID NO: 325200 - DNA, 201 bp, Homo sapiens
taagagtcagtggctatctgataggaattcagcacctcctggcttcctcactccccctgcccacacagcacactccccccgacccagcgctctggaagacycggccagtgtgtagatctgctttctgataaaggaatcttcttggtggggagcagggggagaaggaaagccacacatttcagctgaacatcactgagaatc

SEQ ID NO: 325201 - DNA, 201 bp, Homo sapiens
tccagagcttagaagggcagtagctgcaaaactagctatagtctcacaatgatacccaggcaaggaacactctggagatcaaattggtagagaatgattaygtgaattagcattcatctttaaagacctctcagaagactgatgtttgaagggtccaacctcttgttgaacttggctttttaattgagtatattgcttgaa

SEQ ID NO: 325202 - DNA, 201 bp, Homo sapiens; identical to SEQ ID NO: 68365

SEQ ID NO: 325203 - DNA, 201 bp, Homo sapiens
tggctttttaattgagtatattgcttgaaaggttggtttatttggttgacagcttctgaattatgagtaacagatttggtttagttaagaaagtagacatygtagatttcctgagcaagcattttgtggtaaaattaggcaggtacagctatccagctgtccaagccagttgagtgccccagtgtttcaggtgagctgtgg

SEQ ID NO: 325204 - DNA, 201 bp, Homo sapiens
ggaggaggttggagggttctggtgggaaggcaggaatgtgccagccctagcactctgcatgctacctaacagagggagtattcagtaaaagctcgcttacygtatgaaacaaattaatggacagccttttgtggggcccttttgaagagacactggtgataccaactactaggcttctgcgttctgggtcatctgggtcta

SEQ ID NO: 325205 - DNA, 201 bp, Homo sapiens
ggcaggtacagctatccagctgtccaagccagttgagtgccccagtgtttcaggtgagctgtgggcaacaatttctgagcactggagcagggaaggatttkaaaccaagaagggactggaggtgagaggaagatgtgtcccacagcatgaaatgtaggatagcatccaaggatgggctgcaggcattggaaacctgttgag

SEQ ID NO: 325206 - DNA, 201 bp, Homo sapiens
cagcatgaaatgtaggatagcatccaaggatgggctgcaggcattggaaacctgttgagctcactgtggccagacccacagcaagtcagaagtggtggtgytgggaatgcaaaaggcaggatggccgtatttcatgtttggaaggatcactaggatctggtaataaggtactagatttttcagggagtaggtgatgaataa

SEQ ID NO: 325207 - DNA, 201 bp, Homo sapiens
ccctcagagagtctgtcctcaacaaggagggtgaagtcagactctgcactttgtagataaaatgttacagacatgcccggtgtgtgaaaactcagaaaaayagcatcatcctaagcagccttttgtctgtctatacctctgcctaagtgctaggcagttgacagactcgtggaattcagaagattcttacaaatacatacc

SEQ ID NO: 325208 - DNA, 201 bp, Homo sapiens
cctggagttacaatggcggcgcccatgctgcgctggggctgccgtggaagacgttgggctttcgcccgggttgacggtggttcttgccaccgaagaggggmtccgactgggtccacatccaaccagattaggggagagagctcagtggctcagcagcccctccacacggcccagaagacgaggaaagggtattctgtttca

SEQ ID NO: 325209 - DNA, 201 bp, Homo sapiens
ccacagatgtgagtaaggccatcctagacatccagccacccactgatggcagacacacaagcgagtccaggtaaaatcagcctggcccagatcagcaaaayacccagatgaccacacagattcataagcaatcataaatggccttgtgttaagccaatgagtttttgcagtggtttattatactggtaattggtgtacctt

SEQ ID NO: 325210 - DNA, 201 bp, Homo sapiens
aactgccaaatgaatgtcttcttaatagctgtgcactttgactcctaatactcgtcctcaaatcccagccacttcataaaacctttcccacctgtacttcygtccaaaggacaaacctttgctacctttcagttcacagcaaatactcatcaaatttttactgaatttaactgaaatatactcacagatcagagagaatac

SEQ ID NO: 325211 - DNA, 201 bp, Homo sapiens
gctaagaaatactaagataaccatctgcttccagctctgttagactacaaggggcattttgttgattagcctgctaaatgcttttaaagcattgactttgwttccacaggacaaaagtagttaatcaaagactacattagttaatgcaattttaactggaaagatgtatacaaatagatttcgacatacattgccaggata

SEQ ID NO: 325212 - DNA, 201 bp, Homo sapiens
gaggggctccgactgggtccacatccaaccagattaggggagagagctcagtggctcagcagcccctccacacggcccagaagacgaggaaagggtattcygtttcatacatttctgcccacctaactgtgaggtggaactgcaggactggggaaataatggcaattacggcccagcttctagacgttttggctgacggga

SEQ ID NO: 325213 - DNA, 201 bp, Homo sapiens
tagcatttaacagcttcttagatttgatagcaaataagcattaaaaaagtaacctgaaattaggtctcaggaattgaaagtgatttgggggaccaaaaatrtgccgcatcagatggtttagtgtggtggagttttgcaaaatttttttaagagtatcatttagtggtgatttattgtatctgtgtctctctggttattata

SEQ ID NO: 325214 - DNA, 201 bp, Homo sapiens
tcttatttaatcctattttcattagaaaaatgtttattttatattgaacatggaaaattattttcttgttttaataataacacaactctttggaaatactyatttagggagttttgggtgaagcgggatatattaaatgttttctgaagacccatctctgtgatgctgtttctaagtctgaatatattcatacatgtattc

SEQ ID NO: 325215 - DNA, 201 bp, Homo sapiens
cgtgctgaagagtttatggatgggatacagctctaccagagtcttcaaggctcaacaggatttggtgagggagagggcagtgcctacctggagcccaggtrcaggaacagcaaagaactggaatgattgggaaggagaggagcgtagctggcaggagcagagggtggaaagaggccaagaggtgtggctgtgtgcagagcc

SEQ ID NO: 325216 - DNA, 201 bp, Homo sapiens
aatacttatttagggagttttgggtgaagcgggatatattaaatgttttctgaagacccatctctgtgatgctgtttctaagtctgaatatattcatacaygtattcatcacttcacaaacattttagcatgtctactaataccagacattgggctttgagctgggtcataaagatgatccttgcctttaaggagttcaaa

SEQ ID NO: 325217 - DNA, 201 bp, Homo sapiens
ggtctttcatccctgtcctcccgggtttggcctctccattcagaaattctggtgttggtgctgaaaatgtgtggctgttctgtggaggcaggagccgtgcygaagagtttatggatgggatacagctctaccagagtcttcaaggctcaacaggatttggtgagggagagggcagtgcctacctggagcccaggtgcagga

SEQ ID NO: 325218 - DNA, 201 bp, Homo sapiens
atataatctagcctttagaggaatgagcaataggtacataaaaaatgaagcacatgaaaacaatgaagggcttagcaagtctaggaaaaacaaaatgttcmagaaaggaaatgtaatcatagtgttttattagcttaggagagaaacatgtaaataataatagaagcaccagctactgatttaataaaaactgtgatataa

SEQ ID NO: 325219 - DNA, 201 bp, Homo sapiens
gtggctgggggtagctggctagctgagtaatgatcccgataagcagcaaattaacatgtaaagagttctccagcatgttctccagctttgacaggactacrctgatgaatgggcctgcaggaagaacacaaggcttcagggctggctgggctcacagggatgcctttccctgacaattgcagaaccatcggtgccacatct

SEQ ID NO: 325220 - DNA, 201 bp, Homo sapiens
ctcttggtctttcatccctgtcctcccgggtttggcctctccattcagaaattctggtgttggtgctgaaaatgtgtggctgttctgtggaggcaggagcygtgctgaagagtttatggatgggatacagctctaccagagtcttcaaggctcaacaggatttggtgagggagagggcagtgcctacctggagcccaggtg

SEQ ID NO: 325221 - DNA, 201 bp, Homo sapiens
ggatcactaggatctggtaataaggtactagatttttcagggagtaggtgatgaataaagcaaagacaacatgataatttgcactctgatacctagaagcrtggtgttgtcatcatttgagacagaagatgggtggtgggaaatgcagaggagctggtctgtgaggaagacaagtttggcttaggataaggattgggaaac

SEQ ID NO: 325222 - DNA, 201 bp, Homo sapiens
cagagaaacgatagatgagtgactgatagagtgagaactgggttcaagggaataggttttggggttcttgtttgttcatttaataagaaatactattgcayatgtatacgtcagatggaatgctgagaaagagtaatgactggtatgggagagaagggataactgagagtgatgcccttgagaaggcaagtgggagttaaa

SEQ ID NO: 325223 - DNA, 201 bp, Homo sapiens
ccgccaccacacccagctaatttttgtattttctttttagtagagacagggtttcaccatgttgggcaggctggtctcgaactcctgatctcaagtgatcmgcccgccttggcctcccaaagtgctgggattacaggcgtgagccaccgcgcctcttggtctttcatccctgtcctcccgggtttggcctctccattcaga

SEQ ID NO: 325224 - DNA, 201 bp, Homo sapiens
gcctcagagagcttttgagggaaaaagtcacagtgcccggcacgttgtgggcctcggtgtgagccaccttctctttgccagggtggtgtgctgaataccaragcacctgccaccctcctgaactcttgtggcatctgctgcctctttgtcttttttttgttttgttttgttttttagacagagtctcgccctgtcacccag

SEQ ID NO: 325225 - DNA, 201 bp, Homo sapiens
ggaggacgcagccaaaagaagagatactccccctggttatatggagagttttgcttatttggccagatatcccctgaacagctgtttatgcttcattatgyaagaattaaatagtttctctttaaatacagaaacatatggcaagtttctaatattttgtttattctttgagactagttggcattatttttactttcagtt

SEQ ID NO: 325226 - DNA, 201 bp, Homo sapiens
atcactgctaggccaagtcatcaaaatcttattgttgaattagaatctagactcagactccaaggagacatgaataatgtgtgtgctggtctttccctaaytagtattaatgaatccctgggaattctctctctctctctctctctctctctctctctctctgcatttatctccgtggttgtttcatctgattgttgcttg

SEQ ID NO: 325227 - DNA, 201 bp, Homo sapiens
tctgttagactacaaggggcattttgttgattagcctgctaaatgcttttaaagcattgactttgtttccacaggacaaaagtagttaatcaaagactacrttagttaatgcaattttaactggaaagatgtatacaaatagatttcgacatacattgccaggatagtggaaactgtctctttttcactttacttgcaatt

SEQ ID NO: 325228 - DNA, 201 bp, Homo sapiens
gtgaggaagttttgaggtttggttgtcaaaggttgaggaaacacctctctgatttttttcttttttctttttgttttattatatatatataattatacttkaagttctagggtacgtgtgcacaacgtgcaggtttgttacatatgtatacatgtgccatgttggtgtatttacattaggtacatctcctaatgctatccc

SEQ ID NO: 325229 - DNA, 201 bp, Homo sapiens
gcctctcatgttttcagccagcactgtgtccatcccagcaggaagttcggcccagccctgatgcaggcaggtgcccctgatggttactagatcggatgcarttgtcctgattgctgacttcttgcttacctcatgcttctggtggctcgctcataattgcacagggagtagaagccagtgtttgcaggctcagcctggccg

SEQ ID NO: 325230 - DNA, 201 bp, Homo sapiens
ggtttggttgtcaaaggttgaggaaacacctctctgatttttttcttttttctttttgttttattatatatatataattatacttgaagttctagggtacrtgtgcacaacgtgcaggtttgttacatatgtatacatgtgccatgttggtgtatttacattaggtacatctcctaatgctatccctcccccacccccacc

SEQ ID NO: 325231 - DNA, 201 bp, Homo sapiens
atttaaaaataggaagataaataccaaacgagacagctcaaagatctgaaggtggttgctgccaggaacaggacgggacctaggaaggggtggggcggggractgctgcttttcatgatcagttatttaaaaatacatgtctgtgatattttgtttaaaaaacttaagttaggggctgggcgtggtggctcacgcctataa

SEQ ID NO: 325232 - DNA, 201 bp, Homo sapiens
aacaataataatggtagtaaaatcaactaccatgtaccaagtgcttaccatgtggcaggcactgttctaggtgctttatatgtattcacttattctaaccycataacaaccctacctgccgcagttgctgtccttatcacagttagaaagtgagtagaaaatgtgttgtcctgtctcttgtggttacccctggtgtcacat

SEQ ID NO: 325233 - DNA, 201 bp, Homo sapiens
ttccattgtccttaggcatctgtaattgctgatgagaagtctgcatcccttgtcagtaatctgttgtgtcactctgatagctttagccaggatgtgtccakatgtgaatttgtttttatttattctgctcagtgtgatttttaacttaagtactgtaccctggactatggaggtatctctatggaatgaattcctggtggc

SEQ ID NO: 325234 - DNA, 201 bp, Homo sapiens
ggcagccaggagactgttggtgactctgacaagggcatttttagagagatggggagagaagctaggctgacgtgggttaaggaataaatgggaagtgaaayagcggagacagtgtatgcaacaaacaaacaaaacttgtttaagaggctttgctgaaaaggaaaccagagaaacgatagatgagtgactgatagagtgaga

SEQ ID NO: 325235 - DNA, 201 bp, Homo sapiens
tgtttactaattgttccacagagtccttttttgattcaaacttcttggttacaatttaagaaacaataaaaacaacatcactgaccagttactgagcacckagtatgcaactaaggactattcgaagcatattgtttcagttatttgagtcccaacaatcttatgagaactaactccagatggtccaagcagaaaagatac

SEQ ID NO: 325236 - DNA, 201 bp, Homo sapiens
aggtgcacttttgacaaaatggcacgtatctctaggaatttgtttctgatattcataggcctcgttcatacctgatcctgtattcatatcaatagtgaatrcttagctgcatttcttacttagagtttggttggttcaagacagttgttttgtttcttagcaatagtcaaatctttcaacttaatactaatcttatatata

SEQ ID NO: 325237 - DNA, 201 bp, Homo sapiens
ctgatacttattggactaactttgggtgttacagcatcatgggctcaccaattgagggcaaagtaggaaggggagagaaatggtgtgaattgaggactatytagaaagacattcaatgttattcctttgaagtacataacaagatatttctcagtatagatcctagagactggcttttgtgaatagatttatttgtaatta

SEQ ID NO: 325238 - DNA, 201 bp, Homo sapiens
gattggacagactagagagtggcattgtttttttgaatagctgtttatttatcaaaagaaaaaaggacagaaatgaacatagaactgtatgtatttgctgwggtagtcatggcctgtgtgttctcagctctgtgctacaccactttgctgctccactctgaatggcagggaggctgctcctgcaggctacagatcctagag

SEQ ID NO: 325239 - DNA, 201 bp, Homo sapiens
ccctcagtttcctcactgtaaaatgaaaatggcaggacgtgcctcagagagcttttgagggaaaaagtcacagtgcccggcacgttgtgggcctcggtgtkagccaccttctctttgccagggtggtgtgctgaataccagagcacctgccaccctcctgaactcttgtggcatctgctgcctctttgtcttttttttgtt

SEQ ID NO: 325240 - DNA, 201 bp, Homo sapiens
ggccagcatgtggcaggtaacaccttagaggagactggggcatcactgcctctctgaaatcgtccattgatatcatcccctccctcctcctttgagctcarcacacattaatcaaataccacaatttttcaggttctgtattaggctccagggatacaagggtgaacagacaattcccgtcctcatgaaatgtgcaattgt

SEQ ID NO: 325241 - DNA, 201 bp, Homo sapiens
agcttgactaagatcctaggaaattcctttttttcttggcattcttctaactgacactctctgtttactgggccctctgtgcatctgtaacgtgtgatgaytgatgcttataattctgaccttgaagtacttcatggcttctaaatcatcaaaaaaagattaaagcatattctcagtatcactgtaatgtttgtgtgtttt

SEQ ID NO: 325242 - DNA, 201 bp, Homo sapiens
gtcattaaaagaagtgaaacatttaaaaatcaaaacgtggagcctaggtgcctacacgtgtaatgctagtgactcaggaggctgtgggaggatcactgtaygcagagtttgagatcaggctgggcaacatagcgagacctacttgccaaaaaattaacacctaggtgtggtgccatacacctgtatccccagctattcagg

SEQ ID NO: 325243 - DNA, 201 bp, Homo sapiens
tccagggacacagcacaacgtaagtggaacatggactcagcagcatctgtacttgaagctgttggacagatgagaactttcagggagggtgcagcgtgccrgggtggctggggaacgaacctgaagctctttagcctttaactgggaagcgtgcacagagaaggaaatgcaggcgcgatggcacagaagtagaaggaaaac

SEQ ID NO: 325244 - DNA, 201 bp, Homo sapiens
aacacagcttagtcgaggctcataatcttttgcatcagaagaaagtactcctcattataaagggagattccacctgctgtaatttaaattgtaccttaccstgccctcatcttaataagtggtgatggagaaatgctgtccccccaaaactcaactttcctattccagaattcttattaaacctctcagactccccttttc

SEQ ID NO: 325245 - DNA, 201 bp, Homo sapiens
gttactagatcggatgcagttgtcctgattgctgacttcttgcttacctcatgcttctggtggctcgctcataattgcacagggagtagaagccagtgttygcaggctcagcctggccgtggtatttggtgctaattgcctgttagtacaaaagctaaggctctggctgatgcaacagtaaatgcatactgtagttctgtc

SEQ ID NO: 325246 - DNA, 201 bp, Homo sapiens
ctatccacctagtcacagacccagcagctggatattttaagcagtcattaaaagaagtgaaacatttaaaaatcaaaacgtggagcctaggtgcctacacrtgtaatgctagtgactcaggaggctgtgggaggatcactgtacgcagagtttgagatcaggctgggcaacatagcgagacctacttgccaaaaaattaac

SEQ ID NO: 325247 - DNA, 201 bp, Homo sapiens
gagaataaatgctagtctgtcttctaggcaggttgggcttaaaatctggccaatgaaatctacaacaatgctgtaaagaaagagctgtacttagcctaacycaaaacatctcttatcctcagggcaggtcatatacttgtcgttagctagaagcaacatactctgttcccattccaagtctttgcacacgtggttccatta

SEQ ID NO: 325248 - DNA, 201 bp, Homo sapiens
taagcagtcattaaaagaagtgaaacatttaaaaatcaaaacgtggagcctaggtgcctacacgtgtaatgctagtgactcaggaggctgtgggaggatcmctgtacgcagagtttgagatcaggctgggcaacatagcgagacctacttgccaaaaaattaacacctaggtgtggtgccatacacctgtatccccagcta

SEQ ID NO: 325249 - DNA, 201 bp, Homo sapiens
aaattggagagctgcagtgaggctgactctgcccctctttggtaggagtgggccttctggaggtggtcctggagcccgacatgtcctgtggagaagaggcrgcaacagctgtcagggagctgcagctgatccttcaagccctggggaccagccaggcgaacatggcaggtagaagccacagaagcagtattcttctttccc

SEQ ID NO: 325250 - DNA, 201 bp, Homo sapiens
tttatgctccaagtgttgattgctttaagaaagtttttattatcccattcttcttcaaaataactgtgattcctaccaaccctatgggatcataaataggycacctgttaactgagaaatagtcccatctgggtccttgccaagagataaacgatagtggcaagaactcatcagtcagtgacagctgagagtgttcattaa

SEQ ID NO: 325251 - DNA, 201 bp, Homo sapiens
cagaacgagatagcttaacaaaccttacccactgcatctttgggcccctgctgtttgcagaaacagttttccatcttgatgttatatttctgttgtgtgartgtgttttagagaaaaatatgaaactgcactttatcactgtgctcagtggtatagttttttttagttttgctgttataaatctctacttctagaagatag

SEQ ID NO: 325252 - DNA, 201 bp, Homo sapiens
agaggtggttcctccctgttgcataaaaatgaaaatatctctgaatgcttctaggatccagaagccagtgcagcatctgtgaactgaggccagtaggccarggacgtggaggaggaatttaaggaggggcgctgtggagaaacctggcttacctttggttagtgctgcaggggtcatatcagacatgtccacacggaagag

SEQ ID NO: 325253 - DNA, 201 bp, Homo sapiens
ggaggaccagtctgagggagaaatctccctgtggtctgactcagagtggaagagccaaagctttactatgggttcaattctccaagcctgtgatttttcaycacctttttctccctatgtcaggccatttagccatcatctcgtgtcaaccaaagagatcactggagttggggagagatggggagcaaaaactgacacgtt

SEQ ID NO: 325254 - DNA, 201 bp, Homo sapiens
acccagactgtgcccaagggcttcgttttaggccctttccttctctgcttccagcttacctgccttgtggcaagaatttttacttccttaatctatcagayctttcccagctgaagctagaggcggaacagagtgaagacctggttgtagagatgccttatttttgtttagataacttgggccttaattttctcactcaga

SEQ ID NO: 325255 - DNA, 201 bp, Homo sapiens
catatgcacaatgacatgcatccaccatcgtgtcacactgagaagttccactgcatgccctgtgctccacctcttcatccctccctccctcttctccagcygtcacattttgtttaggcaaaatctattcatttcttctatttctcaagggtaaatttttttcctttcattttttatttatgtaaatgctgctaaaaatag

SEQ ID NO: 325256 - DNA, 201 bp, Homo sapiens
ctgcctgcaggacagacatcacccccacggggctaaccagtaggcaagatctatgagtctgcagctgataagatcttggggaggtttgcagttgagagttmtctcgttggttcattattcagctcatgttcacttagcctctgctgtgtgctaaggtctgtgcccagcatgagaagcgcagttcctgggacagacaccagc

SEQ ID NO: 325257 - DNA, 201 bp, Homo sapiens
gaggctggggaaccaaccagggctcccctcgggaggggacgtttgagccatgccctgaagcattaggggagagtcgctctgcagtgggagggacagatcaygcagacaaagcagagtgcgaagctcagagagcagcagcacagcaggctcaggaacgccagaagctgcaggggccggaggcaggcaggtgggaatggtggg

SEQ ID NO: 325258 - DNA, 201 bp, Homo sapiens
cagcgaggatgtcagtgtgtgggagaagcatttgttcagcctgcggttctgagaggaactgtgtgttgtgttcccataggttctcaacaggaggtgtgtaraagcggcggtgatgacaggcctggctctgaactgccacataaacaagaagtccttgtttgacaggaagcactacttctatgcagacctccctgtaagtac

SEQ ID NO: 325259 - DNA, 201 bp, Homo sapiens
gatttactgaggcaaaattatcctaaaaaccattctcagtcttctgagagctctttctaaagcattaggtttacgaggttcattcaaaaagaagggggggraagagtcaactgcattctcttacagtgtttcctcagtgatgtgatttaagggtggaacataaagtggtttgacagtgttctgttttaagctgttacttga

SEQ ID NO: 325260 - DNA, 201 bp, Homo sapiens
tgaaatggggggaaagtcatctttccttctaataagcaaattgctctcatttggtcctgttttttccagcctgtgtctttatgaagacatagtcctgcatrcatatggatgtttctgtcaacagtggattacgtatgctacaggagtcccataagattgtcatatggcatttttaccgtccctttcttgttcagacatgct

SEQ ID NO: 325261 - DNA, 201 bp, Homo sapiens
tgactatgactgagtcagtcagcattccgtacagagcacctcttaacccaaagcctcttacaattcatgtatttttcctaggttgacgtaacaaaactacrttttagtcttatacatcttccccaccatcttgaccacttgagtttccaacctacttgaaataaacactgaattctagccctaccttttattactatttgt

SEQ ID NO: 325262 - DNA, 201 bp, Homo sapiens
gtaacaaaactacgttttagtcttatacatcttccccaccatcttgaccacttgagtttccaacctacttgaaataaacactgaattctagccctaccttktattactatttgtgaaattacataggagatgggaggaagggaccaaggctactcagcctcgaagatttaagttacctccctccactcagcaggagcccaa

SEQ ID NO: 325263 - DNA, 201 bp, Homo sapiens
tagtggttaacttgattggaaaaaaaaaaagaagggtgaattttttggccatttttgaaaggactttttttgataccttaaaaacgtccttatttttatgrcttgcagataatgtattgggtgattagtatttttcctttaaagggctagtacttgaaatttccaagatgagtgagattagaatgagataggaatggaaag

SEQ ID NO: 325264 - DNA, 201 bp, Homo sapiens
aaggcctacgctcttcattcctaagctctgctgcccgcttgcatatataatgtgctataatgtcaaacagaaatagtgtttttagttaattgatgtttggrgtcacttgtgtttcattagtggagaaaacagagtttgtacttttgttaacattcatgccactagcgttttgtacagcacaatcacagaacatagattcat

SEQ ID NO: 325265 - DNA, 201 bp, Homo sapiens
aagtgccatccactaaatttagtgaaaatcagtcaacgccaatgaaaagcagaaatcatgtctattttccaagtgaaaaaataaagttagaagaaaagtamtataagccgtcctctgcagctttatttattttgtttcttaaaccttctgctggaagcacttgagtcctgtctgaatcgttgggaagttccaggcacggtg

SEQ ID NO: 325266 - DNA, 201 bp, Homo sapiens
gctcatctgggggtcccttgtagctgtcagaacgctccctgtcacataaccagctgttcctcaacttgcattcttctgggctgcttttccttctctgagtytgccactgggcagctggctctatcaggtttccttctcgtaaataaatatagtccacctcgttcctggcctatcgtcagcttcacagggtgtgtgacttag

SEQ ID NO: 325267 - DNA, 201 bp, Homo sapiens
tttcaagaaggaaagaatgggcagtaggtgtcactttggggcatcagaaagagagttctctgggggcacataggcaggtggcagggcccttgcaaggtccyggggcagggggagcccaggctgggtgggtgtgtcattgtctcagcagcatcccggggagtgaagacagacagatattgacaaataactcccaacagttgt

SEQ ID NO: 325268 - DNA, 201 bp, Homo sapiens
ggcatcagaaagagagttctctgggggcacataggcaggtggcagggcccttgcaaggtcccggggcagggggagcccaggctgggtgggtgtgtcattgyctcagcagcatcccggggagtgaagacagacagatattgacaaataactcccaacagttgtttgcccaaataagttaactctagatggtgtcaactccat

SEQ ID NO: 325269 - DNA, 201 bp, Homo sapiens
ggtggcagggcccttgcaaggtcccggggcagggggagcccaggctgggtgggtgtgtcattgtctcagcagcatcccggggagtgaagacagacagataytgacaaataactcccaacagttgtttgcccaaataagttaactctagatggtgtcaactccatgttcagccactggatatggatgcacacatccatgtgt

SEQ ID NO: 325270 - DNA, 201 bp, Homo sapiens
ttacagtgtttcctcagtgatgtgatttaagggtggaacataaagtggtttgacagtgttctgttttaagctgttacttgatggaaaattagtgttgtgtkatttatagactgatggctgaagcaacaaggggcctagaatatcttcctaatgacttaaagctgatgtggcatcagctacaagagactgctgtttccagga

SEQ ID NO: 325271 - DNA, 201 bp, Homo sapiens
aggggcctagaatatcttcctaatgacttaaagctgatgtggcatcagctacaagagactgctgtttccaggaagagctcacactgcaaagcaggctgccrtttgcagcaaaccacacatgacaccagcctgagccagtgacttgaagtagcacgtgcaataatagctgacctgcaataaagtgtttcataaaaatggcaa

SEQ ID NO: 325272 - DNA, 201 bp, Homo sapiens
tctaagaggtgggaagaaaggcagaagggaaaagtattcataaattgtggagaaaatccctgacaggagcatgactgaaaaccaggtcattttgtgttctyagcacagcacaagacataaaagctaaaacgagtggcatccctccctccccaagtctaatcatattgtctagagatattttttcagtggggaaaaaaattg

SEQ ID NO: 325273 - DNA, 201 bp, Homo sapiens
aggtcccggggcagggggagcccaggctgggtgggtgtgtcattgtctcagcagcatcccggggagtgaagacagacagatattgacaaataactcccaasagttgtttgcccaaataagttaactctagatggtgtcaactccatgttcagccactggatatggatgcacacatccatgtgttagtgtggcccgggtgtt

SEQ ID NO: 325274 - DNA, 201 bp, Homo sapiens
cccaggctgggtgggtgtgtcattgtctcagcagcatcccggggagtgaagacagacagatattgacaaataactcccaacagttgtttgcccaaataagktaactctagatggtgtcaactccatgttcagccactggatatggatgcacacatccatgtgttagtgtggcccgggtgttagttcccttcccgactcggc

SEQ ID NO: 325275 - DNA, 201 bp, Homo sapiens
gcaggagcagagggtggaaagaggccaagaggtgtggctgtgtgcagagccagagctgagccggaatagggagcctctggaacgtcagggggattcagccrtgaacccatcaggtgcagagccccactctgcagtgtgtgggggatgaccaggacccggttctaccccacaggtgctgtcagcctcctggggaggactaga

SEQ ID NO: 325276 - DNA, 201 bp, Homo sapiens
aagaggtgtggctgtgtgcagagccagagctgagccggaatagggagcctctggaacgtcagggggattcagccatgaacccatcaggtgcagagccccaytctgcagtgtgtgggggatgaccaggacccggttctaccccacaggtgctgtcagcctcctggggaggactagaacttgtgcatcagaattttaattcaa

SEQ ID NO: 325277 - DNA, 201 bp, Homo sapiens
gccacctggcatgaactggcaaggagcagcagagggacaggcaaggaagaggaggacattccggaggcccaagaaggaggtttcacaaggagcttacggtrcagccccaggagtcagggtgcagcgggatggggagaagctgaatgtttggccacaagcaagggggttgatttttaagagaagagcttctatagaggggta

SEQ ID NO: 325278 - DNA, 201 bp, Homo sapiens
ggacattccggaggcccaagaaggaggtttcacaaggagcttacggtgcagccccaggagtcagggtgcagcgggatggggagaagctgaatgtttggccmcaagcaagggggttgatttttaagagaagagcttctatagaggggtaggcacagaatccagatggcatgtgcttacacagggtaggtagtagccactggt

SEQ ID NO: 325279 - DNA, 201 bp, Homo sapiens
tatagaggggtaggcacagaatccagatggcatgtgcttacacagggtaggtagtagccactggtgctagatcgttattgttaaagcaagaaactgggcasacgcaagtgactgcaaggtcagccaaaggcattgtcaagacagggaagatcggagcatttgtgaagctgtgagattcaagccacaggacacgggaaacca

SEQ ID NO: 325280 - DNA, 201 bp, Homo sapiens
caatgtgttctattcaaagtagattgaggccaggcacagtgcctcatgcctataatcccagcactttgggaagccaaggtgggtggattgcttgaggccasgagttcaagaccacctgggcaacatagcaagaccccatctctataaaaaattaaaaatttagccaggcatggtggtgagcacctgtagtcccagctactc

SEQ ID NO: 325281 - DNA, 201 bp, Homo sapiens
ctactaaaaatacaagaaattagccgggtgcgatggcgggcgcctgtagtcccagctactcaggaggctgaggcagaagaatggcatggaccggggatgcrgagcttgcagtgagccgagatagcgccactgcactccggcctgggcgaaagagcaagactccgtctcaaaaaaaaaaaaaaaaccatatccctcccttcc

SEQ ID NO: 325282 - DNA, 201 bp, Homo sapiens
gaggcccaagtcccaatgtcttccttcttcttgcatcctgttttaacagaagcagagaaggtggactttgggcctgagataagctgggggattgggacagrcagcatggttcacggggggtcgggggtggttgtagaagcatcagcgttgtctgctctcatccaagcaggagatggagctgtgatcctgaatgagctctga

SEQ ID NO: 325283 - DNA, 201 bp, Homo sapiens
ccttcttcttgcatcctgttttaacagaagcagagaaggtggactttgggcctgagataagctgggggattgggacagacagcatggttcacggggggtcrggggtggttgtagaagcatcagcgttgtctgctctcatccaagcaggagatggagctgtgatcctgaatgagctctgagggactggacaaattttggagc

SEQ ID NO: 325284 - DNA, 201 bp, Homo sapiens
caaattttggagctttgaaagagcccctttcccctcctctgtcgaaccgcggcctcagagaatgggagggaagagagcagcacacagagctgaaggccgcrgtgtcagtttcttcttcagcggagacgcattcactatccagaaaccagtattacctgacaacagcaaattagtagcctgtgctgctgctgccattgcgtg

SEQ ID NO: 325285 - DNA, 201 bp, Homo sapiens
tgtggacattctcgtgctggtgcaataggataaaacggaggaagatctcaagtagtgctggctcggagatgctacgcaggaaaaggtccagatatgcagtygtggtcatgacctcttccacagtcacctaggacaaacaacggagtgagcacaggtgagcatccttttgatgctgtgatacacgcctctcccgtggccccc

SEQ ID NO: 325286 - DNA, 201 bp, Homo sapiens
gagaagtttcaggttgccagctctaccatgagaccgttggaagaggaggaaggtggctccagaataaagaattctaggaaaaaatgagagtagggaattarcaggtatctgatttgtgtggaaaaaagatttccatataatctagcctttagaggaatgagcaataggtacataaaaaatgaagcacatgaaaacaatgaa

SEQ ID NO: 325287 - DNA, 201 bp, Homo sapiens
taggaaggggtggggcggggaactgctgcttttcatgatcagttatttaaaaatacatgtctgtgatattttgtttaaaaaacttaagttaggggctgggygtggtggctcacgcctataatcccagcactttgggagaccgaggtgggcggatcacgaggtcaggagattgagaccatcctggctaacacggtgaaaccc

SEQ ID NO: 325288 - DNA, 201 bp, Homo sapiens
gctgcccacccagagaaccagagataatgcctgttgaagggccaagttgcatattcagcgaggatgtcagtgtgtgggagaagcatttgttcagcctgcgsttctgagaggaactgtgtgttgtgttcccataggttctcaacaggaggtgtgtagaagcggcggtgatgacaggcctggctctgaactgccacataaaca

SEQ ID NO: 325289 - DNA, 201 bp, Homo sapiens
taatgtgtgtgctggtctttccctaattagtattaatgaatccctgggaattctctctctctctctctctctctctctctctctctctgcatttatctccrtggttgtttcatctgattgttgcttgattttaattcaatctggcacttcttcatggagcactaaatttcttctcaacggctatacattaaactgtggtga

SEQ ID NO: 325290 - DNA, 201 bp, Homo sapiens
agttattttaaaaagagtggtctgtgctagtacaaaggtaagattccattcctagaatagttatgccaaatctgctcaggattatattatttactattctsatgcttgaaaatgagcaggggcaagggggtatgaaaaaaggatcatgaaatccatctcttgtcaccttctgttcagcactagtgcaagatttggtacctg

SEQ ID NO: 325291 - DNA, 201 bp, Homo sapiens
tttgaatttgtttgctctcacttaacaaagaacaccaccaaattctcttggttggtccctaatatccattgggtttggctaacaatttacatccaaaaatkcacatggtagaaaaatactagactgttctgttatcacttggccaggaatgtactggagtgggggacaggaaagctagttattttaaaaagagtggtctgt

SEQ ID NO: 325292 - DNA, 201 bp, Homo sapiens
agaatgaccttgacctcagtgaatgctatattggtgatctcctgcccactctgacctcactctgcctttctctcctggattggggaatgctgtgacctccrtatttcctctttctctttttcctataggacatgctgctcagttcctccaggacatgagaagatatatgccaccagctcacaggaacttcctgtgctcatt

SEQ ID NO: 325293 - DNA, 201 bp, Homo sapiens
atttcttatgctatgtgacagattttcatctaatttacatttaactttccaaaaattttctaaaagcattataactgcatcatgcaaagtttagataacaygacaaaatgataaagaaaatatgccctggcttgacatgtccactgttatcattattatatttttagtcttttacttcatttttcatcctgtattttatct

SEQ ID NO: 325294 - DNA, 201 bp, Homo sapiens
ccccacaggcagaggttgcagtgagccaagatcgtgctactgtactccagcctgggcaaaagagcaaaactccatctcaaaataaaaataaaaaataaaargccaggtgcagtcgctcacgcctgtaatcctagcactttgggaggccgaggcgggcggatcacaagatcaggagatcgagaccatcctggctaacacggt

SEQ ID NO: 325295 - DNA, 201 bp, Homo sapiens
gatcttggacaatgggcctaaaaaaggagtcttaatattcccaactacataatggagatagtaaggcctgccacacctctctcataaaattatgttgaaamtaaaatagcataaataaaaatgtcaaaaaatatcccataatttttgctaaacttcttgccttccttatccaatttcctcaggaacatggacgttttgttc

SEQ ID NO: 325296 - DNA, 201 bp, Homo sapiens
aaaaaaaaaaacaacaacaacaacaacaaaaaacctaactactgtattttaatcaggtcttgccaagaaatattgctgttccttactgccaactctccaaraaactggaactgcctcctattttggtttatgcagactgtgtcttggcaaactggaagaaaaaggatcctaataagtatgtaaacagtgataacaacagga

SEQ ID NO: 325297 - DNA, 201 bp, Homo sapiens
gtggtgaaaccccgtctctactaaaaaaatacaaaaattcgcagggcatagtggcatacacctgtaatcctcgctactcaggaggctgaggcaggagaatygcttgaacctgggagtcggaggttgcagtgagctgagatcacgccaccgcactccagcctgggtgacagagcgagactccatctcaggaaataataataa

SEQ ID NO: 325298 - DNA, 201 bp, Homo sapiens
tgcttttgtggttttattggttttcatattacaaacaaagaaactagaaaatgaaaccattccaaaagtggaagtaatttctcactgcccctgtgataaaytgtggtcactggctgtggcagcaactattataagatgctctgaaaactcttcagacactgaggggcaccagaggagcagactacaagaatggcacacgct

SEQ ID NO: 325299 - DNA, 201 bp, Homo sapiens
agggcacagtggctcacacctgtaatcccagcactttgggaggctgaagtgggcggatcacttgaagtcaggagttcgagaccagcctggccaacatggcraaaccccgtctctactaaaaatataaaaattagccgggcatggtggtgggcacctgtagtcccagctactcaggaggctgaggcaggagaatggcgtgaa

SEQ ID NO: 325300 - DNA, 201 bp, Homo sapiens
gatcctaataagtatgtaaacagtgataacaacaggaatttttggagtgtgtgccgattaaataaaacaggggttgttcattggcttaattttgggcagcrcagctttcctctcagctgggtatggttcctctcagttcctcggctgggtacggtttcttggactgctgtgtctaccactacaaatgtacacatatgtgac

SEQ ID NO: 325301 - DNA, 201 bp, Homo sapiens
ctgctcaggattatattatttactattctcatgcttgaaaatgagcaggggcaagggggtatgaaaaaaggatcatgaaatccatctcttgtcaccttctrttcagcactagtgcaagatttggtacctgaaaattagcaattaacctaaagaatgatttttctttttttctttctttcctctgatagctggaaaggcaac

SEQ ID NO: 325302 - DNA, 201 bp, Homo sapiens
aactgtggtcactggctgtggcagcaactattataagatgctctgaaaactcttcagacactgaggggcaccagaggagcagactacaagaatggcacacrctatggaaaactcctggacaatcagtaaagagtaccatattgatgaagaagtgggctttgctctgccaaatccacaggtaagagaaggcagtaaaatgtg

SEQ ID NO: 325303 - DNA, 201 bp, Homo sapiens
tttggcagggcacagtggctcacacctgtaatcccagcactttgggaggctgaagtgggcggatcacttgaagtcaggagttcgagaccagcctggccaasatggcgaaaccccgtctctactaaaaatataaaaattagccgggcatggtggtgggcacctgtagtcccagctactcaggaggctgaggcaggagaatgg

SEQ ID NO: 325304 - DNA, 201 bp, Homo sapiens
aaaagagcaaaactccatctcaaaataaaaataaaaaataaaaggccaggtgcagtcgctcacgcctgtaatcctagcactttgggaggccgaggcgggcrgatcacaagatcaggagatcgagaccatcctggctaacacggtgaaaccctgtctctactaaaaatacaaaaaagtagctgggcatggtggcgggtgcct

SEQ ID NO: 325305 - DNA, 201 bp, Homo sapiens
aagcataaaacattactgagattgatttgagtcaattgctccatttgttttcagttaaacatgctcagcattgatcatctcacagaccacaagtcacagcrccttgcacgtctagttctgggatgcatcaccatggcatatgtgtggggcaaaggtcatggagatgtccgtaaggtttggagattttctcagatttcttat

SEQ ID NO: 325306 - DNA, 201 bp, Homo sapiens
cgtgaacccgggaggcagagcttgcagtgagctgagatcgcgccactgcaccccagcctggacaactgagcgagactccgtctcaaaaaaaaaaaaaaaaagaaagaaagaaaaccttaaatgtttgtgttttgtttgtttgttttaggtaattcctactgtattcaaggcaatgcaaatgcaagaacgggacactttgct

SEQ ID NO: 325307 - DNA, 201 bp, Homo sapiens
tggcagtaagaaaatgatgtgcttaatgattacaaatttcatatggaatacgaactttcagtttgtacatatgatgcacagagatgcttttgtggttttaytggttttcatattacaaacaaagaaactagaaaatgaaaccattccaaaagtggaagtaatttctcactgcccctgtgataaactgtggtcactggctgt

SEQ ID NO: 325308 - DNA, 201 bp, Homo sapiens
gtgttcttcgcatatatttgtctgggtatgtagtcttatgtttgaatttgtttgctctcacttaacaaagaacaccaccaaattctcttggttggtccctratatccattgggtttggctaacaatttacatccaaaaattcacatggtagaaaaatactagactgttctgttatcacttggccaggaatgtactggagtg

SEQ ID NO: 325309 - DNA, 201 bp, Homo sapiens
ctcttgtcaccttctgttcagcactagtgcaagatttggtacctgaaaattagcaattaacctaaagaatgatttttctttttttctttctttcctctgayagctggaaaggcaacccccagctatcagacggtctggtgtatgaagggttctgggaagacccaaaggagtttgcagggggcagtgcaggccaaagcagcg

SEQ ID NO: 325310 - DNA, 201 bp, Homo sapiens
aaattgtcctttttatgcttaggtgcgacaaggtatgggcacatataaaaatatgattgaggcaaaaggcataacctaatgccaatggactggggaaacccagcaagacctgtctgtctagattcctcttgacctctctgagcatgtactccttccttctgggtatagggatcttatgacctacaatccaacaaggtaagt

SEQ ID NO: 325311 - DNA, 201 bp, Homo sapiens
gggaaagagatgtaaagaaagttatagatataaagatgtatttgtgataagagagattaaaaagaaaagagaattattttgtatgataaataattttatayttttttctgaagtaagatgactggtaatctaagaaagagggaaatttaggatacaatggaaagtccaatcatgttggaagtggcatgtgtataatcaaat

SEQ ID NO: 325312 - DNA, 201 bp, Homo sapiens
gatatgatggcttagcttaggctcagaggcctgacacacagtagaactgatttatttgcaaaataagttttgttactatacttggtctgattttttgcatraagggcagcaagaataattatttactatataggctcctttttaaaaaatggctttgctggaacattcttttttataaagaatctcatattagacctctta

SEQ ID NO: 325313 - DNA, 201 bp, Homo sapiens
agccaagctttggtcctagagctgttgtgtttgaagtggtcctacatagtttatgtgacagcccatagagctcaatatgggcagcctattgtccacacagyagctagacagatcactttgattaggcgaacactgttccgcttataacccttctctcatcctgtctcactttgatttctcatctcgtttagaatagaagcc

SEQ ID NO: 325314 - DNA, 201 bp, Homo sapiens; identical to SEQ ID NO: 68406

SEQ ID NO: 325315 - DNA, 201 bp, Homo sapiens
atgaccagttttgtctaatgtctcagttctcaaagcaatctaggtaaactgctaacaatgaataaattgaacaaatataagtgggatggataaatgcttgytggttaacttttatgtaatttaaaatcttaaacttattttggattaaagaacagctactcattaatagtttggctcatttccaattaagtagagatatgg

SEQ ID NO: 325316 - DNA, 201 bp, Homo sapiens; identical to SEQ ID NO: 68409
  misc_feature (1)...(201): n = A,T,C or G

SEQ ID NO: 325317 - DNA, 201 bp, Homo sapiens
aataagtcattcatttaggcaaagtgataactcaaagatttcaaaaagtaaaaaccttcactctttgagagagaggactcactttcacaaacaataagacstaataaagacagcatgaggccaactaaatttgtctctcttccccaacccatcttttttttttttttttttgcagttttctcaaaaggtaagcaaaaatct

SEQ ID NO: 325318 - DNA, 201 bp, Homo sapiens
ctatttttttctttttgaaacttctcagatatctcagaagttcaacttctggtgtatcctgctgcttttagccttttcttcatttgagaatagctgagatsttaactctctctttcaactttttgttggctctggcaaattttttttttcttcaggtctaaatctgttgctatagcctgatgctgaagtgtttcgtcttaa

SEQ ID NO: 325319 - DNA, 201 bp, Homo sapiens; identical to SEQ ID NO: 68396

SEQ ID NO: 325320 - DNA, 201 bp, Homo sapiens
taaataggggaaagagatgtaaagaaagttatagatataaagatgtatttgtgataagagagattaaaaagaaaagagaattattttgtatgataaataaytttatatttttttctgaagtaagatgactggtaatctaagaaagagggaaatttaggatacaatggaaagtccaatcatgttggaagtggcatgtgtata

SEQ ID NO: 325321 - DNA, 201 bp, Homo sapiens; identical to SEQ ID NO: 68397

SEQ ID NO: 325322 - DNA, 201 bp, Homo sapiens
acagctaaatgggaaatcaagtgggtcatgtaccatgaataccatatactctactgtataattctcctgcttatatcagaaactgtttataagcctattayaattgataccaattggaatctcttttttactcatcaccaagaacaccacaaacaagttgtttaccatttggctccttatttaatctggatttccaactcc

SEQ ID NO: 325323 - DNA, 201 bp, Homo sapiens
cttttatgtaatttaaaatcttaaacttattttggattaaagaacagctactcattaatagtttggctcatttccaattaagtagagatatggagaaacaygcctaaaaattatagagtgatttcatctataaagtactgatacctgatatgcagtttaggatttcatgtttcctaggtttaaggtcactaaaaataaaaa

SEQ ID NO: 325324 - DNA, 201 bp, Homo sapiens
ggtaaactgctaacaatgaataaattgaacaaatataagtgggatggataaatgcttgttggttaacttttatgtaatttaaaatcttaaacttattttgsattaaagaacagctactcattaatagtttggctcatttccaattaagtagagatatggagaaacatgcctaaaaattatagagtgatttcatctataaag

SEQ ID NO: 325325 - DNA, 201 bp, Homo sapiens; identical to SEQ ID NO: 68400

SEQ ID NO: 325326 - DNA, 201 bp, Homo sapiens
tccaaggccactgttagttgtcagatatcatctcaatccattccccttctcactgactgtgctccagtcaccctggcttcctggatgtttcctcaacactygggacaggttccagctaaggatcctggtactttctgttccactgcatggaacaatcctcctcacacatatccacagaacttattctctagcatccttaaa

SEQ ID NO: 325327 - DNA, 201 bp, Homo sapiens
ctgtaaaaaaatacgtttaacattaaggtttatacttgggtgaacacctgatattcacaggctataaaatagttagcaaggaaataactttaaatatgacyagttttgtctaatgtctcagttctcaaagcaatctaggtaaactgctaacaatgaataaattgaacaaatataagtgggatggataaatgcttgttggtt

SEQ ID NO: 325328 - DNA, 201 bp, Homo sapiens; identical to SEQ ID NO: 68402

SEQ ID NO: 325329 - DNA, 201 bp, Homo sapiens
gctatctgtaaaaaaatacgtttaacattaaggtttatacttgggtgaacacctgatattcacaggctataaaatagttagcaaggaaataactttaaatrtgaccagttttgtctaatgtctcagttctcaaagcaatctaggtaaactgctaacaatgaataaattgaacaaatataagtgggatggataaatgcttgt

SEQ ID NO: 325330 - DNA, 201 bp, Homo sapiens; identical to SEQ ID NO: 68403

SEQ ID NO: 325331 - DNA, 201 bp, Homo sapiens
gttctccatgagagtcctgggagttttttttctctataccagtggcacaatctccaaagttatcataaagcttcattcaaaagcaccccttagagtcctayagctaattgcaaaccacctttttaaaagcaccaaagtagaacaactgtcaatgacagaagtcttaggacagccatggtcaaggacacacttaacaaggaa

SEQ ID NO: 325332 - DNA, 201 bp, Homo sapiens
tttcacaagacagtgtcatcagttaaggcaggaacaggccattttcccatcttttgtggtggaatgtcatcagtaaggcaggaaccggccatctggatgtrtacatgcaggtcacgggatatgatggcttagcttaggctcagaggcctgacacacagtagaactgatttatttgcaaaataagttttgttactatacttg

SEQ ID NO: 325333 - DNA, 201 bp, Homo sapiens
catattttctttaggcagtcccttggttttgaggtgagatcagttcagttaaatatctacgtcccattccaggaggtgggactgcaaatggtttaggcctytagacgtaatgtaggcaatcagatttctagtaggaggcatttctgtagaaacagaaaaaaataaataaataaatgttactatctggagtagtctatatat

SEQ ID NO: 325334 - DNA, 201 bp, Homo sapiens
gaatcaatcagtgaatgaatgaattaatcaatatattttttgagtgaggagctttgtgttaggtacagctaaatgggaaatcaagtgggtcatgtaccatraataccatatactctactgtataattctcctgcttatatcagaaactgtttataagcctattataattgataccaattggaatctcttttttactcatca

SEQ ID NO: 325335 - DNA, 201 bp, Homo sapiens
ctattataattgataccaattggaatctcttttttactcatcaccaagaacaccacaaacaagttgtttaccatttggctccttatttaatctggatttcsaactcctcatgcttaaaagacggaagatacaataatactttccttacagggttctgagactactaagagaacttatgcatgtaaaagggattcatgcagt

SEQ ID NO: 325336 - DNA, 201 bp, Homo sapiens
caaacagactctgtgtgagcaacatggctgtttatttcacctgggtgcaggcgggctgagtcctaaaagagagtcagtgaagggagataagggtggggccrttttataggatttggatagataaaagaaaagtacagtcaaaggggggttgttctctggcaggcagagtgggggtcacaaggtgctcagtaggggagctat

SEQ ID NO: 325337 - DNA, 201 bp, Homo sapiens; identical to SEQ ID NO: 68398

SEQ ID NO: 325338 - DNA, 201 bp, Homo sapiens; identical to SEQ ID NO: 68399

SEQ ID NO: 325339 - DNA, 201 bp, Homo sapiens; identical to SEQ ID NO: 68401

SEQ ID NO: 325340 - DNA, 201 bp, Homo sapiens; identical to SEQ ID NO: 68404

SEQ ID NO: 325341 - DNA, 201 bp, Homo sapiens
ggaatctcttttttactcatcaccaagaacaccacaaacaagttgtttaccatttggctccttatttaatctggatttccaactcctcatgcttaaaagayggaagatacaataatactttccttacagggttctgagactactaagagaacttatgcatgtaaaagggattcatgcagtagaaatactaacaaaagaatt

SEQ ID NO: 325342 - DNA, 201 bp, Homo sapiens; identical to SEQ ID NO: 68405

SEQ ID NO: 325343 - DNA, 201 bp, Homo sapiens
aaaatataatatttttgagggcaagcaagtactagaacaataggaaacacatcaagagtattctgtaaactatttcttgaatcaatcagtgaatgaatgarttaatcaatatattttttgagtgaggagctttgtgttaggtacagctaaatgggaaatcaagtgggtcatgtaccatgaataccatatactctactgtat

SEQ ID NO: 325344 - DNA, 201 bp, Homo sapiens
tggctccaaggccactgttagttgtcagatatcatctcaatccattccccttctcactgactgtgctccagtcaccctggcttcctggatgtttcctcaayactcgggacaggttccagctaaggatcctggtactttctgttccactgcatggaacaatcctcctcacacatatccacagaacttattctctagcatcct

SEQ ID NO: 325345 - DNA, 201 bp, Homo sapiens
gagaggactcactttcacaaacaataagacctaataaagacagcatgaggccaactaaatttgtctctcttccccaacccatcttttttttttttttttttgcagttttctcaaaaggtaagcaaaaatctttcactatctcttaatattaaaagaaaatcttattcaaaggaaatctaaattttaccattgcatagctta

SEQ ID NO: 325346 - DNA, 201 bp, Homo sapiens
agactactaagagaacttatgcatgtaaaagggattcatgcagtagaaatactaacaaaagaattactatgacagatacttataaccattgtgtttttacrtatttaaaatacgttatacctataattagtcacacgaggaaatcaaatgctaaagtatgatatgtttttatgttttgtttttcttgcttaggggatcatg

SEQ ID NO: 325347 - DNA, 201 bp, Homo sapiens; identical to SEQ ID NO: 68407

SEQ ID NO: 325348 - DNA, 201 bp, Homo sapiens
aaggatttatctgtttctacgacatacctgtatgaattaagtgaattctctctcaaggtcccaaaataagttggggttcctgggcctgtcagaatgtgacyttttacccattacaggccagaaacctgtaaaggaacctgtaaaggaactgcatagacaagctgtgaggccagttttatccacagggctattatcagcttt

SEQ ID NO: 325349 - DNA, 201 bp, Homo sapiens
gaaacttgagaatgaagacccaacttcccagtaagttacagaaactcatgtattattccgaggccacagtaaagagtggagactcaaagcatggccagaawcaggtaaattagttttagtggcaacacaggttaagagagagaggaaggaagaagctcggctagcaaaggtggccttgttatgtagacgaaccttttctca

SEQ ID NO: 325350 - DNA, 201 bp, Homo sapiens
ccttttcttcatttgagaatagctgagatgttaactctctctttcaactttttgttggctctggcaaattttttttttcttcaggtctaaatctgttgctrtagcctgatgctgaagtgtttcgtcttaaagcttcaaaaaaagcaatgttttcttccattatcacttaattctgtgctgttggcttttcctcctatgagt

SEQ ID NO: 325351 - DNA, 201 bp, Homo sapiens
aaggcttagaaacaggagagggtatggctgcattaatggacattgtccacagacgcaaattttcctcagttaagacagttttgcaatgccacttctgcttkttggccagtggaaaccatttttaaatatgtcaaagaaatatatttgagggtaaaatattttgattttcttcagtccccactttgaaatttaaaacaagtt

SEQ ID NO: 325352 - DNA, 201 bp, Homo sapiens
tggagtcttcagaataaagaccccaacacacaggggaaattgtcctttttatgcttaggtgcgacaaggtatgggcacatataaaaatatgattgaggcaraaggcataacctaatgccaatggactggggaaacccagcaagacctgtctgtctagattcctcttgacctctctgagcatgtactccttccttctgggta

SEQ ID NO: 325353 - DNA, 201 bp, Homo sapiens
cgaggccacagtaaagagtggagactcaaagcatggccagaaacaggtaaattagttttagtggcaacacaggttaagagagagaggaaggaagaagctcrgctagcaaaggtggccttgttatgtagacgaaccttttctcagaagcaaaagatggtaaatgtttctatccagatctttaaaggtgtcagactctcaatc

SEQ ID NO: 325354 - DNA, 201 bp, Homo sapiens
acctctctgagcatgtactccttccttctgggtatagggatcttatgacctacaatccaacaaggtaagttggataatttctttatggctaattcatacayagaaagggagagggcaaattagagtaatatttttagactttgtggctggttttgagaaaaaggagttctgatttctaggttctgccttggggaaagagat

SEQ ID NO: 325355 - DNA, 201 bp, Homo sapiens
atatttaaggttaaataaggttataaacgtggagtcttaatctgataggattggtggctttataagaaaaagaaaagagattgctctctccccagtgcagktaccaaggaaaggccatgtgagaacatagcaggaaggcagccatctgtaacctaaggaaagagatctgtcaaaggacaaaactacaacaaatgtaaagat

SEQ ID NO: 325356 - DNA, 201 bp, Homo sapiens
gattttcaggcagagccaatgtataccttatgtgggggccataggctgttggccccctaaagcttcactaaaagtcactgtcatgtgacaggttgattaayaggggaaagggagtacaaatttatttaatgtatatacatggtctattagccaggaccctttagagggccagaactaataggatagatgtatacataaagg

SEQ ID NO: 325357 - DNA, 201 bp, Homo sapiens
ttcaatatgtctgattttcaggcagagccaatgtataccttatgtgggggccataggctgttggccccctaaagcttcactaaaagtcactgtcatgtgayaggttgattaataggggaaagggagtacaaatttatttaatgtatatacatggtctattagccaggaccctttagagggccagaactaataggatagatg

SEQ ID NO: 325358 - DNA, 201 bp, Homo sapiens
aaattgccaatcacaaaatctttgaatccacctttgtcctgtaagctctcctacttcaatatgtctgattttcaggcagagccaatgtataccttatgtgrgggccataggctgttggccccctaaagcttcactaaaagtcactgtcatgtgacaggttgattaataggggaaagggagtacaaatttatttaatgtata

SEQ ID NO: 325359 - DNA, 201 bp, Homo sapiens; identical to SEQ ID NO: 68408

SEQ ID NO: 325360 - DNA, 201 bp, Homo sapiens
actatacttggtctgattttttgcataaagggcagcaagaataattatttactatataggctcctttttaaaaaatggctttgctggaacattcttttttrtaaagaatctcatattagacctcttaaaagcatcctgagcccaaccaaggatttatctgtttctacgacatacctgtatgaattaagtgaattctctctc

SEQ ID NO: 325361 - DNA, 201 bp, Homo sapiens
gtagcatgaaagtataaagcttactgatcaaaggaagaacattttcaaatccaagacactctaataccgtaatggcaatgggtaggtcaatttagtatacrttaaaacgatttagtatatgctatacctttaacctttattgttttaacatacactaaattgacctactcattgcctagggttaaaggttaaaggtataaa

SEQ ID NO: 325362 - DNA, 201 bp, Homo sapiens
tgggattacaggcgtgagccactgcgcccggcctgggagggggttttcaggcaaggaaggataggtatcgttttggagttactggcccatgcaaggatccygggtcttaacatacaggctttgctttttttgtttgttgtttgtttttttgagacggagtcttgctctgtcacccaggctggagtgcagtggtgcgatctc

SEQ ID NO: 325363 - DNA, 201 bp, Homo sapiens
gggattacaggtgtgagccaccatgcccggcccagaccagctttaaaacaggtttcaataaatcctgcttcctgtcccttcctttaccatctggtggtgcrtttctccctgaaccctaaccccagctgtctctccttcctctcactcttccccctccttataactgaccctttacctcaagggttagcgtagctttggacc

SEQ ID NO: 325364 - DNA, 201 bp, Homo sapiens
attcacaagtataagccttggaggcggaacataactcgaagaagagcccttttgtgctccgcccatagcgtaggaaggtgtcaattggctgtttcgaggawcgcgccaaaaactgccaagggctgtgggaggtgtgttcttgcgtcatttccgagagacttccgcgccgcagtttccctgcttccccagctccagaacttc

SEQ ID NO: 325365 - DNA, 201 bp, Homo sapiens; identical to SEQ ID NO: 68421

SEQ ID NO: 325366 - DNA, 201 bp, Homo sapiens; identical to SEQ ID NO: 68422

SEQ ID NO: 325367 - DNA, 201 bp, Homo sapiens
atactgactccgaggtgccttctttcttgtgctctgtgtaggaattggccgttgggcttacctcctgcttcgtgaccttcctcctgccagcgggctggatmctgtcacacctggagacctacaggaggccagagtgaaggggtccgttctgtccctcacactgtgacctgaccagccccaccggcccatcctggtcatgtt

SEQ ID NO: 325368 - DNA, 201 bp, Homo sapiens
cgttaggtctttccccacagccccaggatctcgggtctggtcctgtcaggccctccctctcctgtcgcctcctcgctgcgccgcctcctgccgacttcttkagccgctctgagcccattttctcgttggttcactgggggatgcctgacgctgtcagcgacgaaaatggttgttactgctatttattttattttattttat

SEQ ID NO: 325369 - DNA, 201 bp, Homo sapiens
gagctccccagagcacctgagcctcacgctgctgcttcttccacagacccgctgacattcttcaacacctgcctggacacctcccagaaagaagcggtttyatttgcgctgtctcagaaagaacttgccatcatccatggacctcctggcactgggaaaaccacgactgtggttgagatcattcttcaagctgtgaaacaa

SEQ ID NO: 325370 - DNA, 201 bp, Homo sapiens
gaattgattttaaaaccttaaatgaggggccaggtgttgtctttccgtttgcctgagtgacgcgggtcttctccaggacatccggccacagatctgcccamggaggaggactttgaggccctggtttctgccgccgttaaggctgataacacctgcggctttgccaagtgcacagccggcgtcacaaccctgggccagttc

SEQ ID NO: 325371 - DNA, 201 bp, Homo sapiens
tacgcagcaagctaaagtgaagctttctgcatgaaagtcgactctgaggctagctttttggaagagagggtggccttgccctggagagctgggtcaggccygctccctcccttctgatgtcctgatgtgctcattgtcctcccctacctaagccttttcctcgtgggaggggtcggttctgttgggtggggcctcagtgct

SEQ ID NO: 325372 - DNA, 201 bp, Homo sapiens
cccgagagctacttcgacgtggtggtcattgacgagtgtgcccaggccctcgaggcgagctgctggatccccctgctgaaggccagaaagtgcatcctggygggcgatcacaagcagctgccccccaccacagtctctcacaagtaagacccctttgcctcacatgcccttctctgcccccgccctcctgcggtccttcca

SEQ ID NO: 325373 - DNA, 201 bp, Homo sapiens
gtgcgtaacgcacgggcccggcggggaacaccggtccgctgtaacaccggcccggcgcagaagcgggacgtcggcttctaggggcccaggccggcggcggygatggcctcggcagctgtggagagcttcgtgaccaagcaactggacctgctggagctcgagagagacgcggaggtggaggagcgcaggtacgggaggccg

SEQ ID NO: 325374 - DNA, 201 bp, Homo sapiens
tcttccacagacccgctgacattcttcaacacctgcctggacacctcccagaaagaagcggtttcatttgcgctgtctcagaaagaacttgccatcatccrtggacctcctggcactgggaaaaccacgactgtggttgagatcattcttcaagctgtgaaacaaggcttaaaggtgggcagtgcatgccacttccctgtc

SEQ ID NO: 325375 - DNA, 201 bp, Homo sapiens
catatgtgggtaggatttgtctgagatgcttttgatcatggcaatggagagcttttgcagttatgttgagtttcttagaatcccagctgtttcatttatgsctgtgtgactttgcaggttctgtctctgagccttacttacttcatctgtaaaactgggatgattcccacctcacaggcttgctctgagaatgaaacgatc

SEQ ID NO: 325376 - DNA, 201 bp, Homo sapiens
gcgctgtctcagaaagaacttgccatcatccatggacctcctggcactgggaaaaccacgactgtggttgagatcattcttcaagctgtgaaacaaggctkaaaggtgggcagtgcatgccacttccctgtcagagcccgtccgctcctggtctgttgtgttcagtgggtgctcagcgacctttcagcctcagttctggtg

SEQ ID NO: 325377 - DNA, 201 bp, Homo sapiens
agaggagagggccaggaggggaacctgtaggttggagtcagacctgagcagagtttgagattttttttttctgagatggagtctcactctgtcgctcaggycggagtgcagtggtgcaatcttggctcactgcagcctcagcctcccgagtagctgggaccacaggtgcccgccaccacgcctggctaattttttgtattt

SEQ ID NO: 325378 - DNA, 201 bp, Homo sapiens
taattttttttagaattaatagagacggggtctcactctgtcactatgttgcccaggctagttttgaactcctggccgcaagcagtcctcctacctcagcytcccaaaatgctgggattacaggtgtgagccaccgtgcttagccatgaattgattttaaaaccttaaatgaggggccaggtgttgtctttccgtttgcct

SEQ ID NO: 325379 - DNA, 201 bp, Homo sapiens
tatccaaaaacaactgtccatgggactattgagccggtttctccatgatcctgccactgcgctccagcctgggccatagagcaatttgtttcaaaaaaaaraaagaaagaaagaaaaatatagtggagctacagtgttcgggagacaactgtgagtccatttgaaacgggaagggttcccttgtccccctcgcagggcgtg

SEQ ID NO: 325380 - DNA, 201 bp, Homo sapiens
agagcctggaggaggaaggcccttccctggggagggtcatggtggcttcaaggagggagtggtgcctgaaggaaaattggagttaagctggtgggtgcggrgtagggtggggagccgtcctgagaggtgtggggagccatgtgagagccgggcttgtttccgaatgggactatttacttgtccaaaacaatcagagctaac

SEQ ID NO: 325381 - DNA, 201 bp, Homo sapiens
tttttatttttattttttggagacggagcctcactctgtcacccaggctagagtctggagtgcaggggcgggatcttggctccctgcaacctccgcctccygggtttaagtgattctcctacctcagcctcccgaacagctgggattataggcgtgcgccaccatgcctggctaatttttgtatttttagtagagatggag

SEQ ID NO: 325382 - DNA, 201 bp, Homo sapiens
gaaacgtgcccgaaacacgtgttggtggtggatgcccacttggggcgaccttgtgctgctcacccgttctttctttccctccaggcgaagtccgcctcgtyagtttgcacatccaggctctggtggacgctggtgttccagcccgtgacattgctgtggtctcgccatacaacctccaggtacgagggtttccttttgtcc

SEQ ID NO: 325383 - DNA, 201 bp, Homo sapiens
ggccatgatagacagaaacgtgcccgaaacacgtgttggtggtggatgcccacttggggcgaccttgtgctgctcacccgttctttctttccctccaggcraagtccgcctcgtcagtttgcacatccaggctctggtggacgctggtgttccagcccgtgacattgctgtggtctcgccatacaacctccaggtacgagg

SEQ ID NO: 325384 - DNA, 201 bp, Homo sapiens
cctgctcagacagagccttgtgcacaggcaccctgagcttgaaatcaagtctgtcgatggcttccaaggccgagagaaggaggccgtgatactgtccttcrtcagatccaacaggaaaggtacggagccctcgccagagtcctttggggacagcacagaagtgaatttattgattgaggggcatattgggtgtctgctggg

SEQ ID NO: 325385 - DNA, 201 bp, Homo sapiens
gagctgagagaggccaggcagtggaagcagacacccatgaccctgcagggatggtgtgggggttgtccttcctggggcgcctgagggtgcaggctgcagaktgggagggcagctacagctgcacccaagagctcccgacccaccacctcagaagaggccaggctcctgcttgttcccggctcctgcctgcttcgtggagca

SEQ ID NO: 325386 - DNA, 201 bp, Homo sapiens
ggccagaaagtgcatcctggcgggcgatcacaagcagctgccccccaccacagtctctcacaagtaagacccctttgcctcacatgcccttctctgccccygccctcctgcggtccttccacgctcagccaggagccccaggctcaccaggagcccctgcggtgcctcctcggtttctcggcacagctcctaccccgtctt

SEQ ID NO: 325387 - DNA, 201 bp, Homo sapiens
attttaaaaaaattttaaataactggctgggggggttgttatttgagatgggagagtaaatgcagtccctgctattccatcttgggcagaggtggaggacrcacattctctcttgtagccaggagagagcactcccgttacagagctgtgtaccttgtgactgttgtgggaatcttgtcaaccactcttttggggtttagg

SEQ ID NO: 325388 - DNA, 201 bp, Homo sapiens; identical to SEQ ID NO: 68455

SEQ ID NO: 325389 - DNA, 201 bp, Homo sapiens
tctcatctgaaacttgcctggaaaggatctttcttcaggctcacgtggttgttggcagcattcagttccctgtgggttcttgctgggtgttggctggaggscgctcttagctgtttgcccttaggccttgccaacatggctgcttgcttcctaaaagccagcaagagacacagtctcctagcacaatgggttatcgtctta

SEQ ID NO: 325390 - DNA, 201 bp, Homo sapiens
tgtgcagccacagccagggttccctgctgcagccggcatgatggcagcagccactgccatcagaacctccctgggagcagggaggacaggcgtgggaggaygcttattcagtggcttcttccagggagaggttctcgagatgtccttaaaggaggtcttcatcctctggaaagcctttgggtggaggaagtttggaactgt

SEQ ID NO: 325391 - DNA, 201 bp, Homo sapiens
tttgggggaggacgttgggtgacgttgcgctgagtgttttgggtttgcagttggtactgatcatcgcgtcctgtcctcattttgttggaattaaaaatacrttaatcacagaggtctggtaagtttccagagggaaggtctctgaagtggagctgggtactgccccagggttttggtggggttggtgagccgtagtggtgc

SEQ ID NO: 325392 - DNA, 201 bp, Homo sapiens
ttaattttttggagatggagtctcactctgttgctcaggctggagtgccgtagcgtgatctcggcctgctgcaacctccgtctcctaggttcaagcgattstcctgccttagcctcctgagtagctgggattacaggcgtccaccaccacgcctggctgatttttgtatttttagtagagatggggtcaccatgttggcca

SEQ ID NO: 325393 - DNA, 201 bp, Homo sapiens
tcacagccggtcccagcatggccagtgagggtcgggtgttaggagtgctcagtctcagcagctatagcactgcggtccccagccacttcccctccccaccstcaggatgccaagcttggtgcgggcaatgccttttttttttgagacggagtctcgctctgtcacccaggctagagtgcggtggcatgatctcagctcact

SEQ ID NO: 325394 - DNA, 201 bp, Homo sapiens
cgccccctccaacatcgccgtggacaatctggtggagcgcctggctctgtgtaagcagcggattctgcgcctgggacaccctgcccgcctcctggagtccrttcagcagcactccctggatgcggttttagcgcggagcgacagtgcccagattgttgcagatatcaggaaggacatcgaccaggtctttgtaggtgtcat

SEQ ID NO: 325395 - DNA, 201 bp, Homo sapiens
tcatttatggctgtgtgactttgcaggttctgtctctgagccttacttacttcatctgtaaaactgggatgattcccacctcacaggcttgctctgagaaygaaacgatcccctgtcagtcaggtgctcagcgtggtgccaaggacagagtcagcccccatggcagtggctctttctgaggatgctgagcagactggcagg

SEQ ID NO: 325396 - DNA, 201 bp, Homo sapiens
gtgacagatgggaggagagaggggaatgctgattgaaagatctgtctcaggtaactgagagaagggttgtggcattaactgccctagggggatgtaggagragcgggattgggagtggagccaattcggagttccattgggacatatttagtgcctgtgagtagatctttatctatgtttctttctcttttacttttcctg

SEQ ID NO: 325397 - DNA, 201 bp, Homo sapiens
tttgtgactctcagctttcacttcccgtttgtgcagtgcgttgagctgagccacagatgagagctgagggcctcccgaggtctttcctgagccctgtacawgtgtgtggccttctagattcccaggaatatgttggagcttttcaaagccccctgaggatatctcattccccagcttaaaactttggttatcctatcattt

SEQ ID NO: 325398 - DNA, 201 bp, Homo sapiens
ctgcccacctctgcctcccaaagtactgggattacaggcgtgagccaccgtgcccggcctaacttactttcttttttttttttttaactgttactgattgyatttactaaagaaagtaacaaagataaaatatttgaagtatagtggattttattacagaaaatgatattgaagctttccccagtgtcttgtgtcactgag

SEQ ID NO: 325399 - DNA, 201 bp, Homo sapiens
ttttcaaagccccctgaggatatctcattccccagcttaaaactttggttatcctatcatttgctccgaccattattctctgtcttagaaaactgtgatgktcaacaattacctctgattgtttttgacagacaccaccagggaaaaggctgtttgtattacatgagctcagataaagtcttttgagtgtggtctaccaga

SEQ ID NO: 325400 - DNA, 201 bp, Homo sapiens
cctctggctgtcctctcgccttctctgactgagcccagggcttttatggacctcaagagggaaggaaggatgtgccaattggtccatgggtggccatgggygggcctggaataggtaccatgagtcctcactctggtccacaggactggcagcccagctgccagccttcaggcccttcctggccttccactgtccccttcc

SEQ ID NO: 325401 - DNA, 201 bp, Homo sapiens
ctgcagctgcacgcggaaaggcagatcctacctgttcccggctcccctaagagcaccgggagacgcagatccacagctgcagtttgggcggctgtagcccygcccttctggagcaggaggcctgggtctgtagctgtgaccctgtgtctgggctgcagcggccactctacctcagaaggggcggggctcccactggcttca

SEQ ID NO: 325402 - DNA, 201 bp, Homo sapiens
gtcgtcttttgtcttttgagtgtgtgattatcatgtgttaggtgtggatctctgtgagtaaattacatggagtttgtggaccttcttggatgtttagattsgtgtttttcatcaaatttggggagttttcagccattattttttcaggtattctttctgcccttattctactctcgtctccatctacaactcccattatga

SEQ ID NO: 325403 - DNA, 201 bp, Homo sapiens
cccatctcctggtcttttccggctcctagaggccattgcttgacttgttgccctttcctctgtctatgaagccagccgtgttacgtcttcaaatctctccyctcggtgaccttctctgactgaccctcgcatgcccccttataagacccttgggttatcacctgggtcatccagggtcgcctccccatcccaggatcctta

SEQ ID NO: 325404 - DNA, 201 bp, Homo sapiens
atggtgggccacgcgcaggggactacacttttggtggtggttactgataagggcgtaggagcctgactgtgtttcttagtctgaaacctgcttctcactcmcctctggccttttgtaggtgaagttggttttcttgctgaggaccggaggatcaacgtggctgtcacccgtgcccgacgccacgtggcggtcatctgtgac

SEQ ID NO: 325405 - DNA, 201 bp, Homo sapiens
gagagcagttgttgatggccgtgaaaaaacggagccccacactgcaagaggctgagcagcatcgttttctccagggtgagcagaccgctcctgggtgagaygggcctggcagcattttacggccttctcctgaatggtggcccagctctgcctggctggtctggtgatgggaactgtcattgctcagctgacaccaccatc

SEQ ID NO: 325406 - DNA, 201 bp, Homo sapiens
cagactcaccggcttaaaatcaaggtgtgggtggggttgcttcttctggaggatccaggggaaaacccatctcctggtcttttccggctcctagaggccaytgcttgacttgttgccctttcctctgtctatgaagccagccgtgttacgtcttcaaatctctcccctcggtgaccttctctgactgaccctcgcatgccc

SEQ ID NO: 325407 - DNA, 201 bp, Homo sapiens
aggagtcaaaaggccttcattgctgatgtgaaattcaagttagctgggcatggctggtcctggggccctgggacacagatgattagctcccaggaagccayctgagtggaggatcagctggccatgatagacagaaacgtgcccgaaacacgtgttggtggtggatgcccacttggggcgaccttgtgctgctcacccgtt

SEQ ID NO: 325408 - DNA, 201 bp, Homo sapiens
aatgatcaggacatcctgccgaggaggtgaagccccctgcagcccagagctggcctttagcctccatgcacggagccgcggggtgtggtggtcgtggctgyggtttctgtgctgctgtggtgtgtgggctttcccatttgggatgagcattgttcccagaagcaggtttagtgaacgggctttgtgagacattctcagaag

SEQ ID NO: 325409 - DNA, 201 bp, Homo sapiens
ggcttttcaggaatgccaaccctgttctgcaccccccggggctggcaggtgctggttttcaccctgacttcaggctgagggtttcaaggctgccatagggrtggctgggaatagggcaggtttcagtgccaccgagctcccgtgctgacggggattcagatgcttttctggaatgaacacttccctgattgctgcagcctt

SEQ ID NO: 325410 - DNA, 201 bp, Homo sapiens
gccagctctgcagccgccgctactgcctcagccaccacctgcccgaggtatgtcggcctcccctcctgcgatcaaacagtggggaggggtggtgggttccrtctccaggaagcagaccctgggcagacttgttccagtcggaacagttagctccttacaagctccagataccttcagaaacagaaatcagacactgactca

SEQ ID NO: 325411 - DNA, 201 bp, Homo sapiens
ccagtctggagtgcagtggcatgatctcggctcactgcaacctccgcctccggggttcaagtgattctcctgcctcagcctcccgagtagctgggattagrggcatgcgccaccgtgcctggctaattttgtatttttagtagagacggggtttctccatgttgttcaggctggtctcgaactcccaacttcaggtgatcc

SEQ ID NO: 325412 - DNA, 201 bp, Homo sapiens
ggaaatcctaagtaccatcttccttcaacacagctaatccattcttacatgcctgtcgcacaaaagagagcaacaagtcatggtgtgggtgtggccctcaygggagttggtggcagcattggggcagaggctcgggcactgaattgcaggtgttctaattttagttttctcccttggcagagccctgattgctctaaagaa

SEQ ID NO: 325413 - DNA, 201 bp, Homo sapiens
cccctgcgcagacagagcagcctcccagggagcagcgtggcccagaccagcctgatctgaggacgctgcacctggagagactgcagagggtcaggagcgcrcaggggcagcccgccagcaaggagcagcaggcctcagggcagcagaaacttccagaaaagaaaaagaaaaaagccaaaggtaagtcaactaataagaact

SEQ ID NO: 325414 - DNA, 201 bp, Homo sapiens
ggtctggtgattttcagatctttgatatttttttgagaggcctcaatgtccttttctgaggaagaaactcacataaataagtttgaagctttaacagcagrtggtcaatttctctttatccaaaaacaactgtccatgggactattgagccggtttctccatgatcctgccactgcgctccagcctgggccatagagcaat

SEQ ID NO: 325415 - DNA, 201 bp, Homo sapiens
atcgtgggcctgtacgatgctgctaatgagggcagtcagctggccactgggatcttgacccgggtcacccagaagtcggtcacggtggcctttgatgagtyccacgatttccagttgagcttggaccgagagaattcctacagactgttaaaacttgccaatgatgtcacttacaggcgactgaaaaagtaagtggatggg

SEQ ID NO: 325416 - DNA, 201 bp, Homo sapiens
gagccgaggcgtgtgtttgctgaagctgcaggtatccagccagcgcactgggctgtacggacggctgctggtcacctttgagcccaggcgatacgggtccrcggcagctcttcccagtaacagctttacttctggtgtgtgcgtattgacctagacagacattgaaatttactggcattcagaccgtgacttgtaccctcg

SEQ ID NO: 325417 - DNA, 201 bp, Homo sapiens
gagccagtctttgctctaatgtctgtgctcacatcttgtcctgtgtgcttacggtcagcacctgcaccctcggtgtcctaacctcggaggagtggcggcascagagagggtgctgggagccagtctttgctatgggcccgtggcatcgaggctgcttgcgtggctgcttgcatggcagcgtggggatgggccgcctgctgg

SEQ ID NO: 325418 - DNA, 201 bp, Homo sapiens
aatacctcctgtcacccctgctaaaactccatcccccaaagtagaaatcacaaataaggaaaggttacatcttttttttttttttttttttttttttaaaraatcttgctctgtcgcccaggctggagtgcagtggtgcaatctcggctcactgcaacctccgcctcctgggttcaagcaattctcctgcctcagcctccc

SEQ ID NO: 325419 - DNA, 201 bp, Homo sapiens
ttttgagatattaaagtaagttgaggttttgattatgggttgaaaaaattttttttaatctcttgaaaaatgtagaataatatgtgaagctcagtctctcyattcgtaagctcctacaacccaaatcctggggcgggcaagcgctttttcttccccaagatcaaatgcctgtgtgcagggcagggctggtccaatttctgg

SEQ ID NO: 325420 - DNA, 201 bp, Homo sapiens
gcccaggctggtctcaaactcctgggctcaagggatccccctgcctcagcctcctaaagtgctaggattacaggtggacccaccgcgcccggcctggctgsaggtttcaattgatcttcccaaagaaccagcttttgctttttctctattgtttttctgtttcatgtatttccacattgatctttatcgttttctgttttc

SEQ ID NO: 325421 - DNA, 201 bp, Homo sapiens
ctgccgaggaggtgaagccccctgcagcccagagctggcctttagcctccatgcacggagccgcggggtgtggtggtcgtggctgtggtttctgtgctgcygtggtgtgtgggctttcccatttgggatgagcattgttcccagaagcaggtttagtgaacgggctttgtgagacattctcagaaggcagaaagcaggtga

SEQ ID NO: 325422 - DNA, 201 bp, Homo sapiens
tggtttaggtcgtgtatttccacgtggcatcattttccttccacctgaaaggcatccatgatcatttcttgtagtgtgggtcagccggtgatgcagtccartagcttttgtatgtctgaaaatatcttgtttcacctgcagttttgaaagatatttttgctgcgtgagaattctagattaacacttttccttgcaatattt

SEQ ID NO: 325423 - DNA, 201 bp, Homo sapiens
gtgaagccccctgcagcccagagctggcctttagcctccatgcacggagccgcggggtgtggtggtcgtggctgtggtttctgtgctgctgtggtgtgtgrgctttcccatttgggatgagcattgttcccagaagcaggtttagtgaacgggctttgtgagacattctcagaaggcagaaagcaggtgaggcctggctag

SEQ ID NO: 325424 - DNA, 201 bp, Homo sapiens; identical to SEQ ID NO: 68456

SEQ ID NO: 325425 - DNA, 201 bp, Homo sapiens; identical to SEQ ID NO: 68457

SEQ ID NO: 325426 - DNA, 201 bp, Homo sapiens
aagttgtcctgggcaaaatgctcagaaccacaggggctggctgagcgcaaaaccattcttgcccttgggccatgtggagtccctgggtgggctctgccccrtttgccacatcctgcattgtgcccaccccgcaggagctggctaggcgtgcagtgggagttggccaggcatacgctggcagagcgtgtagcggtcttgggg

SEQ ID NO: 325427 - DNA, 201 bp, Homo sapiens
agaagcgggacgtcggcttctaggggcccaggccggcggcggcgatggcctcggcagctgtggagagcttcgtgaccaagcaactggacctgctggagctygagagagacgcggaggtggaggagcgcaggtacgggaggccgccggcgccgctccctcgcggtcggtcccgccgtgtcccgggcagagtctccgaggggc

SEQ ID NO: 325428 - DNA, 201 bp, Homo sapiens
tgaggagtacggcgcgagggtggtgcggacactgacggtgcagtaccgcatgcaccaggctatcatgcgctgggcctcagacaccatgtaccttgggcagytcacagcccactcttccgtggcaaggcacctcctgaggtgagtagctcggcaccacccgccgccccatccttctgccctggctaatcctctgcgtcacct

SEQ ID NO: 325429 - DNA, 201 bp, Homo sapiens
gggaggagctgagagcagttgttgatggccgtgaaaaaacggagccccacactgcaagaggctgagcagcatcgttttctccagggtgagcagaccgctcytgggtgagatgggcctggcagcattttacggccttctcctgaatggtggcccagctctgcctggctggtctggtgatgggaactgtcattgctcagctga

SEQ ID NO: 325430 - DNA, 201 bp, Homo sapiens
gggaagacacatgagctgctttttaattttttttagaattaatagagacggggtctcactctgtcactatgttgcccaggctagttttgaactcctggcckcaagcagtcctcctacctcagcctcccaaaatgctgggattacaggtgtgagccaccgtgcttagccatgaattgattttaaaaccttaaatgaggggcc

SEQ ID NO: 325431 - DNA, 201 bp, Homo sapiens
ccctcctgcgatcaaacagtggggaggggtggtgggttccgtctccaggaagcagaccctgggcagacttgttccagtcggaacagttagctccttacaakctccagataccttcagaaacagaaatcagacactgactcatgatcggttttcagcacatcagggcacaagcaaacaaaatgccttatttgctgagctgca

SEQ ID NO: 325432 - DNA, 201 bp, Homo sapiens
tgggcctggtgggggacctgggtaagagaccagcatacagtaccaggtgttgagtgctctgaggaagaaaacccagggccagggtggcagcagggtcaccyacccagatgcagcagtcagggtgggcttcctggaggaagtaacactggagctgagacctgtgggacagaaggtgggagctgggctgggaaggacagggcc

SEQ ID NO: 325433 - DNA, 201 bp, Homo sapiens
agagttgaggctgggcatgtcctggcgagctgcctggaggagtcaggcctgatctgaaggcagtggggtaccctctagggtgtcagcagggctgtgatgtyaccagtcttggctgcagtgtggattaggtaggcggaggctgggaggcagtgggaagtggccgcagggactgtgtggtcagtcagggtggtgccatttcct

SEQ ID NO: 325434 - DNA, 201 bp, Homo sapiens; identical to SEQ ID NO: 68427

SEQ ID NO: 325435 - DNA, 201 bp, Homo sapiens; identical to SEQ ID NO: 68430

SEQ ID NO: 325436 - DNA, 201 bp, Homo sapiens
ctgtggtgaccgaaaagttcaggggtagggctgaccttattgtgactggatccagggcccaaatgatgtcgtcaggggcccctctgcgtgttcgtctgccygccccaccttgccccgccctgcccggtgccccagccttctgcactggcttgtgttctggccagatttgctgggtgaccccggcagcctcaggctgacaca

SEQ ID NO: 325437 - DNA, 201 bp, Homo sapiens
actgtctgcaggatctgtcatgatataacctgtattattcctgatactggtttgtgtgctcttttttttcctgctcttctggctggagggttttttttttwaaatttagattttatatatacatacatatatattttaagagacagggtctctgccaggcgcagtggctcacacctgtaatcccagcattttgggatgcca

SEQ ID NO: 325438 - DNA, 201 bp, Homo sapiens
ggaagaaaacccagggccagggtggcagcagggtcacccacccagatgcagcagtcagggtgggcttcctggaggaagtaacactggagctgagacctgtrggacagaaggtgggagctgggctgggaaggacagggccgatggcgggtgggcaggcaggctatccacccttagaacatgcataaagccccaggcccagtc

SEQ ID NO: 325439 - DNA, 201 bp, Homo sapiens
ctctactaaaaatacaaaaattagctgagcatggtggcgggcacctgtattcccagccacttgggaggctgaggcaggagaatctcttgaacctgggaggtggaggttgcagtgagccatggtcactccactgcactccagcctcggtgacaaagcaagactccgtctcaaaaaaaaaaccaaacattttcctgggtgtct

SEQ ID NO: 325440 - DNA, 201 bp, Homo sapiens
ttgagacagggtttcatcatactggtcaggctggtcttgaattcctgacctcaggtgctctgcccgcctcggcctctcaaagtgctgggattacaggcgtragccaccatgcctggcctttgtttttgtttttttttttgagatggagtctcgctctgtcacccaggccggagtgtagtgctgctgtcttggctcactgca

SEQ ID NO: 325441 - DNA, 201 bp, Homo sapiens
ctaatttttgtatttttagtagagatggagtttcaccacattggccagtctggtctcactcctgacttcagttgatctgcctgcctcagcctcccaaagtrctacgattacaggcatgagccactgtgcccggcccagttacatttttaatggctgaaaaaggatcttttatcatcatctgcatcagcttgagtcattgtg

SEQ ID NO: 325442 - DNA, 201 bp, Homo sapiens
tctaccctggaggatgctgggcctggtgggggacctgggtaagagaccagcatacagtaccaggtgttgagtgctctgaggaagaaaacccagggccaggrtggcagcagggtcacccacccagatgcagcagtcagggtgggcttcctggaggaagtaacactggagctgagacctgtgggacagaaggtgggagctggg

SEQ ID NO: 325443 - DNA, 201 bp, Homo sapiens
ctgctcagacctgcaggggagcatacagatgggcaggctgtgggctctgacctcatggcagtgtctaggggtgaatgtttacagctctgtgagttacaggrtgctctcttagtttgccgtctataggtggcttatgttaaccaactcaattagatccccttccttgtcacaaggacagagggctttctgtatcctgggttc

SEQ ID NO: 325444 - DNA, 201 bp, Homo sapiens
gtaaaatacctcctgtcacccctgctaaaactccatcccccaaagtagaaatcacaaataaggaaaggttacatctttttttttttttttttttttttttwaaagaatcttgctctgtcgcccaggctggagtgcagtggtgcaatctcggctcactgcaacctccgcctcctgggttcaagcaattctcctgcctcagcc

SEQ ID NO: 325445 - DNA, 201 bp, Homo sapiens
cgcgccaccacgtcctgctaattttttgtatttttagtagagacagggtttcaccatgttggccaggatggtctcgatctcctgacctcgtggtctgcccrccttggcctcccaaagtgttgggattacaggcgtgagccaccgtgcccggccgcagtgtaggtttctgttactgtcattttccgtctaaggagatggaga

SEQ ID NO: 325446 - DNA, 201 bp, Homo sapiens
tgtgggttcttgctgggtgttggctggaggccgctcttagctgtttgcccttaggccttgccaacatggctgcttgcttcctaaaagccagcaagagacayagtctcctagcacaatgggttatcgtcttatgtaatgttatcaagggtgtcacatctcatcacctttcccctgttctgtggattagaagcaagtctcagg

SEQ ID NO: 325447 - DNA, 201 bp, Homo sapiens
ttggcctcccaaagtgttgggattacaggcgtaagccactgctcctggcctcaagtatctgttgattgccttttttcccctgaatattggccatattttcmtgactctctacgtgccttgtagttttttgttgaaaatggatgattttaaataatagaatgtagcaactctggaagtcaggttctcttcccaccccggggt

SEQ ID NO: 325448 - DNA, 201 bp, Homo sapiens
tttggggctgtgattcagccaaacccgccccttggttacttctgggtcagaatccaggggagagttgggtcctgaggtttggggcctgtcctcctcacttsctgtggttcacacctggactctggggctcaggcctgccttccccctttctccctcctgggcgcagggctgcgctggcaggactgtcactcagcctgatgg

SEQ ID NO: 325449 - DNA, 201 bp, Homo sapiens; identical to SEQ ID NO: 68437

SEQ ID NO: 325450 - DNA, 201 bp, Homo sapiens; identical to SEQ ID NO: 68438

SEQ ID NO: 325451 - DNA, 201 bp, Homo sapiens
acgggtgtgcccctgctcttggtggacaccgccggctgcgggctgtttgagctggaggaggaggacgaacagtcgaaagggaaccctggtgagcttgcttscagatggccagcttttttgtttaaacatacctccagctctttaaaaataaaaggcactttaattgcctaattccgggaggagctgagagcagttgttgat

SEQ ID NO: 325452 - DNA, 201 bp, Homo sapiens; identical to SEQ ID NO: 68439

SEQ ID NO: 325453 - DNA, 201 bp, Homo sapiens
tagagacaacatggtttcaccatgttggtcgggccggtcttgaactcctgacctcaggtgatctacctgcctcggcctcccaaagtgctgggattacaggmgtgagccaccgtgcccggtctgtgcactttttatgtcctttgctgttcttggagaacgtcatttttgggaggagtttgttgtctcatccagtcactgccc

SEQ ID NO: 325454 - DNA, 201 bp, Homo sapiens; identical to SEQ ID NO: 68440

SEQ ID NO: 325455 - DNA, 201 bp, Homo sapiens
tttctctttatccaaaaacaactgtccatgggactattgagccggtttctccatgatcctgccactgcgctccagcctgggccatagagcaatttgtttcaaaaaaaaaaaagaaagaaagaaaaatatagtggagctacagtgttcgggagacaactgtgagtccatttgaaacgggaagggttcccttgtccccctcgc

SEQ ID NO: 325456 - DNA, 201 bp, Homo sapiens
agccaaaagaaatgatcaaatgccagggacagggtgtggtattggcgtgcatgcgtgcccgtgaggagggcgaacgggaagcctttccccatggggctccygcaggctccgcttcccaggtcctggctgtttcacagcgtgaggccctctgctgagctgaagggcagggtcttgctgcgctggcatgggtgggtgaggaaa

SEQ ID NO: 325457 - DNA, 201 bp, Homo sapiens
gctgtgggaggcatttgtgtaatgatgctcttgggggatgagggcaccattggaagcatctcccggttgacacagcacacagggacaggtgttcttcctgygggggcgggggtgcctgcttaagctccccaacttcccagaatccaaacagctgataagagtcctgccctggggttgacacggatgctgaaagatgttggc

SEQ ID NO: 325458 - DNA, 201 bp, Homo sapiens
agttgaggtcaggagttcgagaccagcctggcccacatggtgaaaccccgtctctactaaaaatacaaaaattagctgagcatggtggcgggcacctgtawtcccagccacttgggaggctgaggcaggagaatctcttgaacctgggaggtggaggttgcagtgagccatggtcactccactgcactccagcctcggtga

SEQ ID NO: 325459 - DNA, 201 bp, Homo sapiens
taagccttttcctcgtgggaggggtcggttctgttgggtggggcctcagtgctgcactgtggccccctgatgtgctccctctctgcctgtgtgccagggamctcccaggtgtggctgccacagaagagacgggtgtgcccctgctcttggtggacaccgccggctgcgggctgtttgagctggaggaggaggacgaacagt

SEQ ID NO: 325460 - DNA, 201 bp, Homo sapiens
ttgctcagctgacaccaccatctccccagttccacgttgaacaggatgcacggccataggagtcaaaaggccttcattgctgatgtgaaattcaagttagytgggcatggctggtcctggggccctgggacacagatgattagctcccaggaagccacctgagtggaggatcagctggccatgatagacagaaacgtgccc

SEQ ID NO: 325461 - DNA, 201 bp, Homo sapiens
gaaacctgcttctcactcccctctggccttttgtaggtgaagttggttttcttgctgaggaccggaggatcaacgtggctgtcacccgtgcccgacgccaygtggcggtcatctgtgactcccgtactgtcaacaaccatgcatttttgaagaccctggtggagtatttcacacagcatggggaagtacgcacggcctttg

SEQ ID NO: 325462 - DNA, 201 bp, Homo sapiens
tcagtgtcctgctgctcagacctgcaggggagcatacagatgggcaggctgtgggctctgacctcatggcagtgtctaggggtgaatgtttacagctctgkgagttacagggtgctctcttagtttgccgtctataggtggcttatgttaaccaactcaattagatccccttccttgtcacaaggacagagggctttctgt

SEQ ID NO: 325463 - DNA, 201 bp, Homo sapiens
taagtaccatcttccttcaacacagctaatccattcttacatgcctgtcgcacaaaagagagcaacaagtcatggtgtgggtgtggccctcatgggagttkgtggcagcattggggcagaggctcgggcactgaattgcaggtgttctaattttagttttctcccttggcagagccctgattgctctaaagaagtatcatt

SEQ ID NO: 325464 - DNA, 201 bp, Homo sapiens
gggttgaaaaaattttttttaatctcttgaaaaatgtagaataatatgtgaagctcagtctctctattcgtaagctcctacaacccaaatcctggggcggrcaagcgctttttcttccccaagatcaaatgcctgtgtgcagggcagggctggtccaatttctggtctcctctgagttaaaaacgtggtctctttccagga

SEQ ID NO: 325465 - DNA, 201 bp, Homo sapiens
ggttacttctgggtcagaatccaggggagagttgggtcctgaggtttggggcctgtcctcctcacttgctgtggttcacacctggactctggggctcaggmctgccttccccctttctccctcctgggcgcagggctgcgctggcaggactgtcactcagcctgatggaacgcctggctgaggagtacggcgcgagggtgg

SEQ ID NO: 325466 - DNA, 201 bp, Homo sapiens
taacacctgcggctttgccaagtgcacagccggcgtcacaaccctgggccagttctgccagctctgcagccgccgctactgcctcagccaccacctgcccraggtatgtcggcctcccctcctgcgatcaaacagtggggaggggtggtgggttccgtctccaggaagcagaccctgggcagacttgttccagtcggaaca

SEQ ID NO: 325467 - DNA, 201 bp, Homo sapiens
caggctatcatgcgctgggcctcagacaccatgtaccttgggcagctcacagcccactcttccgtggcaaggcacctcctgaggtgagtagctcggcaccrcccgccgccccatccttctgccctggctaatcctctgcgtcacctgtttctacgcagcaagctaaagtgaagctttctgcatgaaagtcgactctgaggc

SEQ ID NO: 325468 - DNA, 201 bp, Homo sapiens
gagatgggcctggcagcattttacggccttctcctgaatggtggcccagctctgcctggctggtctggtgatgggaactgtcattgctcagctgacaccascatctccccagttccacgttgaacaggatgcacggccataggagtcaaaaggccttcattgctgatgtgaaattcaagttagctgggcatggctggtcct

SEQ ID NO: 325469 - DNA, 201 bp, Homo sapiens
cggctgtcataagccaaaagaaatgatcaaatgccagggacagggtgtggtattggcgtgcatgcgtgcccgtgaggagggcgaacgggaagcctttcccyatggggctcctgcaggctccgcttcccaggtcctggctgtttcacagcgtgaggccctctgctgagctgaagggcagggtcttgctgcgctggcatgggt

SEQ ID NO: 325470 - DNA, 201 bp, Homo sapiens
agtcctttggggacagcacagaagtgaatttattgattgaggggcatattgggtgtctgctgggtgccacactggtttctggcagtgtgctcatggtgcascttctgtccttagtaagttcacgtcaggcaaagcacaggcaagagagtctgcagaggctcagaggcgtgagtgtgctgtcagggagcaggtggctggggt

SEQ ID NO: 325471 - DNA, 201 bp, Homo sapiens; identical to SEQ ID NO: 68453

SEQ ID NO: 325472 - DNA, 201 bp, Homo sapiens
tgctatctcatttgccttttggttttttagaagtgttatatagtttctagatagttgggaaatgtccagatatctttctgttgttgatctctcctctcctctcccctcccctccccgtccccgtccccgtcctgtgtgggatctcactgtgttgctcctctcctctcctctcttcttctctcctctcctcatccctgtccc

SEQ ID NO: 325473 - DNA, 201 bp, Homo sapiens; identical to SEQ ID NO: 68454

SEQ ID NO: 325474 - DNA, 201 bp, Homo sapiens
tgacctcaagtgatctgcctgcctcggcctcccagagtgctgggattggtgtgagccaccacgcccagtctcctataatattcttgtgcttggttttgggaagcagtaaagttacttgtaaacagtttaatccttttgagtcttgcttttgagatgtgttagggtctggatcagtgcttagtccagggttaatattcccct

SEQ ID NO: 325475 - DNA, 201 bp, Homo sapiens
ggttctttttttttttttttttttttgagacagcatctcactctgttgcccaggctgtagtgcagtggcacaatcttgattcactgcagcctcctcctccygggttcaagtgattcttgtgcctcagcctcctgagtagctgggattgcaggcgcatgccaccaggcccagctaattttttttgtatattttgtagagact

SEQ ID NO: 325476 - DNA, 201 bp, Homo sapiens
ccctctagggtgtcagcagggctgtgatgtcaccagtcttggctgcagtgtggattaggtaggcggaggctgggaggcagtgggaagtggccgcagggacygtgtggtcagtcagggtggtgccatttcctgtgtgcacactcgggggctcccgccacaccagggtgcagaccaccccgccgctctcccgccaggcagcct

SEQ ID NO: 325477 - DNA, 201 bp, Homo sapiens
ctaggattacaggagtgagccaccacacctggctagattctaattggctttgtagttattgctttatccagttgtgttttaaatcagacaggagaaaaaargggtcacaagcagaaaatacatttatggggtcttttatatctacccatgtagttgcctttatttcttcatgtagatttgagttactctctccaaaggact

SEQ ID NO: 325478 - DNA, 201 bp, Homo sapiens
gccgcagggactgtgtggtcagtcagggtggtgccatttcctgtgtgcacactcgggggctcccgccacaccagggtgcagaccaccccgccgctctcccrccaggcagcctgcagggtgaaggactgacatggcgggaggagtggccttctctgttggggcgcctgtggccccccagctctttgatgggcagagctgcag

SEQ ID NO: 325479 - DNA, 201 bp, Homo sapiens
ccgccgctctcccgccaggcagcctgcagggtgaaggactgacatggcgggaggagtggccttctctgttggggcgcctgtggccccccagctctttgatrggcagagctgcaggatctgcctccttgcccctgtgagcccagcagtgattcttgtgtcctccccagatccatggctgcggtgagagggctcgcgcccatg

SEQ ID NO: 325480 - DNA, 201 bp, Homo sapiens
gtgtgcacctgtaatcccagctactcaggaggctgaggcaggagaatcgcttgaacctgggaggcagaggttgtagtgagcccagatcatgccactgcackccagcctgggcgacagagggagaccctgtctcaaaaaaacaaaacaaaacaaaacaaaactttatatagcctggatagaagtcttttatcagatgtatga

SEQ ID NO: 325481 - DNA, 201 bp, Homo sapiens
cactgtccccttccactcaggactctgtctgcctcccgctgccattcatggccctggggcttggctccaatcccactctgagatccgagtgggtgctgggmgctgagagaggccaggcagtggaagcagacacccatgaccctgcagggatggtgtgggggttgtccttcctggggcgcctgagggtgcaggctgcagagt

SEQ ID NO: 325482 - DNA, 201 bp, Homo sapiens
agctgcctgctgtagacggtatgtaaatcaatgggtgtggctgtgctccagtaaaactcaccaaaaccggcagctgactggatgtggcccacagtttgcckattcctgttcaaggagaaaccttgtgaaaataaagcagacttaattttgtgttgattgggttgcccctggggaggtccggcgtgttcctgacaggcatca

SEQ ID NO: 325483 - DNA, 201 bp, Homo sapiens
ttactctagagcaggggtttttcctgtaaagggatggattgtgaatgttttgactctgtgggccatatcatacgtaccgtctacagctgcctgctgtagayggtatgtaaatcaatgggtgtggctgtgctccagtaaaactcaccaaaaccggcagctgactggatgtggcccacagtttgccgattcctgttcaaggag

SEQ ID NO: 325484 - DNA, 201 bp, Homo sapiens
agatgctgccatggccgccgccatcttcccgcagcctcggccggaaacggaaacgacgcgaaccgcgtgcgtaacgcacgggcccggcggggaacaccggyccgctgtaacaccggcccggcgcagaagcgggacgtcggcttctaggggcccaggccggcggcggcgatggcctcggcagctgtggagagcttcgtgacc

SEQ ID NO: 325485 - DNA, 201 bp, Homo sapiens
ggtggctttggccaagcctcatgcaagggttaccccacagctattttctatcatactgtgctaggcaagccagtgttgtgttagcttcaaacacacaggaygactttgtagcactctttcagcatgcagtccctcaagatgtgttgtttttaaatactcattttctttctgcattttcctttggaaattctaaatgcagtc

SEQ ID NO: 325486 - DNA, 201 bp, Homo sapiens
ccctgcttggccacctcccgagttgtcagtctcatcacttcctgggcagcgcgttccgtttggggacccttaagaagcactttgatttcccgacccgagaycccccactaagcttacactcctgggccctggccccgaccccagttccacccgcagcgagttagcagccctttcccttattcattcagtaaacatggtttg

SEQ ID NO: 325487 - DNA, 201 bp, Homo sapiens; identical to SEQ ID NO: 68429

SEQ ID NO: 325488 - DNA, 201 bp, Homo sapiens
cttccaggtcctggcaggagaacatctctctgaaagagctccagagccgaggcgtgtgtttgctgaagctgcaggtatccagccagcgcactgggctgtayggacggctgctggtcacctttgagcccaggcgatacgggtccgcggcagctcttcccagtaacagctttacttctggtgtgtgcgtattgacctagacag

SEQ ID NO: 325489 - DNA, 201 bp, Homo sapiens
tgatattgaagctttccccagtgtcttgtgtcactgagtctttgtttttgcaggtgatatcgtgggcctgtacgatgctgctaatgagggcagtcagctgkccactgggatcttgacccgggtcacccagaagtcggtcacggtggcctttgatgagtcccacgatttccagttgagcttggaccgagagaattcctacag

SEQ ID NO: 325490 - DNA, 201 bp, Homo sapiens
caacacagctcgcccccgccctgtgccgagcaggccaagggtgggccaagggcgggcctagggcaggcctgctctgtttaccttggtttgtttggagctgccccagagggatcccagagtgggctgaagggcaccacgctgctttgggaggttttaggcccacgttatagccctggcacttaaaaggaattgtggtcacca

SEQ ID NO: 325491 - DNA, 201 bp, Homo sapiens; identical to SEQ ID NO: 68443

SEQ ID NO: 325492 - DNA, 201 bp, Homo sapiens; identical to SEQ ID NO: 68444

SEQ ID NO: 325493 - DNA, 201 bp, Homo sapiens
ccggcagctgactggatgtggcccacagtttgccgattcctgttcaaggagaaaccttgtgaaaataaagcagacttaattttgtgttgattgggttgccyctggggaggtccggcgtgttcctgacaggcatcactcatcccccggggcacacactctctgaggaggaacacccacagagctccccagagcacctgagcc

SEQ ID NO: 325494 - DNA, 201 bp, Homo sapiens
ctcccggctccctgtttccaccaggtgcgtctgccgatggccccctgaagttgctgcccgagagctacttcgacgtggtggtcattgacgagtgtgcccargccctcgaggcgagctgctggatccccctgctgaaggccagaaagtgcatcctggcgggcgatcacaagcagctgccccccaccacagtctctcacaagt

SEQ ID NO: 325495 - DNA, 201 bp, Homo sapiens
gagactctgcctcctctgctggttgccacctcctcttttttttttcctcagagatggggtctcactatgttgtccagggtggtcttaaactcctgacctcscaccttggcctcccaaagtgctgggattacaggcatgagccaccgtacttggccagcgtctcacttttaatagtggagctgtggctgggtgcagcggctc

SEQ ID NO: 325496 - DNA, 201 bp, Homo sapiens
cttccatcacgtctcctttgctcactcttcaaggccccagctgctcactgttttggtcaccttgtctctactcgcttcactgtgtgtctttctctcctaaygcgtgagtctgtacttgaacatagcattggaggggtggtttcatgtaggtaggtagaatggagtaagtcccactgcttttgtaaaaactttcctgcctac

SEQ ID NO: 325497 - DNA, 201 bp, Homo sapiens
ggtcggacccaggcacatacgtggcgagaccgcagggagcagcgctcgctctgcgtcctcccttcctcccatatcccaggtctcacctgctccgggccccraaggtctcaggatgctgtggctgcacgcggacgccagccgccctaaggtgaccgtcagggaagatgctgccatggccgccgccatcttcccgcagcctcg

SEQ ID NO: 325498 - DNA, 201 bp, Homo sapiens
ggctgaaaaaggatcttttatcatcatctgcatcagcttgagtcattgtggatcttggcacatggagagtttttttttttttaatttatttatttattttyaattatactttaagttctagagctttttgaaaaaactttctggtttataaaaatgttggataatgatgagaattggaataatggccagttttgtagtttg

SEQ ID NO: 325499 - DNA, 201 bp, Homo sapiens
ttttgtatttttagtagagatggagtttcaccacattggccagtctggtctcactcctgacttcagttgatctgcctgcctcagcctcccaaagtgctackattacaggcatgagccactgtgcccggcccagttacatttttaatggctgaaaaaggatcttttatcatcatctgcatcagcttgagtcattgtggatct

SEQ ID NO: 325500 - DNA, 201 bp, Homo sapiens; identical to SEQ ID NO: 68461

SEQ ID NO: 325501 - DNA, 201 bp, Homo sapiens; identical to SEQ ID NO: 68463

SEQ ID NO: 325502 - DNA, 201 bp, Homo sapiens; identical to SEQ ID NO: 68464

SEQ ID NO: 325503 - DNA, 201 bp, Homo sapiens
caagtaggggaagtggggcgtcagattgggggtctgggggatccggtcgtgggggtgtctgggacgtcaggcggggggcctgaggggcgtcaggtgggggsgtctgggaggcgtcaggcgggggtcggtctatgggggcagcaagcagggtgtttgtgcagcggcaggtgatgggagttgccgagtccacagcgctgtaga

SEQ ID NO: 325504 - DNA, 201 bp, Homo sapiens
ttccctcagaagctcagaagtgaagtgaattaagcctgatgagtttttttgtcaccattattagcaatatttgtttgtattatgtgctaaataattaatayatagaataactggaatttaaagagaaaattaaaatgatttctgtattataaatacaggaaatacagctatatagctgatgatacttttcataataacttc

SEQ ID NO: 325505 - DNA, 201 bp, Homo sapiens; identical to SEQ ID NO: 68466

SEQ ID NO: 325506 - DNA, 201 bp, Homo sapiens
atctttgtaagatctttacattaaatatttagttgaatcttatcttttacttaaagttattctctttttgctttactagttaaacgagaagattcatcacygctttgatggctgcctcacaaacttcacaaactgttgcatctcacgttccttttgcagatttgtgttcaactttagaacgaatacagaaaagtaaaggac

SEQ ID NO: 325507 - DNA, 201 bp, Homo sapiens; identical to SEQ ID NO: 68469

SEQ ID NO: 325508 - DNA, 201 bp, Homo sapiens; identical to SEQ ID NO: 68471

SEQ ID NO: 325509 - DNA, 201 bp, Homo sapiens
ttgaatcttatcttttacttaaagttattctctttttgctttactagttaaacgagaagattcatcaccgctttgatggctgcctcacaaacttcacaaaytgttgcatctcacgttccttttgcagatttgtgttcaactttagaacgaatacagaaaagtaaaggacgtgcagaaaaaatcagacacttcagggaattt

SEQ ID NO: 325510 - DNA, 201 bp, Homo sapiens; identical to SEQ ID NO: 68475

SEQ ID NO: 325511 - DNA, 201 bp, Homo sapiens; identical to SEQ ID NO: 68476

SEQ ID NO: 325512 - DNA, 201 bp, Homo sapiens; identical to SEQ ID NO: 68477

SEQ ID NO: 325513 - DNA, 201 bp, Homo sapiens
cacaaatagctgctatcaaggtgttggagacaccacagaatgaattatctatttccctaatggttacccacatgccatcaataatgaaaaagtgtgtattmatagtcctatgggacaaatgaacagtaactgcctatggagatgctggataataactggatggttcagacagcatctttaactaggatttaaatctgtatg

SEQ ID NO: 325514 - DNA, 201 bp, Homo sapiens; identical to SEQ ID NO: 68481

SEQ ID NO: 325515 - DNA, 201 bp, Homo sapiens; identical to SEQ ID NO: 68482

SEQ ID NO: 325516 - DNA, 201 bp, Homo sapiens; identical to SEQ ID NO: 68460

SEQ ID NO: 325517 - DNA, 201 bp, Homo sapiens; identical to SEQ ID NO: 68462

SEQ ID NO: 325518 - DNA, 201 bp, Homo sapiens
tttacattaaatatttagttgaatcttatcttttacttaaagttattctctttttgctttactagttaaacgagaagattcatcaccgctttgatggctgyctcacaaacttcacaaactgttgcatctcacgttccttttgcagatttgtgttcaactttagaacgaatacagaaaagtaaaggacgtgcagaaaaaatc

SEQ ID NO: 325519 - DNA, 201 bp, Homo sapiens
gatctttgtaagatctttacattaaatatttagttgaatcttatcttttacttaaagttattctctttttgctttactagttaaacgagaagattcatcamcgctttgatggctgcctcacaaacttcacaaactgttgcatctcacgttccttttgcagatttgtgttcaactttagaacgaatacagaaaagtaaagga

SEQ ID NO: 325520 - DNA, 201 bp, Homo sapiens
ttagagcattgatcttttttttagtaaacattaataaacatttattatgatctcagtgatctttgtaagatctttacattaaatatttagttgaatcttaycttttacttaaagttattctctttttgctttactagttaaacgagaagattcatcaccgctttgatggctgcctcacaaacttcacaaactgttgcatct

SEQ ID NO: 325521 - DNA, 201 bp, Homo sapiens
gcaggtgatgggagttgccgagtccacagcgctgtagactgcgccgcattagaagcctggcctcctgatgctgtgctcttcatctagacccaagccccagrtcgtgggacgatttctcccgtttttgactccctggaactgtattgcctgctttacctgcgtacatgttgattctttctcatggcaaccccgcaggaaacc

SEQ ID NO: 325522 - DNA, 201 bp, Homo sapiens
gcgtcaggtgggggggtctgggaggcgtcaggcgggggtcggtctatgggggcagcaagcagggtgtttgtgcagcggcaggtgatgggagttgccgagtycacagcgctgtagactgcgccgcattagaagcctggcctcctgatgctgtgctcttcatctagacccaagccccaggtcgtgggacgatttctcccgttt

SEQ ID NO: 325523 - DNA, 201 bp, Homo sapiens; identical to SEQ ID NO: 68470

SEQ ID NO: 325524 - DNA, 201 bp, Homo sapiens; identical to SEQ ID NO: 68472

SEQ ID NO: 325525 - DNA, 201 bp, Homo sapiens
ctgaggtcctttccaactttaacattgtggtacatccaagaaccatttactggcaaccttgaattaatttatgaatgcaccttttatatttatttatttayctgcctacttgagatgggggtcttggtctgtcctccaggctggagtgcagtggtgaaatcatggctcactaaagcctcaacctcctgggcacaaacgatc

SEQ ID NO: 325526 - DNA, 201 bp, Homo sapiens; identical to SEQ ID NO: 68474

SEQ ID NO: 325527 - DNA, 201 bp, Homo sapiens
atgaaaggccttccctcagaagctcagaagtgaagtgaattaagcctgatgagtttttttgtcaccattattagcaatatttgtttgtattatgtgctaartaattaatacatagaataactggaatttaaagagaaaattaaaatgatttctgtattataaatacaggaaatacagctatatagctgatgatacttttca

SEQ ID NO: 325528 - DNA, 201 bp, Homo sapiens
atctgaacacaggaagtaatcagagcaatgcactctttctctgttaaaaccaaactcaggtagtagatcctctagaaagctttccttggacccctattccytcctgccacccattccacattctgtagtttgtgcaaacttacgtggcagaagttactattacagcgtaattaacctgcttacacaggctgtgagttcctc

SEQ ID NO: 325529 - DNA, 201 bp, Homo sapiens; identical to SEQ ID NO: 68478

SEQ ID NO: 325530 - DNA, 201 bp, Homo sapiens; identical to SEQ ID NO: 68479

SEQ ID NO: 325531 - DNA, 201 bp, Homo sapiens
agggggaacgggcagaggaatgatgtagactccttagggattttccattttccgagagggtacagggggcattggagcgggagagactttaggcttggagrgaattactttatttctcttcttacacttggtctttcattaacttttgggatcccaaagcccttctagcgtctttgtctgctcatttctttttgctgagat

SEQ ID NO: 325532 - DNA, 201 bp, Homo sapiens; identical to SEQ ID NO: 68480

SEQ ID NO: 325533 - DNA, 201 bp, Homo sapiens
ccggggtgtaggccccgcctgaccctacagtcacggagccccgggcccctcatcgttcccatttccgggtggcacccgtggcgtggccacacggtgaccaygtggcgaatgagtgactcaggctggagtcccagctgtgggcttcatggcctcatggccctgtgagatgggtggtgctgggcccatttttcagatgagaaa

SEQ ID NO: 325534 - DNA, 201 bp, Homo sapiens
tttgcctcctcgtcttcttggagcgtcacaggggtccgggaagctggattgcgcaaatgagtgtggaggcaaaacagccctgcagttcccctgagtgtgcrggtgctaccagcccgggtgtgccttctgggtgggaggggacggtggccggcgcggcctggagaggagatatctagagttggctgaggaaggcagatctga

SEQ ID NO: 325535 - DNA, 201 bp, Homo sapiens
gaactgccggcttttgcctcctcgtcttcttggagcgtcacaggggtccgggaagctggattgcgcaaatgagtgtggaggcaaaacagccctgcagttcycctgagtgtgcgggtgctaccagcccgggtgtgccttctgggtgggaggggacggtggccggcgcggcctggagaggagatatctagagttggctgagga

SEQ ID NO: 325536 - DNA, 201 bp, Homo sapiens
ccccaccgtctacaccgtagttctgagcgtgtgagggacagtgatgggactagaacctctgaggcagccttcgttcccaccgggcttggggctgagaccayggaccccttccaggcagggggtgtcccctgagcccttccctgtgtgcgcagttacggtggagctgcaggggacgtttcctcaccaggggccgatgccctg

SEQ ID NO: 325537 - DNA, 201 bp, Homo sapiens
gcgctgggtcacggccggccggctccccacccacacccccaggctccctcctgtccccagggagaggcagagccagaagactcaggcccaggcctctgccrcccccgctgcctgcctggcgctggccagaggtctcagggctatgccgcctaagtacgtcggggcgggtggctctgcgcagaggctcagggtcccggccac

SEQ ID NO: 325538 - DNA, 201 bp, Homo sapiens
gcagggaagagtgccataatctcctcctaaaccggacagggccctgcccccctggctagctgcagacccaatatggggacaggtgtgaaccaggcaaacaygtgctagctcaggagggcttcctagaggagatgagtaaaaatttgcaggatgagcttatggaactctgggccaaccagagcaggacacatatcccaggtc

SEQ ID NO: 325539 - DNA, 201 bp, Homo sapiens
tgtcctcgggacctggggcctctgatggtgcttggatgggaccctcctgccgccctcacctctccagggcagcacccaggctcaggcctgtggagtagtgscttccgggacactggctactaacagcaggtgctttgttcctgctttggtccctgaagagaagggagggccagagggcagggcagtctggaggagaggcct

SEQ ID NO: 325540 - DNA, 201 bp, Homo sapiens
gctgggtgggccctggatgtggatttggaagtgggcgccttcccatgctcctagcatccgagttccagaggctctgggttttcctctgttgctggggagayggaggcagggcagccgtccaggtgggtgagccgggcccgggactctgtccgcttcaggggctccctcccctgtgtctcccggtctcctgccccgtgccag

SEQ ID NO: 325541 - DNA, 201 bp, Homo sapiens
tccgggccgggtgacccagggcgggaagggggggccgtgtcggggcggggttggggacagtggcggggcggggcctggtgaggggaccgtgtcggggcgtkgttggggacagtgtcggggcggggcgccgcacctagcccttccctgccgcgcgctcctcccccacgccgcgccccgccccgcccagccccgccgccctcg

SEQ ID NO: 325542 - DNA, 201 bp, Homo sapiens
ggcgcccactctctcctccgctggccccctcttccagctagccagaccctcgccaggcacaaacagctggggccacagcctgggggcacagggggggtgasgctgtccagagctcttggtgcaggaatcgagtggatcctgctgggcatctgcccgaggctccgggaaggatggctccagctacgggtggccgtttctcct

SEQ ID NO: 325543 - DNA, 201 bp, Homo sapiens
cccgcgccgccccagcacgactctgccagctccgaagcagggttccgaggggggctcaggcctgttctggcttccctgctgtgtggccttggggaagtcasttaactttgctgaaccttgaacctcgcattcctcatctgaagaggggggttatgatcgtacctaccctggggggttactgtcagaacaaaaggaggtgac

SEQ ID NO: 325544 - DNA, 201 bp, Homo sapiens
tgtccgcttcaggggctccctcccctgtgtctcccggtctcctgccccgtgccaggagggcccctccccagcctcctccacaccccacccccaggccttcscgccccagcctcggctgcgggatctgtgggacccgtgttcatggtggcctcccctgcagcatcatcggctggttcgtgcgaagcttcaagtacttttacg

SEQ ID NO: 325545 - DNA, 201 bp, Homo sapiens
cagaaagctctgaactatgtacgggacaccgcgggggaagtgcggtggcctcacgtggctggtgcagatggccctttgtccccttgaggacatcaacttcractttcttccacccccagggtatacctttctcccccagccacactgtgggctgcagagttctagagagccacagcctcccgctggcctggggcagcctcc

SEQ ID NO: 325546 - DNA, 201 bp, Homo sapiens
gagcaagctcccagccctgctgaggggttgaggggactgcggagcccgggggagggagggagcctcaggatgagctcctagagtcctactgggggcccgcrccgccccagcacgactctgccagctccgaagcagggttccgaggggggctcaggcctgttctggcttccctgctgtgtggccttggggaagtcacttaac

SEQ ID NO: 325547 - DNA, 201 bp, Homo sapiens
ccagggccccccagggtagagccagcctcacctgactggcaagtgtcaccccgccatcctgcagggcagcggcagcggccaggctggacacagctccctcygttccggcatggcggctggcatattgctgtgggcgggggaggctggtcaccagctcagttgggtccccagcaccctgtgggggcagctgctagggagtgg

SEQ ID NO: 325548 - DNA, 201 bp, Homo sapiens
agtgccccccaccatgcctaacagccacacggcaatgtccactgcctgcccgcctccccaggccaggcacagccagggctgtttacctgtcgggttggggsccaccctggggggccctcccttgggcacacagagtgtaccgtctgcagacaggctgtgcccctcccaacactggcaccagtaactgccggcggtgttgac

SEQ ID NO: 325549 - DNA, 201 bp, Homo sapiens
cagggccccccagggtagagccagcctcacctgactggcaagtgtcaccccgccatcctgcagggcagcggcagcggccaggctggacacagctccctccrttccggcatggcggctggcatattgctgtgggcgggggaggctggtcaccagctcagttgggtccccagcaccctgtgggggcagctgctagggagtggg

SEQ ID NO: 325550 - DNA, 201 bp, Homo sapiens
gccaccctggggggccctcccttgggcacacagagtgtaccgtctgcagacaggctgtgcccctcccaacactggcaccagtaactgccggcggtgttgaygcagcgctggggacagccgcccctcctagcactgcattcatccacatctgcaggaaacggggtgtcaggcggccatgcctgcgggaggggtcctgcccac

SEQ ID NO: 325551 - DNA, 201 bp, Homo sapiens
accatgcctaacagccacacggcaatgtccactgcctgcccgcctccccaggccaggcacagccagggctgtttacctgtcgggttgggggccaccctggrgggccctcccttgggcacacagagtgtaccgtctgcagacaggctgtgcccctcccaacactggcaccagtaactgccggcggtgttgacgcagcgctgg

SEQ ID NO: 325552 - DNA, 201 bp, Homo sapiens
ggccctgacctagaaccgcctcccagctgcctgagccaggtgctggtgggattgggggcttaggcacattgaggggccttttgcttcgatttactttggayttttttttttattttttgagacaaggtctcgctctgttgcccaggttggtcttaaacccctgagctcaagtgatccgtctgcctcagcctcccaaagtgc

SEQ ID NO: 325553 - DNA, 201 bp, Homo sapiens
caccctggactgcagcctctgcacttcttccttcattgcactgtccactcctgcgggcagagccaggcgctgggtcacggccggccggctccccacccacrcccccaggctccctcctgtccccagggagaggcagagccagaagactcaggcccaggcctctgccgcccccgctgcctgcctggcgctggccagaggtct

SEQ ID NO: 325554 - DNA, 201 bp, Homo sapiens
aagtgatccgtctgcctcagcctcccaaagtgctggggtcacaggcatgagccaccgtgcccggccccacccattttggattcttccccccctcccccccrccccctagtcatccccatcacagccactgttggtggaggtcctgccctggcccgatggtgccccgggtgtctccgcctcatagaatgtaagcctgcacac

SEQ ID NO: 325555 - DNA, 201 bp, Homo sapiens
atgaaaaccccgcagccgtcagcagccacctctcagcctctcagaggcacagcagtgcagctctcagacctcccggctgcggggtgtgcagttccggctcyaagcgtggaaagaggtcaagccaggccctccaagctgattccagatgaagcccatatggatctggaaggagactgggctggaaaatgctctcctgggttt

SEQ ID NO: 325556 - DNA, 201 bp, Homo sapiens
tgggcttcagggcatgggcagtgggtctggacaagccaggcttttggtgtagtatcaggccagaccagagctcagggtgggtggagctcattgtaagcagygcctccagactctggacttcctggtccccagcctccaggggtgcagtgcatcctagggtgtctgggagaggccagggtatagccattcccccagcacctg

SEQ ID NO: 325557 - DNA, 201 bp, Homo sapiens
ccccgggctagggctgcctccctcactggcttcctgagatggagaggactgggagagaggcgtgggcagggaagagtgccataatctcctcctaaaccggrcagggccctgcccccctggctagctgcagacccaatatggggacaggtgtgaaccaggcaaacacgtgctagctcaggagggcttcctagaggagatgag

SEQ ID NO: 325558 - DNA, 201 bp, Homo sapiens
agcccctctaggcccactgggcccagacccgggaggagggctctggagggtgggggcactcacaggaccccagctgctcctccaggaaggaaatctgctcrctcagggagtcgatgcggccgagctgctggaaggagtgcaccaggaggctgccggggtccgggagcccatgctccagtgcctgcgaggccaggctgtgca

SEQ ID NO: 325559 - DNA, 201 bp, Homo sapiens
ggtccagcccacaagctgcatcaggctctctgggagaggaggggcctggagggccaggagtcccagactcacgcaccctgggccacagggagccgggaatyggggcctgctgctcctgctggcctggaagactctgtggggtcagcactgtactccgttgctgtttttttataaacacactcttggaagtggctggggagc

SEQ ID NO: 325560 - DNA, 201 bp, Homo sapiens
tggagggccaggagtcccagactcacgcaccctgggccacagggagccgggaatcggggcctgctgctcctgctggcctggaagactctgtggggtcagcmctgtactccgttgctgtttttttataaacacactcttggaagtggctggggagctgtggtcactcacagggcgggcaggtgaccagggcggtggaggcga

SEQ ID NO: 325561 - DNA, 201 bp, Homo sapiens
cccatccaggaaccgcttgtaaagtgagtctagactttcccaccagctttcagaaagctctgaactatgtacgggacaccgcgggggaagtgcggtggccwcacgtggctggtgcagatggccctttgtccccttgaggacatcaacttcgactttcttccacccccagggtatacctttctcccccagccacactgtggg

SEQ ID NO: 325562 - DNA, 201 bp, Homo sapiens
acagagtgagaccctgtctcaaaaataaaaaagtaaataaaagatggaactggccaatgtcactaccagagggaaccaatgtccctttcagatgtggcccragcctcctgcaggcagctagctttggaattgcaggtgtgtcttggctgctgctagaaatcatacacatgtccttcacaggagatgagtgtggacctgtcc

SEQ ID NO: 325563 - DNA, 201 bp, Homo sapiens
ctcccccgggctagggctgcctccctcactggcttcctgagatggagaggactgggagagaggcgtgggcagggaagagtgccataatctcctcctaaacyggacagggccctgcccccctggctagctgcagacccaatatggggacaggtgtgaaccaggcaaacacgtgctagctcaggagggcttcctagaggagat

SEQ ID NO: 325564 - DNA, 201 bp, Homo sapiens
aaaagactgaggcagcacctgggctttccctcagcaggagcccactgctccgatgccaccagaagggcccagtctgggctcagcctcacttagttttgggygctgggctgctccctgggcctcctgccttgctgggcaaagctggcacaagtcacccgcctggcagtggccagcagggctccctgagctccaggcttccgg

SEQ ID NO: 325565 - DNA, 201 bp, Homo sapiens
agggccctgcccccctggctagctgcagacccaatatggggacaggtgtgaaccaggcaaacacgtgctagctcaggagggcttcctagaggagatgagtmaaaatttgcaggatgagcttatggaactctgggccaaccagagcaggacacatatcccaggtcccaggggcaggacagccacaaggacccatggcagcag

SEQ ID NO: 325566 - DNA, 201 bp, Homo sapiens
ctgtctcccaggcctcatggaggtccttccggagcgctgcgtgcagatcgccaagcgggagctgctcttcctggggcccgtgggcctcatcatgtacctcrggggcgtcttcttcatcaaccggcagcgctctagcactgccatgacagtgatggccgacctgggcgagcgcatggtcagggagaacgtgagtgtgcaggg

SEQ ID NO: 325567 - DNA, 201 bp, Homo sapiens
gagaggcgaggccagggcagcaggctgaggtgggccccagctccccacaggccactgaggtctgttgcttcccccacaggaacagtcacagtgcaggtgcyggaagccatccccaccagcggcctcactgcggcggacgtccctgcgctcgtggacacctgccaccgggccatgaggaccaccttcctccacatctccaag

SEQ ID NO: 325568 - DNA, 201 bp, Homo sapiens
gccccagctccccacaggccactgaggtctgttgcttcccccacaggaacagtcacagtgcaggtgctggaagccatccccaccagcggcctcactgcggyggacgtccctgcgctcgtggacacctgccaccgggccatgaggaccaccttcctccacatctccaagaccccccaggagaacggggccactgcggggtct

SEQ ID NO: 325569 - DNA, 201 bp, Homo sapiens; identical to SEQ ID NO: 68547

SEQ ID NO: 325570 - DNA, 201 bp, Homo sapiens; identical to SEQ ID NO: 68535

SEQ ID NO: 325571 - DNA, 201 bp, Homo sapiens
acatgctgatgtgtggccgacttgggaggctggggctgggtgagctcggtgtggtggggcactcaccggtaggtgctgcaggcccggtgcccgtcgcaggwggtgaggaagggctggtacacacgctgcacgaacgactcggagacagggtccccgtgagcccggacagcacacaccctacggctgcgggggtggagaggg

SEQ ID NO: 325572 - DNA, 201 bp, Homo sapiens
gacaaggccacctcacatttgcaggtgctccaagggcagcccccagtgggctgggcccctgccagagtgggggctgctgtggccagggctcaggtggcccrgaccctggctctgctgctgctcctggtgtgacctcagacaagccccgagcccctcgccgcctcttcacggggaaagggaaccggcctgattctgtagggt

SEQ ID NO: 325573 - DNA, 201 bp, Homo sapiens
tggtggaggtcctgccctggcccgatggtgccccgggtgtctccgcctcatagaatgtaagcctgcacacccttccacaagagcctgggaggtcaaatgcwttgcccgaggccatagctgggaagaagggaaatgggatccaaatccccgtcaggcccagagcctgagtgtgggagcagcccaggtgcctgggggctgagc

SEQ ID NO: 325574 - DNA, 201 bp, Homo sapiens
cggatggaccccagctgtgcacacagcttgggggcctggagggcggcctctgagcccatgtgtccaggctgatgcccgcatagggtagatggaacccaggsagcccaggggcacaggctgcggggctcatgacctcttgccccttccagccagttcccagaacgtgggcacctggtgcccaggcaggacagtggggtcaaa

SEQ ID NO: 325575 - DNA, 201 bp, Homo sapiens
atgagtaaactcaaattaataggtttaggaattaacaaaaccagcttttgttaaacatgcacttctgggaactacatggcaatgttcaagttgtatttatycagttattcacaatgccgtgggtgttagtaaactttttagaggaaatggagactattcagtaacctggcaagtctcttaagtggagttttctttcaccta

SEQ ID NO: 325576 - DNA, 201 bp, Homo sapiens
ttcttaccctcatcttccaacataaattctcattacttttaaatataaatgaggaaaaccttatagagctcttctttgatatcccaaaagactaaaaattktatacccataatccacagttcttatttttattacttaatggcccctcacaaatagaaattgtgttccacttgaaaagttaatgttggcttttatatcaca

SEQ ID NO: 325577 - DNA, 201 bp, Homo sapiens
acaattccctgatctcaaccctctggtccttcaacccaattagacagcctacattatagaccctccatttttatttatgacctgtcttataccaatccttsttttctcccttatatatggaatatatatatatatgtgtgtgtgtgtgtgtgtgtgtgtgtgtgtgtgtatatatgtgtgtgtatatgtatatatggaatt

SEQ ID NO: 325578 - DNA, 201 bp, Homo sapiens
aatgacaggcaccaaacaactcttcagcacctattcaatgccaggtactgtgccaagtctgtgggatacaaagtttttttttgttacagatagggggtgtkatagacagaagaaagtgtatcatctcttgccatttcctctgcctaaaatgtttgtcttgtaaaatttatttcacctaagaaaatttttcttaatcctatg

SEQ ID NO: 325579 - DNA, 201 bp, Homo sapiens
tatgtatatatatataaacaaaatgacgaggacagggaatttaattatttgggtatcacacatgcaggtgttatatatgccaaattttaaaggtaaattamtacttttattatttgtgtgaaatgtcattttacatatgggttccattttgaaagtggtttgggaagggggcataccattttaagtaccaagaaaaacttg

SEQ ID NO: 325580 - DNA, 201 bp, Homo sapiens; identical to SEQ ID NO: 68560

SEQ ID NO: 325581 - DNA, 201 bp, Homo sapiens
atcactttccaaagaaatgtaagggttttttttttccttatttctctgaaggtttaaatagacagcatttgcatacaaaatatcacatatatgtgacatawagattttagtgtagaactagatttatgagattattttggcaaaattcaattttccatggaattttcattttaatacattcttgtggaagaagcatatatt

SEQ ID NO: 325582 - DNA, 201 bp, Homo sapiens
acttagaataaatttgtatttgtttggtatgctgaatgcatgatcccaccttgtggcagagaactgaaattgaggatcaggatgtctgcagatgccaaaaygtttatactctttgtgaccaggccattgtattttggcctgagagttttctagacatttcccaatcaccctgatgattggataccaaaataaaacacagtt

SEQ ID NO: 325583 - DNA, 201 bp, Homo sapiens
tccactcattaaaagaaatcaggaagtggcttcaaggccatgtggccaatgtaaattaaatatgaggatttctgttaaaatagacatttctaaatttcatstgtccactttttggtgataactattttaatatttgtctttttatttttaatcttcctttccaaataggtcgggagtttagtgtacctgagataattgcca

SEQ ID NO: 325584 - DNA, 201 bp, Homo sapiens
ctattaaaatatcacatcactatataagaggacagatattttaatttgcttggctatagtaatcactttactatgtatacttatatcaaagcaccatgttktacacctaaaatatgtaaaatttgaaaaaaagttgaaaaatatcaaaataattatatcagtcaggcaatatttttagtgaaaagacattggctttttatt

SEQ ID NO: 325585 - DNA, 201 bp, Homo sapiens
tttgagtcttacagaagaaacctattaaaatatcacatcactatataagaggacagatattttaatttgcttggctatagtaatcactttactatgtatayttatatcaaagcaccatgttttacacctaaaatatgtaaaatttgaaaaaaagttgaaaaatatcaaaataattatatcagtcaggcaatatttttagtg

SEQ ID NO: 325586 - DNA, 201 bp, Homo sapiens
tccaaataggtcgggagtttagtgtacctgagataattgccatagcagtagttggcgctttgttactggttgcactcatttttgggactgcttcttatctrattcgtgccagacgcagtatggatgaagctaaccagcctctcctcactgatcagtatcaatgctatgctgaagaatatgaaaaactccagaatcctaatc

SEQ ID NO: 325587 - DNA, 201 bp, Homo sapiens
cgccacaatttgagaacatttccatttataactactttgtttggacacactattactcagtcaaaaagactttccttggggtaggacaggaaagctttggwgaagtggatttctctcatgagggaccagcttttctcacatggcacaggtaccacctcctgcgtctggagaaagacatgcaggtatgtaagaagcatttca

SEQ ID NO: 325588 - DNA, 201 bp, Homo sapiens
ctccaaatgatcctatttttgtcctcctgcacaccttcacagatgcagtctttgatgaatggctgaggagatacaatgctggtaagacattttcatatgcyttttgcatgctcagctgggcggattgtttagatggcatagttatcagttcaagctgagcactcagcgcataaaaacactttcaaaataaggatagcatag

SEQ ID NO: 325589 - DNA, 201 bp, Homo sapiens
tattcacagtacttctcaaatatattttcttcttcagacatgggcaactttccatttatttttatgtggaaattccacaggactttggtccataggatgttaggtgcaatggcagagtttgtccatatgcaaacaaatttaagaatcactggaataaaaaacaaactggtttattttttatataaactagtttctttactg

SEQ ID NO: 325590 - DNA, 201 bp, Homo sapiens
gactgtcagagagtagaccaaacagaaatgaataattgtaaacagaagcagagagtattaatgtggtttctgtgatctaggaaatgttgcaagagccttcyttctcccttccttactggaattttgcaacggggaaaaatgtctgtgatatctgcacggatgacttgatgggatccagaagcaactttgattccactctaa

SEQ ID NO: 325591 - DNA, 201 bp, Homo sapiens
taactacctgaatgcactgatttgaatatgattcaataaaaaaaatcactatattttggctaatctgtaaactaaggccatcagcactgatgttttaaaaratgtacagattgtgtcttcttaatgcccaatcagaagacaattatacttatttcctgacaaaatgtataaaaagacgagtgtcaagccacgttccatata

SEQ ID NO: 325592 - DNA, 201 bp, Homo sapiens
gcaaatacatttctctgccctatgatcagagatacttggtatacaaatctaataattatttttaattctctcaccttttagtctcaaaattatatgccatwttaacctatttttgatcattttaataactacctgaatgcactgatttgaatatgattcaataaaaaaaatcactatattttggctaatctgtaaactaag

SEQ ID NO: 325593 - DNA, 201 bp, Homo sapiens
aaataaggttttaactcctctgggcccctcagacaccgttgatatactaaccagtaccttattgtctgaagagagctaatagaaatagactgtcagagagyagaccaaacagaaatgaataattgtaaacagaagcagagagtattaatgtggtttctgtgatctaggaaatgttgcaagagccttctttctcccttcctt

SEQ ID NO: 325594 - DNA, 201 bp, Homo sapiens; identical to SEQ ID NO: 68562

SEQ ID NO: 325595 - DNA, 201 bp, Homo sapiens; identical to SEQ ID NO: 68561

SEQ ID NO: 325596 - DNA, 201 bp, Homo sapiens
attagtttagttttttttttaaatagagtaataaaaaaaattccaaacaattagttgacactgagtaaagccttgcttgcgcatatgttttatttaggtcmgtattaacctgtaacttttttcaaaggtctgtacaaattcaaattagcatctactgatgcttaacttggttttccttatttcacacaaagtattttaaag

SEQ ID NO: 325597 - DNA, 201 bp, Homo sapiens
gtttcattccctctaatgcctaaatgacaccttgtaataaattaccagctttgttaaataaggttttaactcctctgggcccctcagacaccgttgatatrctaaccagtaccttattgtctgaagagagctaatagaaatagactgtcagagagtagaccaaacagaaatgaataattgtaaacagaagcagagagtatt

SEQ ID NO: 325598 - DNA, 201 bp, Homo sapiens
ggtggaaaaaaagaccagccccccgcctagtttgggtgagcagatttgggattaattatcaggcagcaatccacatgcacttaacagttctgacgtgagakgacaagaaacacaagcaaatataaaacattcaattctaagagaagttcatcagagacatccttcaggattgtgaggtactggaaagaagtcctatgggga

SEQ ID NO: 325599 - DNA, 201 bp, Homo sapiens
ttctaagagaagttcatcagagacatccttcaggattgtgaggtactggaaagaagtcctatggggagtgggtggacacgtgccaaaactccattagtgtragggactttaaatcacagaaattaacttgctggaaatctgttcccaattcttccttcagctccaaggttaaattaaatgtaattaatgatggtgacctgc

SEQ ID NO: 325600 - DNA, 201 bp, Homo sapiens
acctgctaattcatgcttttgataactgatatctagtatgtatatatatataaacaaaatgacgaggacagggaatttaattatttgggtatcacacatgyaggtgttatatatgccaaattttaaaggtaaattactacttttattatttgtgtgaaatgtcattttacatatgggttccattttgaaagtggtttggga

SEQ ID NO: 325601 - DNA, 201 bp, Homo sapiens; identical to SEQ ID NO: 68550

SEQ ID NO: 325602 - DNA, 201 bp, Homo sapiens
caagttttcaaaatccagtgtctttgtataataaattttgatacctccaaatgatgcttgatatatatatatatttaaagtcttcaaaagaatataattayttttatcttataaacttgttattgttaaatttttaccttcaatatagcattgtccatgtctaatgcatcccatctccccaaaaaatgcaaatacatttct

SEQ ID NO: 325603 - DNA, 201 bp, Homo sapiens
gaaatgtttgttactgctccagacaacctgggatacacttatgaaattcaatggccaagtgagtgttgaaagtgtatttttactgtgataatttccaaaarcaaatgtgttatctttcaagtagagtaatcacggtattctgaagctatgttttccatttggacttggaaactttcatttgtacttttatttgaggataag

SEQ ID NO: 325604 - DNA, 201 bp, Homo sapiens; identical to SEQ ID NO: 68551

SEQ ID NO: 325605 - DNA, 201 bp, Homo sapiens; identical to SEQ ID NO: 68552

SEQ ID NO: 325606 - DNA, 201 bp, Homo sapiens; identical to SEQ ID NO: 68555

SEQ ID NO: 325607 - DNA, 201 bp, Homo sapiens
taataaattaccagctttgttaaataaggttttaactcctctgggcccctcagacaccgttgatatactaaccagtaccttattgtctgaagagagctaayagaaatagactgtcagagagtagaccaaacagaaatgaataattgtaaacagaagcagagagtattaatgtggtttctgtgatctaggaaatgttgcaag

SEQ ID NO: 325608 - DNA, 201 bp, Homo sapiens
acattcaattctaagagaagttcatcagagacatccttcaggattgtgaggtactggaaagaagtcctatggggagtgggtggacacgtgccaaaactccrttagtgtaagggactttaaatcacagaaattaacttgctggaaatctgttcccaattcttccttcagctccaaggttaaattaaatgtaattaatgatgg

SEQ ID NO: 325609 - DNA, 201 bp, Homo sapiens
ggcctgacgagccttgaaaaaattgtttcccaatataatcattgctattacctggaaaagtgaaatatttgcaatagttttactattctcctccttaccaygtgtctaggttacagtgaccccacgggaaagtatgaccctgctgttcgaagtcttcacaatttggctcatctattcctgaatggaacagggggacaaacc

SEQ ID NO: 325610 - DNA, 201 bp, Homo sapiens
atttttattacttaatggcccctcacaaatagaaattgtgttccacttgaaaagttaatgttggcttttatatcacactataggaaatctcttttaagttmatttcaatgcattctttaaaatactatttaaaaggcctctttctctgccttcctatgcagctgagaggctagcattatttttcaaacaataaaagtgctt

SEQ ID NO: 325611 - DNA, 201 bp, Homo sapiens
tctcattttaatgctaccaagtatgcatttttaaattttcttttctaccaaggaaaacctatatttcatattcatgctatgtataaagttttaaagagcgrcaataagaactccaaacattgtgtaaatgtttccacatcccatttttttctgcaggcaccgaggatgggccaattaggagaaatccagctggaaatgtgg

SEQ ID NO: 325612 - DNA, 201 bp, Homo sapiens
ttgtgtaaatgtttccacatcccatttttttctgcaggcaccgaggatgggccaattaggagaaatccagctggaaatgtggccagaccaatggtgcaacrtcttcctgaaccacaggatgtcgctcagtgcttggaagttggtttatttgacacgcctcctttttattccaactctacaaacagtttccgaaacacagtg

SEQ ID NO: 325613 - DNA, 201 bp, Homo sapiens; identical to SEQ ID NO: 68556

SEQ ID NO: 325614 - DNA, 201 bp, Homo sapiens; identical to SEQ ID NO: 68559

SEQ ID NO: 325615 - DNA, 201 bp, Homo sapiens
tgagttgagtttcattccctctaatgcctaaatgacaccttgtaataaattaccagctttgttaaataaggttttaactcctctgggcccctcagacaccrttgatatactaaccagtaccttattgtctgaagagagctaatagaaatagactgtcagagagtagaccaaacagaaatgaataattgtaaacagaagcag

SEQ ID NO: 325616 - DNA, 201 bp, Homo sapiens; identical to SEQ ID NO: 68563

SEQ ID NO: 325617 - DNA, 201 bp, Homo sapiens
tggatttctctcatgagggaccagcttttctcacatggcacaggtaccacctcctgcgtctggagaaagacatgcaggtatgtaagaagcatttcagtttkcagactctttacagacaagatgccttgtttgtaagtgattttaattcactagttttcagaatcatcagaacatttgatgaaaaagcaattttatgttact

SEQ ID NO: 325618 - DNA, 201 bp, Homo sapiens
agaaataccgtaaataaaaaataggaaactaccctgcagcacatttctgataaaatgtggccataaaattataggataggtcaatgtaaacacttgcaaaytgcatgaaagctaagctgaaacaattagcctccttcttaaatattccttgtacctgcaaatacgttttagaaatcagtgtcataaaacaactgtgaagaa

SEQ ID NO: 325619 - DNA, 201 bp, Homo sapiens
tgaagtggatttctctcatgagggaccagcttttctcacatggcacaggtaccacctcctgcgtctggagaaagacatgcaggtatgtaagaagcatttcrgtttgcagactctttacagacaagatgccttgtttgtaagtgattttaattcactagttttcagaatcatcagaacatttgatgaaaaagcaattttatg

SEQ ID NO: 325620 - DNA, 201 bp, Homo sapiens
atccaagagctctgatggagacgtacaaggagattaatgttttctcatgcctattaacacaacatccattctgcagcccatggatcaaggcacaattttgrctttcaagtcttgttatttaaaaattcattttggaaggcatactacacactacatgccatatacattaacaacctcataagcaatattatttttgttttc

SEQ ID NO: 325621 - DNA, 201 bp, Homo sapiens
ctcatttaccattcagaaaatcttagaacccttacgaataatgctaaatttactctgcctgtgttctagaaatgcaacaacaaagcctagatgacagcacrtctgtttacagcatgatttactgaatattttaagcccactgttgagacctactgctcaggaaaaaaaaaaagattcatttcaaaagattactgctcattg

SEQ ID NO: 325622 - DNA, 201 bp, Homo sapiens
attttttataaactgaaggtttgtggcagccctgtgtcaagcaagtctgtcagtgccatttttccaacagcatgggcttacttcatgtctttgtgtcacayttaggtaattcttgcagtatttcaagctttttcattattattctatctgttatggtgattagtgatatttgatattactcttataattttagggggcacc

SEQ ID NO: 325623 - DNA, 201 bp, Homo sapiens
caggtaaaatcagaggtgtttaaagtacataataatcttgcatgtattctgtgtaggtcatcgatttggagtgtccttcatgctttaaaatattgcagaaytgacacattagcttaaaccgtgttttcagcaggtgggagtaacacacgaatcatgtctctgcagctgtctcagaactatttcattcttaatgttttttga

SEQ ID NO: 325624 - DNA, 201 bp, Homo sapiens
atatgtgaaggccgaggacattagtgtatactactgtagacattataaacactgtacatttaggctacactaaatttaaataatttttttcttcaatagtwaattaagcttagcttactgtaacttttttactttatacatttttgacattttaaaacttttgaatcttttattatagcacttaccttaaaacacaaatac

SEQ ID NO: 325625 - DNA, 201 bp, Homo sapiens
aaacatttttctattaaaaacttcaaaaatttttactttttaagtttttttgttaaaaactaagacacaaacacattcatcagcctagtagcctaggcctrcacaaggccaaggttatcgatatcactgtcttccacctccatatcttgtcccagtggaaggttccaggggcagtacacgcatggagctgtcatcacccat

SEQ ID NO: 325626 - DNA, 201 bp, Homo sapiens
tcttccataagaaatggcccatatgtgccttagggtagctttcttttttaaaaaaaaaaaaattatttatgtatttttttattttttatttttctttgagrcagagtctcgctgtgtcgcccaggttggagtgcagtggcgtgatctcagctcactgcaacctcctgcctcccaggctcacgccattctcctgcctcagcc

SEQ ID NO: 325627 - DNA, 201 bp, Homo sapiens
gctactaagattcttgcaaactgatggcttaggacttcttttcatcatcatcttggccactcccctcatgtctcttcctatgctgagtctcttttcctggkccctgtatatctcttcgttgcttatctttaattctcatttggggatcactttcttcagtaactttctgagaagacaatccatggcatgtggcctgcactg

SEQ ID NO: 325628 - DNA, 201 bp, Homo sapiens
gccatggaggagagaagtgaggagatggagtagtaataccagaacccacagagagcttggagccatggaggagagaagtgaggagatggagtagtaatacyagaacccacagagagcttggagccgtggaggagagaagtgaggagatggagtagtaataccagaacccacagagagcttggagccgtggaggagagaagt

SEQ ID NO: 325629 - DNA, 201 bp, Homo sapiens
ctaatggcctctttgtccatgccatgcaggtgtactggcactccagtgctcacattcttggggaggccatggagctttactatggaggccacctgtgctayggtccgcccattgaaaatggattttattatgacatgttcattgaagacaggtaacacactgaatactggcttgtgaatgcatgtgtttcaattgtattgt

SEQ ID NO: 325630 - DNA, 201 bp, Homo sapiens
gttttctggctgaccagccgtgaggttttcatgagcagcttattggcctggtgtagacccgccgtgttaaccacacaaaataaggttttcttgtcccgggwtaacgtgtttctctaattgtacgatccttaaatttagagcaatcgcaggcgctggctcagtcaataaaggatccgggcccaacacgcacattcacagtag

SEQ ID NO: 325631 - DNA, 201 bp, Homo sapiens
agtacacaaacttttgaagtaggctttttttttttcactcagtggaattcccttaagagccatccatgttgttttgtttcgagataaattagttggttccttttttttttttttttttttgctgatggtgttccacgttccacagtgtggatgcaccacagtttggccattcacccgctaaaggacatttggggtgtgtgt

SEQ ID NO: 325632 - DNA, 201 bp, Homo sapiens
aacattgatgatctcacagttcctacgagtcagggtctgggagcagctcagctggtggattctggcgcagagcgtctcctggggctgcagtcaggctgtcrgccagggctgcggagctcggggctcgctcacagttggtggatgcagctcctcatcacctgggtgcttgcttgcctgaatgtcctcactgcatggtggctg

SEQ ID NO: 325633 - DNA, 201 bp, Homo sapiens
gtctaatgtttgcccatcgtccacgatcttggagggaaatgcctattagatttgctgattttggagttctgcatagaaatgaactgtcggggactctcagyggcttgaccagagtgaggcgcttccagcaggacgatgctcacattttttgcacagtggagcaggtaaacaataacacagagtgaagcagtgtggtcacaa

SEQ ID NO: 325634 - DNA, 201 bp, Homo sapiens
aaggacatttggggtgtgtgtttcctgtttggggctattataaataaagctgctatggacgttagtgagcagtattgtgtgtgaacctgcgctttcatttytctgggacaaatgccaggagtgcaattgctggggcagacagtaagtgcatgctcagccctttgggctgtctgccagctcattctacctgcacttgtgcta

SEQ ID NO: 325635 - DNA, 201 bp, Homo sapiens
ctatgttgtggcggtttgaacttcctgaatctgtaagttattggtttgcaaacgttgtattgtttttccatatttctttggtactatacctccgctccttytgggacgcaggtgacctgaatattagaccttttggtatttttccagttttctgaggctgtttatgcttccttcagtctttctttgtatatctctcagatt

SEQ ID NO: 325636 - DNA, 201 bp, Homo sapiens
ttgttgcatctcatttccagagtaagtagacatgaaataaaatttatgaagggaaaatacagaacaattttgatgcttacagtgaggtaaatattagaacrttactgctccaatgattcagtgaggatctcgaaatgaattctgaagtcttccaatgtttgcatttattggaggggctcccgagttctatcaacttgtttt

SEQ ID NO: 325637 - DNA, 201 bp, Homo sapiens
ctgggttgatagttatttagttttaatattttaaaaatattgtttaaaaatatatattaacttagtagtatagcaagaggacgcttctgaggttaatgcaractttgaacactcatctttttttttttttttttttttttgagatgagtcttgctctgttgcccaggctggagtgcagtgggacaatcttggctcactgaa

SEQ ID NO: 325638 - DNA, 201 bp, Homo sapiens
gcccctccgtgccgctctcctgtgcgcggcgctgccttttcacagtacggttccctcgcctactccttctccattccctgcacgtgcctagcactcaaacraaggttcagctcaggattggataagcaaccaaaacaggatcatcaactgtactccattaaaaacatgctttatttctgtctgacatgaagaattgtattt

SEQ ID NO: 325639 - DNA, 201 bp, Homo sapiens
gtagcacagtgctgtggagattcatccatgattctgcaagtattgatagtttgttcctttctgtcactgactagtgtgccattgtggatccaatctctcaytgaagggtgtttgggttgcttccagttcttggtgattatgaatagaactgctgtagatattagtgtataggtttttgtgtgaatagaagttttctttagg

SEQ ID NO: 325640 - DNA, 201 bp, Homo sapiens; identical to SEQ ID NO: 68609

SEQ ID NO: 325641 - DNA, 201 bp, Homo sapiens
ccatcaatgtgctacaattcagctggacttccaactgcctattagatttaatctcacatatgttaggtgagtgattgaatgtgataaatattatagtactratattctaattttttgtcatttgagtattagcaatgcaaaaataaacattagtgaatgtctagtatatgtgctatacacgcaatatatatttgtttacct

SEQ ID NO: 325642 - DNA, 201 bp, Homo sapiens
acatttggcttctcctttcaattaaacctgtcaacaaggccggaaaacttcctaggagagattgagatgtggaatgaggctgagaaggtaagagacacacyttgtgcttcctcttcattttagtcgtatggaagacacctgagaggctgcagtcttcacaggaggatgcaataatttgtaatagaaattttgaacctggaa

SEQ ID NO: 325643 - DNA, 201 bp, Homo sapiens
tttggtacctatatttatttggtgactttggttaatttcagtttatccataaactaaaatgaattccttgggaactcaaaacagtatcaactttttgaacktggaggactgacaaccgggctctggactgtggctaatgagcccatatatacacttctcaggcgtcccaggcagccagcagacgttccctggcaacacttt

SEQ ID NO: 325644 - DNA, 201 bp, Homo sapiens
tattttcagactgcagtcgactgcgggtaactgaaactgagaaaaatgaaaccacagagaagggggactactgtactcctgggagcttaacacaccaataygagaaataagaatcagagaagccctggattaatagtataacaattatttttacgtgattaataggtgcagaagccgagcagaggctgcacagaagcagtt

SEQ ID NO: 325645 - DNA, 201 bp, Homo sapiens
cctagtgccaggtggagtcactgtgagcctgtaagagctcccccctctcatttgcaccctagtgccaggtggggtcagtgtgagcctgtaagagctccccmctctcatctgcgccctagtgccaggtggagtcactgtgagcctgtaagagctcccccctctcatttgcaccctagtgccaggtggggtcagtgtgagcct

SEQ ID NO: 325646 - DNA, 201 bp, Homo sapiens
aatatttaattctgtgggttgccttttttgcagctacttttaagaactaaacacaattaatctttgttaaggaaaatgatttgttgtgaatatatagataygaaacagttaaatcatgcagatacgggtttttctcccaacaactagcttctttaagtagttatttaatataaagtgccttgtataccccgatagtagtga

SEQ ID NO: 325647 - DNA, 201 bp, Homo sapiens
atttaatataaagtgccttgtataccccgatagtagtgatggaagcagaaaagaaaggaaaaggaaaaaaacccttagttttataaatatatcatcattaygataaactttgcttttgtttttatacaaattaataatatagctgtgtccttgtcagaattttattgattaatgttaaaattagatcttctagaacagtac

SEQ ID NO: 325648 - DNA, 201 bp, Homo sapiens
gcatttgaaatgcccagtagccacgtggcttgtggcctccatgctgcacggtgtcgctcaaggctgtgagctctttgtatccctcgtgtctcagcacctagaacatcagtagatgacctttcaatgtttcttgaagaaaagtagagttgttttcttcatttcaacattgtgtgtaataatgtgtaaatatgtttttcttcg

SEQ ID NO: 325649 - DNA, 201 bp, Homo sapiens
tgttgattttgtttgtttgtttgtttgattttgagacaaggtcttgcattgtcacccaggttggagtgcagtggcacaaacactgctcactgcagcctcgwcctcctgggctcaaacagtcctcctgccccagtctcccaagtagctgggattacaggcatgtgccatcgtgcctggctagtttttgtattttctgtacag

SEQ ID NO: 325650 - DNA, 201 bp, Homo sapiens
ctatttttatgtaaataactgagatgccatcttattaattcttccaaggtcatgtttgtaaaataaacattacatgagagctttcctgtcatctacactgkatgttgtttagagtgttgaacaaatttgagttcctaagttgtaatctgtcctcatgtggtctatgctatttgcacgtgtgccactacacgctgagatgat

SEQ ID NO: 325651 - DNA, 201 bp, Homo sapiens
tcctgtagaaggctgggggaatccaaagcccttatttcattttgtgctgcctttcaatctaagctagtacaattcctttaaaaactttgcgagtccttttctataaatttatcatcaacacggttagataaaagccacatccacatctttctgacaccgatccttctttgcctgggaggctactgtgagacaatagtacac

SEQ ID NO: 325652 - DNA, 201 bp, Homo sapiens
ttctggatggctattgcaacatagcaaagtatcccagaacttaatagtttaaaactgccatttcatcattactgtctttcatagttccaaattttaggctyctctgggtggttctcgcattgggtcccttacatgactgtattcaggtagagtctcatgccagggttattgattgaagaatgtccccttcccatcatagaa

SEQ ID NO: 325653 - DNA, 201 bp, Homo sapiens
taaggcaccattccattatatgacatttcagaaatgccaaaactatagtgacagaaagatgatcaggagtccagtgggtggggagaggggattgactccarggggtcaggagggaacttcctggagggtggaaatgttctatatcttgactgtggcagaagtcgcatgactgtatacatttgtcaacagtcactgaattgt

SEQ ID NO: 325654 - DNA, 201 bp, Homo sapiens
tacctttttttaaattaacttttttaattgtcatgcagtaaaatgtacgcctttttgataacatgcagaactgtgttatcacctcagcaatcaagatacaraacagttccgtcacccctcaaaactccctcatgctacccttttaaaatcaaatcctccccagccctgacctcagggaacggctgattttttctctacccc

SEQ ID NO: 325655 - DNA, 201 bp, Homo sapiens
gccaccacacccagctaattttgtatttttagtaaggatggcgtttctccatgttagtcaggctggtctcgaacttccaacctcaggtggtctgcccacakcagcctcccaaaatgttgggattacagatgtaagccaccacgcccagccctactctccccttttatacctgctttcttgtgtgctacaagcactgtgaca

SEQ ID NO: 325656 - DNA, 201 bp, Homo sapiens
gtaaatatgtttttcttcgtagtacaataaatttaaatgccgcattctgaatgagaaagttaacactgcaactaccaccgtgtacaggtttgtgtccacasatggtaaacgctgctcagtggtaaacttgaaggtgttagcagtagaggccgagtttgttttctggttggagatcgatttttcaagttgtgtagttgataa

SEQ ID NO: 325657 - DNA, 201 bp, Homo sapiens; identical to SEQ ID NO: 68610

SEQ ID NO: 325658 - DNA, 201 bp, Homo sapiens
tcaggtggacaatagagagatgggatcagaagtcattgcttccctcaagaaacttaactatcagaggatgaaccaaatgctcattagatgatatttaataktagtgaagaaaaacttgataaaaacatgtcatgggactgctgacttaatgtttggtaaattgctgatttaaaatacatttctttacctttcttttctgca

SEQ ID NO: 325659 - DNA, 201 bp, Homo sapiens
tgaagtcctggaacaataagacagcagattcaaatttatggctgctgaggctccaggacaaaggaaagagggaatgcataatgtctggaagatggatgtcrgttctctgctcttctttttagagcagtgtccagcacagaattgtcagccctggagaatatatgtaaagccatcataaaagaaaagcaaccttttgaaaga

SEQ ID NO: 325660 - DNA, 201 bp, Homo sapiens
aatttatggctgctgaggctccaggacaaaggaaagagggaatgcataatgtctggaagatggatgtcggttctctgctcttctttttagagcagtgtccrgcacagaattgtcagccctggagaatatatgtaaagccatcataaaagaaaagcaaccttttgaaagactagaagtcagcaaggaaatcctcctggaaat

SEQ ID NO: 325661 - DNA, 201 bp, Homo sapiens
tgacatgctgattctaaaattcgtatagaaagcacaagaacctagaatagccaaaagaactttgaaagataaaaacaaatttggaagagtcactatgcttkgtttcaagaattatgagaaactacagtaatcatgctggtctagatagataaatcagcaaaacagagtctagaaatagacacaaatatatggacaactgat

SEQ ID NO: 325662 - DNA, 201 bp, Homo sapiens
agttttttttaaacagtgaatgtggctgggcgcggtggctcacgcctgtaatcccagcactttgggaggccgaggcgggcggatcacgaggtcaggagatsgagaccatcccggctaaaacggtgaaaccccgtctctactaaaaatacaaaaaattagccgggcgtagtggcgggcgcctgtagtcccagctacttggga

SEQ ID NO: 325663 - DNA, 201 bp, Homo sapiens
caattatccccaagttgatctataaagtcagtacaatcccagtcaatacccaagcagaccttttttccctgtaagagttgacatgctgattctaaaattcrtatagaaagcacaagaacctagaatagccaaaagaactttgaaagataaaaacaaatttggaagagtcactatgcttggtttcaagaattatgagaaact

SEQ ID NO: 325664 - DNA, 201 bp, Homo sapiens
taccttgttcgtggtttggaagactaaatattattaaaatatcaattatccccaagttgatctataaagtcagtacaatcccagtcaatacccaagcagaycttttttccctgtaagagttgacatgctgattctaaaattcgtatagaaagcacaagaacctagaatagccaaaagaactttgaaagataaaaacaaatt

SEQ ID NO: 325665 - DNA, 201 bp, Homo sapiens
tctttcttccaagatccagaaaccaccacacctaaaactgagggtacattaatcatgaattaatataggacatgagcccaatttgaaaatatttgctcatrgtgttactttgcatggaattgtgatctgccctagcagattttaatgttgaatgcatgtatcttgaaggaggaatatcacaaacgggacttcacggaggtg

SEQ ID NO: 325666 - DNA, 201 bp, Homo sapiens
tagaagtcagcaaggaaatcctcctggaaatgtttaaggtaacttggggaaactcctaaacctcttactaggaatattaaaaatcaatatagactagcttycccaccttcccccaaataattacctgttgctcaccaaattattccaatcctgttaagctactgtgaggttgttaccagttacttgctgtgacatttccct

SEQ ID NO: 325667 - DNA, 201 bp, Homo sapiens
ccagtagctgggaccacaggcgcgtgcctccacgcctggctaatttttttgtatttttagtagagacagggtttcaccgtgttgttagccaggatggtttsgatttcctaacctcgtgatccgcccgcctgggcctcccaaagtgctgggattacagacgtgattcaccgcccccggccgtgatacgatttttaaagctaa

SEQ ID NO: 325668 - DNA, 201 bp, Homo sapiens
gaaaactttaaaacattgctgagataaatttaaagaaggcctaaataaatgaaatataccttgttcgtggtttggaagactaaatattattaaaatatcarttatccccaagttgatctataaagtcagtacaatcccagtcaatacccaagcagaccttttttccctgtaagagttgacatgctgattctaaaattcgta

SEQ ID NO: 325669 - DNA, 201 bp, Homo sapiens
tgatgagagactgggaaaagttccaagaggaagcaaagaaccgagatcacaggaagatcgggaaggtatgccccacatcttaatcactggagatgtaatcrtaagccaacataggaatgtttctgtctcacaaaactaagttgctttaaaaataagatttcttcttcttctctcctattttgctggcactcacagtccgct

SEQ ID NO: 325670 - DNA, 201 bp, Homo sapiens
taggtactctttgttgtttgctggaagaagagttgtaaagtttcacctgaatcccctgggatagttttactagcaatagttcatattgcaagcaaacaacraaaacaactctgaaaatgatcccatcagtagaattatatactttatatttcagcctcacaggcctgtaatattttccctcacttttctggcttattagga

SEQ ID NO: 325671 - DNA, 201 bp, Homo sapiens
aaggagagagctcaggtacatacacagagaattaaacagtgcttaccatggtcaggggttggggggaagaaatggggggatatagatcaaaggatacaaartagatatctaggatcaacaaggtcagagatctaatacagaacatgaggactaaagttaacaaaattatatttatcagggagttttgttaagtaattagat

SEQ ID NO: 325672 - DNA, 201 bp, Homo sapiens
gtcttcacgtgatgttctccctgcgtgtcttcacattgtcttccccttgtgtgcatctgtctctgtgtccagatttctcctttttataaagagaccagccrtatagtattaggatctaccctaatgatctcattttaatttgattacctctataaagaccctacttccaaataaggacacattctgaagtactaggagtta

SEQ ID NO: 325673 - DNA, 201 bp, Homo sapiens
tatcataaagttggtatgcaaattcaaccttgtaagacaaacatattgtacaactgaaactgaataggcataattgtccacaaaaaacaatcccaacaatygtagtttttgtattatcaacatacatagtttcaagtaaatttacctagaagataattattaaaaccggtaactgaacactgaagaaagctctttgccctt

SEQ ID NO: 325674 - DNA, 201 bp, Homo sapiens
ttggtttcatgttggatgggtaatgtgccagtgttgtatccaatgtgcttcatgtggggtgggtaatatgccaatgttgtaccgaggtgtgagggaggtayatcttacacatgtgtgtacacccagtcatcacgcttatgaactacaaaaagctcagagtatttgttctttgaaattgcacatagaatatttactaaaata

SEQ ID NO: 325675 - DNA, 201 bp, Homo sapiens
acttttcctttatgtgtcacacgattgtgatgtgtctgtctgtggacttattcaagtctatgttgtggcggtttgaacttcctgaatctgtaagttattgrtttgcaaacgttgtattgtttttccatatttctttggtactatacctccgctccttctgggacgcaggtgacctgaatattagaccttttggtatttttc

SEQ ID NO: 325676 - DNA, 201 bp, Homo sapiens
acagagaattaaacagtgcttaccatggtcaggggttggggggaagaaatggggggatatagatcaaaggatacaaaatagatatctaggatcaacaaggycagagatctaatacagaacatgaggactaaagttaacaaaattatatttatcagggagttttgttaagtaattagattttaactgctcttgtcacacaca

SEQ ID NO: 325677 - DNA, 201 bp, Homo sapiens
ccgaggtgtgagggaggtatatcttacacatgtgtgtacacccagtcatcacgcttatgaactacaaaaagctcagagtatttgttctttgaaattgcacrtagaatatttactaaaatagaccatattctggaccataaaacaagtctcagtgagttgaaagggatgcaattaaaataaaatgtttaattaaccctaatg

SEQ ID NO: 325678 - DNA, 201 bp, Homo sapiens
taaaaaaaggagagagctcaggtacatacacagagaattaaacagtgcttaccatggtcaggggttggggggaagaaatggggggatatagatcaaaggayacaaaatagatatctaggatcaacaaggtcagagatctaatacagaacatgaggactaaagttaacaaaattatatttatcagggagttttgttaagtaa

SEQ ID NO: 325679 - DNA, 201 bp, Homo sapiens
gagctccccgctctcatttgcaccctagtgccaggtggggtcagtgtgagcctgtaagagctccccgctctcatttgcgccctagtgccaggtggggtcastgtgagcctgtaagagctccccgctctcatttgcgccctagtgccaggtgcagtcagtgtgagtctgtaagagctcccccctctcatctgcaccccagga

SEQ ID NO: 325680 - DNA, 201 bp, Homo sapiens
ctccctgtgttagccaggatggtctagatctcctgacttcgtgatccgcctgcctcagcctcccaaagtgctgggattacaggcgtgagtcaccgcgcccrgcctggggtagctttgttctcaacctgattccttcctgtagaaggctgggggaatccaaagcccttatttcattttgtgctgcctttcaatctaagctag

SEQ ID NO: 325681 - DNA, 201 bp, Homo sapiens
gtttcgtccctaagctttgtgttttctggctgaccagccgtgaggttttcatgagcagcttattggcctggtgtagacccgccgtgttaaccacacaaaayaaggttttcttgtcccgggataacgtgtttctctaattgtacgatccttaaatttagagcaatcgcaggcgctggctcagtcaataaaggatccgggccc

SEQ ID NO: 325682 - DNA, 201 bp, Homo sapiens
gatgacctttaacaggtctcctgcagtggaaccaggggtgagggcctcgtccaagggcgtgaggggcgcgtggaaatggaacaacctcccaggctcgcatmctcctcggggacctcccagaaggctcaaccggaagaaaacccgcgacccgcgcgaggacagcgaaagcgcaaacgccggccgccaggagtcgcagcgcgc

SEQ ID NO: 325683 - DNA, 201 bp, Homo sapiens
aactcaaagaggatggctcagcagcacagcccatttaggatgacagtggggaagggaagtgtcctaaagtgcagaattttgagtggtgcatcttgtggtcytttttgagtggtgcatcttgtggtcctttttgagtggtgcatcctgtggtcctttttgcccggaaggaagaatggccggagataaggagttacatggatg

SEQ ID NO: 325684 - DNA, 201 bp, Homo sapiens
tcatatgaacataccactgcttcagatccatcctgcagttgaggggcatttgggttgttttcagcttttggcagttatgaaaactgctattgtcattcatrtacagttttttgtatgaacataggttttcattttactagagtaaatacctaggagtgtgatttcagggtcatatggtgatatggtttggctgtgtccaca

SEQ ID NO: 325685 - DNA, 201 bp, Homo sapiens
tgtaaatattcatgtttaaagaagagtcataagtctctcaccttagatcaaaagctagaaatgattaagcttggtgaggaaggactgttgaaagcccagayaggccaaaagctcggcctcttgcaccagttacccaagttgtgaatgcaaaggaaaagctcttgaaggacattaaaagtgctactccagtgaacacaaatg

SEQ ID NO: 325686 - DNA, 201 bp, Homo sapiens
tctcaacatagaaaaggtacagtaaaattaggtataaaagataaaaaatggtacagttgtttaggacagttaccatgaatggagcttgcataaccggaagytgctccaggcgagtcagtaagttgtaagtatatgtgaaggccgaggacattagtgtatactactgtagacattataaacactgtacatttaggctacact

SEQ ID NO: 325687 - DNA, 201 bp, Homo sapiens
tgaggcaggagaattgcttgaacccaggaggtagaggctgcagtgagccaagattgtgccactgcactccagcctgggcaagagagcaacactctgtttcaaaaatatatatatatatatataaatactgaggtaatagttctaagactgatacccattggccgggcgcagtggctcatgcctgtaatcccagcactttgg

SEQ ID NO: 325688 - DNA, 201 bp, Homo sapiens
gaggcaggagaattgcttgaacccaggaggtagaggctgcagtgagccaagattgtgccactgcactccagcctgggcaagagagcaacactctgtttcaaaaatatatatatatatatataaatactgaggtaatagttctaagactgatacccattggccgggcgcagtggctcatgcctgtaatcccagcactttggg

SEQ ID NO: 325689 - DNA, 201 bp, Homo sapiens
caggctggtgggtttatgtcttttcagccccaaaggactgtagggaagtccattctactcttccaaagtgttctattcttaacaaataattccaaggctcwtctaattactacattggctcaaaaatccaggacatcttctgaatcaggcctagctgcagatgaggctcctcgggtgcagtttgttgggaacagattatca

SEQ ID NO: 325690 - DNA, 201 bp, Homo sapiens
caggagaattgcttgaacccaggaggtagaggctgcagtgagccaagattgtgccactgcactccagcctgggcaagagagcaacactctgtttcaaaaatatatatatatatatataaatactgaggtaatagttctaagactgatacccattggccgggcgcagtggctcatgcctgtaatcccagcactttgggaggc

SEQ ID NO: 325691 - DNA, 201 bp, Homo sapiens
ggaggtagaggctgcagtgagccaagattgtgccactgcactccagcctgggcaagagagcaacactctgtttcaaaaatatatatatatatatataaatmctgaggtaatagttctaagactgatacccattggccgggcgcagtggctcatgcctgtaatcccagcactttgggaggctgaggcgggtggatcatgagg

SEQ ID NO: 325692 - DNA, 201 bp, Homo sapiens
caaatttatgacactgattcttagaagctatttagatgtttttaagtggccagatcactaggtatgggtagagactcagctccttcaataacctaaactgktatttccaggatgaaatatgatttttaatgttccagataagttatctggatttcttcaggagactggactgagctgtgaactgctcagtcactgagagtt

SEQ ID NO: 325693 - DNA, 201 bp, Homo sapiens; identical to SEQ ID NO: 68614

SEQ ID NO: 325694 - DNA, 201 bp, Homo sapiens; identical to SEQ ID NO: 68615

SEQ ID NO: 325695 - DNA, 201 bp, Homo sapiens
tgtggcgggcagcaaccacacattttccagccacattatttgtttaaagttcaggacaaaaggttttcaagagcacaatatattaaatgtgcttagcaacrgtgtgacaggaaggactgaaccctggagaatgacttgcccactgagagctgtagctggtggtcaggagagcccagctatgagcctctaaacacggggcac

SEQ ID NO: 325696 - DNA, 201 bp, Homo sapiens
agcagctgaacgcgccctacagctgccaggcggaggggccgtgcctcacgcgggaggtggcgcagctccgggccgagaactgcgacctgcgccaccgcctrtgcagcctgcggctgtgcctcgccgaggagcggagccgccaggccacgctggagagcgcggagctagaggcggcgcaggaggccggcgcacaggtaaccg

SEQ ID NO: 325697 - DNA, 201 bp, Homo sapiens
tggagtagtaataccagaacccacagagagcttggagccatggaggagagaagtgaggagatggagtagtaataccagaacccacagagagcttggagccrtggaggagagaagtgaggagatggagtagtaataccagaacccacagagagcttggagccgtggaggagagaagtgaggagatggagtagtaataccaga

SEQ ID NO: 325698 - DNA, 201 bp, Homo sapiens
atcagctaattttttttttattcagttgaataaattaaatgtatttaatttttttcctctggcttctccaagggccatgtaaataagtagttgaatatcaraacacaatcatttcctgttctaataaaaatatataggagagaaaaaaatctgtaattcttgataggccattttacactgactttattcgtcaatcaagta

SEQ ID NO: 325699 - DNA, 201 bp, Homo sapiens
ctccctcctgctgcccttttttccccacactcaaaccatcccaccctgtcctcctatctgacagccatgaacttgttctctagctccatcattttgtcatrtaaagaatattacataaatggatttacagagtacacaaacttttgaagtaggctttttttttttcactcagtggaattcccttaagagccatccatgttg

SEQ ID NO: 325700 - DNA, 201 bp, Homo sapiens
cttcactacaagctaagttgaaggcatgtggtggcttaggctgaagacaaaagtggagcctcatgcctccacacccctataaattataagtgaccctcccrgacacgtgcagaggtgaaggaaaggcaaaaaggaagtagtaaggcctgccctcttggccttcttacccacccagactcagagtggaagagggagtgtgat

SEQ ID NO: 325701 - DNA, 201 bp, Homo sapiens
gtatacaaatacatgtcagtttttaaagtagcccatatttataatttcttttttttttttttttttttttttttgagatggagtcttactctgtcacccaractggagtgcagtggcgcaatcacggctcactgcagcctcaacctcccctggctcaggtgatcctcccacctcagcctcccagctacctgggactacagg

SEQ ID NO: 325702 - DNA, 201 bp, Homo sapiens
gcaaacatgtcccacagcggacactgtttatacctaccctgccatcttttttattctagaaaaattatattttgaaataattgtaggttcgcatgttgttstaagaagttatatagaggccggatgtggtggctcacgcctgtaatcccaacctttgggaggccgaggtgggtggatcacctgaggtcaggagttcaagac

SEQ ID NO: 325703 - DNA, 201 bp, Homo sapiens
atgtagaagaaatgtttaagaaaattatactataaatggggtaaggtatagggaataaaagtttttgtacttcacctgagctggtaaagtgacaatatctrgactgataagttatataatacctagagaaaccaataaaaaaaaaagctatagacagggatacactaagagaacctatagataaattggaattgaattcca

SEQ ID NO: 325704 - DNA, 201 bp, Homo sapiens
tccacgatcttggagggaaatgcctattagatttgctgattttggagttctgcatagaaatgaactgtcggggactctcagtggcttgaccagagtgaggygcttccagcaggacgatgctcacattttttgcacagtggagcaggtaaacaataacacagagtgaagcagtgtggtcacaaattgagtgtgatgccccgc

SEQ ID NO: 325705 - DNA, 201 bp, Homo sapiens
aaaattctacatccatatctcataaaaactctcaaaactaggaatggaagggaactttcttaacctgataaaaggcctctatgaaaaacctacagctaacytcatacttaatagtgagagtctgaatgctttactcttaaaatcagatattaggtaaggattatctcattacttctctgatcattgtactgcaggttcttt

SEQ ID NO: 325706 - DNA, 201 bp, Homo sapiens
tggggtaaggtatagggaataaaagtttttgtacttcacctgagctggtaaagtgacaatatctagactgataagttatataatacctagagaaaccaataaaaaaaaaagctatagacagggatacactaagagaacctatagataaattggaattgaattccagaaaaatgttaaagtaatccataggaagacaggaaa

SEQ ID NO: 325707 - DNA, 201 bp, Homo sapiens
gcctataatcccagcactttgggaggctgaggcaggtgggtcacttgaggccaggagttcgagaccagcctggccaacatggcgaaaccccttctctactaaaaaaaaaaaaatacaaaaattagccgagcatggtggcgagcacctgtagttccagctactcgggagcctgaggcatgagaaccgcttgaacccgagagg

SEQ ID NO: 325708 - DNA, 201 bp, Homo sapiens
cccctgctgcagctcagtctcacttcctctgggcagcccctccgtgccgctctcctgtgcgcggcgctgccttttcacagtacggttccctcgcctactccttctccattccctgcacgtgcctagcactcaaacgaaggttcagctcaggattggataagcaaccaaaacaggatcatcaactgtactccattaaaaaca

SEQ ID NO: 325709 - DNA, 201 bp, Homo sapiens
ccctgctgcagctcagtctcacttcctctgggcagcccctccgtgccgctctcctgtgcgcggcgctgccttttcacagtacggttccctcgcctactccttctccattccctgcacgtgcctagcactcaaacgaaggttcagctcaggattggataagcaaccaaaacaggatcatcaactgtactccattaaaaacat

SEQ ID NO: 325710 - DNA, 201 bp, Homo sapiens
agcaaaatgtaaaagaaaaataaatactcttttctgagcaaacattatttaatttgtagattgacataaaaatcaaggatgctattggcagataccatcartgtgctacaattcagctggacttccaactgcctattagatttaatctcacatatgttaggtgagtgattgaatgtgataaatattatagtactaatattc

SEQ ID NO: 325711 - DNA, 201 bp, Homo sapiens
cctgctgcagctcagtctcacttcctctgggcagcccctccgtgccgctctcctgtgcgcggcgctgccttttcacagtacggttccctcgcctactccttctccattccctgcacgtgcctagcactcaaacgaaggttcagctcaggattggataagcaaccaaaacaggatcatcaactgtactccattaaaaacatg

SEQ ID NO: 325712 - DNA, 201 bp, Homo sapiens
tcctgtcttgctctggttctttatgcttctcttgaatatctaccttattccacttatctgcagaccggtttcttccttctgtgtggcaagaagcatggctrtagattcctgcatcatctcacaatatgggtcactagagagaacaaactttttacccacattccagaaagttctggctggctcgcatgggtctggtgtcca

SEQ ID NO: 325713 - DNA, 201 bp, Homo sapiens
gactgggaaaagttccaagaggaagcaaagaaccgagatcacaggaagatcgggaaggtatgccccacatcttaatcactggagatgtaatcataagccarcataggaatgtttctgtctcacaaaactaagttgctttaaaaataagatttcttcttcttctctcctattttgctggcactcacagtccgctgctcagtg

SEQ ID NO: 325714 - DNA, 201 bp, Homo sapiens
gtgggtactcttctttcaacatctgacacactcactccccaagtgagacaactcttatgttccatagctcaaagcctgggatttctgagtgatgtacagarcaccccccatcaggctgaccacttgtattctagcaacaaataaactgatagacaagtctgctcacaccacacgtgcatacagtacacagaagacaatcac

SEQ ID NO: 325715 - DNA, 201 bp, Homo sapiens
tgggaggtgaaggtgggcagatcacttggggtcaggagtttgagaccagcctggccaacagggtgaaaccctgtctctactacaaatacaaaaagtagccrgacatggtggcatgtgcctgtaatcccagctacttgggaggttgagtcaggagaatcacttgaacccggaaggtagaggttgcagtgagccgacattgca

SEQ ID NO: 325716 - DNA, 201 bp, Homo sapiens
aacctgtcaacaaggccggaaaacttcctaggagagattgagatgtggaatgaggctgagaaggtaagagacacaccttgtgcttcctcttcattttagtygtatggaagacacctgagaggctgcagtcttcacaggaggatgcaataatttgtaatagaaattttgaacctggaaattatgagatagatatataggttg

SEQ ID NO: 325717 - DNA, 201 bp, Homo sapiens
gtttgagaccagcctggccaacagggtgaaaccctgtctctactacaaatacaaaaagtagccggacatggtggcatgtgcctgtaatcccagctacttgrgaggttgagtcaggagaatcacttgaacccggaaggtagaggttgcagtgagccgacattgcacctttgcactccagcctgggtgacagagtgagaccct

SEQ ID NO: 325718 - DNA, 201 bp, Homo sapiens
aagtagccggacatggtggcatgtgcctgtaatcccagctacttgggaggttgagtcaggagaatcacttgaacccggaaggtagaggttgcagtgagccsacattgcacctttgcactccagcctgggtgacagagtgagaccctgtctcaaaaaaaaaaaaaaaaaaaattacattgtagagttgatacaatttaatag

SEQ ID NO: 325719 - DNA, 201 bp, Homo sapiens
tttataagaaaatgccaaactattttccaaaatgactactgttttgcattcccaccagctgtgcatgagggttgcttttgtaaagctcatctcagtcacaycttttgcatttcctggaatctgcctgacttgttgatgcatgtcttgaaaccctggagtggggaggggagtggcttctcttgttgttatattaataaccca

SEQ ID NO: 325720 - DNA, 201 bp, Homo sapiens
ggatccctttcatcatgtaaggagcaatgcctcattctcactgaagagagactcactgtggattttgctttgctcttctttgctgccatgcttctgccagkggcaccaaatatgtacttaggtgctgccaggaacacaacagtgcttctgactatgaaagagattttatagcaaataagtaaagcattgcactgacattaa

SEQ ID NO: 325721 - DNA, 201 bp, Homo sapiens
ttttcagcttttggcagttatgaaaactgctattgtcattcatatacagttttttgtatgaacataggttttcattttactagagtaaatacctaggagtrtgatttcagggtcatatggtgatatggtttggctgtgtccacacccaaatctcaccttgaattgtagtaatccccaagggtcaggggtggggccaggcgg

SEQ ID NO: 325722 - DNA, 201 bp, Homo sapiens
cccgagttctatcaacttgttttttcaagtcttgttctcatcttgtgcataaatgttaacgcttcccaaagtaaaaacttagctttcttacttttactttktattaaatttaatacaaaatatgacctgagtagttaaaaaatattttacattatttgcagtaagatgtcattagccctttcaaagagcaaattttaaaac

SEQ ID NO: 325723 - DNA, 201 bp, Homo sapiens
acatgaaagcaagagataaaattattattagtagatgttaaaatatagagaaatccaacagaatcaaatggagaaatgggcactaataataatggaaggtraaaatgcaaaaatcaatttgccttcataatgttagcaataatctgctaggaaatgcaatggaaaaaacatttcagaagcaacagcaaccacaaaatagaa

SEQ ID NO: 325724 - DNA, 201 bp, Homo sapiens
tgtgaaatttatctttctgagaagcttgtgcttgtgcagagatcttgaagtggcttacttcattacaattaagtcatcatttgcttttttcattttttttkcctaaggggaagagggaataattaaatgtaagatacacctcatgagggtttcagggaatttgaccagtggacttcaagaacacatatcaggaacatttta

SEQ ID NO: 325725 - DNA, 201 bp, Homo sapiens
aaaagtttttgtacttcacctgagctggtaaagtgacaatatctagactgataagttatataatacctagagaaaccaataaaaaaaaaagctatagacarggatacactaagagaacctatagataaattggaattgaattccagaaaaatgttaaagtaatccataggaagacaggaaaaataaaacagaaatgaataa

SEQ ID NO: 325726 - DNA, 201 bp, Homo sapiens
ttaacattcattcctgtgaaatgaacagaaatttccttatcacgataaagagcttttatcagaaaacagcaatagcatctcaacacagttgggaagaagaygaatatgactactatttgtattgttactcaaaattattctgggattacaaatacatgaaagcaagagataaaattattattagtagatgttaaaatatag

SEQ ID NO: 325727 - DNA, 201 bp, Homo sapiens
atctttttttttttttttttttttttgagatgagtcttgctctgttgcccaggctggagtgcagtgggacaatcttggctcactgaaacctccgcctcctrggttcaagcaattcttctgcctcagcctcctgagtaactgggactataggcatgcaccaccatgcctggctaaactttgtatttttagtggagacagggt

SEQ ID NO: 325728 - DNA, 201 bp, Homo sapiens
agagtgtgttttttacttatgatattttcaatttaggatgggtttattgggacgtagccagattgtaagccagggagtatatatatatatatatttgagayggagtcttgctctatcgccaggctggagtgcagtggctaattttttgtatttttagtagagacggggtttcaccatgttggccaggatggtctcgatctc

SEQ ID NO: 325729 - DNA, 201 bp, Homo sapiens
aattcctgacctcaggtgatccacccgccttggccttccatagtgctgggatcacaggcgtgagccaccatgcccggcccatattttctaaattttctacmgtaaacctttgtacctaataagaggcactttgctaggtactgagagtgcagtgttgagcacatattaattatcttgtttcttcaatagtgcattcgtttt

SEQ ID NO: 325730 - DNA, 201 bp, Homo sapiens
tgatgtggccaggtggagacacagataagttgaagtttattctggtaaagacctttgtacctgacatgcagcaagtcccagtcctgatggagggaggatgyagccagctccctagtgctaaagcattttggctttgcaggcaaaaacctgcattcaaaatctaactataacagccttgcaaacaagctacttaacttcatc

SEQ ID NO: 325731 - DNA, 201 bp, Homo sapiens
ccaggcatggtggcacatgccagtggtcccagctactcgggtagctgaggcaggaggatcacttgagcccaggaggtcaaggttgcaatgaaccctgatcrtaccactgcactccagcctgggcaacagagccagaccctagccaaaaaaaaaaaaaaaaaaaaaaatcaaaactatttattatgaacattttctcctatt

SEQ ID NO: 325732 - DNA, 201 bp, Homo sapiens
tccttcaaagtttctgctttgtttccacagctgcatgtttccagcctgtgctgtgcacgctgggtgggagagggcaacttgaatgcaataactacacctarcacagttggcaagactctttctttactatcatgaaggaaaccacatttaaaaatgtgtccccttatgtatcctctgggcattgcatatagttctgtcatc

SEQ ID NO: 325733 - DNA, 201 bp, Homo sapiens
ttctagctggcgaagcaacaccccaaggatcctgtgacaatttattgaatatgacaccaaaacagtaatcaacaaaagaaaaaatagataaattggacttygtcaaaattaaaaacttttatgcatcaaaggacactatcaagagtgaaaagacaatctaaagaatgggagaaaatgtttacaagccacatagctcatcag

SEQ ID NO: 325734 - DNA, 201 bp, Homo sapiens
tgagttaggaactcttcctaacccacataaagtatttgaccctacctgaccatttactgcatgacccccatgcttagcctctctggaccagtttctggtcwgtcatacctcaccggcgcaatacgaagattcaatgaatgaaaacgtaagtagtttgtgccctttctatgtgggatgactgaaaggagcttaccaagccat

SEQ ID NO: 325735 - DNA, 201 bp, Homo sapiens
cccatctctaccaaaaatataaaaaattagctaggtgtggtggcatgcacctgtaatcccagctactcggaaggcggaggcaggagaattgcttgaacccrggaggtagaagttgcagtgagccgagaaattgcgccactgcgctccagcctggccaacagagcaagactccatcttaaaaaaaaaagaaagaaagaaata

SEQ ID NO: 325736 - DNA, 201 bp, Homo sapiens
ctatttattggggtctgggtaagattttatttgaacaaatacttttgcactttaggaaaaaataaaagtggatggagttttgtaaagaatgacaggtgccrttgtcatgtacaaatctgcaaagttcagagagctgaatacaatttagcttaaccctacttgcaacagaaagggggaaactacaaggtacaggatgagaga

SEQ ID NO: 325737 - DNA, 201 bp, Homo sapiens
gagctatgatcatgccactgcactatagcctgcatggcagagcaggaacgcttaaccatctcatagataactagattagtcttcttctagggacctaaagrgcaaagcgataaagcgagcataaaagcagtttgaaaagtaagtgacagaagcatgaaaagcatcgtttttgaattagttcttacttggattccattgatg

SEQ ID NO: 325738 - DNA, 201 bp, Homo sapiens
ctctgcctcccaaagtgctgtgattacaggcgtgagccaccgcacccggctggcttttaaacaatatcaacaccgaaggggtgagattcttagagtgacakttcagagacagtcaggagagtaggggagatggaaacacctgctactaatggtaaggctcggctgcgactgcccagccctgggaaagcctttctctgcaga

SEQ ID NO: 325739 - DNA, 201 bp, Homo sapiens
gtagaagtataggatcatgctaacaccgttgctagtgtagctataactggccatcattcgagctgagcatgggtttccattcagcccagaagtttcaactrcacacaagagatgatgaagcagcaacacagaagcacagacagaggtgtggagcacagtctaagccatggggagagattttctcacctgggctgcaccagg

SEQ ID NO: 325740 - DNA, 201 bp, Homo sapiens
ggaaactcaagttgacagtacagttgggaataatttctctggcctgcacttagtgccatagtagaagtataggatcatgctaacaccgttgctagtgtagstataactggccatcattcgagctgagcatgggtttccattcagcccagaagtttcaactgcacacaagagatgatgaagcagcaacacagaagcacagac

SEQ ID NO: 325741 - DNA, 201 bp, Homo sapiens
cgcccacctcggcctcccaaagtactgggattacaggcgtgagccaccgcacctggcatatacatgaatttttttgtttgtttggttggttgtttttttgtttgttttttttgagatagagtcttgctctgtcacccaggctggaatgcagtggcgctatctcgactcactgcaagcttcgcctcccaggttcacgccatt

SEQ ID NO: 325742 - DNA, 201 bp, Homo sapiens
tgaggcaggagaatcgcttgaacccaggaggcggaggttgcagtgagttgagatcacaccattgcactccagcttgggcgacaagagtaaaactccatctaaaaaaaaagaaaaacccaaacaaaaagaacactagttgcctctgaagatggtgagcctctgaagatgcctctgaggctcaattttgagggaattctatat

SEQ ID NO: 325743 - DNA, 201 bp, Homo sapiens
tgaggcaggagaattgcttgaacccaggaggcagaggttgcagtgagccaagatcatgctactgcacttcagcctgggcaacagagtgggactctatctcaaaaaaaaaaaaaaaaagagctgtaatacaaatagggctgaaacatatccctctgcttgccacattcccagcaacaagaagaaaagaactgcagccctttg

SEQ ID NO: 325744 - DNA, 201 bp, Homo sapiens
tgtggtggctcacacctgtaatcccggcactttgggaggctgaggcaggcggatcacctgaagtcagtggttcaagagcagcctggccaacatggtgaaamcccatctctacaaaaatacaaaaattagccctgcatgatgggggaggctaaggcggaagaatcgcttgaacctgagagagggagcttgcagtgagccgag

SEQ ID NO: 325745 - DNA, 201 bp, Homo sapiens
ccaggatggtctcgatctcctgacctcgtgatttgcctgcctcagcctcccaaagtgctgggattacaggcgtgagccaccacgccttgctcttttttttkggggggggggggttgtcgtggaaattaagtttatgaatctccttgatctctgaattattccaaacagcaccatcccagcaattccttttaattgttttta

SEQ ID NO: 325746 - DNA, 201 bp, Homo sapiens
taaggcggaagaatcgcttgaacctgagagagggagcttgcagtgagccgagatcgcgccattgcactccagactgggcaacagagcgagactccatctcaaaaaaaaaaaaaaaaaaaagaatgaatatcttctattacttcatttattgtgccaggtactcttactcttgggcaactgaaatcatggcttcatatctat

SEQ ID NO: 325747 - DNA, 201 bp, Homo sapiens
caggatggtctcgatctcctgacctcgtgatttgcctgcctcagcctcccaaagtgctgggattacaggcgtgagccaccacgccttgctctttttttttkgggggggggggttgtcgtggaaattaagtttatgaatctccttgatctctgaattattccaaacagcaccatcccagcaattccttttaattgtttttag

SEQ ID NO: 325748 - DNA, 201 bp, Homo sapiens
gcttgggaagggggctccagacttggtgcagtggaaccaataggcatggtcacgtgagaaatcagagtcagaaaaaaaagcagtggcaggggaaattgagagaaggagatagtttctagtgctgctacagaggtagctattctaaggcttgatgaccaattggttgtcaaagataagagggaggaaaaaaaacaaagggtc

SEQ ID NO: 325749 - DNA, 201 bp, Homo sapiens
cttgggaagggggctccagacttggtgcagtggaaccaataggcatggtcacgtgagaaatcagagtcagaaaaaaaagcagtggcaggggaaattgagagaaggagatagtttctagtgctgctacagaggtagctattctaaggcttgatgaccaattggttgtcaaagataagagggaggaaaaaaaacaaagggtct

SEQ ID NO: 325750 - DNA, 201 bp, Homo sapiens
gtagctgggattacaggcatgcgccaccaggcccagctaattttgtatttttagtagagacggggtttctccatattgatcaggctggtctcgaacccccracctcaggtgatctgcctgcctctgcctcccaaagtgctgtgattacaggcgtgagccaccgcacccggctggcttttaaacaatatcaacaccgaaggg

SEQ ID NO: 325751 - DNA, 201 bp, Homo sapiens
tgttacctacaaaggaaatgatccttactcctctcactcttgtcctatccctcctccagggccctgcactcagaagggaagttacctaaaggtaaggcttrttccttttgcaaagggccacaagatactgtccctctgagaaacttatgagggggaaatttgcaaatccacagagagctgccctcagccgagcagaggcag

SEQ ID NO: 325752 - DNA, 201 bp, Homo sapiens
tgacacatagttatcacctggaatccataatttacattaggcattagggttcactcagtgttttttttgttttgttttgttttgtttgagatagagtctcrctctgtcacccaggctggagtgcagtggcacgatcttggctcactgcaacctctatctcccgggttcaaccaattctctgcctcagcctcctgagtagct

SEQ ID NO: 325753 - DNA, 201 bp, Homo sapiens; identical to SEQ ID NO: 68618

SEQ ID NO: 325754 - DNA, 201 bp, Homo sapiens
gcctggagaatgccagctggttttcagcccccaatactttggagcagaattagttaactttgagtgatgggtggatctttcttttcttctaatttaacttkctgttcatgtttagcttacatacagtattgggtcattttttgcataacttttttttatttctaacagactttattttttagagcagttttaagttcacag

SEQ ID NO: 325755 - DNA, 201 bp, Homo sapiens
ggcttctttctggaggatgaatggggagtaacccagggacaccactcctaagtgcttagactagaaatggtggggagtcagaaaagaactgtttatggtgraataaaacaaagaaggctgggcgtggtggcttattcctgtaatcccagcactttgggaggccgaggtgggcggatgacctgaagtcaggagttcaaggcc

SEQ ID NO: 325756 - DNA, 201 bp, Homo sapiens
caattttcctgcctcagcctcccaggaagctaggattacaggtgcccaccaccacgcccagctaatttttgtatttttagtagagacgaggtttcaccacrttggccaggatggtctcaatctcttgacctcgtgatccacccgcctcggcctctcaagaagctgggattacaggcgcctgccactatgcccagctaaatt

SEQ ID NO: 325757 - DNA, 201 bp, Homo sapiens
cagagccatgagccaattaaacctcttttccttataaattacccagtctcaggtatttctttatagcaatgtgagaaggaactaatgaacccaggctggtytggaactcctaggctcaagcaatcctcccacctcagcccctcaaagtgctgagattatggatgtgagccaccacgcgcagccccagccccaaggttttgt

SEQ ID NO: 325758 - DNA, 201 bp, Homo sapiens
taatagctcaaaagaaaaatttccttggctctgaaaaacaaaagaaaggatcagcaacgttttaagccaaaagttaaaaaaagattgcttcagtcttctgtaggtcaatccatgcagttaactcctgttttgcttgatattcatgaacatttcagctcttcatgagtcctgaaagttttttcctctattttaatgtcacaa

SEQ ID NO: 325759 - DNA, 201 bp, Homo sapiens
atctttgtcagcatttgtaattttccattttttggactatagccatcctagtaagtgtgcagtgatgatgtcacattgtggttttgattttcatttccctratgactaaggatgatgagcatcttgcatcttttcacatgcttattggccatctatatatcttctttagagaatacctattcaagtcctttgcccattttc

SEQ ID NO: 325760 - DNA, 201 bp, Homo sapiens
ctcctgggtagctgggattacaggtacacgccaccatgcccagctaatttttatatttttagtagagacaggggtttcaccatgttggtcaggctggtctygaactcctgacctcaggtgacctgcctgcctcagcctcccaaagtgttgggattacaggcatgagccaccacgcctggccgctatagtgttattatttct

SEQ ID NO: 325761 - DNA, 201 bp, Homo sapiens
tcactgtagcctctgcctccctggttccagcgagtctcctgcctcagcctcctgggtagctgggattacaggtacacgccaccatgcccagctaatttttrtatttttagtagagacaggggtttcaccatgttggtcaggctggtctcgaactcctgacctcaggtgacctgcctgcctcagcctcccaaagtgttggga

SEQ ID NO: 325762 - DNA, 201 bp, Homo sapiens
gaaccactgtgtccggtctttttttttttttttttttgcacacggcaaatcagatttgggtctaactttttggggggcaagaatatttcataggctgtacyatgtactttgcatcatatcaggagacacgtactatctgttagacctatagtgaatctacagttgatcagtgagttcagatggcaatgactccctttattt

SEQ ID NO: 325763 - DNA, 201 bp, Homo sapiens
cgagtagctgggactacaggctcccgccaccacgcccggctaattttttgtatttttagtagagacggggtttcaccgtgttagccaggatggtctcgatytcctgacctcgtgatccgcccgccttggcctcccaaagtggtgggattacaggcgtaagccaccacgcccggcgattttaaacatttttaagtgttcaat

SEQ ID NO: 325764 - DNA, 201 bp, Homo sapiens
gattttttttcctgacatgggtacttctctttacatctatagctttaaaaagttttattataaatttcaaaaacatacaaaagtataaagaatagtatcayaaacccccatttgcctattacctaaacccactgattatcgagactttactatacagtgcttgtttcttcacctatccctaacttaacatcttttgtgtat

SEQ ID NO: 325765 - DNA, 201 bp, Homo sapiens
gtcaatagctcctaatagccttcatgtgaaaatgtgaccagaagcacgttactaacactggctagagtgcagtaggagagtgtggtaggacaggctgaccyctgccctgttactaggaagacagacactcacccagcctttctgaacagcaactctgctaagagcttttaaaatatgcatattctatgacctaaggaatac

SEQ ID NO: 325766 - DNA, 201 bp, Homo sapiens
gctattaataaggaaactcaagttgacagtacagttgggaataatttctctggcctgcacttagtgccatagtagaagtataggatcatgctaacaccgtkgctagtgtagctataactggccatcattcgagctgagcatgggtttccattcagcccagaagtttcaactgcacacaagagatgatgaagcagcaacaca

SEQ ID NO: 325767 - DNA, 201 bp, Homo sapiens
accccatctctactaaaaatacaaaaattagctgggcgtggtggtgggtgcctgtaatcccagctactcaggaggctgaggcaggaaccccggaggcaaakgttgtagtgagccgagatctcaccattgcactccagcctgggtgacagagggagactccatctcaaaaagaaaaaaacaaaacaaaacaaaaaaaacctc

SEQ ID NO: 325768 - DNA, 201 bp, Homo sapiens
cactgcaggagcactatgagaaccacgtggagtggccgacaggatagggctttgaaaagtacaaagctgccctctgtagaaaacaccctaaagcagaggtycccaacccccaggctgcagaccagtacaggtccgtggcctgttaggaaccaggcagcacagcaggaggtgagtgacgggcaagcaagcattactgcctga

SEQ ID NO: 325769 - DNA, 201 bp, Homo sapiens
gcttctcctgttctagttatcagcaagagggactagacaaagaaaactggggcaactatcattcaccaactgtctcttaaggaagcatccaaaaactgacytacatgtttatctagggtagaattgttactatattagagaagacagaaactatgcttggacccaggccttgagctgattagggttgaactttaggcaaag

SEQ ID NO: 325770 - DNA, 201 bp, Homo sapiens
tgatgatagggaggctttaaaaaattatggcatctataaatgagaatttggctttgctgcaaatagcagatgacccacaataactgtggtaggaggagggrtgctatctgggaccgtgtgatggctcactccccagagtccttgcagcttggtttcctcctttttcattactctactctgtctggcttcatacctaagatt

SEQ ID NO: 325771 - DNA, 201 bp, Homo sapiens
gcaagctttatgtactttatttgttgcaataatatgaaatgcatctttctgggaaggagaacacaggtaactgatttcagtgtaatacctagcactcatgscttgctaatcctttttatatcctatgagaaaggaaaaatccaggccgggcgcggtggctcaagcctgtaatcccagcactttgggaggccaaggcaggtg

SEQ ID NO: 325772 - DNA, 201 bp, Homo sapiens
acaggatcttactaatgttgcccagctggtcttaaactcctggcctcaagcagccctcccaccacctcagcctcccaaaaggctgagattacaggggtgaracaccacacctggccaaattggcaatttttgaagaaagatttctcacaaggactttgcaagctttatgtactttatttgttgcaataatatgaaatgcat

SEQ ID NO: 325773 - DNA, 201 bp, Homo sapiens
tgtattttatattatttcatgagtattaatttttaaaattggctgtttttaggctttgcattgcaaaacacattcccaaaaacaaaatgccaacttactctttttttttttttttttttctgagatagtctcgctctgttgcccaggctggagtgccgtggcgtgatctcggctcactgcaacctccaccacccgggttca

SEQ ID NO: 325774 - DNA, 201 bp, Homo sapiens
agagggaaatacatcccgcatctgcctcatcatgaacttgggtggccaccaggatattgctcatgaaagctgcttttctttctttttttttttttgagacrgagtttcactcttgttgcccaggttggagtgcaacggtgcgatctcggctcactgcaacctccgcttcccaggttcaagcgattctcctgcctcagcctc

SEQ ID NO: 325775 - DNA, 201 bp, Homo sapiens
ccatgcctggcctacctatttacattcttactggcactaatgagagtatctgtcttaatatactactttctgtagcattgactgacattttttataaatttctttttttttttttttttgagacggagtcttgctctatcgcctaggctggagtgcagtggcgcaatctcggctcactgtaagttctgcctcctgggttca

SEQ ID NO: 325776 - DNA, 201 bp, Homo sapiens
ccccgtctctcctacaaatacaaaaattagctggctgtggtggtccacgcctgtagtcccagctactcgggaggctgaggcaggagaatcacttgaacccrggaggcggaggttacagtgagctgagatcgcgccactgcactccagcctggcaacagagggagactccgtctcaaaaaatatatatagagagagagagca

SEQ ID NO: 325777 - DNA, 201 bp, Homo sapiens
gccactacgcctggctaatttttgtagttttagtagagatggggtttcactatcttggccaggctggtcttgaactcctgaccttgtgatccacccacctyggcctcccaaggtgctgggattacaggcatgagccaccatgcctggctcactaggtgtttttaaaaggaaaaaaaatctcacttactttgagaagactct

SEQ ID NO: 325778 - DNA, 201 bp, Homo sapiens
gaggctgcagtgagctgtgtttgcaccactgcactccagcctggatgacagagcaagaccctatttcaaaaaaaaaaagatatttctgaggagccatgctyattcaagactcactgctcttagaagaggtgttaatctggccaggtgccgtggctcacacctgtaatctgagcactttgggagggtgaggtgggaggatca

SEQ ID NO: 325779 - DNA, 201 bp, Homo sapiens
tttgtgtttttttaaattgttattttttttttttttttttttttttttgaggcagagtctcaccctgtctctcaggctagagtgcagtggttcgatcttgrctcactgcaacatctgcctcccaggttcaagcgattttcctgcctcagcctctggagtagcgggattacaggcattcaccgccacgcccagccaattttg

SEQ ID NO: 325780 - DNA, 201 bp, Homo sapiens
cccaggagtacaagaccagcctgggcaacatggcgagaccccatgtctaccaaaaaagaatttttttttttttttagacagattctcactctgttgcccakgttggagtgcaatggcatgatcttggctcactgcaacttctgcctcctgggtttaagcgattctcctgcctcagcctcccgagtagctgggattacagtc

SEQ ID NO: 325781 - DNA, 201 bp, Homo sapiens
agtggccacagcaatcacattgctctgtatgcagctgtgaggtatgattctccgggtgatggatgtgggggagggtttgtttatttgattagggctcatgstttaaagtctaaagcactttcccacttgttatctgagcccatgaaactcactgctggcttatcttctagccctttttggccatgttgctcactgcatctc

SEQ ID NO: 325782 - DNA, 201 bp, Homo sapiens
cagccctctgtttggcacatagtgtgtgcttagtccagatcacttaaatgtacaatgatttcattctctcggagccccgctctggtggtgtgggtccctgsggacccctccagatgcctttctccagccatggctgcgcaggcaccgagaagccgcaggctggttccagctcacagcctctcgcctcaggcccacactgct

SEQ ID NO: 325783 - DNA, 201 bp, Homo sapiens
gcctgggcaacatagcaagaccccatggctataaaattaaaaaaggattaaaaagtagataatattaaaacaccttagatttttcaaagtaatggagctcttttttttttttttttttttgagatggagccttgctctgtcacccaggctggagtacagtgacatgatctcggctcactgcaacctccatctcccaggttc

SEQ ID NO: 325784 - DNA, 201 bp, Homo sapiens
gctaatttcttttttcttttttttttctgagacagagtttccctccatcgcccaggctggagtgcagtggcgggatctcggctcactgcaacctccgcctsccgggttcaagtgattctcctgcctcagcctcctgagtagctgggactacagacacgtgccaccacgccaggctaatttttgtatttttagtagagatgg

SEQ ID NO: 325785 - DNA, 201 bp, Homo sapiens
tgctgccttcaagcatctgtttaacaaagcacatcttgcaccgcccttaatccatttaaccctgagtggacacagcacatgtttcagagagcacagggttsggggtaaggtcagagatcaacagcatcgcaaggcagaagaatttttcttagtacagaacaaaatgaagtctcccaggtctacctccttctacacagacac

SEQ ID NO: 325786 - DNA, 201 bp, Homo sapiens
ggcggctggccgggcgggggctgcccgcagccccccacctccctcccggacggggcggctgctgggcggagacgctcctcacttcccagatggggcggctsccgggcggaggggctcctcacttctcagacggggaggccgggcagagacgctcctcacctcccagacgggggtcgcggccgggcagaggcgctcctcaca

SEQ ID NO: 325787 - DNA, 201 bp, Homo sapiens
aggctgcaatctcggcactttgggaggccaaggcaggcggctgggaggtggaggttgtagctagccgagatcacgccactgcactccagcctgggcaacaytgagcactgagtgaacgagactccgtctgcaatcccggcaccttgggaggccaaggctggcagatcacttgcggttaggagctggagaccagcccggcca

SEQ ID NO: 325788 - DNA, 201 bp, Homo sapiens
ctgcaatctcggcactttgggaggccaaggcaggcggctgggaggtggaggttgtagctagccgagatcacgccactgcactccagcctgggcaacattgwgcactgagtgaacgagactccgtctgcaatcccggcaccttgggaggccaaggctggcagatcacttgcggttaggagctggagaccagcccggccaaca

SEQ ID NO: 325789 - DNA, 201 bp, Homo sapiens
acccaggcatccctgcactcttgactcaggaagccccctgcccccacaggctcaaaaatgcctgctcccactgcctggcctcttcctgttcctggtgcccrctccaattttggagcaaagttgaggctgagcccaggcactgtcgcaacctgccacagtgcacgcatgctcagggcagcactgatacaccagccccctgcc

SEQ ID NO: 325790 - DNA, 201 bp, Homo sapiens
aatatccacagggctttgcccagagtacaggacaagccacttcattctcaggatcccagaaagttttttcagtcttttcttttctttctttctttctttctttttttttttttttttttttttttttgcgacagagtctcgctctgtcacccaggctggtgtgcagtggcgtgatctcagctcactgcagcctccgcctcc

SEQ ID NO: 325791 - DNA, 201 bp, Homo sapiens
aattttagaaggaattggatactgatattggcaaatttttatgagactggctaaaggagaaagaagaaggggacctgtgatagaatcttccatgacaaggrggaaatactggcctcagtctcctgcagaagcaggagctctggtacacaggtggggtgcccactggtacagctcccatctgacatgaagcaggcaagccaa

SEQ ID NO: 325792 - DNA, 201 bp, Homo sapiens
taagggcactacctacctctcatcactctaaaattttagattgagatttttcaggccatagaggtcatataaattcagggatcaaacccaagagcattcabtgtggaatgctgtgaaacaaattgtctcaagaccttgtagcttaaaaccataattaaatctttccagcctgtgtgctggcacacacctataatcctggca

SEQ ID NO: 325793 - DNA, 201 bp, Homo sapiens
ctggctacttctcattctcttcccggcttccctcccaccagtggccccttggtccccctgtccccagggctcactccccagtcctcctcagcacagcttcycctgtggctttaagggctataagctctacttccagacagcgcctctagctcactgctttccctggacatcagaatatccacagggctttgcccagagtac

SEQ ID NO: 325794 - DNA, 201 bp, Homo sapiens
acccttgccatgtctcccttccctgagccttgaatcctgcttgccctgtggtgcccccatgtcccccagtacggttctccccgctgccctctataaccaarcacctggcaggttattgcttttccataaagctggaaaactcttagacagtgagaggcaggtggccagactgctgctgtcctttgaaggtttagggccaag

SEQ ID NO: 325795 - DNA, 201 bp, Homo sapiens
ttgggaagggggctccagacttggtgcagtggaaccaataggcatggtcacgtgagaaatcagagtcagaaaaaaaagcagtggcaggggaaattgagagaaggagatagtttctagtgctgctacagaggtagctattctaaggcttgatgaccaattggttgtcaaagataagagggaggaaaaaaaacaaagggtctc

SEQ ID NO: 325796 - DNA, 201 bp, Homo sapiens
ccttaatctatgttaaacaaaaaagggaaagcaggcaactttatccgtatttatgatttgattgacaacatatccagtgtttaaccattaactgtgttgtyactggtgtgtgtttgtttgtttgtttatgagacggagtcttgctctgttacccaggctggaatgcagtggtgcaatcttggctcacagcaacctccacct

SEQ ID NO: 325797 - DNA, 201 bp, Homo sapiens
tatgggatcctggaaatctatacagtgatttatgcaaaagaaaccacctggagactcacatggaggggaccatgggcatggcagcctttcctctgaaggcscctcctgttacctacaaaggaaatgatccttactcctctcactcttgtcctatccctcctccagggccctgcactcagaagggaagttacctaaaggtaa

SEQ ID NO: 325798 - DNA, 201 bp, Homo sapiens
agacattttgatttgccactttatcactgttatacatggagcgatgctcccagcttgagtttaagaagaattcagacctgccaggagcctctgtaaagagcctaggggaggccagacgccgtggctcacgcctgtaatcctaacactttgggaggccgagacaggcagattgtctgagctcaggagtttgagaccagccag

SEQ ID NO: 325799 - DNA, 201 bp, Homo sapiens
aatgatctcaaggaatccagagtgctcattaagttggtgaaagagtcagtgcagaatgcagctcatacatatatcctgatgtgatgttggcacctctcaaraagctgggaaagatgtccaggctggtcataggactcagcccctattatgggtccagcagccagtaatagtaagcaatgtctacttcaaaagatatctctg

SEQ ID NO: 325800 - DNA, 201 bp, Homo sapiens
cagcctctcaagtaactgggactacaggcgcatgccaccacgcctagctaatttttgtatttttagtagaggcagggtttcaccatgttggccaggttggkcttgaactcctgacctcaaatgatccgctcccctctgcttcccaaagtgctgggattacaggcatgaaccactgcgccgggccttttttttttttttttt

SEQ ID NO: 325801 - DNA, 201 bp, Homo sapiens
agggtgcacacaaggaatgtaaatttcaatataattaggatataattagagaagcaaatctgatgcaggtttacatactaatcccaaagattagaattacstatactactactctccaaggttaactctgtggaagaggcaccgcagcatgcaacatcacataaagaaaactgacacttcctgagcaaatagttttcgtcc

SEQ ID NO: 325802 - DNA, 201 bp, Homo sapiens
agaagcaggagctctggtacacaggtggggtgcccactggtacagctcccatctgacatgaagcaggcaagccaaaggggagcaagagcaatgcaacctgkaagacccatcctcagacattctgctattgcccccagacaatggaaggggggcgacagctgtccatgggggcactgctaagagggtgttgatcagcagatc

SEQ ID NO: 325803 - DNA, 201 bp, Homo sapiens
tactcggaaggctgaagcaggagaatggcgtgaacccaggaggcagagcttgcagtgagccaagatcgcgccactgcactccagcctgggcaacaggctcaaaaaaaaaaaaaaaaaaaaaagaatgtggactctagaatcaatcagttggctctgggttaaaatctcagccagctctactacctactagctgtttgagac

SEQ ID NO: 325804 - DNA, 201 bp, Homo sapiens
tttttttttttttttttttttttttgaggcagagtctcaccctgtctctcaggctagagtgcagtggttcgatcttggctcactgcaacatctgcctcccrggttcaagcgattttcctgcctcagcctctggagtagcgggattacaggcattcaccgccacgcccagccaattttgtatttttagtagagacgggcttt

SEQ ID NO: 325805 - DNA, 201 bp, Homo sapiens
atgagaaccaccagaggtcactttcattgccatcttggttttggtgggattttggtgggatttttattgcaggttgttttatcagtaaggtctttatgacstgtattttgtgctgacctcctatctcatcctataagtaagaatgctaacctcctgggaatgcaacccagtaggtctctgccttattttagccagccccta

SEQ ID NO: 325806 - DNA, 201 bp, Homo sapiens
agaggctcatgttctcattagcaaactgatggcctccatcgatggccgtgatactcacagggcgtggttcaaagccccagatcatcagggcttctagagtstacttaatcaggacaggcatttatttaaagtgctctgaagctaactgtcacaaatagggaaccttagtactggtcagttgggaaccaaggttattaccaa

SEQ ID NO: 325807 - DNA, 201 bp, Homo sapiens
gatcacagctccctacagcctccaagtcttgggctcaagtgatcctcccgcctcagcctaccaatagttgagactataggcgtgtgccagcacacccaacttttttttttttttttttgagacggagtctcactgtcgcccgggctggagtgcaatggcgcaatcttgggtcactgcaacctctgcctcctggattcaagc

SEQ ID NO: 325808 - DNA, 201 bp, Homo sapiens
aaattgatctgattttcattttagaaagacttcttttgacaacactgtggaaagcagcttgggaagggggctccagacttggtgcagtggaaccaataggyatggtcacgtgagaaatcagagtcagaaaaaaaagcagtggcaggggaaattgagagaaggagatagtttctagtgctgctacagaggtagctattctaa

SEQ ID NO: 325809 - DNA, 201 bp, Homo sapiens
attctcctgcctcagcctcccaagtagctgggactacaggcatgcatcaccatacctggctaatttttgtttttgtttttgttttgttttgagtctagctstgtctcccaggctggagtgcagtggcacaatctcggctcactgcaacctccgcctcctgggttcaagtgattctcctgcctcagcctcccaagtagctgg

SEQ ID NO: 325810 - DNA, 201 bp, Homo sapiens
ttgtgattctaaggcatcttagggaatttcattatgtctcctaaagctagactcaaaaatagaattaggaattattcttctttagcaaccttcattatgtstcttaaagctagactcaaaaatataattaggaattattcttctgtagcaacctcaagcagtccaggatcagtcctcagctccaccttttgtgacagtggg

SEQ ID NO: 325811 - DNA, 201 bp, Homo sapiens
gcccgccactatgcccagctaattttttgtgtttttagtagagacagggtttcaccatgttggctgggctgctcttgaactcctgacctcgtgattcgccyacctcggcctcccagaatgctgggattacagacgtgagccaccacgcctggccaatttttgcatttttaatggagatagggtttcaccttgttggccagg

SEQ ID NO: 325812 - DNA, 201 bp, Homo sapiens
gcttgcaccactgcactccagcctgggtgacaagagcgaaactccatgtcaaaaaaaaaaaaaaattctaatcagatgccagtctcactgtcattctccartcttcccactataacatatttagttcattgtcctgcccgtgttctaattttgcagttttcctagactgatcctctgtgatccaacaattaattataaatt

SEQ ID NO: 325813 - DNA, 201 bp, Homo sapiens; identical to SEQ ID NO: 68617

SEQ ID NO: 325814 - DNA, 201 bp, Homo sapiens
ctgcagtctgtatatctgattctgttctttgttctagtaattcattcggggtgactcggttccatgtgtattttgtgatttttttaaatgtaagcacgttkctttttttttttttttttttttttgatacggagtctagctctgttgcccaggctgaagtgcagtggcacaatctcagctcactgcaagctccgcctcctg

SEQ ID NO: 325815 - DNA, 201 bp, Homo sapiens
aatgctgtctctactaaaaatacaaaaaattagctgggcatggtggtgggcacctgtaatcccagctactcaggaggctgaggcaggagaattgcttgaayccaggaggcggaggttgcagtgagccgagcttgcaccactgcactccagcctgggtgacaagagcgaaactccatgtcaaaaaaaaaaaaaaattctaat

SEQ ID NO: 325816 - DNA, 201 bp, Homo sapiens
ctactcgcaagtatggctatattggctgataatatagcatgtgacaatgtttcttgatctgcagagatatgagctcatttttctttttaattttcttttctttttttttttttttttttgagatggagtttcactcttgttgcccaggctggagtacaatggcatgatctcggctcactgcaacctctgcctcccaggttc

SEQ ID NO: 325817 - DNA, 201 bp, Homo sapiens
tgctcaacagcaaagaagtggcacaggccaaggtgaggattgtaaattcctggacaccccaactcagatccctgccccagaccccctgtctcctcaaagcmccacctctgcagaagccctaactgaaggtttttcacagtggttcagcacctgtccctgagaattagggctaggccagctagatcttgggaggcatagatt

SEQ ID NO: 325818 - DNA, 201 bp, Homo sapiens
gaggtggaggaagtggatggggaggcggaagaggtggaggaagtggatgggaaggcgggagaggcaggcacacttggtgtaacttttgttgaaaaaatatmtttgtataagtggacccacgcagttcaaacgtgttgttcaagggtcaactgtggtcatattgtcggggttctttagccattaggtctcagaaattagcct

SEQ ID NO: 325819 - DNA, 201 bp, Homo sapiens
gtagctgtgattacaggcatgtgccaccatgcccggctaattttgtatttttagtaaagactgggtttctccatgttggtcaggctggtctcgaactcccracctcaggtgatccacccaccttggccccccaaagtttgggattacaggcatgagccactgcacccagcctttttaatttttttctcttagtgatctttt

SEQ ID NO: 325820 - DNA, 201 bp, Homo sapiens
gttggtcaggctggtctcgaactcccgacctcaggtgatccacccaccttggccccccaaagtttgggattacaggcatgagccactgcacccagcctttytaatttttttctcttagtgatcttttaaagacaacttctgttttatagggataacgcctataatcccagcaatttcataattgaaagattttattcattg

SEQ ID NO: 325821 - DNA, 201 bp, Homo sapiens
aaggtgaggattgtaaattcctggacaccccaactcagatccctgccccagaccccctgtctcctcaaagccccacctctgcagaagccctaactgaaggyttttcacagtggttcagcacctgtccctgagaattagggctaggccagctagatcttgggaggcatagatttttcaatgactttagccttttttttctaa

SEQ ID NO: 325822 - DNA, 201 bp, Homo sapiens
acctttttccccacagtcatctcttgcctgctaaattcgttagactcacgttagtcctcagccaccttgaaccttctgtggcatctggccctgcctgtccstcactgcaatgctgctttgacttatatggcaccagcttgccctcctcactctggcctttctggctacttctcattctcttcccggcttccctcccaccag

SEQ ID NO: 325823 - DNA, 201 bp, Homo sapiens
ctgggaatcgtggcacgtgcctgtagtcccagctacttgggaggctgaggcaggagaatcgcttgaacccaggaggcagaggttgcaatgagccaagatcrcaccactgcactcgtagcatgggcaacagagcgagactccgtattaaaaaaaaaaaaatcaaggaaactttcttagaaacagctgggtcttaatagtctc

SEQ ID NO: 325824 - DNA, 201 bp, Homo sapiens; identical to SEQ ID NO: 68619

SEQ ID NO: 325825 - DNA, 201 bp, Homo sapiens
actcaatgtttttattgtatttcattatttcctctgaatccattttgttttttattgtatgttatttattctttatttgtgtttttttaaattgttatttwttttttttttttttttttttttgaggcagagtctcaccctgtctctcaggctagagtgcagtggttcgatcttggctcactgcaacatctgcctcccagg

SEQ ID NO: 325826 - DNA, 201 bp, Homo sapiens
aattttttgtatttttagtagagacggggtttcaccgtgttagccaggatggtctcgatctcctgacctcgtgatccgcccgccttggcctcccaaagtgrtgggattacaggcgtaagccaccacgcccggcgattttaaacatttttaagtgttcaattccatggcagtaagcactttcatagtattatgtaaccatca

SEQ ID NO: 325827 - DNA, 201 bp, Homo sapiens
tctgtcaccaggctggagtgcagtggcacgatctcagctcactgcaacctccacctcctaggttcaagagattctcctgccttaacctcccgagtagctgrgactacaggcgtgtgcccaccatgcccagctaattattgtatttttagtagagatggggtttcactatgttggccaggatggtctcaatctcttgacctc

SEQ ID NO: 325828 - DNA, 201 bp, Homo sapiens
ttatcaccaaaaatcaagtaatctagggagaaaaaatgggagagggtatgtgtagagatttgagggaaacccaaaatatacacaaaatagtttatgacttaaaaaaaaaaaaaacgcaaaaaaaggtatgatgaggacaatacaaaactaaacctgtaaactaaacctgtttgctgggcgcagtggctcacacttgtaatc

SEQ ID NO: 325829 - DNA, 201 bp, Homo sapiens
tatcaccaaaaatcaagtaatctagggagaaaaaatgggagagggtatgtgtagagatttgagggaaacccaaaatatacacaaaatagtttatgacttaaaaaaaaaaaaaacgcaaaaaaaggtatgatgaggacaatacaaaactaaacctgtaaactaaacctgtttgctgggcgcagtggctcacacttgtaatcc

SEQ ID NO: 325830 - DNA, 201 bp, Homo sapiens
tttgggaggctgaggcggatggatcacaaggtcaggagttcaagaccagcctgtccaacatggtgaaaccccatctcaaataaaaatacaaaaattagccsggtgtggtggcgggtgcctgtaatcctaactactgagctgaggcaggagaatcgcttgaactctggaggcagaggttgcagtgagccaagatcgcgctgc

SEQ ID NO: 325831 - DNA, 201 bp, Homo sapiens
gagctgaggcaggagaatcgcttgaactctggaggcagaggttgcagtgagccaagatcgcgctgctgtactccagccagggcgacagagcaagactcttaaaaaaaaaaaaaaatggccattatctccacttaactggtgaagaaactgtggctcaagaaagttaagtaacttgcacaaatcagacctgcaattatttat

SEQ ID NO: 325832 - DNA, 201 bp, Homo sapiens
ttttaacttctgttcggattttttttcctgacatgggtacttctctttacatctatagctttaaaaagttttattataaatttcaaaaacatacaaaagtwtaaagaatagtatcataaacccccatttgcctattacctaaacccactgattatcgagactttactatacagtgcttgtttcttcacctatccctaactt

SEQ ID NO: 325833 - DNA, 201 bp, Homo sapiens
gcatgagccactacacccggcctagagtgtgttttttacttatgatattttcaatttaggatgggtttattgggacgtagccagattgtaagccagggagwatatatatatatatatttgagatggagtcttgctctatcgccaggctggagtgcagtggctaattttttgtatttttagtagagacggggtttcaccatg

SEQ ID NO: 325834 - DNA, 201 bp, Homo sapiens
ggatttgtggacctcaattggaaaacattgctgtagaacagtagttcattttgaactcatttttgcaagctaaattttgacatgttttagatgctaattckaggaatgttctcccttttctaagaaaagtccaagcattttttacctgctctaaaagaatatcaacggcttttatgtttcagagactggatgcaagagatt

SEQ ID NO: 325835 - DNA, 201 bp, Homo sapiens
attatttatttttattttttgagacagagtcttgctctgtcacccaggctggagtgcagtggagcgatctcggctcaccacaacctccacctcctgggttsaagcaattctcctgtctcagtctcctgagtagctgggactataggggcccgccacttcgcccggctaatttttgtatttttagtagagactgggtttcgc

SEQ ID NO: 325836 - DNA, 201 bp, Homo sapiens
aagtacatctcccttctggatctgcccttgtctctgcttcatacgcaggatgtcctcttcgtgctcaacagcaaagaagtggcacaggccaaggtgaggaytgtaaattcctggacaccccaactcagatccctgccccagaccccctgtctcctcaaagccccacctctgcagaagccctaactgaaggtttttcacagt

SEQ ID NO: 325837 - DNA, 201 bp, Homo sapiens
gaagagtccagcacagttaccttcattctctaatgggcaaagcttggaccagagtacttcacaaaccacagaccagcctctggattggctgtccctagctyaggtgcccatcctggtcccttcagctgttgccagaggtatgggatcctggaaatctatacagtgatttatgcaaaagaaaccacctggagactcacatgg

SEQ ID NO: 325838 - DNA, 201 bp, Homo sapiens
aaaaacttttatgcatcaaaggacactatcaagagtgaaaagacaatctaaagaatgggagaaaatgtttacaagccacatagctcatcagggattgataytcagaatatataaagaagtcttacaacaaaaagacaaaaaatagggtgggcacagtggttcacacctgtaatcccaatactctggaggcagagagaataa

SEQ ID NO: 325839 - DNA, 201 bp, Homo sapiens
gcctcgatcctggactttgcaggaaaaaaaaaaaaaagaataatacattctaccctcacatatagtcaattgattttcaacaatggtgccaagacaattcatggggaaagaatactcttttcaacaaatggtgatggaacatccacatgcaaaataatgaagttgactttgggaggccgaggcaggaggatcatttgaacc

SEQ ID NO: 325840 - DNA, 201 bp, Homo sapiens
ggaaaatcaattcagcccagcctttcttctctagactgcactgccagctctcatatatcagatttccatgtaattctggtctatacactttagtcatctcmacaaccctgtcttaattactgtagcttataaaagctacactaggccagaagtgttggttcacgcctgtaatcccagcactttgggagacagagacgggtg

SEQ ID NO: 325841 - DNA, 201 bp, Homo sapiens
tgaatctttgtaggcatttttaaatcccgggcctgttgctccttgcacagtgccatgttcagccttccatcactgcctcaccagggtgcacacaaggaatrtaaatttcaatataattaggatataattagagaagcaaatctgatgcaggtttacatactaatcccaaagattagaattacctatactactactctccaa

SEQ ID NO: 325842 - DNA, 201 bp, Homo sapiens
actccactgccactgcactctagcctggacaacagagatcctgtctcaaaaaaaattaatgtccttaaaaaacaaacaacagaccaggcacggtggctcaygcctgtaatcccagcactttgggagactgaggcaggttgatcacctgaggtcaggagttcgagactagcctggccaacatggtgaaaccccgtctctact

SEQ ID NO: 325843 - DNA, 201 bp, Homo sapiens
caataaaaatctcgtttctcccagtgcttgtcttgacatcaatgtagcattaaaaagtccaagacttttacagactaatttaagctgaacaaggaaatatmatctggtacctactaagaaacataaatgggcctgggttgctagcagttcctggaagtcactgtgttttccaataaatccatgcaaatcgtaacagggaaa

SEQ ID NO: 325844 - DNA, 201 bp, Homo sapiens
catgcctggcctacctatttacattcttactggcactaatgagagtatctgtcttaatatactactttctgtagcattgactgacattttttataaatttctttttttttttttttttgagacggagtcttgctctatcgcctaggctggagtgcagtggcgcaatctcggctcactgtaagttctgcctcctgggttcac

SEQ ID NO: 325845 - DNA, 201 bp, Homo sapiens
tattgaccagattttgtggataccaaaccctgtaggatacttacattcattttgtcagggtttgtaaatgttgagtgtggggcttgcattgtaattagcaktatgcctagtattaatggaaatgtatgctgcatccctgagaattatcagggtaataagcatcctattcccaatatcttcctccctatatgaggtagatta

SEQ ID NO: 325846 - DNA, 201 bp, Homo sapiens
tgggttcctcatgactttgtcagttatggaaggcatctcaggttctttgtagcgtatagcttatgtaaaatagatatccatgagttaatccgtcagcagawtaaatacccttccagttactcaaatatagtaattttataaatttctttgataaaagtagattttcagatgctgccactcatcatctatatattttagtgc

SEQ ID NO: 325847 - DNA, 201 bp, Homo sapiens
gatgaatggaacccaaaactgagtagtgaatttagtttactgccaaacattgatgttttgatttaggtttattctattgtcttgtggattaagttgacagyaactcttgacacatgttaaaaactgtgtttctttttgaaaatttatgaatttgggggttcttaaaagtctggaaaataatcttttgtggaagtatagaag

SEQ ID NO: 325848 - DNA, 201 bp, Homo sapiens
ggaatctagacatctgcaggaaatgtgaaaatatttttataacctaatagctgagatctggacaggggtatcactgagttttcccagctgtacctgcaatrtattttgaaatgttcccagactgaaagaacactgaaacttattgcatgaactagactgcatttaaaaaataataatgttggctgcctttgaacagtgtgt

SEQ ID NO: 325849 - DNA, 201 bp, Homo sapiens
tttcatttaaggcacaataggagaccatgggagggattgtaggctgaggggtgaaacaatggatttaaaaaatatataaattattctggatgctttgtaargaatagattgggaggtaacaagagtagaaataggaaggccatttaggaagctattataggtagtctggatgagagatggtggtggcaatgactacaggat

SEQ ID NO: 325850 - DNA, 201 bp, Homo sapiens
ctgataaagtgcttgcaaagaataagactttagggaaatgaaaaaacatagtgaatgctaataatttaagcaccttaatgcctatatttggccatgagttrctaggatacagtttctttccatgttttctctgatatcccagtttattttcattggcgtacgtcaacatggagaagaaggatatgtttgtcatgagaggaa

SEQ ID NO: 325851 - DNA, 201 bp, Homo sapiens
tgagagatggtggtggcaatgactacaggatttccaactgattgagttaagggtgtggaggaggaggaagattgggaagaaattgaggacagatacaggcytttatctgtgaattgtcagaggcctgtgaaccagagcaactccatcttaaaagctgggtaaaatgaggctaagatctactgtgctgccttcccagacaag

SEQ ID NO: 325852 - DNA, 201 bp, Homo sapiens
catcgaatatggacagttgattgatgtacacccctcgtagaatatgagctcctggaggaagcttaaccaccttattttctaagtactgataaagtgcttgyaaagaataagactttagggaaatgaaaaaacatagtgaatgctaataatttaagcaccttaatgcctatatttggccatgagttgctaggatacagtttc

SEQ ID NO: 325853 - DNA, 201 bp, Homo sapiens
gaggttaccctacaatacctgtaagagtaaagtagttttcttgcccagatagatatttctaattctggtttccataatcttgcaagaatggcagagccacrttgggaagggagaaaaatccaaattttagtcgttgggcctgacacattagtaaagaaatgcgtccttgccaacttatgcaaaatgatcaaaacatgagaa

SEQ ID NO: 325854 - DNA, 201 bp, Homo sapiens
gcaactccatcttaaaagctgggtaaaatgaggctaagatctactgtgctgccttcccagacaaggcattctaagtcacaggataagataaaaggtcagtrcaaaatacaggccataaaatccttgttgataaaacaggttacagtaggagctggccaaaacccaccaacaccaaaatggcaacaattgtggcatctgctc

SEQ ID NO: 325855 - DNA, 201 bp, Homo sapiens
tgaggcaggggaaccacttgaacccgggaggtagagcttacagtgagccgagattgcaccactgcactccagcctgggcaacagagtgagactacatctcaaaaaaaaaaaaaataatacatttctattgtacatttgtagcttctaactgatgaggtcatgacactggcaagccctccctgtttgttagctgtgcttcaa

SEQ ID NO: 325856 - DNA, 201 bp, Homo sapiens
aggttaccctacaatacctgtaagagtaaagtagttttcttgcccagatagatatttctaattctggtttccataatcttgcaagaatggcagagccacgwtgggaagggagaaaaatccaaattttagtcgttgggcctgacacattagtaaagaaatgcgtccttgccaacttatgcaaaatgatcaaaacatgagaag

SEQ ID NO: 325857 - DNA, 201 bp, Homo sapiens
tcgtgtatattaagcagctactatctgccagagaccgtgctggatgccataggcaaatactgaaccaaagggtttccctatgaagggagctcatggtttcwaagaggaaatgagtcatatgcaattggaattgccttgaattttgaaattttattaatgggataaggaaattagatagattagatagatagatagataata

SEQ ID NO: 325858 - DNA, 201 bp, Homo sapiens
ctgtggacctgatagcccacatagactcttcactgatgttcatgatgatgatccatgattaaagctccctgggcatgaattgactctactgtgccttaacyggcatgaaggagatgtttaagtgttgtattcaactgtgataataggattaagacctcaacataaaaatttaggctcagagcaacattttgtggggaaaaa

SEQ ID NO: 325859 - DNA, 201 bp, Homo sapiens
gaagactctttgcctggtgtatacattcagctatcaaccctgaaggaaaagtataagttgaatatttcatatgagtttcattagggtatataaagaaatamaaagacaacgggccaggtgcggtggctcacgcctgtaatctcagcgttttgagaggccaaggcgggcagatcacctgaggtcaggagttcgagaccagcg

SEQ ID NO: 325860 - DNA, 201 bp, Homo sapiens
gccacagtatatcctaagggaattcaaggtcacagatgccagggtaagttggcacagtcttcaactcttaaccattagctgaaaagtagtctaagatacctctctctctctctctctgggagaagcacttgccacttgactgttgtcccaaagagaaatcattcattctggagaacgtttttttttatgtttaatatgtaa

SEQ ID NO: 325861 - DNA, 201 bp, Homo sapiens
agaaaagtagaaaacatgtgcatgtatacattaacatagaagatgggtggcaactggaatatttaacacggaaaaatgtgttaagtactgttataattatwtcattgcactaaaataaatgctttgcttattagaaccaattgtttctataagcagggtttcttaacctcagcagtttggacattttagatcgtagaattt

SEQ ID NO: 325862 - DNA, 201 bp, Homo sapiens
aaagttatattaactattctgaaggtgacagtattcaaggcagcagttaaatctctaggtcttgagtgtaacctgccccaccgtttaaaaaaaaaaaaaawagtgctctttcagaatttgaagctaggtatgtgagtgaaaatagaaagtgcattttgagtaaactcaccaactattcctggtgataaagaaaaggcacca

SEQ ID NO: 325863 - DNA, 201 bp, Homo sapiens
tcctatttctccacatcctccccagcatctgttgtttcctgactttttaatgatcgccattctaactggtgtaagatggtatctcattgtggttttgattkgcatttctctaatgaccagtgatagcattttttcatatgtttgtctgccgcatcggtgtcttcttctgagaagtgtctgttcatatcctttgcccacttt

SEQ ID NO: 325864 - DNA, 201 bp, Homo sapiens
atcagagactaggattgcaacccctgctctttttttttgccttccatttgcttggtagatcttcctccatccctttatgttgagcctatgtgtatctctgygtgtgagatgggtctttactctttatccaattggccagtccgtgtcttttaattggggcatttagtccatgtacatttaaggttaatattgttatatgca

SEQ ID NO: 325865 - DNA, 201 bp, Homo sapiens
ggattgcaacccctgctctttttttttgccttccatttgcttggtagatcttcctccatccctttatgttgagcctatgtgtatctctgcgtgtgagatgkgtctttactctttatccaattggccagtccgtgtcttttaattggggcatttagtccatgtacatttaaggttaatattgttatatgcaaatttgattct

SEQ ID NO: 325866 - DNA, 201 bp, Homo sapiens
cagtccgtgtcttttaattggggcatttagtccatgtacatttaaggttaatattgttatatgcaaatttgattctgtcattatgatgctggctggttatyttgcccattaattatgcagcttcttcatagcgttgatggtctttacaatttggtatgtttttgcagtggctggtaccagttgttcctttccatgtttagt

SEQ ID NO: 325867 - DNA, 201 bp, Homo sapiens
cctttccatgtttagtgcttccttcaggagctcttgtaaggcaggcctggtggtgacataatctctcagcatttgcttttctgtaaaggattttatttctyctttgcttatgaagcttaatttggctggatatgcaattctgggttgaaaattacagtattgttaaacaggtaacctttaaatgaagtcaggcagtctctc

SEQ ID NO: 325868 - DNA, 201 bp, Homo sapiens
gtctcagaaacatttgttaatgggggaactatgtggatggctactaacgagaaccaggtttttaactgggcactgcaagagtaaataaatttaggatttcaagagtaaataaatttaggatttaaaggtatgtgagtgtggacaatatttatagcagataaaccataactaagtttctatttaaacatgttcctaactttt

SEQ ID NO: 325869 - DNA, 201 bp, Homo sapiens
tctcagaaacatttgttaatgggggaactatgtggatggctactaacgagaaccaggtttttaactgggcactgcaagagtaaataaatttaggatttcaagagtaaataaatttaggatttaaaggtatgtgagtgtggacaatatttatagcagataaaccataactaagtttctatttaaacatgttcctaacttttt

SEQ ID NO: 325870 - DNA, 201 bp, Homo sapiens
attcacattagtttcttttactgcaagtgtgaatacacactataggtcatcaaaaggatattcaggattttgtattgtggtttggacagaaccatgactatgtgaatttactgaaaaggttcttgttcttttgcctttgtagctaatcatatgtaatacaagtcccctactccagccagattaaaaccatgggtaattcct

SEQ ID NO: 325871 - DNA, 201 bp, Homo sapiens
gtatctcaaaagaagaagagctatttatgacaaacgcacagccactatcctacagaatgggcaaaaactggaagcactccctttgaaaagtagcacaagasagggatgccctctctcactgctcctattcaacacagtattggaagttctggccaaggcagtcaggcaacagaaagaaataaatgttattcaattagaaaa

SEQ ID NO: 325872 - DNA, 201 bp, Homo sapiens
ttcacattagtttcttttactgcaagtgtgaatacacactataggtcatcaaaaggatattcaggattttgtattgtggtttggacagaaccatgactatgtgaatttactgaaaaggttcttgttcttttgcctttgtagctaatcatatgtaatacaagtcccctactccagccagattaaaaccatgggtaattcctt

SEQ ID NO: 325873 - DNA, 201 bp, Homo sapiens
aatctccttaagctgataagcaacttcaggaaagtctcaggatacaaaatcaatgtgcaaaaatcacaagcattcctatacaccaataatagccaaatcamgagtgaactcccattcacaattgcttcaaaaaagataaaatacctaggagtccaacttaacaaggaatgtgaaggacctcttcaaggagaactacaaacc

SEQ ID NO: 325874 - DNA, 201 bp, Homo sapiens
aagaaaaaaaagtatcaaaaaaattcattactccagagttattgtttgcatcagttttgcaaacacaagatgttccataggtaactgatgcttcaatgacktttgttttgtttttacttttcagaagagatggggtgcattcagggtgatatagacagatatggccatagacagtttttactttttgttttagtctgttcc

SEQ ID NO: 325875 - DNA, 201 bp, Homo sapiens
aaggtaaaaaattttaagataaagggcagggaacaaattgtcatcgtcagaaatgagggatgtttaaggggttagtacccatttttaatattagagaaatrataatcctcaaagcagctttgactccatattgctgttgctcaagtagagtaactagaagctgagtaaagctagaagttgtgtgttgaaagtgttgctaga

SEQ ID NO: 325876 - DNA, 201 bp, Homo sapiens
acgtttttttttatgtttaatatgtaagagtaacttttcctctgtctggcaagctttctcacaaaccttagtttggctttcattcaaacataacatctggmagctcaaccttggggatgcacttggtgagtgttcgtgctgggaagtgtttactgattggttggctgtgcttacattcaccttctcagctcatgctctttg

SEQ ID NO: 325877 - DNA, 201 bp, Homo sapiens
tagagcatatttatttctctctacctcattttttcagaattttaaaaactagttgtaagcattcttatgacaatatagttatttacatgagtgcaataaayatctgttttcttttgtcacaggacacaattttaaaaattggttattttaccaaggctttaactaaaatggtgtactttcctttaagttatcaaacttaac

SEQ ID NO: 325878 - DNA, 201 bp, Homo sapiens
ttctgttatttacccagtagtcattcaggagcaggtggttcagcttccatgtagttgtgtggttttgagtggttttttttttaatcttgagttctaatttdattgcactgtggtctgagagaccgtttgttatgatttccattctttcttttgcatttgctgaggagtgttttacttccaattatgtggtcaatgttagaa

SEQ ID NO: 325879 - DNA, 201 bp, Homo sapiens; identical to SEQ ID NO: 68707

SEQ ID NO: 325880 - DNA, 201 bp, Homo sapiens
gaaatgccttagtgtcttcttttcaacccagatatacttcgtgagtcagagcagttttacctaatcactctaaaaaagaaagactgctcttcaatctggcttttttttctaccttttggtttatctatgttaaagctctccacagactgttaattcctgtggtcagccagggagagctctttttcagaaaagggcatttgt

SEQ ID NO: 325881 - DNA, 201 bp, Homo sapiens
gtttatcccccaaaaaatttgcttcctattagacaaaccaaattaccaattttaccttaatgggaattgttggtacctcccctagtaataattcgttgttwatcatttcatatttgcttttgctttcatagcaatgcactgataactgtctttcttctgtttgtgaaaacctcatgaatagctatcaaataaatcctaatg

SEQ ID NO: 325882 - DNA, 201 bp, Homo sapiens
ctattctttgcttcctaacaatatcttgagcccttatgtctcctaacttgagagactatactttcagaaaatatatagaaatccaataggctatagagagygattaggtagatgtgaaaagcagtacaatttgaatagtcatttactttaagtaaacaaaagatttatatctaaaagggaaatctggggtacactgcattc

SEQ ID NO: 325883 - DNA, 201 bp, Homo sapiens
ttggtacctcccctagtaataattcgttgttaatcatttcatatttgcttttgctttcatagcaatgcactgataactgtctttcttctgtttgtgaaaamctcatgaatagctatcaaataaatcctaatgacaatattaagttctgccagtcaataagtgcttagtatggtacctcagttaaaaaatgcaatttgcttg

SEQ ID NO: 325884 - DNA, 201 bp, Homo sapiens
tgacaactggccttgcaaactttttcaaaagtataagtggtgttaactgttaggaccaggtctcagaggaacacagaattgtgtgtttttttttgtttttktttttttttcctgcaaggattttagagacctcattttattcactcactcacttgtgttcccatttatacatccattctttaaagcaccagacattaaact

SEQ ID NO: 325885 - DNA, 201 bp, Homo sapiens
atttgcttttgctttcatagcaatgcactgataactgtctttcttctgtttgtgaaaacctcatgaatagctatcaaataaatcctaatgacaatattaakttctgccagtcaataagtgcttagtatggtacctcagttaaaaaatgcaatttgcttgaaaattgttgctatatcagaaaatgaagcaccttcaagttaa

SEQ ID NO: 325886 - DNA, 201 bp, Homo sapiens
ttgagaggctaaggtggaagaatcacttgagcttgggcagttgaggctcaccacgattgtgctactgtactccagtctgggcaacagagtgagacctcttytcaaaacaaaacaaaacaaaacaaaaaaaggaagagaaaaggagattagtcttctgatgtgagaatgcctattttgactttaattaaaatttagtttttg

SEQ ID NO: 325887 - DNA, 201 bp, Homo sapiens
ctcatgaatagctatcaaataaatcctaatgacaatattaagttctgccagtcaataagtgcttagtatggtacctcagttaaaaaatgcaatttgcttgaaaattgttgctatatcagaaaatgaagcaccttcaagttaattattttcaatagtttctagagcattttataactcaagtcattgaagttaatagaaata

SEQ ID NO: 325888 - DNA, 201 bp, Homo sapiens
tgagccaccatgcccagccaggttattggatcttagaaattagtggtttataattgagataacagagcatcatgcaaaatgcccatgcagtaaacctgtgyatgtaccccttgactctaaaataaaagttgaaattataaaaataatatttgagataatagaaagtacatgtgactaaggcctttccagttttttttgctc

SEQ ID NO: 325889 - DNA, 201 bp, Homo sapiens
agtaaccttgacttggttgggagccccatcccctcctgcctacgtagatgtgtttcttgttaattcagaaactccaagccagcctctatcatgaagtgaakaattaaagagaaaggtcctgtgattggatggagataccattttagaaccaattctttaacctaaaatttagtatattcttttttcttcagtttgctttag

SEQ ID NO: 325890 - DNA, 201 bp, Homo sapiens
tgcggcagacaaacatatgaaaaaatgctcactatcactggtcattagagaaatgcaaatcaaaaccacaatgagataccatcttacaccaattagaatgkcgatcattaaaaagtcaggaaacaacagatgctggggaggatgtggagaaataggaatgcttttacactgttggtgggtgtgtaaattagttaaaccagt

SEQ ID NO: 325891 - DNA, 201 bp, Homo sapiens
actcaggaagcagcttacagtccagttgtgacaacccagtggtctctcaacattgagaactgtcccctgaggggggcaaaatcacccaattgagaaccacygatgttgcttgtgaaagctttggaacagaaggttggagcagaggttaggagagatagataatgcccttctaattaatatggggtttggaagggagaaatt

SEQ ID NO: 325892 - DNA, 201 bp, Homo sapiens
gtcgatcattaaaaagtcaggaaacaacagatgctggggaggatgtggagaaataggaatgcttttacactgttggtgggtgtgtaaattagttaaaccaktgtggaagacagtttggtgattcctcaaggatctagaaccagaaataccatttgacccagcaatcccattactgagtgtatacccaaaggattgtaaatc

SEQ ID NO: 325893 - DNA, 201 bp, Homo sapiens
tttatctttcttttttttttttttttgaaatggagtctcactcagtcgtccagactggagtgcagtggtgtgatctcggctcactgcaacctctgactccyaggttcaagcgattcttgtgcctcagcctctcgagtagctaggattacaggcatgtgccaccatgcctgactaatttttgcattattagtagggatgggg

SEQ ID NO: 325894 - DNA, 201 bp, Homo sapiens
gttaaaccagtgtggaagacagtttggtgattcctcaaggatctagaaccagaaataccatttgacccagcaatcccattactgagtgtatacccaaaggwttgtaaatcattctactacaaagacacatgcacacatatgtttattgtggcactattcacaatagcaaagacttgtaagcaacccaaatgtccatcaatg

SEQ ID NO: 325895 - DNA, 201 bp, Homo sapiens
cagccaatacaaaataaatgggtaaaacagtattccaataaaactttatttaaaaatacgtgcagtgggccagattgttcaagagtcctagtttgatcacycctgcttttgaccttactcacctgcaactcctcatcagacaggagaaagtggagaatatcagcaaaggaccttgtttaacctgatgaagttagttaaagg

SEQ ID NO: 325896 - DNA, 201 bp, Homo sapiens; identical to SEQ ID NO: 68629

SEQ ID NO: 325897 - DNA, 201 bp, Homo sapiens
ggtggggagagaggctccccctctcttctcctggtttcatccatcctctggagtcaagttattaggttattaggttggtgcaaaggtaattgcggttttcrcaattaaatagcttggttgctggagctccttttttctcttagggactgctgtggctacccaatgtgaagccacagacctgttaaggctaaagagcaggtg

SEQ ID NO: 325898 - DNA, 201 bp, Homo sapiens; identical to SEQ ID NO: 68635

SEQ ID NO: 325899 - DNA, 201 bp, Homo sapiens
gacaccttctaatttgctaccttaaatttacagcagctatttttttttttcatagatcttttgtgcattcacattttaactcacagatattgttcaggtcytggaagtgtgagctttctctctttcttcttgaatgtcttgtatataggtccttaagcaactcattcatttcagagatattctttttattctaggcttttg

SEQ ID NO: 325900 - DNA, 201 bp, Homo sapiens
ttttaaacttattgaaaattgcagtaatataaggagaggctcagatagaagtgtgttataacctgttttacatggatatgatgaatttatacagttatgasttgtggacaatagagggagaaaaagattgagagccattgaactttcttttatttctttttatttatttattttttatatttttaaggagtcttgctctat

SEQ ID NO: 325901 - DNA, 201 bp, Homo sapiens
aaagaccagttaacttaaagactcagcttaggtccagataggaaagaatagggaagaataatcaatataaaataaggtttacagaaccggaaggaatattkaaccaagatgacttgtaaactacagcagcagagagggaaatggaaaagtaaaattaagaacctgcctttccaatattaacagaacatctgtattgatttc

SEQ ID NO: 325902 - DNA, 201 bp, Homo sapiens
ttcatcctcattatcacatgctgttacaactcagtatcccaagagtaatcatttgatgaatgtgataccatgttttcctgaatatggctataaagagatayggagtgtggaagctggtagaagtatgtccacacccaagcaaatgtggccaagactgtgaacatctcacccagtaacatcgcctttgttattgtggcagcg

SEQ ID NO: 325903 - DNA, 201 bp, Homo sapiens; identical to SEQ ID NO: 68641

SEQ ID NO: 325904 - DNA, 201 bp, Homo sapiens; identical to SEQ ID NO: 68625

SEQ ID NO: 325905 - DNA, 201 bp, Homo sapiens
gggtgcagcccacaaagggtgagctaaagcagggtgtggcgttgcctcacccaggaagcacaaggggtcaggggatttccctttcctagccaagggaagcmgtgagagactgtaccacgaggaacagtacactctggcccagatactgcacttctcccgcagtcttcacaactggtaaaccaggagattccctccagtgcc

SEQ ID NO: 325906 - DNA, 201 bp, Homo sapiens
ccgtgagagactgtaccacgaggaacagtacactctggcccagatactgcacttctcccgcagtcttcacaactggtaaaccaggagattccctccagtgyctggcttggtgtgtcccacccccacagagcccagcaagatacgatccactcccacagagcccagcaagatacgatccactggcttgaaaatctcactgcg

SEQ ID NO: 325907 - DNA, 201 bp, Homo sapiens
taaagtgctgggattacaggcgtgagccaccatgcctggcctacaataatgagtcttttaagctgtgaacatactataatcatccatttatttaagtcttstttaatttattgatcatgctatctaattttctgcatagaaatcttgtgaacttttgttacatttttagtgttttatatttttgatgctgctataaatagc

SEQ ID NO: 325908 - DNA, 201 bp, Homo sapiens
agcccagcaagatacgatccactcccacagagcccagcaagatacgatccactggcttgaaaatctcactgcgagtacagctgtctgaggtccacctgggmcattcgagcttcgtgaggggagaggcatctgccattgctgaggctagagtaggctgtttgttttaccctcacagtgtaaacaaagccagcaggaagttca

SEQ ID NO: 325909 - DNA, 201 bp, Homo sapiens
tacgatccactcccacagagcccagcaagatacgatccactggcttgaaaatctcactgcgagtacagctgtctgaggtccacctgggccattcgagcttsgtgaggggagaggcatctgccattgctgaggctagagtaggctgtttgttttaccctcacagtgtaaacaaagccagcaggaagttcaaacagggctgag

SEQ ID NO: 325910 - DNA, 201 bp, Homo sapiens
ggtgtggtgggaagagcattggtttttaaataaaatgatctgagttcaaatcctgtattttgctatttactggataagtggtcttggtcaagtttgttaayctctctgagcatatatattttttaattttatgcagcttctatatattctacacctactgcccgccagcatatcgctggatgctggtggtatgatggcaag

SEQ ID NO: 325911 - DNA, 201 bp, Homo sapiens
caagtttatctaattcataacacgtcccatctggattgctcagtgattacttgtccccccaccccaagactggagggactttaactgttttcctccacacrtctagaatttaatgtagagtttagtgcaagtaggtgttcaataaacatttgatagttaagtgaataaatcaatgagttaatgggagagagctgaatttca

SEQ ID NO: 325912 - DNA, 201 bp, Homo sapiens
gatgatatacaaaatatagttcttgggacataatacttgtttttattttgcagagaattgggtttgctggcaatcacattgggagtgtttcagcttctgtmtgtgtataatacatgacacaaaacgttggtagcttataaaaagacatctgttactatcacagatttctataggttagtaattcagatagggcgcagcaga

SEQ ID NO: 325913 - DNA, 201 bp, Homo sapiens
tcagaaattcctgagattgtttttctgatttgcattgtgacatgaactgctctcgatattattggcacagtattattaatgcatatttgcatgaaacattktattctttaccaaagcattttattttaggttgtttaaatcaccctttctactactggaccctacttttaatccagagaataggttccaaaccatgccatc

SEQ ID NO: 325914 - DNA, 201 bp, Homo sapiens
tttgctcatgaaactcaaataaatgcttccagaaaaaaaaaacaaaacaaaacaaaaaaaaaaacgaggtaatagcatggaccaaacagttattcattttkctctttaattccaaaaacagatactattcctctctgagtattacatagagcttacgatttacttattatagaaaaatggtgttatctacaacaagtactt

SEQ ID NO: 325915 - DNA, 201 bp, Homo sapiens
ggaccctacttttaatccagagaataggttccaaaccatgccatcaattttatgttattagactggatataaatgtgttctgtgtttttatgtatctgtgrccaaaaatatgtcattttatacataagggagtttgttctatcaaaccattgcaaaacacagtgcctttcagaaacatttatactacaaaggttttgggga

SEQ ID NO: 325916 - DNA, 201 bp, Homo sapiens
gtattaagtacttattttgtcaatgatatatttgtggcatttacacatcagactctttgttttgaattttgctttgttttactaccgttataattctggcygtcggttttattgtcattatcatttatcaatatgctagatacacacattttaaaacatgtaccttagtaaaatactggatattttagcaatcatgggttt

SEQ ID NO: 325917 - DNA, 201 bp, Homo sapiens
ggagtcttacacaataaaaggaatctaatttacacaacataagcacatttctgttcagattgtgagaatgaaagatcatggagaagttttattcaaagatrtcagctttgctcatgaaactcaaataaatgcttccagaaaaaaaaaacaaaacaaaacaaaaaaaaaaacgaggtaatagcatggaccaaacagttattc

SEQ ID NO: 325918 - DNA, 201 bp, Homo sapiens
agtactattgtatatattgtaaatacttccttttaatcaattataatgtattgattaacctgcagttccttaagatggccaaatgataatattgaaaccartcttgtttttcaaaataactggacttttctttctcactttccgcattgtttctgctcctctgcaggcctcttgtcgtctgtttttttctttatgtgttaa

SEQ ID NO: 325919 - DNA, 201 bp, Homo sapiens
ttttttttaagattagagaaacagtagaccagtgactgtgacagaacctcaggtatgccaacttttaacagtcagggacaagaagcaaagtggagacaggmcaggaggaaacaaagagaatgaggaattatggccataatatcaggcacatcacctcacagagcatactgaaacaaccaaggaaggaagtgcacccaccac

SEQ ID NO: 325920 - DNA, 201 bp, Homo sapiens
agaaaggttgaaatgattgagtcttaagtgtgtcaatgtataatctacccctttctaaacatcgtgttttaagtagtcatcttacttcagaaattagaggytcaatgtgtttagaaatacatttcatcatgttcatacacaatatagatttctccttcctcagattgtctcccatgtaaatatactgcttgataaagatga

SEQ ID NO: 325921 - DNA, 201 bp, Homo sapiens
ttaatggccttcaaaagtagggccagcccttctactttaccaaaagaaaatgtgtggtttgtttacagatctagatagacttgtactttggtagacagatsatgagggaattcttgtctgaatctttgcattttctctttatataagagatgaggccatcttctagtggggtggtttgaacgtccagggtttcaggctaga

SEQ ID NO: 325922 - DNA, 201 bp, Homo sapiens
gattgctgtaaacaagtatttgattttatgaatatgccacaatttatttattcactctagtttggatgaatatgtaagttatttctaatttgtgctgctgttttttttttttttttgagacagagtttcactcttgttgcccaggctggagtgcagtggtgtgtcttgggctcactgcaacctctgcctgccaggttcaag

SEQ ID NO: 325923 - DNA, 201 bp, Homo sapiens
gtatcagataatttgtgtacatatctttaaactactacacatatgtttaaatcgtatttagcatttggtaattgcaaaatttgtactttctgctcaaaggrcgttttatttcacttcctggccctgaaaggaagctagataatcattttatcataatcacacaactgaaataaacttctggaattaatagagcagaacagt

SEQ ID NO: 325924 - DNA, 201 bp, Homo sapiens
gtagttctaaatgtaaacttgaatgcattctgttttttatttgatctttccttcttccttttattttcactgttgtaaaaatattttctccttttttttgttttattttgatatttttgcttttattgtttgtataaatgcaaagattggtaaattctttgtggaacaaggagggtgtattaacaggtatatgaataattt

SEQ ID NO: 325925 - DNA, 201 bp, Homo sapiens
tttccttggtggacctcccttgggcaacatattgccaggacagtgcaggacatcaagctccctgacagtgatcctgtacacagatgaggaagacattcttytgcctgaaataaaacaacaggggaatactgatcacagaactcacttttcctacgctctcagtgtctttatattttctttttttaaaaaaaaaaaaaaaga

SEQ ID NO: 325926 - DNA, 201 bp, Homo sapiens
ccaagtgttacacatgctgtttaattaggatccaaaaatgcagggatttttcagattattcactgtttccctcattatctgaacttcccattgctttcctscttaagtgcacaagagctatgaattaattttctttcttgctaccgtgaagattctggagttatcttaaaacaatgaagacaacagagagaaactcaaaac

SEQ ID NO: 325927 - DNA, 201 bp, Homo sapiens
gcatgcaccgccatgctcggctaattttgtatttttagtagagacagggtttcaccatgttggccaggctggcctcgaactcctgacctcatgtgatccgyccacctcggcctcccaaagtgctgggattacaggcgtgagccaccgcacctggcctgtttgttttttttgttttttttttttttaataataacatctaag

SEQ ID NO: 325928 - DNA, 201 bp, Homo sapiens
cttcagggctgttgtggacatatttcttgcaaatatctttttccactctgtagattgccctttcttgataatatctttggatgaacagacattttaaattttaattaattgaaatttatcaatctttattgtcattaccttattttcaaaacatgctttgagaaaggctacaaagatattcttttgtgccattgtctataa

SEQ ID NO: 325929 - DNA, 201 bp, Homo sapiens
cacatacttactcactgacactgggacactttagatacactgactcacctacagtgcacatgtttaggatgtgggaggaaaccaagtacccagaggaaacycatgcatacttggggagtatgcacacactccacaaagacagtggcctcggctggggattgattttttttttttttttcatcagtggtaaaacgaaatggg

SEQ ID NO: 325930 - DNA, 201 bp, Homo sapiens
ttcagggctgttgtggacatatttcttgcaaatatctttttccactctgtagattgccctttcttgataatatctttggatgaacagacattttaaattttaattaattgaaatttatcaatctttattgtcattaccttattttcaaaacatgctttgagaaaggctacaaagatattcttttgtgccattgtctataag

SEQ ID NO: 325931 - DNA, 201 bp, Homo sapiens
tcagggctgttgtggacatatttcttgcaaatatctttttccactctgtagattgccctttcttgataatatctttggatgaacagacattttaaattttaattaattgaaatttatcaatctttattgtcattaccttattttcaaaacatgctttgagaaaggctacaaagatattcttttgtgccattgtctataaga

SEQ ID NO: 325932 - DNA, 201 bp, Homo sapiens
gaatatgactttccaaagaagtcctcatcagtgacagtaagtaagctcttcctagtttctcctcagccatcctttccagccttgtcttttgctgttccccyatttcttcctttcataccagccacataaaaacatcctgagcttcccaaatgtactgcccttatttatgtctgttggaaattgctttcatatttgtttata

SEQ ID NO: 325933 - DNA, 201 bp, Homo sapiens
cagggctgttgtggacatatttcttgcaaatatctttttccactctgtagattgccctttcttgataatatctttggatgaacagacattttaaattttaattaattgaaatttatcaatctttattgtcattaccttattttcaaaacatgctttgagaaaggctacaaagatattcttttgtgccattgtctataagat

SEQ ID NO: 325934 - DNA, 201 bp, Homo sapiens
tagttctaaatgtaaacttgaatgcattctgttttttatttgatctttccttcttccttttattttcactgttgtaaaaatattttctccttttttttgttttattttgatatttttgcttttattgtttgtataaatgcaaagattggtaaattctttgtggaacaaggagggtgtattaacaggtatatgaataatttt

SEQ ID NO: 325935 - DNA, 201 bp, Homo sapiens
agttctaaatgtaaacttgaatgcattctgttttttatttgatctttccttcttccttttattttcactgttgtaaaaatattttctccttttttttgttttattttgatatttttgcttttattgtttgtataaatgcaaagattggtaaattctttgtggaacaaggagggtgtattaacaggtatatgaataatttta

SEQ ID NO: 325936 - DNA, 201 bp, Homo sapiens
gttctaaatgtaaacttgaatgcattctgttttttatttgatctttccttcttccttttattttcactgttgtaaaaatattttctccttttttttgttttattttgatatttttgcttttattgtttgtataaatgcaaagattggtaaattctttgtggaacaaggagggtgtattaacaggtatatgaataattttaa

SEQ ID NO: 325937 - DNA, 201 bp, Homo sapiens
ttctaaatgtaaacttgaatgcattctgttttttatttgatctttccttcttccttttattttcactgttgtaaaaatattttctccttttttttgttttattttgatatttttgcttttattgtttgtataaatgcaaagattggtaaattctttgtggaacaaggagggtgtattaacaggtatatgaataattttaaa

SEQ ID NO: 325938 - DNA, 201 bp, Homo sapiens
agctaactctgagggcaaagggagctgtctttccccaaagctaaaaatctgcctataaatttcataaagactaccagcttcagtatttatctctccacagytgtattgtaaaaatatttgcatgaaaagaacatctttgtttccttaagtcttcatctgctcttggtactcatttgctcttgaaaagggatataatcgttt

SEQ ID NO: 325939 - DNA, 201 bp, Homo sapiens
tcactgtttccctcattatctgaacttcccattgctttcctccttaagtgcacaagagctatgaattaattttctttcttgctaccgtgaagattctggarttatcttaaaacaatgaagacaacagagagaaactcaaaacctttctaatgtggttttagttgctgatcatgtaaaaatggtagctaagttcagagatca

SEQ ID NO: 325940 - DNA, 201 bp, Homo sapiens
agcaaaagcaaggtaaattattgaaataaaataaatgaatgtaagttgagaatctatttggcatggtctcgcctggggaacttgtcagtctgcctctgctstattgtagcattgtttccactaagaattaggtcattcaataactaccacttcgctgtacttttgctcactttgtcattatttttcttaacctgttatttt

SEQ ID NO: 325941 - DNA, 201 bp, Homo sapiens
tcactaaaattaggtcccataggatcatatctttggtacaatgaatataggactgcataaatcaggaagtacagtaaataaggctttcaattcaatttaayatatgaccagctctcttttatcactgaccttcataccactgaatgtttacagatgtgtcatttatttaagattgctaagtgttggactgacttacaaaaa

SEQ ID NO: 325942 - DNA, 201 bp, Homo sapiens
tggattggtaagagttcctaaatttatcaaatgagaacctcttgaataaatggcctaatcctgtgcggtggaataattatctagaatttttactgaacacmaggtattatactttataattttgtgtcaataattatgatctggtgaatttagagtcgttttatttccttttgtttggaaaatgctattcttagtttttcc

SEQ ID NO: 325943 - DNA, 201 bp, Homo sapiens
gaatgcaggtgtaactgtgtagagtaggaagagcactggactcagaatgagaagacttagacattgtcatatttattgctttatgacaaattatcccaaasctgacagcttacaacagtatatacttattatctcatattttctgagggtcaggaatctgtgtagttctggctcagagtctctcatgaagctgcagtcaga

SEQ ID NO: 325944 - DNA, 201 bp, Homo sapiens
attggaagggccctgttttctaatagcctgaattccagtgtactattgggtattagtatcactgctaacattacagagtttaaaatgttcaaacaaaaaakgctttgatctacaaaacttcagaaacctaaaaatatttttttttcttttcttttttttttttaagtgagtgtagaaagcctttccggaatcacagattga

SEQ ID NO: 325945 - DNA, 201 bp, Homo sapiens
aaattcagccctaggactatatttagttagaatgtgacatcattttaaaacttgaattatttaaaccatgcattttaaatgtttgttatttaagaaaactygagaaatcaagtaaatgtccccattcttcctaactgcatttaaccaactagaacttaaaacaaaaagagctataaggtaattaatttcaaaatccataac

SEQ ID NO: 325946 - DNA, 201 bp, Homo sapiens
tgaacctagcaacacgtgtacttatttgaaggtttaaagagtataagacagaaaacagggaaaggagggggcacctagtggtctcaaacgggatgtctgckttttcttctcagcaggcagggaataaaaggcataaagcctttctacccttttggatgcccaaggatacggcaaactgcctgtgtccttttcccaatatcc

SEQ ID NO: 325947 - DNA, 201 bp, Homo sapiens
aaaagacttcacaatagagcttaatggctatgtccaagtaaatggattggaagtctctacagagacttgggaacagggagggcagtcgggggaggttgcatttttttagaccattggcacacagccactggagaagtcatctaaatataaatcagaccgtgtcactccatagcataaagccctccagtgtcttccactgca

SEQ ID NO: 325948 - DNA, 201 bp, Homo sapiens
actaagaacatgctcataaatgacaaatattagaatgcagtctctatttgtggtttagatcaaaaaattatttttatttatcctagctttacgtgcatctyacggaaacaggatacacggtgtatatattattatgcagttcgttggaactagaatttcaaaaaattttaataaatatgtttaatctgttgcctctggaga

SEQ ID NO: 325949 - DNA, 201 bp, Homo sapiens
actggggtggaggcagcatgagttgtgttgctggggcagacatgacataaagggtagagtcagtacacatacttgcaaagatgtagttatgagacctaatrgggacctctctcctgtcttcctgtcctgtcccatctctccttccttcccctcctgtcatctccacatgactcccctctaatcttctctcctgctccgttt

SEQ ID NO: 325950 - DNA, 201 bp, Homo sapiens
aaggtgttgggcctcttggtggtgaatcgtggcttgtgctgaaggcgcaggacccggtggggcagcgggaacttgatcttgcagtcgtggaactgcttgayagcctgccggcgtcacttgctggccgcgatctcttccaccatcatgatctgaatggagtgggcccgggcgcggtgccgggcgcccatgtctcggtagcac

SEQ ID NO: 325951 - DNA, 201 bp, Homo sapiens
aactgctgaaatttgtggagcctttagacactacctttaggattgtgaaagctctgcaacccaatatttcaattctgttggggttaagtctagcctttctmtgacttagaactagtcaacttttattaattctcaatttctctctccttaagcatatcatattcctggtaatttttggtaagattttgatgctgtgtatat

SEQ ID NO: 325952 - DNA, 201 bp, Homo sapiens
tagtcttccaggatgtgagaataatagatgaattataagctatttcccccaaaaaagagtgtgttgggatacgtgagaccatgtaaatgaggagaagctaygactgatgattcctgaaaagactccccccacttttgtatcttcctggagttcaaaaacagatactatttctgagcacccctacagactagaattgccact

SEQ ID NO: 325953 - DNA, 201 bp, Homo sapiens
aatgcttccagaaaaaaaaaacaaaacaaaacaaaaaaaaaaacgaggtaatagcatggaccaaacagttattcattttgctctttaattccaaaaacagrtactattcctctctgagtattacatagagcttacgatttacttattatagaaaaatggtgttatctacaacaagtacttattatgacatcagaagatatc

SEQ ID NO: 325954 - DNA, 201 bp, Homo sapiens
aaaaatattattgacaaatctttggagtcttacacaataaaaggaatctaatttacacaacataagcacatttctgttcagattgtgagaatgaaagatcrtggagaagttttattcaaagatgtcagctttgctcatgaaactcaaataaatgcttccagaaaaaaaaaacaaaacaaaacaaaaaaaaaaacgaggtaa

SEQ ID NO: 325955 - DNA, 201 bp, Homo sapiens
tctctgggatgcagcaaaagcagtggtaagaggaaagtttatagttctaaatgcctgcttcaaaaagtcagagagatctcaaattaatgattcagcatcayatctggaagaaccagaaaaacaagacaaaaccaactccaaactagaagaatgaaagaaataactaaaattgagctaaactgaataaaattgagaccaaaa

SEQ ID NO: 325956 - DNA, 201 bp, Homo sapiens
attattcatgcctccccttttcagacaatgtagggtaacttcctggcattcccatggcatttgtaaactgtcatggcgctggtgggagtgtagcagtgagratgaccagaggtcactcttgtggccatcttggttttggtgggttttggccagctcctttactgcaacctattttatcagcaacgtctttatgatctgtat

SEQ ID NO: 325957 - DNA, 201 bp, Homo sapiens
taacagcaaattcctcaagtcctgctgcctgtgctttaaggcccaattcttctgcattcctatgatcatttagcagagagaagacccaactctactttctytctacttattggcattcctcacctccataacaacaacaaagtttgtgcccctgattttctgtttatggtcaaaaattggtggttgatctacgtatacttg

SEQ ID NO: 325958 - DNA, 201 bp, Homo sapiens
tcgcttcccaaggagggtgacacctgctgaaaggggctgcagtaaggcagtctcagagttgtgccttggacaagctctgtgggaaagtattagtgagcatkttttttaatcctacaactctttcctcctttggcagttaacagcaaattcctcaagtcctgctgcctgtgctttaaggcccaattcttctgcattcctatg

SEQ ID NO: 325959 - DNA, 201 bp, Homo sapiens
gggcccttgtaggtctgaatcaacttttgtattagtgtgtctaagatatcaatgactaaactaaataaataattctgtgtatacacacaccatacttgtayggtctgtattatccacagtttttctttatgttttgtttttggacaatccacaatgtttcaattgttgaatcgtgtctgtacggtgcatgtcatgtgttta

SEQ ID NO: 325960 - DNA, 201 bp, Homo sapiens
ctttcaccttcaccaataagcaaacctgctaatatgcttaatagttagtctctaggttagtatgcatcacacttcacaggtgaaagtgtaactgtgacttmttttggtctcatcacttgatccaaataacagatcccaccttcccacttcctacactgaaagacttttaaagaaggtagtagacgtccatgggtgaaatgt

SEQ ID NO: 325961 - DNA, 201 bp, Homo sapiens
tttttatgagcaaggtctttatgacctgtatcttgtgctgacctcctatctcatcccgtgacttagaatgccttcactgtctgggaatttagcccagtagktctcagcattgttttacccagcccctattcaagatggagttgctctggctcacatgcctctgacagaatggctgacatgatgtcaaatagaatcacgtgt

SEQ ID NO: 325962 - DNA, 201 bp, Homo sapiens
gtttgtctttgagtcgtggctttactttaacctttcaaatttgtgaagtacaagattcatttgacctttccctcaggtgtatgattataaaatgtattccyccccttttcctcttctattctttgcttcctaacaatatcttgagcccttatgtctcctaacttgagagactatactttcagaaaatatatagaaatccaa

SEQ ID NO: 325963 - DNA, 201 bp, Homo sapiens
gatggagttttgctcttattacccaggctggagtgcactggcgcaatcttggcttaccacaacccccgctcctgggttcaagcgattctcacacctcagcytcccgagtagctgggattacaggcatgcgccaccatgcctggctaatcttgtatttttagtagagatgggatttctccatgttggtcaggctggtcttga

SEQ ID NO: 325964 - DNA, 201 bp, Homo sapiens
tttgctcttattacccaggctggagtgcactggcgcaatcttggcttaccacaacccccgctcctgggttcaagcgattctcacacctcagcctcccgagkagctgggattacaggcatgcgccaccatgcctggctaatcttgtatttttagtagagatgggatttctccatgttggtcaggctggtcttgaactcctga

SEQ ID NO: 325965 - DNA, 201 bp, Homo sapiens
ttttttttttgcagttgcaggatttaatagagtgaaatagaatgaaaacagagctcccatacaaagggaggggacccaaagggggttgctgttgccggctsgaatgcctgggtttatatcctgatccttgtccctcctgctgtgctctcaggcaatagatgattggctatttctttacctcctgtttttgcctaattagca

SEQ ID NO: 325966 - DNA, 201 bp, Homo sapiens
ggcaatagatgattggctatttctttacctcctgtttttgcctaattagcattttagtgagctctctgattggttgggtgtgagctaagttgcaagccccrtgtttaaaggtggatgcagtcaccttcccagctaggcttagggattcttattccgcctaggaaatccagctagtcctgtctctcagtccccgctctcaac

SEQ ID NO: 325967 - DNA, 201 bp, Homo sapiens
ttgtctcctgcaggatcaatatcagttttcctatcgtgccgcactagagtacctgggcagctttgaccactatgcaacgtagaaacccctgacccattctsgatttttactacaggcccttcaatatccatggagtctcttctgagccatacagggcacttgagaagtccttcttaacttctagctaacaactacttagtg

SEQ ID NO: 325968 - DNA, 201 bp, Homo sapiens
aggcatgagccacagcacctggacctgaagttctctttctctcaatcttccatcaattgatttgaagatgtcttctgttatccgagataatgtgtcagagyagaggaaacaaacacgtctttggaggttgatggaaaaaatgtcaagccatgtagccaagagcaccctagcccccaccaaagctatattaaaactgaggaa

SEQ ID NO: 325969 - DNA, 201 bp, Homo sapiens
aggtgataatagtaatgtcaccgtgactgtctcaaattgtttggagactttttaagaaaacgttactcaacacaatatagctaatcaacatttttctcagrtagtcaatacattatgatgcggtaaaaaaaactaccatttctattctctaatattagaaggaacacacgccatcagaaagtggtaatgtctgtaacatct

SEQ ID NO: 325970 - DNA, 201 bp, Homo sapiens
gtacttattccccatctcaatccaaaaagactttagagtgattccagagtctttaaaaatgttctaggtattttcttccttgcaagcaattcagaacataraatttaaatgagctgttcaaataaacatcagtggtagtaatggaaagtatctccattctaagggggtgagaaagagtttcagtggcaataaacaatagac

SEQ ID NO: 325971 - DNA, 201 bp, Homo sapiens
tgttacttaaaaatttttaattcaaataaaaagcattttaggtttgtataaacaacagcactactaggtatttatgtgggctaagagtgaaatttttcatmtatatcctccttttaaaaacatcttcttataaattcatgtcatagaaaatatttggttcagcagcttgtggtggtagattgcagtattctagccttgtat

SEQ ID NO: 325972 - DNA, 201 bp, Homo sapiens
aagtgtttacattacagtaagatcaaaatgtaaagactgtactatttggaatcttattcagttttggtatagacttctgttgtccaacatgcatctattcyggcctccaatcttctgagctgctttatgcagataagcacttttcataacaattgaggcattagtgcattcacaagcaaataattccatgcaagctttcat

SEQ ID NO: 325973 - DNA, 201 bp, Homo sapiens
tttactattatggagacttgcccaagcaaaagtctgaaaggaaattaagttctttctgcaaaccggaaattgggtagggaagaaaaagaaatatgggtatscttcaaattttggaagaactatagtctttataataatatctaccatttttatgggctttgattattgtttttattatttccaatgacaccactctggaaa

SEQ ID NO: 325974 - DNA, 201 bp, Homo sapiens
tcacatttcttctttgtttagggagacgtctggtgaacacccgtgggatctaaagaacaagtaagatttaaagcatactgggttgtgtgcctggctttcamattttatttattttattgcttaatagtgtttctttactactgtgggttgtagcttaaaattgttagaaattttattatggagtataaggaataaaagtga

SEQ ID NO: 325975 - DNA, 201 bp, Homo sapiens
gggtgtgagctaagttgcaagccccgtgtttaaaggtggatgcagtcaccttcccagctaggcttagggattcttattccgcctaggaaatccagctagtyctgtctctcagtccccgctctcaacaggaaaacccaagtgctgttggggaggttggctgacaaccgctctaactgcttcctgctgaattggggcatagta

SEQ ID NO: 325976 - DNA, 201 bp, Homo sapiens
caagccccgtgtttaaaggtggatgcagtcaccttcccagctaggcttagggattcttattccgcctaggaaatccagctagtcctgtctctcagtccccsctctcaacaggaaaacccaagtgctgttggggaggttggctgacaaccgctctaactgcttcctgctgaattggggcatagtagttgttgtgcagttgag

SEQ ID NO: 325977 - DNA, 201 bp, Homo sapiens
cttagggattcttattccgcctaggaaatccagctagtcctgtctctcagtccccgctctcaacaggaaaacccaagtgctgttggggaggttggctgacraccgctctaactgcttcctgctgaattggggcatagtagttgttgtgcagttgagatttcctcaggaggggtgccttcaatgtcgttaacatcggagcat

SEQ ID NO: 325978 - DNA, 201 bp, Homo sapiens
cagtgctcacatgtctcccaccattcagcacccacatgtgctgagtttcttcctgttctcatggcagcactctcacatctcctgtctgtgatgatgataaygacccttttatatgaaatatttcagatatcagagccctgtccttctgtttttataacaatatgtattacacctttgtagagtaagttaaaatcttcccat

SEQ ID NO: 325979 - DNA, 201 bp, Homo sapiens
tgctcacatgtctcccaccattcagcacccacatgtgctgagtttcttcctgttctcatggcagcactctcacatctcctgtctgtgatgatgataatgasccttttatatgaaatatttcagatatcagagccctgtccttctgtttttataacaatatgtattacacctttgtagagtaagttaaaatcttcccatcac

SEQ ID NO: 325980 - DNA, 201 bp, Homo sapiens
caatgaccacaaaagaaaacatttctattttcccttggaaaagactcttggtatatttgaccacatgtgccacagtgtattcacaggcgcagaaccatcaytagtaaaacagtcatcattattaggttttgtaaacctctgagcacttataatgcaaaactactgtcatatctgctttctattagtttataatttatgtgt

SEQ ID NO: 325981 - DNA, 201 bp, Homo sapiens
aacaaaaacaagaaaccaaacacacacacatacacacacacacaattttttttggccaacttcgaatgcactggattttttcttgaaggtggttcccccaytttcttgaaggaaggaagtggtggacgacagagatctgttttcatcttttatgcaaagtggaagagtggaatagactcttccatttctaagggaaggcct

SEQ ID NO: 325982 - DNA, 201 bp, Homo sapiens
aaagcatggagatgagaagaagcgtggcttgctcaggggttcccaacatattctgtgactgtcattgcagctcagggtcatgctgctgagaggtgaggtgygaaaggtgattacacccttgaaaggtcataacaatataggaaggagtctgcaaccaagtgatttcaaaaatgttcagaaaagtcatggaaatcacttcct

SEQ ID NO: 325983 - DNA, 201 bp, Homo sapiens
ttaatttggtgttccaggattccagatagtagttccattctccaaaaccaggactatcacaatccacttttattgtttccagttcgcctcccagtacgctrcttgccaaatgtctcctccgttttctaaaattctcagagtaatcccccagcctcatctacagtttgcaccttaagtatctaggaagattcctgagggctc

SEQ ID NO: 325984 - DNA, 201 bp, Homo sapiens
gaaaggcatgatgcatgcacacatacatacatatgtacttatatgtggaaggtagggaaatgaagaagtgatgattgctgtttatcacacctttggagccytgacaaataatggtagtgccgtcctatgcttgtatactttttgtaactcatggatatgaatgtttgtttatcatcttctctaaaaaattatggtggcagc

SEQ ID NO: 325985 - DNA, 201 bp, Homo sapiens
taaccagactgtataactctgtgaattcagaatctaacccgttcccaccttgtcacaattactcaacatatgtccttgctgacatttaaattttacagagaaaaaaaaaaaatcgattgggcatggtggctcatgcctgtaattccaccaccttgggaggccagtttgggaggattgttttgagtccaggagttcaagacc

SEQ ID NO: 325986 - DNA, 201 bp, Homo sapiens
aaccagactgtataactctgtgaattcagaatctaacccgttcccaccttgtcacaattactcaacatatgtccttgctgacatttaaattttacagagaaaaaaaaaaaatcgattgggcatggtggctcatgcctgtaattccaccaccttgggaggccagtttgggaggattgttttgagtccaggagttcaagacca

SEQ ID NO: 325987 - DNA, 201 bp, Homo sapiens
ttaagtacatttctcaagactcttggttttataagccatgaaaactctgtaattattgagtatgtgtatattatcttatccttcaatctaaattaatgctrgagctaatattaagatagaaatgtattttcagagagttgcttgtttttgaaggaatggtgcgctgaatgctatcttaaaattccagaatccttaaagatt

SEQ ID NO: 325988 - DNA, 201 bp, Homo sapiens
gatattggtctctgtcatacgcagagaagcctctgccttctcctcatcctccttgatcattatgattgtttgtagtaaagaaaatgaatggctagctggtrtaatcctgtgtatctgttgattagttgctcagggcaccatggagaaagcattgtggtatagttgtctggtttgagttgaattctccattaggggaaaaga

SEQ ID NO: 325989 - DNA, 201 bp, Homo sapiens
atgatggacttgttcggtaaatccttcagatggtgggaggacaggagagggggaagcttactctggatcataacataaaagatattggtctctgtcatacrcagagaagcctctgccttctcctcatcctccttgatcattatgattgtttgtagtaaagaaaatgaatggctagctggtgtaatcctgtgtatctgttga

SEQ ID NO: 325990 - DNA, 201 bp, Homo sapiens
aaaacttgatttcttatgtaattgccccagaatgacacaggctgataagttgggaagaaatatcatttggattggtgaaataaaggatagtgatgtgtagrtgtgtttcttaagttgggcttcttccttttgcagtggcattctggatagttaagtagtatcatggcttagtcgttaccagctgttaattatcagttgagc

SEQ ID NO: 325991 - DNA, 201 bp, Homo sapiens
tccggatgtaggaagtagcaatgagattgcaaatttgagagatttttaaggcaggccctcatcactgagtggagctgttctgtgtggacatggttcaaggktgacttgaaggcttccaccaggacatctgaatgcttcaataccttcggctcatagcatgcttggagataattaatttctgcaagggagatgaaaaatttc

SEQ ID NO: 325992 - DNA, 201 bp, Homo sapiens
gtgccctctcatttttgaaatttatagacataaacttttattcttttagtatttaaaaatttgtaaattatctatagctctgtcctcctttttttccctctttttttttttttttttttttttttttttggagattgagtcatgctctgtcatccaggctggagtgcagtgacaggaactcgcctccacctccccaaatgc

SEQ ID NO: 325993 - DNA, 201 bp, Homo sapiens
aattcaagaaaaatctatgttggaggccaagacaggaggattacttgagcccaggagtttaagaccagcctgggcaacatagcaagaccctgtctctaccaaaaaaaaaaaaaaaaaaatatttgccagatacggtggtgtgcacttgtggtctcagctacttgggaagctgagatgggaggatcacttaagtccaggaga

SEQ ID NO: 325994 - DNA, 201 bp, Homo sapiens
gtgaaatgggcagagtaagtgtgtggcccttgtgtgtctcctcataagacatttactctgtggagaaatgaagactttgtttcaataactcttgtgctagwtcattttttttgaaatgcagtgcactctggacataatccggaccatcattccttgttagtttctaaatttgtaaagccacatcaagtgtttaaatttatg

SEQ ID NO: 325995 - DNA, 201 bp, Homo sapiens
acttgtgtttccatataacaatgaaattataaatcttaaatgttatcagtagcctatgatgaaagaaaaagtattttgatttccataacgtttcaggaaaygaagtcccctagagttttatgatcaaacctgaatttggtcttgaaatgatgattctacttaaatatttttaaattacatactttatatacctgtttgatg

SEQ ID NO: 325996 - DNA, 201 bp, Homo sapiens
taaagggatactgatgttacccttgtataccctaacttttattcatctatttcaaagccataaaagtaatataatctcattataagatatttagaaacagaaaaaaatatgttgctgataatccttttgctcataatccttttatctgaaaacatagtcgccctttctcctacctggtctctcatttggtcacagaacttg

SEQ ID NO: 325997 - DNA, 201 bp, Homo sapiens
gataagtcagctctccaggcattaaaagcatttcatgatttctttgggttaaatacttctacggtgattaatttccagcagtagtcccactcacaaaattsttgaacatttaacaacaggctattgcaagccagtaagagcttggtccaacataccactgaaagtaaaatctaaggagggagatagcacaaggaagcgttg

SEQ ID NO: 325998 - DNA, 201 bp, Homo sapiens
tcaactttgttagacacatctcttgtgcaaaaccattattacagatgctgaagctacacacagagcctccagttacccataaaagcagcatttggacagaktgtaaatttgccaccaggactctggcatatggaaactaatatgtctgatcaggaaatgaaactcattggaatatttacactgcttctcagatactttgac

SEQ ID NO: 325999 - DNA, 201 bp, Homo sapiens
acttctggcggatgctctgggaacacaattccaccatagttgtgatgctcaccaagctgcgtgaaatgggcagagtaagtgtgtggcccttgtgtgtctcmtcataagacatttactctgtggagaaatgaagactttgtttcaataactcttgtgctagatcattttttttgaaatgcagtgcactctggacataatccg

SEQ ID NO: 326000 - DNA, 201 bp, Homo sapiens
ggaaaaacaaagtagcaatatcagttacaaaggactatcgaaatattcccagccatgttaacacatctgtagaggaaataatactgattatttatttttamaagcatacctcggagatattaaaggttcagttccagaccaccgcaataaagcaatatcacaaaagagcaagtcacatgaattttttggttcctagagcat

SEQ ID NO: 326001 - DNA, 201 bp, Homo sapiens
gttttactcccaacttctacatatacacataaaggcatgaaaaatacccggcatcaaaaataactgctaaaaattatgttaacataatagagtatattttwaaaaaattacctgggtataaacctgttttatcattcttgaaaacttgattttgatcgtttaaaatcatgtttgtgtcattaatgaacttgtgtttccata

SEQ ID NO: 326002 - DNA, 201 bp, Homo sapiens
aaagcagtaatgaagacttccgtgttgctgtcttgggagattccagagaattataactccgccatgcctttcaaagtaagttgttttctaatttgtaagaratcacagataaaagtagaggggacagtttatctgggtaagttatttgcacagcaagcagaccactttgttttggccacgtgtccttgctattttcatttg

SEQ ID NO: 326003 - DNA, 201 bp, Homo sapiens
gttaacataatagagtatattttaaaaaaattacctgggtataaacctgttttatcattcttgaaaacttgattttgatcgtttaaaatcatgtttgtgtmattaatgaacttgtgtttccatataacaatgaaattataaatcttaaatgttatcagtagcctatgatgaaagaaaaagtattttgatttccataacgtt

SEQ ID NO: 326004 - DNA, 201 bp, Homo sapiens
ataaggggaagccattgttgggtttgaagaagttacagtgtctgaaataaatttcttaaaactgctctcatgttagatggagaacaaactggagaggacaraagtagaagttggacatccaattagggggcagctgtcctaatccaggaggttcatgtgctgcttacaacaaatcacgagttttaaatgagaagcaatact

SEQ ID NO: 326005 - DNA, 201 bp, Homo sapiens
gccattgttgggtttgaagaagttacagtgtctgaaataaatttcttaaaactgctctcatgttagatggagaacaaactggagaggacaaaagtagaagwtggacatccaattagggggcagctgtcctaatccaggaggttcatgtgctgcttacaacaaatcacgagttttaaatgagaagcaatactttacagaggt

SEQ ID NO: 326006 - DNA, 201 bp, Homo sapiens
tagctttctcctttgttaaatggcctaaggaagccaattaaaatgctgtcttgtgatttttattctgtggtggttcagcctgtacccagatttgtgatgasctgcataagccaataggcatttggggagtctcagccaccaccaatctgacaatacacatgagccctggaccccaaggcccaaaagtcctttgttctccag

SEQ ID NO: 326007 - DNA, 201 bp, Homo sapiens
ataataaatagaaaatatataatgataaatagaaaaacaatttatatgcattgggttgtatcttattcatctgagtattaaattaactgacctcccttctwtactgttcgtgttaactatttaaattgtacaatttgccttgtaatattggtcttagtgtgttacagagaaacagacaaaaccttaagttgccattaagtt

SEQ ID NO: 326008 - DNA, 201 bp, Homo sapiens
ctgttcgtgttaactatttaaattgtacaatttgccttgtaatattggtcttagtgtgttacagagaaacagacaaaaccttaagttgccattaagttgtsaacatgtagataaagaatgaacagtaaagcctgtgtccattgaagccagtgaaagaccagttaacttaaagactcagcttaggtccagataggaaagaat

SEQ ID NO: 326009 - DNA, 201 bp, Homo sapiens
caaaaaaggagacttaaaataatatttgtcagtaactctaagcccttaaattcagccctccaaaatcagatgaaggtgtgcaggctactcagagaatgagrtcgagaaaggaagtactgaggtgcttaccagcaaagggaaaaatgtattgctgtcactattcagataagctcaggaaaagcttctaatcccactgctgag

SEQ ID NO: 326010 - DNA, 201 bp, Homo sapiens
gatcgtgtcactgtactccagccccagcctgggcaacagagtgagactccatctcaaagaaaaaaagaaagtaattaagattcaaacatagctttttcctrctttttctttctcacacaaataaattatacataggccacaatatccctgacaccatatgacagaagtgcatctctcattaccttcttgcctttaccctaa

SEQ ID NO: 326011 - DNA, 201 bp, Homo sapiens
tttctagactacacagatatataccagacagtatttccattgagaaacttactatagagttggggaaataaagaattgtcaaatgaaaagataagttatgrtaatgaattcaaacaactttacaagaagaaatgctacaaggctaaacgtagctagttgccaaatggatgctccagtctgtaacacatgatagtggcacac

SEQ ID NO: 326012 - DNA, 201 bp, Homo sapiens
cagttgtattgtaaaaatatttgcatgaaaagaacatctttgtttccttaagtcttcatctgctcttggtactcatttgctcttgaaaagggatataatckttttgtttttgatctataatcattcccacagcaaccaattgtgatgccacagaccaaggattataattttcgctggagaataaacagatgaactttgaaa

SEQ ID NO: 326013 - DNA, 201 bp, Homo sapiens
tagcaaaaattaattattgcagttgtggataaaaaagaggttgttgttctaaagtataattaatcttcactgctgccagtactgtttccattagtaggatyataattaacattttgttttaaaagccctattgacatggatttttagaaaagtgttagccaagtctaaatataaagcaaaattaaaattctgcttttcaat

SEQ ID NO: 326014 - DNA, 201 bp, Homo sapiens
agccagaaagaagagagagggagagaaggaaggaatgagagaaagagggaggaggttggttttctctgcatctcctgcaaaagagagaaagaaggaggagyctagtttgctctttgcatctcccactttccaagcatagtcacatgatatatagagagatatcatttatcaagtcatgaataagcatgcttcattaggtta

SEQ ID NO: 326015 - DNA, 201 bp, Homo sapiens
ccaggctggtcttgaactcttgacctcaaatgatccacccgccttggcctcccaaagtgctgggattacaggagtgagccaccgtgccaggctgatgtcatttttttttttaagtcacttctgagactctaagtatgtacctccagttttataatcaaaataaacaaaaacaggtttctgaaaggtaggggtttttaaagg

SEQ ID NO: 326016 - DNA, 201 bp, Homo sapiens
ttttttgctttactcttgttctcagaaagctaatcgaagagtaaaatcagaaagctctgggagtgagtttatttttatctctattgtcttcagttcattgsagcttttttgttttttttaattgtacatctatgcagcttactctaatgaatctacacttcattactctgaggccgtagataaacctacatcatctatggt

SEQ ID NO: 326017 - DNA, 201 bp, Homo sapiens
aatcgaagagtaaaatcagaaagctctgggagtgagtttatttttatctctattgtcttcagttcattggagcttttttgttttttttaattgtacatctwtgcagcttactctaatgaatctacacttcattactctgaggccgtagataaacctacatcatctatggttctgtttttagaatatagatacaggtagcag

SEQ ID NO: 326018 - DNA, 201 bp, Homo sapiens
ctaaggtatgtgctatcatttgtaggactctctgtctcagaaggcttttgcatgatatatcaatgtcatgtcaatttgtgggtttatacttgggattggaytcttggcatcagtattcaggagccctctggcataggacataaaaaagtaacctattttaaagtagtggttatatcaaattcccagctagttagcccagtc

SEQ ID NO: 326019 - DNA, 201 bp, Homo sapiens
ttttctttctcgagacggagttttggttttttaggaaattaccttttcacccagcatggaaaaataaaacacccaaagggatataacctggtagctcatcyctgatctttcagtattctatacaaggatccttatcaggcagtttgggaactttgtgcttagtttctgccccttctctgttgatgaaatgtgaacttcctt

SEQ ID NO: 326020 - DNA, 201 bp, Homo sapiens
ctctgaatatcatctgtttctccattagctcactgtggggttgagctacgatgcccacagaacaggcatgcttttaaaaaaaaaaattctatgtgttttgyagaaacttggaaagactgcagctataccaggggataccctggcaaacaatagactgtgtctttgcaataaatgtttgctttatttggtatgttgcagaaa

SEQ ID NO: 326021 - DNA, 201 bp, Homo sapiens
gattgtttacagtttggagtgattatgaattaaagttgctgtagtcatttgaatataggtttttgtgagaacctaagttttcttctttcctgggtaaatamcttggagttttgggagtggcatttttaagttgcatataaagtgtatgtttacctttataagaaactgccaaactgtttttcaaaatagcattcctatttt

SEQ ID NO: 326022 - DNA, 201 bp, Homo sapiens
tatgccttacaaactaatcaaagttgctaaagttcaaatgccctccaagtaccttccagtggctcctctctttgaatcttgcttaacctgaatcaggagtratagcatttatatttctaatgacaagcctgctgtgtggactgagcaggttgcacacgttgtacgtagtccatgtgattgtaacttcctttgggttgagca

SEQ ID NO: 326023 - DNA, 201 bp, Homo sapiens
aaaaaaattctatgtgttttgtagaaacttggaaagactgcagctataccaggggataccctggcaaacaatagactgtgtctttgcaataaatgtttgckttatttggtatgttgcagaaagaatccttcatgtcaccaggtctgatgcagccacgtgtggctgtcattgaacaggtgaagggtcgggggaaaggcctgt

SEQ ID NO: 326024 - DNA, 201 bp, Homo sapiens
atccttcatgtcaccaggtctgatgcagccacgtgtggctgtcattgaacaggtgaagggtcgggggaaaggcctgtgtcctttagaatttaatcaatttrcttgtaaatgtttattagattttgctttcctatttcctgttttctagtttttctggagactgcaaagtaaacatttttgccacattgttgtaaaattgca

SEQ ID NO: 326025 - DNA, 201 bp, Homo sapiens
accatcatattacctcctaaagtcatgttaacttgaaacgttaaggatgtttgtttttctatgtgagaacccaaattataaacattacaaggattgtgatraagtaggaattttacttatgggaagaaataaggcagttttagggagaaataaacttgtgtgatatattttatatgtttttcttcatcattttattattgc

SEQ ID NO: 326026 - DNA, 201 bp, Homo sapiens
taccacctaacacctgtagaatctttttttttttttttgtaaaaggcacacaaattttatttacatgtccaaggaaggaaccactgagtgactatccctgygtgtataatcttgagcaaattgctcaaccatactgtatttagaattgttggaagattaaactctttaaataagccaggttttcagaatgaagtaggaccc

SEQ ID NO: 326027 - DNA, 201 bp, Homo sapiens
ccgcttcatgctcttgtttaatttttattaaaaattagcaagtttgaagatgatgaaaggattatagtttatatctgaaacaaatagcattccatcctaascttgtcaaacagaaaaatatatttgattagttgggctagaaataattcatcagattgattctataactacctatattatagtgactgcctttgacttctg

SEQ ID NO: 326028 - DNA, 201 bp, Homo sapiens
gatttcattcacatccaggtaggttaattttggccattctaattattgctaatcacaatattactagtgtgatgaaaagccactaaaatgttaaataactyatgatgaaaacagactaaagaaaaaatgatttatgaaaaaaagaaaaagtgtatcccatcaaatagatttttttccacagtacattaaagagtaatagaa

SEQ ID NO: 326029 - DNA, 201 bp, Homo sapiens
attatctcatttagtcctcaaaaaaaaatcctataaggaggagaaaaagaaattgaagttcagaaatggaattctgtgtgcccagcccagtctcctttttkgctcatacattttttttctagattagctattatttattgtattaacagaaaaaataagcactgggttgccacatacagttgcaccactttcactccacaa

SEQ ID NO: 326030 - DNA, 201 bp, Homo sapiens
gaattttggcctgaaaaaatgcatatgttatccgttcatggtctcttttatttcctgtttggaaccaccctttgccctacatgattcataaatgtacaccrtaagtccccagggattggctttgagaaatagctataagcacagaattcacttttggaaagtttagcctctatcattcaaggtagggatttggggctacat

SEQ ID NO: 326031 - DNA, 201 bp, Homo sapiens
attcacttatataagctatacttcaattataaaaataaaataatttacatggacaattaaggaaacattagtagtgattatctatttaatttggaaagctstcaacagtaaatttaaaatggatgcatatgatagatggcattgctggcacagtgtgatagagtatttccaagaatatgtgtttctttttcaagtactgca

SEQ ID NO: 326032 - DNA, 201 bp, Homo sapiens
atctcaacatgagatttggagggtacacatatccaaactatatcaccaggttcacaaagacctattttggcagtgctttaaaaaccacttaattcatttayttttcagtagtgcagtagagtgggagagctaatgtttcatgaataaaagacaattacaggaacagcatttctctcttggaccaacattcttacagcgtaa

SEQ ID NO: 326033 - DNA, 201 bp, Homo sapiens
atcctgcatttattaggactccccagaaaaatacttagttgtatcctgaggaaatatttcaaagtgaaggcaaaaacgtatcatcttacagatgttttacrgtaatggcaaagtggaagcaaattaaatgtacaactatgagggattacttaaattaattacaacatatctatatattattaagcaaccaatgaaaatcat

SEQ ID NO: 326034 - DNA, 201 bp, Homo sapiens
gttccagtccagtaaggaaggcagcttggggtctccaaataggcctagactccatgagtgaggctgccaaggcatttgatagaatgaaaattgccaagctrttcctgcatctcttggtgagctgctaaaatgaggcattgtcttcaaacagagggaatagctttaacttcaaagaatttgtattcattttctggtaaagtt

SEQ ID NO: 326035 - DNA, 201 bp, Homo sapiens
tgtcatctcgttagataggatgatttccccatacaaattttacaaaagaggaaacttcaatagtttgccactagaatctaaacatgtaattatagatcatrttcattgaactttaactatgtagcagacctcatcctaaacacttacctatatcaattcatttaatattcacaataactttgtgaattaggcataactgtc

SEQ ID NO: 326036 - DNA, 201 bp, Homo sapiens
ttcataaaatgagtacatcacatcaaagaccatttgctctgttatgcttaattgaaaacaaaatagtcagtatcatcaactcagtcaggactttaaattaygtttaaactattttaaccagtaagaagtgaaccttcaagaaaaaaaaaaatgatggggggaattttaaagtgtagtaagtctttaattccatgagccaaa

SEQ ID NO: 326037 - DNA, 201 bp, Homo sapiens
actgttggaataacattttcatgcccaagctctaatttaactaattttataaaactgagaatgttttagcaactccgtctacatgccctggagaaaaatayttgtttttaaatattctaaagcactcaaaagttttcaagatcatgaaactttatccatctggcttagtggaggatttgataagaaatatagctgctttcc

SEQ ID NO: 326038 - DNA, 201 bp, Homo sapiens
tgtcagtagcaattaagactacatgcttcttcaggcatgtccagtgagaaatgctgagagactctttctcttctgaaattcttataaaagtttggaaaaargaaaaacacttgttttagaaataactaggctcaattccttctgtaccttattggctcaaatccaactatgtgtccgtttctcaaatatttactgtcattt

SEQ ID NO: 326039 - DNA, 201 bp, Homo sapiens
cacaatcacatatgaaaagtgtcatttcaagaaaggtgaatatttcaaagatgacttcattttaaaactatccttccttagtttaccttttattttaaaasaacccttctttagtttcattgtgtatttgcaggcagtataagagtcaagtgtgtgtgtgctcttgtgctctaacttgtgatcctaggagcatcagactta

SEQ ID NO: 326040 - DNA, 201 bp, Homo sapiens
ttttccttaagcaactttaggaccagcagcacaaacattgcctttggagtctgcatgatgtatgggattgtttttgaaagtggtggatacttaatgtaaakaggacgctggcaacaaaaagaatgatgctcatgttggcaatctaaaggatgttggggtccttatctagaaagttctacacttttggttttctcttgtcag

SEQ ID NO: 326041 - DNA, 201 bp, Homo sapiens
attccgctcctgccaatttatatgtcagaggtaggaatgacataaccctggcatcgcttcttcattcaggctcagggggagttgagacgccgcagggtccrtgttgttatattagtagttaacaagctggtttggtaatagtgaccgtagctgaaacatgttagtaaatagaaaagttaaaaatttaaaatgtgttgttta

SEQ ID NO: 326042 - DNA, 201 bp, Homo sapiens
tagaatgaaaacagagctcccatacaaagggaggggacccaaagggggttgctgttgccggctcgaatgcctgggtttatatcctgatccttgtccctccygctgtgctctcaggcaatagatgattggctatttctttacctcctgtttttgcctaattagcattttagtgagctctctgattggttgggtgtgagctaa

SEQ ID NO: 326043 - DNA, 201 bp, Homo sapiens
taaagaagtagtgacaaagtagatccaagccttctgcccaatatatcctgtgagaatggaggaggtttcaaagaagtcaggtagtagcccaaaaaaggtcrggctggcggtgcagtacagaaaaaggaaattatggtcctccaatgattctgtgctgtaattggactaagacaaaaatgagccattaagtaaaagaaattc

SEQ ID NO: 326044 - DNA, 201 bp, Homo sapiens
cacagtgtgttatattgggttttatgaatacaggactcattagatcttagagcttctggagaacatagccatctctcttatctccacatttgcagaggatstgtgagagagaacttacctgaaatgtcttttcaccagagcgcgtaaagagatttgccagaaggaggctttcattccatgtactaccttcttacaaatagg

SEQ ID NO: 326045 - DNA, 201 bp, Homo sapiens
ctataagaggaatcttagcattattttcaggacataaagcattggcttaataatttgctctaccaggtattccattttgttttcaattacgtatttttcaraatattaattatttatcttttattgagacagagtcttgctctgtcgcccaggaatgaagtgtggtggtgcaattatggctcactgcagccttgacttcct

SEQ ID NO: 326046 - DNA, 201 bp, Homo sapiens
gctaggatatgaacccgtgtagtctgaggtctgggtaatgttctgaccactataaatagttgcctctgagagttgatttcctttcaccacagttttcaccrtggaaaatttgttgtcattaacttatctgttaaggtgatcacatagtagtcaggtgaccccaaggaaggattattgtcccaaatttctttttgttataat

SEQ ID NO: 326047 - DNA, 201 bp, Homo sapiens
ctatggatatgtaagatgtgtgcacgtcccagtgtttgtaacctgagaattttatttaaaccgtcatttgaatctacagtaatctggtgttggggaggaayaggatctttatcaacaaagagctgccaaaaccccaactgcttcttgagtagctgtaatagatgaataatgttacagccaaccatgcatttcaagttttgc

SEQ ID NO: 326048 - DNA, 201 bp, Homo sapiens
tgtggctaaacagtttgtcattctttttgaaaaaacaaatgttgggcacaccaccatgctttgggagtgtagatgaaagtgaaggatgtaagcattaagasattacatgaatttgcagttttggctaggccttgggaaacattagtctttccatcgtcacagatgcagcaatcagagtatttggctttagcttaaaagttc

SEQ ID NO: 326049 - DNA, 201 bp, Homo sapiens
aggctgtttcctcttgtgatgtgctcacctggttgaataacactccttgttttccagggatcccaggaagtgactatgtgaatgccaactacatagatggstataggaagcaaaatgcctatattgcaacacagggatctctccccgaaacatttggggacttttggagaatgatatgggaacaacggagtgccacagttg

SEQ ID NO: 326050 - DNA, 201 bp, Homo sapiens
gaacacttgggactaaatgaccacatgtcctggagagatttaacaaagcactggagcctcatattatttcatctgctcttccgtcttcctccctcccatcmttcccatctcaccctttccctatccagttgctcttttacctaaagtagcgggaagaaaggagaaggcattcctggattcccaaacaagagctggaattgg

SEQ ID NO: 326051 - DNA, 201 bp, Homo sapiens
agtggcagtattatttgtcatggtttttctactgtggctaaacagtttgtcattctttttgaaaaaacaaatgttgggcacaccaccatgctttgggagtrtagatgaaagtgaaggatgtaagcattaagagattacatgaatttgcagttttggctaggccttgggaaacattagtctttccatcgtcacagatgcagc

SEQ ID NO: 326052 - DNA, 201 bp, Homo sapiens
tctccaagagctgaagcttgaaatgtcattatttagattaaggctcaggttcttaaaataatattcattcctatggtacatgaagaaaatatgtgtgcgtsttgtaaatgctgctgtgaattagaagtatgctagactgccactgaccatagatttgcagcagggaagaggggagaaaaggaaagagaagagaagatagct

SEQ ID NO: 326053 - DNA, 201 bp, Homo sapiens
atcaagaaataagctgtcctgaatgagtccatagtcttctaggagaaacagaaaaaaaacaaaaaaacaaaacaaaaaataattgttaagttaatcttggragtgggacaatattgacgagagtcttcccagagtacccatgacttggagagtcactgaagtttgccagaaatgcaagcccccaggctgagggatctgtgc

SEQ ID NO: 326054 - DNA, 201 bp, Homo sapiens
ccaacatagttgtactggttgttaaaatattgaactgcattgatgctggctggtacctataaattatatttttattgaaacattgagtcatctaatgatamtgtttggaagaggtgacactggagtcaaaggcaactgctgggcagaccaaggcagaagcagaggtggctgtagggctatgtggggcacccaggtgatcct

SEQ ID NO: 326055 - DNA, 201 bp, Homo sapiens
tttggaagaggtgacactggagtcaaaggcaactgctgggcagaccaaggcagaagcagaggtggctgtagggctatgtggggcacccaggtgatcctcakgagtgattaggtctgaggtggatactctgaggacccacctcatgtgggaagagctgatatcaaagtgctacttggccacgagaaagaggcacctcacaca

SEQ ID NO: 326056 - DNA, 201 bp, Homo sapiens
  misc_feature (1)...(201): n = A,T,C or G
tcctcaattcatagaaaaaagagtactgaaattaacattgatcaagaagctattatttaaaatgtattttgctgacagtatcatagaaaacttaggaaatnggtttacattttacaggtgagaaaacagaggctctggaagaataaataaatgatgtatttaagatacaagctgcaggtggaagagccagagttagtatct

SEQ ID NO: 326057 - DNA, 201 bp, Homo sapiens
tctcaggtaaatattcaatttccatggacagaggtagtgtaaagggcatttattactgctttctcgactccaggttgagtgctcctagactaggtgtcctrtgctgttataatctgatacctagactgcttttctacatctgaagtcttttatagcatgaagtttcaaaatgattacagagtattaaaaccacctccctct

SEQ ID NO: 326058 - DNA, 201 bp, Homo sapiens
tgttggatttttgtatggacaaacagagaccacgaatggtctccagatataatctatgttttacacatgctcaaaaaccctagtaaaaatcaaatacttcytaaagcagtaggcaattgcatatatagtaggcaattttaaaatgttaaactgataaatcaagctcctggatctttaaatcttcattttaagtgtgtctta

SEQ ID NO: 326059 - DNA, 201 bp, Homo sapiens
caaaagacagcactgcattgcagtgagaagtgaagagacttgattcctttttcggttttgccacaagcagatctcttgggctctctgggctccaaattgtktgttgtctctctctctgttgattggtgccatctactatttgtaattcttaatttaagttggttcctgtgttccttttttgtgatgaaatattctaaatta

SEQ ID NO: 326060 - DNA, 201 bp, Homo sapiens
agtaagatgacataaaatagatacatataaagcacttgagacagtgcatggcatatagaagtatgcagtaattttaaattattaataattattcattactragtaccttttaaaagctgtgtgtatatttagaactctgagaagaaaaattcaacatgaatttggatatcatctacgtaacctgagccatccattttatta

SEQ ID NO: 326061 - DNA, 201 bp, Homo sapiens
tacatctgtttgtataaagacctgagaaacctttcaactcttaaaatgatgctgttaaaggaacttaatgccattgtccttgatgccttcaagatgaggtstgaactgcttatcattgcattcatgcccctttgtaatttaggctgatctcacccttcgcacctcattgttgactccttgggccatcttctgatagctaca

SEQ ID NO: 326062 - DNA, 201 bp, Homo sapiens
tatttttgctaaatgacaaattttaagcacggaaggtgagagttatagcatttgattaacgaaatcgtatatcaaaagtccacaaacatttgtgaatctaytttttttctggctgtgggttctttattcacaaagaaagtaaggttttcagttattttagatcaacctagggtagtaatgtggtttcagataaattattca

SEQ ID NO: 326063 - DNA, 201 bp, Homo sapiens
agattttcttaagaggtcacggattatattttcctatatcgtcttagtcttccacttagaaactaaggccgttttgttccacttttgagcctcgttccttrtgttgttttatagaataatttgtggctttattctaaaccacatattctataaagactatattctagtaccagagggacatgacaactgatttgctctaag

SEQ ID NO: 326064 - DNA, 201 bp, Homo sapiens
ctttgtggcactagagaggatattttgtttgtattaggtgtagttctttaaataatttaacatagtttagagattagaagtcattatttgtaagtgatagmgttttgttttgttttgtttttcctttcttacacctcttcttcaaaatgtgggctggtaagaaaaaatgctgagtgattctgtttgcctgttaggttttgt

SEQ ID NO: 326065 - DNA, 201 bp, Homo sapiens
gttaccatatttctgataagtgtattctataaacttcttaatttttgtagtagtttagctttgtggcactagagaggatattttgtttgtattaggtgtakttctttaaataatttaacatagtttagagattagaagtcattatttgtaagtgatagcgttttgttttgttttgtttttcctttcttacacctcttcttc

SEQ ID NO: 326066 - DNA, 201 bp, Homo sapiens
ggggcacccaggtgatcctcaggagtgattaggtctgaggtggatactctgaggacccacctcatgtgggaagagctgatatcaaagtgctacttggccaygagaaagaggcacctcacacagttctgctctggttaggacaaagtgccagaaacttgagacttaatgactttcagtttaatgggggaagtcattggaaaa

SEQ ID NO: 326067 - DNA, 201 bp, Homo sapiens
tgataaacagctcttccaaattgtctgttgaatagatgacatggctaacatgagaattatagatgatctctttaagttaccatatttctgataagtgtatyctataaacttcttaatttttgtagtagtttagctttgtggcactagagaggatattttgtttgtattaggtgtagttctttaaataatttaacatagttt

SEQ ID NO: 326068 - DNA, 201 bp, Homo sapiens
ctgatatcaaagtgctacttggccacgagaaagaggcacctcacacagttctgctctggttaggacaaagtgccagaaacttgagacttaatgactttcartttaatgggggaagtcattggaaaagtttacggcagctccctatgtcaacttctggcagacacatcaaacaaaagggaataacttttttaaagttaataa

SEQ ID NO: 326069 - DNA, 201 bp, Homo sapiens
tgtgaaaactcaaagtgcaagtaatttctcaagttccaaagcttagttctacttagacttttaaaatgtttgttctttcacccacattaaaaaaaaaaaamaaacctcagacattttctttactaacattaaacttcgtatctttcatagtagagccttttgtttttttcttgtgggagtcctacccgtcttaagggactc

SEQ ID NO: 326070 - DNA, 201 bp, Homo sapiens
atgtacgattagatgtgccagcgacaccctgactcagccttgtgtataatggatagaggggaactgataggcttaggtgtggactagaaagtttaggttastaattattctagttcatttgagtaaggtgttttaaactgaatagactttccattctttgttacagctgataaacagctcttccaaattgtctgttgaata

SEQ ID NO: 326071 - DNA, 201 bp, Homo sapiens
ctggcagacacatcaaacaaaagggaataacttttttaaagttaataagcagtttagaaagtgtgcgaatggttcaatgaactggtaggcaattttatgayatgtaatttggtttattttgagaataatatttttcaactttatggctgtatatatgaaaagctgcactggtggtcaaatgctttaatatcactctcattt

SEQ ID NO: 326072 - DNA, 201 bp, Homo sapiens
atgagaaatgaacgttctggtagtctcatagtcagtgtggactacagaccagcagcattggcgtcacctgggaacttgttagaaatgtagaattataggtrctaccccactgctactgattcagaatctacattttaaaagatattgatgatgtctttgtgtaataaattgtcatcccagctgggcacagtggctcacacc

SEQ ID NO: 326073 - DNA, 201 bp, Homo sapiens
gcactgattatttgtgaccttaagcatcagtccaaacatatattcctttacacacacacacacacacacacacacacacacacagacacacacacacacayatatatacacaggctgacttaccagaggaataaaattatcattaggaattctacaaatcattcttgcagactgctttaacaaagggcattttttaaagcc

SEQ ID NO: 326074 - DNA, 201 bp, Homo sapiens
aaccagactgactgccagttgggaatagatatagccaaatattgattgagtgcagagaactacactgttgttaaaagagaatcactgagatgctctctgtycttatcgtggaaaatcaagtattcaatctggtcttaaaaatttccagaatagttactataacctgtagaaataaatagttcagcatttattttttctgcc

SEQ ID NO: 326075 - DNA, 201 bp, Homo sapiens
aggcacatgagaaatgaacgttctggtagtctcatagtcagtgtggactacagaccagcagcattggcgtcacctgggaacttgttagaaatgtagaattwtaggtactaccccactgctactgattcagaatctacattttaaaagatattgatgatgtctttgtgtaataaattgtcatcccagctgggcacagtggct

SEQ ID NO: 326076 - DNA, 201 bp, Homo sapiens
cacaaactttcttgtttcccaggaaattgggagaaagaaagaagcaaataaaactaggaaaaaaatcagtgactgcatacataggcatatgtgtgcatttktagcctgagaaacccttttatcatgtgaatattaggttaggtcctatcataattttcccatctatctggtcactcttgtttccattattgctcctgccag

SEQ ID NO: 326077 - DNA, 201 bp, Homo sapiens
ttgttaaaagagaatcactgagatgctctctgtccttatcgtggaaaatcaagtattcaatctggtcttaaaaatttccagaatagttactataacctgtrgaaataaatagttcagcatttattttttctgcccactaaaattaatgaaatttatctaaaactttcctttattatagtctccctcattaaatgggtattg

SEQ ID NO: 326078 - DNA, 201 bp, Homo sapiens
ttattagcattaggcagggaagaaatgcgtaacaagcaattattatcccgagagcagcccttcagtgttgtctgtgtttctaattcttgaccatactgtastccggtttggtttgagtcaggagttaacacaaactttcttgtttcccaggaaattgggagaaagaaagaagcaaataaaactaggaaaaaaatcagtgac

SEQ ID NO: 326079 - DNA, 201 bp, Homo sapiens
acgaatttagagtcacttttagcaatagttatggtatcccacgtatcatttattgcctcttctaagtccttctttggctaaataatctcgtggcaaatacrttttggattagcaatgctagaaccctttcaaggtatcagtttgttacagttggaattctgatgccttgccatgttgccatgctcagtaagtctttattaa

SEQ ID NO: 326080 - DNA, 201 bp, Homo sapiens
taataaatgaagttaacctccgaaccatttcaaaagaaggataaggaaagaacaggagagaaccccctgtacattagatgaagacactttgcatcaagtcrtctagccaacctttagctttgtgcaagaataaaaaggacagtgtactctctgagacttggatgtgcctacttaagtcattatttagaaggaaggggctct

SEQ ID NO: 326081 - DNA, 201 bp, Homo sapiens
ccatgtgtgtgcatttccacatacgttaggatatttatttttcataaggtccttttgagaaatatttcctgagagaaaatggtaatatttagacatatccrctttaaaaaattgcctctgatttttgcagttgagtttgaaatgtttatttttcttttggtaaatactaaaaatgcattgttcaaaagcaacttttttctt

SEQ ID NO: 326082 - DNA, 201 bp, Homo sapiens
gcaaatgatagaaataaaaaacacagaaggctattttgtacaactaggaaacacacaaaatattctttacatcttattaaggcaaaatttttgtcttactrtggacaatttttgtttgttttcatcaaaaagatgatgtttgtgtggtctcaaagttgaaatcaaggcataggaatcaaaccttgtgaatttaatatctag

SEQ ID NO: 326083 - DNA, 201 bp, Homo sapiens
gagaattgagaaaggtattgaagagaagatggcactcttagtggaactaggaagaggagtgaagtgcattttatcaagggaaaggcacatgagaaatgaaygttctggtagtctcatagtcagtgtggactacagaccagcagcattggcgtcacctgggaacttgttagaaatgtagaattataggtactaccccactgc

SEQ ID NO: 326084 - DNA, 201 bp, Homo sapiens
tcccttctctattgtttaaagaaagcttcttttgagaaatgaaatctcttaaggctttacttaaatcttgatctcaatggcaacagtgaagaatgaaataratcttccattatcactcagccatttttcttcttgtctggcgatttatcagtaaatataaaactcttgctccaaatgaaagtttcagccaatgaagagtag

SEQ ID NO: 326085 - DNA, 201 bp, Homo sapiens
tcagtgctgagaaaatatagaagttgtaagaaacctgtacttctggagtttgtagttgtcaaagacaagtatatacaatcaaacgagaattacaccaaggwggtaatcttaagtgctggaatgttattgggattcagtaaaggtcataatgatctggagaattgagaaaggtattgaagagaagatggcactcttagtgga

SEQ ID NO: 326086 - DNA, 201 bp, Homo sapiens
atatgatgagaaccagtgtgtggggttagagagttgggagaagttgtcagagaccagaccacgcaaggctctaaattttaatatttgtagaatttcttctrtttgtcaggcatcatgctaaacactgggcatttactggtgatcagaagagatactatgcttgccattaaggggcttaccgtccagcaggagagtaaaata

SEQ ID NO: 326087 - DNA, 201 bp, Homo sapiens
cagaagagatactatgcttgccattaaggggcttaccgtccagcaggagagtaaaataatggatgaatacacaattgcaaattggataagcactatatagaaaaaaaaaaaaagatggtgcctgcagtcttggaatcttggtcttgtacatttaagtaaagacctgaaggatgagaaggaatcagttggatatgggtagct

SEQ ID NO: 326088 - DNA, 201 bp, Homo sapiens
tacccctctggaattttctgatgtcatttgaaccccaaaatagacttggctgaaagactaagaggtagtatatcaggtgatgacattgagtcaaatatttytatagttagaagcattaaaatactttatagtcacttgaaaaactgtattaggttagaataaatatatcaagtatccattagctcactgaatgaaaatcag

SEQ ID NO: 326089 - DNA, 201 bp, Homo sapiens
tgctagcctggctgtgccgtggctgtagcatgagctttttagtgtcgatatgcttgggaggcccatcagctacaatttcctcatctcaggctccagccagmtgcagcagatgctattgttacctcttctattcgataaagtaggaagcaaagagagaaagaaatttgtcaatattgtttttctgctggaaccgaaataaaa

SEQ ID NO: 326090 - DNA, 201 bp, Homo sapiens
tgagctcatactactagtggtggcaaggccattatgttccccatgttgcatggccctataaatcaggcagattctccagactttaggtcccatgatggttyttagctcccctttctgctgtccctttgggggcatttctctgatttctctgtcaagccttccctggtgacctggtcagaatgagccactccttcctttctg

SEQ ID NO: 326091 - DNA, 201 bp, Homo sapiens
ctatttctgagttcctttttctaccactctacatttcatgttctttcccacataccatctattccatgattaaatttagacatagctccccattttgtagsaatactaatagttcaggatagttgagcacttattcaacatcaaataatctttcttgccaactgaagaggccctgtcataagtgctttatatgtgttactg

SEQ ID NO: 326092 - DNA, 201 bp, Homo sapiens
ttttactacagttcagtaaataataatttagatgcatttttactgatggcagcatagtttcttaaatgaaagtaattttgtagtatgatgatcaaattatrtagtttccattaagatttacagcagcagaatgtcacatgcattgattaaaaagggagtgaaatttggaaaatacaaactatttgaaatggcccatgggat

SEQ ID NO: 326093 - DNA, 201 bp, Homo sapiens
tggtggctcacacctgtaatcccaccactttgggaggctgaggtgggcgaattgcctgaggtcaggagttcgagatcagcatggccaaccgtggtgaaacsctgtctctactaaaaaatagaaaaaaattatctgggagtagtagtggtgcctgtgatcccagctacttgggaggctgaggcaggagaattgtttgaacct

SEQ ID NO: 326094 - DNA, 201 bp, Homo sapiens
ataaattatgaggagtgtatttattatgaccattactgttaataatctcaatttacatataaaaatctccctatttaatataatgaagtcacatatactascaaattatgtggtctcaacccatttttcagtggttgaaattctaatggactcgatctctgctataggaacagtcattcttgctgttgtaagaggatgcat

SEQ ID NO: 326095 - DNA, 201 bp, Homo sapiens
tgcataactgtatattagattcaccagtttttaaaatttgggactaagaactcttatttgagtatgaccaatgattagcagatttagtgtttttaatatcracagcaaacagtagtttgtttctaaagttaagcaactttagaatccatctagatgtttataaatatttttccatttacctgcagttgtgtcacccttacc

SEQ ID NO: 326096 - DNA, 201 bp, Homo sapiens
atgctaaaaactctcaataaactaggtattgatggaatgtacctcaaaataataagaggtattcatgacaaacccacagccaatatcatactgaatcggcmaaagctgaaaggattccctttgaaaaccggcacaagacaaggatgccctccctcactacttctattaaacatagtgttggaagttctggccagggcaatc

SEQ ID NO: 326097 - DNA, 201 bp, Homo sapiens
cagctgggactacaggcatgctccaccatgcccagctgatttttttaagttttattattttgtagagacagggttttgctatgttgcctgggctggtctcraacccctgacttcaagccatcctcccaacttggcctcccaaagtgctggggttacagatgtgagttaccatgcctaagcctgaaccacaagtttaaaatc

SEQ ID NO: 326098 - DNA, 201 bp, Homo sapiens
gagcctgagatcatgaaagtttatttcatggcccatatgctgaatctagcctgtagacacattttgccccatacagtgcttttaaaattcaattaattttyagtaattaagaatggaaaggttttacctggaaggttcatgatcaacttctgtgaaggaaatcggaagctgggacaagagtgcgcccacatttcacaaggc

SEQ ID NO: 326099 - DNA, 201 bp, Homo sapiens
tttgctttgttttactaccgttataattctggctgtcggttttattgtcattatcatttatcaatatgctagatacacacattttaaaacatgtaccttartaaaatactggatattttagcaatcatgggttttctagtatctttggtcatatttcatatttatactatagcaagatgaaactgttgtttagcagtgcaa

SEQ ID NO: 326100 - DNA, 201 bp, Homo sapiens
aaggtgaaggggaagcaaggaccttctccacatggtggcaggagagagaagagcaaagggggaagagccccttataaaaccattagatctcgtgagaattsactcactatcacgacaacggcataggagaaaccacccccattgttcaatcacctcccaccaggtcccttctttgacacatggggattacagtttgagaag

SEQ ID NO: 326101 - DNA, 201 bp, Homo sapiens
tctgtattttacccagcaacaatctgcaacttatttttctccaggaaaattgaatctgttactgtttagtattcctaccagtttgaaaaatgtggtttatrttggcatcagagcagtaatttacatatattgggataacaaaaatgcatgccagaaaaagatcaacataaaatgaagtgcagaaaagctgttttccttcaa

SEQ ID NO: 326102 - DNA, 201 bp, Homo sapiens
gcaaatgaaggaggctgtctgttgcctgttacctaagatggtaatatacacctattatatacctattcctgttgatgacatgtttaccagcctgataaacmcgcatgatcaggaagagaaagtattttggattgaaccatacttgacacataaatgtcctcagcctgaagggtttgataaataggaagcatgcgaggttta

SEQ ID NO: 326103 - DNA, 201 bp, Homo sapiens
ttatagatttttgaaatattatagggatgatgggtagtcattgtcttttatcttcccccatccaagccttacccaaacctccaggaactcctgtagtgacygagagcacagctacaagcatcacactgacgtgggactctgggaaccctgagcctgtttcttattacataattcagcataaacctaaaaactctgaggaac

SEQ ID NO: 326104 - DNA, 201 bp, Homo sapiens
aaactactctttgctataatttcatttaattaaatcttcagtagatacataatcctgtcattttcatagtagagtttatagatttttgaaatattataggsatgatgggtagtcattgtcttttatcttcccccatccaagccttacccaaacctccaggaactcctgtagtgaccgagagcacagctacaagcatcacac

SEQ ID NO: 326105 - DNA, 201 bp, Homo sapiens
gcagctaatactaaggtttttttgtgggttccagttacattctaagaatcttagtggattggctcattagtcttcacagcaaacccatgaaatacagttayatacagctgtataatatgacttaaataataatatttttcccatttccacatgaggaaactaaagcaaagagaggttaagaaatgcgtgcaggatcactta

SEQ ID NO: 326106 - DNA, 201 bp, Homo sapiens
ttggaacttgcagaccacattgaaagattgaaagcaaatgacaacttgaagttttcccaggaatatgaggtaattcactgtgtttattctttacagtaatwtcaagagttactcttctctttttttgaccatattcttgaaaattaacttcatcagtgcttttccctttaaatatgactcaaatatgatataaaaatgtat

SEQ ID NO: 326107 - DNA, 201 bp, Homo sapiens
ggggcaaatggtggagcggtggggcaatccacccttacccagggatcctgccaccgccttttttaaaggcagggattactgttttaaggagggctgactayggtgagggggcgatttctttttctttctttcctctgaactagtggggagaaggagaaatagcaggaatcaaagtctacgcagctgccatagaggaggggg

SEQ ID NO: 326108 - DNA, 201 bp, Homo sapiens
tacacgttataattggtatcgcatctctaaccaagcgtatatatcaaatatatgctatataaaactaatgacatgagaacaaaggtacacattgtcaacayttacaatcgtgaaataatgttatattgtgtaaccttaatataataagcacacatgtatttatccgtacattacagacataaaacctgtactgtacaataa

SEQ ID NO: 326109 - DNA, 201 bp, Homo sapiens
tactactcacatattttcaggccatttctaactatagtattctctatattttggaatagttagcatcattttcatttgttttcaaatgtgtttcttctttscttttttcaataggtatggctagccatcctccaatacccatcttggaacttgcagaccacattgaaagattgaaagcaaatgacaacttgaagttttccc

SEQ ID NO: 326110 - DNA, 201 bp, Homo sapiens
taaactgttctttcgttgattttcaatttttcaaactgacaagggtgactgtttgtaaaagagtacactgtaagtatttgcatattagatttccttcagamcaaacttgatttatcaaaccattggacaattctatttttaaaaggattctatgcataattaagaattcattaacacaatcacatatgaaaagtgtcattt

SEQ ID NO: 326111 - DNA, 201 bp, Homo sapiens
aattcagcagcaagtaagaagtacaagtttgctactcttgaaaagctgccattctagggggtgatcttagaaaatgcaatacacgttataattggtatcgyatctctaaccaagcgtatatatcaaatatatgctatataaaactaatgacatgagaacaaaggtacacattgtcaacatttacaatcgtgaaataatgtt

SEQ ID NO: 326112 - DNA, 201 bp, Homo sapiens
agccagctggaatttatatctgtaagataagagtcagcaatgctctttcatgatacttctgtaaaattaataggaaagaaataaaagacaaatcatatgamaagtgagaaaacatcagaaagacacaggagtcaccaaaattaatagtggattatttttcatggaatctatgaaattactatatcttccgctggctgaatg

SEQ ID NO: 326113 - DNA, 201 bp, Homo sapiens
gtgacagcagaatgtcaacacatggcttccagtttgagctcctccctcattcttttcctgcttcagtggcttccctggggacatgctagttcaggtttttstagccagctggaatttatatctgtaagataagagtcagcaatgctctttcatgatacttctgtaaaattaataggaaagaaataaaagacaaatcatatg

SEQ ID NO: 326114 - DNA, 201 bp, Homo sapiens
gtcacttaacatgacttttttttctcaagtgatttttatcttctataacattctcttctcattcttccaaaaaggagctctatgaaagcaattaggggaasgtaaagggtgacaaggatggagggtaattatgaagaactacagagttcttttcatattttgtacataatatcatttctggaaattatatccacattaaaa

SEQ ID NO: 326115 - DNA, 201 bp, Homo sapiens
ccaggataggtcgtagccctctggatgcatcttgttgagtcacctactcagtactttattaaggcaacttgatatgaattaagttactgtagtaaatttcrttgggtcagcgctttttgaaataggtggatactaactacttcagcctataggcaacttctttttgtttttggttgtttgtttgattgatgggttttttga

SEQ ID NO: 326116 - DNA, 201 bp, Homo sapiens
gctcccatgtggagcccaaggctctcaggaaacaactctgtctctgcttccaaagcaagctttcaacttccaagagaccatagcaaggactgaaaaaagayactctttattgagttgcatttttatttcaaagtaaaattgggattttagcaccggaatgctaagtgtgtacttagagggatgccatagtggatgctgggg

SEQ ID NO: 326117 - DNA, 201 bp, Homo sapiens
actatttctgagttcctttttctaccactctacatttcatgttctttcccacataccatctattccatgattaaatttagacatagctccccattttgtarcaatactaatagttcaggatagttgagcacttattcaacatcaaataatctttcttgccaactgaagaggccctgtcataagtgctttatatgtgttact

SEQ ID NO: 326118 - DNA, 201 bp, Homo sapiens
caacattgagagtacacactctggagagatagactgcctaagtaaaatgtcagcttgtttacttactggctgtatgcctttggacaaattatttaatctcygtttcttcacctgtaaaatgggataacgctatagcaatgagaattttataaaaattaagtaagatgacataaaatagatacatataaagcacttgagaca

SEQ ID NO: 326119 - DNA, 201 bp, Homo sapiens
cccttatatgcctaatggcaaaaatacggtacacacacacacacacacacacacacacacacacacacagacacgtgtgtaattatatgtttaaaataatrggaacaaaaattagagacacataatttgggagttttcactgaaaaacagcatgatgatttttttcacattgcatttcaaaatacagaatctgtgctttct

SEQ ID NO: 326120 - DNA, 201 bp, Homo sapiens
catccttaaagaagaaaagaattcacaacttcaaatggatgctgttttctcatgaaggatttgcccagtggctggagagtgcttctaatattattatatartataatattatgggtgtagatgccagttttgagatgatgtttatcagcactcctgttcttgaacagtgagaaggtatttattgggcatgttaagaacagt

SEQ ID NO: 326121 - DNA, 201 bp, Homo sapiens
ttcttctgcctttagttcactctctccatagaagccagttgccttaaaaatcctgatgtaatcttgatattcaccagcttcaaatatggtgtgagtctttrttggctatagcagcactgcctactatcactttcctcaataacaaaagcgttctgtatcttctgttttgtccagtatagagctagtaaccacacgtggcgg

SEQ ID NO: 326122 - DNA, 201 bp, Homo sapiens
ccttaaagaagaaaagaattcacaacttcaaatggatgctgttttctcatgaaggatttgcccagtggctggagagtgcttctaatattattatataatayaatattatgggtgtagatgccagttttgagatgatgtttatcagcactcctgttcttgaacagtgagaaggtatttattgggcatgttaagaacagtaaa

SEQ ID NO: 326123 - DNA, 201 bp, Homo sapiens
atatgaaggagttgtagatatcttccagactgtcaaaatgttaagaacacaacgaccagctatggtacagacagaggtgagaaaatccattgcatttttcrcatctcaagagcctacgttttgctagcctggacctcccggactccatactctctcaacaccagacacaaaatactgtggggaaagcatcaaactgtttaa

SEQ ID NO: 326124 - DNA, 201 bp, Homo sapiens
aaaatgaagcaccttcaagttaattattttcaatagtttctagagcattttataactcaagtcattgaagttaatagaaataaatagcaagtaaatagttsagacattcaccataaatttagtgtttttggaagttgctatgcaaaaaccttctaacaaaagcaattcatctaattttatttaaactaatatattttaggg

SEQ ID NO: 326125 - DNA, 201 bp, Homo sapiens
tcccccttaataaattacccatttgctttcaagaaatcaacagtttgcatttttttctcttaacagtttatttataaaatatttttaggacttagacattwtgtactttacgtattacatccgtgtgtactgccacgctcctcgaagcaactcacagggaaaaaaatggactaaaacaatgcctgcagtgcctccctcctc

SEQ ID NO: 326126 - DNA, 201 bp, Homo sapiens
aagaaccccaagaaaagtcaatatgagcattaataaatgcttaaaatttctaaatacaaaggaaaaagaagaaaaaaaaagttgaaatcaacatagtctartaatagatgatttaactttttggtgagccctactattaaaaatcaaaaggcaagtaagagtatattctgttgtagttttatctttcaccttgcatagatg

SEQ ID NO: 326127 - DNA, 201 bp, Homo sapiens
tcttggaagtatctggcagcctatgtagagataatcatcagaatattaaaagacagtccatggaggcccaggcactaaccagacagaactaggaattttasacatggtcgaccattatggtgggactgatgtgtacagtctacatactagaccagaaccttgataagaaccccaagaaaagtcaatatgagcattaataaa

SEQ ID NO: 326128 - DNA, 201 bp, Homo sapiens
  misc_feature (1)...(201): n = A,T,C or G
aaattacacctgtgttgctatgtcaacactgggtgtcattgaagcaatagcacagatcactgtcaaaggtatgctcaatggattatgctttgaggatctgngtacactcaagccaagtgactaatgcctctagaaagcccatccttgaaaatctaaaataattcattattcagcattttaaatgtgtgtataacctaatca

SEQ ID NO: 326129 - DNA, 201 bp, Homo sapiens
ttgtttgggagaccttcccgtggcagaatcaaagctcgtagttcagctgcgggaatctggtgtacttaacacacacattcattccgtagggaagggaacgyatcttttataatgaagagtcaaagttgtaagaaacaatttaaaaagaaagccacgaacaaaccaaagattatttgctttcccatagatttattgtagctt

SEQ ID NO: 326130 - DNA, 201 bp, Homo sapiens
tgtcctgctgtatgttttagatccagtgtccctcaatttgaatgtgggcataaaaagccttttaaaagattttgttgtcatttatgttgttttacctttgrtatgaattgaatggaatcctgtatgtgaaacacccagctccctttctgaatttgcaatccttacctttaacaacttgagcttaatcttctgtctttcaac

SEQ ID NO: 326131 - DNA, 201 bp, Homo sapiens
atacatttttaagtgtcagtttcacagatttgaaatcgaccagccatggcaatcttgagagacattaggcagtgaggtcaagtatacttaaactgttcttkcgttgattttcaatttttcaaactgacaagggtgactgtttgtaaaagagtacactgtaagtatttgcatattagatttccttcagaccaaacttgattt

SEQ ID NO: 326132 - DNA, 201 bp, Homo sapiens
ggaaggaagagaaaggtcatgaaaatgtattagactgcttttcaggaaggtacaagtcaattttgtcggctatccccaaggtgaggactatatttcttatraacggttattaaatctagatttctttggtaagagcctttagtaagtggcttaacaatcttaagcctttggcacttgccactgatcagcactgaatattgg

SEQ ID NO: 326133 - DNA, 201 bp, Homo sapiens
aggaaggaagagaaaggtcatgaaaatgtattagactgcttttcaggaaggtacaagtcaattttgtcggctatccccaaggtgaggactatatttcttayaaacggttattaaatctagatttctttggtaagagcctttagtaagtggcttaacaatcttaagcctttggcacttgccactgatcagcactgaatattg

SEQ ID NO: 326134 - DNA, 201 bp, Homo sapiens
tgtatatgaaaagggggctctggagtgttctttatgagccaggaaggaagagaaaggtcatgaaaatgtattagactgcttttcaggaaggtacaagtcarttttgtcggctatccccaaggtgaggactatatttcttataaacggttattaaatctagatttctttggtaagagcctttagtaagtggcttaacaatct

SEQ ID NO: 326135 - DNA, 201 bp, Homo sapiens
cattttctgtcccattagtatgcaagaaagattatctttgttgtgcactcgtgtatatgaaaagggggctctggagtgttctttatgagccaggaaggaaragaaaggtcatgaaaatgtattagactgcttttcaggaaggtacaagtcaattttgtcggctatccccaaggtgaggactatatttcttataaacggtta

SEQ ID NO: 326136 - DNA, 201 bp, Homo sapiens
agccacaactgtcaacgtgtaacagctctggctatttgaatctgttacattgtgatgtttctcatgaaaatttaacgaagaaagtgcattcaaagagattstgtgcaaagggggatggatagaatttaattacccttattaaaaataagaaaggaacgctctttacattttctgtcccattagtatgcaagaaagattatc

SEQ ID NO: 326137 - DNA, 201 bp, Homo sapiens
actattacttattttatctcatctaggtgccatcaattttaagatactccatcattgcatgtaccactaaggaataaaagatatcacccctataactgcamgatgccatcaattttaagatgcacatcaatttcagagatgttagaatgtggaaaggaaatgtatgtcttagaatcaatgaaaccctaccatttcctatcc

SEQ ID NO: 326138 - DNA, 201 bp, Homo sapiens
ctggcttccttacaaagaagagattcagtgtttgtgaaagtggagtgaaagtaagagcatcgttaatattgtttatgcatgaacagtgaaaacagtttaastgaacaaatcatgtaaaacctgttacttgatcattcacagatatgtaaggcatgactacctacaaaacagtgtcagactattttcctcatggattcattc

SEQ ID NO: 326139 - DNA, 201 bp, Homo sapiens
atgccatattccagtggtttccattgagtggcctctggaccagcagccatagcgtcagcaccaccagggaacttgacggaaatacacacccttggaccccrcctcagacctactaaatcagaaagtctaggcattggcccaccaggctgtattttaacaagccttcccaggtgatgctgatgcatactaaagtttgagaac

SEQ ID NO: 326140 - DNA, 201 bp, Homo sapiens
tagtaactattacttattttatctcatctaggtgccatcaattttaagatactccatcattgcatgtaccactaaggaataaaagatatcacccctataaytgcacgatgccatcaattttaagatgcacatcaatttcagagatgttagaatgtggaaaggaaatgtatgtcttagaatcaatgaaaccctaccatttcc

SEQ ID NO: 326141 - DNA, 201 bp, Homo sapiens
atttacacaatcaacatattatcacaggtgaaaggatctataagcatgaactagttgtgttcacagacagcaccacagactaggaaaatacatgttctgtyaatggctggtaataaaatgtttttctggattagcccaactgtataaatgggccatgctctgtagatttataatgatgggtattatattttcctaaactga

SEQ ID NO: 326142 - DNA, 201 bp, Homo sapiens
gcttatcaggtttcctgacaccagtactcagtagtcttagtaactattacttattttatctcatctaggtgccatcaattttaagatactccatcattgcmtgtaccactaaggaataaaagatatcacccctataactgcacgatgccatcaattttaagatgcacatcaatttcagagatgttagaatgtggaaaggaa

SEQ ID NO: 326143 - DNA, 201 bp, Homo sapiens
taaatgtatacaagtcaaacagtattaaacaaactcaattccttctacatgttgactccatcactcaatatcaactttattttggctggcaagagttgcartaaaatcctcggcctataatttaaatttaccagttgtgaaagctttcaaacttagatatttgtaccacatatgtacccaggtgtatggtgaggctgacct

SEQ ID NO: 326144 - DNA, 201 bp, Homo sapiens
aacacatacatgcttatcaggtttcctgacaccagtactcagtagtcttagtaactattacttattttatctcatctaggtgccatcaattttaagatacyccatcattgcatgtaccactaaggaataaaagatatcacccctataactgcacgatgccatcaattttaagatgcacatcaatttcagagatgttagaat

SEQ ID NO: 326145 - DNA, 201 bp, Homo sapiens
agtatacaggcccttggctcaggtcaccagtttggcccctagctcaaactgtgtgaccttaagcaaatgactgaacctctctgtattttagtttgttcatstctatataaagaagcagtcatagtacttacttcatacaatcattaaaaacaaacacatacatgcttatcaggtttcctgacaccagtactcagtagtctt

SEQ ID NO: 326146 - DNA, 201 bp, Homo sapiens
tgaaataaaaagcagtaacaacatttttgtacctgggatggatgaaattgaggaagatgaatggctaaatttactattccagatcagaatctcctaatacrctgggattggaggtgggtgtgggagagtctttgcccaattccttacgaacatggcagtttttctgcttctcagattgggtccaaacctctctgcctgcca

SEQ ID NO: 326147 - DNA, 201 bp, Homo sapiens
tgctagtttaataggtcagctgtggtatccacaaatctgcattttaaaagagctcttcaggtgactttgatgcaggtgctccaaagacttcaatttgaggmatgtcattggtttagggtaatgtattacagaacatgacccccagtcttcatttcaccattttctgagatagcatatagactagtatatttaaaatttaat

SEQ ID NO: 326148 - DNA, 201 bp, Homo sapiens
acttgtaagatgcacgaagctaatttttttttactctgattctaagactaaaacaggttaaaggcgtgaaagctgtttgcactgatcctgaggtcagaatmcgaggaagtaggttaaattgtagcacagtattattagatcctatgagacacttcctgtactgtaaaggccgttgaactccaacagtgaatttagtgaaag

SEQ ID NO: 326149 - DNA, 201 bp, Homo sapiens
gctcttacaatgtgccaggtactttgctagactctgcagtacaaaaataaatgatgcataaattttgcccttgaattctgagtccaagggttcctttagtktttttatccaaacttaaccaaagccacaataactagaatttgtcaggattttggtatgcagctatgagttttactccatggttaatgggactggcatttt

SEQ ID NO: 326150 - DNA, 201 bp, Homo sapiens
tgtttcccacttttttccttaagctgcttaaggagatatctaggaagcgcagaagcatccgttatgggagagaagttgaattaaagccatatattgccgcycactttgatgtccttcccactgagttcaccctgggggatgacaagcattatggtggatttacaaacaagcaactccaaagtggtcaagaatatgtcttct

SEQ ID NO: 326151 - DNA, 201 bp, Homo sapiens
gcaattcagattttcctggcttccttacaaagaagagattcagtgtttgtgaaagtggagtgaaagtaagagcatcgttaatattgtttatgcatgaacartgaaaacagtttaagtgaacaaatcatgtaaaacctgttacttgatcattcacagatatgtaaggcatgactacctacaaaacagtgtcagactattttc

SEQ ID NO: 326152 - DNA, 201 bp, Homo sapiens
tgtcaataatatctaagtgttcaggtatacttgccaaatttttaaatactgcacttgaagaagcattgatgtaattgatgtaattgacacgctttttcttyataaacatatttgtattaatcttaaaaattgggatttttcccaataccatggcaaacagttctttattgaagacttcgttaaatcagttggggtcagagt

SEQ ID NO: 326153 - DNA, 201 bp, Homo sapiens
gtctaattgtgagtatttgttgaacattgggaaggttacgaagaaagtaacaaatagctcctgccctcctgtgagcttgtaagagttcacacttacatacyaactattattacggtttattgataacactatttggggacttttaaagaggagccactctgaactgtttgaaacttagaaaagtaattccaggggatgaat

SEQ ID NO: 326154 - DNA, 201 bp, Homo sapiens
gaatgactcaaaccgtaagatatccagtgacttagaaatctgtattcctgtcagtgaaggaagacccacagtgtttgcctcaacaaaaaaactgagtggtycactcctgggcttttttagccattagtttcaacaccaagaattccattgttattctatagatagaataacagtagaatatagatacgtgttctattgtgt

SEQ ID NO: 326155 - DNA, 201 bp, Homo sapiens
ttaggaacaaatcatctgacaatatggattttatttatttgtactgttgattaatcaaagagcctaaaatcttgttcaaagggaaaagagggtatttattrgctttgcagaggttacttggcacaaacactatgctttaaatttagttgcgtgtctagataacccctgttttttatgatttgcatagaataatttctcatt

SEQ ID NO: 326156 - DNA, 201 bp, Homo sapiens
aaaaaagaatgtttgtctataggatggagtcagagataattaactcagcagggcatgagcagttggaaagatgaggatgggactggtttaattcaaaattragagagccagagataaaagttttaaagaaggcaaatctggaaaaattgtctagaaaggtaaagagtaaataaaggcaattagatttggcaaatgaaaaaa

SEQ ID NO: 326157 - DNA, 201 bp, Homo sapiens
aaatctaactggggtttatgttctgctatgtagacattactttgtaatttgtaggatgattgcatgcattgcttctaaacagtttgttttattctctgccmggagtaccttgcaaactcctcaaaatgtgaggaatatttcataaaatggagctttgctctggaatgctctgtgggtagctggttggtatgctgaatattt

SEQ ID NO: 326158 - DNA, 201 bp, Homo sapiens
ggggtctctagaaatgattggaaatgaagatctgggatttcatagagtatctgagtttaggaacattaatgaagagacagattctgcatggaggttgatasttaaagcttgggctgaccttgccagataagagaggacaagagatgctagtagagaatagaacttaagaatacgggttcagggccagccacagtggctcat

SEQ ID NO: 326159 - DNA, 201 bp, Homo sapiens
tcaactgtgataataggattaagacctcaacataaaaatttaggctcagagcaacattttgtggggaaaaattgtttattatcttctacataaatttgaakagatttttactggctttcagcaaagaaaatggaggaaagaaaactcacattgctttcaaacacctgattattttggcataatcactgtgagtaaatgttt

SEQ ID NO: 326160 - DNA, 201 bp, Homo sapiens
aataaatgtgtttccctgatgcctaagtatttagttaaacgttcaggtattaatagtgttactaggtaggaggagaaggtacttcttttttttctcaatgmgtttatttgattatgaatcacaaaaagggtaatcatttgctcaggccgagcactaataacagtatgccttaacttaatgcaatgtaaacttggagctacc

SEQ ID NO: 326161 - DNA, 201 bp, Homo sapiens
tgctaacccctggggatcccaacaaagatcctttggctttaattaaaaaacattaagctgcaataaagcttacaacctgtctaatctttgttggccttaayattttgccccttgctccttgtaaaacatgatgtagaggtgtggaaggtgaagtgaattgtcagcaaagacttaatcaccattggtataaatcccaaggtc

SEQ ID NO: 326162 - DNA, 201 bp, Homo sapiens
tgtggacctgatagcccacatagactcttcactgatgttcatgatgatgatccatgattaaagctccctgggcatgaattgactctactgtgccttaaccrgcatgaaggagatgtttaagtgttgtattcaactgtgataataggattaagacctcaacataaaaatttaggctcagagcaacattttgtggggaaaaat

SEQ ID NO: 326163 - DNA, 201 bp, Homo sapiens
ttctttacatattttattattattttaaaaatagttaaaatttttaaaatttaaaacttcaaaattatttgtctttaatggtatttttaggactactaccrtgcttagaatacagcaaaatcatgtaaatgggagcattattttctaaattaatatcattggcatcagcagcagcataaggagcatcatttttggtttcta

SEQ ID NO: 326164 - DNA, 201 bp, Homo sapiens
atattgtggtatatatcaatcaaaaagttataaaactgggtatttctggtattctccagcaacaaggacccttaatgaagccaattaatgcattgttgatmactggacgataattgttttttctagaccagttttaacataagattaaaatgtacaactaaaatcttgtcgatataccaaataataaaaggttattgggta

SEQ ID NO: 326165 - DNA, 201 bp, Homo sapiens
gcattattattaattatagtcaccattctgtgcaatagatcgctaaagcttattcctgccatctagctaaaactgatcaacatctccccttttgccagccmtccattggtaatcaccactctattatctactgctatgagtttgacttctttggatttcacatataaatgagatcatgcagtatttgtcttctgatttttc

SEQ ID NO: 326166 - DNA, 201 bp, Homo sapiens
  misc_feature (1)...(201): n = A,T,C or G
taataattgtgcctttgaagaaatctcgcgggaaatttatcaagccatgggagagtccagatgaaatggaattagatgaggtaactgtgtcattgttggcnatgtcttttattcgttatttaatctgctgcatttccgccccctcccttggaggcctttcaggatctaatctgggtgctggcttctccatacctagctggt

SEQ ID NO: 326167 - DNA, 201 bp, Homo sapiens
ataatgaaccgtcaacttaaaagtgtctgcacaagcaatatagtaattacagtttgaaaaagttaattttatgtttgttcaatattacttgctgagattaygaattttctgtttttttatttttattttatttttaattggcaataattgtatatatttacatattatgcattattattaattatagtcaccattctgtgc

SEQ ID NO: 326168 - DNA, 201 bp, Homo sapiens
aggagaaggagtttgaaatggcataaaagtcattactcaaagcagaagttgacatcaagcctgactgtcagttttttccactagctaaccttattgattcrtagcacaataacgctttcttttacactaggagtgttagtttggagattatgcttggtgacttttcatttggctacaaaattcatcttcccagagcatgtc

SEQ ID NO: 326169 - DNA, 201 bp, Homo sapiens
acacagtgcaggagaaggagtttgaaatggcataaaagtcattactcaaagcagaagttgacatcaagcctgactgtcagttttttccactagctaacctyattgattcgtagcacaataacgctttcttttacactaggagtgttagtttggagattatgcttggtgacttttcatttggctacaaaattcatcttccca

SEQ ID NO: 326170 - DNA, 201 bp, Homo sapiens
aggttcagatgattccggttaccctggtaaccttcattcttcaagttagttttccttgattatgcataagtcattttatgtttactatcaagctactactstttcccttttaggcctttctcagtgtctgttttcttatttcactttacaccatttaattccacacaatttccatttcacacagtgcaggagaaggagttt

SEQ ID NO: 326171 - DNA, 201 bp, Homo sapiens
cacagctcatgaaaggagagaggaggaaggcccggcgcggtggctcgtacctgtaatcccagcactgcaggaggccgaggcgggaggattgctttagcctrggagtttgagtccagcgtgggtaacaaagcaagaccttgtctttaacagaagatttttaaattggctaggcatggtggcacgtgccttgtagtcacaagt

SEQ ID NO: 326172 - DNA, 201 bp, Homo sapiens
atatgtttttctaccagttaatctataaacataacttcctagaagcatgaagcagggtgtacttttttaggtaatatgtagcaagggttttttttatagtkaggttatcaatacacattttaaaataatacttataaattaagaatgataagtttaataaatactgttatgtatattcagttactgatttaagaaaggact

SEQ ID NO: 326173 - DNA, 201 bp, Homo sapiens
gcttaaggaaaatagcatctaaaattatgctaactactacctgtcagtgtacttggtgaaatcagttgacatctcagatacatacgtcacttccattatawcaccagaaaggaacatcatgcttcatggttttagccagtggttaaggacattttaggacaattttgctgtccctgagctatgtggcagaaaatatttata

SEQ ID NO: 326174 - DNA, 201 bp, Homo sapiens
ttatctttgttttatagtgcatgaggaaaatattaaacacttttgtattgtcagcttttgatgtataccaaaccatccctaaacttagtagcttaacccartacccacttaattatctcaattctctggatcagcagtttgagctgggctcaacttggtggttctgctgttggtggcccagcttagatgatcatgattgga

SEQ ID NO: 326175 - DNA, 201 bp, Homo sapiens
gtcactctcatggccatcttggttttggtgggttttagcaggcttctttactgcaagctgccttatcagcaagatctttatgacctgtatcttgtgcggayctcctatctcatcctgtgacttagaatgccctaaccgtctgagaatgcagcccagtaggtctcagcctcattttacccagccccttttcaagataaagtt

SEQ ID NO: 326176 - DNA, 201 bp, Homo sapiens
tggttcacacatctctgacagcggtggcaggggaccccaggtcagcaagtggaagggaccatgcagagcttcttcctgatgtttcttgggtttcttgaggytcagggtcagacgcacacaacgttgcttttgtcccattcttttggccaaggcatgtagaaaggtcaatccaggaagggaatagacttttctacttgagaa

SEQ ID NO: 326177 - DNA, 201 bp, Homo sapiens
cctccatataacaaactgtctcgttttataatgcatttttaagacagagggttaaatactggtagtctcaaatctatttaggtaactaataagaaacactraggagttaaatgacttcatgttggggtgttaaaagccttgcttcaataatggaggaaatcctggagtgaagactaagggatgaaatgtaaaagataacta

SEQ ID NO: 326178 - DNA, 201 bp, Homo sapiens
gaaagaaagaatgtttgaattattggaagggccctgttttctaatagcctgaattccagtgtactattgggtattagtatcactgctaacattacagagtktaaaatgttcaaacaaaaaaggctttgatctacaaaacttcagaaacctaaaaatatttttttttcttttcttttttttttttaagtgagtgtagaaagc

SEQ ID NO: 326179 - DNA, 201 bp, Homo sapiens
ggaagcctaataattatggtatacattattattcatattatctaaggtgtacatttgctcagatcagagagagaaggggactttttttcacaaacactttsagatgtgtgtactcattcataaataaaaataatagctaacattggctataagatgactatgtgtcaattgctttacatgcgttatcttgtgtagttcttt

SEQ ID NO: 326180 - DNA, 201 bp, Homo sapiens
taaagtatatatttaagaatgtttgtcacaattgggaaagcaatgcttgagtatatctagctacccagatgctttgggaataagtctatatatttctgatratatgaattaattataacagtttacttctatataatttaaaattttgaaatgatcccaatcttatagaaaagtagaaactacagtacaaagaacttatta

SEQ ID NO: 326181 - DNA, 201 bp, Homo sapiens
tgagggacttcaaacgtaaaaaaaaaatccagtagatattaaaagaaaaaacacttttagtgtaagttttggaatattgtttaccaataaataggttttgsacatggctttttggcaataggcttttttccttatttttctgccaaaaaaaggtattatgaataggactaccaaacatgatttcgtactttttcttttctt

SEQ ID NO: 326182 - DNA, 201 bp, Homo sapiens
tggacttgagctactcaaattttcggaactttagttttcctactgtaatttgggtaataccaacctcatagaattgttatgaaattaagtggggctaggcmcacaaaaggaaggtgatcttggttcatttttctttcattcttcttatttttccagatactatctgtgaggtataggttctgatcccatggctttgatctg

SEQ ID NO: 326183 - DNA, 201 bp, Homo sapiens
aacttcgtaataaagtgcactcaggctgttgtctctccactgagataaccagactgtataactctgtgaattcagaatctaacccgttcccaccttgtcayaattactcaacatatgtccttgctgacatttaaattttacagagaaaaaaaaaaaatcgattgggcatggtggctcatgcctgtaattccaccaccttgg

SEQ ID NO: 326184 - DNA, 201 bp, Homo sapiens
atttcgaaaagaaataaatcatagttgtaaacttctttgggcagtttcataaattgatagtcctgtgatttcaaagattttgaagaaaaacatacattgayatacacacacacaaacacaaacaaacacaaaggctgggcgcagtgacgcatgctggtaatcccagcactggaaggccagggtggaaggattacttgaacc

SEQ ID NO: 326185 - DNA, 201 bp, Homo sapiens
tcaggttttgcctgaaaccctttttctaatttgctgtgtttaatctattgaagaagaaggtcaaggttttagaatttatgtggatgcttgacaactcttcyatctagttgcaaaagataagggatttcattcatgtaacttttggtagtggttttggccattgtttggcagttttactttgattgggttattttccagatg

SEQ ID NO: 326186 - DNA, 201 bp, Homo sapiens
gattgttttgagtccaggagttcaagaccagtctgggcaacatagcaagaccccttcccaataaaaattgaaaaaccaaatgtggtggcacttgccagtaktcccggatactctgggggtagaggcgggaggatagcttgagcccaggatttccaggctgcagtgacctgtgattgtgccactgcactccagcctgggcga

SEQ ID NO: 326187 - DNA, 201 bp, Homo sapiens
ttgctttgtacttagtgctgtgctccatccaggggcagctctattggtgagagtccttcatagaggcatactgtttcatgagtgcctcaaatacatgacawtgcttcccaagggaagacatgactgaaaacatatgcaaacaatcataacatttcagaaagccatccctgataattctccttcattcctcatcttcaaaat

SEQ ID NO: 326188 - DNA, 201 bp, Homo sapiens
gaatttagagagagaccacctggtcagaaccttcaaatggggaaaatgaattctaattgcagctccaacttgctttgtggacttgagctactcaaattttyggaactttagttttcctactgtaatttgggtaataccaacctcatagaattgttatgaaattaagtggggctaggcccacaaaaggaaggtgatcttggt

SEQ ID NO: 326189 - DNA, 201 bp, Homo sapiens
tgaaattgcataacttcagctaattctccataaatattactcctctggccaagttgttttgactgtcattttaagattgagatccctgataagtacagatkaaagcaacactatgtggtcggttaagtgaagcatctcagatgttaccactgatctgtgttaaggctaaataggtacatcttcttatgaaaactaaagagg

SEQ ID NO: 326190 - DNA, 201 bp, Homo sapiens
tgatatcaaaaagattttcctattctgtctatatttatttttctgttttttttttctattgcaattgaggtttataatcattttccaaaattggcaagccrctggctttcttactacgattattgtataaagatgatgtgcataatattttcatttctgataatgggattggattactctgatgttcatgttgccttcaag

SEQ ID NO: 326191 - DNA, 201 bp, Homo sapiens
tattgaatagactttttataagcacatcaaacacttatctattccttattttattaaagtaaaattttcaaatggtgttgaatatattctcacaaaatagraggtctgaagatagccctagtgaaaaccaaatcagctttttaaaaagaattacagatgagtccttgctgttacatgaacaactcaatttattatgaataa

SEQ ID NO: 326192 - DNA, 201 bp, Homo sapiens
gttgagtaatctttaaatggttttaaatatgaaaagactttcattgagatgattattttctgaaatatgggtcaatcttctcagttctccatagctctaamttctggcattacaaagtcacttgcaactagtttaccttgaaaatatggggaatatatggccattgacaaggaaagtatttatattaagctagaaaaatat

SEQ ID NO: 326193 - DNA, 201 bp, Homo sapiens
taattataattctatgttatatccgcacatagactttatcatctcacatttaaactaatatagtaactacctaactgggctttctctttgtcccccttcastgcactcccttgacagagattgctttttagaatgtgaagatttttcttttacttccttggttcaaaatatccagctgtggcccgggcacggtggctcaca

SEQ ID NO: 326194 - DNA, 201 bp, Homo sapiens
cagaaaaattaaatagtacacaagttatggcacaccaatgtagcatagcaagtagtataagatatccaatcaacaatgtttgtttccagttagtctttagygtttcctatcacagtatatatatatatgcatatctatatatatacttaaatagattagccagtattttcctaaactatgtctttaaaaatattgtatagt

SEQ ID NO: 326195 - DNA, 201 bp, Homo sapiens
gaatatagatacgctaaatgaaagagcttgaaatggtaccctttttgtctgattgcatggcttgaagcaagagttaagaatagtatctttcttttgtaatratttttaaaaaattggctcaatatcctaagctaccattagaattattgggtgtttttcctagataatttacaatttgaataattttatatttcctattta

SEQ ID NO: 326196 - DNA, 201 bp, Homo sapiens
ttaaatcatttaatactcatgacacttcaaatttgggaggtaccatatacatgtaaggtatctatactaatcttaggaacatgacaatatttatattggartgtaggcctatttaaaaggccagagcaatcataagccaatagaacatgaaaaacaactttttgttttcctaataatataaattggaccctaaatttttca

SEQ ID NO: 326197 - DNA, 201 bp, Homo sapiens
tccatcaaataagttatatcagtgcaaatgtatttctggcaccattatagtaaatcttagtacagtagccaagtggagggagtgtgtttgagtacttaatktgggcaaagtggtttttaaaatatatttctaacagtaatctaagtatcttctattaaaacccctttaatcagatggaacacattaaaacatcagaacaga

SEQ ID NO: 326198 - DNA, 201 bp, Homo sapiens
atctcaaaaaaaattttttttttcttcatataaaataaacataggggtggatgatactaatgttttcccattttggtagtgcccaagaaattaaaatgacrcctttaaatgaatgctgaagatttgaaaaggttccatttttgaggctaagagatgttatgaattcaagaaatgtaagtgcatgccaagaagataaacaac

SEQ ID NO: 326199 - DNA, 201 bp, Homo sapiens
tcattttttttgaaatgcagtgcactctggacataatccggaccatcattccttgttagtttctaaatttgtaaagccacatcaagtgtttaaatttatgkgttttaaagaaagatctagtgatttgtttccagtgaagcacaagcatggagacaaatgagtagcaggtgtccccgtttgacttatgtcggacttctttta

SEQ ID NO: 326200 - DNA, 201 bp, Homo sapiens
tgttcagaagcaagttgtaatgacatagggaacctctgtgactttatagagcagaattttactctgggtatttaaaaaatgcacaacacagattatactargagaaaaaactaccagaaggtactcaatgtaaattaattttataacaaccgttttatgtttataaaaaattgaaataaagaataagggtattctatgaaa

SEQ ID NO: 326201 - DNA, 201 bp, Homo sapiens
ctcttgtgctagatcattttttttgaaatgcagtgcactctggacataatccggaccatcattccttgttagtttctaaatttgtaaagccacatcaagtktttaaatttatgtgttttaaagaaagatctagtgatttgtttccagtgaagcacaagcatggagacaaatgagtagcaggtgtccccgtttgacttatgt

SEQ ID NO: 326202 - DNA, 201 bp, Homo sapiens
ccttaatgaagccaattaatgcattgttgataactggacgataattgttttttctagaccagttttaacataagattaaaatgtacaactaaaatcttgtmgatataccaaataataaaaggttattgggtacctgggcagcccaaatttcaccatcggggtttctattgatttacttactgggagtcgttaacacgtcct

SEQ ID NO: 326203 - DNA, 201 bp, Homo sapiens
gcactttgggaggccgaggccggtggatcacgaggtcaggagatcgagaccattctggctaacatggtgaaaccccgtctccactaaaaatacaaaaaatwagctgggcgtggtggtgggcgcctgtagtcccagctaaaaatacaaaaattatctggacatggtggcacttgcctatagtcccagctactcgggagactg

SEQ ID NO: 326204 - DNA, 201 bp, Homo sapiens
gagggtagctcctctctgcagctggtcatcccagcaggtgttcagctaacaacagagagagtcgtgcctttttgcagctggttgtcccatctgctttgctktggctgagcctggaacttttatgggcctcagaggggatgaagtgcatgccagctggtccatggacagccatgggcggtcccagaaaaggcaccaccagtt

SEQ ID NO: 326205 - DNA, 201 bp, Homo sapiens
actaaagaattatggaccaggcgcggtggctcacgcctgtaatcccagcactttgggaggccgaggccggtggatcacgaggtcaggagatcgagaccatyctggctaacatggtgaaaccccgtctccactaaaaatacaaaaaataagctgggcgtggtggtgggcgcctgtagtcccagctaaaaatacaaaaattat

SEQ ID NO: 326206 - DNA, 201 bp, Homo sapiens
gatacagaacctctatttgcttgctcaggttttattggcaattagaaaagcaaagatcaaacaaaggaaaaaaatcctagagaattagtaattaccaagcrttcaatgcagttttggaatgtgtgaattttaatatataggtgttccatctgaggttctgatagattcttagccctaaaggagaggtctgctaagtgcttt

SEQ ID NO: 326207 - DNA, 201 bp, Homo sapiens
ctggaatctcctttctcttaccagctgtcctcacttgtatccattgaaatcctattattctctcattttctaatgctcagttcaagtgctattccttttcrttgaattgagttgaactaaagaattatggaccaggcgcggtggctcacgcctgtaatcccagcactttgggaggccgaggccggtggatcacgaggtcag

SEQ ID NO: 326208 - DNA, 201 bp, Homo sapiens
agattatgtcttaaaagtccccccccccttttttttttaatttggaatttttcctctgtgccaatgagctgttctaggacagggtttcccacctttggcaytgctgacattctgaatgggataatttcttgttggggggcaggtagttgttctgtgtgttatagggtatttggcagtatctgtggcctctacccttaggtg

SEQ ID NO: 326209 - DNA, 201 bp, Homo sapiens
tcccacctttggcattgctgacattctgaatgggataatttcttgttggggggcaggtagttgttctgtgtgttatagggtatttggcagtatctgtggcstctacccttaggtgccatgggtcacccttcttgcgctgtgacaacaaaaattgtctctaggcattccctgagggagagggcaaagtcacttttacagctg

SEQ ID NO: 326210 - DNA, 201 bp, Homo sapiens
tatcaatttaaaataaaacaacaaatcatacattactattaggataagatcctattgtaatgtgtgcagtctgtcatcaaggaaattttaaagcttgactkacatattagtttattggtcataactaatgtcttatagcttgatgtatataggttattaaaagtgaaatatagggaataatatgaaattttggaacaggtg

SEQ ID NO: 326211 - DNA, 201 bp, Homo sapiens
gctccaggcccctcccctccttcaggcttcagccagagcagccctgcttttgtctgttttacaaattggagagtcctagcagcacatcgtttgtacaaatrgatccttctcttaaataattagaagccacattcagctgatttacagaggcctggtttgggaggtagataaaaagaagtaatttggggacatactccttcc

SEQ ID NO: 326212 - DNA, 201 bp, Homo sapiens
gttaaatatcattatgatattgcttctgagatgtctagacttgagaggatgggtttgttatgatagaaaaatgaaaaatgttcagagataaacaatgatayctagttttaagtgacagcagtagtttttgtttttgtttttttaatgcttaattctttccttttctgttcccgttttcagagtaatgatttggttctctaa

SEQ ID NO: 326213 - DNA, 201 bp, Homo sapiens
taaaatatttcagggcaactaattataataaataatgcagaatatagttttgattttactgttaatctcatacaatctagtagtagcagtagtggcagcartagtggtaatagtaaatttttaaagtatttactatatgacaaatctacttttgagtgccatacatgcattaaatcatttaatactcatgacacttcaaat

SEQ ID NO: 326214 - DNA, 201 bp, Homo sapiens
atgtttatacctgcattcgtttctagagtgctagatcctatcactgttgctagtccaggagtaacatttgaaggttcatttgaaaaaatttggtcttcttmtgcacttcagctgagtaggaggaaaagccaaatcacttcttccctgagtgagcattcataggtctccatctctgtgatcacacggagtcattatgtagca

SEQ ID NO: 326215 - DNA, 201 bp, Homo sapiens
taaagctgtagactatagggccaatggatctattaagaaatcttagggctgagcttttatactatcagttacattataccatatttctaggtttctcttgsatatggatttagatttatttaggtgattgaaaatcatgatctcttctttaatttgttgctactctttccacaaattatgttggagaatgtgtgtgcacat

SEQ ID NO: 326216 - DNA, 201 bp, Homo sapiens
aggaggggaatggggaggggagagctgattcctttagcacttttccaatgaacttttgagatttttaacatctgatagctgtgaactgcttgataagttgwttttcagaggcgattgataacaatagctgatttggaacagctggccagcttctggattcaagaagttttccactgtaccacttgcttcttcatgccaacc

SEQ ID NO: 326217 - DNA, 201 bp, Homo sapiens
attatataaagcagaacatttcctcaatggcttctgaaattgaaaaaaaatttaattacaaaatatgtttgtgctatgggtcatggggcccaatgcctacrgaggttaaagtcacttaaggaagggattaccagttattagaaatgtaccctttgatataattatgaagaaagataaaatactccaagggaataaaatagc

SEQ ID NO: 326218 - DNA, 201 bp, Homo sapiens
  misc_feature (1)...(201): n = A,T,C or G
ggggaggggagagctgattcctttagcacttttccaatgaacttttgagatttttaacatctgatagctgtgaactgcttgataagttgattttcagaggngattgataacaatagctgatttggaacagctggccagcttctggattcaagaagttttccactgtaccacttgcttcttcatgccaacccactgtttaaa

SEQ ID NO: 326219 - DNA, 201 bp, Homo sapiens
aaaagagaaaggaaaagagaaagaaaaaagatctgccatatactctcttatctataataataagggttttgattgttgaaaacagcaaaaataaaatgagrtatgaagcatataaggatgagattaaatgggtttaaattatgaaaactttcatattaaatgtctgttaatggagaacaattatataaagcagaacatttc

SEQ ID NO: 326220 - DNA, 201 bp, Homo sapiens
aagaactattagccttcgttaaaaaacaaagaggaagaaaaggaaaagagaaaggaaaagagaaagaaaaaagatctgccatatactctcttatctataayaataagggttttgattgttgaaaacagcaaaaataaaatgagatatgaagcatataaggatgagattaaatgggtttaaattatgaaaactttcatatta

SEQ ID NO: 326221 - DNA, 201 bp, Homo sapiens
gataaacatttaaaaactacgattgtgtgtgctagaatatgtttaagtctctgtcatattaagaagcaccaggaaagtgaatatcccagaaagttttgttytgaaaccctggtcatcatgttttaggaaagtgaattaagctttgaagaaggcactttgatacaaaagtgcctcctgacaattaaaaaaaaaaaaaaaaaa

SEQ ID NO: 326222 - DNA, 201 bp, Homo sapiens
tagctgaaattaaatgaagaacctctgagccctgagttccaccaacttctcttaaaactctgatttttgaacccgatccagagctttaagtattgaacctraagaagcctgtggtgccatttatctagaggtgcctgaaggaaatgaggcagaaggtgtttacctgaagcaagcttcctgattgtgcaaaactgagctatg

SEQ ID NO: 326223 - DNA, 201 bp, Homo sapiens
tagacaagatttaaattatgaagtcaatttctaaatcaatgtaaagagcttggaatttattttaatgatgggaattcaatgaagtgttttaagcaggggakttacattatcagatttttgttgtgaaaagataattctgacttcagctttgagcaagtaggatagggaccaatttattctcctgtgtgaaacaagccataa

SEQ ID NO: 326224 - DNA, 201 bp, Homo sapiens
tattacacctataaactttgtagaaatgttgttagcaatttccagttaaaactaattaatggttctccttcatgatgaagtaattgaaaatgatcatgctrtttcccacacaggttgtaatctgaagctacttaaaatgactggtacttcaggctcctgaaaaattgtatcactcttgcatccttgttagtcttctaaagt

SEQ ID NO: 326225 - DNA, 201 bp, Homo sapiens
tgagaggtatatgtgatatttcgatatctgtatataatgtacaataaaattaggataactgggatatttatcactgcaaacatttctctttgtgttgggascattatagttcatttcctctagcgcttttgaaataaacaacgaattactgctaagtataatttttctactgtactattgaatgctagaacttatttcttc

SEQ ID NO: 326226 - DNA, 201 bp, Homo sapiens
tgagctggaaacttgcatggaaaagtagatgttagaaatcagagagttaaaagtcaaaagagcgggttagtaggctccaaaagttgatttgtaagtcactyatttagaactctggatgtatttttcctagagcagcaatgtagctcacaatggtagtccaaaaaacctctcaaagtcctaacctagctgaaattaaatgaa

SEQ ID NO: 326227 - DNA, 201 bp, Homo sapiens
gggggcagtattgccagaacttttcaacttggatcttagctacaattgaagtacagccagaaaagttgtactcaaatcccaacatagattattttatctayacttatttgcttagttcaacacatggtccattctttaattggaacaggatgactggatcacatttctggtttgatctattccaggcttgattctgctgat

SEQ ID NO: 326228 - DNA, 201 bp, Homo sapiens
aaacatgacccaaattagttatgacatatgctctggacatagtaaagttaaatgctgcctaagagaccagacttatatgcacaaaatgcctttaatctgcmtttcattgaagagacctttgaataaatttttagctttctcagtgacagagtagtgtaagaatgacagaagtcttaagcagggcgagagagcttgaaattc

SEQ ID NO: 326229 - DNA, 201 bp, Homo sapiens
tagaggagagcttaataaattgactatttacagagggatggacaagatgaaaggatcaaggatcatcctgggttaactggaagcaacttccacactttgasttgataaggttatcagaacccagaaagatctgcactgttgaagagggccactcagtaagaacctaacctcaagtgcagaaaagcaacatgtgaaaacatg

SEQ ID NO: 326230 - DNA, 201 bp, Homo sapiens
atagaggagagcttaataaattgactatttacagagggatggacaagatgaaaggatcaaggatcatcctgggttaactggaagcaacttccacactttgrgttgataaggttatcagaacccagaaagatctgcactgttgaagagggccactcagtaagaacctaacctcaagtgcagaaaagcaacatgtgaaaacat

SEQ ID NO: 326231 - DNA, 201 bp, Homo sapiens
tttttttttttagtttggtaaataaaaagttaaccaaaattttaattttcttaatagtagctttttccttgtgagtcttttaccttgtggacccagaattaaaaaaaaaaaaagccaattatctcaatactagtttcgttttggaaagaaaaaaaacaagattcttgggtgttccattcctcaaacatgtttgaaaaatat

SEQ ID NO: 326232 - DNA, 201 bp, Homo sapiens
tcttaatagtagctttttccttgtgagtcttttaccttgtggacccagaattaaaaaaaaaaaaagccaattatctcaatactagtttcgttttggaaagaaaaaaaacaagattcttgggtgttccattcctcaaacatgtttgaaaaatattctcctcattataagaagtatattatttaaaaaattagctttcaatca

SEQ ID NO: 326233 - DNA, 201 bp, Homo sapiens
ttttcctattgtgaatagcactgcaatgaacatatgagtgcatgtgtccttttggtagaatgatttcttttactttgggtatataactagtaacgggattsctgggttgaattatagcactgttttaagttctctaagaaatccccaaactgctttccgcagtggcaggactaattacattcccaccagtgtataagtgtc

SEQ ID NO: 326234 - DNA, 201 bp, Homo sapiens
ttgttcttatcctcaggcaattttgtagattctcctcctgtaatcttttcactttatttcctttccatttctacctttcctatgtgttctgcactccataygcagcttcttaggtggtttttgtgttttctcatttctcctctttgagtcttcctaatttttgctttatgaaaggcaaacttgctcaagtctacttgatca

SEQ ID NO: 326235 - DNA, 201 bp, Homo sapiens
ctcctgtatcccaaacattgtattttgtaaacccaaaatactatcttccatccatatctatttctcttttcttcatacttcatctgagttatcccttgatyagaaaccttggtgtcatccctatctcttttcttccttttgttcttatcctcaggcaattttgtagattctcctcctgtaatcttttcactttatttcctt

SEQ ID NO: 326236 - DNA, 201 bp, Homo sapiens
tacatattagcatggcacggtatgttgtttatcttagaaagcatttaaagcaaaagctagaaataattttacctagaatgcacaaagagagcgtttctctytaaagtctaaattttattaatatattcctggggatatttgatttggagtttcagtttgggggaagaaatgtttagaaaagcagttaattaaaatactgaa

SEQ ID NO: 326237 - DNA, 201 bp, Homo sapiens
ttttttttcatgatcataagttcatatgtaatttttccctaaatcctgagtcattgcattgttgctgcaattatctaaaataacttactccttggtttgckctttcttgttaagttcctctgaggcaagtcagtgaacttaaaatctctttgaaaccaagacaactctgtaatttatttctcattttagggggaagttatg

SEQ ID NO: 326238 - DNA, 201 bp, Homo sapiens
tacatattaagatgatgctaaagaattgcaaaatctcgacccaggttcctttctttttaggctacagtgaaaagaacattcagttcttataggaagaactraatttatgcctcagttctgccacttattatctgtgagctctcggaggaaatgataaaacatttcagaatcttagtttcatcatctgtaaaatggagggaa

SEQ ID NO: 326239 - DNA, 201 bp, Homo sapiens
tttcagtttgggggaagaaatgtttagaaaagcagttaattaaaatactgaagcagaataagtgcctttttttttttttctttaatggtagtgcatcttaraaagctgcttagacttttgcccagtgcagctgtccttccctgaagtatcaggtttcaagagcaatgatggatggtgggtgcctgtagccagttgtggggt

SEQ ID NO: 326240 - DNA, 201 bp, Homo sapiens
gatagctgtgaactgcttgataagttgattttcagaggcgattgataacaatagctgatttggaacagctggccagcttctggattcaagaagttttccastgtaccacttgcttcttcatgccaacccactgtttaaaaaaaaaaaaaggagactatctaatagaatggtagagtgattcctctcctttttagttttatc

SEQ ID NO: 326241 - DNA, 201 bp, Homo sapiens
tctcttaccagctgtcctcacttgtatccattgaaatcctattattctctcattttctaatgctcagttcaagtgctattccttttcgttgaattgagttsaactaaagaattatggaccaggcgcggtggctcacgcctgtaatcccagcactttgggaggccgaggccggtggatcacgaggtcaggagatcgagacca

SEQ ID NO: 326242 - DNA, 201 bp, Homo sapiens
actgtttaaaaaaaaaaaaaggagactatctaatagaatggtagagtgattcctctcctttttagttttatctttcctgcattcaaaccgcttatgaatastaataaaaaaggtaatatctttaaaacaatttttgttctcatgcttaagctgagtttcagaaatgacatactatggtatctgcattataattctttttaa

SEQ ID NO: 326243 - DNA, 201 bp, Homo sapiens
gggaggctgaggcaggagaattgcttgaacccgggaggcagaggttgcagtgagccaagatcacgccattgcacttcagcctggacaggcatgaccctgcyacaaaaaaaataaaaataaaaataaaagataaataaaaaattttaaaaaagtatatagtaaaaaatctagttatttaaatctttaatcttaaagttgtat

SEQ ID NO: 326244 - DNA, 201 bp, Homo sapiens
tggcaggaccttggctcaccaaaacctctgtctcctgggttcaagtgattctcctgcctcagcgtcccgagtagctgggattacaggtatgcaccaccacrcctggctaatttttttgtgtttttagtagagacggagtttcaccatgttggccaggctggtcttgaactcctggcctcaagtgatcctcctgcctcggct

SEQ ID NO: 326245 - DNA, 201 bp, Homo sapiens
gggatactttgagagtgagaaagggtcctattaataactacgctgggacagtaggtgtaaactgggatgtagggactacctaactcaaactcagcctattktagagctccattctggaatatttatccttccatctgatcacattccttccattctccctataactcccaacataagtggccttgagatctttggggagca

SEQ ID NO: 326246 - DNA, 201 bp, Homo sapiens
ggctaatttttttgtgtttttagtagagacggagtttcaccatgttggccaggctggtcttgaactcctggcctcaagtgatcctcctgcctcggcttccsaaagtggtggaattacaggcgtaagccactgcgcctgactctgaaccattttcttttgcttcatcttctggttttcctaatagaagatggtttcccatga

SEQ ID NO: 326247 - DNA, 201 bp, Homo sapiens
tgtaatgaagctgtgacgtctaaatgctaccgtcattctgagaggaccagattttcatggtcatcgtcctccctggccctccattgtctgcatgtctgtgscttgctttctctcctactaactgacacagcatttttttagatatgttaatacacagatttttaaaggacatgttaatttatgttttactgtttagattat

SEQ ID NO: 326248 - DNA, 201 bp, Homo sapiens
caatctcaaatgtcagccctagagtgtatccctatgcagagagaccacattatcttatggaagctacattattagccaaaaacataatgtttgctgggtartgatttacatgtgaatagtctcaaaaaggagcttctgaatataagcagttctgaatattgtaaaaataaggaaaataaataatatttagctatatttata

SEQ ID NO: 326249 - DNA, 201 bp, Homo sapiens
tttggtaggccaagagtggtggctcatccctgtaatcctagcactttgggaggctgaggcaggcagatcacttgatgccaggagtttgagaccagcttggytaacatggtgaaaccttgcctctactaaaagtacaaaaattacccaggcatggtggtgggcacctgtaatctcagctacttgggtggctgagacaggaga

SEQ ID NO: 326250 - DNA, 201 bp, Homo sapiens
aaagaaaatagtgaacttgcagataggaatgaactagataggtgagatagaagtattttagaaaccctttatcccagaagttataaaaacaaatttataakatgatgattgtggagttttttatttttttttctgtcctttccctttaggtcatattttcattctctttttttttttttaagtaagattcatacttagatg

SEQ ID NO: 326251 - DNA, 201 bp, Homo sapiens
accttgcctctactaaaagtacaaaaattacccaggcatggtggtgggcacctgtaatctcagctacttgggtggctgagacaggagaaccacttgaaccygggaagcagcgtttgcagtgagccgtgattgtaccactgcactacagcctgggtgacagagtgagactgtctcaaaaaaaaaaacagaaaaaaaaaaaca

SEQ ID NO: 326252 - DNA, 201 bp, Homo sapiens
ggctgagacaggagaaccacttgaacctgggaagcagcgtttgcagtgagccgtgattgtaccactgcactacagcctgggtgacagagtgagactgtctmaaaaaaaaaaacagaaaaaaaaaaacaaaaaaaaaccaaattattgaattattggatccccaccacagacctactgacccacgaactctgatggtagtac

SEQ ID NO: 326253 - DNA, 201 bp, Homo sapiens
gacttgccttgttggtaccacatcctgagagggaagaaaggagggagagtctgttactgcttcttggtgatgaatcactattaggaaatagtacaggtgaytcagctcatgtttattcttcctggcaaggctgaatgaaaaacataaaggagagaagatatagaggaagaaaataaaacatctttagttgtctccgtttgc

SEQ ID NO: 326254 - DNA, 201 bp, Homo sapiens
tcttgaaatttgaatttatatatcactgaatcactgacgcaggaattttctgacaatttgcagggttccagctggtgatgtgccctccactctccaccccmcctcacccccaccttgctcagccctgggcctgctgctggaggcagtcagcccgctgagtctcgcttgtacaccggcttggcccatggctgagctgggtgc

SEQ ID NO: 326255 - DNA, 201 bp, Homo sapiens
caaaatgggaaaatcagaatctgtcactgtcaccattttggatatataccttcatcttcaatctcctcttgcttcaaatgtatcagttacatttgtttccrtttaacagcatttccaattgatattaggttattcccagtttgtggttaaatggtaggtctttaggaaacatctttttaaactctagtaggactataagta

SEQ ID NO: 326256 - DNA, 201 bp, Homo sapiens
aatggcacttcctcaaaggtgctctaccagcatccttcacatttgcctcacagcgccgcttgagatttgtaattagatgtttattcatgtgattatttaaygtcagattcccccactaaactgtaagctccgacaggaaagatcacgtttgttctgctcattccttcttcgatgtctcagcacatggtaggcactcagtaa

SEQ ID NO: 326257 - DNA, 201 bp, Homo sapiens
gacagagtgagactgtctcaaaaaaaaaaacagaaaaaaaaaaacaaaaaaaaaccaaattattgaattattggatccccaccacagacctactgacccaygaactctgatggtagtactcacgcatctgttctaagaaggcttccagggggccccgtgcatgctgacctttgggaggccctattccaaccaaaccaggaa

SEQ ID NO: 326258 - DNA, 201 bp, Homo sapiens
atgcctataggaaattctgttaatcaaaatgggaaaatcagaatctgtcactgtcaccattttggatatataccttcatcttcaatctcctcttgcttcaratgtatcagttacatttgtttccgtttaacagcatttccaattgatattaggttattcccagtttgtggttaaatggtaggtctttaggaaacatctttt

SEQ ID NO: 326259 - DNA, 201 bp, Homo sapiens
aataaataaataaataaattattatgagaaggaaaaaccaagccaggaactgagaagttttcaaaaaatacttaattttttaatcttagaaaggtgacaakataattaatattgtcatatgtactttatagaatatagatttagcttaaagttttatgaaactaagtaaactgaataatgagaattgagagtccagataat

SEQ ID NO: 326260 - DNA, 201 bp, Homo sapiens
tgcagtgagctgggatcgtgccactgcattctagtctgtataacagagcaagactctgtctcaaaaagcaaaaaactaaaaaaaaaaaaaaaaaaaaaaaraggaaaaatcttaagcattaataagtacgttgcctctctaccgtttctgaagagtatcttctgttcctttctctgcttgggactggaggcattgaaaaaa

SEQ ID NO: 326261 - DNA, 201 bp, Homo sapiens
tatatgcatatgtgtgtatatatgtatagatacttattgagatacaattgatatgtgatcaactgcacatatctaaaacatacagtctgatagttttgacrtatgcatagacctgcgaaacttcaccacacttgtaattcctccatcttggctgtctgtactgtagcctcaccaatacgcttcccaggcaaacagtcatca

SEQ ID NO: 326262 - DNA, 201 bp, Homo sapiens
taaaataatacttataaattaagaatgataagtttaataaatactgttatgtatattcagttactgatttaagaaaggactgcttatgtttattttaatcygacttttactatttaacagactcgacctgaatttgatttatatgtaccaaaaaaaaaatattttaggaaaatattaatttcaattttgaattttatcatt

SEQ ID NO: 326263 - DNA, 201 bp, Homo sapiens
ctctcacaacatggtaccttgcttctttaaagtcagaaagggaaagggacacttcctattaccagactgatagcaaggtggaggcttatataatgattcayaatcaagagagtaaaatcctatcatctttaccaagttctattggttagaaatatgtcacaggtcctgcccacactcagtgggacaggattatacaatctg

SEQ ID NO: 326264 - DNA, 201 bp, Homo sapiens
aaaaaaaaaaaaaaaaaagtctacatcaaaactttgtaagtaggagaccatctgtatatgcatatgtgtgtatatatgtatagatacttattgagatacarttgatatgtgatcaactgcacatatctaaaacatacagtctgatagttttgacgtatgcatagacctgcgaaacttcaccacacttgtaattcctccatc

SEQ ID NO: 326265 - DNA, 201 bp, Homo sapiens
gttacacttgtattatatcgaggataccaaaatagatactaacttcctttccaccaaattattcactgtcttttcatgttattaggtatcatctgttgaarggcccccatcttctcatgcttggggtgcagtctccttgtgtttggttttgacctcaccgtagttgcttctgtgctctgcagccagcatgatctttaagaa

SEQ ID NO: 326266 - DNA, 201 bp, Homo sapiens
ggctaattttttgtatttttagtagagatagggtttcaccatgttggcctggctggtctcaaactcaaactcctcaagtgatccgcccgcctccagcttcycaaagtgctgagattatatgtgtgagctaccgtgcccggcctgaatatcaacttttattttaaaaagattgttgaaacacgcctgatagtatgtgtgtat

SEQ ID NO: 326267 - DNA, 201 bp, Homo sapiens
tactattctagggaaaaaaaggtcaaatttaaaatagcagttgattacatttcaaacttcattgtgcgaagagttgtcatatctggcagtgtaaactcccyggtcccccagcccacccctttccacacttcctccctgttcctgtgaccatgatttcttatactcaaaaccactgcggttagcttgaaactccacgagcag

SEQ ID NO: 326268 - DNA, 201 bp, Homo sapiens
tgaacactaatcaaagataccatccatagctttgattattaaagccaggatttcttacggtttttcttaaagaaaaatagccctaatagatgtcactgcarcaattgatgggagttaaagaaacagattaattggactccatatttctttatttaaacatcttaaatacaattatgcatggccaacggtaagttaatcatt

SEQ ID NO: 326269 - DNA, 201 bp, Homo sapiens
aacatgctacaggtggatgaattccagtgatgtcttaaccttctaagagacatgtgtttatggtttatttattagtgaccatctttgggttgcaaataacmaatataaaccaggaagcaagcaattcacaggaaaagaaattttaatatgtaatacacacataaaaatattcagcctccttagtcctcagagacagacaat

SEQ ID NO: 326270 - DNA, 201 bp, Homo sapiens
atgtttagaattagaaggttattttctttcctatgatttcaatctgattttgtttttggtgttttgtttctctcattactgttttatatccattcttcagwcacatgatcctcaaacttatttaggtgaagtatctgaaagtattcactgaccatgaaatatcattatatttatttttatcctgcaaactacctactcttt

SEQ ID NO: 326271 - DNA, 201 bp, Homo sapiens
tctctgtgtgaatgatatagttctctaaacttccgtagcatcatttgattgacctctattcagattcaagtcaactaccaattatcagagccagctgagtstgctctatccatgcctaatggcctgttctatccatctgtaaaatgagacctgctgcggcatattcaggtgttctttacgcgaacacattagccttctaat

SEQ ID NO: 326272 - DNA, 201 bp, Homo sapiens
aagtaacaagagacatctttttttttttaaaccgttagtagatggatttcatttattaactaaaagggttgtattagtaatgatttcataaatggttggawatcagttattgttaattctcatttaaccatgcgtgcatgtaatacatattaagatgatgctaaagaattgcaaaatctcgacccaggttcctttcttttt

SEQ ID NO: 326273 - DNA, 201 bp, Homo sapiens
tgtcctcacttgtatccattgaaatcctattattctctcattttctaatgctcagttcaagtgctattccttttcgttgaattgagttgaactaaagaatkatggaccaggcgcggtggctcacgcctgtaatcccagcactttgggaggccgaggccggtggatcacgaggtcaggagatcgagaccattctggctaaca

SEQ ID NO: 326274 - DNA, 201 bp, Homo sapiens
gcaaaatgcccatgcagtaaacctgtgtatgtaccccttgactctaaaataaaagttgaaattataaaaataatatttgagataatagaaagtacatgtgrctaaggcctttccagttttttttgctcccaatccaaagcattagtatattccatacctgttatgtactgcatctcacctaattttggcctttccagggat

SEQ ID NO: 326275 - DNA, 201 bp, Homo sapiens
gagttaggactggcccagcctaaatgaaacatcaagctgttcatgtgaatagtagtttatatcattgttactattcttcattcctgcagattattgcatcwtttttttttttccattttcaaattttattttttagagagacttggcctcagtatgttgtccaggctggtcttgaactcctgagctcaagtaatcctcctg

SEQ ID NO: 326276 - DNA, 201 bp, Homo sapiens
tgaaaataggcaattataatagcaccttgcttcctagagaccaatgcttttggaaaaatagatgtactgtataaatagcagatagattatctgcttgcctrcagtggtatggaagacaagactctctcaaaggagagaaaagtaaaatataccacaaaataggaagaaaatttgttctaggaatggatatatttaagggaa

SEQ ID NO: 326277 - DNA, 201 bp, Homo sapiens
ttattaacaacatcccttgagctatgtcctttaatgtagcagtagctaactaaattgagatttgggaattgtatttagaaaacagcatttctcagtactgytttggggtttggagaaattgtactttcaaatacataaagtgatcctctgtaatgattggatcacaagtaacaagagacatctttttttttttaaaccgtt

SEQ ID NO: 326278 - DNA, 201 bp, Homo sapiens
tctcgtaactctgccagttgcatgagattgattaaatttataaattctcaattgtctttttctttttctttttttattaacaacatcccttgagctatgtyctttaatgtagcagtagctaactaaattgagatttgggaattgtatttagaaaacagcatttctcagtactgctttggggtttggagaaattgtactttc

SEQ ID NO: 326279 - DNA, 201 bp, Homo sapiens
aagaactgaatcaaatggcaacatatgttttggaataatttctagcatattaacaatcctttatttagtgtgtagacatccccttaaattaaaaacttttyctaaaaataattatgatcccactaataaaagcagtgaaataagtagtactagcttctttttttttaatctctatgctgagctctttattaggtatacagc

SEQ ID NO: 326280 - DNA, 201 bp, Homo sapiens
ctccaaaaagcctgagagtcagggttataatctgctgtatagaatgtcatagcaaagtactgggtgtgatgttgcattaaggaggagggctcttataagcyttggttcaaacctaggttggaaaattgtgataatatccctcagcagaaaattatagtctttgccattgccagtttaaaatgccttgtatatccactatta

SEQ ID NO: 326281 - DNA, 201 bp, Homo sapiens
tcataatgctgaggctgatgtcaatgtcagttttatacccattatcttcatgcaaatctaaacaatggaattttggcctgaaaaaatgcatatgttatccrttcatggtctcttttatttcctgtttggaaccaccctttgccctacatgattcataaatgtacaccgtaagtccccagggattggctttgagaaatagct

SEQ ID NO: 326282 - DNA, 201 bp, Homo sapiens
ttagtagagacggggtttcactgtgttagccaggatggtcttgatctcctcacctcgtgatccacccatcttggcctcccaaagtgctgggattacaggcrtgagccaccacgcccggcctatactcacaatatttctgtcttttatggaagcagtgagtccctcctcaaacccctttggtattatatcactgtagaccat

SEQ ID NO: 326283 - DNA, 201 bp, Homo sapiens
aagtatttcctgatgggcagcatagagtagtggttaagaatgtgagctctgaagccatagtctggttttgaagtctggctgtgatttggtaaatcatgctyttagcctcagtttcccatatctttgtcattttgatcaatcttgctctttgcttcagttttcctatttttaaaatgtggatgacggtgatggtcatgatat

SEQ ID NO: 326284 - DNA, 201 bp, Homo sapiens
tttggtaaatcatgcttttagcctcagtttcccatatctttgtcattttgatcaatcttgctctttgcttcagttttcctatttttaaaatgtggatgacrgtgatggtcatgatataatactcctgggttttgcgaggatttgctgaattaaaagaaaactcatagattagcagataacacaaggtaggtgtttcgtgaa

SEQ ID NO: 326285 - DNA, 201 bp, Homo sapiens
acaccagaaacatatcttattaaaaagattttggtttttgccatgtgtggtggctcacgcctgtaattccagcacattgggagactgaggcaggaggatcwtttgaggacaggagttcaagatcagcctggacaacatagcaagacctcatctgcacaaaaattcttagaaagtaaaataaaaatgtctttttgtttttgt

SEQ ID NO: 326286 - DNA, 201 bp, Homo sapiens
atgatgaaaatgttcttttttttcgagatggagttttgctcttgttacccaggctggggtgcaatggcacgatcttggctcatcgcaacctccgcctcctsggttcaagcgattctcctgcgtcagcctctctagtagctgggattacaggcgtgtgccaccacacctggctaatttttttgtgtttttagtagagacagg

SEQ ID NO: 326287 - DNA, 201 bp, Homo sapiens
aacaatggaattttggcctgaaaaaatgcatatgttatccgttcatggtctcttttatttcctgtttggaaccaccctttgccctacatgattcataaatstacaccgtaagtccccagggattggctttgagaaatagctataagcacagaattcacttttggaaagtttagcctctatcattcaaggtagggatttggg

SEQ ID NO: 326288 - DNA, 201 bp, Homo sapiens
gagttttgctcttgttacccaggctggggtgcaatggcacgatcttggctcatcgcaacctccgcctcctcggttcaagcgattctcctgcgtcagcctcyctagtagctgggattacaggcgtgtgccaccacacctggctaatttttttgtgtttttagtagagacagggtttctccatattggtcaggctggtctcga

SEQ ID NO: 326289 - DNA, 201 bp, Homo sapiens
tacgttgtttccatactttggctactatgaatattactgcagtgaacatgggagctcagatatcttttcaaagtggtgatttcatcttctttgggtatatrtccaaaagaggaattgctgtaatttgtttaggaaggttcatacttttttccataatggctgtaccaatctctattcccatgaacagtgtactaatgttcc

SEQ ID NO: 326290 - DNA, 201 bp, Homo sapiens
tatttgggaataggccctaaactctaaggatggaacaattatcaacagtatttgtgaactaattcttattatttgtaatagtctggtggtatttgattctrctgttgtgtgatctcctggttttattcccttaacattcttaacttctttaattttcctctcattctgtttctatgtacctgatctacttctttttctttt

SEQ ID NO: 326291 - DNA, 201 bp, Homo sapiens
aaatgtggattaaaagcaatatgatccctgcccctaaaaagcttaaactctagtggcatagccaaatatttaacattaatttttaaaatttacattttctracagtaacaagcattaaagggaagaaaataagcagccaagtggctcatctgttctgaaaagtaatccacagctttcctgagggagtgatttattttttct

SEQ ID NO: 326292 - DNA, 201 bp, Homo sapiens
ttatgagggctaaatataggaatggttctaagtattaaaaattgtcaaaacataagaagggatactgtataactctatatatttattttaaattaacaaargtagatttttatgataaactgttgaatgaaaagtaaagatactaaactatttatgaggtatataaaataagaaaaaaatatgacatatatgcatataata

SEQ ID NO: 326293 - DNA, 201 bp, Homo sapiens
cagttatttacagtaactacagttattaaatgtggctttaagatacactaagtacttaaatcgtcagtttaaaaaatagcacacaatctattccttttaasctaaaaatacggaaagtataacaaatctactaaaccaagtatgttttcttagtttttttgtgtgtaaagataaatatatagagaaacatatacttaaacc

SEQ ID NO: 326294 - DNA, 201 bp, Homo sapiens
atgtaaaaaaaaaatctgtcaaactaaataacctgttatttaatcaataagttgttttctctcttttatttttcagtttcaagcagtttattagaaaataktacaaagttcagtgaaatacctccaataagttaattttgagttgaatttaaaaagtatgttagttgattttagaattgaaacacttccaagcagatgaat

SEQ ID NO: 326295 - DNA, 201 bp, Homo sapiens
aactctgtctccatttgatgtttggcatctatgtctccatctccattctaaactcttttattttcattttatctatatcccctttcaggtggctatctgtrctgtctcctgccatatgtctatccacttctcatagaaacaataatttctacatagataaccttcaaaataaatttcctcgcttgtctctggagttccaga

SEQ ID NO: 326296 - DNA, 201 bp, Homo sapiens
ttttcagataccaattagaaattttcaaaaggtgctggaaaggacctgagagtaaacctcatgttgttttgctgaggaacctaagatcccaaaaattgaaraggctttcttactccagctgacctctccatcttggtctttggaacctaaggccagtcctttctgggcttgacactgtctttgttacactgcagaaatggg

SEQ ID NO: 326297 - DNA, 201 bp, Homo sapiens
aatgtggatatgcatctgagaggcataattatcatgcccctctcattcagaaatgttctgcttcaaaggaatggcacagtgtccttcttgattttgtcactttttttttttccagttacttcttttgacattgttgaaggatgagaataagttcaaggcttcctaaggatgaaggaagcaaagggcctgcggcaaaaatat

SEQ ID NO: 326298 - DNA, 201 bp, Homo sapiens
tttccaaatgtgcttttatctagatgctgcacaaaattgcaaaactaattatggggccaaattcatattattttgtggatctctgaggatacgtatgagaraatctagtcctcttggaggaaatactgaaatcattttttaaaaatagacatattggctactggtactaatagaaaaatatctttcttgatagttaactta

SEQ ID NO: 326299 - DNA, 201 bp, Homo sapiens
acatagccaaaccatatcaaatttaaaccaaaggtagttctactaatgtgtactgctctaatactgttgtaaagggatactgatgttaccgttctataccstaacttttattcatctatttcaaagccataaaagtaatataatctcattatagaatatttagaaacaggaaaaatatgttgcttatagtccttttgctca

SEQ ID NO: 326300 - DNA, 201 bp, Homo sapiens
cacatgcctgtagctccagctacttgggaggctaagacaggaggattgcttgagcccaagagttcgagtccagcctgggcaacataatgagactttgtctaaaaaaaaaaaaaaaaaaatggcttctgtgaatataaatgtcactagagagtgtgaatataagtgccactggacagtctactgtaattatttggaattctt

SEQ ID NO: 326301 - DNA, 201 bp, Homo sapiens
ctcgaagcaactcacagggaaaaaaatggactaaaacaatgcctgcagtgcctccctcctccctcacaaaatgattaattctgtatcttcctgttaattayttttagtttgatgctaatacatttaacaggaccatattaatactactcagttggcctatgacattttgaaaattaccaaaagggggaaaaaagagagaga

SEQ ID NO: 326302 - DNA, 201 bp, Homo sapiens
gtggcagatttcttaaattcaccctcatgctatcagctattattgtactttcaaagtgtgaaattgacaagctggtcagtttcatgaattcagctgtcagwttgtgtccagttaaaaattgctaaaagctgtaaatgtgcctgcctggaattttcttttgtgaaggaaggacagcaaggggatgggggattaatgggtgtt

SEQ ID NO: 326303 - DNA, 201 bp, Homo sapiens
actagtggggagaaggagaaatagcaggaatcaaagtctacgcagctgccatagaggagggggattgtttgggagaccttcccgtggcagaatcaaagctmgtagttcagctgcgggaatctggtgtacttaacacacacattcattccgtagggaagggaacgcatcttttataatgaagagtcaaagttgtaagaaaca

SEQ ID NO: 326304 - DNA, 201 bp, Homo sapiens
agctgcagatagtgaaggacggtacatttgtaaagtaaggctgttattggagggtgatggtcaacatagaattgcagggaagaaaggaacttcaatagggmttttccctatatgcttccattttgtcaaaattacagcaataggattcctaagtgatttgttgaagtccctatatagattaaagctttttaataaaatatt

SEQ ID NO: 326305 - DNA, 201 bp, Homo sapiens
ttaagaaaaaaaaaaaccctttattgtttatatgatttaacatatttggatttattttaagaccaatgggaatgtaaggtaatacataaaatgattattamaccataacttaaatgttttctctaaaatagtacatggtgttagtaaccagatttgccttaaataatggctcccttgcctaccaggagcaattttctcaat

SEQ ID NO: 326306 - DNA, 201 bp, Homo sapiens
ctgagacaggagaatcacttgaacccaggaggcggaggttgcagtgagccaagatcgtgccactgcactccagcctgggcaacaaggagggaaagtccatsccccccaccccccaaaaaagaattgatacgatctttgcatattcaaattttattaacatgaaaagactgaatacagtagaatatgtaggagatcagctgt

SEQ ID NO: 326307 - DNA, 201 bp, Homo sapiens
tccttcccctttaaactaccctcaaaagtaaaagatgcttttctaattttgtaatcccatagtgcattgtaaaaatgtatgtcttgatggcggtgtggttsaggatggtggggagagcagcggtagtaggataatagtctgtatttcagttttcaatttaactgtgatgtttattttttatttcagcacctccaaggttta

SEQ ID NO: 326308 - DNA, 201 bp, Homo sapiens
tgcatattcaaattttattaacatgaaaagactgaatacagtagaatatgtaggagatcagctgtttgattagataaattatcccctgctggaactacctstaaaattgctgtattttcagtgcattctgtctctagctttgtaaatgactgttgttctggatcctggaggcagtatctgtccactttcacactttgaaga

SEQ ID NO: 326309 - DNA, 201 bp, Homo sapiens
aaggaaagaaagtcagcaatcagagatttgaggtattaggtccattgttctgtttctctgggggaagaatgtatctgctctgtctttggtttctacgttayttgcttgctttactctgataaaaggtgtcactgatatatggtattccttacattgcaagtgatggaaaatgtaactctaaatggctttttaaaaaaggaa

SEQ ID NO: 326310 - DNA, 201 bp, Homo sapiens
tataatctcattatagaatatttagaaacaggaaaaatatgttgcttatagtccttttgctcataatccttttatctgaaaacaacacactgttctaactygagtaatttttgtgatcctttgtactgtatggtgaatttgctattcagtacatcagttatcattttaccataaatgtattttttacaaccttgcctcatc

SEQ ID NO: 326311 - DNA, 201 bp, Homo sapiens
tagaaacaggaaaaatatgttgcttatagtccttttgctcataatccttttatctgaaaacaacacactgttctaactcgagtaatttttgtgatcctttrtactgtatggtgaatttgctattcagtacatcagttatcattttaccataaatgtattttttacaaccttgcctcatcataactgctgcttttaatggct

SEQ ID NO: 326312 - DNA, 201 bp, Homo sapiens
acaggaaaaatatgttgcttatagtccttttgctcataatccttttatctgaaaacaacacactgttctaactcgagtaatttttgtgatcctttgtactrtatggtgaatttgctattcagtacatcagttatcattttaccataaatgtattttttacaaccttgcctcatcataactgctgcttttaatggctgccga

SEQ ID NO: 326313 - DNA, 201 bp, Homo sapiens
aatcattatacacttcatcggaatttcatcacttgttagaaatttactcaaaggatcataaattctgtatttttcattattcaggaattctgaaaaaagartgtgcattttgtgataacaaaaattctggtagggtatgagaaatccatccttaaagaagaaaagaattcacaacttcaaatggatgctgttttctcatga

SEQ ID NO: 326314 - DNA, 201 bp, Homo sapiens
aacaaaaattctggtagggtatgagaaatccatccttaaagaagaaaagaattcacaacttcaaatggatgctgttttctcatgaaggatttgcccagtgkctggagagtgcttctaatattattatataatataatattatgggtgtagatgccagttttgagatgatgtttatcagcactcctgttcttgaacagtgag

SEQ ID NO: 326315 - DNA, 201 bp, Homo sapiens
gaaatccatccttaaagaagaaaagaattcacaacttcaaatggatgctgttttctcatgaaggatttgcccagtggctggagagtgcttctaatattatyatataatataatattatgggtgtagatgccagttttgagatgatgtttatcagcactcctgttcttgaacagtgagaaggtatttattgggcatgttaag

SEQ ID NO: 326316 - DNA, 201 bp, Homo sapiens
atcgcgccacagcgctccagcctgggtgacagagcgagactccatctcaaataaataaataaataaataaataaataaataaataaaatccccttggtcawtctgaaaattatcatctaggttttgttcatttaataggcaaaacactttctcattattggtttaatatgaatttctttaattactgaagtgataattttt

SEQ ID NO: 326317 - DNA, 201 bp, Homo sapiens
atccttaaagaagaaaagaattcacaacttcaaatggatgctgttttctcatgaaggatttgcccagtggctggagagtgcttctaatattattatataayataatattatgggtgtagatgccagttttgagatgatgtttatcagcactcctgttcttgaacagtgagaaggtatttattgggcatgttaagaacagta

SEQ ID NO: 326318 - DNA, 201 bp, Homo sapiens
cccagtggctggagagtgcttctaatattattatataatataatattatgggtgtagatgccagttttgagatgatgtttatcagcactcctgttcttgarcagtgagaaggtatttattgggcatgttaagaacagtaaaaatcaggaaaaacaaaggataggattgctatgcgttatccccaaccaaacagattggtaa

SEQ ID NO: 326319 - DNA, 201 bp, Homo sapiens
cttcagctgatgctgaagagtggctgattcttaaaatgaggtgatctgaactttttaggacatcctaatgcccatgcagtctgaatctttcttcaaaatayccactcagacgctaaaagcaggggagcttgagatccagggtgatgtttgaattgaggctttcaaaggaagaggaagataacctttgaagaaggtaaccaa

SEQ ID NO: 326320 - DNA, 201 bp, Homo sapiens
ctctcctcctagggtgggcgtagtattgggggcaaatggtggagcggtggggcaatccacccttacccagggatcctgccaccgccttttttaaaggcagrgattactgttttaaggagggctgactacggtgagggggcgatttctttttctttctttcctctgaactagtggggagaaggagaaatagcaggaatcaaa

SEQ ID NO: 326321 - DNA, 201 bp, Homo sapiens
ccactgcactccagtctgggtgacaagcgagaccatctcaaaaaacaaaacaacagtaacaacaacaaaaatttaggaaagtgatcatactcattaagggrataatacatttttcttgtgagaattacacaaatttgaaaatccttgggtcagggagtggtcaacactgagccctttttttaaacttattgaaaattgcag

SEQ ID NO: 326322 - DNA, 201 bp, Homo sapiens
cggctggagtttagggagtgtgtagggagatgcagaggatggagtgggaggggggaaggcagccaaccctgcacaacgttgctggctctggtgtggagtgkgaactttgcctgctctgtaaactcagtgttcatcaagggaagagtggttgatcaggtgagagagaatgctggcccctactcttatggtggctgtggaatt

SEQ ID NO: 326323 - DNA, 201 bp, Homo sapiens
cccaagtactttttcataatttggtatctgaccagctcttctgctgatttgatggaacccttttatggtgaactgcttaaaattctttatgtaattggaamttgtctttatgaataatacaaacttctccagtcaatccagttgattcagtagtgctaactctccccaaaatgtcctccttcctcttgtttttaggctgaa

SEQ ID NO: 326324 - DNA, 201 bp, Homo sapiens
tttatggtgaactgcttaaaattctttatgtaattggaaattgtctttatgaataatacaaacttctccagtcaatccagttgattcagtagtgctaactytccccaaaatgtcctccttcctcttgtttttaggctgaactaaattgtatatcttatggccgggcgcagtggctcacgcctgtaatcccagcactttggg

SEQ ID NO: 326325 - DNA, 201 bp, Homo sapiens
tttgtattgtttttatgatgtcactgcaattaggacttaaaaaataggctcttccaatatacacatgtagtttttaaatgatgttctatattaagtagaamacacacatactaaatatacgttatagtatagaaattgccactatttagaaatatatttgcagtgtaagaagttcatttggaattttaaaatattggtctt

SEQ ID NO: 326326 - DNA, 201 bp, Homo sapiens
cctccacctcccgggttcaagtgattctcctgcctcagcgtcctgagtagctgggattacaggcacgcatcaccacacctggctaatttttgtatttttartagagacggggattcaccatgttggtcgggctggtctcgaactcctgaccttgtgatctgcctgcctcggcctcccaaagtgctgggattacaggaaaaa

SEQ ID NO: 326327 - DNA, 201 bp, Homo sapiens
ctgggctactacataaaggaccaagaccaggaagaaagaaaacagttaaactcaaggctgcagatgacttctgtgacaagagtgagaggttaacttgccarctgactgaatctatttctggaattagcctaatgtgcctgagaagtcagaagaaaaatggattttaccactgcttccttgcttgtgcttctagaagtcgtc

SEQ ID NO: 326328 - DNA, 201 bp, Homo sapiens
taaaaatttttatattgaataaagcatccaatcatctagttctgccacaaaatagtatttatcaacaacatttataaatgcatacatatgcctagtatatycttggtatgtaagatagttgttctcctaaaaacttctgaaattctaaacaatatgtatttcaaatctaaatttttaaagtaaatatgctcatatttactg

SEQ ID NO: 326329 - DNA, 201 bp, Homo sapiens
gtctctgctgatccagtttctggagcgcctcttgggttgtgcttttactctcttatgtcaggtgtcatactggagtttctgagcaatcaaatagaaatccyatatagggtaaggagtcaataacatttattttgatctagattttggtttggagcaggtggttgggttaaaagtccaacaagataatctgagaatagagag

SEQ ID NO: 326330 - DNA, 201 bp, Homo sapiens
agtgtctgggcatataaacagactattgacagacattgttgtttgcctgttagacgcttccttcttgcttgcctataacattgacccagattttatctackctcattctatagtaacctgctgtgtatgccagtgggtgggggtgcgggggtggggctggctcctaagtggcaaatcttactggttgaaaaaagtgaagtg

SEQ ID NO: 326331 - DNA, 201 bp, Homo sapiens
gaaaaataaccattgtgtatcttcatttcttctttcaatatggccatgttgccctcagcaacttcgtaataaagtgcactcaggctgttgtctctccactragataaccagactgtataactctgtgaattcagaatctaacccgttcccaccttgtcacaattactcaacatatgtccttgctgacatttaaattttaca

SEQ ID NO: 326332 - DNA, 201 bp, Homo sapiens
caagtagctgggactacaggcacccaccaccatgcccggctaattttttatatttttagtagagacagcttttcactgcgttatccaggatggtctccatstcctgaccttgtgatctgcccgcctcgacctcccaaagtgctgggactgcagacacaagcctccgcacccggccaaatctaaatattttaaagaagaaaa

SEQ ID NO: 326333 - DNA, 201 bp, Homo sapiens
tgcccggctaattttttatatttttagtagagacagcttttcactgcgttatccaggatggtctccatgtcctgaccttgtgatctgcccgcctcgacctyccaaagtgctgggactgcagacacaagcctccgcacccggccaaatctaaatattttaaagaagaaaattatgtaaagtcatatatgtgaaaaaatatcc

SEQ ID NO: 326334 - DNA, 201 bp, Homo sapiens
tgcctgagattaaaataatagaatccatgttctgtttgagtggaaagtggctggattgcatatctatctacactttgcgagaaagatctgtttctcacttstacagtgtctttttggatgaaaggaacaaatattagagttccaacggcatgttgaatagacttgtattttaaccgtttcattgccagtttctactggcat

SEQ ID NO: 326335 - DNA, 201 bp, Homo sapiens
tttgcgagaaagatctgtttctcacttgtacagtgtctttttggatgaaaggaacaaatattagagttccaacggcatgttgaatagacttgtattttaamcgtttcattgccagtttctactggcatcacataaaactagatagaagctatgacatgcagtaataactgaaagaaattttagattctttttctaaagcta

SEQ ID NO: 326336 - DNA, 201 bp, Homo sapiens
acatatgacataaaacataattattcttcctctgattgatttctgagataagattatgtaacactatttgatcaactgtagccatctttggtagttagtcragagaattccaacggctcaggaagacaaaactgtatgtcctgtcttctgtaatcttatagagtgtgttgtaatttgaaagcaaattgcaaaccaaaatca

SEQ ID NO: 326337 - DNA, 201 bp, Homo sapiens
gcaaagcaatagaattagtagactgtgttgaacagaactgaactcaaaaattctaagatacataagattttcttccatttaagctcaggaaaaatataatyatcttagttgattttccctgaaaattttaggaaaattttgatccaaatatatcattgcattctattagtcatttgatcatatggctcatattgctcagac

SEQ ID NO: 326338 - DNA, 201 bp, Homo sapiens
catgcagctattaacagaattagggattatgttctctcaactccaatgcaatttccattatgataaattagggaagagataagagtcattaggagaacaasgtaaccaagtacttggctggccagaggcaccaaggggattgagatgagggtgaagagtatgagatgctcaggggaggtgcagagtgaagagaaggaacaa

SEQ ID NO: 326339 - DNA, 201 bp, Homo sapiens
tggggtaaggcaccccacagatcccttcattcctctttgcagtcaatgcctttctccacctctatcattaggcaacaactgctctgtttgctgcccctacrtttttctttttccagaacatcatataaatgtaatcatccattacgtaacccttgactctggctgctttcatttagtgtattgcatttgacatcctaccat

SEQ ID NO: 326340 - DNA, 201 bp, Homo sapiens
gcacccggccaaatctaaatattttaaagaagaaaattatgtaaagtcatatatgtgaaaaaatatcctacctttgtgactttgttgcagaaggagttagwattgttaggagaggaatttttttaatttttcttttttttttttttttaagatggagtctcgctgtaactcctaggctgaagtgtagtggtacaatcttgg

SEQ ID NO: 326341 - DNA, 201 bp, Homo sapiens
taacagctcattccatgacatgcagctattaacagaattagggattatgttctctcaactccaatgcaatttccattatgataaattagggaagagataakagtcattaggagaacaaggtaaccaagtacttggctggccagaggcaccaaggggattgagatgagggtgaagagtatgagatgctcaggggaggtgcag

SEQ ID NO: 326342 - DNA, 201 bp, Homo sapiens
caccagacactgaatctgctggtgccttggtcttggacttcccatccttactgtgagcaataaatttctgtttataaactacccagtctgagatattttgytatagtagcccaaatggggtaaggcaccccacagatcccttcattcctctttgcagtcaatgcctttctccacctctatcattaggcaacaactgctctg

SEQ ID NO: 326343 - DNA, 201 bp, Homo sapiens
ttcaatttgtaaaagacacaatatttgtgaagcagaaaaaacaaagcaccataatacaaggtgtgcctgtatatctgacttttatttataataatgaaaarttaaaagatagcttaaatgttcaaatagaaaaaatatttgctagtcacagtttgtccaaatgatagaatattatgctgccattgagctttttcacaaata

SEQ ID NO: 326344 - DNA, 201 bp, Homo sapiens
acagcaaaactccatctaaaaaaaaaaaaaaaaaaaaaaatgaaaatgagctaatgtttggctgtgaattttggtgggtgtgatagatgagaaagctactrtaatggagggtaagctccttaaggtgggcttagggagttgtaagaagggaattcagatgaaggagcatctctcagcctcagagggttctgaaactgcttc

SEQ ID NO: 326345 - DNA, 201 bp, Homo sapiens
gagtcttaataaataaatgttcttgttagtgatgcagatccttagcagaggccaagttttttaaaaaggttaataggttaaagtttcttaaagtgaagttwtaacaagcacctcaagatgaaccacaatattactctgcttttatctgttttgtcatttccatttctgtcttctctctttactcttacctgcccatcttca

SEQ ID NO: 326346 - DNA, 201 bp, Homo sapiens
ccagggaatatttggtaacgtttggagacgtttttggttgtcagaatagggggcaggatgtgctactggcatgtactgggtgggtgtcaggggtgctgctraacatcctgcaaggcacaggacagccccaatgtcaatagcacttataacaaatcatgcagcccccaatgtcaatagcaccaaagttgagaaacactactt

SEQ ID NO: 326347 - DNA, 201 bp, Homo sapiens
ttcaggttaagctttcttcataatacacccatattaaattgttctatgtgatatttctgcttggcgaggtttaatttggtggaatgagagctgcctgtttkttagcagtcagatgtgcataatagccatctaaggtagaattcatcaattatgctgaaatgtttgtttttaaaatgtcaggtgtccagatggtgccatggc

SEQ ID NO: 326348 - DNA, 201 bp, Homo sapiens
cttcaaattgtcatgaacatgaacagtaaacaaccaaaaagatggtacaacacaaatagataatttaacacatgtatgaggagataatagccttaactggyaatttagtttgaatgaaaacttgtgaatgaaaacattttgtacccatgaatgtttatggactcgtgagatgtttacctttcctgatgaatatttgagtat

SEQ ID NO: 326349 - DNA, 201 bp, Homo sapiens
ttaggtcagaataaatatctagacattgtctcacacatttatcaaacatttcctaggagccaggctccgcatggtggtttcaagtaagtgatttgccatgstctgcacaatcacagtatgaaacaaatataattatctctcttttgcagataaagaaacaggactctggaggttttaacagctcattccatgacatgcagc

SEQ ID NO: 326350 - DNA, 201 bp, Homo sapiens
ggctttgggtaacaaaaggacaggctcagatgcaacagccagactgcctagagtattcagagcgttagggatttagattcagctgttcatgtcttagttgmtcatagaacaatagaggaaaaactgaaggaaccagaatccagaaccacactgtcttactagggtgaggcagttactttcaagtaaggccagctgaaagta

SEQ ID NO: 326351 - DNA, 201 bp, Homo sapiens
acttcccttcaatctgtcttcctccggaaaaactcagctgctctctcaaatgtaccagtgatcctctctaactactgaaagaaatgtgcttttactgggtytcattctctgtcgcctctctgtagcatttcacatacccagtggtcatccacacccctagtcttagttcttcagtgctttggcaggtgacctattgtcttc

SEQ ID NO: 326352 - DNA, 201 bp, Homo sapiens
aagagctacagtgataagcaattatgttatttatcataattaactttaacacatcagtgattgtcagtctactctttcatttaatcatccccaaaactttraagggggattagttttatctccattttataaatgggtgactctctttaatgcatccatgtatggttgtgcaggttgaagactctaccactgatgagcaca

SEQ ID NO: 326353 - DNA, 201 bp, Homo sapiens
gcatttgagagggtagaacacaagtaggcatattttaatagttggggccagcagagggaggctttgggtaacaaaaggacaggctcagatgcaacagccaractgcctagagtattcagagcgttagggatttagattcagctgttcatgtcttagttgctcatagaacaatagaggaaaaactgaaggaaccagaatcca

SEQ ID NO: 326354 - DNA, 201 bp, Homo sapiens
tattattgcttagcttagattattgattcttctataggatatgtgcctgtgtaagacaagagcatgtacatgctatatttcagaaagatttcaaccaaatrtggttaatatttggggaaactgaggtgggtatgtttgctttttgggaaaataatttctgaaaaacacatttgcaattcattaggaagtggtaatgactat

SEQ ID NO: 326355 - DNA, 201 bp, Homo sapiens
aaagagctacagtgataagcaattatgttatttatcataattaactttaacacatcagtgattgtcagtctactctttcatttaatcatccccaaaacttkaaagggggattagttttatctccattttataaatgggtgactctctttaatgcatccatgtatggttgtgcaggttgaagactctaccactgatgagcac

SEQ ID NO: 326356 - DNA, 201 bp, Homo sapiens
gagagataaaagaacaaagcatattctctgtacatcattaattaaaaagacaagcaatattttgctgctaagatttttggccaagcccaaataaatttgtkaaatccagaaaaaataatttgataatttattataaagtattacaaaaggatgtaaaacattattataagaaataatttgaaatgaaatctaaattgttat

SEQ ID NO: 326357 - DNA, 201 bp, Homo sapiens
ctttccccatgaaactaccattgaccttcttcacagaattagaaaaagctactttaaatttcatatggaacaaaaaaagagcccatatagccaagataatmctaagcaaaaagaacaaagccagaggcatcatgctacctgacttcaaactatactacaaggctagagtaaccaaaacagcatggtactggtaccaaaaca

SEQ ID NO: 326358 - DNA, 201 bp, Homo sapiens
aaggtgctgattatgtagggagatgggacaattgatgcaccaaggttcctagggcatggcgaagaggtggatcaagagcacaagtgaagcaattggtcttsaataagataaagggaaaaatggtttctaagttagaaattcgtatacagtgaataggatgtgacttgccatcaagttcatgtttgatggcattattttatc

SEQ ID NO: 326359 - DNA, 201 bp, Homo sapiens
catgtgtacacacacgtctcccttctgtgttatagctactttggggatatagtagctactttcacttcccaaagtatcttgccaacttaaccagtgtgcarttgatagatgagaagttgtggtcagcttatcctgtaagatggatctatcttaaaagaaatggtctatgtttttgtaagttgtggtaataactcactttgg

SEQ ID NO: 326360 - DNA, 201 bp, Homo sapiens
cattcaataactaccacttcgctgtacttttgctcactttgtcattatttttcttaacctgttattttccacatctttaaagtatgttgagggataaaaamtatacctccttgtatctttattctgatggttgaaaactatgcacatttcgttcctatgctggttttatattataaaagcaaaagcacttgaatcacacga

SEQ ID NO: 326361 - DNA, 201 bp, Homo sapiens
taaatttataaattttcatgtagagcttctctcattccattcttctggtcttgaacaggtttttctacccccatgtctcctatgtttcctttacttgctcwtatgtcttttacttgcttcaactatggaaggagggcagatttggggagatttgaaaattacaccaatcactgccatttttccccaaatgttgcagaatat

SEQ ID NO: 326362 - DNA, 201 bp, Homo sapiens
gtgtgtatctactcatatgccactagacaagacaaatctgcctttacatctggctgcggtagcaattcccagatgcacttaattctgacacatggccattmttgaaccaaaagcaattgcctggcatgattatagttcttatttgttttcgttttaaggggcctcatccaggctgccaaatgtacaacaggtgccttagtt

SEQ ID NO: 326363 - DNA, 201 bp, Homo sapiens
aaattagataaatctggttgaattttttttttttttttttgagacagggtctcactctgtcccacaggctggaatccagtggcatagcctcggctcactgsacctccaccccccaggttcaagcgattctcctgcctcagcctccctagtcactgggactacaggtgtgcaccaccacgcccagctaatttttgtattttt

SEQ ID NO: 326364 - DNA, 201 bp, Homo sapiens
cgttatcaggcatttacagattgcgagttttctgattttactaacagagctaagtctttaacaatcttagtaagaagagaagagcctttttccagctatcmcaggccagttcgaaaacacagaatgggcattaaggagaatagatttgaagcagcaagtaagcaaccaacatgcttgctaatgatatcaaagcccagctca

SEQ ID NO: 326365 - DNA, 201 bp, Homo sapiens
ttcctaaattacagattataccactaaaaatgatactgaatatcaaaacatacaataatttgaggagttctgattgacaaaagctgtttaccttaaattcyttcaaacaacaaaactgtagtctataaggggttagagtctgtgagaacacaaaaagatttatctaaaggagaaacataagcacaagaatactcagtattg

SEQ ID NO: 326366 - DNA, 201 bp, Homo sapiens
tgcattagagaataataaagtgaactttattaaaaggcacccttgggtacaatttcatcatcctctacagctgaaagcagcagaattttagtcttcttatrcttaggtttttatagaatgccttttaaccaaaaggatcagaagagtgtaattgcaggcccctttttaaatgatctgtgaaagttgggtggttcattcagg

SEQ ID NO: 326367 - DNA, 201 bp, Homo sapiens
ctgtgcttcattctaaaccagacaacagccatcttatgggttcattgatgcattttgttctatgaatatcaaaattatttaatttatgataagaaaatttwaaaaaaaatccaggctattcagacaggagccccagaagctctctggtaaaggaaattctagaactgtatattttccaaataatcatcacatatatggctt

SEQ ID NO: 326368 - DNA, 201 bp, Homo sapiens
ccatttttgcctgatttttttcttccttcagggcatagcttagctgacaactcttcctagaaaatttccctcctcccaagtctgggtacctttctctgggyactaaaagaataccgaataaattctacatatagtgtctatcataatgcattgtaattgcttatttttactctgttttattaggagtacctggaagccaat

SEQ ID NO: 326369 - DNA, 201 bp, Homo sapiens
tttaatggacaagtactgcttcattaaatagagtttttttccatactataaaaaaagaaaaaacatattgaaaaatatctgtggagtcatttgaactccarttaatctttatcttagatttcttactatgccaaagtatgaaacttttttaaaatatcagggaaactgatttatgatatcagtaatactccctaaaattat

SEQ ID NO: 326370 - DNA, 201 bp, Homo sapiens
tacctttctctgggcactaaaagaataccgaataaattctacatatagtgtctatcataatgcattgtaattgcttatttttactctgttttattaggagyacctggaagccaatgtccatgtcttattcccagtgacatctccagctcctactacatggcctggctcggtgcaatagtaatattgggatgttatcgttga

SEQ ID NO: 326371 - DNA, 201 bp, Homo sapiens
ttaaatttttatattttcctaaaacagattactgtatatttctacatatacctctactcataacctcatcacagtttgaaatgaaatttaatgtagctttwcattttgatttccttaagatgtgtggatgggagcacacacagtattttaattttataatttaaaataaccaagcagtcagaagttaagataagctgaact

SEQ ID NO: 326372 - DNA, 201 bp, Homo sapiens
tgtaaaatgggcttaagtattattttatttccatatcctctggttcttcagttgcatcccctttctgccttaagttaaacatattgcacttccatctgctmtacactatagatgattcacatttattttttgcagtgatattttttaaatgagtttagggagcagatgtttttgcattcatacttgccttccttttcctga

SEQ ID NO: 326373 - DNA, 201 bp, Homo sapiens
agcctgtctgcctcctgccaccaactgtggcacccaggctgctcacgccaaggggcatctgcaggccctgagttgccctcagctccccacttggcttcccytccaccctggtcagtacctaaagtctgggggtgctgaggcagcaaggggctggtgtctcagtgctgccccaacatgtgcacactcagtcaggctgacagc

SEQ ID NO: 326374 - DNA, 201 bp, Homo sapiens
actaaaaatacaaaaattatctggacatggtggcacttgtccatagtcccagctactcgggaggctgaggcaggagaagcacttgaacccggggggcagargttgctgtgagctgagatcgcgccactgcagtccagcctggggacagagagagacttcctctcaaaaaaaaataaagaaaaagaaaaaagaaaaacaggg

SEQ ID NO: 326375 - DNA, 201 bp, Homo sapiens
atatagataaaagatgattttctacacattttaccagagtgtaacctaacgggcagcagtatgtaaaatgggcttaagtattattttatttccatatcctytggttcttcagttgcatcccctttctgccttaagttaaacatattgcacttccatctgctatacactatagatgattcacatttattttttgcagtgata

SEQ ID NO: 326376 - DNA, 201 bp, Homo sapiens
gcctcctgccaccaactgtggcacccaggctgctcacgccaaggggcatctgcaggccctgagttgccctcagctccccacttggcttcccttccaccctkgtcagtacctaaagtctgggggtgctgaggcagcaaggggctggtgtctcagtgctgccccaacatgtgcacactcagtcaggctgacagcacctaggct

SEQ ID NO: 326377 - DNA, 201 bp, Homo sapiens
atgaaaaaaaaaaaaaggatccaagtaacaggaggtcaaacacgggagaagggtaaatggaattcccagaaaaataactatacataggtatctaaagcaamaggtccagattgatgtaggaaggtaaaggcatgatggtctctgagaaaggaatggaattgatggaaagttttagctgttttggagtgattagaaagaaat

SEQ ID NO: 326378 - DNA, 201 bp, Homo sapiens
tccctccctcccttcctaatacctatattactaaaaagctttctataaatctataaaataggagtaatgataacatcttgcaagactctttgaaaacaccrtatataagatatattaaacatttagtctagtgcatggaactcaaggagcagttatttctttattccattctaaagtataatgcttcttaaatcaaatttt

SEQ ID NO: 326379 - DNA, 201 bp, Homo sapiens
ggctgatggtttagaaatttgctcattctggaggagaaatataggcaataagatatatagaaagctacacagattatgggcacacaatagcatgcccatartttaagacatgagaaggatagctttaattttaggggctaccaatacccccaaactgcctgaaattgtgaaactcacctcccttttacctgagtttctaat

SEQ ID NO: 326380 - DNA, 201 bp, Homo sapiens
ggttaatgaagaagacattgaaataatactctgaccacccatgtgcctcgaagggagcatttcaggaacaagtttcccttcgtagcttgtttcaaattacscttactctcaaaaactgtgtttcaataaggagggataaccacaagctcaggctgaatgtgccccgaaataagatatttgggcaattaactataccataga

SEQ ID NO: 326381 - DNA, 201 bp, Homo sapiens
tgcccatagacacctcgatttctacccagcatccttcatgggcttcatgtttaagaaagggagaattggattgtctgagaagagcctcagacacttgtttrtagtgtttaaatgggaaaagggtaaaggacaaaatcatgactctggtaactttgtctattggcctgtctcatttatgagtgtaaaatgtcactgaaggtt

SEQ ID NO: 326382 - DNA, 201 bp, Homo sapiens
gtgaatgatcaccattaggacaaaagataatacgtgaagtacccaagtctaggtcttgggaaattgaattccagctttagctctgtcacaaaataactggmttcttaagcaaatacgttaacttccctgttctgttctgtttcttttttttttttttggcctgatatgcattgggaaggccttggattagcgatgaaatca

SEQ ID NO: 326383 - DNA, 201 bp, Homo sapiens
agagtcaccagggtatagctatggccattctttcttatgctatgcaccccaaaagggattataaagcacagataattaaatcagcagaggctgggtgtgayaacttatgctgtaatcccttcccaataactttgggaggccaaggtgggagaattgcttgagtccaggcattcaagaccagcagggcaagacctcgtctct

SEQ ID NO: 326384 - DNA, 201 bp, Homo sapiens
tgaatgatcaccattaggacaaaagataatacgtgaagtacccaagtctaggtcttgggaaattgaattccagctttagctctgtcacaaaataactggawtcttaagcaaatacgttaacttccctgttctgttctgtttcttttttttttttttggcctgatatgcattgggaaggccttggattagcgatgaaatcac

SEQ ID NO: 326385 - DNA, 201 bp, Homo sapiens
acacttggcttccagatttggtccagcctctctccgtttgtgtttctatgagtaaagttgaggcaaaccctaatgagctttcccaatgcaagattgttatsccaaatggaaagcagttagcaggaacgctaagatccaggattctgtttcaaatcattaaaattaaatagtattcttccctccaaaacgtttaagatattt

SEQ ID NO: 326386 - DNA, 201 bp, Homo sapiens
caagtctaggtcttgggaaattgaattccagctttagctctgtcacaaaataactggattcttaagcaaatacgttaacttccctgttctgttctgtttcttttttttttttttggcctgatatgcattgggaaggccttggattagcgatgaaatcactcagatcacccctctccagctttccgtgattcattgacatgc

SEQ ID NO: 326387 - DNA, 201 bp, Homo sapiens
tttttttggcctgatatgcattgggaaggccttggattagcgatgaaatcactcagatcacccctctccagctttccgtgattcattgacatgcctatttyagcaagtcagttcttgcaagatggaaaaaatttgctccctgaaggtgactgttactgagatagtaaaacacacagtgagcagttggatgagacagagaag

SEQ ID NO: 326388 - DNA, 201 bp, Homo sapiens
tgtctttttatagtgctgtgttcacaaatacaccctaaatctagagctgacctaacatgttaagtgttatgcaaaaggttagaagcatttaattgaagttyatgagctatagagagctttcatctaaattacaaccgtgaacagcattttatcttaaactaagcgctaaccagcaggtattcttgagggcagtcaatcatc

SEQ ID NO: 326389 - DNA, 201 bp, Homo sapiens
tgccctgaatgtgtcacttgtttcttgtaggtgaagtgtgaccagtattggcctagcagaggcacagaaacccacggactcgttcaagtaacgctgcttgwtactgtggagctggccacatattgtgttcgaacatttgcactttacaaggtttgcttttcatctttttctcctccctttcccttctctattgtttaaaga

SEQ ID NO: 326390 - DNA, 201 bp, Homo sapiens
agcatttgaactgcaactttctatttctgtaatattccatggttccaaaaggtatgcttttgctattaatgctattaatgataaaactttgatgaataacktaccccagttctttttgataagcgtctcataaactatgcagaacaattagccagaaaggtgaaatattttaggatctttagcagtttaaatttataatta

SEQ ID NO: 326391 - DNA, 201 bp, Homo sapiens
gttgatcgtatgctgtgcttcatcatcatcttcgtgaaagaaagagaaaaggtagaagcaagtgcctgtagatatccacaggtaacactaagggaggatgygccagacctagcattgaagccttcctcagaaaaaccaacttgagagaggatttacaatcccttcttatctctcagacagttgccatttatatgctgttta

SEQ ID NO: 326392 - DNA, 201 bp, Homo sapiens
atgcttccacacttttagaaaaacacgtacgttgaattatggttagttgtctgtatgcctgtcttttacttaaacttataccactgtaaatatatcagtayattgtgatgtatagtaaaccccttccattacagaaagaactaactgtatactacattgtaattatttacagaaatcttgtaaaaggaagatattctcatg

SEQ ID NO: 326393 - DNA, 201 bp, Homo sapiens
accgcttggatctgtaattttgcaatctgtaaaacaagaagattggattggaccatttttaagatcctttccaaagctgtaagtttaaagtgagatactayaagatcaatataaaaataaatctaatccaggagaaatgaaatgaaaggaacaccactctgtttttagtcaatgagtcgacagtatttctttgggtgttca

SEQ ID NO: 326394 - DNA, 201 bp, Homo sapiens
aactacaggtgagttatggcaaatcagtccagtaaacatcaaaatgtagcccttctctttgctacaaactcacctttctatcgtggatttcaatttgcctrctgcagaaacattgcttactatctttcagaagtcaactagctatatttcctttccagaacagaaactttcggaatagctagtctagtctgctccctccca

SEQ ID NO: 326395 - DNA, 201 bp, Homo sapiens
acttcttccaatataatgatgtttgtctacattgaagatctcttttttaatgtagccaccttcatcaatgatcttagctagatattctggataacttgctrcagcttctgtaacagcacttattgcttcaccttgcacttttatgttatggggttggcttccttccttaaacctcataagccaacctgtgctaacttcaaa

SEQ ID NO: 326396 - DNA, 201 bp, Homo sapiens
tcttcctctactgaagtcttgaacccctcaaagtcatccatgaagattggaatcaacttcttccaaactcctgttactgttgataatttgatcttctcccrtgaatcacaaatgtttttaatggcatatagaatggtgaattacttccagtaaattttcaatttactttgcccagacctatcagagaaatcactatctatc

SEQ ID NO: 326397 - DNA, 201 bp, Homo sapiens
taaataataatgccatcacaatggtgctagactggagaattaatgaattagaattcttacgaaacatagttcaaaagattacactgaagacctgtgtctcycatttcccccttaataaattacccatttgctttcaagaaatcaacagtttgcatttttttctcttaacagtttatttataaaatatttttaggacttaga

SEQ ID NO: 326398 - DNA, 201 bp, Homo sapiens
atcttgctattccaccatttttgcaatttcttcctctactgaagtcttgaacccctcaaagtcatccatgaagattggaatcaacttcttccaaactcctsttactgttgataatttgatcttctcccgtgaatcacaaatgtttttaatggcatatagaatggtgaattacttccagtaaattttcaatttactttgccc

SEQ ID NO: 326399 - DNA, 201 bp, Homo sapiens
ggccttgtgaacatcatcatcatcatcatcatcatcatcatcactaatgttttgcaatggtagttttgagaagagaataggatctacccaaggaacagtastgaaaggggtagtgaagtcaaatgtatttcagagaattattggcttgggaaagatggagagtgtctccaaccagcaggtcaaccattacattagaaagtt

SEQ ID NO: 326400 - DNA, 201 bp, Homo sapiens
cacagtgttcacagcatcttcatgagtatattccatcttgagaagccactttctttgctcatccgtaaggaacaactcctcatgtattcaggttttatcaygagattgcagcagttcagtcccatctcctggctccacttctagttctagttatcttgctattccaccatttttgcaatttcttcctctactgaagtcttg

SEQ ID NO: 326401 - DNA, 201 bp, Homo sapiens
aatgttttgcaatggtagttttgagaagagaataggatctacccaaggaacagtactgaaaggggtagtgaagtcaaatgtatttcagagaattattggcwtgggaaagatggagagtgtctccaaccagcaggtcaaccattacattagaaagttcccaggtgggaggtaaaattcctaatttagggtcagatattgatg

SEQ ID NO: 326402 - DNA, 201 bp, Homo sapiens
cacctgtaatcccagtactttgggaggccaagggcaggtggatcacctgaggtcaggagttcaaaaccagcctggccaacatggtgaaaccctgtctctaytaaaaatacaaaaaaaaaaaaaaaaaaaaaaagctgggagtggtgataggagcctgtaatcccagcttctcgggaggctgaggcaggagaatcacttgaa

SEQ ID NO: 326403 - DNA, 201 bp, Homo sapiens
cccagtactttgggaggccaagggcaggtggatcacctgaggtcaggagttcaaaaccagcctggccaacatggtgaaaccctgtctctactaaaaatacaaaaaaaaaaaaaaaaaaaaaaagctgggagtggtgataggagcctgtaatcccagcttctcgggaggctgaggcaggagaatcacttgaacccaggaggc

SEQ ID NO: 326404 - DNA, 201 bp, Homo sapiens
tttttttttttttttttggaggcagggtcttgctctgttgcctaggctggagtgcagtggtgcaatctaggctcactgccgcaacctctgcctcccaggcycaagcaatcctcccacctcgcaccaccccctgccaacccccaggagctggaactacaggcatatgccaccacacctggctaatctttgtattttttgtag

SEQ ID NO: 326405 - DNA, 201 bp, Homo sapiens
acttactttaaaggtaggcaccacagtgttttctagttttcaatgtacagatctttcgattcactggttaaatttatccttaaggttgtattgtttgtttstttgttcttgagatgctattgtaaatagattgctttcttaatttcttttttaaataattgctagtatatagaaatgcaattgatttttaatactgatttt

SEQ ID NO: 326406 - DNA, 201 bp, Homo sapiens
tcataaacaaagaatagaaaactacaggtgagttatggcaaatcagtccagtaaacatcaaaatgtagcccttctctttgctacaaactcacctttctatygtggatttcaatttgcctgctgcagaaacattgcttactatctttcagaagtcaactagctatatttcctttccagaacagaaactttcggaatagctag

SEQ ID NO: 326407 - DNA, 201 bp, Homo sapiens
tcctcactggaatccaggagataactttttgtttcctaccatggagacttgatatatttctataatccagatgtgcagtatgtaacctccagtgcccacarcaagcccaacacatagtgggccctccacagatacttgtgaaatgaatgaatggttcataaacaaagaatagaaaactacaggtgagttatggcaaatcag

SEQ ID NO: 326408 - DNA, 201 bp, Homo sapiens
acatttagatcactaaatatatataaatatatatgtatatttggacatctcaaccgttacccttaccctttacaatggtgccaacactgctcctgaatggaaaaaaaaaaaaaatccaaggatcctttcctaaagactttataaaaataatgaattcttgaaatttgaatttatatatcactgaatcactgacgcaggaat

SEQ ID NO: 326409 - DNA, 201 bp, Homo sapiens
tcctcatctataaaatgagggtaataataacttcctcgcagaggtttactgcagaatggtgaataagtaaaggacctagcacagccaagaagagtagggtytccaaatgggaactattatcatcattatcaatctcattcacatttcctattctgtttcctctcagagcacaggcttgtctgtttctattttattcaacac

SEQ ID NO: 326410 - DNA, 201 bp, Homo sapiens
tggagtcattcctctgcaaccctgctgcttttctattaactttgtttatgtactattctaaatcctttgttgtcatttccacagtgttcacagcatcttcrtgagtatattccatcttgagaagccactttctttgctcatccgtaaggaacaactcctcatgtattcaggttttatcatgagattgcagcagttcagtcc

SEQ ID NO: 326411 - DNA, 201 bp, Homo sapiens
tggttctgtgtcacttgcaagtcttcaggcggagacaaggggaagcactatgaatttatgagaggtgacaagattcttgcctgaggccaatagtttcttayacttgtacacatccagatagaaatgtgagatggaaaacagtagtatctcttacttcctagcacattaagcctggaaaagaaactgtttcctgatgtatct

SEQ ID NO: 326412 - DNA, 201 bp, Homo sapiens
tggtgactgaggccaaaagagtcctgaggaatagaattagttaccttccttaagcatctgaagttttagagcccaatctttcatttcctttcccagccccraaaggaaatatattctggggttgggaaatatgttttggtactgggaaaggagttctatatggagaacttgccagaaggaatactagatttgtgatttatt

SEQ ID NO: 326413 - DNA, 201 bp, Homo sapiens
actgaatgttttattaaacagttaactaatcttacagataccaccttttgtcaaaactcaaaagttataaataaaccttaccatactaacactttctaacraagctcttctctaccgtgaatgcaagagacccccatagttaggccaaaatatcatcgcccctatttggcctaaaaaagttacaaaaaatagatctttgtc

SEQ ID NO: 326414 - DNA, 201 bp, Homo sapiens
aacagttaactaatcttacagataccaccttttgtcaaaactcaaaagttataaataaaccttaccatactaacactttctaacgaagctcttctctaccstgaatgcaagagacccccatagttaggccaaaatatcatcgcccctatttggcctaaaaaagttacaaaaaatagatctttgtccctgggcaacccttag

SEQ ID NO: 326415 - DNA, 201 bp, Homo sapiens
gagagcttgtccgtgttgattcgaaccaatgaagatggtatgttgcctccgctacgtcagtttgcacccttctgacacagtcttgatctgctgtctttcawtaggctcacagtaatcttttttctctgctcatctttttacccagcattgctgttactttagtatttttgccaaagacttgtctttgctacagcctggcct

SEQ ID NO: 326416 - DNA, 201 bp, Homo sapiens
ctgccttggcctcccaaagtgctgggattacaggtgtgagccaccatgcccagccaggttattggatcttagaaattagtggtttataattgagataacasagcatcatgcaaaatgcccatgcagtaaacctgtgtatgtaccccttgactctaaaataaaagttgaaattataaaaataatatttgagataatagaaag

SEQ ID NO: 326417 - DNA, 201 bp, Homo sapiens
gtagtttatatcattgttactattcttcattcctgcagattattgcatcatttttttttttccattttcaaattttattttttagagagacttggcctcastatgttgtccaggctggtcttgaactcctgagctcaagtaatcctcctgccttggcctcccaaagtgctgggattacaggtgtgagccaccatgcccagc

SEQ ID NO: 326418 - DNA, 201 bp, Homo sapiens
tactgtccatcaactttacctactgctaggagttaggactggcccagcctaaatgaaacatcaagctgttcatgtgaatagtagtttatatcattgttacyattcttcattcctgcagattattgcatcatttttttttttccattttcaaattttattttttagagagacttggcctcagtatgttgtccaggctggtct

SEQ ID NO: 326419 - DNA, 201 bp, Homo sapiens
gatttactgtccatcaactttacctactgctaggagttaggactggcccagcctaaatgaaacatcaagctgttcatgtgaatagtagtttatatcattgwtactattcttcattcctgcagattattgcatcatttttttttttccattttcaaattttattttttagagagacttggcctcagtatgttgtccaggctg

SEQ ID NO: 326420 - DNA, 201 bp, Homo sapiens
atccttatttttaaagtgatacaattcacttcaaaaaccccatgacttacttacactttaaaatgataaagcttacctcatcagtaatcctaaaaggcagytgaacctggtctatgactgaaaaggcctcttttgcccatttcctctttgagacaggcagctgctgaacgtggccttctcacgccctcatttttagcctgc

SEQ ID NO: 326421 - DNA, 201 bp, Homo sapiens
cactatcactgaatttccaaagtaaaactctcagtctctttttcaaaaggacagagagagtgggaacatattatccattaatagtgttgaatttgacttaygtttttattttggcaaccaaaaagatagagaatgccagaccctcttggaagggctttgatcttatcctggtgtatcttataaaatagtctcatagaggct

SEQ ID NO: 326422 - DNA, 201 bp, Homo sapiens
gggaggctccaggcaggcagatcacttgaggtcaggagttcaagaccagcctggccaacgtggtgaaaccccatctctactaaaaatacaaaaaagtagcsaggcatggtggcgcacgcctgtaatcccatctactggggagaccaaggcaggagaatctcttgaaactgggaggcagaggttgcagtgaaccaggattat

SEQ ID NO: 326423 - DNA, 201 bp, Homo sapiens
atgcttctgacacgtaggaactgaaaaccaatatatgagggaaagcctcctgtaaaatgaaggaagcaaggactaaattgtgtgcttctcacatagcaacygtgataaattaaaagcataaattgcatattctcaatggaaggaaaatcacttgctgacgaaactaaagattgtgaaaataaagtcacaaacagccatttt

SEQ ID NO: 326424 - DNA, 201 bp, Homo sapiens
gagtcattatgtagcagttggctctgatacgcttgcacagacacaaattgagtccgacaggactgatgtctcctggactttgctgtcatttgaaatgctgrcatgaggatgggagcagtgaaagcgggaggaggggaatggggaggggagagctgattcctttagcacttttccaatgaacttttgagatttttaacatct

SEQ ID NO: 326425 - DNA, 201 bp, Homo sapiens
ggtccaggttcaaaatcttccacacattctctgtgtctgcttttagccagacaccatcactatgtggtagcttacctcaaagcttcacttagtgtatcaascctcagaagcactttctgatcccttcaacctgcacatctgtcttcttatctaaattccagcccagctcaatccataccttctgaccatgctacgaaaaaa

SEQ ID NO: 326426 - DNA, 201 bp, Homo sapiens
ccaactcagcattctttccagctgtgtgccccccatatctcaggttgccaacgtctttaccagattcccagaggaggctctttacttctggccaggtcttyccatcagggtaccctgaaagcattgttcaggttggtactgagtcctgggttcccctggaggtatgtcccactaagaaatccttgtctgtgttgttttact

SEQ ID NO: 326427 - DNA, 201 bp, Homo sapiens
atgtaaaatgtaatgcaatacttttattaactcattattattttgtagttattcaattcaatccatataaaatagaaatctggattgccacctacattgtrtaaataatcaccaagagtagaatgagagaacagtcaggctacctgggatggggtcagtttgtacttaggttttcctctgccaccatcaccaaactttcag

SEQ ID NO: 326428 - DNA, 201 bp, Homo sapiens
ccctatttggcctaaaaaagttacaaaaaatagatctttgtccctgggcaacccttaggatcaaaggttctcttataaaagggagaggggaaatgtcaaargtgtgctaaccacagcaactccatcttaaataaaagctgggtaaaatgaggctaggacccactgggctgcattcccagacgattaaggcattctaagtca

SEQ ID NO: 326429 - DNA, 201 bp, Homo sapiens
taggatcaaaggttctcttataaaagggagaggggaaatgtcaaaggtgtgctaaccacagcaactccatcttaaataaaagctgggtaaaatgaggctargacccactgggctgcattcccagacgattaaggcattctaagtcacaggataagataaaaggtcagcacaaaatacaggccatgaaaaccttgctaataa

SEQ ID NO: 326430 - DNA, 201 bp, Homo sapiens
tgggctgcattcccagacgattaaggcattctaagtcacaggataagataaaaggtcagcacaaaatacaggccatgaaaaccttgctaataaaaggtaayagtaaaggagccagccaaaacccaccaacaccaaagtggcgacaagagtgacctctggttgtcttcactgctacactcccaccagcaccatgacagttta

SEQ ID NO: 326431 - DNA, 201 bp, Homo sapiens
catgaaaaccttgctaataaaaggtaacagtaaaggagccagccaaaacccaccaacaccaaagtggcgacaagagtgacctctggttgtcttcactgctrcactcccaccagcaccatgacagtttacaaatgccatggcaacatcaggaagttaccctatacaatctaaaaagggaagacatgaataatccaccccttg

SEQ ID NO: 326432 - DNA, 201 bp, Homo sapiens
ccttcccaataaaaattgaaaaaccaaatgtggtggcacttgccagtattcccggatactctgggggtagaggcgggaggatagcttgagcccaggatttycaggctgcagtgacctgtgattgtgccactgcactccagcctgggcgacagaacaagaccctatctaaaagagagagagagagagagagagagagagaaa

SEQ ID NO: 326433 - DNA, 201 bp, Homo sapiens
atgcctctagaaagcccatccttgaaaatctaaaataattcattattcagcattttaaatgtgtgtataacctaatcatatctgtggtattatataacatkcataagcctagataggcggattttttcttggaagtatctggcagcctatgtagagataatcatcagaatattaaaagacagtccatggaggcccaggcac

SEQ ID NO: 326434 - DNA, 201 bp, Homo sapiens
tattttatatatgtaaaatgtaatgcaatacttttattaactcattattattttgtagttattcaattcaatccatataaaatagaaatctggattgccayctacattgtataaataatcaccaagagtagaatgagagaacagtcaggctacctgggatggggtcagtttgtacttaggttttcctctgccaccatcacc

SEQ ID NO: 326435 - DNA, 201 bp, Homo sapiens
ttttacagtaagtcagaagtacaagtttgctgctcttgaaaagctgccattctagggggtgttatacttcttgcctttatgttggcaaggaaacagggacrctaatgggctgattatatgaatgttaccctttgagatttctctaaagagtcaactattagaatgccccttcctaccctaatagcactgcgtttcagaatc

SEQ ID NO: 326436 - DNA, 201 bp, Homo sapiens
tcataccagtgttagtaataattgaacaatatttgtcatcagtgggggaaaaattaagctgtttcctgaggtttgaaaaaagttgcattgagatcttattygtgccaagtcttatggattagatactcaattaaagtagttgatgtagaaaatataaaatctcactcaacctctgtattttaatttagtttttgaatgcta

SEQ ID NO: 326437 - DNA, 201 bp, Homo sapiens
taagaaagaaaaatgatctcaaaaagaagatgtgttcaagcatgtttggaataatttggatttgtttttccacaaagattcatgtttccaaatcgtttatytgctcccattctaaaaactttaacaaatacttgttgctctttgaatgtctagattttaaccggatgaacttctctcattttactctactctcaaaggcaa

SEQ ID NO: 326438 - DNA, 201 bp, Homo sapiens
ttgcccagtacgactggggtttgagccaatcttttcttaattccctatcaacatttttaagatatgattgtgattatttaaaaacaaacaaattttttttwaaaattaaaattactttaccgcataatggtgaaatgctgatgtgatgtcttttacacaagcctggttaactatatgctaacagcattgattaagctcagg

SEQ ID NO: 326439 - DNA, 201 bp, Homo sapiens
ttgtgggaagggatgaaatcatccaggaattttaagaaggggttcagtggaacactgaacatttagaggtcaggcaaagggggtgaaacttctaaggagcytgagaaagaacaggcccaagtggtaagaagaaaactaggatattaaagtagagtagaataccgggagagaagagggcttcaagaagaggctgtggggtgt

SEQ ID NO: 326440 - DNA, 201 bp, Homo sapiens
gcgactaatatgctgaactgggcactctaatttctgaattgggactgtgtttgataacttaaaatgattgtatgacatcatattattaagagttagaaaartaagtagactccttgacttgtcgtgtagggagtagaaaagaactttcaccattaagcaattgtaaagggatagtggaacataatatagaggtattctgtg

SEQ ID NO: 326441 - DNA, 201 bp, Homo sapiens
tttatcggtatttcagttataccatttatttattggggcaaggggctaattggccaagcttttggtataataatagtaataactgcagctaatactaaggwttttttgtgggttccagttacattctaagaatcttagtggattggctcattagtcttcacagcaaacccatgaaatacagttacatacagctgtataata

SEQ ID NO: 326442 - DNA, 201 bp, Homo sapiens
ttcatgctaaaaactctcaataaactaggtattgatggaatgtacctcaaaataataagaggtattcatgacaaacccacagccaatatcatactgaatcrgcaaaagctgaaaggattccctttgaaaaccggcacaagacaaggatgccctccctcactacttctattaaacatagtgttggaagttctggccagggca

SEQ ID NO: 326443 - DNA, 201 bp, Homo sapiens
atgcaaggcaggttcaacatacgcaaatcaataaatgtaatccatcacataaacagagccaatgaccaaaaccacatgattatctccatagatgcagaaamggcctttgataaaattcaacacaacttcatgctaaaaactctcaataaactaggtattgatggaatgtacctcaaaataataagaggtattcatgacaaa

SEQ ID NO: 326444 - DNA, 201 bp, Homo sapiens
aatctgtagacataactcattgctaatcctggcaatgaattaataaattttctcagatgccagtactagataatgtacctatcatctatttcactgatacstgtgaatcactgacttgttttcatggcatggtctttatatgaagtatgtttaactatttgtccttgcttctaggaatctcagagcacatttatattaata

SEQ ID NO: 326445 - DNA, 201 bp, Homo sapiens
atcattttaacaaattatttatatagtatgtcatataagtccgctcacggccttaaaaatgaccaacagtcgttgaatagaatagtccattactcagcttracaatgcagttttgatacacatctacactgaccaaagattttagtaaaaaatttaagaaagaaaaatgatctcaaaaagaagatgtgttcaagcatgttt

SEQ ID NO: 326446 - DNA, 201 bp, Homo sapiens
tgcttaaacctactatttaagtagatttggggagcagaatgccagtcagatctagcagtgctactgttgttcagaagcaagttgtaatgacatagggaacytctgtgactttatagagcagaattttactctgggtatttaaaaaatgcacaacacagattatactaagagaaaaaactaccagaaggtactcaatgtaaa

SEQ ID NO: 326447 - DNA, 201 bp, Homo sapiens
tcactacaaataagactgtctttctcagcattttgaagattctacagaaagaccttatgtcactcatactgctatactatcattactacagcatcatgacyatccccaacctacttaaatatatcaatgtaatccaaaaggaaaattggtggagcaccaccatgcagggtcaaattctgggcaaacagtgacctgacccaa

SEQ ID NO: 326448 - DNA, 201 bp, Homo sapiens
gtaaaacagagcaggacttttgaaaagcaaaaataccataaattagcttctaagaaatattctgccaaatagcattccagtttttaacattttaaattaayacctttagttcatgttttcttggaaacttaggatattttggcaagaaataactggaaaatacagacgtgtttttgcatccccttttcctcttccccacca

SEQ ID NO: 326449 - DNA, 201 bp, Homo sapiens
agaataaatatatcaagtatccattagctcactgaatgaaaatcagtcacatgcattagaaaactgattcaagtcattctttgtctgtggacttgagaagyatgttattggtatccaagataaaatgtactcatgtaagctacagccaatccctttaaaatcattcagaaaaaatgcttaaacttggtataagaaagggat

SEQ ID NO: 326450 - DNA, 201 bp, Homo sapiens
aaccccaaaatagacttggctgaaagactaagaggtagtatatcaggtgatgacattgagtcaaatatttctatagttagaagcattaaaatactttataktcacttgaaaaactgtattaggttagaataaatatatcaagtatccattagctcactgaatgaaaatcagtcacatgcattagaaaactgattcaagtca

SEQ ID NO: 326451 - DNA, 201 bp, Homo sapiens
ctcagactcttacccatcagaaacaatcagagtacagaagatgcaaatgttagatttgtgtcgtggtatacactgcaggatatgtgcagagctgttgagckccaatgaacccatgaagctcactgaaaactctttggcttctcctttttctgttccttgtgttttgccctttcttagtaactgttcaaatgcccttcttgc

SEQ ID NO: 326452 - DNA, 201 bp, Homo sapiens
ctttgagtagcaacagtttctgtcacatgacagtgtcataaacacacatatacctagaaactctggtggaagcctaaatgagattaatattatgtcaatawgtgcatagtatatgataatacagtaatagactcataaataactgaatagagattatgcatatgggatatctgtgtgtgtatgtgcaattgtgtagaaaaa

SEQ ID NO: 326453 - DNA, 201 bp, Homo sapiens
aagaaaagaaaagaaaaatgccaattccagttgaataaatctgggttgggtcatgaggtgtgcattgctaatcatctctaaggtcacagtgaagttgctgktctaccaacaacactttgagtagcaacagtttctgtcacatgacagtgtcataaacacacatatacctagaaactctggtggaagcctaaatgagattaa

SEQ ID NO: 326454 - DNA, 201 bp, Homo sapiens
tggctggggaggtcccaggaaacttagaatcatggcagaaagggaagcaggcacgttttacatggccgcaggcaagacagagcgagagcgtcggaaggagraacagtcaaacacatataaaaccatgatcttgtgaggactcactatcatgagaatagcatgggggaaactgcccccatgatccaatcacctcccaccagg

SEQ ID NO: 326455 - DNA, 201 bp, Homo sapiens
gaaacttgaagaaaatttgaccttatcatggaagttgtttctgtttgttcatttgtttgtttttgaggggctcgcagtgcaagataaaaagatgtaaatgrtaactgtaagatatggaggcagtatagagaaaaacgcgtgtttctgcttttcaaactttttagtagcagacatttttggtatggagagtttaagatacag

SEQ ID NO: 326456 - DNA, 201 bp, Homo sapiens
gatgttaactaatgtggatgtagagaaatttgtcctggcatatctttatttggtaagcaggctaagcaaacttagcaaaatttattcacgctttaaaaacatgagataagagctctttctcagaggcacactcttaaaagttttgccgaattggaaaggttctgacgctgtttaattaaaagaaaaatgcaataaaaccag

SEQ ID NO: 326457 - DNA, 201 bp, Homo sapiens
atgttaactaatgtggatgtagagaaatttgtcctggcatatctttatttggtaagcaggctaagcaaacttagcaaaatttattcacgctttaaaaacatgagataagagctctttctcagaggcacactcttaaaagttttgccgaattggaaaggttctgacgctgtttaattaaaagaaaaatgcaataaaaccaga

SEQ ID NO: 326458 - DNA, 201 bp, Homo sapiens
ctcttgggtaacaaggtatgttgtcaatgagcagtattatcttgaaaagaatcttttattctaagcagtaggtctcaagagtggccttaaaatgttcagtmaaccatgctataaacggatgtcttatcatccattctttcttgttccatttatagaactgggctatttggtacaagaggtcgagctttcagcctgtcttga

SEQ ID NO: 326459 - DNA, 201 bp, Homo sapiens
tgttaactaatgtggatgtagagaaatttgtcctggcatatctttatttggtaagcaggctaagcaaacttagcaaaatttattcacgctttaaaaacatgagataagagctctttctcagaggcacactcttaaaagttttgccgaattggaaaggttctgacgctgtttaattaaaagaaaaatgcaataaaaccagat

SEQ ID NO: 326460 - DNA, 201 bp, Homo sapiens
gttaactaatgtggatgtagagaaatttgtcctggcatatctttatttggtaagcaggctaagcaaacttagcaaaatttattcacgctttaaaaacatgagataagagctctttctcagaggcacactcttaaaagttttgccgaattggaaaggttctgacgctgtttaattaaaagaaaaatgcaataaaaccagatt

SEQ ID NO: 326461 - DNA, 201 bp, Homo sapiens
cacaaaaagatggggtggagtgggatgtaagagctgaatggttgtgaaaaataaaatgcattaaaaaggcattaaagaagacatagttatcactgaaaggytagttaagagggtacttctttttttaatgcatttggttgttatacctctttatatcttgtaaaatattatggtaattgaaataagccattcacagaaaga

SEQ ID NO: 326462 - DNA, 201 bp, Homo sapiens
ttaactaatgtggatgtagagaaatttgtcctggcatatctttatttggtaagcaggctaagcaaacttagcaaaatttattcacgctttaaaaacatgagataagagctctttctcagaggcacactcttaaaagttttgccgaattggaaaggttctgacgctgtttaattaaaagaaaaatgcaataaaaccagattc

SEQ ID NO: 326463 - DNA, 201 bp, Homo sapiens
tcctgaggaatagaattagttaccttccttaagcatctgaagttttagagcccaatctttcatttcctttcccagccccaaaaggaaatatattctggggytgggaaatatgttttggtactgggaaaggagttctatatggagaacttgccagaaggaatactagatttgtgatttattaaagtctgttaaacttttgac

SEQ ID NO: 326464 - DNA, 201 bp, Homo sapiens
ccctctgataagtcttctgcacacttgaattttaggatatagcacacaaccatgcagcgttctccaaataaaataccttggaagacgtaattaacttagtycagaacaagtcattattattcttggatatccacacttatattacctccgcagagctcttatgtcatatttagaacttcattcattttttcttgagctatt

SEQ ID NO: 326465 - DNA, 201 bp, Homo sapiens
ccttaattggggcagttgcactggacctaccagcgctaacattctaccctgtcacattctgtagtaacctctaagaggacccccaacctcaagtggcttasaggggtcacaaaaataagaagaagctccatgtaagagaacatagagcagtgaggcctgtggcatggccttcccaaaatcttcaaatattcaaatgttcat

SEQ ID NO: 326466 - DNA, 201 bp, Homo sapiens
attcaaatgttcattattttaagttactgtgctggaaaaccaaaacatatctgtagtctcattcacctccaccctcaagagccagaccacgtttcattcartttgcatactgcagcatctttgtcacatatttgataggatgcaaagattttgtttgtttccttgcctcttggtgaagttatatcttcctttattctgctc

SEQ ID NO: 326467 - DNA, 201 bp, Homo sapiens
gaagctagatggtgactgaggccaaaagagtcctgaggaatagaattagttaccttccttaagcatctgaagttttagagcccaatctttcatttcctttsccagccccaaaaggaaatatattctggggttgggaaatatgttttggtactgggaaaggagttctatatggagaacttgccagaaggaatactagatttg

SEQ ID NO: 326468 - DNA, 201 bp, Homo sapiens
atcgcttgaacctgggaggcagaggttgcagtgagccaagggtcgcaccattgcactccagcctgggtgacaagagtgaaacaaacaaacaaacaaacaarcaaacaaacaaatggtgcccctatgtaggacacttagcatgaatggagcttgcaagacttttagttgctctgggtgtcagtgagagtagtgagtgaatgt

SEQ ID NO: 326469 - DNA, 201 bp, Homo sapiens
gccatttgcacatctggaggtgagagaaggaagctagatggtgactgaggccaaaagagtcctgaggaatagaattagttaccttccttaagcatctgaasttttagagcccaatctttcatttcctttcccagccccaaaaggaaatatattctggggttgggaaatatgttttggtactgggaaaggagttctatatgg

SEQ ID NO: 326470 - DNA, 201 bp, Homo sapiens
ttaaaaatgcagattccaggctgggcgtggtggctcatgcctgtaatcccagcactttgggaggctgagggaggtgaatcacttgagatgaggaattcaasaccagcctggccaacatgatgaaaccctgtctctactaaaaatacaaaaaattagccaggtgtggtggcacattgcctgtagtcctagctacttggcagg

SEQ ID NO: 326471 - DNA, 201 bp, Homo sapiens
gtcagttgcttagtgtaatagcatgtggctaggctgaaaaactaatagtcgagtactatgctcagtacctgggagatgagatgattcatatcccaagcctyggcgtcatgcagtatgcccaggtaacaaacgtccacatgtacctgtgaatctaaaataaaatttgaattaaaaaaaaaaagaataagatagatccctaag

SEQ ID NO: 326472 - DNA, 201 bp, Homo sapiens
gaaataacagattgtagaaggcatggcaattgttgatcgtcactgaaaagagaaatgaaaatcaatataattaactcattaatgggcactgttctaagggtttcaccatcaataatgcatgtaatttttatagtagcactggagctagcctttcttattaatcgatttgacgtataataaaatggaggcatggaaaaaaag

SEQ ID NO: 326473 - DNA, 201 bp, Homo sapiens
ggaaaaataaacattagcaggaatggtaatactttaaagacaggataatgatgctaatggatgactaaaagttggcttcacactttttctaccaatcatgraccttttctttgaatatgttcctgagtcagtcagttgcttagtgtaatagcatgtggctaggctgaaaaactaatagtcgagtactatgctcagtacctg

SEQ ID NO: 326474 - DNA, 201 bp, Homo sapiens
cctactgatttgaagcttttgaaagtgattgatttaatccaaatgcatacctcctccaggaggacatacaacctggaaaaataaacattagcaggaatggyaatactttaaagacaggataatgatgctaatggatgactaaaagttggcttcacactttttctaccaatcatggaccttttctttgaatatgttcctgag

SEQ ID NO: 326475 - DNA, 201 bp, Homo sapiens
gtagggaataatttactttggctctgttgaattttgctcttttcaggaaacatgcaactagagatacttaggaaagagacacggatatgcaaatatggatttttttttttttttttttttttgctgcattagccttgctgtagatcaaagacaagattaaatatctatatacatgtatgtgggtgtatatatgcacacaaa

SEQ ID NO: 326476 - DNA, 201 bp, Homo sapiens
gaaataagcagctatacaatttttacaggaaatttgaatatggatatatattacataagagcatcatatcaatcttaaatttactgagttctaaaactttrttgtggttatacgaaagaatgtcctagtagttcttaggagataaatgctaaattacttaaaggtaaagtgccacgatgactaaaactaactcacaaatgt

SEQ ID NO: 326477 - DNA, 201 bp, Homo sapiens
tagggaataatttactttggctctgttgaattttgctcttttcaggaaacatgcaactagagatacttaggaaagagacacggatatgcaaatatggatttttttttttttttttttttttgctgcattagccttgctgtagatcaaagacaagattaaatatctatatacatgtatgtgggtgtatatatgcacacaaaa

SEQ ID NO: 326478 - DNA, 201 bp, Homo sapiens
aagactaaacttggaaaacttaaactttggcattccaaatgaagctggtctatggtgatatttatttttgcatttggtaatgtgtagtataagttagcaayacagacatgatttgtttccttaggatcattgtgaataaactcgttggattgggaaatatcctgtgtcaagacaaattattccaagctagcctacaatgga

SEQ ID NO: 326479 - DNA, 201 bp, Homo sapiens
cgcaaaaagtgaggcatagatattttaattagcttgatccattccacaatatatacatgtatattttgtatatgtacacatatgcaattttataccataawcattatggtatgttttataccataaacattatggtatgttttataccataaacgtaaaacattatgtatacataataaacatacataatatgcataatat

SEQ ID NO: 326480 - DNA, 201 bp, Homo sapiens
tctgtaatcatattttcatttacgtacaggccccataaagagactaagttgtacttgccagtcatgttttaaatgccagagagcaaactctgaactctatytaattgactgtttgttgtggtgacacacattgggacgtaactgctaacagtccactcatacagatcttagatgggggagagcgaagtttctgtgtaagga

SEQ ID NO: 326481 - DNA, 201 bp, Homo sapiens
cactcaaaaggataaaattatcatctagtcaggaaaatttccaaactcagggcgtaggtccttacaaatatttaattcattatgtttgtgttgcattcatygcattcaagaaatatttgccatgtgtctctctgagctttggacgtacagatttatctacacatatgaaaatgaaatgtaaagctaaactatgctcactta

SEQ ID NO: 326482 - DNA, 201 bp, Homo sapiens
atatagctggatactcatctatacatacatttttttaaatttaattatatgttgattactcttaatatgaaagagccttgacaatgaaacagtgtatatatgtgtgtgtgtgtgtgtgtgtgtgtgtgtgtgtatgtatttttttttaagttggtactgatcatttgacttgcctctgtctaaattacctgtattgttttc

SEQ ID NO: 326483 - DNA, 201 bp, Homo sapiens
tataaaccatgactataaggaggaaaaaaagatgtttgttttaatggcactcaaaaggataaaattatcatctagtcaggaaaatttccaaactcagggcrtaggtccttacaaatatttaattcattatgtttgtgttgcattcatcgcattcaagaaatatttgccatgtgtctctctgagctttggacgtacagattt

SEQ ID NO: 326484 - DNA, 201 bp, Homo sapiens
tatagctggatactcatctatacatacatttttttaaatttaattatatgttgattactcttaatatgaaagagccttgacaatgaaacagtgtatatatgtgtgtgtgtgtgtgtgtgtgtgtgtgtgtgtatgtatttttttttaagttggtactgatcatttgacttgcctctgtctaaattacctgtattgttttct

SEQ ID NO: 326485 - DNA, 201 bp, Homo sapiens
ttattgtagcagaaataatagattaattagttacataattttttttcaggcttcacagttaataaagcgttctctaaatttatagtggtggcttaaaggaracaaaaaaattagagtaaacttaagtaagtagaaaatgatctttacttctatgtttatttccttgtttcttgatatgtatacctacaaatttataaattt

SEQ ID NO: 326486 - DNA, 201 bp, Homo sapiens
tggtcaggctagtctcgaactcctgacctcaggtgatccgcccacattggcctccgaaagtgctgggattacggggatgagccaccgcgcccggcccaaawatatatatatatatatatatgtatttacaaatgaaaaataaagagttttgtttctaaaataagtttcaaaattggaatggactagaataggtatcatttt

SEQ ID NO: 326487 - DNA, 201 bp, Homo sapiens
tagacttcctttacaatgagagtgctggagaataaagctatgatgaagactgtgttgtatgtctctaattcaggcttctgtatagagatacgaacattccyaattaggcacctcacagttgacatttccagattaactattctgtgcctttatctctttctctccctcacacaactcatttgttttgttttgttgtatttt

SEQ ID NO: 326488 - DNA, 201 bp, Homo sapiens
ttaaatccttccttccccaactataatctgtgggttttgttttgttttgttttgtttgagacagagtcttgccctgtcgtttaggctggaatgcaatggcrtgatcttggctcactgcaaccttcgcctcctgggttcaagtgattctactgcctcagccttccaagtagctgggattacaggcgtgcaataccacgcccg

SEQ ID NO: 326489 - DNA, 201 bp, Homo sapiens
caggctcctgaaaaattgtatcactcttgcatccttgttagtcttctaaagttaagaactattagccttcgttaaaaaacaaagaggaagaaaaggaaaakagaaaggaaaagagaaagaaaaaagatctgccatatactctcttatctataataataagggttttgattgttgaaaacagcaaaaataaaatgagatatg

SEQ ID NO: 326490 - DNA, 201 bp, Homo sapiens
tcccagaaagttttgttctgaaaccctggtcatcatgttttaggaaagtgaattaagctttgaagaaggcactttgatacaaaagtgcctcctgacaattaaaaaaaaaaaaaaaaaaaaaaggactgtctttagtatgacccagctgttattgtcaaaggattaagtctgtgagaaatcatgcaacttatgtataagttg

SEQ ID NO: 326491 - DNA, 201 bp, Homo sapiens
aaatggaatatatatgttccattttatatgttccattttggaaggaatgcagacatgatgaatggttacgaacccccactttgggtctcagaaacatttgytaatgggggaactatgtggatggctactaacgagaaccaggtttttaactgggcactgcaagagtaaataaatttaggatttcaagagtaaataaattta

SEQ ID NO: 326492 - DNA, 201 bp, Homo sapiens
tgggattacaggtgtgagccactgtgctgggccccaaagagcttttatattagagaaatataataaaataaaatataagttaatatatgaatatgaaacakatcagtctacctcacatatgttgtattagaatgagcttttatatagtttatatgttttatttattcaagcatgtcaagtaagtcacaaactttgataata

SEQ ID NO: 326493 - DNA, 201 bp, Homo sapiens
acaaatactacttaatctcacttacgtatggaatccaaaaagttgaacatacagatgcagagagtacgatggtggttgccaggggctagagagtgggagaracagggagatgttagtagaaggataaaaagtttccgttatgcaggatgaatacattctgaaaatctcatgtatagcatggcgactatagttaataatact

SEQ ID NO: 326494 - DNA, 201 bp, Homo sapiens
gatttttaatactgattttgtattctgcaactttactgaatttttttattacttccaacagttttttggtgaagtctttagggtattctatatgtaagatkgtgtcatatgcaaacagaggcaattttacttcttccttttcaagatatctgtgtacctatgttcactgcagcattattcacaatagccaatatatgaaat

SEQ ID NO: 326495 - DNA, 201 bp, Homo sapiens
aactaccatttctattctctaatattagaaggaacacacgccatcagaaagtggtaatgtctgtaacatctatccaaatactttatttcttacttgttacyaaaaacaaataaaccaaaaaagtgctcctcttactagatgagttgataagaatggattagtaagtaaaatccaaattactcagtaatattattatttttc

SEQ ID NO: 326496 - DNA, 201 bp, Homo sapiens
tttctagatgagactctcttagtgcttgttctacttgtgggtacttgagcttcctggatctgttgatagttttcatcaaaatcataaagtttcagctattrcttcttcaattttttctgctccttttatgtatttttcttctgggactcatattacatgtatattaatacacttgctttatctcacaggtccctggagcta

SEQ ID NO: 326497 - DNA, 201 bp, Homo sapiens
agggcctctctgagggactaagattgctaaaatgctagactgcggggtgcacagaggagagaatggagaggcatgatgaacaacattggaactgatttatracagtcatccaagtgttttctttctgggtgaactagagcacttatgaatgcagattataggtaatttgaaaccctaatctctgcttattttcaccatact

SEQ ID NO: 326498 - DNA, 201 bp, Homo sapiens
tagaaaattaaaccaaccttgtatgttaaatttcactcgatcaatatatataattcatttttatgtgggtagatttaggttgctaatattttgtgaaaaawtgttgtgtctatgtccacaagcaatattgctttaaagttttatttttatgtgatgtctttgtttggttctggtatcagcataatgccagcatcatagaat

SEQ ID NO: 326499 - DNA, 201 bp, Homo sapiens
atacttcatgttattaaaattgttcatttgtctgcctcccttttctaaactgtaaacttgttgagaaccatataaaactaggtctatttagtaagactaamttgtatttattttctagtgccatcacagaaattgacacatagtgggaactcaggaataaatgaataaaagcagattgcatattgacctaattttcagtga

SEQ ID NO: 326500 - DNA, 201 bp, Homo sapiens
ttgtgatcttattcactctaggtaatcacatatgtatcgttcatattaacacttttataaaactgaatttagtatgtagaaaagttcaaagtaaaaagctrtactattaggtgacatttttaagggcatgactaaaagcaaaaatattattgacaaatctttggagtcttacacaataaaaggaatctaatttacacaaca

SEQ ID NO: 326501 - DNA, 201 bp, Homo sapiens
atgcctctgacacattcatgattgattgattgattgtttaatttttttaaaagctatctagttaatttagttaaaataaacctggcttattctttttttamacaaattgattttaaatagttaaaacatttttttaaatccataagtaattcttactctactcatttatacacacatatactcacatgtacacagacatac

SEQ ID NO: 326502 - DNA, 201 bp, Homo sapiens
cccagaaagttttgttctgaaaccctggtcatcatgttttaggaaagtgaattaagctttgaagaaggcactttgatacaaaagtgcctcctgacaattaaaaaaaaaaaaaaaaaaaaaaggactgtctttagtatgacccagctgttattgtcaaaggattaagtctgtgagaaatcatgcaacttatgtataagttgg

SEQ ID NO: 326503 - DNA, 201 bp, Homo sapiens
taaaatttccaaatggtaaaccagtccagaagtttactagatgctgcagcattaggacactcttttgttgccaatctgctctgaatatattaacatgagtrtagcaggctgcagtctcacttccattactactcagatgtgcagagaaactttggcttctctatttgctgtatctcccgtttttcagcagcatcaccctga

SEQ ID NO: 326504 - DNA, 201 bp, Homo sapiens
gaaaagtatggttgttcgtttatggttgttgctgttgttcatgggtttgggtggctattatgtattaatcatttatcatcacaacaaagggtctttgttgygatgataatcttactaatagtcgcagtgtcttggagaaaattatttggttatttatgattcattatctataatacacatcactactaggccaccatacat

SEQ ID NO: 326505 - DNA, 201 bp, Homo sapiens
tatctctatctctatgtcttccaccttatttgatgtttacatggttccagaataatcttgaataaaagacgtctttgcttcttttcaatcttaggagaaamgcattccgttttcatcattatgtattatgctagctgtagaatttttgtagatgtcctgtttcaggttgatgaaatccttatttgcttagtttgttgaaag

SEQ ID NO: 326506 - DNA, 201 bp, Homo sapiens
ggcacagtggctggcgcctgtaatcccagctattcgggaggctgaggcaagaggatcactggaacccaggaggtggaggttgcagtgaaccgagatcacgyccctgcacttcagcctggacaacagatgagactctgtctcaaaaaaaaaaaaaaaaaaaaagttattttttttattttcctgcaaggtaattcctgctca

SEQ ID NO: 326507 - DNA, 201 bp, Homo sapiens
ttcctttttagcagcacttggaaaagtatggttgttcgtttatggttgttgctgttgttcatgggtttgggtggctattatgtattaatcatttatcatcrcaacaaagggtctttgttgtgatgataatcttactaatagtcgcagtgtcttggagaaaattatttggttatttatgattcattatctataatacacatc

SEQ ID NO: 326508 - DNA, 201 bp, Homo sapiens
tatctaatgactaacgaagcgagaatttttttattaatcattcatatatcttctttgataaaatgtctgttcaagccttttgctcatttttaattgagttstttatcttattgaagtttatgagttatttatatcttttggatataattcctctatcagaaatataatttgcaaatattttcttcatttgtgggtcatttt

SEQ ID NO: 326509 - DNA, 201 bp, Homo sapiens
ctgaggcaagaggatcactggaacccaggaggtggaggttgcagtgaaccgagatcacgtccctgcacttcagcctggacaacagatgagactctgtctcaaaaaaaaaaaaaaaaaaaaagttattttttttattttcctgcaaggtaattcctgctcatatcaatggcaaaagcaactgctgttttaccattgaaaagt

SEQ ID NO: 326510 - DNA, 201 bp, Homo sapiens
cttgaatggtttataaatagaagccttgaatatttttatctatttcattgaaaaagaaaaaaattctagtcatcatgcaattattcgatgtttctgagaaycttgttttatgctcaatttaagccatgtttaaatgaagaaaatgtttcttgatttatttcaagtttccttactagtgttctaaactttctatatttatga

SEQ ID NO: 326511 - DNA, 201 bp, Homo sapiens
ttatccattcaccaactgatggacatttggtttggttcccgttgggtctataaagaataatgctactatgaacatttgcatacatatttttacatggacayatatttttatttctcttgggtaaacacctaagagtggaattcctgggtcatctgccaaatctatgtttaacattttacagaattgtcaaaatgtttttct

SEQ ID NO: 326512 - DNA, 201 bp, Homo sapiens
tgaggcaagaggatcactggaacccaggaggtggaggttgcagtgaaccgagatcacgtccctgcacttcagcctggacaacagatgagactctgtctcaaaaaaaaaaaaaaaaaaaaagttattttttttattttcctgcaaggtaattcctgctcatatcaatggcaaaagcaactgctgttttaccattgaaaagta

SEQ ID NO: 326513 - DNA, 201 bp, Homo sapiens
aagaagaaagacgacagatcttcaaaaaataaaaataaacaaatagagtaaacaaatagattacatatacttgcacttcattgtaaatatttggaagaaasaaaagagaggtggaacaaatacaaagtagtaagtagagactggaaactaaatatagagacacgatattcaataaatagtgcctaagagaaagggaaagaa

SEQ ID NO: 326514 - DNA, 201 bp, Homo sapiens
ttgtgcatgcatactcatttacaagtcatatatatatgtatacatatatatttaaaatatgtatagtatatgtatacaaatgtatatatatatgtgtgtayatatatatttaaaactaggtgttcacaccaacactattagttccaatccaacactacacaattgattctgattttcttttttttataacatttgatggct

SEQ ID NO: 326515 - DNA, 201 bp, Homo sapiens
ttataatttgccaatcagtttaaattgtctagcctgtggctatcacgccggccttaaattagaatacatacatacatatatatgacataaaaccacctaarcagtaaaaagtagcatgaacctttcagatggaaatgtaatgtattaccacagagcaacagtagtttctaatctgagagcccacatctgaattacttctgc

SEQ ID NO: 326516 - DNA, 201 bp, Homo sapiens
ccatctctaaaaaacaacaacaaaaaattaggcgcggtggcacgcacctgtagttccagctacttgggaggctgaggtggaagatctcttgaggctaggaggttgaggcagcagtgagccgtgatcctgccactgcactcctgcctgggtgacagagtaagaccatatcaaaaaaagaaaaaaatgtatatatatatgaat

SEQ ID NO: 326517 - DNA, 201 bp, Homo sapiens
caaaaaattaggcgcggtggcacgcacctgtagttccagctacttgggaggctgaggtggaagatctcttgaggctaggaggttgaggcagcagtgagccdtgatcctgccactgcactcctgcctgggtgacagagtaagaccatatcaaaaaaagaaaaaaatgtatatatatatgaatagaatatatttatatactat

SEQ ID NO: 326518 - DNA, 201 bp, Homo sapiens
aaacatttagaaatggaaaaaaaaaaaaaaactaagtttatctaaaagaagtggaaggaagaacatttttatgaaagatcgttacactcaagcagtaaatytggctgaaatttaactaaatttaaataaatttggctctaagttttataagcaccagtttaaacatagaaatctatagtgtttcatatttttattttctga

SEQ ID NO: 326519 - DNA, 201 bp, Homo sapiens
ccaaaccaaatcttcatttctttttaattttaactcatagtttcgaagcattttttgatttactgtccatcaactttacctactgctaggagttaggactsgcccagcctaaatgaaacatcaagctgttcatgtgaatagtagtttatatcattgttactattcttcattcctgcagattattgcatcattttttttttt

SEQ ID NO: 326520 - DNA, 201 bp, Homo sapiens
ataaaattaaagataggaatatgaaagatttattcaacatgatatggtgtccatttcttataaaatccattggctctggagctgagtgtcagattactaargttcattaaagctcttgctcatagctgttgttttgcttttaagaagtgaatttaactagcatgagaaatgtcatagaaatggagttgccctagtgtgaaa

SEQ ID NO: 326521 - DNA, 201 bp, Homo sapiens
gttgccctagtgtgaaactatgtcagtaacataaaatggccttcaaatttaaggccgtaattgatattacagcttcatcatgctataccgaaggaaaaatrttctttaatcaaaggggttcatattgttgattcacttattctacttgccttaaaaatgctgagtggtaaatgctaggatttcttccgtgtaagttacact

SEQ ID NO: 326522 - DNA, 201 bp, Homo sapiens
agatattccaaaacagacttaatgactttaactaaagaattgtatcaacactgttggtaccagttatacagtgacttaaaagttgcctaggaataattttrtgcaggagatgagggaaaaaaaacccataatctcaaactgatgggaatattttaaagattgcaacactttctaacttttgaccccatgattagtgacaaa

SEQ ID NO: 326523 - DNA, 201 bp, Homo sapiens
ctatatcttctttccacatttctctctcactgtcccttttctcaataaaaatgaagagaaaatgaaaaaaaaaaaactaaattatataaagtgatgtcacytttaaatgtgagatatgacaattcttgtccactgccagaattggagccacaataaagctgagacagatttggctatagttgagaacagcatttattgaat

SEQ ID NO: 326524 - DNA, 201 bp, Homo sapiens
catatatgcagaagatgccctgctctttacttttagccttgactttctggctatagggagggcattaacttttgagtttcaggatggcatccctaggcttaaaaaaaaaatacttgcataaagccacttattatgtgtataatttgtatttagttctaaatcaataaacttttattgagcatcattatgtgtcaggtgctg

SEQ ID NO: 326525 - DNA, 201 bp, Homo sapiens
agtttgagtccagcgtgggtaacaaagcaagaccttgtctttaacagaagatttttaaattggctaggcatggtggcacgtgccttgtagtcacaagtacmgaggaggctgaggcaggaggattgcttcagcctaggaggtcaaggctgtagcagtgagctgtggtaaacgttaggagaaggaaaaggaatagcatgcatt

SEQ ID NO: 326526 - DNA, 201 bp, Homo sapiens
ttgtgaaatataatatttttatttttcatggatgtagtactttaaatttacatgtgcatatttaaactccacccaacaatactccaaggaactatttcctygtcttataaaaaaggaaagtaggctattaagtgaggttaagttacttacccaaggtctcacagctaggattagtggagccaggacccatatactgctctt

SEQ ID NO: 326527 - DNA, 201 bp, Homo sapiens
taaaagcccttgatgaaagtcgtatttttgctggatttttgtgagatctgtttcagccactttaactcactgacagctttctctcaaagttgttttaactktgtgaaatataatatttttatttttcatggatgtagtactttaaatttacatgtgcatatttaaactccacccaacaatactccaaggaactatttcctt

SEQ ID NO: 326528 - DNA, 201 bp, Homo sapiens
taaccaactacttaaaagcccttgatgaaagtcgtatttttgctggatttttgtgagatctgtttcagccactttaactcactgacagctttctctcaaarttgttttaactttgtgaaatataatatttttatttttcatggatgtagtactttaaatttacatgtgcatatttaaactccacccaacaatactccaagg

SEQ ID NO: 326529 - DNA, 201 bp, Homo sapiens
caaactatactacaaggctagagaaaccaaaacagcatggtactggtaccaaaacacagatatagaccaatggaacagaacagagccctcaaaaataataycacacatctacaactatctgatctttgacaaacctgacaaaaacaagaaatggggaaaggattccctatttaacaaatggtgctgggaaaactggctagg

SEQ ID NO: 326530 - DNA, 201 bp, Homo sapiens
atatataacattgtttatccattcaccaactgatggacatttggtttggttcccgttgggtctataaagaataatgctactatgaacatttgcatacatayttttacatggacatatatttttatttctcttgggtaaacacctaagagtggaattcctgggtcatctgccaaatctatgtttaacattttacagaattgt

SEQ ID NO: 326531 - DNA, 201 bp, Homo sapiens
aacaagacctttattatctgttttacgttaaccaactacttaaaagcccttgatgaaagtcgtatttttgctggatttttgtgagatctgtttcagccacyttaactcactgacagctttctctcaaagttgttttaactttgtgaaatataatatttttatttttcatggatgtagtactttaaatttacatgtgcatat

SEQ ID NO: 326532 - DNA, 201 bp, Homo sapiens
aaaactggctaggcatatgtagaaagctgaaactggatcccttccttacaccttatacaaaaattaattcaagatggattaaagacttaaatgtcagaccyaaacccataaaaaccgtagaagaaaacctaggcaataccattcaggacataggcatgggcaaggacttcatgtctaaaacacccaaagcaatggcaacaa

SEQ ID NO: 326533 - DNA, 201 bp, Homo sapiens
aatagacaaataaatgaacaggtaatacttagatggtccaggatttaatccaagactatctacccccaaagcaggtcataatcacaatacctcactgactkccagtctcatcttcattgtccaccaataagtatacgtttatttgcagaatattgatagcatgaatttcttcactctttctagtcactcttcatttggaag

SEQ ID NO: 326534 - DNA, 201 bp, Homo sapiens
tgaacagacacttctcaaaagaagacattaatgcagccaaaagacacatgaaaaaatgctcatcatcactggccatcagagaaatgcaaatcaagctgcartgagataccatctcacaccagttagaatggtgatcattaaaaagtcaggaaacaacaggtgctggagaggatgtgggaaaacaggaacacttttacactg

SEQ ID NO: 326535 - DNA, 201 bp, Homo sapiens
aaccttgggcttccttagtgttctccagcttagtgaatgtaaccaccagctatcaagttgttcacatcagaaagacagggatctttctaaacaccttcttytccttcattcctgtgtccaaagtgatgattaattatgtatgtcaacttaactgggccaccggatgcccagatattgggtcaaacattattcagggtgaat

SEQ ID NO: 326536 - DNA, 201 bp, Homo sapiens
ggcaatgctcacagctctcacaggctcctgtgaagtttaaatgagatcctgaatgtgaagtcctgtgaggttcagttttcattctgttctttctctctgtmcacacacacacacacacacacacacacacacacacacacacagagtaatacttaatgtatggagaaatcagctatttaacatttttgacctattgagatg

SEQ ID NO: 326537 - DNA, 201 bp, Homo sapiens
aggaaacaacaggtgctggagaggatgtgggaaaacaggaacacttttacactgttggtgggactgtaaactagttcaaccattgtggaagacagtgtggygattcctccgggatctagaactagaaataccatttgacccagccatcccattactgggtatatacccaaaggattataaataattctactataaagacac

SEQ ID NO: 326538 - DNA, 201 bp, Homo sapiens
agttaggactggcccagcctaaatgaaacatcaagctgttcatgtgaatagtagtttatatcattgttactattcttcattcctgcagattattgcatcatttttttttttccattttcaaattttattttttagagagacttggcctcagtatgttgtccaggctggtcttgaactcctgagctcaagtaatcctcctgc

SEQ ID NO: 326539 - DNA, 201 bp, Homo sapiens
tttttatcaataaaattaattttatcttaattaattaccacagtgattgtgatacctttcacttgaatacttgaataatgatttaaacactttatctttcttttttttttttttttgaaatggagtctcactcagtcgtccagactggagtgcagtggtgtgatctcggctcactgcaacctctgactcctaggttcaagc

SEQ ID NO: 326540 - DNA, 201 bp, Homo sapiens
tcctccgggatctagaactagaaataccatttgacccagccatcccattactgggtatatacccaaaggattataaataattctactataaagacacatgyacacatatgtttattgtggcactattcacaatagcaaagacttggaaccaacccagatgtccaacaatgatagactggattaagaaaatgtggcacatat

SEQ ID NO: 326541 - DNA, 201 bp, Homo sapiens
attagtggtttataattgagataacagagcatcatgcaaaatgcccatgcagtaaacctgtgtatgtaccccttgactctaaaataaaagttgaaattataaaaataatatttgagataatagaaagtacatgtgactaaggcctttccagttttttttgctcccaatccaaagcattagtatattccatacctgttatgt

SEQ ID NO: 326542 - DNA, 201 bp, Homo sapiens
actgaaaatgggagccaaagatcagtaaccaataaagcagactcagtaataggagacaggaatgtgagaaacagtgttttttatgactccaactaatttgsataagtgttatctttttgaatgcatctgacccagtcatctgccaccagtgggcttaaccctcaaagcactgttacgaacggagccacacagaatcaaaag

SEQ ID NO: 326543 - DNA, 201 bp, Homo sapiens
tcacaatagcaaagacttggaaccaacccagatgtccaacaatgatagactggattaagaaaatgtggcacatatacaccatggaatactatgcagccatwaaaaaggatgagttcatgtcctttgtagggacatggatgaagctggaaaccatcattctcagcaaactatcgcaaggacaaaaaaaccaaacaccacatg

SEQ ID NO: 326544 - DNA, 201 bp, Homo sapiens
tagaaaacagcatttctcagtactgctttggggtttggagaaattgtactttcaaatacataaagtgatcctctgtaatgattggatcacaagtaacaagrgacatctttttttttttaaaccgttagtagatggatttcatttattaactaaaagggttgtattagtaatgatttcataaatggttggatatcagttatt

SEQ ID NO: 326545 - DNA, 201 bp, Homo sapiens
tttttaaatggtataggtagcttctagcaggcttttattatagtaaaatcagaggaaataaatggactatggtcaacttttgtgtttttagttcaggggtaaaaaaaaaaaaatagatcagggaaaaaaatagtccaagtgcataatttgtccaaactattcaatcagtcattcaataagtattttttttttttttttttt

SEQ ID NO: 326546 - DNA, 201 bp, Homo sapiens
acatggcctggctcggtgcaatagtaatattgggatgttatcgttgagtattctgtaaacaaattagtgtgcccagaaaactcagaggtgaattagttcayggcccaaatcttacaacccatctgtttaggttctacagtttacgatgatattgtctattgctcctctgtaattaattttaattttatattattttgagtg

SEQ ID NO: 326547 - DNA, 201 bp, Homo sapiens
gggatcacctgaggttgggagtttgaggccagcctgaccaacatggagaaaccccgtctctactaaaaatacaaaattagccaggtgtggtggcgcatgcytgtaatcccagctactcgggaggctgaggcaggagaatcacttgaacccaggaggcggaggttgcagtgggccgagattgcgccattgcactccagcctg

SEQ ID NO: 326548 - DNA, 201 bp, Homo sapiens
gatgaagaacttgatgaatgatgtggatagtaaagttagaaagtgcaaattaaattcatagtaagtcaatacgatattattttgtagtttggttttttttwaaacttttaagcaacatagcagcacaattaagcatttaagcagtcgactccagacagaggtgggtttgccttatagatttctcacttgttacatgctagc

SEQ ID NO: 326549 - DNA, 201 bp, Homo sapiens
  misc_feature (1)...(201): n = A,T,C or G
agaaagaggaaccaaaacctttagaaaataggcaatattcataatacgttgaaacgtagagcttttctgcacatattccattaagatcacatacaactganaggtctaatattgataagttattttctatatatatatatatagatatatatgtatatatctatctttgtgtatttttgatagacttggaaacattttatc

SEQ ID NO: 326550 - DNA, 201 bp, Homo sapiens
gaaagaggaaccaaaacctttagaaaataggcaatattcataatacgttgaaacgtagagcttttctgcacatattccattaagatcacatacaactgacwggtctaatattgataagttattttctatatatatatatatagatatatatgtatatatctatctttgtgtatttttgatagacttggaaacattttatca

SEQ ID NO: 326551 - DNA, 201 bp, Homo sapiens
agacttgtgcttatttagtggaagcaaaaataggattcttctaggcagaaactgttactgttgttctcacgcttccgcaagcattttgtaacccatttgattttttaaaagaaagagaaaactaaaatgaagaaaccgttattggaaagttcaaggtatcatctctttcttctgtgcacctctgtgtagctgtgatgtttg

SEQ ID NO: 326552 - DNA, 201 bp, Homo sapiens
aaacctttagaaaataggcaatattcataatacgttgaaacgtagagcttttctgcacatattccattaagatcacatacaactgacaggtctaatattgwtaagttattttctatatatatatatatagatatatatgtatatatctatctttgtgtatttttgatagacttggaaacattttatcattacacagtagga

SEQ ID NO: 326553 - DNA, 201 bp, Homo sapiens
taaacattttttaaaattgacctttgtgaagaagcattattctaaaactgaaccaccaacagattgttaaaatttagagtgaaggagaaaaccatgttaaraagggacctaaagtgtattcagtaccttataagtaatcctttgtttttaacatggcatttaaaaaattccccccaaatttatctttactcagtcttgtaa

SEQ ID NO: 326554 - DNA, 201 bp, Homo sapiens
ataggcaatattcataatacgttgaaacgtagagcttttctgcacatattccattaagatcacatacaactgacaggtctaatattgataagttattttcwatatatatatatatagatatatatgtatatatctatctttgtgtatttttgatagacttggaaacattttatcattacacagtaggaaatgacaggaaaa

SEQ ID NO: 326555 - DNA, 201 bp, Homo sapiens
ggcaatattcataatacgttgaaacgtagagcttttctgcacatattccattaagatcacatacaactgacaggtctaatattgataagttattttctatrtatatatatatagatatatatgtatatatctatctttgtgtatttttgatagacttggaaacattttatcattacacagtaggaaatgacaggaaaattg

SEQ ID NO: 326556 - DNA, 201 bp, Homo sapiens
gttagagttagcagacaagaacattaaaacaagtttttaaaaaattatttttattatttttttagagacaaggtcttgctctattgcccaggctggattgyagtggcgtagtcatagctaactacatcctcaaactcctgggctcaagtgatcctcctgcctcctgagtagctgggaccacaggcatgcaccactacacca

SEQ ID NO: 326557 - DNA, 201 bp, Homo sapiens
caggtcctgaagtacagtgccctctgagtgatgagaaaccaacaagcgagtaccatgattgcctcagcttactgcctggcgagagtttctagggtttaaasagaagagatcaattaaaacttggcaaactcctgagttgggaagatggggccgagtgtctgggtaggctaaggcagctggagtctgcaggacatagtacca

SEQ ID NO: 326558 - DNA, 201 bp, Homo sapiens
gcattctgtttgtagcttctttttcaaacttttgaggtccttttgaattctgataagctattcctttgtggctggtgactccctctggcctcttcctccascctctgcccccccgcccttcctcaatgcttcctcctcgtctggtctcatatgcagacttaataacagtgataattattctaccctccaggtcattaatga

SEQ ID NO: 326559 - DNA, 201 bp, Homo sapiens
tttctataagaacccatttatatagattcttatgctttaaaatatatatgtatacatgtgtagacctataaatatatatgtacatctatctgtgcatatayataattgctagaaataatgtagcagcttggtaacacagaagaccttccttcacttttttaaagaatggaagtctgttggggatcttgccattctacattt

SEQ ID NO: 326560 - DNA, 201 bp, Homo sapiens
ggtcctcaagacatgggacttcaggtcctgaagtacagtgccctctgagtgatgagaaaccaacaagcgagtaccatgattgcctcagcttactgcctggmgagagtttctagggtttaaacagaagagatcaattaaaacttggcaaactcctgagttgggaagatggggccgagtgtctgggtaggctaaggcagctgg

SEQ ID NO: 326561 - DNA, 201 bp, Homo sapiens
cagccctgcagtagtaaacgtccagtgtgtggcagtggggcatatgtttgtcatatccattaggggagcacttggggcccagaggactgatgaattggccyacattgtcttactacacagctgtcatagcttctctgatagcaggtgatagttctgcaagagcgtgtcaaattggagcttatctcttatgacatctgttga

SEQ ID NO: 326562 - DNA, 201 bp, Homo sapiens
cactcgttggaactgttagtaagatcaagttctgaataaccatgaaagacgttttgtgttttatttcataaacttatatctaaaagggtgatgattaagayatgaggtgagctctaaccaaatccatattagagaaagcaaaatccttaaaaaaaaaaaaaaagctattcaaagttctttaaccattcacaaataaaatta

SEQ ID NO: 326563 - DNA, 201 bp, Homo sapiens
agtagtcacattgtactagccacaatgtatagtgaattctgtaaaaacttgcagcattttaattagtccttttaaaaaatatatcaggctttccatttcatttttttttgaagaatttgttctattttattttatttacaccatcatttcctttgcaggttcagatgattccggttaccctggtaaccttcattcttcaag

SEQ ID NO: 326564 - DNA, 201 bp, Homo sapiens
catgtgatattttttcatagccctgctttaattatttatttttgattataagttatgtaatgggttacaaattacggaaatatgatagctcgacctgttartaagccgttaattcactctccaccaatataactttaaaccatgggcaataatatagtcatgcaccacttgatgacagggatacctttggagaaatgtgtt

SEQ ID NO: 326565 - DNA, 201 bp, Homo sapiens
aattccagcactttggaaggctgaggcagatggatcacctgaggtcatgaattggagaccagcctagccaacatggtgaaaccccatctctagtaaaaatrcaaaaattagctgggcatggtagtgggcgcctgtaatcccagctacttgggaggctgaggcaagagaatcgcttgaacccgggaggcggaggttgcagtg

SEQ ID NO: 326566 - DNA, 201 bp, Homo sapiens
aatagtagattaaccttagcttactgtaactactttataaaatttttaaactttttgactctcttttgatatcacttagcttaaaacacaagcacactgtrcagctatacaaaaacattttttctttatatccttattttataagcgtttttctatttaaattatattaactttttagaatttttgattaaaaactaagtt

SEQ ID NO: 326567 - DNA, 201 bp, Homo sapiens
tctaatattagaaggaacacacgccatcagaaagtggtaatgtctgtaacatctatccaaatactttatttcttacttgttaccaaaaacaaataaaccaraaaagtgctcctcttactagatgagttgataagaatggattagtaagtaaaatccaaattactcagtaatattattatttttctattgcatttgattcat

SEQ ID NO: 326568 - DNA, 201 bp, Homo sapiens
gccatcagaaagtggtaatgtctgtaacatctatccaaatactttatttcttacttgttaccaaaaacaaataaaccaaaaaagtgctcctcttactagaygagttgataagaatggattagtaagtaaaatccaaattactcagtaatattattatttttctattgcatttgattcatgtaaatctcaaagtgaattctg

SEQ ID NO: 326569 - DNA, 201 bp, Homo sapiens
tacttcaggtacattctagatgttatacattttgtggtgtgggttgagataataacccctttttaagtagttacaacaacagcattttttctgagttcctrtcagctcacttacaagtcacattttggaccacagtccatcctgtcatggtagttacacagagatgaacagtcatcagacatctagtttcaagttagtcag

SEQ ID NO: 326570 - DNA, 201 bp, Homo sapiens
cgttgtgcacatgtatcctagaacttaaagtataataatagttatatatatatatacacacacacacatatatatatacacatatatatatacacacacayatatatacacatatatatacacacacatatatacacacacatgtatatacacatatatatacacacatatatatacacatatatatacacatatatatac

SEQ ID NO: 326571 - DNA, 201 bp, Homo sapiens
cttaagagctagtaaaaatgtagctactaacttgctctgtgaccttaaacaaatcattcaatgtctggacctcagtttcctcctctgtcaaaaggttgcarttggatgacatgattttgtagttccctttgagctcaaaaattccacactctaaaagaaagaaatgtaaactgactcatcattattccctgggctcaaatg

SEQ ID NO: 326572 - DNA, 201 bp, Homo sapiens
tcaatccatgaacatagaatatctttccattttttgtgtcctcttcagtttcttgcatcagcattttatagttttcattgtagagatttttcatttctttsgttaattcctacatattttatttgtaactgttgtaaataaggttactttcttgatttctttttcagattatttgctattggcatatagaagtgctactaa

SEQ ID NO: 326573 - DNA, 201 bp, Homo sapiens
ctttgatctgttttgttctcatcacaaagcccagtcccaacacatttgctgccgtctctggatgtggactgtctccagtctcagtgctcacatgtctcccrccattcagcacccacatgtgctgagtttcttcctgttctcatggcagcactctcacatctcctgtctgtgatgatgataatgacccttttatatgaaata

SEQ ID NO: 326574 - DNA, 201 bp, Homo sapiens
ttaaagtataataatagttatatatatatatacacacacacacatatatatatacacatatatatatacacacacatatatatacacatatatatacacayacatatatacacacacatgtatatacacatatatatacacacatatatatacacatatatatacacatatatatacacatatatacacacacatatatac

SEQ ID NO: 326575 - DNA, 201 bp, Homo sapiens
atggactcagctacacatatttgttcaaatatgttcaaactgttataattctataacagttcccaatcattacagcttgcttcaggtccagatttatctcracccctatcactctacatatttctgagcttaaagagtaagttttaaataaacaatcatagtgcagtagttgtaagtgaaagaaataatttgacttgcttc

SEQ ID NO: 326576 - DNA, 201 bp, Homo sapiens
tagagattgaatctttagattgttttgggtagtatggacattttaacaacattgatactttcaatccatgaacatagaatatctttccattttttgtgtcytcttcagtttcttgcatcagcattttatagttttcattgtagagatttttcatttctttggttaattcctacatattttatttgtaactgttgtaaataa

SEQ ID NO: 326577 - DNA, 201 bp, Homo sapiens
atatatatatacacatatatatatacacacacatatatatacacatatatatacacacacatatatacacacacatgtatatacacatatatatacacacatatatatacacatatatatacacatatatatacacatatatacacacacatatatacacacccatatatatacacatatatatacacatatatatacaca

SEQ ID NO: 326578 - DNA, 201 bp, Homo sapiens
tttttgctcagggtaggtttggctactctgagtcttttgtgttccataaaaattttaggattatttttctatttctatgaagaatataattggtattttgrtagagattgaatctttagattgttttgggtagtatggacattttaacaacattgatactttcaatccatgaacatagaatatctttccattttttgtgtc

SEQ ID NO: 326579 - DNA, 201 bp, Homo sapiens
tatatatatacacatatatatatacacacacatatatatacacatatatatacacacacatatatacacacacatgtatatacacatatatatacacacatatatatacacatatatatacacatatatatacacatatatacacacacatatatacacacccatatatatacacatatatatacacatatatatacacat

SEQ ID NO: 326580 - DNA, 201 bp, Homo sapiens
ggacacaaacaaatggaaaaacattccatcctcatggataggaagaatcaatatcatgaaaatggccatattacctcaagtaatttatagattcagtgctwtccccatgaaactaccattgaccttcttcacagaattagaaaaagctactttaaatttcatatggaacaaaaaaagagcccatatagccaagataatact

SEQ ID NO: 326581 - DNA, 201 bp, Homo sapiens
atattacctcaagtaatttatagattcagtgctttccccatgaaactaccattgaccttcttcacagaattagaaaaagctactttaaatttcatatggarcaaaaaaagagcccatatagccaagataatactaagcaaaaagaacaaagccagaggcatcatgctacctgacttcaaactatactacaaggctagagta

SEQ ID NO: 326582 - DNA, 201 bp, Homo sapiens
aaccataaaaaccctagaagaaaacctaggcaatcctgttcaggacataggcatgggcaaagacttcatgactaaaatatcaaaagcaatggcaacaaaarccataattgacaaatgggatttatttaaactaaagagcttctgaacagcaaaagaaactatcgtcagagtaaacagtcaacctacagaatgggagaaaat

SEQ ID NO: 326583 - DNA, 201 bp, Homo sapiens
tttgaggatctccatgcagaggtaaccatcctcatcagatgaaaaatatcttggttggcgggggtggtgggggtgggcacagcttagcaacttgtagttgkttttttttgtttgttttctttgttttgtttttctgtttcggggaattgaaatttttttcctgtcagaacaaacacagctgtgtcttatgtttcagaaatt

SEQ ID NO: 326584 - DNA, 201 bp, Homo sapiens
atttcatcatcttatatgtatgaaaatcattagtatgactatttttgttagagaacaaaaggaaattataaagtcagaccaaggacagcaatgagatctaraaagagaatatgctcatctgaaacaatgaataatgtgatgcaattacactcatttcaagtaatttattttctgatttaggatacactagcatggctaatt

SEQ ID NO: 326585 - DNA, 201 bp, Homo sapiens
atattcataatacgttgaaacgtagagcttttctgcacatattccattaagatcacatacaactgacaggtctaatattgataagttattttctatatatmtatatatagatatatatgtatatatctatctttgtgtatttttgatagacttggaaacattttatcattacacagtaggaaatgacaggaaaattgatgt

SEQ ID NO: 326586 - DNA, 201 bp, Homo sapiens
ctatcttctaatgtgtcaatgaatagcctcacagattccagtggcaggttttctagaccttcctggtttgagacagaaaagaataacttcggccagacgcrgtggttcacgcctgtaatcccaacactttgggaggccgaggcgcgcggattgcctgaggtcaggaattcaagaccagcctggccaacatggtgataccct

SEQ ID NO: 326587 - DNA, 201 bp, Homo sapiens
aatacgttgaaacgtagagcttttctgcacatattccattaagatcacatacaactgacaggtctaatattgataagttattttctatatatatatatatagatatatatgtatatatctatctttgtgtatttttgatagacttggaaacattttatcattacacagtaggaaatgacaggaaaattgatgtgatctcca

SEQ ID NO: 326588 - DNA, 201 bp, Homo sapiens
gaccttcctggtttgagacagaaaagaataacttcggccagacgcggtggttcacgcctgtaatcccaacactttgggaggccgaggcgcgcggattgccwgaggtcaggaattcaagaccagcctggccaacatggtgataccctgtctcgactaaaaatacaaaagtaagcctggcgtgggggcgtgcgtctgtaatcc

SEQ ID NO: 326589 - DNA, 201 bp, Homo sapiens
tattctgtaaacaaattagtgtgcccagaaaactcagaggtgaattagttcatggcccaaatcttacaacccatctgtttaggttctacagtttacgatgrtattgtctattgctcctctgtaattaattttaattttatattattttgagtgaagtttcatttacccagttccttaccaaaccaggacaaagccaaatct

SEQ ID NO: 326590 - DNA, 201 bp, Homo sapiens
atcatctccaaatgtagacactgatgtacgtaaagttctcagggaatatgagtagtatataaaatgtgaaacttactctgagaaaaggagactagttgagaaaaaaaaaaaaactcttattttacctaaggacctcttattttgtttacttcagaatttaatatttgccttttttccattccacatatttgctttggatag

SEQ ID NO: 326591 - DNA, 201 bp, Homo sapiens
atacgttgaaacgtagagcttttctgcacatattccattaagatcacatacaactgacaggtctaatattgataagttattttctatatatatatatatagatatatatgtatatatctatctttgtgtatttttgatagacttggaaacattttatcattacacagtaggaaatgacaggaaaattgatgtgatctccag

SEQ ID NO: 326592 - DNA, 201 bp, Homo sapiens
cacagggccttgtaaagtcttgaatatcgccagagctagccaggagaggagtatgtcaggttgcaaccaagagctaatatttaaatactgtattcaaatgrcatgtacgatttggcgactttttttctttataggacactggctgaaggaaagctttgccatcaaaggagataacctcttgacaactggccttgcaaactt

SEQ ID NO: 326593 - DNA, 201 bp, Homo sapiens
actgaccaaaatggcaaaaccccgtctctactgaaaatacaacaattagccgggcatggtggcgcatgcctgtaatcccagctactcaggagactgaggckggagaatcgcttgaacctgggaggtggagattacagtgagtcaagattgtgccactgcacttcagcctgagcaacagaggtatactccgtctcaaaaaac

SEQ ID NO: 326594 - DNA, 201 bp, Homo sapiens
gggagaatcgcttgaacctgggaggtggagattacagtgagtcaagattgtgccactgcacttcagcctgagcaacagaggtatactccgtctcaaaaaamaaaacaaaacaaaacagattatagatatgcatttaggagttgttaacaaaatagcaatggtttcgtggaagaagacagaatcattgaagcaatgagggga

SEQ ID NO: 326595 - DNA, 201 bp, Homo sapiens
ctaaatcaatgtaaagagcttggaatttattttaatgatgggaattcaatgaagtgttttaagcaggggatttacattatcagatttttgttgtgaaaagrtaattctgacttcagctttgagcaagtaggatagggaccaatttattctcctgtgtgaaacaagccataaaacagataaaatacatgcaacagtggtcct

SEQ ID NO: 326596 - DNA, 201 bp, Homo sapiens
ggtaaacttcctaagaaagtgagaagattgaaaacaattcaagaaatagttaatggccttcaaaagtagggccagcccttctactttaccaaaagaaaatrtgtggtttgtttacagatctagatagacttgtactttggtagacagatgatgagggaattcttgtctgaatctttgcattttctctttatataagagatg

SEQ ID NO: 326597 - DNA, 201 bp, Homo sapiens
ggagaaaaaagaaggccatgaaccccgcaaaagaatcttccctgagagaaaggagatgctgggggaggtactagatggcaaaaatcagccagagaagatcwtaatgtagctggattgcatgaacttcaaaaaagaaggggtttgttactacaaaagcaagagagtggaagaaaaatacctgcaggaagcgatgggaagcca

SEQ ID NO: 326598 - DNA, 201 bp, Homo sapiens
gaaaaaagaaggccatgaaccccgcaaaagaatcttccctgagagaaaggagatgctgggggaggtactagatggcaaaaatcagccagagaagatcatawtgtagctggattgcatgaacttcaaaaaagaaggggtttgttactacaaaagcaagagagtggaagaaaaatacctgcaggaagcgatgggaagccagga

SEQ ID NO: 326599 - DNA, 201 bp, Homo sapiens
cttgtcctgcttctggcaccaaatagttggatgattttaaattctcagggtcttcgtttctttacctgtaaaaacgaggtaatttcaacaaaagattagcytgcttctgatgttctttgacttaaaatttccaaatggtaaaccagtccagaagtttactagatgctgcagcattaggacactcttttgttgccaatctgc

SEQ ID NO: 326600 - DNA, 201 bp, Homo sapiens
ctccagtacatcttgtaaccattgtggaggggaacaaatgaaagtaggctatggcctcactttatgcttactcatccagtttttgatccctacagagagtttttttttttttttttttctaccatggataataaaagcactgtagtaattttatctatagcttgatactgccaggtttgacaaagcagtgttcctctctta

SEQ ID NO: 326601 - DNA, 201 bp, Homo sapiens
ctcccgttggagtgctagcctggctgtgccgtggctgtagcatgagctttttagtgtcgatatgcttgggaggcccatcagctacaatttcctcatctcakgctccagccagctgcagcagatgctattgttacctcttctattcgataaagtaggaagcaaagagagaaagaaatttgtcaatattgtttttctgctgga

SEQ ID NO: 326602 - DNA, 201 bp, Homo sapiens
aatttaggaatggctatcaagtgatgttaataactggttatctttttcttgaacacaaatgctcttggttaccattttatattgtgtaatagacatgtatrtatttacattttgctagcaaggatgttcctagttttgtatgagtgaattaaatcaatatctcatgctctttctacaagagtaacatggcttaggaggact

SEQ ID NO: 326603 - DNA, 201 bp, Homo sapiens
gtaaaaatttaggaatggctatcaagtgatgttaataactggttatctttttcttgaacacaaatgctcttggttaccattttatattgtgtaatagacakgtatatatttacattttgctagcaaggatgttcctagttttgtatgagtgaattaaatcaatatctcatgctctttctacaagagtaacatggcttagga

SEQ ID NO: 326604 - DNA, 201 bp, Homo sapiens
tttctcatagaatacaaactgacactaaaatgaaggaacaaaaaaacaagtaattgtcaatgtaaaaatttaggaatggctatcaagtgatgttaataacwggttatctttttcttgaacacaaatgctcttggttaccattttatattgtgtaatagacatgtatatatttacattttgctagcaaggatgttcctagtt

SEQ ID NO: 326605 - DNA, 201 bp, Homo sapiens
attttcagatttgttggcagggtcatgtttctgatccagtcataattgtcataataaatgtcataattgtccaatgattaattttaggacttctctctctmtctctcctctacagtaacccccttcttccttccctctctacctgtgctgatggcttccattaacatctacatgctgttgactcccacattattctttcta

SEQ ID NO: 326606 - DNA, 201 bp, Homo sapiens
ctacatgctgttgactcccacattattctttctaaaccaaacttctcttctgagtcccagactgtatatccattgataattccacttagatgtcactgagycatcacaaactcagaaaatccaggataaaatttctgatctttgatataaaaccttgggcttccttagtgttctccagcttagtgaatgtaaccaccagct

SEQ ID NO: 326607 - DNA, 201 bp, Homo sapiens
ctgctcttaagattgaatattttctgttgatctctttttagaatcactgactcttccttcttacacgtcttattatatattaagtccatgtagtaaatttmtcatctttgttattgtaccattaaacacaaaaatttccatctagttgtttttaatagttgctttatctgtattccccatttgttgattcaatgctgtgta

SEQ ID NO: 326608 - DNA, 201 bp, Homo sapiens
atgtatgaaaatcattagtatgactatttttgttagagaacaaaaggaaattataaagtcagaccaaggacagcaatgagatctagaaagagaatatgctsatctgaaacaatgaataatgtgatgcaattacactcatttcaagtaatttattttctgatttaggatacactagcatggctaattaattgggagtagcca

SEQ ID NO: 326609 - DNA, 201 bp, Homo sapiens
ctgtgctaatggtctacgaacatttactggttgcttagtttgtatgtagacattgtgccaaatgtttgcaattcattattttggacagtggataaaaatayggccaatgataaagtattaagttatagctttagcagtggtctaggtaattggacattctgacacattgctgctatgaatatatgaattattttaaaagta

SEQ ID NO: 326610 - DNA, 201 bp, Homo sapiens
gttattgtaccattaaacacaaaaatttccatctagttgtttttaatagttgctttatctgtattccccatttgttgattcaatgctgtgtatttttcttytttatatatatatatatatattttttttttttttttttgagacggagtctcactctgttaccttggctggagtgcagtagcacgatctcagctcactgca

SEQ ID NO: 326611 - DNA, 201 bp, Homo sapiens
gaataatgtgatgcaattacactcatttcaagtaatttattttctgatttaggatacactagcatggctaattaattgggagtagccagagaaagaagggraacagctaagtgctggcaatcaggagacctacgttccagcctctgctctgtcactactttactgctgagagcttggataagttacttaaacttcatggag

SEQ ID NO: 326612 - DNA, 201 bp, Homo sapiens
tattgtaccattaaacacaaaaatttccatctagttgtttttaatagttgctttatctgtattccccatttgttgattcaatgctgtgtatttttcttctwtatatatatatatatatattttttttttttttttttgagacggagtctcactctgttaccttggctggagtgcagtagcacgatctcagctcactgcaac

SEQ ID NO: 326613 - DNA, 201 bp, Homo sapiens
tcatggagcattttgcatttgtttttcatctgtgaaatggagataagaagtgttgccctacttatcgcatgctgctgttgtgaggcaatagatgtaaacamatgtgcaaaattaacagtgctctacaaatgtatcatttttaccattatcattaatatttatgactagtcattcatattgatggaaatagttcactgtcat

SEQ ID NO: 326614 - DNA, 201 bp, Homo sapiens
aaaaatttccatctagttgtttttaatagttgctttatctgtattccccatttgttgattcaatgctgtgtatttttcttctttatatatatatatatatwttttttttttttttttttgagacggagtctcactctgttaccttggctggagtgcagtagcacgatctcagctcactgcaacctccgcctcccaggttca

SEQ ID NO: 326615 - DNA, 201 bp, Homo sapiens
gccatatgctttaaatgcttagcccaatgtccagtgcctaggaagtaatcagttaagcttcatattattttttagtcatttacaaaatatttattcggtawctaccatgaaccgaacaaaatagaaatgcagtttgtgtgtgtatatcttccaggaatgaagcatggcctgacaacgcctctgtattatatggaaatgtat

SEQ ID NO: 326616 - DNA, 201 bp, Homo sapiens
gcagaagtgagcgccagtctctctgctcaggtctaccccagccttcaggagatacatggtaagaaacttcttttctccatagtggagggggagtaaaacarataagatgccatattcctgagctctctggaagctctccttgaaattcaccccgctaccctctagtaacagtaccagagtggggctgtgtgcatccaacca

SEQ ID NO: 326617 - DNA, 201 bp, Homo sapiens
gagtctcactctgttaccttggctggagtgcagtagcacgatctcagctcactgcaacctccgcctcccaggttcacatcattctcctgcctcagcctccygagtagctgggattacaggtgaccaccaccatgcctagctaatttctccgtttctttaaatactattttattccttgaacatgtttataatgatagctat

SEQ ID NO: 326618 - DNA, 201 bp, Homo sapiens
attcaccccgctaccctctagtaacagtaccagagtggggctgtgtgcatccaaccaaggaataagaggccactgtctgcctacatgcatccctaatcttytgagtgctgattttgaaacctcatcactttggggcaaggagtacctccctcccctttcccatagagaggagagagaattgagtcttctctctctccgctg

SEQ ID NO: 326619 - DNA, 201 bp, Homo sapiens
acatttgttattttagaaaaatatctacagaccacagtaatatacgattatgtgttttgcaaataatatttaacatgaccaactaaatgtaatgtgtagctttttttttttttttttaagagtctccctctgctacccaggctggagtgcagtggtgtgatctcagctcactgcaacttttgcctcccgggttcaagcgat

SEQ ID NO: 326620 - DNA, 201 bp, Homo sapiens
aggttcttgttctagtatgtttaatgatttgctcaaatgttgacacttttctacagcaggggaaaaaaatcttcaatttaaattgttggatttttcaaccwgggcctttagtataaaaatatggacaaaatagcatattcttttacaatacaaagctgtaaatgctgatagttttaaatataaagtgattttcattcagaa

SEQ ID NO: 326621 - DNA, 201 bp, Homo sapiens
tccagtacatcttgtaaccattgtggaggggaacaaatgaaagtaggctatggcctcactttatgcttactcatccagtttttgatccctacagagagtttttttttttttttttttctaccatggataataaaagcactgtagtaattttatctatagcttgatactgccaggtttgacaaagcagtgttcctctcttaa

SEQ ID NO: 326622 - DNA, 201 bp, Homo sapiens
ccagtacatcttgtaaccattgtggaggggaacaaatgaaagtaggctatggcctcactttatgcttactcatccagtttttgatccctacagagagtttttttttttttttttttctaccatggataataaaagcactgtagtaattttatctatagcttgatactgccaggtttgacaaagcagtgttcctctcttaaa

SEQ ID NO: 326623 - DNA, 201 bp, Homo sapiens
tatgtcaatatgtgcatagtatatgataatacagtaatagactcataaataactgaatagagattatgcatatgggatatctgtgtgtgtatgtgcaattstgtagaaaaaggctgactggaacactctatctgaatcccttatttttcaagtaagaaaattaagattcagagaatttaatagatttatccagaattgttg

SEQ ID NO: 326624 - DNA, 201 bp, Homo sapiens
agcagtgttcctctcttaaatgtatttgatcaagtaatttttcagaaaggcctataattcaaattgttggaaccatatcattgaatagaatggtggcctarggggatttccacacgtatacctcatatctaggcccataagaaattgaaagaggctttccaaacagcattactctcaaaattatcttctgagttcatttat

SEQ ID NO: 326625 - DNA, 201 bp, Homo sapiens
tttttttaattagcatatgaaaagaatcaagaaaaaagaaataatacattcatctgccttgatgtaagcagatacataaaaattatatgtataaatacacagagttagaacaatttagagtatcagagcttaaacattatatttccttatgatattgtgtaatcattaagtaaattacattatagttgaaaaaatctctaa

SEQ ID NO: 326626 - DNA, 201 bp, Homo sapiens
ctgggcctttagtataaaaatatggacaaaatagcatattcttttacaatacaaagctgtaaatgctgatagttttaaatataaagtgattttcattcagaaaaaaaaaaaacagttatgaaacgcctaaatgtgcagtaataattacggggaaataattgttcagttctttagttaacacactttatttcattggaacac

SEQ ID NO: 326627 - DNA, 201 bp, Homo sapiens
ttttttaattagcatatgaaaagaatcaagaaaaaagaaataatacattcatctgccttgatgtaagcagatacataaaaattatatgtataaatacacagagttagaacaatttagagtatcagagcttaaacattatatttccttatgatattgtgtaatcattaagtaaattacattatagttgaaaaaatctctaac

SEQ ID NO: 326628 - DNA, 201 bp, Homo sapiens
ttcacaaacataataacaagtctaaggagtagcaatgacactgttacagtaaagtatttctttggatattgaatttttaaaagaactgcttaaattcaagyttcttccttcttgcaaagggactgtgacttttgttactatgtgtcatgcaggggcatttctgtgaagagaaataaaagtggggtgaagggaaataataga

SEQ ID NO: 326629 - DNA, 201 bp, Homo sapiens
aaaacttttgtaaataactaggaaaatattttacaaatcagtgtattcagttagaatagaaagaattttaaatttttaataaagaataaagactactatcttttttttttttgagacggaatcttgctctgtcgcccaggctggagtgcagtggtgtgatctcggctcactgcaagctctgcctcccaggttcacaccatt

SEQ ID NO: 326630 - DNA, 201 bp, Homo sapiens
gaaatgtgaaaatatttttataacctaatagctgagatctggacaggggtatcactgagttttcccagctgtacctgcaatgtattttgaaatgttcccakactgaaagaacactgaaacttattgcatgaactagactgcatttaaaaaataataatgttggctgcctttgaacagtgtgtattttgatttcatgtaatc

SEQ ID NO: 326631 - DNA, 201 bp, Homo sapiens
gttatccttgttaccattggccaactaacatttagcctttctttttcctttttttgctgcattaaaatggagcagtaaacccgacaggtgaggaatagagracaaacccctttaatgttcagtaagaaaaaaataaactggtagacttcagagttgttgaagaggggagggcggggctgcacacaaaagataatacctggc

SEQ ID NO: 326632 - DNA, 201 bp, Homo sapiens
ggcagcctgtatagcatggatacactggacaaagggattgattcacaccctgggctggatggaaagggagggcttgagatttcaccacacttttcagaaargtatgtcattgaaaacttatttctggaattttccatttaatattttcagaccgtggttaaccgcaaataactgagattgcagaaagtcaaaaccacagat

SEQ ID NO: 326633 - DNA, 201 bp, Homo sapiens
aatgattaatccaaactaaccctctagctttctaactcatatctatatattcatatacacttatgtataaatatacacatgtaacatatatataaattccygattaaaattaaactacaaaaaacatcttgaagatcacctacctttctcccaatgccatattccagtggtttccattgagtggcctctggaccagcagcc

SEQ ID NO: 326634 - DNA, 201 bp, Homo sapiens
gaggcgggcggatcacaaggtcaggagatcgagaccatcctgactaacacggcgaaaccccatctctactaaaaaatacaaaaaattagccaggcatggtrgcgggcgcctgtaatcccagctactcgggaggctgaggcaggagaatggcatgaacccgggaggcagagcttgcagtgagccgagatcgcaccactgcac

SEQ ID NO: 326635 - DNA, 201 bp, Homo sapiens
gcggatcacaaggtcaggagatcgagaccatcctgactaacacggcgaaaccccatctctactaaaaaatacaaaaaattagccaggcatggtggcgggcrcctgtaatcccagctactcgggaggctgaggcaggagaatggcatgaacccgggaggcagagcttgcagtgagccgagatcgcaccactgcactccagcc

SEQ ID NO: 326636 - DNA, 201 bp, Homo sapiens
ttaatactctttgctttttcaaataacatcagaaattctaatctgtgaattgtatttgtaaagtgatttccaatgacacattctattcttaagaacatcarctatatagaattcaaagatgtgaagaaataaaaaaagaacatcacctataaatctgtccatctctttcttattattcaccttatctgatgtaggagataa

SEQ ID NO: 326637 - DNA, 201 bp, Homo sapiens
gacacattgctgctatgaatatatgaattattttaaaagtataatttgttaaatatatcaaaagccttaaaaatatacttttttgaattcagtaattttayatgtaggagtaattcacatataggaattacatatatgtgcaaagatatgattacaaaaaagttttgaagtctttttctgattgaaatagcagaaacaacc

SEQ ID NO: 326638 - DNA, 201 bp, Homo sapiens
ctgctatgaatatatgaattattttaaaagtataatttgttaaatatatcaaaagccttaaaaatatacttttttgaattcagtaattttacatgtaggartaattcacatataggaattacatatatgtgcaaagatatgattacaaaaaagttttgaagtctttttctgattgaaatagcagaaacaacctaaatgttt

SEQ ID NO: 326639 - DNA, 201 bp, Homo sapiens
aaaaatatacttttttgaattcagtaattttacatgtaggagtaattcacatataggaattacatatatgtgcaaagatatgattacaaaaaagttttgargtctttttctgattgaaatagcagaaacaacctaaatgtttaacaataaatttaaatgtaatctttactctttataatataaacatgatgaatttatttg

SEQ ID NO: 326640 - DNA, 201 bp, Homo sapiens
tgctcattctggaggagaaatataggcaataagatatatagaaagctacacagattatgggcacacaatagcatgcccataatttaagacatgagaaggayagctttaattttaggggctaccaatacccccaaactgcctgaaattgtgaaactcacctcccttttacctgagtttctaatctccttcatgacctaattt

SEQ ID NO: 326641 - DNA, 201 bp, Homo sapiens
cacgtggatcatttactttctccctgctttactgacaaatgccaaaaatgtgccagctctcatgatgggctttatctaagtgaactggatgaagatcattsatttatctcacacaagctactagagaaactaattaattggagattcaaatatctgacctgtatggttaatgaagaagacattgaaataatactctgacca

SEQ ID NO: 326642 - DNA, 201 bp, Homo sapiens
tgttgtattagcaggcatgaaaacagtgttaatctccttacatatttccatcagagctcttgggtaactaggtgcttgtcaatgagcagcaatgtttttamagaaatttttcttttctaagcagtaggtctcaacaatgggcttaaaatattcacggtaagtcatgctgctaaacagatgtgctctcatccaggctttgtt

SEQ ID NO: 326643 - DNA, 201 bp, Homo sapiens
cttcaacacacagtatttcattagttactctggctacaggagcacattggattggaaagtccttagaaaatagtttaggaggccacttaaatctgtccctstaacagtcaacctgggtcacccttggcacatgccatgttcaccctcattagtgcccagaagagttttatggcctcttcatacttgaaggttcactgttta

SEQ ID NO: 326644 - DNA, 201 bp, Homo sapiens
gtcatatcatttcaagactctcttatctgtcatcttccaaaatgagctgtgttttaatttatatctaaaaactttccatgcctttcttttttgtttcttaraactttacctttgattattaaactttatccatgcattacataaatgttattttcaccctttaacacagtagatttttttttaattgatagatttttggtc

SEQ ID NO: 326645 - DNA, 201 bp, Homo sapiens
aactataggatcatattgtcagtgaagagaaataatttgacttattcttttcctatttggatgccttttatttctttatcttgcctaattgctctggctasaacttctgatgctatgttagatagagatgatgagaatgggcatccttgttttcttccagttctcaaggggaatgcttccagtttttgcccatttggtata

SEQ ID NO: 326646 - DNA, 201 bp, Homo sapiens
aatgaatctacacttcattactctgaggccgtagataaacctacatcatctatggttctgtttttagaatatagatacaggtagcagattgctgggaaatygtaaaagaattatttttatcctgtctgatagtttttcttaaagtagaagctagaaaggggccttccagatttggaattactttttatcaggagggcatta

SEQ ID NO: 326647 - DNA, 201 bp, Homo sapiens
tattccattctcacccagagtaaaataagtgttccacagtatcaacagagtaaaagttcatgttactgaccaggaaagcctggtgaacacagaaatgcaaycaactgtagcttgggtgaggtgtaggactgacatctaaccagagtcaccagggtatagctatggccattctttcttatgctatgcaccccaaaagggatt

SEQ ID NO: 326648 - DNA, 201 bp, Homo sapiens
gcctttcttttttgtttcttagaactttacctttgattattaaactttatccatgcattacataaatgttattttcaccctttaacacagtagattttttyttaattgatagatttttggtcataagtgtagcactattgagatttttctcacatgtctgatgatgtctgtattcaggttgaaaatttgatcatagtttgt

SEQ ID NO: 326649 - DNA, 201 bp, Homo sapiens
gacaggtagaaggcaggaatggtttaggcttcttctttaaagcgtttgtctgtaagataaatattagaagatcttcagatttcttttctcaatgagcaaaygatacagaacctctatttgcttgctcaggttttattggcaattagaaaagcaaagatcaaacaaaggaaaaaaatcctagagaattagtaattaccaagc

SEQ ID NO: 326650 - DNA, 201 bp, Homo sapiens
agcctggaagtttgagaccacgatgagctattgatcacactgctgcactcgaggctagtctacacagtgagactctgtctcaaaagaaaacaaaaaaaaamgaaaagaaagaaagaagaatcagagcacttctgttgataataatcaacagagcacttctcttttctccttaagcatatgccaccccttcttacttacttt

SEQ ID NO: 326651 - DNA, 201 bp, Homo sapiens
tgtgctcagcttcagtggctaagctgagttagagtggtctaaaatgtcattctggtaaagcccccagaacattatcaaagcaggttggcagtgaaagagayagctaaaaagaagtctttctcacccctcagatggagaaagaattagcaggccaaacaaaagaaggagcaaagaagtctcaagagtgggctctcctttctt

SEQ ID NO: 326652 - DNA, 201 bp, Homo sapiens
tcctccaaattctgtcccatcataccagtgttagtaataattgaacaatatttgtcatcagtgggggaaaaattaagctgtttcctgaggtttgaaaaaarttgcattgagatcttattcgtgccaagtcttatggattagatactcaattaaagtagttgatgtagaaaatataaaatctcactcaacctctgtatttta

SEQ ID NO: 326653 - DNA, 201 bp, Homo sapiens
tttcgcagcttttttgctgttcaaatagaatggtttaagttttcatttgtctaacagagaggaaagaagcatcagcccttggtttttagtttggattcagstatctataggagaccatgtggtgtggctgggacactgggctgggcaccagaaaaactaggatcccatcccagaatcgacactaactagcaatgtaatgtt

SEQ ID NO: 326654 - DNA, 201 bp, Homo sapiens
agggtatgagaaatccatccttaaagaagaaaagaattcacaacttcaaatggatgctgttttctcatgaaggatttgcccagtggctggagagtgcttcyaatattattatataatataatattatgggtgtagatgccagttttgagatgatgtttatcagcactcctgttcttgaacagtgagaaggtatttattggg

SEQ ID NO: 326655 - DNA, 201 bp, Homo sapiens
atcaccaaactttcagttttcttctccttcccctctatccccaactctttgcttccaagtataggagattcctggggctctcagatagttattttaaaagaaaaaaaaaagttcattttctctcagagttgataatgccactgagaggcacacatccttatataaaagagaatatgagtaaaaatggataatgtcctacaa

SEQ ID NO: 326656 - DNA, 201 bp, Homo sapiens
gtaaaaatcaggaaaaacaaaggataggattgctatgcgttatccccaaccaaacagattggtaacaagctatctagtttcctgcgaaaaggcgatttctstattatgccggagtatttctgtatgctctccctggagacagttttcaggcagtttcaccatgaggcggcaggtgtagaatcccctcaggatgcattttga

SEQ ID NO: 326657 - DNA, 201 bp, Homo sapiens
tcaggaaaaacaaaggataggattgctatgcgttatccccaaccaaacagattggtaacaagctatctagtttcctgcgaaaaggcgatttctgtattatkccggagtatttctgtatgctctccctggagacagttttcaggcagtttcaccatgaggcggcaggtgtagaatcccctcaggatgcattttgaacctgtg

SEQ ID NO: 326658 - DNA, 201 bp, Homo sapiens
tttatataaatcatgcaatatgtatttgtcagtgtctggtttcatttgcccaaccttatatttgcaaggtttatccatacagtcgcatgcagttgcagacttttttttttttttttttttgagatggagtctcactcttgttgcccaagctagaatgcagtggggtgatgttggctcactgaaacctctgcctcccaggtt

SEQ ID NO: 326659 - DNA, 201 bp, Homo sapiens
tttattctgttttggagaaatgtcacacgaaattttgaattaagttaagctattattattattattattgctgtaccaaggtaaaatcaatttgtcataawttttgtcttttgcctacacgttggagtctttctcattggtaaagttttcactcttatcatggccttttacatagcagctcccactgctatgatcatgtca

SEQ ID NO: 326660 - DNA, 201 bp, Homo sapiens
aggtgaaattactttttctctgatctttctgtgaacctttcattaacaaaatattaatcacagttagcttaacactgttaagagctaacactgtttttttyccttcacatttgaaagagaaaggggagttctgttttacctggtcccgattatcctaggccttaggataacttggcatcttaaaaatgcacttgtgtttac

SEQ ID NO: 326661 - DNA, 201 bp, Homo sapiens
gagaagcacttgaacccggggggcagaggttgctgtgagctgagatcgcgccactgcagtccagcctggggacagagagagacttcctctcaaaaaaaaawaaagaaaaagaaaaaagaaaaacagggtggtaaaggaaagggccaaggaggatacattttaaaggacacatttgaaacacaatttactttccctaatatc

SEQ ID NO: 326662 - DNA, 201 bp, Homo sapiens
acgtgaatgtccattttttaaacccattgtgtatctaccagcttgcaattactggcatccttggattgggagcaggggagtgcggtcagatttctatgtatttttttttttttctaattgtaaattttgaactatttacaagcaaaaactctccctcccctctttgttttagaaatataaaacaataaagttttttaagag

SEQ ID NO: 326663 - DNA, 201 bp, Homo sapiens
tttggtttgatgactattcctaatatataccccaagtgtagtatttaaaaaaaacagtctgagtaaatttttacagctatgtctcatgagctgtttaaaamaacaacaacaacaacacacacacacatactcagataggctctcttggtttggattaacctggtacagaatattagaacaaaactggtggaaacacaaaat

SEQ ID NO: 326664 - DNA, 201 bp, Homo sapiens
cattgtgaggaaatgggaatgagcgtattttctgtgtgtgaaaatgttgactatatgatacttagccctcttcagtcatttatcttaccagcctagcccaytccatctgtggagactttgccccccacttcatttagaagatcgcaaatgccgttctcggaatagtacagtagaaagatgcccaagctgcatgttgagatg

SEQ ID NO: 326665 - DNA, 201 bp, Homo sapiens
tgataagaatcctcatctagaaagaaagattacgaagattaagtacatttctcaagactcttggttttataagccatgaaaactctgtaattattgagtaygtgtatattatcttatccttcaatctaaattaatgctagagctaatattaagatagaaatgtattttcagagagttgcttgtttttgaaggaatggtgcg

SEQ ID NO: 326666 - DNA, 201 bp, Homo sapiens
ttgtcgatataccaaataataaaaggttattgggtacctgggcagcccaaatttcaccatcggggtttctattgatttacttactgggagtcgttaacacrtcctgttacctcttggtatctgttgtatcagccttaattggggcagttgcactggacctaccagcgctaacattctaccctgtcacattctgtagtaacc

SEQ ID NO: 326667 - DNA, 201 bp, Homo sapiens
taatcccagcactttgggaggacgctgcgggcagatcgcttgagtccaggagtttgagaccagcctaggcaacatggtgaaactgtctctgcaaaactacaaaaaaaaaaaaaattagcctgtcgtggtggcatgcacctgtagtcccagctactcaggaggctgaggtgggaggatcacctgacccccaaggggttgagt

SEQ ID NO: 326668 - DNA, 201 bp, Homo sapiens
gattatatgttagattgagctatgttaaattttactactggaccatttttgaccaataaaatggcaatttcataaaattcgttatattcatagtcctatartataaatatataaatatatagaaagcataatatttagtacataatataatctcagcccatttaacttctccattctccctctgtatgcctacagaggtat

SEQ ID NO: 326669 - DNA, 201 bp, Homo sapiens
aaatgtatgtcttagaatcaatgaaaccctaccatttcctatcccaggccaaacccttagggctttgctgatgtcagtaaaaaaaaataataataataatmataacaataagaagaagaagaataaaagactgaaagaaatggaaacttgctagtttaaaccagtgcaattatcacttgttatgttgccctttcttactct

SEQ ID NO: 326670 - DNA, 201 bp, Homo sapiens
ttagaatcaatgaaaccctaccatttcctatcccaggccaaacccttagggctttgctgatgtcagtaaaaaaaaataataataataatcataacaataakaagaagaagaataaaagactgaaagaaatggaaacttgctagtttaaaccagtgcaattatcacttgttatgttgccctttcttactctccagtcatttg

SEQ ID NO: 326671 - DNA, 201 bp, Homo sapiens
gaatcaatgaaaccctaccatttcctatcccaggccaaacccttagggctttgctgatgtcagtaaaaaaaaataataataataatcataacaataagaakaagaagaataaaagactgaaagaaatggaaacttgctagtttaaaccagtgcaattatcacttgttatgttgccctttcttactctccagtcatttgctg

SEQ ID NO: 326672 - DNA, 201 bp, Homo sapiens
aataaggcagttttagggagaaataaacttgtgtgatatattttatatgtttttcttcatcattttattattgcaatatagttcacatataaaatttaccytttttttttttttttttttttttttttggagacagggtctctctctttcacccaggctgaagtgcagtggcaccatcagggttcacggcagcctctgcct

SEQ ID NO: 326673 - DNA, 201 bp, Homo sapiens
gagggatcttgactggtctctcagggtgctggaattaaaataaagattattgaagtttcatttacagaacaaatgattagcattacgttttaaggagcatrtaactaatggttcttcccctgctaaggtattacttttcatcacttctttttgtgatcttctgaagatctaaatgcactctaaggtaaagaatggtcttct

SEQ ID NO: 326674 - DNA, 201 bp, Homo sapiens
tgagaaagaacatggttgtctatattttgcatctgtagtgataaccaactttggtagatttctttaagataagctatagtttttgcacagattattttcawtatttactcaaattgtttatttttcttcaatgcaatctttacattgagaccttgagtccattgtttttatctacattgtatacctaaagagaaaaccatg

SEQ ID NO: 326675 - DNA, 201 bp, Homo sapiens
tggtttaagggtaaaggtaaaacatacagattgtgttgctaattcaagaaaaattgccctgtgcattcctttatagaatagtgcaaataaaatgcagtacsttgatgacaattacttatattaatatgctgaatttttatctgtgtgttccaaggtccatgagatttgacatgtaagaacatacattaattatcagtttgt

SEQ ID NO: 326676 - DNA, 201 bp, Homo sapiens
tcaattttgttgtgctaaatacttagatagacaaaatattttcagtagcagttgaattattaaataaagaatattaagaacaatagcatgtttatgtggaygagatgtcataatgagaaccaaacctcttgcatttggtgacctcaatgtatttaaatttgtaacctcaacatcacattagcaaaacgttttgcttttgta

SEQ ID NO: 326677 - DNA, 201 bp, Homo sapiens
tgacactgtgttcatgtaagtgaaaggaagttatttttaggtaaaatgttgtctttaaaaataataagacaatatttcatatcataaattatttctaccamtcttcacatgttttatctaccaattagttttatttcatgatagaaacaatacttttttcttttttttttttttttgagatggagtctcgctctgttgccc

SEQ ID NO: 326678 - DNA, 201 bp, Homo sapiens
tcatatgccactagacaagacaaatctgcctttacatctggctgcggtagcaattcccagatgcacttaattctgacacatggccattattgaaccaaaakcaattgcctggcatgattatagttcttatttgttttcgttttaaggggcctcatccaggctgccaaatgtacaacaggtgccttagttttatacttgcca

SEQ ID NO: 326679 - DNA, 201 bp, Homo sapiens
aaaggctgccattttcatagctgcccaacaggtaagaaatcagaagcatttttataaagagaactatcgatccagcagggatatctgaagagcagtcaccsatcaaagaaatggaattatgccaagtgactgttatatatgcattctgcttattggcagcctgccctataccattttatctgagaaacttttgttaattat

SEQ ID NO: 326680 - DNA, 201 bp, Homo sapiens
atgttgaacaaaaaccctaggctttccagtgcctcagattttttcctctgaatactgaaattgataatagccaccatttattgagtatttaatatgtgccraacagtatgctaagtgctttacaaaaaatatatatatgtgttttacttttcacagcaatcctgtgaagtattatctctttgaaatagatgggtgcactgc

SEQ ID NO: 326681 - DNA, 201 bp, Homo sapiens
tttgtattcttatcctgggaagtgcaatcattattcagtagcagcctaccccctccttgttaaacaaaaagaatttattattcaaacttgggcagtatgcaaaaaaccccaattcattacataataactgattaacatttttacccaaagagggttggatgggtctgattccctgtctttaggaatgattctcctgtgcat

SEQ ID NO: 326682 - DNA, 201 bp, Homo sapiens
taaattctcaattgtctttttctttttctttttttattaacaacatcccttgagctatgtcctttaatgtagcagtagctaactaaattgagatttgggarttgtatttagaaaacagcatttctcagtactgctttggggtttggagaaattgtactttcaaatacataaagtgatcctctgtaatgattggatcacaag

SEQ ID NO: 326683 - DNA, 201 bp, Homo sapiens
cttagtttgggcatggtgctgactctggaaaaatattgatgcaggttgagttcattcaagttgacagtcttttctattgacgattgtctgtagtgtctgarcacatgagactattacaaagagatgttgaaggccgttttggttttatgtcagataaaaacatgctgattcctgctgcagttttgaaaaacaattttaaaa

SEQ ID NO: 326684 - DNA, 201 bp, Homo sapiens
  misc_feature (1)...(201): n = A,T,C or G
tctaattggtagctggtgacacttattaaaatgtcatgcttggcttacatctgtttccacaaagtgtccaaattctctcccttttttaaaaaaataaaaanggatttcaactctccacaattaagcccttaagaaagatagctaaaagaatatgtgacttgtgcttcctgattgttcattatatgaaattatagcctcaga

SEQ ID NO: 326685 - DNA, 201 bp, Homo sapiens
tccccttttcctcttctattctttgcttcctaacaatatcttgagcccttatgtctcctaacttgagagactatactttcagaaaatatatagaaatccartaggctatagagagtgattaggtagatgtgaaaagcagtacaatttgaatagtcatttactttaagtaaacaaaagatttatatctaaaagggaaatctg

SEQ ID NO: 326686 - DNA, 201 bp, Homo sapiens
tcttttcaaaacatctgaattgtatagagatgttgaaatattgtctaaaatgggaattaagataaaaatgacactgaagacaaatatctgccatactttayatgcaaacccaattcaaaagatgtaaatggatttgttactgatttgtacttaaggtaactcctatatatcaagcagtttctttaaaaacaactcccctcc

SEQ ID NO: 326687 - DNA, 201 bp, Homo sapiens
agagaagagttattctctctgtgaactacaagattgagaattcctatgtaacacatcaactgaagaaatctgataatgtggaagaagattgcttagaaggratttgtcagtaaatttcatttgaacaagcatcacttgtttaagcttctgtaatttcatggcacagtgacatttctaccaaaggataggtttgtttgggat

SEQ ID NO: 326688 - DNA, 201 bp, Homo sapiens
tcagggataggaattgaagacagacagtctggctccagaacacacgtgcttcaccatcaagccatactgcctgttgacacttctgtgaaactgagacagcygaactattatattacggcatgcatgtaaatccaacctacccagtctgttctgcctggagataactgctggtaacaagcagtcatttgcaaaagctgtttt

SEQ ID NO: 326689 - DNA, 201 bp, Homo sapiens
gacacttctgtgaaactgagacagctgaactattatattacggcatgcatgtaaatccaacctacccagtctgttctgcctggagataactgctggtaacragcagtcatttgcaaaagctgttttcagtaaaacacacattttatcttgacactgcaggccttcattaaactgtgcacagaaacttgttttgaaataacc

SEQ ID NO: 326690 - DNA, 201 bp, Homo sapiens
ttcctctaaccactctaaaatcatgaaatattatacattgtagatgtttagcattatctaaggacatgaggtgatgcttattattgagcataataatatayaagagcatccatacaactaaatctgcttatcttataactgtcaacttcctgtttctgctatattcttttgtaaatactcattgagatgtttaccttatgc

SEQ ID NO: 326691 - DNA, 201 bp, Homo sapiens
tcccagtcatttgtttttcccagaattagactctgcaactaggccactttcctgtctctcccaggttcatttggtgatacccacgttgggaaattgcaaamaaaacagtccgttcaactgtagtcacacttgatgaacatctacgaggaacaaagaatgtcctggtctatcttggtttgaaaagaaaaataaaatctgagt

SEQ ID NO: 326692 - DNA, 201 bp, Homo sapiens
gtcatttgtttttcccagaattagactctgcaactaggccactttcctgtctctcccaggttcatttggtgatacccacgttgggaaattgcaaaaaaaacagtccgttcaactgtagtcacacttgatgaacatctacgaggaacaaagaatgtcctggtctatcttggtttgaaaagaaaaataaaatctgagtttaca

SEQ ID NO: 326693 - DNA, 201 bp, Homo sapiens
ttttaaaaagtgataacagaacagactttacatcaaccagatttacataaatgtaggctacatgctagaggatgtgctattttatcctagttctatcacgstttgtgcagatacctggcccaaaattttcttattcattgagaagacagagaaaagtataattatggccaaaatactagcttgtacaaagctgttttcttt

SEQ ID NO: 326694 - DNA, 201 bp, Homo sapiens
atatatgagatggcatttccaaagtagctattatgctgttctaatataatttaaagggcaggggatagctacctaagactgtgtcttttacgtttaaaccttttttttttttttttaactgatggaaagagatatataccaacacaaatagctcatgaccaattctctccctgagtatgacagctagaactagtggttccc

SEQ ID NO: 326695 - DNA, 201 bp, Homo sapiens
cagtcagtggaggaggtatggcttttctaggcctttctttatgaaagatgtggatttcttttttttattattattatactttaagttttagggtacatgtrcacattgtgcaggttagttacatacgtatacatgtgccatgctggtgcgctgcacccactaacgcgtcatctagcattaggtatatctcccgatgctctc

SEQ ID NO: 326696 - DNA, 201 bp, Homo sapiens
agttaagattggaaacgaggcagtgcttccaaacttttaatcactagccacatgatcaaaaaggaagttttgcaaaaaaaataaaaaaataaaaaataaamcaacttagtatgtataatgcactctgtgttttttcctacttttctttcatttcagaaattgtttatgacccactagattcgcaacccacataaggtcatg

SEQ ID NO: 326697 - DNA, 201 bp, Homo sapiens
agcttcacactttttcatataatctactattatattaaggctatttccaagcttttcaaagttattttaaatgattgtatacatgtgttcaggggaaatattttttttcacttttaaggctttctgacagagtttagtatctgaagtctaacaccaggaaatggatgaatcaaagactgacttcacagtggggtgaattga

SEQ ID NO: 326698 - DNA, 201 bp, Homo sapiens
tctgctgctatttgctaagccactaggggcctgtataactgttcttatatccaggaggtatcctggtatggcatatgcaaacccttcctagagagacattaaaaaaaaaaaaaattcaagtaggcattcccccaagtttttgttttttcctttttaatacattaactcatattctgatactagttatagacaatgattgaa

SEQ ID NO: 326699 - DNA, 201 bp, Homo sapiens
acttgccatggatgaatgatttactatgagcatagtttatcctttttgttccctgcatgtcagttctaataatatatattattactttaagtaattttctrtacgtatttgttatatagtatgttagagtcaaaatttcaaatgcaaccattagacaacaggtaaagctgatgcattttatcacttatctgaagccagaat

SEQ ID NO: 326700 - DNA, 201 bp, Homo sapiens
ctgctgctatttgctaagccactaggggcctgtataactgttcttatatccaggaggtatcctggtatggcatatgcaaacccttcctagagagacattaaaaaaaaaaaaaattcaagtaggcattcccccaagtttttgttttttcctttttaatacattaactcatattctgatactagttatagacaatgattgaag

SEQ ID NO: 326701 - DNA, 201 bp, Homo sapiens
agtcaaaatttcaaatgcaaccattagacaacaggtaaagctgatgcattttatcacttatctgaagccagaattttaactgtgtacaaaaatatgtgackgaaacactttttgatgacttcaatgagtgtggtatatttatacattttctatgccttttctactactaaaggtggggcactcccacatccattcatttgt

SEQ ID NO: 326702 - DNA, 201 bp, Homo sapiens
tattaatatattcctggggatatttgatttggagtttcagtttgggggaagaaatgtttagaaaagcagttaattaaaatactgaagcagaataagtgcctttttttttttttctttaatggtagtgcatcttagaaagctgcttagacttttgcccagtgcagctgtccttccctgaagtatcaggtttcaagagcaatg

SEQ ID NO: 326703 - DNA, 201 bp, Homo sapiens
tgatcaaataaaaaggattagaactttcagaccatcaagttaaagactaaataaatgcaaagtgttttatattagcaagtatctgcttgagactttcccgttgttctttaaatcactcacaataggattttttcttctattgggtcattttttctgagtaagcaaagcctttgagttgaagatctgttgttagcattagaa

SEQ ID NO: 326704 - DNA, 201 bp, Homo sapiens
gatcaaataaaaaggattagaactttcagaccatcaagttaaagactaaataaatgcaaagtgttttatattagcaagtatctgcttgagactttcccgttgttctttaaatcactcacaataggattttttcttctattgggtcattttttctgagtaagcaaagcctttgagttgaagatctgttgttagcattagaaa

SEQ ID NO: 326705 - DNA, 201 bp, Homo sapiens
tttaggatgtgggaggaaaccaagtacccagaggaaacccatgcatacttggggagtatgcacacactccacaaagacagtggcctcggctggggattgattttttttttttttttcatcagtggtaaaacgaaatggggttgaaccaaatgatgttacctgaggacctgctgttaggttttcagcctacatttcccacct

SEQ ID NO: 326706 - DNA, 201 bp, Homo sapiens
gagcaaactagaaagtcccttaattatattagttttcagactctaaggtatggataattattaatattttcctgaatactgctcattgattgactattttrtatatagattaacacaggctaagaaaggaaaacagtttaataatccttagtaaattagaggctggaatctatactgctgagaattttagaatgcttggag

SEQ ID NO: 326707 - DNA, 201 bp, Homo sapiens
tctatttggcatggtctcgcctggggaacttgtcagtctgcctctgctgtattgtagcattgtttccactaagaattaggtcattcaataactaccacttygctgtacttttgctcactttgtcattatttttcttaacctgttattttccacatctttaaagtatgttgagggataaaaaatatacctccttgtatcttt

SEQ ID NO: 326708 - DNA, 201 bp, Homo sapiens
atagatgagaaaactgaagctcagacaggattggcccagagtcacacagtcacacagaatataaataatataacttgctagaatccagctcttctgattcytggtctgggtcttccactttcccacatcactcataacactttcctaccggtgcaggatgtgacagtgtctgaagtcacttagcatgggtggaaaagctca

SEQ ID NO: 326709 - DNA, 201 bp, Homo sapiens
aggagttgcaggttgggttcaaatactctgaatatcatctgtttctccattagctcactgtggggttgagctacgatgcccacagaacaggcatgcttttaaaaaaaaaaattctatgtgttttgtagaaacttggaaagactgcagctataccaggggataccctggcaaacaatagactgtgtctttgcaataaatgtt

SEQ ID NO: 326710 - DNA, 201 bp, Homo sapiens
gccactaggggcctgtataactgttcttatatccaggaggtatcctggtatggcatatgcaaacccttcctagagagacattaaaaaaaaaaaaaattcargtaggcattcccccaagtttttgttttttcctttttaatacattaactcatattctgatactagttatagacaatgattgaagactatttcaagaatttt

SEQ ID NO: 326711 - DNA, 201 bp, Homo sapiens
attctgctttatgctacagacactatagcaaaaagagaacacattttcaatgttccgtgtctgacttatggaaacagacatcctaaatggacaataaaatyttccctacctcccacattccataattatgtactgtactttgcttttcaatggagctagcaattctgtggcagatttcttaaattcaccctcatgctatca

SEQ ID NO: 326712 - DNA, 201 bp, Homo sapiens
ctggacatggtggcacttgcctatagtcccagctactcgggagactgaggcaggagaatggcatgaacccgagaggcggagcttgcagtgaactgagattrcaccaatgcactccagcctgggggacaaagcgagactccgtctcaaaaaaaaaaaaaaaaaaaaaatttttttttgagttgagtagaattgaaaccataa

SEQ ID NO: 326713 - DNA, 201 bp, Homo sapiens
tataatgaagagtcaaagttgtaagaaacaatttaaaaagaaagccacgaacaaaccaaagattatttgctttcccatagatttattgtagcttttatgtrggtgtgtagaaaacttgcattgcttctctggacgttgattttcatttaaaagcactagcaagtgaagtcagtttttaagtcttatgcttaaaaaaatctt

SEQ ID NO: 326714 - DNA, 201 bp, Homo sapiens
acgttgcctctctaccgtttctgaagagtatcttctgttcctttctctgcttgggactggaggcattgaaaaaaacatttttttaccaaaggggttttgaktcgatgaccttttttttctgcagatggcctccagctctaaaattttatcctattctgccagtgatacaactgccagagctctggggtcagtcctggagca

SEQ ID NO: 326715 - DNA, 201 bp, Homo sapiens
ggtgtacttttttaggtaatatgtagcaagggttttttttatagttaggttatcaatacacattttaaaataatacttataaattaagaatgataagtttaataaatactgttatgtatattcagttactgatttaagaaaggactgcttatgtttattttaatccgacttttactatttaacagactcgacctgaatttg

SEQ ID NO: 326716 - DNA, 201 bp, Homo sapiens
gtgtacttttttaggtaatatgtagcaagggttttttttatagttaggttatcaatacacattttaaaataatacttataaattaagaatgataagtttaataaatactgttatgtatattcagttactgatttaagaaaggactgcttatgtttattttaatccgacttttactatttaacagactcgacctgaatttga

SEQ ID NO: 326717 - DNA, 201 bp, Homo sapiens
tgtacttttttaggtaatatgtagcaagggttttttttatagttaggttatcaatacacattttaaaataatacttataaattaagaatgataagtttaataaatactgttatgtatattcagttactgatttaagaaaggactgcttatgtttattttaatccgacttttactatttaacagactcgacctgaatttgat

SEQ ID NO: 326718 - DNA, 201 bp, Homo sapiens
gtacttttttaggtaatatgtagcaagggttttttttatagttaggttatcaatacacattttaaaataatacttataaattaagaatgataagtttaataaatactgttatgtatattcagttactgatttaagaaaggactgcttatgtttattttaatccgacttttactatttaacagactcgacctgaatttgatt

SEQ ID NO: 326719 - DNA, 201 bp, Homo sapiens
tgtatattcagttactgatttaagaaaggactgcttatgtttattttaatccgacttttactatttaacagactcgacctgaatttgatttatatgtaccaaaaaaaaaatattttaggaaaatattaatttcaattttgaattttatcattcaaaatctgttttctctcagttacacttgtattatatcgaggataccaa

SEQ ID NO: 326720 - DNA, 201 bp, Homo sapiens
ggtaggtttttgttttttgttgttttttcattctcattgttatacaagaagttatttttgtttaaaaaaatacttcagaaagtatgcagcaatagttggattttttttttttgagactgtgtctcgctctattgcccaggctggagtgcagtggggccatctctgctcactgcaacctctgcttcctgggctcatctgatt

SEQ ID NO: 326721 - DNA, 201 bp, Homo sapiens
cttcttgttgctttaaaaggaacattttaagttgcttttttacaacaataagtgtgaaaggaaatgccaaaatacaaacaatttcacttcttgttggaatytgacatttccactagctaagtaatataaacatgcatcacctaaatgagcagtattttaatagcatcgttttcacattttaattgttgtcacatttcttct

SEQ ID NO: 326722 - DNA, 201 bp, Homo sapiens
aacctggaggcagaggctgcagtgagccaagatcgcgccacagcgctccagcctgggtgacagagcgagactccatctcaaataaataaataaataaatamataaataaataaataaaatccccttggtcaatctgaaaattatcatctaggttttgttcatttaataggcaaaacactttctcattattggtttaatatg

SEQ ID NO: 326723 - DNA, 201 bp, Homo sapiens
aaaaaattactcaggatccctccgtagaggcaccaagtcaacctaaaattctcataactccttgaaagcaggctagtgaaaatttggagagaatttatgamgattagtataaattatagcttattatctagtatttttgcaatctgtccttatactcgttatgtggccaaagcatccaaaaaatgctttatgcctagatgt

SEQ ID NO: 326724 - DNA, 201 bp, Homo sapiens
cctggtgcctagtagtcttcaggcaacatttttgtattcttatcctgggaagtgcaatcattattcagtagcagcctaccccctccttgttaaacaaaaakaatttattattcaaacttgggcagtatgcaaaaaaccccaattcattacataataactgattaacatttttacccaaagagggttggatgggtctgattc

SEQ ID NO: 326725 - DNA, 201 bp, Homo sapiens
tcctgagtacatgtgtacattttgtagcatctgaagaaaatcaacctttaaccttgagaaattaatgatgggatctctgaaacttcattgaagacagcagrtactttcattgaagaatagggacattcaagacagaatttgaaaccacaagtgagaggcctcttttactgtggttatagtagtctcaaaaaggatatttag

SEQ ID NO: 326726 - DNA, 201 bp, Homo sapiens
aaagttactgggtgatgtttctaaaccacagcctgagtgacaagttctgctgttcttcttttccacctctgagttgaacacatactcttttcagaagacaytggggcccacatagatgaagagaattgtttggaatctcagaaccacctatttgaagaacaaggaggtttagaaacaccccacttagtcagtaaggctaat

SEQ ID NO: 326727 - DNA, 201 bp, Homo sapiens
ctgcaacctcctcctcctggatataagtggttctcatgcctcagcctcccaagtagctaggattacaggcatgagccaccatacccagctaatttttgtakatttttattagagatggggtttcgttatattggctaggctggtctcgaactcctggtttcaggcgatccatccaactcggcctcccaaagtgctgggatt

SEQ ID NO: 326728 - DNA, 201 bp, Homo sapiens
acaggcatgagccaccatacccagctaatttttgtatatttttattagagatggggtttcgttatattggctaggctggtctcgaactcctggtttcaggygatccatccaactcggcctcccaaagtgctgggattacaggcatgagccactatccctggcctaccattatttatgactggagtcttatagtctgctcta

SEQ ID NO: 326729 - DNA, 201 bp, Homo sapiens
ttcatgctaggcaccgtgacagatacaaaaatgtttgcaagcaaatagcaaatatgagagataagcattaaatagctgtaatgccttattttgagaaaatacacacacacacacacacacacacacacacacacccgcatccatgttatgttaagccacctggactcacctctgagagagacaggctactcaggagaaata

SEQ ID NO: 326730 - DNA, 201 bp, Homo sapiens
tcatgctaggcaccgtgacagatacaaaaatgtttgcaagcaaatagcaaatatgagagataagcattaaatagctgtaatgccttattttgagaaaatacacacacacacacacacacacacacacacacacccgcatccatgttatgttaagccacctggactcacctctgagagagacaggctactcaggagaaataa

SEQ ID NO: 326731 - DNA, 201 bp, Homo sapiens
gttttgttgatatacacgataatttttttaaaatttgagcatgaatttctttaagctggaatgcactatccagttttgcaaacccttcccactccctattrttttacacacatttatgacattgctttatcttgtagacatttgagttgtaactctggagaaacattttaagcttattccccatttctcttcccacaggaa

SEQ ID NO: 326732 - DNA, 201 bp, Homo sapiens
catgctaggcaccgtgacagatacaaaaatgtttgcaagcaaatagcaaatatgagagataagcattaaatagctgtaatgccttattttgagaaaatacacacacacacacacacacacacacacacacacccgcatccatgttatgttaagccacctggactcacctctgagagagacaggctactcaggagaaataag

SEQ ID NO: 326733 - DNA, 201 bp, Homo sapiens
atatacacgataatttttttaaaatttgagcatgaatttctttaagctggaatgcactatccagttttgcaaacccttcccactccctattgttttacacrcatttatgacattgctttatcttgtagacatttgagttgtaactctggagaaacattttaagcttattccccatttctcttcccacaggaagaattaaat

SEQ ID NO: 326734 - DNA, 201 bp, Homo sapiens
atgctaggcaccgtgacagatacaaaaatgtttgcaagcaaatagcaaatatgagagataagcattaaatagctgtaatgccttattttgagaaaatacacacacacacacacacacacacacacacacacccgcatccatgttatgttaagccacctggactcacctctgagagagacaggctactcaggagaaataagg

SEQ ID NO: 326735 - DNA, 201 bp, Homo sapiens
cagagccaataaaaggaactattgcttgtctcaaatgcagtatatttgctgcttatatgttctttgatgaattcagccctcggtttatccctcttcagggkttccagtccagtaaggaaggcagcttggggtctccaaataggcctagactccatgagtgaggctgccaaggcatttgatagaatgaaaattgccaagcta

SEQ ID NO: 326736 - DNA, 201 bp, Homo sapiens
ttaaatattctgtaaattctcatagaataggttcacactgtgcaagtttagctatatgtgtgcagatcatacgtaccttgagatctcagaaggcatgagtmatggcttatgtacatttttacccccagctcttacaccttagtaagcactcaataattgcttgtccaagtttgttgaattacatatggcattttagtaatt

SEQ ID NO: 326737 - DNA, 201 bp, Homo sapiens
aaatattctgtaaattctcatagaataggttcacactgtgcaagtttagctatatgtgtgcagatcatacgtaccttgagatctcagaaggcatgagtcayggcttatgtacatttttacccccagctcttacaccttagtaagcactcaataattgcttgtccaagtttgttgaattacatatggcattttagtaatttt

SEQ ID NO: 326738 - DNA, 201 bp, Homo sapiens
gctcccctttctgctgtccctttgggggcatttctctgatttctctgtcaagccttccctggtgacctggtcagaatgagccactccttcctttctgattscataccacattgctatattctggcctttctttcactctttctaaatcaaaggcaattgctagcatgtgagtcttttccattctttaatcactggaacata

SEQ ID NO: 326739 - DNA, 201 bp, Homo sapiens
gcatctccccatcacttattttatttgatgtttatgataagagtggcagatgtgcattattactttcctcactcgccagctaaggaaattgagaccctgaraagttaagtgatttgctgaagaaaacgtacttaactagtaagcggaatcagaaggagaaccccctttctgatctatgtgtatattatactgccattttcc

SEQ ID NO: 326740 - DNA, 201 bp, Homo sapiens
aaatttaggatttcaagagtaaataaatttaggatttaaaggtatgtgagtgtggacaatatttatagcagataaaccataactaagtttctatttaaacwtgttcctaactttttctaccctttttgttttcgggaaatgaaaatgattgttcttgtggtccgtatgcttgctgaatcctcctggcgtcttcctttgcgg

SEQ ID NO: 326741 - DNA, 201 bp, Homo sapiens
ttcatagtattggttttaaagattaaataagagccgtgtaaagtgattcattagcctgttacatagaaagaagtcaacaaatgtttacagttactgacttytaaaaattattgttttacctcacagttatttaaattgactctgttaatgtccacaaagaatactattatattttctggactgtgagtttgagttctacgt

SEQ ID NO: 326742 - DNA, 201 bp, Homo sapiens
agggaggatcacttgagcccaggagttcaagaccagcctgggcagcatagagagaccctcgtctctacaaaaaataaaagtaaaaataaattagctggatktgtgacacacacctgtggttccagctactcaggaggctgaggtgggaggatcacttgagcctgggaggttgaggctgcagtgaaccatgattgtgccact

SEQ ID NO: 326743 - DNA, 201 bp, Homo sapiens
acctcacagttatttaaattgactctgttaatgtccacaaagaatactattatattttctggactgtgagtttgagttctacgtaattgttgattcagaaragtagaaaacatgtgcatgtatacattaacatagaagatgggtggcaactggaatatttaacacggaaaaatgtgttaagtactgttataattatatcat

SEQ ID NO: 326744 - DNA, 201 bp, Homo sapiens
taatacctttgccgtaattcctccctttatagaacagttttgggaattaaatgtgtgaacaagtagttgttaataacattttttatgaaataaacaaaaavaggttataaaagagactatttttgtataggtgctgaatttttaaaacattttatctataaaaaagaaacactatcatgtgaatcatcagatttttacact

SEQ ID NO: 326745 - DNA, 201 bp, Homo sapiens
ttgtggatctctgaggatacgtatgagagaatctagtcctcttggaggaaatactgaaatcattttttaaaaatagacatattggctactggtactaataraaaaatatctttcttgatagttaacttattaaaaactgctcattgaagctctcaatatgtcctttgtgggaaaaattgccttaatgggaaaggtcagaac

SEQ ID NO: 326746 - DNA, 201 bp, Homo sapiens
ataattgactttttctcttacttgtaattcattgcctattttccccataattttcacattgtgaagtgttatttgacaaaaaaaaaaaaaaaaaaagatgrttttagctgccccttgctttacatttgacatctttttgtttttctgctttcatgattacaaaaatacactgttacccactgtcagtcttcactgttttct

SEQ ID NO: 326747 - DNA, 201 bp, Homo sapiens
tttttccaaatgtgcttttatctagatgctgcacaaaattgcaaaactaattatggggccaaattcatattattttgtggatctctgaggatacgtatgaragaatctagtcctcttggaggaaatactgaaatcattttttaaaaatagacatattggctactggtactaatagaaaaatatctttcttgatagttaact

SEQ ID NO: 326748 - DNA, 201 bp, Homo sapiens
acaagctttctggggtgatggaaatgttgtatatcttgataaggatgtgggttatgtagacataacatttgttaaatgtcatccagctgcacctaaaaccygggcaattcacttatataagctatacttcaattataaaaataaaataatttacatggacaattaaggaaacattagtagtgattatctatttaatttgga

SEQ ID NO: 326749 - DNA, 201 bp, Homo sapiens
atcatcattgaagaggaatgattctaataatttagagaacgttgatattaattgtagtgacatctaaaaccataggtagaaaatttttaaatttggaatcyttctttattctcaaacagatccctgtaaaatgatgaaatggctgtgaacagccccatatttgctttaaggatttccttccttttctatttgccccaatca

SEQ ID NO: 326750 - DNA, 201 bp, Homo sapiens
tttttagcaatttagtatgataatattttatcagaagtgtagtgagcctagagaagaggaattaatcaagtctactctgaaccatgagggtgtgtgtagtrtgtgtgtgtgttatatgtgtgtgtgtaggggtagaaagacactagagtttgactgaaagagtgagaagaaatctgccagtttaaacaaggggagaaagag

SEQ ID NO: 326751 - DNA, 201 bp, Homo sapiens
caacaacaaaaatacactattaaaatcctcaatcacagctatgcttttacaatcacatgcagaacaaaatttcccacctaacattcagtgacagtgatatwtttttttttagtttggtaaataaaaagttaaccaaaattttaattttcttaatagtagctttttccttgtgagtcttttaccttgtggacccagaattaa

SEQ ID NO: 326752 - DNA, 201 bp, Homo sapiens
aaacagtccctatacagggtttctaacctgtgccaaataaaaaatatcactttctaacaggtccagaaaccacaagttatcttgggacctcaaaaagaaaraaatttacccaactcataaatatttaaaggtacaaactcatggcagggctcagctttaaaaaagtcttatctaaaattccttctatgaaacaaagttcca

SEQ ID NO: 326753 - DNA, 201 bp, Homo sapiens
tgtgccaattgaattaggtcttcagtgtactgttattgttagaagttgaatggttaattcttcccttcttaagctgaagtgtacctttctgtgataaaacmatgggactcaagagattgcatttaaaacttggtgaaaaactgaaaaatttatttatctttgtatatgaatatgactggggaaatattttaaagcagcttc

SEQ ID NO: 326754 - DNA, 201 bp, Homo sapiens
cttgttaaagagttagttttcaggccagatgggtggctcacgcctgtaatcccagtgctttgagagaccgaggtgggtggatcacgaggtcaggagttcgrtaccagcctggccaagatggtgaaaccccgtctctactaaaaatacaaaaattagtggggcatggtggcagttgcctgtaatcccagctactcgggaggc

SEQ ID NO: 326755 - DNA, 201 bp, Homo sapiens
gcatgaagtattttgcattctatcactcaattgtgtgtagttggtgaacatttcccagactgtgccaattgaattaggtcttcagtgtactgttattgttwgaagttgaatggttaattcttcccttcttaagctgaagtgtacctttctgtgataaaaccatgggactcaagagattgcatttaaaacttggtgaaaaac

SEQ ID NO: 326756 - DNA, 201 bp, Homo sapiens
agctactcgggaggctgaggcagagaattgcttgaacctgggaggcggaggttgccgtgagccgagattgtgccactgcaatccagcctgggcaacagagygagactctgtttcctgaagttgaaggaacttattggatggatgttgttatttctacttagaaagtctaaaacagtcaagagccaggccagttagttgttt

SEQ ID NO: 326757 - DNA, 201 bp, Homo sapiens
cccctgtattagtttctcatgccctgatttataaaatttagaacattcttcaaatgcattcatgtgtgttgatggtactaatgatatgaatacaggcataratgtttagagtgataaagtcataggcctgcaagggactttagagattatttggataaaaccattcgtttttcatggatgagaaaattgagactgaatgta

SEQ ID NO: 326758 - DNA, 201 bp, Homo sapiens
ttaccatttacaattttgactgtttttaataacatacctcagagtgtcaggacatgcagtctgtatacattttgctaatctttggagcttggatttgaatsacactggcgttaagcctggtgtgatgaatggaacccaaaactgagtagtgaatttagtttactgccaaacattgatgttttgatttaggtttattctatt

SEQ ID NO: 326759 - DNA, 201 bp, Homo sapiens
ttctttaaatacaaaatattaccatgccagaaaaaggcataaaatgctagaaaatgatggtttaacaagagttgaactttcaaaactaaaaacataaaaaygtatccttaaccttgataggattaaaggaaatcactgtctttgatggtaaatgaaacaccaaacacttactttcttaatattttttctgacattttataa

SEQ ID NO: 326760 - DNA, 201 bp, Homo sapiens
tctttttctctgctcttacaaacagagaatgaaatttcagaatgtctgaaatgttgcctcaaaagtgatgccgtctgctgtgaatggctactttaagaatsttgaaacaagggcactcaactcaattgtcaggggatgtcatacttttataatacttagcttcctgagcatatgattgtgtggacaaggagaacaagacac

SEQ ID NO: 326761 - DNA, 201 bp, Homo sapiens; identical to SEQ ID NO: 68623

SEQ ID NO: 326762 - DNA, 201 bp, Homo sapiens
aaggaaaactgtcatctgttcatagtaaaactcccattggtggaagtgagagtctggtggaaggggagacgtggacccaagtcttagctccctagtgacarccacgtgatcttcatcaaattcttaagcctgtaaatatatgcaactacttgagtcaaaccaaccaacaaacaggaaaaccttagtattttaacagtacct

SEQ ID NO: 326763 - DNA, 201 bp, Homo sapiens
acatcaaagggagatatacattcccattaagaatcaaagtgatagctctgctagccagactaggcacctccataaaacatgcatacatccccccaccgccmcacacacacacacacacacacacacacagacagagagagggagcaagggagagagaaaatgcacactgagttctccatttccacattttgtaatgctgac

SEQ ID NO: 326764 - DNA, 201 bp, Homo sapiens
tattgaagtaataacaatttcctagtaggcatacttgtttaatggattgcatagtctttcagcttgtaaacactggaacgtctatcacttactgaaatttaaaaaaaaaaaaaaaaccactaaagtttagcaataatttggtttgctgctgaagtcaaacaaatatagagtttgtgttctgattctcattagtggaatagt

SEQ ID NO: 326765 - DNA, 201 bp, Homo sapiens
atgtatcaaaggaattttcccatgctgggggcttcggggaaatgttcccctatgtgttattgatctgggagagggcttcctatttttaaagttttttaaattttttttttttataaattttgtcactcgagttgagcaccttcaatttccctggcatggaaattgccaaacagtagagacaacgaagctgttgtcttttcc

SEQ ID NO: 326766 - DNA, 201 bp, Homo sapiens
actttgtcaaaggacaacaaagaccgtgaagcaatgtatttagagtttgaagagataatattggagcccagtaatcctgcacaaaaccaagttgttggtcrtatgtaaagaaaaaaagaaacccacaaagggtttctcagatatataaggcatcagaaaaagtggcatccatgcatatcttatataaagcattattcaaag

SEQ ID NO: 326767 - DNA, 201 bp, Homo sapiens
gagcccagtaatcctgcacaaaaccaagttgttggtcatatgtaaagaaaaaaagaaacccacaaagggtttctcagatatataaggcatcagaaaaagtrgcatccatgcatatcttatataaagcattattcaaagacatattccagccaaccaatagatgcatcaaaataaactcaagaatagatgagccatgtcaga

SEQ ID NO: 326768 - DNA, 201 bp, Homo sapiens
caaagacatattccagccaaccaatagatgcatcaaaataaactcaagaatagatgagccatgtcagaaagataaactgtgaaacatgtgaggcagaattrttctaaataaatgctgctgatgtggttataagtttaataaaaatgttatagccagtccctaaaatggaaaataactatgtggaacatgccctctttttcc

SEQ ID NO: 326769 - DNA, 201 bp, Homo sapiens
tttttttttaaatttcagagttgagttgagaaaacaaaattaggccaatgaggttgacagctttcccataggcttctgctggactcaagtcttcagactgygggtctagtatgttttccactgcagtatggtccttaaaattttgttcaaatcaatttgattaaagggtcccttaacattttctagatgcattaggaaaat

SEQ ID NO: 326770 - DNA, 201 bp, Homo sapiens
tgtcataattttcccagcattacattgcttgtttctcattgtcagctttagagactgaatgttttttttttttttttgctatattttaaattttattttattttatttatttattttttttttattaaaatggagtttgtacctagaaagtaactgccttttccattatgtttgcaaaacacttggtatttttaatttagc

SEQ ID NO: 326771 - DNA, 201 bp, Homo sapiens
gagcaaaacccccaagtacaacccaaactgagggttttttggtcaatctataaaataggtaagagaggaggaaaaagggccttttaatttttttcagaacrgccacctgatcttttttgttgttgttgccattttcacctggttgatttgctttttcctcttgaatccctaactacccctagatgtgtatagaagagttgt

SEQ ID NO: 326772 - DNA, 201 bp, Homo sapiens
gctgagtacaacatgccacagtatatcctaagggaattcaaggtcacagatgccagggtaagttggcacagtcttcaactcttaaccattagctgaaaagkagtctaagatacctctctctctctctctctgggagaagcacttgccacttgactgttgtcccaaagagaaatcattcattctggagaacgttttttttta

SEQ ID NO: 326773 - DNA, 201 bp, Homo sapiens
caattaaactcaaacttattggtttgtagggtacaatagtaaagctacaagcttagcaaaacctcttccagaatttagtaaggagctctgtgaatgtagtmcagttacaagagataggtatgtatgcctttgttgttgtgtttatattttctaaaggcttaggaataaacacatctttaaaatctgagataataattctac

SEQ ID NO: 326774 - DNA, 201 bp, Homo sapiens
accttaagtgaaagagaaattggttagcaggagggttggcctaggtgacagacctgttaatcccagaaagttatattaactattctgaaggtgacagtatycaaggcagcagttaaatctctaggtcttgagtgtaacctgccccaccgtttaaaaaaaaaaaaaatagtgctctttcagaatttgaagctaggtatgtga

SEQ ID NO: 326775 - DNA, 201 bp, Homo sapiens
acatacctcttgctgaattctttgcctgcatttctgcatgggcaatctcatcaagtcacatggttttctgctaaagcttcaccatatcacagtttggctayggcctaagaaaccaatagtccagtcctagctattggaagaaggtgagtgggtctgaacacgatcctctttgttatttctgccctgtgggggacttctgta

SEQ ID NO: 326776 - DNA, 201 bp, Homo sapiens
gcctgcatttctgcatgggcaatctcatcaagtcacatggttttctgctaaagcttcaccatatcacagtttggctatggcctaagaaaccaatagtccartcctagctattggaagaaggtgagtgggtctgaacacgatcctctttgttatttctgccctgtgggggacttctgtacacttagaaagtgctttacctta

SEQ ID NO: 326777 - DNA, 201 bp, Homo sapiens
tgctttctcgactccaggttgagtgctcctagactaggtgtcctatgctgttataatctgatacctagactgcttttctacatctgaagtcttttatagcrtgaagtttcaaaatgattacagagtattaaaaccacctccctctttggaaagcttgtaccccaaattgtccttagcaacatttggcttgcagtcttttaa

SEQ ID NO: 326778 - DNA, 201 bp, Homo sapiens
ttttaatctgtgaaagcagagctagatttaaaatgttctgctacttcattgagaagaaagaagaaaatagaaaaaaatagcagttttaccaatctaagttwtacaaatccgtatgttgaccatttaatctgacgcattcataattggcatacataattcacacctattctgggttataagaagtatgagaaaatctacaga

SEQ ID NO: 326779 - DNA, 201 bp, Homo sapiens
caatgaacatgcaaatgtatgcaaagcagtttcaggacttgctctgtagaaacagctcacttaccttgattaacacgctacatttcctcgtaaccagagarcgatttctcagacttctgtcacttacatcgaatatggacagttgattgatgtacacccctcgtagaatatgagctcctggaggaagcttaaccaccttat

SEQ ID NO: 326780 - DNA, 201 bp, Homo sapiens
aacagaactttgacacaaacaaagcaatgcaactgaaatacagagattttattttagtctctgttcctgagtctctccacctgtaaaatgcaagagaatgscttgatgggtggctcagaaactttagcaagcaccagaatcacctaggggcttttaaaaattcaaatagctggccgggtggggtggctcacgcctataatc

SEQ ID NO: 326781 - DNA, 201 bp, Homo sapiens
cctcaaaagtgatgccgtctgctgtgaatggctactttaagaatgttgaaacaagggcactcaactcaattgtcaggggatgtcatacttttataatactyagcttcctgagcatatgattgtgtggacaaggagaacaagacacaggagagccccagtgtgatctttcagctcgttttgtgctctctgattgtatgtcag

SEQ ID NO: 326782 - DNA, 201 bp, Homo sapiens
ggagagagctgaatttcactgaagatgatttactccttcatctgcaagataagggaaagagccttgccacagaaaatctgttggaaagcaagaatggtagrggccagccctcttggtttcccatcccgtgtcctcttctctctgttgtgttgtgttgttaccttgaaaaacataacgtgaaggtggtgtttggtcctcaac

SEQ ID NO: 326783 - DNA, 201 bp, Homo sapiens
tgaaattttcgtccatcttgtaggacaaccattaccagtcatggtagatagttatttcattggatgaatgtgttacataaagtttttctgtttattttgckgttacttcttgtgtttgactttgtggaagtgaatcccattttacattttgcattgatgaactatggattctagcaccttataattacaatagaaaagtta

SEQ ID NO: 326784 - DNA, 201 bp, Homo sapiens
ctggagtgcagtggctcaatcttggctcactgcaacctctgcctccaaggttcaagtgattctcttgcctcagcctctcaagtagctgggactacaggcaygtgccacctcgcctggttaatttttgtatttttattagagacgggtttcgccatgttggccaggctgatcttgaatcgtgacctcaggtgatctgcctgc

SEQ ID NO: 326785 - DNA, 201 bp, Homo sapiens
tatttttcattattcaggaattctgaaaaaagagtgtgcattttgtgataacaaaaattctggtagggtatgagaaatccatccttaaagaagaaaagaaytcacaacttcaaatggatgctgttttctcatgaaggatttgcccagtggctggagagtgcttctaatattattatataatataatattatgggtgtagat

SEQ ID NO: 326786 - DNA, 201 bp, Homo sapiens
caagtagctgggactacaggcacgtgccacctcgcctggttaatttttgtatttttattagagacgggtttcgccatgttggccaggctgatcttgaatcstgacctcaggtgatctgcctgcttcagcctcccaaagtgctgggattacaggtgtgagccactgtgctgggccccaaagagcttttatattagagaaata

SEQ ID NO: 326787 - DNA, 201 bp, Homo sapiens
accttctggagatgccaaataagcaatttgatacttgaatccagaactcagaaaactgggctggggatattctcttggaagtcgctagcatataaatggtracagagccacgggattagacaaaatcaacaaaaaagagaataacaatgccgtagggttcaagacccaagctttgggttccccagttaatagaattaatag

SEQ ID NO: 326788 - DNA, 201 bp, Homo sapiens
gggtttcgccatgttggccaggctgatcttgaatcgtgacctcaggtgatctgcctgcttcagcctcccaaagtgctgggattacaggtgtgagccactgygctgggccccaaagagcttttatattagagaaatataataaaataaaatataagttaatatatgaatatgaaacagatcagtctacctcacatatgttgt

SEQ ID NO: 326789 - DNA, 201 bp, Homo sapiens
tggtggctgtggaattggagagaagtggatggatgccagaaatatgtaggcaggttgaataaacaagaggaagtaaattatttcctcatatattgagggtragtatataaggaaatgtcaaggatgactcccagatttgtgttaagagcacctgttggggtgattgtagtatttattgataagaaacactcggaggagggt

SEQ ID NO: 326790 - DNA, 201 bp, Homo sapiens
aattgaacaataaatacaatataataaacaatacaattgataaataggaaagtatattatgtgttcaaaggtgacctaagtattatggtgggagaaagacyagagtaagggaaatcaggagggtgcatgatgggggtgggtaggggttcagatgtgatttaaaattgggtagtcaggtcagtgagaaagtgacatttaagc

SEQ ID NO: 326791 - DNA, 201 bp, Homo sapiens
tgtttaatggtattgatgatgctttgccttttaaaaacccctgagcaactaactgtagttttatttgatccaaatttatcttggttattatttccaacccrgtcttagttgtcaaatgttttggagcaaaatctggtcatcaggaatcttgaaattctaccaagaagtccaagaagaagaaacctacttgaaatttaagat

SEQ ID NO: 326792 - DNA, 201 bp, Homo sapiens
agctgtaggatttgctttttctgctgagcttagttgatgacaccttctaatttgctaccttaaatttacagcagctatttttttttttcatagatcttttstgcattcacattttaactcacagatattgttcaggtcttggaagtgtgagctttctctctttcttcttgaatgtcttgtatataggtccttaagcaactc

SEQ ID NO: 326793 - DNA, 201 bp, Homo sapiens
tgtctcctagcccaagggtggggagagaggctccccctctcttctcctggtttcatccatcctctggagtcaagttattaggttattaggttggtgcaaargtaattgcggttttcgcaattaaatagcttggttgctggagctccttttttctcttagggactgctgtggctacccaatgtgaagccacagacctgttaa

SEQ ID NO: 326794 - DNA, 201 bp, Homo sapiens
gtatttatacaatgctgagggcattttggcacataataatctcatgtttgctcagaatcatgaactgtgtccactcttcccccacacaacattttttaatwaaaaaaaataaagcttgtttctatttgtttataacatttattttcttaccagaggtgattgattgcaaggacagaagtgcctatgcttggtgacattttc

SEQ ID NO: 326795 - DNA, 201 bp, Homo sapiens
aatttactggtgatgtcagcattttataactctttggaaatgaaagtgtgatatttatgcacacattaatatgtgcacattaagttagctccttaaaaatcccccccccgccccaccaaaaaaaaaagtgtaagctggccaggcgcagtatctccatgcctgtaatcccagcactttgggaggccaaggtgggtggatcac

SEQ ID NO: 326796 - DNA, 201 bp, Homo sapiens
ttatcactttgctttgttagtaatgtttattgggagcagattaattagaagaaatatgttcaaggagcacatctcttgataaacatagatgtctaatggcrcttaacctttaaaatgtatgcagaaaaagctttgcatgttattgctcttcatgtcttttgggggtgcttcaggtattcagctgttagtgccatttcaaat

SEQ ID NO: 326797 - DNA, 201 bp, Homo sapiens
agtctatcagtgtatgcggtgaggttgaatcactgttgctttaattaatgtggtcaagggagactctaagaagccgactctctgggcaagaagagtttagyagagaccttggtgcttggtgcttgggtgcgttattcaactcttttgaaaagcaaattttctcctcagctgtgtttgtagagactaccattctagacatat

SEQ ID NO: 326798 - DNA, 201 bp, Homo sapiens
gatgaagttagttaaagggaagagattagtttgattagcctcctttatcactttgctttgttagtaatgtttattgggagcagattaattagaagaaatawgttcaaggagcacatctcttgataaacatagatgtctaatggcgcttaacctttaaaatgtatgcagaaaaagctttgcatgttattgctcttcatgtct

SEQ ID NO: 326799 - DNA, 201 bp, Homo sapiens
atgaagagtagatgaagaagaactagctcttcctgtaaaatgtgataggagctctcctggtagttaaacctgaaaaatataatgcttctcacctaagaatyttgtcttcctgcgcaaatatttgtcatttacaaatagcttggggtttctatttccaaagagtgtgtcttcccaaaggctacagggtggtagaaaggaatt

SEQ ID NO: 326800 - DNA, 201 bp, Homo sapiens
tataaacttcatactaaatgctgatatatcacttgctgattaagccttataatggtttcactaataattaatcaattgaagagaattgttagaaaaatgargcaacagtttacactctagtagggttttgggatttctttaagcaatgatttcaccatcacgtatgccctttccccaaattacggatttgattgtgaatat

SEQ ID NO: 326801 - DNA, 201 bp, Homo sapiens
aaatgctgatatatcacttgctgattaagccttataatggtttcactaataattaatcaattgaagagaattgttagaaaaatgaggcaacagtttacacyctagtagggttttgggatttctttaagcaatgatttcaccatcacgtatgccctttccccaaattacggatttgattgtgaatatccttgcgtgcgaatg

SEQ ID NO: 326802 - DNA, 201 bp, Homo sapiens
taataattaatcaattgaagagaattgttagaaaaatgaggcaacagtttacactctagtagggttttgggatttctttaagcaatgatttcaccatcacrtatgccctttccccaaattacggatttgattgtgaatatccttgcgtgcgaatgaccatttgcacttgttttctctttttaaaaagtcttcctttcagcg

SEQ ID NO: 326803 - DNA, 201 bp, Homo sapiens
agggtgtagccccttgtgcatttatgaaataatggagactgaaaaatgcttactaagcaaaacaaaaccaaaaccaaaaccactaaaaatgtgttttctgytttcacagtgactttcatgtttgccaaagtggtggcaacaaatcctgtaactgtctatgatcacagaatatttaaagacttttgccttgttaaagagtta

SEQ ID NO: 326804 - DNA, 201 bp, Homo sapiens
tggaatacagattctctttagacccattttgccttgtctcgccatacataccactgttgcccaccttcattgtatattttattaaaggttcatctctaagktgaaatggaaggactgtggatatgaaacaaatttcaggaaaggagcagaccacactcgttggaactgttagtaagatcaagttctgaataaccatgaaag

SEQ ID NO: 326805 - DNA, 201 bp, Homo sapiens
acatataaaaatcaaagggttggcttctgctgaggctattggacaaatgctggataatgtgtgatggaagtaaggtaaaacgtggtacttttaatatcackgaacctccttgctctttttttttttcagagtacttagcaagccttactatagattaatggaaactccttataatattcttttatcctgtttatttttggt

SEQ ID NO: 326806 - DNA, 201 bp, Homo sapiens
tatcttgaataagcagataattgtaaaggatgattttcatcattatctgcttataaggcatgtaagaagtttatgtgttcaattggtggtaatggtttgayactacttggaaaacacttgtctgggaaggtaatgttcactcgacctgccactgcttggaattgggagatcgttttagtcaaattgattggcaaagttaat

SEQ ID NO: 326807 - DNA, 201 bp, Homo sapiens; identical to SEQ ID NO: 68706

SEQ ID NO: 326808 - DNA, 201 bp, Homo sapiens
taaatggctctttttgtagtttgctgaataaaggccatttgacttagatcgccatccaaggctctctgtgacctatttttttttaaagtctgaatcttcttttttttttttttttttgagacgaagtctcacttgtcacccagactggagtgcagtggcaggaccttggctcaccaaaacctctgtctcctgggttcaagt

SEQ ID NO: 326809 - DNA, 201 bp, Homo sapiens
aagatcatgcagaagtctttggaagattttagtttgagtctacatatttgaaaaaaaaaaaaatcagattaggcccatgtggattttttttttctttctcragacggagttttggttttttaggaaattaccttttcacccagcatggaaaaataaaacacccaaagggatataacctggtagctcatccctgatctttca

SEQ ID NO: 326810 - DNA, 201 bp, Homo sapiens
tgctagatttctagagttggaggtgctgggtcaaagagtgtgtgcatttgaaattttaatgaagattgcaaaactaccccttaaaactgctataactactrtatattaattagtatagggatatagtgtatgttgaatagcatggacaaatttgactgcgtatcaatgacaatttgttcaattttttttcattttaatttt

SEQ ID NO: 326811 - DNA, 201 bp, Homo sapiens
tgcctacgtagatgtgtttcttgttaattcagaaactccaagccagcctctatcatgaagtgaagaattaaagagaaaggtcctgtgattggatggagatrccattttagaaccaattctttaacctaaaatttagtatattcttttttcttcagtttgctttagcttcacttatttcttcactaaactgtgtgtgtgtgt

SEQ ID NO: 326812 - DNA, 201 bp, Homo sapiens
tttgaaattttaatgaagattgcaaaactaccccttaaaactgctataactactatatattaattagtatagggatatagtgtatgttgaatagcatggayaaatttgactgcgtatcaatgacaatttgttcaattttttttcattttaattttgtaatatataaaagttagacaggtgaatattttgtcaaagaaatta

SEQ ID NO: 326813 - DNA, 201 bp, Homo sapiens
gtgaccctctgagactctttttaaggaacagacaactctttttcctgcagacattataggtttaatttgctttggatacaaataacatttatcttgtgttyaaaaaaaaagcacatgcttatgttgtttattatactttgatagattttccaattatttctacttttctttaaacaagcatatttggaagttgtgcttttt

SEQ ID NO: 326814 - DNA, 201 bp, Homo sapiens
tgagaccaaggatataactcaaactgaggttaaccagttggtggtgccaataagtaaacattgttcagacccactcaaaatttctttatttttgtggatcwttccgtgtttagaaaaatgcacaatgtcacaatgagcctaattaaacttccaagccccttgtagctgtcatagcagctgttctaatgtactgtttccgac

SEQ ID NO: 326815 - DNA, 201 bp, Homo sapiens
attactactgtatcacatcacgggacattaagcccgtttcaactcgtgggactaactcaatcatgtttttagaaattgaaaacaaatgttgtaactggatraatgataatattgaagtaataacaatttcctagtaggcatacttgtttaatggattgcatagtctttcagcttgtaaacactggaacgtctatcacttac

SEQ ID NO: 326816 - DNA, 201 bp, Homo sapiens
taattatattgaatttggttcagtgcattgaactggctgtatagatcattttgttgcattaatgtgctgtttttgtgcatatcatagtgatatttgtcctyagggatttcattagtttattttaaaccgaaagggttgctctccagctgagactgttaaatgatgaatttgagtttctctcttgaatcttcaactcaaccc

SEQ ID NO: 326817 - DNA, 201 bp, Homo sapiens
ttgttggggggcaggtagttgttctgtgtgttatagggtatttggcagtatctgtggcctctacccttaggtgccatgggtcacccttcttgcgctgtgasaacaaaaattgtctctaggcattccctgagggagagggcaaagtcacttttacagctggcccagagatttgatcaccctgaggatggagctaccaataaa

SEQ ID NO: 326818 - DNA, 201 bp, Homo sapiens
tcactgactgacatcagtgcaatgtctgttccatttaacagcttcattcttttaattggtgacaatatttatgctgcctaagcctgtgaactaaacttttraggcaagccaactttggttctaacttaggacaaaaagggaaatttgggtgtcatccatattcccatgcccagaaattcaaatctgttttgagtttatgta

SEQ ID NO: 326819 - DNA, 201 bp, Homo sapiens
taaagccctccagtgtcttccactgcatttcagatgcaatccagtctctccactgttgcttacaggccctgtgcaacctgggcccactttattttcccagyctgcctggtatcattctctgctgggaatctctgggctccagccacaaccaagctcattcctgcatcccagcctctgccctgggcagtctgtgccttcaca

SEQ ID NO: 326820 - DNA, 201 bp, Homo sapiens
taatggctatgtccaagtaaatggattggaagtctctacagagacttgggaacagggagggcagtcgggggaggttgcatttttttagaccattggcacayagccactggagaagtcatctaaatataaatcagaccgtgtcactccatagcataaagccctccagtgtcttccactgcatttcagatgcaatccagtctc

SEQ ID NO: 326821 - DNA, 201 bp, Homo sapiens
cttcacaatagagcttaatggctatgtccaagtaaatggattggaagtctctacagagacttgggaacagggagggcagtcgggggaggttgcattttttyagaccattggcacacagccactggagaagtcatctaaatataaatcagaccgtgtcactccatagcataaagccctccagtgtcttccactgcatttcag

SEQ ID NO: 326822 - DNA, 201 bp, Homo sapiens
aattatattacatgcatcgtattgccctctgaactgttagtttctccaaccacccatgtacagatatacagaagctgatatacaattcagttaattggaawtcagcaaaattattgtttcataagatctttgtggtatgagaaataagaaaccggggagttataaattttttgaaattgtattttagattcatatacatgg

SEQ ID NO: 326823 - DNA, 201 bp, Homo sapiens
tcttggccccaggggccttccctctacccatttggattctttcttcaagtttcattatcttttcctctaccagtatgaactaaaagtctgagatcatattktcctcttctacacacatactaatgtttatcattcagaccatttatttgggtcttaacacatattatcatgctttactaatattacatattgctgtatttt

SEQ ID NO: 326824 - DNA, 201 bp, Homo sapiens
aaccagggaaactagaggcagagaaggggagtgatttggccaaggcatataagaaagtcagtgctgaagttggtctagaatctggttctttgactgtctckgttcctttgtttgcactacactgattctcttggccccaggggccttccctctacccatttggattctttcttcaagtttcattatcttttcctctaccag

SEQ ID NO: 326825 - DNA, 201 bp, Homo sapiens
ttttcttcttttagctagaaattttcacagcgtttactccttacagtaatgcttcctggtattttttttctaaaggggtcagagtctaagccaataatagytgcagtttgaaacttattactagaaatgtaaggattagtataattttagttcttcctgcatcttaggaatggagaagatttgtagatggagagtcatttt

SEQ ID NO: 326826 - DNA, 201 bp, Homo sapiens
accatagtacaatttcctacctcaatttactttctactttacttgtacgagataaaaccttttgtttttttcttgtgggaagccagatctcctagaataakcactagaaaggccattgcattcttcagacccacagaaacatcaaagggagatatacattcccattaagaatcaaagtgatagctctgctagccagactag

SEQ ID NO: 326827 - DNA, 201 bp, Homo sapiens
tgaaatgtttatttttcttttggtaaatactaaaaatgcattgttcaaaagcaacttttttcttcttttagctagaaattttcacagcgtttactccttayagtaatgcttcctggtattttttttctaaaggggtcagagtctaagccaataatagttgcagtttgaaacttattactagaaatgtaaggattagtataa

SEQ ID NO: 326828 - DNA, 201 bp, Homo sapiens
gctgagacaggagaaccacttgaacctgggaagcagcgtttgcagtgagccgtgattgtaccactgcactacagcctgggtgacagagtgagactgtctcaaaaaaaaaaacagaaaaaaaaaaacaaaaaaaaaccaaattattgaattattggatccccaccacagacctactgacccacgaactctgatggtagtact

SEQ ID NO: 326829 - DNA, 201 bp, Homo sapiens
catttttaagtggagtcatttgtttttattctattgcattgtaagagttctttataaattttggatagtagtcccttatcagatatgtggtttaaaaatayttttttccacttcataggttaccacttcatttggtgattattttctttgttgtgaagaaacttctgagttcgatgtagtttcatttatttttgcttttgt

SEQ ID NO: 326830 - DNA, 201 bp, Homo sapiens
aaccacttgaacctgggaagcagcgtttgcagtgagccgtgattgtaccactgcactacagcctgggtgacagagtgagactgtctcaaaaaaaaaaacaraaaaaaaaaaacaaaaaaaaaccaaattattgaattattggatccccaccacagacctactgacccacgaactctgatggtagtactcacgcatctgttc

SEQ ID NO: 326831 - DNA, 201 bp, Homo sapiens
ttattctattgcattgtaagagttctttataaattttggatagtagtcccttatcagatatgtggtttaaaaatacttttttccacttcataggttaccayttcatttggtgattattttctttgttgtgaagaaacttctgagttcgatgtagtttcatttatttttgcttttgtagcctgagcctttggtgtgatatcc

SEQ ID NO: 326832 - DNA, 201 bp, Homo sapiens
tttataaattttggatagtagtcccttatcagatatgtggtttaaaaatacttttttccacttcataggttaccacttcatttggtgattattttctttgytgtgaagaaacttctgagttcgatgtagtttcatttatttttgcttttgtagcctgagcctttggtgtgatatccaaaaaaaaccattgccaagcccaat

SEQ ID NO: 326833 - DNA, 201 bp, Homo sapiens
gtgctgaggaacagccaagaatcttgtaatgaaaatattacctgagggccctgcggttttaacagtgagatcaatgcctaaagcatatctagatgaaattkttgaacctccaagttaaagaaacaacccccaattacttggggcaaaaattactattaaaagaccagaaaccagactggcctatgactttgtcaaaggaca

SEQ ID NO: 326834 - DNA, 201 bp, Homo sapiens
ctgtaagctccgacaggaaagatcacgtttgttctgctcattccttcttcgatgtctcagcacatggtaggcactcagtaaatgtttgtggaatagtaggygacagagtcatgaaaatacaacaaatatggatggaagaacaaagttaggaactcttcctctttgtccctggatggtgggaatggatgctttagcatagtc

SEQ ID NO: 326835 - DNA, 201 bp, Homo sapiens
cactgatggggagttgaagataatcgtggagtttgaatacataacaatttataatttattattttgcagggtaagaggcaaaaagagtctaagatgatttwtcagttttaaacctgagtgtcaaggagagcctgagagtgggaggagcagatttgaaaggagaagatactgattaagcttagaatctttatttttgataaa

SEQ ID NO: 326836 - DNA, 201 bp, Homo sapiens
caggagaaggctgcaaccccaacctctacaatctgctactagtggaaacatttttgaagctcagtttggtgtctgattgtgccgtcagtgattatcgtcartgagtcgtggtgcatgtcattctttgtgtctgtgtttgcatgtgaatgtcagtcacctacaggtttgtgaaatattagcgatcttaatgtagtagtcaca

SEQ ID NO: 326837 - DNA, 201 bp, Homo sapiens
agggtaagaggcaaaaagagtctaagatgatttttcagttttaaacctgagtgtcaaggagagcctgagagtgggaggagcagatttgaaaggagaagatrctgattaagcttagaatctttatttttgataaacttgaagacagtttgaaatatagatctccacttgtgctgaaaaagaaaggcatcactttaggaatcc

SEQ ID NO: 326838 - DNA, 201 bp, Homo sapiens
ttaatgctgtgatatcttgcatgtgatacatatatgtatatatattctgatgtggaatataatgactcaatgtaggtctgcttgaatttttctttaataarcttccaatataatacttccagaccatgtgccagtgcatgccacaagtaaatatgttgatcacatctttggttattattatggtcttctactgctgttata

SEQ ID NO: 326839 - DNA, 201 bp, Homo sapiens
aagatgatttttcagttttaaacctgagtgtcaaggagagcctgagagtgggaggagcagatttgaaaggagaagatactgattaagcttagaatctttayttttgataaacttgaagacagtttgaaatatagatctccacttgtgctgaaaaagaaaggcatcactttaggaatcctttggagactactactgagagaa

SEQ ID NO: 326840 - DNA, 201 bp, Homo sapiens
tatccaatgataagttttatgtagcgattctttaatgctgtgatatcttgcatgtgatacatatatgtatatatattctgatgtggaatataatgactcartgtaggtctgcttgaatttttctttaataaacttccaatataatacttccagaccatgtgccagtgcatgccacaagtaaatatgttgatcacatctttg

SEQ ID NO: 326841 - DNA, 201 bp, Homo sapiens
ttttcagttttaaacctgagtgtcaaggagagcctgagagtgggaggagcagatttgaaaggagaagatactgattaagcttagaatctttatttttgatraacttgaagacagtttgaaatatagatctccacttgtgctgaaaaagaaaggcatcactttaggaatcctttggagactactactgagagaaagaaggac

SEQ ID NO: 326842 - DNA, 201 bp, Homo sapiens
agttatgaagaagagaatggctcttgaatttatctagttctatactcttattttaacagttaaagaaatcaaggcgcttcacaaaaggtgatttgtccctrttagtagatgccaaaaccagaagtagaacccatgtccagtattctaagccagggttctttctcctgtaccattggattcacacagattctcctccctttt

SEQ ID NO: 326843 - DNA, 201 bp, Homo sapiens
cccttgctaccattaaccccaagggagtatctgatgtttcccatactcccttgactagtgtccttaaaaccaaggatagaaagcttttctaggaacctgcrttagggatagtcaaatgctgccaatgaaatatcacagacgagcgctctacaggaaagtcaccatatttggcaatgactgctgacctaaatggtggaaagc

SEQ ID NO: 326844 - DNA, 201 bp, Homo sapiens
cccttgactagtgtccttaaaaccaaggatagaaagcttttctaggaacctgcattagggatagtcaaatgctgccaatgaaatatcacagacgagcgctytacaggaaagtcaccatatttggcaatgactgctgacctaaatggtggaaagcattgtgaagcactgggggtgctgggaacagggtgctaaattttaaca

SEQ ID NO: 326845 - DNA, 201 bp, Homo sapiens
ctccaattctaatttagcttgcttgctctctccatccatggtcattataaacagtaaccatattgtgtggtatgtcactttaggaaaaaaagcacacaaasaaatgttataattgtgaaaaagacagaagtctttcagttttgttagttataatatatgttatcactttatcaaattattctttatttaaccacctttttt

SEQ ID NO: 326846 - DNA, 201 bp, Homo sapiens
taaattcagccctccaaaatcagatgaaggtgtgcaggctactcagagaatgagatcgagaaaggaagtactgaggtgcttaccagcaaagggaaaaatgyattgctgtcactattcagataagctcaggaaaagcttctaatcccactgctgaggccatgtgtgtgcatttccacatacgttaggatatttatttttcat

SEQ ID NO: 326847 - DNA, 201 bp, Homo sapiens
tttctaggaacctgcattagggatagtcaaatgctgccaatgaaatatcacagacgagcgctctacaggaaagtcaccatatttggcaatgactgctgacytaaatggtggaaagcattgtgaagcactgggggtgctgggaacagggtgctaaattttaacacctcagaacctgcatttgagtcttctctgctatccagg

SEQ ID NO: 326848 - DNA, 201 bp, Homo sapiens
cttaaagacccagctttatgtacatgtcaccacttgtccaggggtgttaaatggttggaaagacagcatggcgtcatgtgaaatgtgctaaatgagagtgkacggggtatgggatcagattcctcatgtagctacagttctgctgataatgatgactttgatcgagttctttaactcctctgggcttcatttttctaattg

SEQ ID NO: 326849 - DNA, 201 bp, Homo sapiens
gtcctcgggtactccttacataattccaaacccttgtcaaatgtaggattttgcatggtctgaagagtcctgcttcctaagtaggcttaccttaccgggamgggctgctcattactgcaggcatctcaagccagtcactaatttgtttacttatttcacaaacactgttgagcacttactgcatgctttgtgtagggcaca

SEQ ID NO: 326850 - DNA, 201 bp, Homo sapiens
tctatggaagaagggaagaaaatattcacttataaaagatgcatttaaaggaaatgtccattaagctccatacatctctgtagacagcagtaactgggtgygcactaggatgggtgaatagatatgttgcttgttaaacaaagatgaactgtgttagccccatttgcaaggaaagttttctctttctttcttttataaaca

SEQ ID NO: 326851 - DNA, 201 bp, Homo sapiens
tgcacacactccacaaagacagtggcctcggctggggattgattttttttttttttttcatcagtggtaaaacgaaatggggttgaaccaaatgatgttayctgaggacctgctgttaggttttcagcctacatttcccacctagtgtaaggaaactcttggtatggacactaccaatgactatccaccaagagggcctta

SEQ ID NO: 326852 - DNA, 201 bp, Homo sapiens
ttattggcaacaaagttcttggtcttttttagcattaagatgagtgaaaaaagaatcaccaacccagccccttctgaaaaactattttatttttctcttaytgagcataatgtaattgtgacttaaccgattgctgcatcagagacaatatggaattgttgaataaattttttttctccccctaaatggtagtttttctag

SEQ ID NO: 326853 - DNA, 201 bp, Homo sapiens
ttcaagttcagaattgcaggaggctggatcctaccctggcagctcagggtgcaaattggggacctgaccctgcagaatatgccgtcccatctcagggtacrctcacacatacttactcactgacactgggacactttagatacactgactcacctacagtgcacatgtttaggatgtgggaggaaaccaagtacccagagg

SEQ ID NO: 326854 - DNA, 201 bp, Homo sapiens
acataaatagctgtggtacaaagtaatgggcactgtaacaggagattggataatagatggctcctttgcgcgttgaggagggctgcctaactcttcttggkgttggagtcaggagagagggagaaggtagctggaagtgtgtcatgtaaggaaagcttcacagacattacatttgtgttgatcactcatgaatgaataaga

SEQ ID NO: 326855 - DNA, 201 bp, Homo sapiens
atttcacagatgaggcggccagactttggtcctggaaacagagaaacaattttccaggcatccagggagactctgcctgaccttccatgaatcagtcctaraggccgcttgtatccattctaaatcaaatagaaaaaggcaaaaaaccgtattcgtattcagtagctcctgccttctagttcttatgtactcaaagggagc

SEQ ID NO: 326856 - DNA, 201 bp, Homo sapiens
gaaacatatctgaggagcttgtccaaggtggggaaatagatatttacataaatagctgtggtacaaagtaatgggcactgtaacaggagattggataataratggctcctttgcgcgttgaggagggctgcctaactcttcttggggttggagtcaggagagagggagaaggtagctggaagtgtgtcatgtaaggaaagc

SEQ ID NO: 326857 - DNA, 201 bp, Homo sapiens
aaattaattccattgcataaatttagcaatggtcaccctgttctttccgtaattatagaaaaatgaaagctccacttaagggtaataactttgtgataatraaaagaaatgcctcccgcaaatttagccaaaaatctgaactgtctcagtttaagcttcaagtaaagttactgggtgatgtttctaaaccacagcctgagt

SEQ ID NO: 326858 - DNA, 201 bp, Homo sapiens
ttttgacaccctgtattatccccagtttacaaatgaggaaacatatctgaggagcttgtccaaggtggggaaatagatatttacataaatagctgtggtasaaagtaatgggcactgtaacaggagattggataatagatggctcctttgcgcgttgaggagggctgcctaactcttcttggggttggagtcaggagagag

SEQ ID NO: 326859 - DNA, 201 bp, Homo sapiens
aatggcagtgctattgttttcattgctgttatcagttttggaaagtccagccttggccagtggcagactaattcttggcccttctggtttgtcaaggttcrgtaagtttaatggagagcaaatgctttccaaatgccaggtttgtgtccttttccaaatggaactggaagcgccaaaggccgtgaacatttaatttctcaa

SEQ ID NO: 326860 - DNA, 201 bp, Homo sapiens
ccaaattgagcatattggttgaaaatgcaagtatcatcccagttaagatatatttatcctgtgcaccccaactttttgacaccctgtattatccccagttyacaaatgaggaaacatatctgaggagcttgtccaaggtggggaaatagatatttacataaatagctgtggtacaaagtaatgggcactgtaacaggagat

SEQ ID NO: 326861 - DNA, 201 bp, Homo sapiens
tataaattttggatagtagtcccttatcagatatgtggtttaaaaatacttttttccacttcataggttaccacttcatttggtgattattttctttgttrtgaagaaacttctgagttcgatgtagtttcatttatttttgcttttgtagcctgagcctttggtgtgatatccaaaaaaaaccattgccaagcccaatgt

SEQ ID NO: 326862 - DNA, 201 bp, Homo sapiens
gtctttcatgttttaggattttctctgtagtgtttttattaaataatatgttattcaaattagcaattgaatccaatttcttataaggtatgctacctaaraaagatatccggacgttgaaggaaaccaaattgagcatattggttgaaaatgcaagtatcatcccagttaagatatatttatcctgtgcaccccaacttt

SEQ ID NO: 326863 - DNA, 201 bp, Homo sapiens
ttactgtctccttccaagatatgcccttggcacctcactttctatctctaagttgtgtaccaggggattcttctaaacaaagggacaactgaggactagcaaaaaaaaaaaaaaaaattctccttgttacagaatagtatagataaatttttatgaattattaaaatagagagtaaaatttccttgggatgacatttaaac

SEQ ID NO: 326864 - DNA, 201 bp, Homo sapiens
cctaaattaataatataatttggttagaattgtagtaaaggggtatttgagggcaaccagggatctgaggcagaggatgattaaaaccacctgggagggtmggaatggggaatgtcagggaaaactcgccatctaacaggtttctttagaaccaactaaataaaatgagacttcatggatctcaaggaactggaaccacca

SEQ ID NO: 326865 - DNA, 201 bp, Homo sapiens
ctccttcctctgtttttcacataaatgtcatttgtgctggaaccaaccttggtcttccaccggaggcagaaacacagtataaggttgagcagaaaggcaarggtacccccaaaagaagggagccagtgagagtgctgctacacctcacctcctctcgcaccaacagaaaatgtttccgggaataaacacaaagcaagaatg

SEQ ID NO: 326866 - DNA, 201 bp, Homo sapiens
cctatgaaagtattcaattctcaattcaactcgtgtatattaagcagctactatctgccagagaccgtgctggatgccataggcaaatactgaaccaaagsgtttccctatgaagggagctcatggtttctaagaggaaatgagtcatatgcaattggaattgccttgaattttgaaattttattaatgggataaggaaat

SEQ ID NO: 326867 - DNA, 201 bp, Homo sapiens
cttttacatgtagatgtaacatagtaactagtaactcttcaattgaaagaaatgtttagcattttcagtgtggctatacaagcatcataatgtcggtattwaaaaaaaattctaactcatatgaggttagactttaaaaaaaattatttcatcatgcaccgggaacgtgtacatgatgattgaacaaacttgtgtcatctt

SEQ ID NO: 326868 - DNA, 201 bp, Homo sapiens
aaagtattcaattctcaattcaactcgtgtatattaagcagctactatctgccagagaccgtgctggatgccataggcaaatactgaaccaaagggtttcyctatgaagggagctcatggtttctaagaggaaatgagtcatatgcaattggaattgccttgaattttgaaattttattaatgggataaggaaattagata

SEQ ID NO: 326869 - DNA, 201 bp, Homo sapiens
cagttagcttaacactgttaagagctaacactgtttttttcccttcacatttgaaagagaaaggggagttctgttttacctggtcccgattatcctaggcmttaggataacttggcatcttaaaaatgcacttgtgtttacctgccttatgggaaaatctacggcatctactctctgtagtcaccacttatatatacttag

SEQ ID NO: 326870 - DNA, 201 bp, Homo sapiens
tcttatatacagatctgacatttcttgcttagaaatttgttaaaattacataatgagagcttaaatggggatatctaataaagctagtagatagcttttaraacaaagttaaaatgtattgtgtgaagaatcacatttataacaaggcactgtcaatggcaccttgaatgattatcaggagcgctgatctacccaccaggt

SEQ ID NO: 326871 - DNA, 201 bp, Homo sapiens
atttatgttacatcataaaatcctttacaaagtctctaaagctccctgttttttcttcatcttcatcttgtcagctctctcctgtaatctctaatcttctmcctttctgaaggcactgaggtctttcatgttttaggattttctctgtagtgtttttattaaataatatgttattcaaattagcaattgaatccaatttct

SEQ ID NO: 326872 - DNA, 201 bp, Homo sapiens
agagaaaaggaaagttcctaaacactgtgcagcaccttttcccccccacagtaaaaacgcctttgctttgagcaggggtgagatactaggattgtgactcyggtgtagagattgcaggcgttagtatttggaaaaaaagcactgtttgaaaatggcttctattgattcaatgggtttttaatctaattcaaactggaagaa

SEQ ID NO: 326873 - DNA, 201 bp, Homo sapiens
ataaactgcagaatcttttaatcagggactggaaaaaaaaaagtggttggtgaaattggagctaaccatcccgcatcctcctattgaattgtacttgtaaktacagttaaacctaaagagaagatttcttcagagtgtaatagctcccctgggtatttttcactggagcaggttaatttatacttacaatatctgaccaca

SEQ ID NO: 326874 - DNA, 201 bp, Homo sapiens
cagagaaaaggaaagttcctaaacactgtgcagcaccttttcccccccacagtaaaaacgcctttgctttgagcaggggtgagatactaggattgtgactscggtgtagagattgcaggcgttagtatttggaaaaaaagcactgtttgaaaatggcttctattgattcaatgggtttttaatctaattcaaactggaaga

SEQ ID NO: 326875 - DNA, 201 bp, Homo sapiens
aaatatagggctagaaatgaagaatcctaattcttggtttccaagctatcttaagtcccattttctgtttccaaatagggaatcatacaaaccagatgatrccatatattagtaaagcagatcaaatgttttgtgcatcgtgacttgagttctatcttaggccaaagaatgggaaaattcctgccctactaaattttgtgg

SEQ ID NO: 326876 - DNA, 201 bp, Homo sapiens
ggtaccaaggcaaagccttttgctggtcataaactgcagaatcttttaatcagggactggaaaaaaaaaagtggttggtgaaattggagctaaccatcccscatcctcctattgaattgtacttgtaagtacagttaaacctaaagagaagatttcttcagagtgtaatagctcccctgggtatttttcactggagcaggt

SEQ ID NO: 326877 - DNA, 201 bp, Homo sapiens
aaatggtattgtttggtaaagaagttgggggctttacagtgacaacttcagtttccccaaaagatagcctccaaataattcactctgtgttcccaaatgaraagagtttatttctctatggttgacgatgaatcctgaccaacctctccatgtccctgaacatggttaattatgcccacgtttcccagtgtggcacaccca

SEQ ID NO: 326878 - DNA, 201 bp, Homo sapiens
aaattgaggatgtccactgctaacaccatacttttaaattgatttactagaatgtcttatggatggaccatgagctgacccacttgctggcctgttaggcrtacagagtgacatggaaggacctttcacaatgtgataagttactaggaccttaaatatagagaagacactaaacttgttttgggaaaacgtactcattgt

SEQ ID NO: 326879 - DNA, 201 bp, Homo sapiens
caaattctcatttttccttttttggattatgcggaagggttattgtgggtattgactgagataaaggatgtggcaaggtggctcagtgagtctcaaatggyattgtttggtaaagaagttgggggctttacagtgacaacttcagtttccccaaaagatagcctccaaataattcactctgtgttcccaaatgaaaagagt

SEQ ID NO: 326880 - DNA, 201 bp, Homo sapiens
gttatggatttataaatgaactcaaaaatacaaacctagatacatagtgtatctatagcacactttcagtataggtttttttttctgttctaatatccaartaaagcacttgcgttattttaaattacatgcgcaaatgttgtcagtcttgtctgtctttttaaaaatgatgtctaacagaatattatggttatttggcaa

SEQ ID NO: 326881 - DNA, 201 bp, Homo sapiens
gtaaaagttaatccagccagacctcttcctctgatagccttcagttttgagactgattttagacaggtggttatggatttataaatgaactcaaaaatacraacctagatacatagtgtatctatagcacactttcagtataggtttttttttctgttctaatatccaaataaagcacttgcgttattttaaattacatgc

SEQ ID NO: 326882 - DNA, 201 bp, Homo sapiens
agcgctctgctgggtgaacagggagcgctaaaatataccacagtgatgctttgctaagtggcattctagagtttggaaatacctctcgttcttcctatctwatctctttattaggaataccatatgctggcccttttgtagtataagcaaaatactttactaaaattttataatgtgccgtttttcatccctatttcatga

SEQ ID NO: 326883 - DNA, 201 bp, Homo sapiens
gctgccctcaaatttggcttctgctgggggccatgacacatgcctgtagctccagctacttgggaggctaagacaggaggattgcttgagcccaagagttsgagtccagcctgggcaacataatgagactttgtctaaaaaaaaaaaaaaaaaaatggcttctgtgaatataaatgtcactagagagtgtgaatataagtg

SEQ ID NO: 326884 - DNA, 201 bp, Homo sapiens
  misc_feature (1)...(201): n = A,T,C or G
tgatgtttttttttttcatgatcataagttcatatgtaatttttccctaaatcctgagtcattgcattgttgctgcaattatctaaaataacttactcctnggtttgctctttcttgttaagttcctctgaggcaagtcagtgaacttaaaatctctttgaaaccaagacaactctgtaatttatttctcattttaggggg

SEQ ID NO: 326885 - DNA, 201 bp, Homo sapiens
ataagcaagatagaaccctgtggtaagggatctcaagggcaaggcgatcttcatagtgtgtgatggtgcagaaagaacttttcctaactgcatcatatatmgcttagacatcctttttgcatatcatcaagattctgtgtgctagcaccgaataaacaaatcaaagttaagcaatctatttgatagctttggaaaatgaat

SEQ ID NO: 326886 - DNA, 201 bp, Homo sapiens
acagatgtgatagtgtttgagacagttccagagagtttctgctggatagtgggatgtttgataagcaagatagaaccctgtggtaagggatctcaagggcraggcgatcttcatagtgtgtgatggtgcagaaagaacttttcctaactgcatcatatatagcttagacatcctttttgcatatcatcaagattctgtgtg

SEQ ID NO: 326887 - DNA, 201 bp, Homo sapiens
catttctgataatgggattggattactctgatgttcatgttgccttcaaggatatgtagaatttagagagagaccacctggtcagaaccttcaaatggggwaaatgaattctaattgcagctccaacttgctttgtggacttgagctactcaaattttcggaactttagttttcctactgtaatttgggtaataccaacct

SEQ ID NO: 326888 - DNA, 201 bp, Homo sapiens
atttggggtggagagttctgtagatgtctattaggtctgcttagtccagagctgacttcaagtcctgaatgtccttgctaatattctgtgtcattgatctratattgacagtggggtgttaaagtctcctattattattgtgtgggagtctaagtctctttgtaggtatctaagaacttgctttattttatgaatctgggt

SEQ ID NO: 326889 - DNA, 201 bp, Homo sapiens
gcatttgcttttctgtaaaggattttatttctcctttgcttatgaagcttaatttggctggatatgcaattctgggttgaaaattacagtattgttaaacrggtaacctttaaatgaagtcaggcagtctctcctccaaatagaaggtatttgcacacatgacctcttcttgctattgaaagcaactgtggtcagaaatga

SEQ ID NO: 326890 - DNA, 201 bp, Homo sapiens
ttaaatgaacgaatttcttttatggaatgatgctgtattcccattgagtacattagttttctcatagcatgttttttaaaaatcaaattatctctccactrtcgaacacttcctgggatataattaattgtggcagtattttataggtgatggataaaagtgcacgtggcattcacacacacacacacacacacacacaca

SEQ ID NO: 326891 - DNA, 201 bp, Homo sapiens
atgcttccatggtaaccatccataaagtacttatggggccaaatagttttctctatttctcagtattcccacacacttggtgtcatcttcctgtttatctscatccccaaataacatcagtcaggaatctggcatgtccctgtgaaaaccaccaggcgaggtgatgagtgctcatctcacactgagatcctctctcttctc

SEQ ID NO: 326892 - DNA, 201 bp, Homo sapiens
ccacatatgtacccaggtgtatggtgaggctgacctttatctggaactatgaatttgtgcatatgaatactcaaaacagccttttaatacatagaactgawaattcactagatggttttccatcctgaggcatagatttttctacaactgattccctgataaagtcactgattttaaaaagtgagcaaattggaaacattt

SEQ ID NO: 326893 - DNA, 201 bp, Homo sapiens
aaaaccaccaggcgaggtgatgagtgctcatctcacactgagatcctctctcttctcaatatgagtgaatgataaaggattgagtccctgttcacttaccyagaaccttgggaacatgcacacgtgtatctaaaaaaagtttgatgaggaaataatgtgttaacagaaacaatggaggaacaagttgaaggctctttaatg

SEQ ID NO: 326894 - DNA, 201 bp, Homo sapiens
attttggctggcaagagttgcagtaaaatcctcggcctataatttaaatttaccagttgtgaaagctttcaaacttagatatttgtaccacatatgtaccyaggtgtatggtgaggctgacctttatctggaactatgaatttgtgcatatgaatactcaaaacagccttttaatacatagaactgataattcactagatg

SEQ ID NO: 326895 - DNA, 201 bp, Homo sapiens
agaccagtgactgtgacagaacctcaggtatgccaacttttaacagtcagggacaagaagcaaagtggagacaggacaggaggaaacaaagagaatgaggmattatggccataatatcaggcacatcacctcacagagcatactgaaacaaccaaggaaggaagtgcacccaccacttaaagaaagaaaatgtaatccaag

SEQ ID NO: 326896 - DNA, 201 bp, Homo sapiens
tgcatcacacacttatcattaaatccactatttcctggattttttgcttcttctaatgttaaaggtacttatctagaaagtcattattttataactgaaayagactctgcttttcctcagaagatgtatgcaaccagcccttactccgaccccgtggtgtcaatggatctggatccgcagccaatcacggatgaagaagaa

SEQ ID NO: 326897 - DNA, 201 bp, Homo sapiens
tctccattaggggaaaagaagtttgacaagctctttaacctgcagctcacggaatttcatgcagtcttactgaataagatagttcagatgcgtctctccgrcctgtgatgttcatactagccagtagcagctggtatctgtttactgctacatgccacacacactgtgctgagcacctctggtttatttccccccatatca

SEQ ID NO: 326898 - DNA, 201 bp, Homo sapiens
ctagttctgtctatgaaactgttttaacatcacctacaaaatggagtgggtaaagcataaaccaaaacaattatataaaaaatcatgtttcttagatatayagttctttgccaagtcctttgtgtcaatcctcataccatacacatcttttttttttttttttttttttttttggctgcctctgagaagcttggacatata

SEQ ID NO: 326899 - DNA, 201 bp, Homo sapiens
ctgaagacaaatatctgccatactttacatgcaaacccaattcaaaagatgtaaatggatttgttactgatttgtacttaaggtaactcctatatatcaakcagtttctttaaaaacaactcccctcccaagtgatcttggatataatagttcataactataataatgtctaacatattaggtgcattgatatttcataac

SEQ ID NO: 326900 - DNA, 201 bp, Homo sapiens
ttggtatgatttaaaccgttaaaaaatttttaaagtgatgattatcttgattatttcttaaagagttgctggagaactggacttaatgatcctaggatttmccctatatgatcaggttgtttagttattttatttaaagatctaatgtattaagacttgattgggaaaagagacaccaaagaagaaaaaagaaaatttgat

SEQ ID NO: 326901 - DNA, 201 bp, Homo sapiens
tccattaggggaaaagaagtttgacaagctctttaacctgcagctcacggaatttcatgcagtcttactgaataagatagttcagatgcgtctctccggcytgtgatgttcatactagccagtagcagctggtatctgtttactgctacatgccacacacactgtgctgagcacctctggtttatttccccccatatcaca

SEQ ID NO: 326902 - DNA, 201 bp, Homo sapiens
atatcagtttataacaatgttccaagggtagactggtaatttgcaaagagaaaatacttctccgtccctctcaaagacacaagctatcccctaatcctttstctcatattaagaatgtcagataactggtttggaattatccaaaatttaatctcttattgccacgcacaagaaattatatttttcattaggctggtatca

SEQ ID NO: 326903 - DNA, 201 bp, Homo sapiens
cagagaaaaccaacaaccagtgaaggaaaaggcattctatggaccatctattgtattttttctttgtcgtattataaagacctgacacttttttgcatacwtttttttaacatgacggttctaataggacctgtttttaatcttgcttgaaacccgaccttcaatatattgtgacttctctagtgtgaggtggaacagtaa

SEQ ID NO: 326904 - DNA, 201 bp, Homo sapiens
ggacctagatactctgacttatagttcattgtaaatttatatcaatgagaagtctgtgactaaaataactgtatttattaaatatgatcaccgaagcactrgtaggagccaatattgcagattaaatgcatttaactacctgtaaatttcaagaaggcacagctttcttgtatgaactgcagaattgcaactcccaccatc

SEQ ID NO: 326905 - DNA, 201 bp, Homo sapiens
aactatgacttaggacttaagttgattatttgaaaacatgagttctttgattttcaaatgctattacttcccttcaaatgtggcctttaaagaattccaawcttaactgagaagactctttgcctggtgtatacattcagctatcaaccctgaaggaaaagtataagttgaatatttcatatgagtttcattagggtatat

SEQ ID NO: 326906 - DNA, 201 bp, Homo sapiens
actttaatggatgcatctataacagggtgtgggggaacattactcagataatccctgtatttctttctctagttagagtttattaatctgtgactatgggkggatggaaggaccagggctctgaaaaagcctacatttaaagagtatattaagagagcaatttaatcattatacagtctgactccagttatgtggtgatat

SEQ ID NO: 326907 - DNA, 201 bp, Homo sapiens
gtgctgcttacaacaaatcacgagttttaaatgagaagcaatactttacagaggtcaagacacatacgagtagcctatgattaaacctgattccaccaacwtgagcaacttgctcaagtttctttaacttctttgcacctcagttttctcctgacaggactcataacaggacttactgcagagttgttgtaaatattaaat

SEQ ID NO: 326908 - DNA, 201 bp, Homo sapiens
aaatattagacttgggctaagatagctgtgttctaatctcaattctattatttggctctatgataatgaagtttctctggacttcagttatcttagctgakgtttaaagtcccttctagcatcctttgtttctcaggcatgttataagaagcaaacctttatctatgtacatttgctttctactttctattgagttattaa

SEQ ID NO: 326909 - DNA, 201 bp, Homo sapiens
caatctaaagtggcactaacctcttctaaaatgtggctatatttaaagatttagatggctttgtctgaggttaatacttatttaataaatctcctgcaggrcaaggcttttatgaatcaagctgacttttttccttagacaagttatgatgcactttgagagaatttcattagtgtaggaaatgaaatgagctacagcaaa

SEQ ID NO: 326910 - DNA, 201 bp, Homo sapiens
gtaacaatgtctatttaatatgtgtatattaaaaattgtttattggattctgcttctgctgatttgagggaatttgtatcatatgagttatctcattactmaaaacaatctaaagtggcactaacctcttctaaaatgtggctatatttaaagatttagatggctttgtctgaggttaatacttatttaataaatctcctg

SEQ ID NO: 326911 - DNA, 201 bp, Homo sapiens
ctgtcctaatccaggaggttcatgtgctgcttacaacaaatcacgagttttaaatgagaagcaatactttacagaggtcaagacacatacgagtagcctakgattaaacctgattccaccaacatgagcaacttgctcaagtttctttaacttctttgcacctcagttttctcctgacaggactcataacaggacttactg

SEQ ID NO: 326912 - DNA, 201 bp, Homo sapiens
aaacctcacttgcattagttgtgtggtcttggtggccatgtaatgaagctgtgacgtctaaatgctaccgtcattctgagaggaccagattttcatggtcrtcgtcctccctggccctccattgtctgcatgtctgtggcttgctttctctcctactaactgacacagcatttttttagatatgttaatacacagattttt

SEQ ID NO: 326913 - DNA, 201 bp, Homo sapiens
caccattcttagtagtttctgccaatacagctctaccctttgctgcattatggctattcagttctaaggaatgaatgtgcatcagctttctctcttttccygcagaatttatggtgtgtgagggttttggggcagcactgttgggtgtgtagaaaccagggagaacttgagatgtgtctttttgttcccaattattaaagt

SEQ ID NO: 326914 - DNA, 201 bp, Homo sapiens
tagatatttttcttttcttcccttattgtaaatcattggttaagatgacctgcttatattttaatatttatattggtaaaagaggctctatcttgtagagygtgccatttatgtttgttactttacccatattgttatttatgaaattgtttaggctttttgttttttgttcgctatattgtttggttttcaaagcatacc

SEQ ID NO: 326915 - DNA, 201 bp, Homo sapiens
atacaaagatgtggaaattcagtaggtcagggcagttagtgtcttagcaactgtctaaaatgtgtgtttcaaagtatttcctaattttttaaacagaaaawtcaatccttcagactctcagatttttggacccgctgtagggaaaactcatgtttctctttctcatattctgttacttgaatgtatgtgaaataagattag

SEQ ID NO: 326916 - DNA, 201 bp, Homo sapiens
tgaggaagacattcttctgcctgaaataaaacaacaggggaatactgatcacagaactcacttttcctacgctctcagtgtctttatattttctttttttwaaaaaaaaaaaaaagaaaaatgatctgtagtattcatgtctcaaagctaactctgagggcaaagggagctgtctttccccaaagctaaaaatctgcctat

SEQ ID NO: 326917 - DNA, 201 bp, Homo sapiens
aacaacaatgtacttacaagagctggaaagatggctgaataggaatagctctggtctgctgttcccagtgagattgacacagaaggcaggggatttctgcrtttcccatttcatctcattgggactggttggacagtgggtgcagcccacaaagggtgagctaaagcagggtgtggcgttgcctcacccaggaagcacaag

SEQ ID NO: 326918 - DNA, 201 bp, Homo sapiens
aataataggttatccagaaataaactctatctcttttctttagaaatacatgaagcatctgtatatacatgtgcatgtgtgttttcttcagggcagtactmaaattaattttcatctaccttgcctatattatctggcaatatatacacactcccaagagaggtcaattctagaaaaagttgactccatgataaagtgtaa

SEQ ID NO: 326919 - DNA, 201 bp, Homo sapiens
agtcaaaggtaactttgaaatcagtgttcataaccactgttagtatgattttctcgtaatgaaggagtcaatgaaaaataataggttatccagaaataaaytctatctcttttctttagaaatacatgaagcatctgtatatacatgtgcatgtgtgttttcttcagggcagtactcaaattaattttcatctaccttgcc

SEQ ID NO: 326920 - DNA, 201 bp, Homo sapiens
taatgtcggccaaaattttcctgtaactgaaaaactggttttttacatttttaggatacaattttgaaccagctgaacacatttactactcccagtgtagragggactgtaacgtacgatcaaattcctaatggaagaattcagtgtttatcatatatacagtctgaagccattttatcacagaagcctagccttgatcat

SEQ ID NO: 326921 - DNA, 201 bp, Homo sapiens
acctttctggccttgtgtttttactggccaattggtgcataattgatcagcataactgaatttattatgggatggtccaattttgctaaacaagtgatgcscaatctaccgtggttttcctaaaacagcttacatttcatgtaattttaattgcatcaataaacttaaattcacagaaaattttagcacgttataaattaa

SEQ ID NO: 326922 - DNA, 201 bp, Homo sapiens
ctcatgatgaatgtttttgattacccagcttcaaaaactgttcagcacctctgcagtgcattttccttcttggtgtaataggctactgtccttaactacayatcaacaataagctgtgtaatgatgcttcaattataatacttcattaaatatttggtatcggattttttttaattagcatatgaaaagaatcaagaaaaa

SEQ ID NO: 326923 - DNA, 201 bp, Homo sapiens
caaaataggcaataagcaacttaacaaacaaataaatatataattacaaccttaatcagtagtataaagggctgtcaagggagttctgatgtctcagggtrctccagggcaggccttctgggatggcggctgggtgttttatgatgggaaggagacagagtatattctaggatgtggattgagctaaggagggaaataaat

SEQ ID NO: 326924 - DNA, 201 bp, Homo sapiens
ttggaaccatatcattgaatagaatggtggcctaaggggatttccacacgtatacctcatatctaggcccataagaaattgaaagaggctttccaaacagyattactctcaaaattatcttctgagttcatttatcctttgttaccgggctgctctccacatgatacatttataaactgaaactcctattgtcaaggtcaa

SEQ ID NO: 326925 - DNA, 201 bp, Homo sapiens
gtcattagggtagcaaaggtgaataaaagagacatggtcaaaataggcaataagcaacttaacaaacaaataaatatataattacaaccttaatcagtagyataaagggctgtcaagggagttctgatgtctcagggtactccagggcaggccttctgggatggcggctgggtgttttatgatgggaaggagacagagtat

SEQ ID NO: 326926 - DNA, 201 bp, Homo sapiens
ttctcctccaaaggatcacaactcctcgccagcaagggaacaaaacaggacagagaatgagtttgataaattgacagatgtcagcttcagaacgtgggtartaacaaactcctccgagctaagggaccatgttactaatttaatgcaaggaagctaagtacctggaaaaaaggttagaggaattgctaactagaataagca

SEQ ID NO: 326927 - DNA, 201 bp, Homo sapiens
ttcagaaaggcctataattcaaattgttggaaccatatcattgaatagaatggtggcctaaggggatttccacacgtatacctcatatctaggcccataaraaattgaaagaggctttccaaacagcattactctcaaaattatcttctgagttcatttatcctttgttaccgggctgctctccacatgatacatttataa

SEQ ID NO: 326928 - DNA, 201 bp, Homo sapiens
tcctcgccagcaagggaacaaaacaggacagagaatgagtttgataaattgacagatgtcagcttcagaacgtgggtaataacaaactcctccgagctaarggaccatgttactaatttaatgcaaggaagctaagtacctggaaaaaaggttagaggaattgctaactagaataagcagtttagagaaaaacataaatga

SEQ ID NO: 326929 - DNA, 201 bp, Homo sapiens
aatgaaagtaggctatggcctcactttatgcttactcatccagtttttgatccctacagagagtttttttttttttttttttctaccatggataataaaarcactgtagtaattttatctatagcttgatactgccaggtttgacaaagcagtgttcctctcttaaatgtatttgatcaagtaatttttcagaaaggccta

SEQ ID NO: 326930 - DNA, 201 bp, Homo sapiens
atgcaaaggcaacttgtagaatctatgaattgttctacctattaaaaaaaagtttttaaggcactgagatccaagccagaatgacatcaaatagttttaamtaataagctttccttagaagtaaagccgtttggtagtaagtaatagaaagtgattctcttttgtagccaggttttaacctccaaaatgcacagcaacact

SEQ ID NO: 326931 - DNA, 201 bp, Homo sapiens
ggcaggtgtgctatgaatggcacaggtaagattgaatcacagatgaaatattattgctttcagcatttgctctaatttctcatcactacccagcacatatytgaaaactgagcagttttgatatccatcgtcttagaacacgacctgttttttaagagaacggtgggtgcaaggattaaaaaggaaaaggaaaaaataaaa

SEQ ID NO: 326932 - DNA, 201 bp, Homo sapiens
tatgctgaaagcaccacaggcatatataaaatttggactgcatctcatttgtagttactacttaaaaatggaattcagccaaaggatcatttctttttcayctataaaataaaagcactttcacaaagaatcctagagctgggagaaaaaaaagaaacaactttaaagataatctagtctagtgattttcgaattgtgctc

SEQ ID NO: 326933 - DNA, 201 bp, Homo sapiens
gaaaactaggctttaaatcacaatatctacattaaattacatctctgctactgattacatgttggaactggggaaaattatttactcttttgtcattaggrtagcaaaggtgaataaaagagacatggtcaaaataggcaataagcaacttaacaaacaaataaatatataattacaaccttaatcagtagtataaagggc

SEQ ID NO: 326934 - DNA, 201 bp, Homo sapiens
aatgaattccttaagccaaaaattacaagcaatatctttctctctcagaagtagtagttttgttgttcctgatttaattctgaaaataacacaaaggcatyaagaatcaagactagtttcaatttgcttccaaggagggagttttaatctttccaattctttctttttttgtttctcttcttgttttaatcacagatttat

SEQ ID NO: 326935 - DNA, 201 bp, Homo sapiens
tgatggaaaactaggctttaaatcacaatatctacattaaattacatctctgctactgattacatgttggaactggggaaaattatttactcttttgtcaytagggtagcaaaggtgaataaaagagacatggtcaaaataggcaataagcaacttaacaaacaaataaatatataattacaaccttaatcagtagtataa

SEQ ID NO: 326936 - DNA, 201 bp, Homo sapiens
aaagtgcctgcctgacacatgaaaaaatgcttatcatcactggcgatcagagaaatgcaaatcaaaaccacaatgagataccatctcacaccagttagaayggtgatcattaaaaagtcaggaaacagcaggtgctggagaggatgtggagaaataggaacacttttacactgttggtgggactgtaaactagttcaacca

SEQ ID NO: 326937 - DNA, 201 bp, Homo sapiens
catgtggagttttcagaactcatgacattttttcccacagaaaatcacattcctggtctatttccagtgtttaaaaggaaaggtaaactggcatttagtakattataggcttttcatcagcttatttggtttgatgactattcctaatatataccccaagtgtagtatttaaaaaaaacagtctgagtaaatttttacagc

SEQ ID NO: 326938 - DNA, 201 bp, Homo sapiens
agaagcaataggaatcagcttgaaagagcatcagagtgcgttcctacctaatctgagagacacaaagcctctatttatcttaaaataacttcacagagatktctgagtccaagaaggttaagaatagcacagacagacaccttattttagaactcaaaagaactggagggcatcagtttgtccaacacatcttgtttagca

SEQ ID NO: 326939 - DNA, 201 bp, Homo sapiens
tgcttatcatcactggcgatcagagaaatgcaaatcaaaaccacaatgagataccatctcacaccagttagaatggtgatcattaaaaagtcaggaaacarcaggtgctggagaggatgtggagaaataggaacacttttacactgttggtgggactgtaaactagttcaaccattgtggaagacagtgtggcaattcctt

SEQ ID NO: 326940 - DNA, 201 bp, Homo sapiens
atagaaaagttgaagatgccaaattcacttcaccttattctgaattatttcatactttaaaaatattaagtaggcaggttgtaaatttcagaatctccatraatattataaacctatatgttatttaccctttcttttcatttgttatgtttccttggtctttctaaaatggtataaatccccattgaaaagaccttttat

SEQ ID NO: 326941 - DNA, 201 bp, Homo sapiens
accagtgtaaacatttgactagttataggcaaatacatttaggttatgggcatcgcatatgtattttaagtaactgcaaaatgtgaacagtgtgatagaamagttgaagatgccaaattcacttcaccttattctgaattatttcatactttaaaaatattaagtaggcaggttgtaaatttcagaatctccatgaatatt

SEQ ID NO: 326942 - DNA, 201 bp, Homo sapiens
tctcttttctcataataaaaccagtgtaaacatttgactagttataggcaaatacatttaggttatgggcatcgcatatgtattttaagtaactgcaaaaygtgaacagtgtgatagaaaagttgaagatgccaaattcacttcaccttattctgaattatttcatactttaaaaatattaagtaggcaggttgtaaattt

SEQ ID NO: 326943 - DNA, 201 bp, Homo sapiens
atatgtggatttttaaaatgtagatctatttttaaagtattattacatctcatggaacttgcgtatctagtccatgccatttaaaaaataaaagtaaaggrtgaccaagtattcaaactcttttgttgtcccattcatgagttgactgtgattaagagtttcatcactacatgatgaagatttatttgaagaatagcaatt

SEQ ID NO: 326944 - DNA, 201 bp, Homo sapiens
aattttttactacatgtaggatatgaaacaaataacaatattactgagtttttgttttatagccacaaaaaaatgataatgataccatccttatttacctsaaggaactctaataaggttcaaatatttgtattttagagatactgggcattatagtgctttgcattaggtaaaattttaaatttgtctaatatgatcttc

SEQ ID NO: 326945 - DNA, 201 bp, Homo sapiens
atattccatcttgagaagccactttctttgctcatccgtaaggaacaactcctcatgtattcaggttttatcatgagattgcagcagttcagtcccatctsctggctccacttctagttctagttatcttgctattccaccatttttgcaatttcttcctctactgaagtcttgaacccctcaaagtcatccatgaagatt

SEQ ID NO: 326946 - DNA, 201 bp, Homo sapiens
attagtagtattttgatttgtattcttctgctaaaaagaaagaattagacctctaaaaagatggattttattgcaaatatttgtcatgtagctacattggmtatttctgatgtggaatatagaatgcatattaatatgaccataacataccttaaaaagtgattggtgaatgtgccttaatttacttccttcagcaatttt

SEQ ID NO: 326947 - DNA, 201 bp, Homo sapiens
cttcatatcagcagtaaagctgttctacttccttatcattcatgtgttcactggagtagcacttttaatttccttcaggaactttgcattcacaactaggytgtttggtgcgagaggcctagctttcagcacatctgggctttaagcttaattatttctagtttgtgatttaaagttagttagatacacgcgactctccct

SEQ ID NO: 326948 - DNA, 201 bp, Homo sapiens
gaattaaatttgatcgtgttcagacgaggagatgagttcaaggttaggcctatgcttttgtgtcactagtgattagatgatcattggagctgtgtaaaatragacattatttcaataatgtcatcaagtaatttagatatgttataatttaattgttttgttttgatggtgaaggaacaaaatcattattctgtgatattc

SEQ ID NO: 326949 - DNA, 201 bp, Homo sapiens
gtgtattctataaacttcttaatttttgtagtagtttagctttgtggcactagagaggatattttgtttgtattaggtgtagttctttaaataatttaacrtagtttagagattagaagtcattatttgtaagtgatagcgttttgttttgttttgtttttcctttcttacacctcttcttcaaaatgtgggctggtaaga

SEQ ID NO: 326950 - DNA, 201 bp, Homo sapiens
cttttaatttccttcaggaactttgcattcacaactaggctgtttggtgcgagaggcctagctttcagcacatctgggctttaagcttaattatttctagyttgtgatttaaagttagttagatacacgcgactctccctttcacttgaacacttagaggccattgtagggttattaactggcctaatttcgatattgttg

SEQ ID NO: 326951 - DNA, 201 bp, Homo sapiens
ccctacctacattacagagagatgatgcttatttcatatctatgtctgcacaaaggagactgtgatctgaccagaaaggttgttagctttctttggcagaygtgtgtcatctctagaagcgggatttatgatcactggcttcatttatctgaattaaatttgatcgtgttcagacgaggagatgagttcaaggttaggcct

SEQ ID NO: 326952 - DNA, 201 bp, Homo sapiens
aggtgcattataattggtactcttcttgtataaggacatttttgaaaggtaatgcataacatgaagaacaagacataattactacatacttctatttaggyaagaaaatatgatccagaagtgttgagctagatccccagaggaccacagcaagttaatgagtagaattcacattttaaaatacagaagagcctttgttat

SEQ ID NO: 326953 - DNA, 201 bp, Homo sapiens
ttgccaaagacttgtctttgctacagcctggccttttttttttttttttttttttttttttttttcatttttttcaatctcaatgcagtaatttgcttctytttaaaagaactgttggctcctatggtcttgcagtccagcccgtctctgtgcctccatctaaagtcttctgtgtttttcttggctttttgtagtcacttc

SEQ ID NO: 326954 - DNA, 201 bp, Homo sapiens
caggtgcattataattggtactcttcttgtataaggacatttttgaaaggtaatgcataacatgaagaacaagacataattactacatacttctatttagrcaagaaaatatgatccagaagtgttgagctagatccccagaggaccacagcaagttaatgagtagaattcacattttaaaatacagaagagcctttgtta

SEQ ID NO: 326955 - DNA, 201 bp, Homo sapiens
gacttgtctttgctacagcctggccttttttttttttttttttttttttttttttttcatttttttcaatctcaatgcagtaatttgcttctctttaaaaraactgttggctcctatggtcttgcagtccagcccgtctctgtgcctccatctaaagtcttctgtgtttttcttggctttttgtagtcacttcttttacat

SEQ ID NO: 326956 - DNA, 201 bp, Homo sapiens
tacccatttaacccatcaccactgattgaaaagattctttttccattgcaatacagggacatagctgtgtataaatcatctgagagtacatatgggtgggyctgtttctagacttctttttctgttccactattttgcttgtccttgagctaacacttcaccatcttaatttctgtggctttataataagtcttggtaact

SEQ ID NO: 326957 - DNA, 201 bp, Homo sapiens
tacttaaaaatttttaattcaaataaaaagcattttaggtttgtataaacaacagcactactaggtatttatgtgggctaagagtgaaatttttcatctayatcctccttttaaaaacatcttcttataaattcatgtcatagaaaatatttggttcagcagcttgtggtggtagattgcagtattctagccttgtatgtg

SEQ ID NO: 326958 - DNA, 201 bp, Homo sapiens
ttcaatctcaatgcagtaatttgcttctctttaaaagaactgttggctcctatggtcttgcagtccagcccgtctctgtgcctccatctaaagtcttctgkgtttttcttggctttttgtagtcacttcttttacattttgaagttaacttttcaaaactaccttcttacctttttgttgcctttttgtcttacatatttc

SEQ ID NO: 326959 - DNA, 201 bp, Homo sapiens
agaaaacaacatagtatttacttcatgtgtacgtacacttacaggatagtcataaaccctcctgaagactaagtgaaaatcacgtatataccctgttatascatctcttttctcataataaaaccagtgtaaacatttgactagttataggcaaatacatttaggttatgggcatcgcatatgtattttaagtaactgcaa

SEQ ID NO: 326960 - DNA, 201 bp, Homo sapiens
attgtctataagatgtattatttatctttcacatctaggtctctaatatgttattttgtatatggtgtgaggtagagggtcagtgtatgtttttcttcatrcagatacccatttaacccatcaccactgattgaaaagattctttttccattgcaatacagggacatagctgtgtataaatcatctgagagtacatatggg

SEQ ID NO: 326961 - DNA, 201 bp, Homo sapiens
caattatacctaatttttgttacttaaaaatttttaattcaaataaaaagcattttaggtttgtataaacaacagcactactaggtatttatgtgggctargagtgaaatttttcatctatatcctccttttaaaaacatcttcttataaattcatgtcatagaaaatatttggttcagcagcttgtggtggtagattgca

SEQ ID NO: 326962 - DNA, 201 bp, Homo sapiens
atgataatgggccagcgatctgactgtgtctttgttttctcatcattgtgcttctagtgttttgcagtgcctaccaagctcagtggacatttgagtaaatrcatggagaaaagtatgaatgaatgaatgaaaaaatgaatgcagagccaagcctattgggcccaatcacattgtatggtcagtactcattactgaccctct

SEQ ID NO: 326963 - DNA, 201 bp, Homo sapiens
attggacatttaaaaagccttaacactcagccaagcaacttactgtgacaagataggaaagtaaacaccatttattttgcattaccaaccatttttattayagaaaaatgcacatttaagcaaaatagaaactatctgtctactttcagcccgattggccactgaaaataggtttcttttatggggaaaatccttttcctc

SEQ ID NO: 326964 - DNA, 201 bp, Homo sapiens
ggaatttttaatatcttactctgtgcaattatacctaatttttgttacttaaaaatttttaattcaaataaaaagcattttaggtttgtataaacaacaghactactaggtatttatgtgggctaagagtgaaatttttcatctatatcctccttttaaaaacatcttcttataaattcatgtcatagaaaatatttggtt

SEQ ID NO: 326965 - DNA, 201 bp, Homo sapiens
atgtataattagagtttttaagcattttttaaccaccagcacattagcaaacaacaaacactattgcacggtgcagagtttgtttacttggcaaaatgtarataatgcagctgcttcacacaacagtcaaggggtagggggtgctgactgcagaaaaaattcagccctaggactatatttagttagaatgtgacatcattt

SEQ ID NO: 326966 - DNA, 201 bp, Homo sapiens
ttacagaaaaatgcacatttaagcaaaatagaaactatctgtctactttcagcccgattggccactgaaaataggtttcttttatggggaaaatccttttyctcatccctatagagagctgtaaattgtgatttttccatctctccaacaatgcttcaatttattccaatatgatagtgttcttcgttgtctgaaaaaggc

SEQ ID NO: 326967 - DNA, 201 bp, Homo sapiens
tgggtgcctttatacattccttaaattttagttgactgttctcagtgtaagtattcagttacttttgtcttttcgtatagatgtcattatagtgatagctrttttgaaggcccttaagtcgtgattttctccaattttctgcggtacttacctcgagatttgcaatttgatgggtagaaaaagaagggaatttttaatatc

SEQ ID NO: 326968 - DNA, 201 bp, Homo sapiens
tcttcctacctgtctttacacagtaaactaaagtctggaggagtgtctcacatttcagcagcactcattgtcttccccaaattctgcaatcaagtgtgacrtgctgaagtgacatggattaaaaacctgggattatctgagcattaaaaagcgaatgcagggcacaggaattgcacacatatcggggagaggagaaagcat

SEQ ID NO: 326969 - DNA, 201 bp, Homo sapiens
tttaagcaaaatagaaactatctgtctactttcagcccgattggccactgaaaataggtttcttttatggggaaaatccttttcctcatccctatagagakctgtaaattgtgatttttccatctctccaacaatgcttcaatttattccaatatgatagtgttcttcgttgtctgaaaaaggccatgcttcatactgctt

SEQ ID NO: 326970 - DNA, 201 bp, Homo sapiens
ctaggctttgctcagagaatttctctgtaggaggacaaaaccagattatgcatttactataatacctgagaagtaggaagtgattaatatgttattattawacagtatgttcaaagtccttgtatagttactactaaagatcagtatgagcagaatccctaaacaggaatatgaaagcagagtatatactagactgaagtg

SEQ ID NO: 326971 - DNA, 201 bp, Homo sapiens
tgagatctagaaagagaatatgctcatctgaaacaatgaataatgtgatgcaattacactcatttcaagtaatttattttctgatttaggatacactagcmtggctaattaattgggagtagccagagaaagaagggaaacagctaagtgctggcaatcaggagacctacgttccagcctctgctctgtcactactttact

SEQ ID NO: 326972 - DNA, 201 bp, Homo sapiens
gggatccacctgcctcagcctcccaaagtgctggaattataggcgttagccaccacacccggccttcttggctaatttttatatttttttgtagagatggktttaccatcttgcccaggctggtctcgaactcctgagctcaagtgatctgccagccttggcttcccaaagtgctgggattatagtcgtgagccaccacac

SEQ ID NO: 326973 - DNA, 201 bp, Homo sapiens
aagtaagaaaattaagattcagagaatttaatagatttatccagaattgttgacacaaagccagagagctggtacttgttcctatgcctgtgtctggaatktcagagaaggatttcatcatcttatatgtatgaaaatcattagtatgactatttttgttagagaacaaaaggaaattataaagtcagaccaaggacagca

SEQ ID NO: 326974 - DNA, 201 bp, Homo sapiens
gacttcttgctttacaaatctactatgagacactgccttgagccatttttcaaaataaattggagggatataaatatgtaaatatgtggaacataaaacartatttaagtcaaccattattaccatgaactttatgcaattcacttgtaggatattgctttacagagtagtcttttaaatagtaatcaaatttcccataat

SEQ ID NO: 326975 - DNA, 201 bp, Homo sapiens
gctaatttttatatttttttgtagagatggttttaccatcttgcccaggctggtctcgaactcctgagctcaagtgatctgccagccttggcttcccaaartgctgggattatagtcgtgagccaccacacccagctgtacctgacccatttcaagtaaccttgacttggttgggagccccatcccctcctgcctacgtag

SEQ ID NO: 326976 - DNA, 201 bp, Homo sapiens
atgaggttgacagctttcccataggcttctgctggactcaagtcttcagactgtgggtctagtatgttttccactgcagtatggtccttaaaattttgttsaaatcaatttgattaaagggtcccttaacattttctagatgcattaggaaaataaccagaaagcacctgtatattgagaggaagtgttatgtttgacacc

SEQ ID NO: 326977 - DNA, 201 bp, Homo sapiens
ggagtgcagtggtgtgatctcagctcactgcaacttttgcctcccgggttcaagcgattcccatgcctcagcctccagagtagctgggactacaggcatgmgccaccatagctggctaatttttgtgtttttagtagagacagggttttactgtgttggccaggctggtctcgaactcctgaccttaggtgatctgcccac

SEQ ID NO: 326978 - DNA, 201 bp, Homo sapiens
gctgaacatccatctccatctctgtagtgcagccgcatccactggagccacggtgggattctgccttccctccaagactgcctcttagttattatcacccsctaaagtccaaggagagcttctttccatggacagaccacctagtaccactacttcctcttgctttttgtttattttttgccccatcaggttccaatcaag

SEQ ID NO: 326979 - DNA, 201 bp, Homo sapiens
gcctcccaggttcacatcattctcctgcctcagcctcccgagtagctgggattacaggtgaccaccaccatgcctagctaatttctccgtttctttaaatrctattttattccttgaacatgtttataatgatagctatttttcctgaatagaattcatattgtcttgtttctttgcctatccctaattttatgttgacaa

SEQ ID NO: 326980 - DNA, 201 bp, Homo sapiens
agctaattggaccacaactccatgatgtggctgaaagttaagcttcagtggcctaaggtctactgtattttaaggcaagttgctgtctaaccaaaaagcaygcccctctatcacaggtgctggtaattccccaactcatgttgctgatcttgcaatgtattcaaagatagttcaatcagccgtctactttcctgtgtccat

SEQ ID NO: 326981 - DNA, 201 bp, Homo sapiens
tttatatcatatgtaattatacataattattatatataatttattttcatattcatgtcaaattatgagccttttaattatgaggctgtagcattaataaygataggtcttctttctgtagttgattttagtaattactttctcccttttattcttggataatcgagttaaaggtttatcagttttcttactgcttccaaa

SEQ ID NO: 326982 - DNA, 201 bp, Homo sapiens
ggctgtgttgttttttgctttactcttgttctcagaaagctaatcgaagagtaaaatcagaaagctctgggagtgagtttatttttatctctattgtcttyagttcattggagcttttttgttttttttaattgtacatctatgcagcttactctaatgaatctacacttcattactctgaggccgtagataaacctacat

SEQ ID NO: 326983 - DNA, 201 bp, Homo sapiens
tgcaagtagaagtgaggagttggcgagtttgctaatgatggagaggcctccatggactcatctgtctagggaggtgaggtggggagatgctaagacaagayaaaggagttgacagcttctgtgaaattcaagtaccactttgattccctgattgttacaagaagaatatttgcctccccaaataaactctaaattccgcaa

SEQ ID NO: 326984 - DNA, 201 bp, Homo sapiens
agttctgcaagtagaagtgaggagttggcgagtttgctaatgatggagaggcctccatggactcatctgtctagggaggtgaggtggggagatgctaagamaagacaaaggagttgacagcttctgtgaaattcaagtaccactttgattccctgattgttacaagaagaatatttgcctccccaaataaactctaaattc

SEQ ID NO: 326985 - DNA, 201 bp, Homo sapiens
ttgatttttggtttctaccaaaggggaggggccggccaggcgccgtggctcatgcctgtaaattccagcaatttggggggccgaggctggtggatcatctraggtagggaatttgagaccagcctgaccaacatggagaagccccgtctctactaaaagtacaaaattatccaggcgtggtggcgcacgcctgtaatccca

SEQ ID NO: 326986 - DNA, 201 bp, Homo sapiens
atgacaacgttttaaaactctttagtattattaccaatgatgaccaaactcttcatcttccacatctttcctagaaatggtttctgtgttagaaaacaatyattctagcacatcacataataagtgtttaaaaataatgtgataagaatgtggacagccagaattatccatgttgtgatcatcgaaagaaaactaagcaaa

SEQ ID NO: 326987 - DNA, 201 bp, Homo sapiens
ttaaaactctctttactgtctccttccaagatatgcccttggcacctcactttctatctctaagttgtgtaccaggggattcttctaaacaaagggacaaytgaggactagcaaaaaaaaaaaaaaaaattctccttgttacagaatagtatagataaatttttatgaattattaaaatagagagtaaaatttccttggga

SEQ ID NO: 326988 - DNA, 201 bp, Homo sapiens
gattacttaaattaattacaacatatctatatattattaagcaaccaatgaaaatcatgtttttgaagtacaaatgctgtcatgatataatgctaagtaaraaagctagcatagagaaaatttatcatttaatatcaattttggatgtgtatatatatatacaaatatatatatatatggtttctcaatatagttttctgt

SEQ ID NO: 326989 - DNA, 201 bp, Homo sapiens
actattactgtctgcatctttattcttttaatgtgattctaaagtcggttatagatgacatagagtaagcaaaggcttaaagaggattaataaacgtaagyagtatacatggtcaattcagataatccagtgaagggaaatggccattcctctactgatggcaacagatgccatcctgaaaatagctccttggccttcaaa

SEQ ID NO: 326990 - DNA, 201 bp, Homo sapiens
tatgggagaacatactttcaatgaatctgacaaaggtctaatgtctagaatctataagaaatgtaaacaattaaacaagcaaaaaacaaccctattaaaartgggcaaaagacacaaagaagtatttcttaaaagaagacatacaagcagccaacaaacacatgaaaaaatgctctacatcactaatcatcagagaaatac

SEQ ID NO: 326991 - DNA, 201 bp, Homo sapiens
tatttcttaaaagaagacatacaagcagccaacaaacacatgaaaaaatgctctacatcactaatcatcagagaaatacaaatcaaaaccacaatgagatrccatttcacatcactcagaatggtgattattaaaagtcaaaaaacagcaaatgctggagaggctacagagaaatgggaatgcttatacactgttggtggg

SEQ ID NO: 326992 - DNA, 201 bp, Homo sapiens
tgtttttttttttttctccctgggggcagtcaatgaagagtaatatgcctgcaaatgaaagcagaaagaaacttaaattttatctactagtctattaaacrtctctaaaacattgatccacccaaaaacaagttaactagaataggaatgtgtttcctagttgaatgttgtcaccatttatctatggcacatatttatgtc

SEQ ID NO: 326993 - DNA, 201 bp, Homo sapiens
aatgtgcactatgtgggtctgttatcattattttcttttagtttgtatctttttggagatttatccaagtgccagattactcagtgctataattttctttyagttaaacaaagggggtcagacagacattgcatcatccagacatgccttgttggacatgtagaatccgatggagcactgcacaccagaatgattggccaa

SEQ ID NO: 326994 - DNA, 201 bp, Homo sapiens
atgattgtttgtagtaaagaaaatgaatggctagctggtgtaatcctgtgtatctgttgattagttgctcagggcaccatggagaaagcattgtggtatarttgtctggtttgagttgaattctccattaggggaaaagaagtttgacaagctctttaacctgcagctcacggaatttcatgcagtcttactgaataagat

SEQ ID NO: 326995 - DNA, 201 bp, Homo sapiens
gagatgctgggggaggtactagatggcaaaaatcagccagagaagatcataatgtagctggattgcatgaacttcaaaaaagaaggggtttgttactacaraagcaagagagtggaagaaaaatacctgcaggaagcgatgggaagccaggaaagaaaccccaaaccctgactctgaggttcatgggcaggggaggaggga

SEQ ID NO: 326996 - DNA, 201 bp, Homo sapiens
tctttccatttttcaaatcgaaaatgagaatgatgagacctctgaaatttatcaggaaaaaaggttactagttacattcatgttgggcctaatttagaccrttatatgtcttttaatattttatgacaacgttttaaaactctttagtattattaccaatgatgaccaaactcttcatcttccacatctttcctagaaatg

SEQ ID NO: 326997 - DNA, 201 bp, Homo sapiens
aaaaagaaggccatgaaccccgcaaaagaatcttccctgagagaaaggagatgctgggggaggtactagatggcaaaaatcagccagagaagatcataatrtagctggattgcatgaacttcaaaaaagaaggggtttgttactacaaaagcaagagagtggaagaaaaatacctgcaggaagcgatgggaagccaggaaa

SEQ ID NO: 326998 - DNA, 201 bp, Homo sapiens
gagaattgaagaatctgagagcttcagtggtacgtgggcccgacctatgaaggttgaaatcacccaggatgatgacagagtttggagaaaaaagaaggccmtgaaccccgcaaaagaatcttccctgagagaaaggagatgctgggggaggtactagatggcaaaaatcagccagagaagatcataatgtagctggattgc

SEQ ID NO: 326999 - DNA, 201 bp, Homo sapiens
cacagtaaattgggggtacttttgtaacttaaagtcagataaaccagtggaattcagaagaacattcttggctaaagatatgagtctggaaatcatttgcrtatagctaagaactgatgccctgaggtggaatgagatctaggatgaaaatagggtctggatagaagttcttggccagagccttgaggagtgtcaccattg

SEQ ID NO: 327000 - DNA, 201 bp, Homo sapiens
tggaagtgatagaacttagcaatagattaagtatgacagagggagagaataaaggcagattgtcaatgataacacctaggtttctggcttgtgcactgaartggattgtagtgcaatgttagggagggtttattttgaaaggcatattatttcttttattttaaccacagtaaattgggggtacttttgtaacttaaagtc

SEQ ID NO: 327001 - DNA, 201 bp, Homo sapiens
ccgccatgctcggctaattttgtatttttagtagagacagggtttcaccatgttggccaggctggcctcgaactcctgacctcatgtgatccgtccacctyggcctcccaaagtgctgggattacaggcgtgagccaccgcacctggcctgtttgttttttttgttttttttttttttaataataacatctaagttattgt

SEQ ID NO: 327002 - DNA, 201 bp, Homo sapiens
ttagtagatatttaaggagagagaatagttaactaggtgggagtgacagaaagttctaggcaggtggaacagaatgatcgatagtttaatgacagaatggrctgtcagagatctccaacccctgggccatgaatgggtgccaattcctaaccttgttaggaacccgaccacacagcaggaggtaagcagtggggagggagc

SEQ ID NO: 327003 - DNA, 201 bp, Homo sapiens
cctgtgaggtaggtattcttcctctaatttacatatgagtaaaatgaggaccagtggtactaagtgtcctggccaagatcatacagctaatactagtaatrgttaatacgaacagagggcatactaggtgctttgcaaaggatgttacacacattaactgatgtaatcctcacaggaatggtgctcctcattttatagctg

SEQ ID NO: 327004 - DNA, 201 bp, Homo sapiens
ttgcaatttactgaggatattaggtttcatttaagactcacaataaccctgtgaggtaggtattcttcctctaatttacatatgagtaaaatgaggaccartggtactaagtgtcctggccaagatcatacagctaatactagtaatggttaatacgaacagagggcatactaggtgctttgcaaaggatgttacacacat

SEQ ID NO: 327005 - DNA, 201 bp, Homo sapiens
ttattggaattcttaaagggataatagtgtaaggttactactcctgttttctagattggttaatgtaacacggtcaggtattacaagaagctccgtgccaygctgtgtcacttgccgtggttggcaagtttagaaattaggaaaggttgtagctttttattcagtattctattagaaaaaatgtgaggaagaaacagaact

SEQ ID NO: 327006 - DNA, 201 bp, Homo sapiens
ccagttccttaccaaaccaggacaaagccaaatctcagtagagtgtgtgtatctactcatatgccactagacaagacaaatctgcctttacatctggctgyggtagcaattcccagatgcacttaattctgacacatggccattattgaaccaaaagcaattgcctggcatgattatagttcttatttgttttcgttttaa

SEQ ID NO: 327007 - DNA, 201 bp, Homo sapiens
ctaaaaggcctctctacacactacctccagttcatcgtcactaatttactcttccacctattccatattctagggaacaccccttatttcagtgcccccayttaccccatcctctccttaggcttattatacaatattctcatagtgtatccactactttctgactgtgattttcagatttgttggcagggtcatgtttct

SEQ ID NO: 327008 - DNA, 201 bp, Homo sapiens
cttttaagtgcagacaaaatttctttgatatgtgatctatggaaaaactaatatccaaatgagaaagctgcatatatttgaagtactctgtaatgcaaaakaaaacactggtgcttgataaatggaaaccagacccataagagcattacagatttcaacaggggcaagaatctattcttttaaatggaaattcaaatatat

SEQ ID NO: 327009 - DNA, 201 bp, Homo sapiens
tttagaacttcatttcctatttcctatctcatttcctattttatggcatgactaacctgaggcaaggacacaatatgggaatcatcaaatgcatcattcargtggaccagagtcataagattgcagaacaaatgtcaagtacatgtaaacctaatgataatacaggtgatctgcttaccttaaatattgttgtatgtatct

SEQ ID NO: 327010 - DNA, 201 bp, Homo sapiens
aacttgctagaatccagctcttctgattcttggtctgggtcttccactttcccacatcactcataacactttcctaccggtgcaggatgtgacagtgtctkaagtcacttagcatgggtggaaaagctcagtcttatctttttgcctaaaaatctattttatcttttggcattagccttatggataacataaatattaggt

SEQ ID NO: 327011 - DNA, 201 bp, Homo sapiens
acagcaaaactgagctttttgatggctttttaacctctgctgtccttcaaatcaaatccctatgtgtcatagataagtaaactaaatgaaaaagatgacartttggagagctaagacagctcattctgtctgtaagctagtaggtcatgtataccagcaggcaagtagtattgagacaacttatgttcttccctcttcacc

SEQ ID NO: 327012 - DNA, 201 bp, Homo sapiens
gcaataggattcctaagtgatttgttgaagtccctatatagattaaagctttttaataaaatatttcctggtaaacttcttccatttaagaaaaaaaaaamccctttattgtttatatgatttaacatatttggatttattttaagaccaatgggaatgtaaggtaatacataaaatgattattaaaccataacttaaatg

SEQ ID NO: 327013 - DNA, 201 bp, Homo sapiens
gggggcagtcaatgaagagtaatatgcctgcaaatgaaagcagaaagaaacttaaattttatctactagtctattaaacatctctaaaacattgatccacycaaaaacaagttaactagaataggaatgtgtttcctagttgaatgttgtcaccatttatctatggcacatatttatgtctcaggacagcttgcaaacctt

SEQ ID NO: 327014 - DNA, 201 bp, Homo sapiens
acaagttaactagaataggaatgtgtttcctagttgaatgttgtcaccatttatctatggcacatatttatgtctcaggacagcttgcaaaccttggtagwtttccattcattaaatgttcttgggaaaaatgtagattaaaacaaaagtctgtacttggttataagcatcactaggaagttttcaacctgtcttggtttt

SEQ ID NO: 327015 - DNA, 201 bp, Homo sapiens
tttgcatccgtgaagtgtttttataagaattaaatgagataatgcatattaatatcaaggttattgactaacagtcctcaataaatattcacttccatttmatttgttcttttctttcattcttcccttcctatctcctttccttccctccttccctctcctcttccctttcttctttttcttctacactaattcttccta

SEQ ID NO: 327016 - DNA, 201 bp, Homo sapiens
gtaggaaaatatgaataatatactttaatgaattatcctagctctgccacttgcaagctgtgtgattttagaaatggcttattcttctggccttatttttsttatttataaaatgagaataataatagtagttacttttcagatttattatcaggattaaataaagtaatatatatctaattcttgccacatattaattgt

SEQ ID NO: 327017 - DNA, 201 bp, Homo sapiens
taatatatatctaattcttgccacatattaattgttcaataaatatttaattattattaatattattattgtttgacttcattgtctgtcatctcgttagrtaggatgatttccccatacaaattttacaaaagaggaaacttcaatagtttgccactagaatctaaacatgtaattatagatcatattcattgaacttta

SEQ ID NO: 327018 - DNA, 201 bp, Homo sapiens
ttaattgttcaataaatatttaattattattaatattattattgtttgacttcattgtctgtcatctcgttagataggatgatttccccatacaaattttrcaaaagaggaaacttcaatagtttgccactagaatctaaacatgtaattatagatcatattcattgaactttaactatgtagcagacctcatcctaaaca

SEQ ID NO: 327019 - DNA, 201 bp, Homo sapiens
gtattatattgactttgaacaggcaggaaggttttggggttttttttaatttctcatttttctcaattgtggattatatgtgtctatatcttggccagctraagtatgtctttggctcatgatattcagtaaagacataaattctaagttaacttatatctaataaagtatttcttgtttttgtatataataacaatttga

SEQ ID NO: 327020 - DNA, 201 bp, Homo sapiens
agaattgtgacagtttgatatttgtttctttgttgatatcctgaatttctatgaaaatgcttttaggctttttaaaaacttttataacttaaagatttcaytagaacatatctccggttaattctgtgttttttgtttggtttttgttgttgttgttttgttttgttttgttttgttttgttttgtaaaatgcacactcaa

SEQ ID NO: 327021 - DNA, 201 bp, Homo sapiens
aatgaaaagcaaatcttgtagtgaaaagccttagatgatttctatttattggaattcttaaagggataatagtgtaaggttactactcctgttttctagaytggttaatgtaacacggtcaggtattacaagaagctccgtgccacgctgtgtcacttgccgtggttggcaagtttagaaattaggaaaggttgtagcttt

SEQ ID NO: 327022 - DNA, 201 bp, Homo sapiens
tgagattaagtcctaccttatagtaagagaatagattcagaaaatagataatgtgaatataatggggtgagtactgccaggtattgtgaaaacataaataycaagttttagcccaatttgggtgtcaggggaggcctcctgaaggagatcatatctaatctgagtctgatagtgtgagaaagatttaagaaaggtgaaaaa

SEQ ID NO: 327023 - DNA, 201 bp, Homo sapiens
gtctctgatggtgtagaggcaagagaaagactagcaattgttgtttggccacgttgtacttgtctacctcttaagactttcctgctggcatccaacaaatrtatattctatacacactgttttgtcaggactatttctgggaatagaaagatgactgagattaagtcctaccttatagtaagagaatagattcagaaaata

SEQ ID NO: 327024 - DNA, 201 bp, Homo sapiens
gattcagtagcgacagtgtgtcctttctcattgttctcatacagcatagttaattgggcaatttggacaagcaaagagttcactgaagcagagtcctatartagagaaaattagatagataagggaggctgtagacgaggctcctaactccggcttattagttcagcagtcctagagaaagtgacaaatgaggctttttaa

SEQ ID NO: 327025 - DNA, 201 bp, Homo sapiens
gatctctcttgcctccatgaaattagttatgatacagttctattgaatgcagaggaaaaattattgagaattatactaatatatttaatttagtggggaawgttttcctagaaagacagaacctttgtatatatatacacacacacatcccctaaactgctatagtatggacattaaaaaggttagacttagtcttcagtc

SEQ ID NO: 327026 - DNA, 201 bp, Homo sapiens
gatacgtatttacctataaaaccatcaaggccatagacatatcagttatttcttgatcacataccctaatagtcaacgttaatgtttcagggattcagtakcgacagtgtgtcctttctcattgttctcatacagcatagttaattgggcaatttggacaagcaaagagttcactgaagcagagtcctatagtagagaaaa

SEQ ID NO: 327027 - DNA, 201 bp, Homo sapiens
gtaatttttatcccaagcaatttcagtatgacagcgggattatattccttgatttgtgtattcattctgaatgtttattaattgatcttgacagataaagsatatttatgaatttttaaaaccactttattgaaatataattgatatgtaagaaactgtgcagatttaatgtatacaactcaatgagtttggggatacgta

SEQ ID NO: 327028 - DNA, 201 bp, Homo sapiens
atccgctttaaaagaagaggcagcaggaaggaggaaagaggagaggcggagggaggagaggagacgcggccccggaccccccagccgcgagcggcggagcrtcgaggagcgggaggaggaggaagaggaggaggaggaggagggggaggagacaaacagcggcggcggcggcagcgagagaagcgggcgcagggcgagcag

SEQ ID NO: 327029 - DNA, 201 bp, Homo sapiens
aaagattattactaaaatcagtgaaaagaatttctgaaagattattactaaaataaattcagtgaaaagaatttctaaaacattattcccaaaataaattmagtgtaaaataaagtcttcacatttgtctactcttatttttttttttttttttttttttttttgagacggagtctaactctgttgcccaggccggcgtgc

SEQ ID NO: 327030 - DNA, 201 bp, Homo sapiens
atcagaaataagaagttttaaaatagtataatttgtgtaatttaggtataattaataaattcagacctgatacacatcctaaaacaacctttcctgggtamactttcaattattgtttatttgataaaataattgatgaatttcaactaggtgacagaatttcaaaaagattattactaaaatcagtgaaaagaatttctg

SEQ ID NO: 327031 - DNA, 201 bp, Homo sapiens
ggccattaattttaaaagaggttttctattgaaggagcccgttcatctggtgacatgataggttagtttgtattgctttctctcctccgtgccagagagawgtgttagaaaaacaaattatttattttattatatgaaaatgcttgaaattgaattaaattaagaaaataataaaagatttattctcattatttattatta

SEQ ID NO: 327032 - DNA, 201 bp, Homo sapiens
ctgcatcagcctcccaaagtgttgggattacaggcaggactataggcacgtaccattatacccagtgttattttattttttaatttttttaatcaagatgrgggtctcactatgttgcccagggtggtttcaaactcctgggctcaagcaagcctcctgccttggcatctcaaagtgttggtattatagatgtgagctatc

SEQ ID NO: 327033 - DNA, 201 bp, Homo sapiens
atgaggggaaaatgtgaagcaaaagactaaaataaaggtctccgttaataggaagaagagagccagtagaggacacagagagggattattagaaatctaasaggagaactgagccagagcagcatggcaaagggattttctagaaggagaaaaattcaaaaagtggtcaaaaactccccaaactccagaaaacttaaagca

SEQ ID NO: 327034 - DNA, 201 bp, Homo sapiens
tgacttaaaaattaagatctgttggatacggatgttttgtgtacgtttttcctgttggcactctgtgtgtactgctataattagtgtagttgctagaactmtctttttctgcttagcacatttattaaagtctgtacatattagcatggcacggtatgttgtttatcttagaaagcatttaaagcaaaagctagaaataat

SEQ ID NO: 327035 - DNA, 201 bp, Homo sapiens
gtctttcatgccaaacagctggcatatttgatggcttgtatttcctattgttagaaatttgcctcactgatttcacagggccttgtaaagtcttgaatatygccagagctagccaggagaggagtatgtcaggttgcaaccaagagctaatatttaaatactgtattcaaatggcatgtacgatttggcgactttttttct

SEQ ID NO: 327036 - DNA, 201 bp, Homo sapiens
ctgaatactgctcattgattgactattttatatatagattaacacaggctaagaaaggaaaacagtttaataatccttagtaaattagaggctggaatctrtactgctgagaattttagaatgcttggaggctattcaagactactaacagacttgacttttgacacttgtgagttttactgttgtgataaattctgtgcc

SEQ ID NO: 327037 - DNA, 201 bp, Homo sapiens
aggagaggagtatgtcaggttgcaaccaagagctaatatttaaatactgtattcaaatggcatgtacgatttggcgactttttttctttataggacactgrctgaaggaaagctttgccatcaaaggagataacctcttgacaactggccttgcaaactttttcaaaagtataagtggtgttaactgttaggaccaggtct

SEQ ID NO: 327038 - DNA, 201 bp, Homo sapiens
ttcccgttgttctttaaatcactcacaataggattttttcttctattgggtcattttttctgagtaagcaaagcctttgagttgaagatctgttgttagcrttagaaaggtttagtcaaaagctgcggtggggaggaggagtcaagtgcccagtgtgcaggcagggaagcaatgtaaaatggtgcggcatcttggtaaaac

SEQ ID NO: 327039 - DNA, 201 bp, Homo sapiens
ctaatccatctgctatagcttattttttcagttacctagtttgagataaacttctagttgatcaaataaaaaggattagaactttcagaccatcaagttamagactaaataaatgcaaagtgttttatattagcaagtatctgcttgagactttcccgttgttctttaaatcactcacaataggattttttcttctattgg

SEQ ID NO: 327040 - DNA, 201 bp, Homo sapiens
ttattcactgtcttttcatgttattaggtatcatctgttgaaaggcccccatcttctcatgcttggggtgcagtctccttgtgtttggttttgacctcacygtagttgcttctgtgctctgcagccagcatgatctttaagaaactcaaatctgatcacgtcattccttgctttcaaatatttcagtggctccctgtttct

SEQ ID NO: 327041 - DNA, 201 bp, Homo sapiens
attattgaaccaaaagcaattgcctggcatgattatagttcttatttgttttcgttttaaggggcctcatccaggctgccaaatgtacaacaggtgccttrgttttatacttgccaatctgttgttattcaaatgaccgccctaacagagactaatggtatctaataaaattgatctcggttctggcaagccagactcaca

SEQ ID NO: 327042 - DNA, 201 bp, Homo sapiens
tagttttaaaattgggtggaataagtacctaactcctagtccaatttcctgtatctcacaaacactcatctagtggtttctacttgagataaatactaatyttcttttacaccttattacattctcataacacaccatgctttcatctatgatgacactaatcaaaatagtaatttaaaaggcaatgttgtaattagtagt

SEQ ID NO: 327043 - DNA, 201 bp, Homo sapiens
ccagactcacaagagcaagagccgtaggaactgcagtgggaaaatatgctggtggtaaatgtgcctggtgaagcacacactttttttgggggaaagtgacrtatgtctcacacatgggcctcttgtttatgttgagctgtggacattttctgaaacccagtgttacttagacactaggatttgcagtatctaatcttgttt

SEQ ID NO: 327044 - DNA, 201 bp, Homo sapiens
tgtttatgttgagctgtggacattttctgaaacccagtgttacttagacactaggatttgcagtatctaatcttgtttttgatgtacttgctgggtggcaygggacaggattggctgtgccagcttatcagtgaatggctgtgccatgcctgtaaggcacagccaggctgtctttcatgccaaacagctggcatatttgat

SEQ ID NO: 327045 - DNA, 201 bp, Homo sapiens
ttctcagtcagtttcctagagggattgactacaccattgtctaataataattaaatcttccatattacacagtttagagagtatatttaatgagagaaaartgaattgctgttgaatagaaaatagacaaagctcatagaacatattttttcattctttgaataaattttcttgtattttctaattatttgattgtattag

SEQ ID NO: 327046 - DNA, 201 bp, Homo sapiens
tcagaagtaaatgagtttaacgttgtgtgtattaatatgaaatatcagtgaaatacctagttagaagtgtgggcttagagaagttattaagattaaagatsgccaggcatggtggctcatgcctgtaatcccagcactttgggaggccgaggcgggcagatcacaaggtcaggagttcgagaccagactgaccaaaatggc

SEQ ID NO: 327047 - DNA, 201 bp, Homo sapiens
agtagtagtacagcatacattattggtagctgctttaatgatgagatcaagagagtaaaatatggctctgagttctgagcttggatgacaatgaatgatgstgtcatcctaaaggataaaaaaattcagaagtaaatgagtttaacgttgtgtgtattaatatgaaatatcagtgaaatacctagttagaagtgtgggctt

SEQ ID NO: 327048 - DNA, 201 bp, Homo sapiens
acctgcaaatgagaatataaagtaagttgattgaaggcttagggctgaaggaaagaattataggtaaataggaacattatatctcaaaattatagaggtcrtaaaagaagatactgcttaatgtagtgaaagattcttctgctcagactcccagttttgctatccgagttcttttacaacgtgtcctagtattcattgtaa

SEQ ID NO: 327049 - DNA, 201 bp, Homo sapiens
acacaatagagttggctgaattggagagaaaggaaagatctctgtgagaatggggtattaaaatgaatgctctaaacaggtaggaaaatcatacttctctstctgatcaaagtagacagcatctagcataagcccctatggtccatggtggaaaggacaggtcatctgttttaagaatagtttaaatacactgtttttcct

SEQ ID NO: 327050 - DNA, 201 bp, Homo sapiens
aaaaaaaaaaaaaaaaaaagttacttttcacatgcattttggttatgcgtgtgtaacattgttgcatttatgttacatcataaaatcctttacaaagtctctaaagctccctgttttttcttcatcttcatcttgtcagctctctcctgtaatctctaatcttctccctttctgaaggcactgaggtctttcatgttttag

SEQ ID NO: 327051 - DNA, 201 bp, Homo sapiens
  misc_feature (1)...(201): n = A,T,C or G
caacatcccccttctcccgatggagcagcttattgttccagctgacaccactatgacactcactggcttaaaaccagataccacatacgatgtaaaagtangtgctcatacgagcaaagggcccgggccatatagtcccagtgtccagttcaggacactgcctgtggatcaaggtaggatttgtctgcttacggccttcct

SEQ ID NO: 327052 - DNA, 201 bp, Homo sapiens
ttagaccttttcacatatctaacttaaaggtaaataaattatgtattcattggaagctagcctttcaccataagaagtttaatattcagattattaataaytatggttaatattgatagaatgcagaacctcatgctaagacttttacatgaatttcctcatttattattcataagaacaatataaaatagctcttaatat

SEQ ID NO: 327053 - DNA, 201 bp, Homo sapiens
atacaacacaacacacatgttttatatgtataacacagcacacatgttgttgaataattatttatctaaaaactttagaaactattgttttcatacattgkagattagctgagttatatcagcatgtgatgaatcttcccagcatgtgaaacaaaactgttgctccattggttaaggaaataaatatcttaatgatatttc

SEQ ID NO: 327054 - DNA, 201 bp, Homo sapiens
tacatctacaaagtcagtgggttttttcctagactttgccagcccattagatttatccaaatgtgtaccatagcaatattataaagtgaaacatcagttamtaagaacatgctcataaatgacaaatattagaatgcagtctctatttgtggtttagatcaaaaaattatttttatttatcctagctttacgtgcatctca

SEQ ID NO: 327055 - DNA, 201 bp, Homo sapiens
aattatgtgtaaaaaaaaaattaagaatgggcatgatattttttcagagagatgtggtgtttgaaatttatgtaactgtaggcccaccgaattacatactragccccagtggtagttcacattctgattaaaaaccggaaaggcatagaaatataaatcatcccatttgaatatgttcaacaggtggtggagtaagaagag

SEQ ID NO: 327056 - DNA, 201 bp, Homo sapiens
ccataattgtaaaggtatttagttacagctcccacaaagaattcaggaattcttgtgaaattttattttaatagtaaacttcctgattgtgggatatttgyttattataccttgtttctacaacctgtaaagaatcatatcttggaaacgagtactgatcataatttaagtaatctacgtaagattcatataacctcaagg

SEQ ID NO: 327057 - DNA, 201 bp, Homo sapiens
ctaagaaccaaatgagcctactgaaggggagatatgtgaaaagatactgtttctttggaagttaaggtcattgaaagttcaattccctgtaaaaagaatgsttagtctgacccatggtttgacgagtgaagtaactggtctattccttctatataattaaatttttgttagttgttttaaaaacacacaaaaacaggatga

SEQ ID NO: 327058 - DNA, 201 bp, Homo sapiens
tcatataatctactattatattaaggctatttccaagcttttcaaagttattttaaatgattgtatacatgtgttcaggggaaatattttttttcactttyaaggctttctgacagagtttagtatctgaagtctaacaccaggaaatggatgaatcaaagactgacttcacagtggggtgaattgagccaggtagagaag

SEQ ID NO: 327059 - DNA, 201 bp, Homo sapiens
cgagactccatctcaaataaataaataaataaataaataaataaataaataaaatccccttggtcaatctgaaaattatcatctaggttttgttcatttartaggcaaaacactttctcattattggtttaatatgaatttctttaattactgaagtgataatttttcccttatgtttgcttgaagtaattatttctgtta

SEQ ID NO: 327060 - DNA, 201 bp, Homo sapiens
aagtactgtttcatgttttttctttaacagtaaaagtttatctttccacgtcactagatgcataacaattttaatagcttcacactttttcatataatctrctattatattaaggctatttccaagcttttcaaagttattttaaatgattgtatacatgtgttcaggggaaatattttttttcacttttaaggctttctg

SEQ ID NO: 327061 - DNA, 201 bp, Homo sapiens
gaaatctcttcttttctcttataaaacaggcaaacaaaggaaaccactttgttttaaatggcacagtttcattttgttttaaagggaatatcaggctggcwgcggtggctcacacttgtaatcccaacactttgggaggctgagacaggagaatcacttgagtctagaagtttgagaccagcctgggcaacatagcaagat

SEQ ID NO: 327062 - DNA, 201 bp, Homo sapiens
tttcttcgtccaccccatgctttgctttgctgactctctgattctgatgcatggggcccagttgaatccatgccactgtctttactgattactgactttawcctggggtccttgcctgacccagatggtgggtactcttttcatgcagttagattcctcagttcagtcatgccaacctctttaggcaaaagcaccagccat

SEQ ID NO: 327063 - DNA, 201 bp, Homo sapiens
gtgcctgcctgacacatgaaaaaatgcttatcatcactggcgatcagagaaatgcaaatcaaaaccacaatgagataccatctcacaccagttagaatggygatcattaaaaagtcaggaaacagcaggtgctggagaggatgtggagaaataggaacacttttacactgttggtgggactgtaaactagttcaaccattg

SEQ ID NO: 327064 - DNA, 201 bp, Homo sapiens
taggaattgaacaatgagaacacttggacacaggaaggggaacatcacacaccggggcctctcgtggggtggagggagggaggagggatagctttaggagwtatacctaatgctaaatgacgagttaatggatgcagcacaccaacatggcacaggtatacatatgtaacacacctgcacgttgtgcacttgtaccctaaa

SEQ ID NO: 327065 - DNA, 201 bp, Homo sapiens
cacttggacacaggaaggggaacatcacacaccggggcctctcgtggggtggagggagggaggagggatagctttaggagatatacctaatgctaaatgasgagttaatggatgcagcacaccaacatggcacaggtatacatatgtaacacacctgcacgttgtgcacttgtaccctaaaactttaatttaaaaaaagtg

SEQ ID NO: 327066 - DNA, 201 bp, Homo sapiens
attatttaaaaaattagctttcaatcaaaagaccagttggaagagtcagtttcaaaagctcaattccaaatagtttttatttgataaaataaaaagtattkgactttttataccaggttttatcattgctaacagactaattattctgagaagtttagagttatccaagtgtatgaaaacaaaacctttttatttgtatat

SEQ ID NO: 327067 - DNA, 201 bp, Homo sapiens
gaaaataggtcttgctatattgcccaggctggtcttgaactcttggcttaagcgatcctcccacctcgttttcccaaagtcatgggattacaggcataagycgctgctaccagccaaaatttcttgatggaatgaatgaatgacaagttttaggaaaaagtttctaaatattattttcttgcagactgctggatttaaggt

SEQ ID NO: 327068 - DNA, 201 bp, Homo sapiens
ttgagccaatcttttcttaattccctatcaacatttttaagatatgattgtgattatttaaaaacaaacaaattttttttaaaaattaaaattactttacmgcataatggtgaaatgctgatgtgatgtcttttacacaagcctggttaactatatgctaacagcattgattaagctcagggaccacgcttcctgtgtcct

SEQ ID NO: 327069 - DNA, 201 bp, Homo sapiens
atctccggttgattatatatttttctaaaatttgtaaaaataagatttttgcatttgttttcataaagtagtcctttaaagtttcgtaagctttagacttwataatatctaggtccgctgctgggatggggccaagggatctaagaactgcattgtactttacatatgattgaagaaaaattacttgtgtacatcagcact

SEQ ID NO: 327070 - DNA, 201 bp, Homo sapiens
ttttctgactctaaagtttattctgtatttactacttcatatattgccctttaatgctatcttgcaaaggatacaatcgagtgtaatgtgacatagaaaartgtaagggttgattttttttgttttgggggtctctaggaaaaggatgaagatgtgtaaaagataccttaactccaccaagaggggctgctgagttggttg

SEQ ID NO: 327071 - DNA, 201 bp, Homo sapiens
tattcttgaaagatgctaagagaatgggtacaaagtattctcaaacacaaaagtggtaactatgtaagataatgcgtatgttactgagcaagatttaactrtttcacaatgtatacataatagttcaaaacatcattttgtatgtggtaaatacacttttatgtctcaattaaaaaataaatgtatggctgggtgcagtgg

SEQ ID NO: 327072 - DNA, 201 bp, Homo sapiens
tatgttaagagaatatcatggaagatatttggaagggtttggttttgctttttagttaggtagaagagtccttggaggctatattctgactcttaattttrcaaataaagaaactaaaatggaaagattatgcttttgggtgagccacacctaatttatgacaaactcaaacattcagtccagtttaactgacactcagaa

SEQ ID NO: 327073 - DNA, 201 bp, Homo sapiens
ccccacatgaaaggactagactgtgatcttcctcaaggcatactggcattacattagcattctctaattgtagaatcatgcctattggctactgtgagggkgtgtgtgtgtgtgtttgtgaatgcatgtaaagacagttatttggacacttttccctcctttcttttccttcccttggaacctccttcctcctttcctcat

SEQ ID NO: 327074 - DNA, 201 bp, Homo sapiens
aggatgatatagtatacgatgtacatccccacccctcgacacccccgctccccgaaaaataaaaacaaaaacaaaaaaacccaaaggactcatccatgctstggcacacctgtgcttctgatttacatgctacaaatcgtatcagagaggtggctgtaatagctggtaggatgatcaatccctagtaagtagagtatgctt

SEQ ID NO: 327075 - DNA, 201 bp, Homo sapiens
ttgggtcaccattgtcactacctataattattttcatctccatactggaggtccattccaggctggttgtgtaccttttgtacctagattccccaatctgscacaatgactaggtgcttgatacatatttcttaactgactaaattaataaatgtatggttttctaattttccttttccaaccctgataatatgtgctttt

SEQ ID NO: 327076 - DNA, 201 bp, Homo sapiens
ttccaacttggctcatagattgataacccaagcattttaactcgttggaagacagcatttctctgagaaggtcagacagtggtttcctttacaaatggctyttccaatgaaagatcctctcccattcatgatgaaggatactttttagtgctatgaagtataagcagcattgtacatttgattggtttttggaaataattg

SEQ ID NO: 327077 - DNA, 201 bp, Homo sapiens
tttttttgagcaccttctgtgtgtcaggcactgttaccagcactggggatgaagcaatcaacaaaacagaacaagaatctacactcatgaaattcactttytgaataggactagataattaacaagtgacaaaacgagtatataataaaatgtcagaaagtggtaaggtgaaaagtaaaagcgtataggcaattaaggatc

SEQ ID NO: 327078 - DNA, 201 bp, Homo sapiens
gacatgcaagtttaagtttaagaattcaggaagtctggctccagatttcatgtctttgactaataccctaagatctacctcccaagatgcctgaagatgcsccttcgatatcagcatgaaaacagatctccatagcatgagctcaggcatgaaatttccagggcttagcatggctgcaagggatgtgcgagcatttgcaga

SEQ ID NO: 327079 - DNA, 201 bp, Homo sapiens
agtgcataatttcttgctacaaaatttggtgatggaagcaagccttgctgctttttccagttagccatgactgcttttcagcagtactccagtggcatgtkaggggaaccttggaaaccataatgttggcatttactcatgatagtttttgggatagccagtgtgtctgctgtcatttaaaatactgctcttgggtagttt

SEQ ID NO: 327080 - DNA, 201 bp, Homo sapiens
atgtatatgccactggagctcagattggaagtcacagctggaaataaatcaggaatatgggcagaaataattatttaaggtttagaaatgaatgcagtttyttttttaagattagagaaacagtagaccagtgactgtgacagaacctcaggtatgccaacttttaacagtcagggacaagaagcaaagtggagacaggac

SEQ ID NO: 327081 - DNA, 201 bp, Homo sapiens
agccaagatcgcaccactgcactccagcctggcaacagaggaagattgcatctcaaaaaataaaattaaaaaaataaaaaaataagacagcaataaatatycctgtgcctctaaggaaagtacttacccccaaagtcttaatacaagtcaactctcagaagtctttatgttttcttcagttttgaaacattctaagtaaag

SEQ ID NO: 327082 - DNA, 201 bp, Homo sapiens
ctagggaggctgaggcaggagaattacttgaacccaggaggtggagtttgcagtgagccaagatcgcaccactgcactccagcctggcaacagaggaagaytgcatctcaaaaaataaaattaaaaaaataaaaaaataagacagcaataaatattcctgtgcctctaaggaaagtacttacccccaaagtcttaatacaa

SEQ ID NO: 327083 - DNA, 201 bp, Homo sapiens
atcgttacaatgatattaaaaattaaatcagaatttcctagcaaataagtgggatccttacgttgaaccaaggtttaaaaaaaggtactaaaaatgagtarttgagtatgtgagaaattgtattgatcttagggcagtggtttgcaactatggtatcacaacccggttttataattagttgtttaaaacagagcattgaaa

SEQ ID NO: 327084 - DNA, 201 bp, Homo sapiens
aactgcaattttgctgatggagtctactttcttctgtgctaaaacaacttgcaacttagttgttctaatttctaaatgtgtgtcttcttccactgaagaayagacatttttattcagggacaggtactcagtattatatttagtacttcttcatcaaattacatatttgatgaaactcattgtttcatgtcccagcaaatg

SEQ ID NO: 327085 - DNA, 201 bp, Homo sapiens
ccctttacaaccatatttgagtttgcctttctgacttcaaaaaatgattgacttagttgagtcaaagggaagatttctaaactgcaattttgctgatggartctactttcttctgtgctaaaacaacttgcaacttagttgttctaatttctaaatgtgtgtcttcttccactgaagaacagacatttttattcagggaca

SEQ ID NO: 327086 - DNA, 201 bp, Homo sapiens
attttatgtgctttgcctcattttctcatctgtaaaatgaacataataacagtacctatgctatagtgatgcttaaaacattaaaagagttaataaatgtwaggagactagaacaatgcctgattccaacacagtaaagactcagattcaaactttggtatttaatcttcaaattttgtttactggtattacccagtaaat

SEQ ID NO: 327087 - DNA, 201 bp, Homo sapiens
aaaaccaaaaccactaaaaatgtgttttctgctttcacagtgactttcatgtttgccaaagtggtggcaacaaatcctgtaactgtctatgatcacagaawatttaaagacttttgccttgttaaagagttagttttcaggccagatgggtggctcacgcctgtaatcccagtgctttgagagaccgaggtgggtggatca

SEQ ID NO: 327088 - DNA, 201 bp, Homo sapiens
gcatatttgcatgaaacattttattctttaccaaagcattttattttaggttgtttaaatcaccctttctactactggaccctacttttaatccagagaataggttccaaaccatgccatcaattttatgttattagactggatataaatgtgttctgtgtttttatgtatctgtggccaaaaatatgtcattttatacat

SEQ ID NO: 327089 - DNA, 201 bp, Homo sapiens
caggaaactatgccttgaactttaaaagtaataacaaagtatgtggaaagtgcaagaaaaatatttttcttcttagtggttagcctttattttgctatatrtaccaccaaatatttgatacttatattttgctatatataccacctaggtgttttccagctgctgagatacagtgctttaatggacattttattgcttaat

SEQ ID NO: 327090 - DNA, 201 bp, Homo sapiens
ggctttcaaaaggaggtaggatttgattgaagtcttgaaggatctcttggtgagagagatccttaacaagagttaaaggtaggctgggcacagtggctcaygtctataatcccagcactttgggaggccaaggcaggcggatcacctgaggtcgggagttccagaccagcctgaccaacatggagaaaccctgtctgtact

SEQ ID NO: 327091 - DNA, 201 bp, Homo sapiens
ttgtacatttgattggtttttggaaataattgcttgtgttaaaaggcatgatctgatagaaagaccattttcctagcctgttttctaagggtcaaaaataytatgctttcatattgactgattatatgtcctttattgtttcagtactttgatacttttcagatgctgggtttatttgtttatttatttatttatttattt

SEQ ID NO: 327092 - DNA, 201 bp, Homo sapiens
catcagtacgcatcagaatcacctgaaaggcttgttgaactacaaatttctgagtcccacatccctagagtttctgattcagcgggtcttgagtagggccygagattttgcatttttaatgagttcccaggtgatgcagaggctgctgctctggaaccatcatttatagctactgcagttgagtataagtagaataacaaa

SEQ ID NO: 327093 - DNA, 201 bp, Homo sapiens
atccagtgactcagataaatactgtaaacatgttggtagatgttctctcaggcttttctccatgcatatttatatgtttggctcttctctaactagtaagkggataaaaagacccctatcttctttagtaccaaaatgagagatgtttatagatggcataaaaagttattaatacatttgtaattttcttcaggatgatga

SEQ ID NO: 327094 - DNA, 201 bp, Homo sapiens
ggaatgaatgaacagtcaccagtttttcttgggcatattttgacccaaggtatttaaaactaataaggataatatatttagcaaagttccagttttaaaayttcatggatagtacttttattatatcttttcttttaaaattatttcttactgaggattatataccaggagagcattagcattagatccaagagaaaagaa

SEQ ID NO: 327095 - DNA, 201 bp, Homo sapiens
aaaaagtgttcagaaatctgaaatgtagttctaaatgtaaacttgaatgcattctgttttttatttgatctttccttcttccttttattttcactgttgtraaaatattttctccttttttttgttttattttgatatttttgcttttattgtttgtataaatgcaaagattggtaaattctttgtggaacaaggagggtg

SEQ ID NO: 327096 - DNA, 201 bp, Homo sapiens
ttattactgcttcaatgttttagagtcatgtatcatttcggatctgtcttggtttgtcagttatctccctctaatgcttattgctttctttgcatattacsttgttcctttatctttccaaaggcaaactagtcttttttcacatgtctactgctactgataacactttccataaacatttgtttcgtatattctgtctta

SEQ ID NO: 327097 - DNA, 201 bp, Homo sapiens
gtgcgtgagtacatacaaatagctgcttttgtctggctgaccataatacctattttgttgtacttacaaatggtcctaccaccaattagctattccaatarttacacaattttctcactcatcactcactacttagtgctaaaaatggtgtcataaggaatacaacacctcaagtttaagtctttttaattaacctgtcaa

SEQ ID NO: 327098 - DNA, 201 bp, Homo sapiens
tagaatccctgtaagctatttaaagtactaactcaaagactgctcttccagggttaaatctaggaaaacagaaagattccccctttaacccttcactttgrgaataaatgaaaaggcagaattgataatggcagtcatttgtaacgcatgattgtaattttaaaaatgcgctttttttctgttacaattgatttatttgag

SEQ ID NO: 327099 - DNA, 201 bp, Homo sapiens
tagagtgcagtagcgggatctcggctcactgcaagctttgcctctgggttcacgccattctcctgcctcagcctcccaagtagctgggactacaggcatcygccaccatgcccagctaattttttgtatttttagtagagatggggtttcactgtgttagccagaatggtctcaatatcctgacctcgtgatccgcccacc

SEQ ID NO: 327100 - DNA, 201 bp, Homo sapiens
actcaaagactgctcttccagggttaaatctaggaaaacagaaagattccccctttaacccttcactttgggaataaatgaaaaggcagaattgataatgrcagtcatttgtaacgcatgattgtaattttaaaaatgcgctttttttctgttacaattgatttatttgagcaaatctaccatattttttagtgtaattaa

SEQ ID NO: 327101 - DNA, 201 bp, Homo sapiens
tttgaaccttggatgtcagatttctgggtacccatgtcagaatttggcctggatttcttttactgatcttgctgcctacgcaaagcacaatgtcctagtayacgtccctgttactgggaccacttctctctctgaatataccagaggttcctaagtatggcagcccagttattctaccattacactgcagctccacacatt

SEQ ID NO: 327102 - DNA, 201 bp, Homo sapiens
aatggatttttctgtttgttgtaaagtggcgatctaatcttgttattctacatggatgcatagttgtcccaacactgtttattggctagtcccaacctttytctcctgatgtgaaatactgcctctgtctcatagcagatttccctacttatgtccgagcttttttctgatttgtcattaccattttcaaatctttgtcac

SEQ ID NO: 327103 - DNA, 201 bp, Homo sapiens
ttttttctgttacaattgatttatttgagcaaatctaccatattttttagtgtaattaatagaagccataaatctctgcaagctgtttctgttaacagcayagtaatataggaacatgaggttttaggatgacatcctgttagatatttagctaaaaattgtatgcaccatttattaaatgtgtcaaatggagtccaacca

SEQ ID NO: 327104 - DNA, 201 bp, Homo sapiens
gctaaaaattgtatgcaccatttattaaatgtgtcaaatggagtccaaccatagcaccttaaaaaccaaagctatcacaagtttacttagtttcccaatascttatgtagcaaagctgtttatcaacaatattgttgctttgtgttgcctagcttagataaggattaaatattatagcattgtttaggactcttaacacag

SEQ ID NO: 327105 - DNA, 201 bp, Homo sapiens
gtaagaaacaatttaaaaagaaagccacgaacaaaccaaagattatttgctttcccatagatttattgtagcttttatgtgggtgtgtagaaaacttgcawtgcttctctggacgttgattttcatttaaaagcactagcaagtgaagtcagtttttaagtcttatgcttaaaaaaatcttgaacaccaagtgtgagcttg

SEQ ID NO: 327106 - DNA, 201 bp, Homo sapiens
agtcagaatcaacaatcctgacattaccctcgggtaggtaaatcttggactctgcattttcatcctttattgattctgcatgctcactgtatatgggctaygatcaatgttaacattttttttattattaaaactggtcaggcaaactcagtttttcagatagagtgaaccctcttatgtttgttgtttatttatttttaa

SEQ ID NO: 327107 - DNA, 201 bp, Homo sapiens
aaccagttgggtaatacctctgtttaaatttcattcttaagcatactagtttaacaaaaaagtttaaatgataatttactctttgggaggtggaagcaggwgtatcacttgagcccaggagttcaagatcagcctgggcaacatagtaagacccccatctctaaaaaacaacaacaaaaaattaggcgcggtggcacgcac

SEQ ID NO: 327108 - DNA, 201 bp, Homo sapiens
aagtatgtcttctaattctaatataaaccctacattgtatgaataattatgtacaaaatgaaagaaattttgcacagaaattatatcttttccagttgatrcttgggtttttaaaaaaacagttctttttaatggctgtgttattgacattttgtaagggataaatgattattattgattttaccaaattttgctggtggg

SEQ ID NO: 327109 - DNA, 201 bp, Homo sapiens
attaatttgtcaaccagttgggtaatacctctgtttaaatttcattcttaagcatactagtttaacaaaaaagtttaaatgataatttactctttgggagrtggaagcaggagtatcacttgagcccaggagttcaagatcagcctgggcaacatagtaagacccccatctctaaaaaacaacaacaaaaaattaggcgcg

SEQ ID NO: 327110 - DNA, 201 bp, Homo sapiens
ttaattttttaaaatcataatgcttggttaatttgatggaaaatgattgctcagaaagtgactagtttaatttagaatgggcagtaagaaagtatgtcttytaattctaatataaaccctacattgtatgaataattatgtacaaaatgaaagaaattttgcacagaaattatatcttttccagttgatacttgggttttt

SEQ ID NO: 327111 - DNA, 201 bp, Homo sapiens
agaaggaaatataaaagacaaatgtattaatttgtcaaccagttgggtaatacctctgtttaaatttcattcttaagcatactagtttaacaaaaaagttyaaatgataatttactctttgggaggtggaagcaggagtatcacttgagcccaggagttcaagatcagcctgggcaacatagtaagacccccatctctaaa

SEQ ID NO: 327112 - DNA, 201 bp, Homo sapiens
agcttttattttgatggactgtaataatgaacacaaggcacgtacattaagaaagactgataatcccctgaacaattggatacacctggcactccgtaatrttaagagtcacaaagtctagggaaatccccagactacacattcaaatatgaaatataggattgctttattcagtctaccatatacattgctttaaaaata

SEQ ID NO: 327113 - DNA, 201 bp, Homo sapiens
gaacccctagtcagaatcaataaaaatgagattctagtggttttgcaaatcttattccaaatttacaaggctgtcctatgaggatttcttttttgtcagtrcagagagcttttattttgatggactgtaataatgaacacaaggcacgtacattaagaaagactgataatcccctgaacaattggatacacctggcactcc

SEQ ID NO: 327114 - DNA, 201 bp, Homo sapiens
aagaacccctagtcagaatcaataaaaatgagattctagtggttttgcaaatcttattccaaatttacaaggctgtcctatgaggatttcttttttgtcartacagagagcttttattttgatggactgtaataatgaacacaaggcacgtacattaagaaagactgataatcccctgaacaattggatacacctggcact

SEQ ID NO: 327115 - DNA, 201 bp, Homo sapiens
ttttaaaaagaattacagatgagtccttgctgttacatgaacaactcaatttattatgaataatgataatgcatgtaaaatagttttataatttgagatayaagaacccctagtcagaatcaataaaaatgagattctagtggttttgcaaatcttattccaaatttacaaggctgtcctatgaggatttcttttttgtca

SEQ ID NO: 327116 - DNA, 201 bp, Homo sapiens
ggactgacttacaaaaattaatgtatgactcactcaaaatgggatacacattctcaggacagttttaggtatcttaaaaaacaaatgcactagctgtaaastttttcctagattatgaaatttcttttgacagaaaacataatccacaaaattgtctttatattttgaggaaggaggtatggcaactactttcaaaattac

SEQ ID NO: 327117 - DNA, 201 bp, Homo sapiens
cttttaaagaaggtagtagacgtccatgggtgaaatgtgggttaaaggagttagatcaagccctgtttaatgaattacaagtctttaaagcaaaattcacrttgagaaccctgtaaaataatcataggagggcttcgcaaatgaaagaggctgcaaaagacaaaaaaaaactttatttttttaagcacacaggctttagct

SEQ ID NO: 327118 - DNA, 201 bp, Homo sapiens
ctttggataatgcttttttcctgttttcctatactaatgagttgtactcttactttaaaacctgccttctgttttcagtaaatcttttgacatatcttttyctcagctaggacacaggtctcctgactgtgtctttcttctttcccttactacctttatctcctaagggtattttccttggaactggtaattttcactcaa

SEQ ID NO: 327119 - DNA, 201 bp, Homo sapiens
ggtctcatcacttgatccaaataacagatcccaccttcccacttcctacactgaaagacttttaaagaaggtagtagacgtccatgggtgaaatgtgggtkaaaggagttagatcaagccctgtttaatgaattacaagtctttaaagcaaaattcacattgagaaccctgtaaaataatcataggagggcttcgcaaatg

SEQ ID NO: 327120 - DNA, 201 bp, Homo sapiens
gactcaaggtaataaatatatctaacagatttactttttcacatttacgtctttaactcatctgaaatggatttttctgtttgttgtaaagtggcgatctratcttgttattctacatggatgcatagttgtcccaacactgtttattggctagtcccaacctttctctcctgatgtgaaatactgcctctgtctcatagc

SEQ ID NO: 327121 - DNA, 201 bp, Homo sapiens
tgttttttgactgaacaaaagcctaattttagtgtagtcaaatatacagtattagatttcctttatgattattgcttttttgtgtcatgttcaaaaaataytctgactcaaggtaataaatatatctaacagatttactttttcacatttacgtctttaactcatctgaaatggatttttctgtttgttgtaaagtggcga

SEQ ID NO: 327122 - DNA, 201 bp, Homo sapiens
gtctctggcctgttaagaactgggctgcacagcaggaggtgagcagcggacaagagatcattatggcctgagctctgcctcctgtcagatcagtggaggcrttagattctcataggagtgcaaaacctatcgtaaactgtgtatgtgagggatctaggtggtgcactctttatgagaatctaatgccttatgatctgaggt

SEQ ID NO: 327123 - DNA, 201 bp, Homo sapiens
acagctagtaaatttccaagggaatatgaactaaaaggcatctaatttctgaaagcatgcctttaaccctacaatattggtaaatttctgtaaaatcaacygttatacttggtaaatgaatgaacatgtgcacagtgtgactggggaaagaaagatgatgttgtacacttgtcacatgataggtgaggtactcgatgaata

SEQ ID NO: 327124 - DNA, 201 bp, Homo sapiens
  misc_feature (1)...(201): n = A,T,C or G
gtgttttaaaacattcttttttatattatcagtgatttgccaagaaagagcaaagagaagagttattctctctgtgaactacaagattgagaattcctatntaacacatcaactgaagaaatctgataatgtggaagaagattgcttagaagggatttgtcagtaaatttcatttgaacaagcatcacttgtttaagcttc

SEQ ID NO: 327125 - DNA, 201 bp, Homo sapiens
tccagaccaaataatgtaaactctttaatcttatgtcaagtttcctctccatcaatttattgcttttttcttagatgctgcctaatttttcaatatcattktaaaagtacaacagcctggagtggacagacatttcacaagactacagaagatgaatctgagaaagaacatggttgtctatattttgcatctgtagtgata

SEQ ID NO: 327126 - DNA, 201 bp, Homo sapiens
attacccatttgctttcaagaaatcaacagtttgcatttttttctcttaacagtttatttataaaatatttttaggacttagacattttgtactttacgtwttacatccgtgtgtactgccacgctcctcgaagcaactcacagggaaaaaaatggactaaaacaatgcctgcagtgcctccctcctccctcacaaaatga

SEQ ID NO: 327127 - DNA, 201 bp, Homo sapiens
tcaggaggctgaagcaggagagtttcttgagcccaggagttcaagtccagcctggcaacatggcaacatgctaacatgctgtctctaaaaacaaataatcygtgttgaaacatgttgtctaaatcaggggtccccaaccctgggccacagatcattactggtctctggcctgttaagaactgggctgcacagcaggaggtg

SEQ ID NO: 327128 - DNA, 201 bp, Homo sapiens
gctgtgtgaatggagagtgcaggacaaatgtggaattagagaaacaaaatgattcttgtcattttccacacaagaacttggggtgaacttgggtgctgtgrtgatagtgttgggaagttagaccctggatgtactgtatctgaaagtaaatcagacaagattccctaactgcctgaatgaaagaatggagtccagaataat

SEQ ID NO: 327129 - DNA, 201 bp, Homo sapiens
acacacatattggcaatctaagggaggctagcatctgtgcatttttctacccaacctaatggtctggggtttggttgcaagatgtgaccagaaaagacatygtatttatagatagggatttcttttctcattgatgactgcagaaatggttaaatgctttttatgattgggtatggaaaatatatttgctatggaggtact

SEQ ID NO: 327130 - DNA, 201 bp, Homo sapiens
actgcaagagtaaataaatttaggatttcaagagtaaataaatttaggatttaaaggtatgtgagtgtggacaatatttatagcagataaaccataactamgtttctatttaaacatgttcctaactttttctaccctttttgttttcgggaaatgaaaatgattgttcttgtggtccgtatgcttgctgaatcctcctgg

SEQ ID NO: 327131 - DNA, 201 bp, Homo sapiens
ttacgattttcatctggtcagtggaaacagacattcagaaaattatttgccacagtcgggatttatatttatggatctttaagttttgtcctttcctactaagtgttttcctctttcctttcttgtaacacatgtttcaaatttctttgttacttggctgtaaggaccatgtacagctttccaaggccgttgaggtcagat

SEQ ID NO: 327132 - DNA, 201 bp, Homo sapiens
ctgtactatatctatacagattgtatagatataatatctatgtacccttaagtatggcctaggtcataatccttggaacctcgtgaacattgcaaaaaccracgttcataaccccagaaatctttgttaccgaggttcagtcattattagttgaccaagtgaacgcaagcaatttctgttatttccagcataattttcttc

SEQ ID NO: 327133 - DNA, 201 bp, Homo sapiens
agcttaaccattcaactaacctctctggccttagtgttcacatttctggaaggttcagagtgggtcaggaatcgctcttagattctttcaagctctatttaaaaaaaaaaaaagaaaaacataattctaagtgttaatagtgtataggattctgggaagttctatctattggaaaaaatggatacttgctccattatatac

SEQ ID NO: 327134 - DNA, 201 bp, Homo sapiens
gaaacctattttgagataaaacatcactgcttacctatttggagcttttctggctacgtagactattgaatttcacatgaaaaagaagtgtaggccaggcrtggtggctcaggcctgtaatcccagccctttgcggggggccaaggagggcagatcacgaggtcaggagttcgagaccagcctgaccaacatggtgaaacc

SEQ ID NO: 327135 - DNA, 201 bp, Homo sapiens
ctgggaggcggcggttacagtgagccaagatcgcaccactgcactacagcctgggcaacagagtgagactccatctcaaaaacacaaaataaaacaaaaawcagacaagattccctactctcctgaggctaacactttattggacaagaaagacaatgtataataaataataaatttatttatttttttataaatgaggcc

SEQ ID NO: 327136 - DNA, 201 bp, Homo sapiens
tcaagtttaatattctggtcatgttgatatgctgtaatttgctcgaacttcttgtggtgggttgttgaatttaaaactgaaattgagtcttgaggaatggstaagatttagttggatggagaaaaactgcaagggtagagaagaaacctattttgagataaaacatcactgcttacctatttggagcttttctggctacgt

SEQ ID NO: 327137 - DNA, 201 bp, Homo sapiens
aaagttactaatactaggaaaagtctttaactttgtgggaaattaataactccaacattgtgctctatttatgtcattattcattcacttgtgaatgtcartgtacaacttttttatataattacaatcattttgaactttttttgttctgactttaaaatggatttctttatgaaaatttccgttcttcgttatgattca

SEQ ID NO: 327138 - DNA, 201 bp, Homo sapiens
gcagaaaaaaaagcttgtgccaaggctcaaaggaatatgactagtgtctgcaaagggcagaataaaggaggccgtgatataaaacaaaacaaaacaaaacaaaaaaaaacccaataagctgttaaaggggaaaggtaaagatgattatatttgtgctttgttaggattactctgattacaatatggaaaataatcattgct

SEQ ID NO: 327139 - DNA, 201 bp, Homo sapiens
cagggctacagacaatatgtgcatagttggaagcagggataattgagggccaaccaggaggctggctacccaggtacgagtcatctgtttgccgctaaagygctacaggaccttacataggtcgccagcttcttgagcttgagtttccttattggcagcaggggcattgtaccacttttcctactgatcccttgaaatgta

SEQ ID NO: 327140 - DNA, 201 bp, Homo sapiens
tccaagttatgcgtcagtggataaagatttttttttttttccaccggggcgttcctgagtttatttggggcgcacccgggcgagggccctgcacctagaaraaggtgttgggcctcttggtggtgaatcgtggcttgtgctgaaggcgcaggacccggtggggcagcgggaacttgatcttgcagtcgtggaactgcttga

SEQ ID NO: 327141 - DNA, 201 bp, Homo sapiens
gcacagggcttcatcatgtcttggataggaacttgaggtattgagtgtgatggagggaataggattgccaggcgtgaggtttttttttttttttttttttttttgtgtgtgtgtgtgtgtgtatgtgtgcatatgtgtgtagtgtgtacctggaggtgggggtatgacataaagaaatacaggattacatagatttaggag

SEQ ID NO: 327142 - DNA, 201 bp, Homo sapiens
cacagggcttcatcatgtcttggataggaacttgaggtattgagtgtgatggagggaataggattgccaggcgtgaggtttttttttttttttttttttttttgtgtgtgtgtgtgtgtgtatgtgtgcatatgtgtgtagtgtgtacctggaggtgggggtatgacataaagaaatacaggattacatagatttaggagg

SEQ ID NO: 327143 - DNA, 201 bp, Homo sapiens
ttgtgttttgttatcgttgttgttgtttttaagtctttttaatcctctcagattctgttttataaataaaaagcacacacacatacctagatttctgagayttttattttgagatttgtaacatattaaagaatcaggctgggtgcggtggctcacgcctataatcccagcactttgggaggccgaggcagggggatcacc

SEQ ID NO: 327144 - DNA, 201 bp, Homo sapiens
tgagatttgtaacatattaaagaatcaggctgggtgcggtggctcacgcctataatcccagcactttgggaggccgaggcagggggatcacctgaggtcargagtttgagaccagcctggccaacatggtgaaaccccgtctctactaaaaatacaaaaattagtcaggcgtggtggcgggtgcctgtggccccagctact

SEQ ID NO: 327145 - DNA, 201 bp, Homo sapiens
catgcataatttctaaattacaaccctgattccagaaattggcaggcagtaggtagagatacttagtaggttgttccccctaccccatctagtgagaggartggcagacaacattagaaactaacaaatttagatttgcattcccttagtattttcatgttggccaagtcacttgtaaatagacattttctcacttgtaaa

SEQ ID NO: 327146 - DNA, 201 bp, Homo sapiens
ttgtattagacagccctagtctaccagatcattctgaaacatcatttgatcttttcaaggttacagatgtaataaaatcaaggtgtacagcatttatgtasttagaatactcgttgactctagcaggaaagatgtaagtgaaagatactgtgtttcaaaaataccttctcaaggaaagtgaattgataacagattctgtgc

SEQ ID NO: 327147 - DNA, 201 bp, Homo sapiens
aaattaaatgtaattaaaaccacattcatgctagctacatttgaagtggttaataaccacatgtagctagtggccatgatatagaaccagcaccgacatasaacgtttcccgtgttgcactaagttgtattagacagccctagtctaccagatcattctgaaacatcatttgatcttttcaaggttacagatgtaataaaa

SEQ ID NO: 327148 - DNA, 201 bp, Homo sapiens
gatgtaagcaaatccatagataaaagattgtatccacaagcctatatgaacatggtattatgtataatgtagataaaggggaaataaatgaccttttagaygttttaagcataaaactcttcttttggaatatttaggtactagagtgacagattacattatgtttccatacgtctggatgagagagaaccaaacacattt

SEQ ID NO: 327149 - DNA, 201 bp, Homo sapiens
atactgtaatgtgagaggagttaaactccaagggctgaaggggcaaagagtggaggatttgttgctaattcattgtttcacagctccaataagaaagcatkaggatatatgacgaattatcattagaggtcaggcgcacaaccctttcgtgaattaccaaagcagcaggacttgtgagtaaaataaaaactttaagctgtg

SEQ ID NO: 327150 - DNA, 201 bp, Homo sapiens
gaaattcaataaatactgtaatgtgagaggagttaaactccaagggctgaaggggcaaagagtggaggatttgttgctaattcattgtttcacagctccartaagaaagcatgaggatatatgacgaattatcattagaggtcaggcgcacaaccctttcgtgaattaccaaagcagcaggacttgtgagtaaaataaaaa

SEQ ID NO: 327151 - DNA, 201 bp, Homo sapiens
ccattgcactcctgcctgggcgacaaaagcgaaactccatctcacacacacacacacacaaaaaaaaaaaaaaaaaaaaaaaaatcatcttatatgaaccraaaatatttggctatgtttttccattatggccatggttactcataaccattttttgctttcttaatttagttgtcctaaatgaattttgaatgcagaata

SEQ ID NO: 327152 - DNA, 201 bp, Homo sapiens
ttgaggatctccatgcagaggtaaccatcctcatcagatgaaaaatatcttggttggcgggggtggtgggggtgggcacagcttagcaacttgtagttggttttttttgtttgttttctttgttttgtttttctgtttcggggaattgaaatttttttcctgtcagaacaaacacagctgtgtcttatgtttcagaaatta

SEQ ID NO: 327153 - DNA, 201 bp, Homo sapiens
gtagaaggatcacttcaggtcaggggttggagaccagtctgggcaacgtagtgagatcccgtctctacaaaaaataaaaaaaatattaggcatagtgatgygtgcctgtagtcccagctattcaggaggccaaggcgggaggattgcttgagcccaagagtttgaggctgccgtgagtgatgatggcagcactgcaattca

SEQ ID NO: 327154 - DNA, 201 bp, Homo sapiens
gtgaaagcgggaggaggggaatggggaggggagagctgattcctttagcacttttccaatgaacttttgagatttttaacatctgatagctgtgaactgcktgataagttgattttcagaggcgattgataacaatagctgatttggaacagctggccagcttctggattcaagaagttttccactgtaccacttgcttct

SEQ ID NO: 327155 - DNA, 201 bp, Homo sapiens
attcattactacaattacatgtagcagttccttcacttcagaatttccctcacactgccgcaatatgtagccttttgggtctggcttctttcactgagcaraatgcatttaagattcatccatgttgttgcataaatcaatagatcattgcttgcgtagcattatatccgtatcacagttttatttattcctttgggttgt

SEQ ID NO: 327156 - DNA, 201 bp, Homo sapiens
gagtttgataaattgacagatgtcagcttcagaacgtgggtaataacaaactcctccgagctaagggaccatgttactaatttaatgcaaggaagctaagyacctggaaaaaaggttagaggaattgctaactagaataagcagtttagagaaaaacataaatgacctgatggagctgaaaaacacagcacaagatcttcg

SEQ ID NO: 327157 - DNA, 201 bp, Homo sapiens
taaaattttatcctattctgccagtgatacaactgccagagctctggggtcagtcctggagcagaagtgtttaaatgaaatatttccaccaagaatagttyttaaaatcaaaaaggctgccattttcatagctgcccaacaggtaagaaatcagaagcatttttataaagagaactatcgatccagcagggatatctgaag

SEQ ID NO: 327158 - DNA, 201 bp, Homo sapiens
caactttctacccaccctctgataagtcttctgcacacttgaattttaggatatagcacacaaccatgcagcgttctccaaataaaataccttggaagacrtaattaacttagttcagaacaagtcattattattcttggatatccacacttatattacctccgcagagctcttatgtcatatttagaacttcattcattt

SEQ ID NO: 327159 - DNA, 201 bp, Homo sapiens
ctttgagtattttcttatacaacaggataagttgtgtcttctttgcttgttctcattccttgcttgttccagtctcattctttgcttgttccagtcctaaytggaatcagtgatttctctaaggagttttctgaagggaagctttctgaaaggaaagtgtttcctttcaactggagaatggtatttagaaaccaagatctg

SEQ ID NO: 327160 - DNA, 201 bp, Homo sapiens
tattcatgcctccccttttcagacaatgtagggtaacttcctggcattcccatggcatttgtaaactgtcatggcgctggtgggagtgtagcagtgaggaygaccagaggtcactcttgtggccatcttggttttggtgggttttggccagctcctttactgcaacctattttatcagcaacgtctttatgatctgtatct

SEQ ID NO: 327161 - DNA, 201 bp, Homo sapiens
gaattttcaaatagcattggtgcttaaaaaacaaacaagcaaacaaacaagattatctgtgctatctgcatccccccctttaacgtcttttctttctgccsctgttagtgtcatctgttgtgtttatttttttcattcaaaaaatttagacactcaaaattttgctgaaaatttcacctaagactgtgaccaactgtctgg

SEQ ID NO: 327162 - DNA, 201 bp, Homo sapiens
ggtaccttgcttctttaaagtcagaaagggaaagggacacttcctattaccagactgatagcaaggtggaggcttatataatgattcataatcaagagagwaaaatcctatcatctttaccaagttctattggttagaaatatgtcacaggtcctgcccacactcagtgggacaggattatacaatctggacaccaggaga

SEQ ID NO: 327163 - DNA, 201 bp, Homo sapiens
gctctttcttgttaagttcctctgaggcaagtcagtgaacttaaaatctctttgaaaccaagacaactctgtaatttatttctcattttagggggaagttrtgttgctgccctcaaatttggcttctgctgggggccatgacacatgcctgtagctccagctacttgggaggctaagacaggaggattgcttgagcccaag

SEQ ID NO: 327164 - DNA, 201 bp, Homo sapiens
aaagttttagctgttttggagtgattagaaagaaatattgataggtttgtatttggtttattggagtattttagaaaaaagtaatagggtcaagcacataaaaaaataaatatatttttaaaattcttcagggacttgtattgaaggtatagttgtacaaaaacacattttttctcttagattttattaattttagaggct

SEQ ID NO: 327165 - DNA, 201 bp, Homo sapiens
attttacaaaccaagttatttccttcctaatacaaacaaagtatgacagttacaatttattgtgtatttacaatggattgtgtctgtcatggtgattgtgmtggaaccaggggggaaagagtaagaaatctaagcacttttgtgttttcttccttttcttttctcttcctccccgctttcaggctctgaaagtgttccagc

SEQ ID NO: 327166 - DNA, 201 bp, Homo sapiens
gtctgccctccagacatccccaattatgataagaaatcttgatttcctcgtctgaaaagaaaaaggatctctcatttaagaaagtcatggttatagccagwgaagcttgctaaaatgcattagagaataataaagtgaactttattaaaaggcacccttgggtacaatttcatcatcctctacagctgaaagcagcagaat

SEQ ID NO: 327167 - DNA, 201 bp, Homo sapiens
taattatgaaagggcacatttttgatatcctattactgttattattattgttatttttatttatttattttttgagacaaggtctcactctgtcacccagrctggagtgcagtggcacaatcactgctaacctcagcctcgacctgttgggctcaggtgatcctcccacctcagcctcctgagtagctaggagtataggcg

SEQ ID NO: 327168 - DNA, 201 bp, Homo sapiens
aacccatctgtttaggttctacagtttacgatgatattgtctattgctcctctgtaattaattttaattttatattattttgagtgaagtttcatttaccyagttccttaccaaaccaggacaaagccaaatctcagtagagtgtgtgtatctactcatatgccactagacaagacaaatctgcctttacatctggctgcg

SEQ ID NO: 327169 - DNA, 201 bp, Homo sapiens
tgttagatagagatgatgagaatgggcatccttgttttcttccagttctcaaggggaatgcttccagtttttgcccatttggtataatgttaactgtgggyttgtcatagatgacacttacgattttaaggaatcttccttactttaaaccaacaacagcaaaaaggacaaagaagggcattacataatggtaaaggattc

SEQ ID NO: 327170 - DNA, 201 bp, Homo sapiens
aaaagattaagatataatcttgcatcatgatttttattattaaagatggtcaaaatgctaccaaacgtgtttttgtccctccatacccctctggaattttytgatgtcatttgaaccccaaaatagacttggctgaaagactaagaggtagtatatcaggtgatgacattgagtcaaatatttctatagttagaagcatta

SEQ ID NO: 327171 - DNA, 201 bp, Homo sapiens
tataccagctccattggtaatcagggtgaaaatcaagttccttcttgtaattacagatctaaatcttgatggtcacaggagtattatgatagggcaggagytgtaatgaaacagccacacattttaccccagaaagatttaatagtccatcttctcatcctcaccactctgtagccatggcttacagcactccaggtcata

SEQ ID NO: 327172 - DNA, 201 bp, Homo sapiens
aattatgataagaaatcttgatttcctcgtctgaaaagaaaaaggatctctcatttaagaaagtcatggttatagccagtgaagcttgctaaaatgcattrgagaataataaagtgaactttattaaaaggcacccttgggtacaatttcatcatcctctacagctgaaagcagcagaattttagtcttcttatacttagg

SEQ ID NO: 327173 - DNA, 201 bp, Homo sapiens
tgttacgatgattagagtgatttgattagagtttcagaatgctgtaatataagggcttgaactcccaacacccccccacccccgacaccaaccccccaaamacacacacacacacagggagctagtggtagtaatcaattattgcatattggaagccaggtgggcagaaactagataggtgcttattgcatgagaacaatt

SEQ ID NO: 327174 - DNA, 201 bp, Homo sapiens
acgatgattagagtgatttgattagagtttcagaatgctgtaatataagggcttgaactcccaacacccccccacccccgacaccaaccccccaaacacamacacacacacagggagctagtggtagtaatcaattattgcatattggaagccaggtgggcagaaactagataggtgcttattgcatgagaacaattctga

SEQ ID NO: 327175 - DNA, 201 bp, Homo sapiens
catcaatttacttttcctttcatgaaagatttctctgttgtgtgtgatggtgtttgatagcattatacccatggtagaatatctttcaaaactagagtcartctgcttaaatcctgccactgctttaccaactaacttgtgtaatattataaatcctttctttcatttcaacaatgttcacagcatctttcccaggagtag

SEQ ID NO: 327176 - DNA, 201 bp, Homo sapiens
aaagcatatataacttctcatagacgttgggttctggaaacagcaggaaatgtatcccagctttaccacctaacacctgtagaatcttttttttttttttwgtaaaaggcacacaaattttatttacatgtccaaggaaggaaccactgagtgactatccctgcgtgtataatcttgagcaaattgctcaaccatactgta

SEQ ID NO: 327177 - DNA, 201 bp, Homo sapiens
ggagagagacagttaaattccatatttctacttgatagtcacaagtactctgatgactgataagtattgtaggctgtgcaatactcacttactctgagctkctgataattgtaatttagtgggaccattcttacatcccagtgtcagcctactgaagaacattttgtattaatggtaaaggtcaaatgtttcacaggcttc

SEQ ID NO: 327178 - DNA, 201 bp, Homo sapiens
ctttatcccagaagttataaaaacaaatttataagatgatgattgtggagttttttatttttttttctgtcctttccctttaggtcatattttcattctctttttttttttttaagtaagattcatacttagatgccatatttgaacactatggtacaaatgtggaagaatccatttacagtgattaaaatgctgatttca

SEQ ID NO: 327179 - DNA, 201 bp, Homo sapiens
tcatgtttttgaagtacaaatgctgtcatgatataatgctaagtaagaaagctagcatagagaaaatttatcatttaatatcaattttggatgtgtatatrtatatacaaatatatatatatatggtttctcaatatagttttctgtaatttccatcttttctgcaggaaatatgtgagatttaaaatgttttaatatatc

SEQ ID NO: 327180 - DNA, 201 bp, Homo sapiens
agcagtatacatggtcaattcagataatccagtgaagggaaatggccattcctctactgatggcaacagatgccatcctgaaaatagctccttggccttcraaaagtagcacattaaaaggagcatatcctagatgatgggttgatgggtacagcaaaccaccatggcgcatgtatacctatgtaacaaagctgcatgttc

SEQ ID NO: 327181 - DNA, 201 bp, Homo sapiens
agctgcatgttctgcacatgtatcccagaatttaaagtataataaataaaataaaattaaaaaggagtatacccaagagttggtacactagtagaactgtratttttttaaaggcaatttctgacaaaaacaagcaataaggaaaagattccctattcaataaatggtgctgggataactggctagccatatgcagaagaa

SEQ ID NO: 327182 - DNA, 201 bp, Homo sapiens
tgggaggagagagacagttaaattccatatttctacttgatagtcacaagtactctgatgactgataagtattgtaggctgtgcaatactcacttactctragctgctgataattgtaatttagtgggaccattcttacatcccagtgtcagcctactgaagaacattttgtattaatggtaaaggtcaaatgtttcacag

SEQ ID NO: 327183 - DNA, 201 bp, Homo sapiens
ttgtcaaaacttctttcatacttattgaaatgatcatatggctttgcccttttgtctgtcaaggcttactacattaattgaatatagaaaattaaaccaaycttgtatgttaaatttcactcgatcaatatatataattcatttttatgtgggtagatttaggttgctaatattttgtgaaaaattgttgtgtctatgtcc

SEQ ID NO: 327184 - DNA, 201 bp, Homo sapiens
ataaataaaataaaattaaaaaggagtatacccaagagttggtacactagtagaactgtgatttttttaaaggcaatttctgacaaaaacaagcaataagraaaagattccctattcaataaatggtgctgggataactggctagccatatgcagaagaatgaaattagatctttacctttcactacgtacaaaaattaac

SEQ ID NO: 327185 - DNA, 201 bp, Homo sapiens
gactctctaaaaatgaaaaaaaaaaaaaattctgttaaatttattttctgagagtctgtcctgttctagacactaaagtgaataaatacaaatatgagaasacacattctctactcttgaggaccttggagtccaacagagagccaaagacaaatatgcaaatatctttaatacaaagcatagtgggataaatggttcagc

SEQ ID NO: 327186 - DNA, 201 bp, Homo sapiens
ttttaattccatcagatgatgccaaaatgatcaatatgagacaaagggaagtttattaactatagcaagatttgagaaccagtaattactatgtgagtcartaaaaactgccagtgcatttttatttctgagtttatcctgacttttgtgaccctttggaaggttagttcctgaactaccatcatcatgatcttgtgactc

SEQ ID NO: 327187 - DNA, 201 bp, Homo sapiens
tgaggcaggagaatcacttgaacccaggaggcggaggttacagttagccaagatcacacctctgcactccagcctgggcaacagagtaagactcagtctcaaaaaaaaaaaaaaagaaaaagaaagaaaagaaaagaaaaatgccaattccagttgaataaatctgggttgggtcatgaggtgtgcattgctaatcatctc

SEQ ID NO: 327188 - DNA, 201 bp, Homo sapiens
catgacactgacctttgttgatagaagtcccttgtacatatcgttacatgcactgtagaagatgcagtaccagagccagtacagtattgtagttaattgayagaattggtgccaaaaccttgctaagtcccactgaaagggcgatcagtcattttcaatcatttaattatgtgtaaaaaaaaaattaagaatgggcatgat

SEQ ID NO: 327189 - DNA, 201 bp, Homo sapiens
cacattctgattaaaaaccggaaaggcatagaaatataaatcatcccatttgaatatgttcaacaggtggtggagtaagaagagatagcttgcattaacawtggggtcatttgaaagaaaatattgtattagtccgctttcacactgctaataaagacataccccaaactgggtaatttatacaggaaaaaggtttaatag

SEQ ID NO: 327190 - DNA, 201 bp, Homo sapiens
ctgagaaaatatagaagttgtaagaaacctgtacttctggagtttgtagttgtcaaagacaagtatatacaatcaaacgagaattacaccaaggaggtaawcttaagtgctggaatgttattgggattcagtaaaggtcataatgatctggagaattgagaaaggtattgaagagaagatggcactcttagtggaactagg

SEQ ID NO: 327191 - DNA, 201 bp, Homo sapiens
aagtaattatttctgttatatgaattaaatctctatatttcctttgcctaagggtttttattcattagttcatgttctttatatattaggcatattgactstagtcatattgataacaaatgtaacaaactttgcagttcgttacaaggtgctgaaaatgtcttggtacatttatgagtcttactttaatgattttttaac

SEQ ID NO: 327192 - DNA, 201 bp, Homo sapiens
ctgcaagaagagattggaacaaggctgcctagagcctgatgtaacccagcatcatagggatgactttacttatttatgtatttaattgtaaaattataaartggtagtggcagtattatttgtcatggtttttctactgtggctaaacagtttgtcattctttttgaaaaaacaaatgttgggcacaccaccatgctttgg

SEQ ID NO: 327193 - DNA, 201 bp, Homo sapiens; identical to SEQ ID NO: 68620

SEQ ID NO: 327194 - DNA, 201 bp, Homo sapiens; identical to SEQ ID NO: 68624

SEQ ID NO: 327195 - DNA, 201 bp, Homo sapiens
tggttggtcttaccactccatcccatgtgctccagttccagggaaacctcggcttgtgattaaccacactcagatgaatactgctcttattcagtggcacyctccggtggacacatttggacctcttcagggctaccgtctaaaatttggccgcaaggatatggagccacttactactcttgagttctctgaaaaagaaga

SEQ ID NO: 327196 - DNA, 201 bp, Homo sapiens
agtagaactgtgatttttttaaaggcaatttctgacaaaaacaagcaataaggaaaagattccctattcaataaatggtgctgggataactggctagccayatgcagaagaatgaaattagatctttacctttcactacgtacaaaaattaactcagaatgggttaaagatttaaatgtaagacctcgaactataaaaatc

SEQ ID NO: 327197 - DNA, 201 bp, Homo sapiens
aaaaacaaaagttggcaaatgggacctaaagcacttctgcaaaacaaaagaaactatggacagagtaagcagaccacctacagtatgggagaacatacttycaatgaatctgacaaaggtctaatgtctagaatctataagaaatgtaaacaattaaacaagcaaaaaacaaccctattaaaagtgggcaaaagacacaaa

SEQ ID NO: 327198 - DNA, 201 bp, Homo sapiens
aaagtctgtacttggttataagcatcactaggaagttttcaacctgtcttggttttcagttttcttactgaaaaaggaaatcctttgcatccgtgaagtgyttttataagaattaaatgagataatgcatattaatatcaaggttattgactaacagtcctcaataaatattcacttccatttcatttgttcttttctttc

SEQ ID NO: 327199 - DNA, 201 bp, Homo sapiens
aatgaaatacaaagaaatcaagtaattacaggagccaggctgtgaactcaagctcaagccagtatttaaccactgtattatattgactttgaacaggcagsaaggttttggggttttttttaatttctcatttttctcaattgtggattatatgtgtctatatcttggccagctgaagtatgtctttggctcatgatattc

SEQ ID NO: 327200 - DNA, 201 bp, Homo sapiens
aaatctttaattcttattttacaaaatccattctttctttgtctcaatgatcttgctttttggattttgtttggaaggtactttctcatatctatgtcacacaaacttactgtttaatttataattttgcattgacagtatagtaattaagacaagggatactgaaatcacactatttggattcacagtcttggctccttc

SEQ ID NO: 327201 - DNA, 201 bp, Homo sapiens
aatctttaattcttattttacaaaatccattctttctttgtctcaatgatcttgctttttggattttgtttggaaggtactttctcatatctatgtcacacaaacttactgtttaatttataattttgcattgacagtatagtaattaagacaagggatactgaaatcacactatttggattcacagtcttggctccttca

SEQ ID NO: 327202 - DNA, 201 bp, Homo sapiens
atctttaattcttattttacaaaatccattctttctttgtctcaatgatcttgctttttggattttgtttggaaggtactttctcatatctatgtcacacaaacttactgtttaatttataattttgcattgacagtatagtaattaagacaagggatactgaaatcacactatttggattcacagtcttggctccttcac

SEQ ID NO: 327203 - DNA, 201 bp, Homo sapiens
tgaggagcactgcatttccaacaacataaaagcaagtggcatgaaagcaaaacaagttatcacactaagattttggttcagtacttcccagtcttcctcgytgccttcaaagcggatcctacaagcatccccgaaggaggctgccaaggtgaactggggcggacacaaactgtgtctcatcaaagcacgctccctatagta

SEQ ID NO: 327204 - DNA, 201 bp, Homo sapiens
tctttaattcttattttacaaaatccattctttctttgtctcaatgatcttgctttttggattttgtttggaaggtactttctcatatctatgtcacacaaacttactgtttaatttataattttgcattgacagtatagtaattaagacaagggatactgaaatcacactatttggattcacagtcttggctccttcact

SEQ ID NO: 327205 - DNA, 201 bp, Homo sapiens
atgaatcattttcaataccatatactaagtgactcattaattttctattgttttttgataccacgttcttagttattgacctccaagattgatttggtgtrttaattcgcttaggataatggcctccagcttcatctatgttgttgcaaaggacatggttttcatttttttatggctatgtagtattccatggtatatatg

SEQ ID NO: 327206 - DNA, 201 bp, Homo sapiens
acgttcttagttattgacctccaagattgatttggtgtattaattcgcttaggataatggcctccagcttcatctatgttgttgcaaaggacatggttttyatttttttatggctatgtagtattccatggtatatatgtaccacattttctttatccagcccactgttaatggggcatctgtgctgatcccatgtttttg

SEQ ID NO: 327207 - DNA, 201 bp, Homo sapiens
taaagtttctcctatcaaaagcctttaatttgtttttatctttttagaaagaggcatttattcacttcagttacctatataaaattagaactaatctacarttctctttcttgatctcaaagcaactgtaggtatgcttttatttttaccaatttgattggaattatcaactttgggattcatttctgatgaaaaataacc

SEQ ID NO: 327208 - DNA, 201 bp, Homo sapiens
gatctttattcatcattttatatagtcaaatctgttgatggttttttttctctcttattattcattttatgtttagaattagaaggttattttctttcctrtgatttcaatctgattttgtttttggtgttttgtttctctcattactgttttatatccattcttcagtcacatgatcctcaaacttatttaggtgaagta

SEQ ID NO: 327209 - DNA, 201 bp, Homo sapiens
tgtaaatgaacggtattactatgttggtacataaacatagactttcacatagtacttgatgagcactcttgttttgttgtttttccacttttcagaagtawgatgatctcacttgtaagttccattgtatgcttgtcattttgtgtatgtcatggagtgatgagcactctttaacgaaagcaaaaggaaactaataccact

SEQ ID NO: 327210 - DNA, 201 bp, Homo sapiens
aaatagtacaaagttcagtgaaatacctccaataagttaattttgagttgaatttaaaaagtatgttagttgattttagaattgaaacacttccaagcagrtgaatgatttgaagaagaggaatgtattgtgaattttttccctttaaatcatctagtgatatatggttgtggtataaggcaaggttctaaataatttttt

SEQ ID NO: 327211 - DNA, 201 bp, Homo sapiens
agaggaatgtattgtgaattttttccctttaaatcatctagtgatatatggttgtggtataaggcaaggttctaaataatttttttttccaaatttgtcasttccttatccccaaacgatgcaccgaactgtccttccttcccccaagtatttgcagtactcttttttttttaatttgaagtcgttatgtgttttaagatc

SEQ ID NO: 327212 - DNA, 201 bp, Homo sapiens
ttgaggccaggagtttgagaccagcctaggcaacataatgaaactctgtctctactgaaaatacaaaaattagctggtcatggtgtaatcccagctactarggaggctaaggcaggagaatcacttgaacctggaaggcggaggttggagtgagcggagatcgtaccactgcactccagcctgggtgacacagcgagactc

SEQ ID NO: 327213 - DNA, 201 bp, Homo sapiens
ttttttttttgcatcggtcatgttttttgatcttttcttaaaaggtagagcagattggttaagcattttcattggttgaaaatgtttgtattcttcaaagraaacatagtgggtttacccattttttgaaagagaaacctaagtaaagaaaatgcagaaaatgctctgatagggtgggacaagtgcctataatttctttta

SEQ ID NO: 327214 - DNA, 201 bp, Homo sapiens
atccaatgatgttgttccagttcctagtggtcctcctcgcaaagtcgaggtagaggctgtcaactcaacatctgttaaagtctcatggcgctcacccgtgcccaataaacagcatggccagataagaggatatcaggtgcattatgtgaggatggaaaatggtgagcccaagggccagcccatgctgaaagatgtcatgct

SEQ ID NO: 327215 - DNA, 201 bp, Homo sapiens
catgcctttcaaagtaagttgttttctaatttgtaagaaatcacagataaaagtagaggggacagtttatctgggtaagttatttgcacagcaagcagacyactttgttttggccacgtgtccttgctattttcatttgtgactttcacatgggagacagtttggtgctttgtaagtgtgtcctttacactctgaagaagg

SEQ ID NO: 327216 - DNA, 201 bp, Homo sapiens
tgtttcatgtcccagcaaatgaagatcgttacaatgatattaaaaattaaatcagaatttcctagcaaataagtgggatccttacgttgaaccaaggtttaaaaaaaggtactaaaaatgagtaattgagtatgtgagaaattgtattgatcttagggcagtggtttgcaactatggtatcacaacccggttttataatta

SEQ ID NO: 327217 - DNA, 201 bp, Homo sapiens
aatgaagacttccgtgttgctgtcttgggagattccagagaattataactccgccatgcctttcaaagtaagttgttttctaatttgtaagaaatcacagrtaaaagtagaggggacagtttatctgggtaagttatttgcacagcaagcagaccactttgttttggccacgtgtccttgctattttcatttgtgactttc

SEQ ID NO: 327218 - DNA, 201 bp, Homo sapiens
cctgaagtacctgcaaatgagaatataaagtaagttgattgaaggcttagggctgaaggaaagaattataggtaaataggaacattatatctcaaaattayagaggtcgtaaaagaagatactgcttaatgtagtgaaagattcttctgctcagactcccagttttgctatccgagttcttttacaacgtgtcctagtatt

SEQ ID NO: 327219 - DNA, 201 bp, Homo sapiens
attcatttgtgctgacaaatcgtggaaacagtgctggtgggctgcagcacagggtcacggcaaagactgcaccagatgtattacgtaccaagcctgccttyattgggaagaccaacttggatggcatgattactgtgcaactgcctgaagtacctgcaaatgagaatataaagtaagttgattgaaggcttagggctgaag

SEQ ID NO: 327220 - DNA, 201 bp, Homo sapiens
agtcttccaatccatatgcatggactgttatttgtgtcatttatgatgccttttagcagtattctgaagttcttcaatttcacctccttggttatatgtayccctaggtatttttgtgcatgtgcagctattataaatgggattgtattcttgatttctcttagcttcatcattattggtgtatagaaatgttgcttgttt

SEQ ID NO: 327221 - DNA, 201 bp, Homo sapiens; identical to SEQ ID NO: 68630

SEQ ID NO: 327222 - DNA, 201 bp, Homo sapiens
aatgggcatccttgttttcttccagttctcaaggggaatgcttccagtttttgcccatttggtataatgttaactgtgggcttgtcatagatgacacttaygattttaaggaatcttccttactttaaaccaacaacagcaaaaaggacaaagaagggcattacataatggtaaaggattcatatcaacaagaagacttaa

SEQ ID NO: 327223 - DNA, 201 bp, Homo sapiens
atataattcgttgctttatattataaaattgttggaatggaggaacaagataaacagccacagatttctgggcctgcaaacattttattgcagtaggtatmacctaacatatactgaaagttgcttggacagaagccagtgaaagatcaattgattcttctttgttatgctttcattgcttatatgaatcttgggacttca

SEQ ID NO: 327224 - DNA, 201 bp, Homo sapiens
tgtggcaatgacaaagccaagtaggagtttacatcttgggtggaatcacctatggggaggctgagatttctggatccatccttaggtcacagggggcaagkgtccatcatccctgcacagcttttcagctcctgtgaaatcagaatgattggagggtaaacctcgtttgaaggcttgcacaagaattgatttcttcctgat

SEQ ID NO: 327225 - DNA, 201 bp, Homo sapiens
cagaagattctcctgcctcagtctcccgaatagctgggactacaggtgcacaccactatgcccagctaactttttgtatttttagtagagacaggttttcmccatgttagccaggatggtcttgatctcctgacctcatgatccacccgccttggcctcccaaagtgctaggattacaggcgtgagccaccacgcccaacc

SEQ ID NO: 327226 - DNA, 201 bp, Homo sapiens
agaaagaaagagaccaatagaaaaagagagagacttaagaaataggatagagacaaagagaaaattatgaaaatagaaattatggggggaaaaaaagggamaaagggtcacagtaattgagcaagagacagggatgagaagaccctgcatgatactttccttctccaggctcctgaaagagagcaacctggggatctgtta

SEQ ID NO: 327227 - DNA, 201 bp, Homo sapiens
aggcaagagaatcgcttgaacccgggaggcggaggttgcagtgagccaagacggtgccattgcactccagcctaggcaaaaagagtgtaactccatctcaaaacaaacaaacaaacaaacaaacaaacaagacctttattatctgttttacgttaaccaactacttaaaagcccttgatgaaagtcgtatttttgctggat

SEQ ID NO: 327228 - DNA, 201 bp, Homo sapiens
ggcaagagaatcgcttgaacccgggaggcggaggttgcagtgagccaagacggtgccattgcactccagcctaggcaaaaagagtgtaactccatctcaaaacaaacaaacaaacaaacaaacaaacaagacctttattatctgttttacgttaaccaactacttaaaagcccttgatgaaagtcgtatttttgctggatt

SEQ ID NO: 327229 - DNA, 201 bp, Homo sapiens
gcaagagaatcgcttgaacccgggaggcggaggttgcagtgagccaagacggtgccattgcactccagcctaggcaaaaagagtgtaactccatctcaaaacaaacaaacaaacaaacaaacaaacaagacctttattatctgttttacgttaaccaactacttaaaagcccttgatgaaagtcgtatttttgctggattt

SEQ ID NO: 327230 - DNA, 201 bp, Homo sapiens
gctttcatattcccgaacctcaattactcctttggtaaaatggggataagaattttacttgtgataaaatgggaataagaattatggaaaataaatgaggyaacataaagcttgcccatgaaaattcattcactcccattcgtcccaatactcttatcatttctaatagtgtctctcttcactttcttaaaattctgtggg

SEQ ID NO: 327231 - DNA, 201 bp, Homo sapiens
caagagaatcgcttgaacccgggaggcggaggttgcagtgagccaagacggtgccattgcactccagcctaggcaaaaagagtgtaactccatctcaaaacaaacaaacaaacaaacaaacaaacaagacctttattatctgttttacgttaaccaactacttaaaagcccttgatgaaagtcgtatttttgctggatttt

SEQ ID NO: 327232 - DNA, 201 bp, Homo sapiens
tcttgctttgaactaagtcttttaagtggtgcaacttgggctcaaggcatgaaaaatctaggcataaaatgagtctgaaaggtatggttggccttgtgaacatcatcatcatcatcatcatcatcatcatcactaatgttttgcaatggtagttttgagaagagaataggatctacccaaggaacagtactgaaaggggta

SEQ ID NO: 327233 - DNA, 201 bp, Homo sapiens
ttggagtgagcggagatcgtaccactgcactccagcctgggtgacacagcgagactccatctcaaaaaaaaaaaaaaaaaagctgggtgcggtggctcacrcctgtaatctagactcttccccaaatggtggggggatgggtgggttattaatggtaggtattggggggttagcttgagatgggacttggtcttagaagag

SEQ ID NO: 327234 - DNA, 201 bp, Homo sapiens
ttgtttttcagtgattaaccagtatctctggtattttagagatgtgccaagggctctctttctttgtgaaatagagcatatcttgtagtttgctttgtcartgttctcttagactatcaaaacactcaaattttacattttgagcagtatttacgcctgaattaattcacaagtttcaaggtcactaactttggttatatt

SEQ ID NO: 327235 - DNA, 201 bp, Homo sapiens
tcttagactatcaaaacactcaaattttacattttgagcagtatttacgcctgaattaattcacaagtttcaaggtcactaactttggttatattatattrttattttccaatttagccacctctttatttgtataatagagcatacagcagcacataaaacgcaaaactctaggacataaaaagtggcattcggacgatg

SEQ ID NO: 327236 - DNA, 201 bp, Homo sapiens
cacacacctgtggttccagctactcaggaggctgaggtgggaggatcacttgagcctgggaggttgaggctgcagtgaaccatgattgtgccactgcactycagcttgagtgacagagtgagacctgtctcaacagcaacaacaacaaaacaaaagtaaaacttgtcagggcaaagggctgtaaggaaatcagtctatcag

SEQ ID NO: 327237 - DNA, 201 bp, Homo sapiens
gctgtcagtattaatacctttgccgtaattcctccctttatagaacagttttgggaattaaatgtgtgaacaagtagttgttaataacattttttatgaartaaacaaaaacaggttataaaagagactatttttgtataggtgctgaatttttaaaacattttatctataaaaaagaaacactatcatgtgaatcatcag

SEQ ID NO: 327238 - DNA, 201 bp, Homo sapiens
ctgaggcccgaaatcccccttaatgtctcttgcttgttaaaaatacacctcccatccttgaagagagaaacttgcttaacagttacacaggtgtggtgggmgaatgggcatgcacatgcacacacatgaaaaataaacttttaaagtgaaactgcaaatcctttactgcctttccatcaaatggtctctagcaataaacct

SEQ ID NO: 327239 - DNA, 201 bp, Homo sapiens; identical to SEQ ID NO: 68638

SEQ ID NO: 327240 - DNA, 201 bp, Homo sapiens
  misc_feature (1)...(201): n = A,T,C or G
tgtatgtgtccagcaccagggccctaacaaactatgcctgctctgtttatgatacctaataaagagcagtccaccatgatgatattaccatacaagatcantgcaatcacacataaatgtcttcccgtgttgtttttaaaattgaacaaacaggtggatatttgtcattgatgtaagaaatggacaagtcaccccatatcc

SEQ ID NO: 327241 - DNA, 201 bp, Homo sapiens
ggaaaagccagcatgaaggaaaatctggcattgtagaatgagtaaattaagagataattgcagaaggattctcctcaatcctcatatatggcaatctcccrtgaacatgtaaaccatgatttgatttactctgcccgaatcacttctcaaatatctttttaggaacatacctctatgtaaaggcataaagtaaagaacagc

SEQ ID NO: 327242 - DNA, 201 bp, Homo sapiens
ataattgcagaaggattctcctcaatcctcatatatggcaatctcccgtgaacatgtaaaccatgatttgatttactctgcccgaatcacttctcaaatawctttttaggaacatacctctatgtaaaggcataaagtaaagaacagctgtgatgttgagtgccctcctgcgtgccatgctcactgccagctttgtctaaa

SEQ ID NO: 327243 - DNA, 201 bp, Homo sapiens
ataaaatagttcactctataaggaaatttgtattacaaaacatcttccatcctttcttttctttattctcctctcccctcccctctgttttgctaatattscatcacacacttatcattaaatccactatttcctggattttttgcttcttctaatgttaaaggtacttatctagaaagtcattattttataactgaaata

SEQ ID NO: 327244 - DNA, 201 bp, Homo sapiens
ccacatcaaaatttattgggaggctagctgtggtggctcactcctgtaatcccaacactttgggaggtcaaggtgggtggatcacttgaggtcgggagttmgagactagcctggccaacatggtgaaaccctgtctctactaaaaatacaaaaattagctgagtgtggtggcacacacctgtaatcccagctactcaggag

SEQ ID NO: 327245 - DNA, 201 bp, Homo sapiens
tggagtgtggttggggcttaggagacaggaatgtagctttttggtatgacttgttttattgcttgctctcggtgctgagtaacttctaaaataagaagtaygtagaagctggccaggcgcggtggctcatgcctgtaatcccagcacttagggaggcagaagcaggcggatcacctaaggtcaggagttcgagaccagcct

SEQ ID NO: 327246 - DNA, 201 bp, Homo sapiens
ctcctcatcttctccagttattttctgtttggaccacgggccacaggagtggagtgtggttggggcttaggagacaggaatgtagctttttggtatgactygttttattgcttgctctcggtgctgagtaacttctaaaataagaagtatgtagaagctggccaggcgcggtggctcatgcctgtaatcccagcacttagg

SEQ ID NO: 327247 - DNA, 201 bp, Homo sapiens
gaaatgtgtttatacctcatataactaacaatgcacccatttatgttagcaatagttttattttttaaaaatgctgcaaaatgtaaagataggtggcctcwaaatgtttatactaaatagaatgaaaaaacaaaaccaatacacaattttgttaggaaacactgaaatccactgcttaatgtatgcattaatgggccttct

SEQ ID NO: 327248 - DNA, 201 bp, Homo sapiens
cttgctttgaactaagtcttttaagtggtgcaacttgggctcaaggcatgaaaaatctaggcataaaatgagtctgaaaggtatggttggccttgtgaacatcatcatcatcatcatcatcatcatcatcactaatgttttgcaatggtagttttgagaagagaataggatctacccaaggaacagtactgaaaggggtag

SEQ ID NO: 327249 - DNA, 201 bp, Homo sapiens
ttgctttgaactaagtcttttaagtggtgcaacttgggctcaaggcatgaaaaatctaggcataaaatgagtctgaaaggtatggttggccttgtgaacatcatcatcatcatcatcatcatcatcatcactaatgttttgcaatggtagttttgagaagagaataggatctacccaaggaacagtactgaaaggggtagt

SEQ ID NO: 327250 - DNA, 201 bp, Homo sapiens
atttcaggacatgatcatttctgggctccagcctgaaacttcctactccctcaccgtcacagcctacacaaccaaaggagatggtgctcgcagcaagcccraactggtgtccaccactggggcaggtaatcatgtctgtgcatgtatgtgccttgaacagtaatactaactttttaaatggtataggtagcttctagcagg

SEQ ID NO: 327251 - DNA, 201 bp, Homo sapiens
tgctttgaactaagtcttttaagtggtgcaacttgggctcaaggcatgaaaaatctaggcataaaatgagtctgaaaggtatggttggccttgtgaacathatcatcatcatcatcatcatcatcatcactaatgttttgcaatggtagttttgagaagagaataggatctacccaaggaacagtactgaaaggggtagtg

SEQ ID NO: 327252 - DNA, 201 bp, Homo sapiens
gacattctattttgtcatttcaggacatgatcatttctgggctccagcctgaaacttcctactccctcaccgtcacagcctacacaaccaaaggagatggwgctcgcagcaagcccaaactggtgtccaccactggggcaggtaatcatgtctgtgcatgtatgtgccttgaacagtaatactaactttttaaatggtata

SEQ ID NO: 327253 - DNA, 201 bp, Homo sapiens
gcacagtctcaataagaggcaatattaacgtgacatctaaccaggccacagtggtatctaagcacatgctatcatattttgcagcagaccttttttgagawctgcttctagtgcaggttctgggcttggtggtgatgagaagagtgtgaagacgctcacaatttaatagggtgaaattatacacaataaaaatacagagag

SEQ ID NO: 327254 - DNA, 201 bp, Homo sapiens
ccagtactttgggaggccaagggcaggtggatcacctgaggtcaggagttcaaaaccagcctggccaacatggtgaaaccctgtctctactaaaaatacaaaaaaaaaaaaaaaaaaaaaaagctgggagtggtgataggagcctgtaatcccagcttctcgggaggctgaggcaggagaatcacttgaacccaggaggca

SEQ ID NO: 327255 - DNA, 201 bp, Homo sapiens; identical to SEQ ID NO: 68621

SEQ ID NO: 327256 - DNA, 201 bp, Homo sapiens
atgaaaatgtcaacaccagttagaagtataaaggattttttgtccactgaactgatcaaattcttttgacttcttgtaggaaagcatgaaactttataatyattctcatcaaaagttccgtggaactacgaatccatccactcccgttagactctattattattctttgtctgggacattttggtgtgtgttgtgattagt

SEQ ID NO: 327257 - DNA, 201 bp, Homo sapiens
cagtactttgggaggccaagggcaggtggatcacctgaggtcaggagttcaaaaccagcctggccaacatggtgaaaccctgtctctactaaaaatacaaaaaaaaaaaaaaaaaaaaaaagctgggagtggtgataggagcctgtaatcccagcttctcgggaggctgaggcaggagaatcacttgaacccaggaggcag

SEQ ID NO: 327258 - DNA, 201 bp, Homo sapiens
agtactttgggaggccaagggcaggtggatcacctgaggtcaggagttcaaaaccagcctggccaacatggtgaaaccctgtctctactaaaaatacaaamaaaaaaaaaaaaaaaaaaagctgggagtggtgataggagcctgtaatcccagcttctcgggaggctgaggcaggagaatcacttgaacccaggaggcaga

SEQ ID NO: 327259 - DNA, 201 bp, Homo sapiens
gtactttgggaggccaagggcaggtggatcacctgaggtcaggagttcaaaaccagcctggccaacatggtgaaaccctgtctctactaaaaatacaaaaaaaaaaaaaaaaaaaaaaagctgggagtggtgataggagcctgtaatcccagcttctcgggaggctgaggcaggagaatcacttgaacccaggaggcagag

SEQ ID NO: 327260 - DNA, 201 bp, Homo sapiens
aaggtctaagtaagagaaaaatccaacaaaatgttacttaataaagacactatgttgtaagaaatccaggcatagggctacaggattggtgaattcagtgkctcggcatcataaagaatgtttgtgtgtgtgtttttccatctttccatgtcacaaaacaactggaagaagtggatctgtttttcctccttcatgaggaaa

SEQ ID NO: 327261 - DNA, 201 bp, Homo sapiens
tactttgggaggccaagggcaggtggatcacctgaggtcaggagttcaaaaccagcctggccaacatggtgaaaccctgtctctactaaaaatacaaaaaaaaaaaaaaaaaaaaaaagctgggagtggtgataggagcctgtaatcccagcttctcgggaggctgaggcaggagaatcacttgaacccaggaggcagagg

SEQ ID NO: 327262 - DNA, 201 bp, Homo sapiens
tgttattctgctagtcttgagttaagtgtattgtgattatactagaatttcctggtttgtagctgggactacaggaatgtgccactatgtctggctaattaaaaaaaaaattatttttgtagagatcagtctcattctgttgcccaggctctcgaactcctgggctcacgggatcctcctacctcggcctcccgaagtgct

SEQ ID NO: 327263 - DNA, 201 bp, Homo sapiens
actttgggaggccaagggcaggtggatcacctgaggtcaggagttcaaaaccagcctggccaacatggtgaaaccctgtctctactaaaaatacaaaaaaaaaaaaaaaaaaaaaaagctgggagtggtgataggagcctgtaatcccagcttctcgggaggctgaggcaggagaatcacttgaacccaggaggcagaggt

SEQ ID NO: 327264 - DNA, 201 bp, Homo sapiens
ttctcttacttgtaattcattgcctattttccccataattttcacattgtgaagtgttatttgacaaaaaaaaaaaaaaaaaaagatgattttagctgccmcttgctttacatttgacatctttttgtttttctgctttcatgattacaaaaatacactgttacccactgtcagtcttcactgttttcttcattgtttttc

SEQ ID NO: 327265 - DNA, 201 bp, Homo sapiens
tttctcttcctccccgctttcaggctctgaaagtgttccagctgaaatttcagatcggacagactcgctgcggctccggaggcagtgattccaagctgctygcgcacgctgctgccaagctgcaggatggtgcacgtagccaggctgctgctgctgctcctcactttcttcctccgcacggatgctgagagtaagccattc

SEQ ID NO: 327266 - DNA, 201 bp, Homo sapiens
gcttttctatctgtttcaattgatttttcttttcttcttaaatttctattttccccctataggaagagggcagagtccgactctagaaaaagcagcatacygaacaataaggagatcccttcacaccacccaacagaccctgtagaactgaggcgccttaactttcaaacaccgggtaagaagcatcacacatctaatcca

SEQ ID NO: 327267 - DNA, 201 bp, Homo sapiens
agaccctgtagaactgaggcgccttaactttcaaacaccgggtaagaagcatcacacatctaatccacacacagtctttcccagaagttgtacagctcaaytgatattaagagttgaaggtatcactttattttgagccattttgttcatcctgctcttttattttactattatggagacttgcccaagcaaaagtctgaa

SEQ ID NO: 327268 - DNA, 201 bp, Homo sapiens
ggcccaattcttctgcattcctatgatcatttagcagagagaagacccaactctactttctttctacttattggcattcctcacctccataacaacaacaragtttgtgcccctgattttctgtttatggtcaaaaattggtggttgatctacgtatacttgctgaagtcagggaagatggtaattattatatccaaatgt

SEQ ID NO: 327269 - DNA, 201 bp, Homo sapiens
agttttgatatccatcgtcttagaacacgacctgttttttaagagaacggtgggtgcaaggattaaaaaggaaaaggaaaaaataaaacagttgtcctgtyccttcttacctccgcttgatttaaggtaggatatttcttagagcctgggactcacctagcaggaggtctctctgagggaggaaaagtaaaaagcatgagt

SEQ ID NO: 327270 - DNA, 201 bp, Homo sapiens
acttaattctatgatatttaaatgaaaagctccaggcttactagtcttccaggatgtgagaataatagatgaattataagctatttcccccaaaaaagagwgtgttgggatacgtgagaccatgtaaatgaggagaagctatgactgatgattcctgaaaagactccccccacttttgtatcttcctggagttcaaaaaca

SEQ ID NO: 327271 - DNA, 201 bp, Homo sapiens
gctaatgatggagaggcctccatggactcatctgtctagggaggtgaggtggggagatgctaagacaagacaaaggagttgacagcttctgtgaaattcargtaccactttgattccctgattgttacaagaagaatatttgcctccccaaataaactctaaattccgcaaattgatgcaacatgccaagagcacctaaga

SEQ ID NO: 327272 - DNA, 201 bp, Homo sapiens
aatattagaaggaacacacgccatcagaaagtggtaatgtctgtaacatctatccaaatactttatttcttacttgttaccaaaaacaaataaaccaaaamagtgctcctcttactagatgagttgataagaatggattagtaagtaaaatccaaattactcagtaatattattatttttctattgcatttgattcatgta

SEQ ID NO: 327273 - DNA, 201 bp, Homo sapiens
ttctaaccattcacaattgtagtttcccctaaggcaactcctaaaaatttccatctttgtcaggctggtcatgtttaggacatttctgtaactccaagtcyctttaaagggaaggcctaagagaactgtacggagcaaaaaattactcaggatccctccgtagaggcaccaagtcaacctaaaattctcataactccttga

SEQ ID NO: 327274 - DNA, 201 bp, Homo sapiens
gcagtagctgagatcgtgccactctactccagcctagggtacagaggagactctgtctcaaaatataaacaaataaatgaattaaaatatagatgctagarcttcactcccagagaatccagttcagctagtatgcgtgggctgggcacatatgttttaaaaggtggtacagattctaatgcacaaccagggtggtgaacc

SEQ ID NO: 327275 - DNA, 201 bp, Homo sapiens
ccaaagtgctgggattacaggcatgagccacagcacctggacctgaagttctctttctctcaatcttccatcaattgatttgaagatgtcttctgttatcygagataatgtgtcagagcagaggaaacaaacacgtctttggaggttgatggaaaaaatgtcaagccatgtagccaagagcaccctagcccccaccaaagc

SEQ ID NO: 327276 - DNA, 201 bp, Homo sapiens
ggagagaatgtcacaggaatggagctcgaatttaaggtatggtattggatgtgatgtggttattcaggagcaagtcattctgggtttgtctttgagtcgtrgctttactttaacctttcaaatttgtgaagtacaagattcatttgacctttccctcaggtgtatgattataaaatgtattcctccccttttcctcttcta

SEQ ID NO: 327277 - DNA, 201 bp, Homo sapiens
aaaagtaattattgtatttgtccacttgctaatttatttttgagactgtattataaatgcgtatatttatccatataatccatatatccatataatccatrtaatccataaaatccatatattttatgtgatggagtattattttcatattaagataattcatgatatgcaaaatactatattattttttcttgtatttta

SEQ ID NO: 327278 - DNA, 201 bp, Homo sapiens
atccataaaatccatatattttatgtgatggagtattattttcatattaagataattcatgatatgcaaaatactatattattttttcttgtattttataycttacaatgattggtgaacctcacattaccctgcattactatgaattctatagttttatcaaataggatatattacttttgtgaaaaagataaatatgtt

SEQ ID NO: 327279 - DNA, 201 bp, Homo sapiens
aggaaatgccagaatctgctcactggatcattttcctgggagcaataaaacaaatcaataaatttgaattgagttatcatggtggttttcagaattacctsagaagcttgccaacaattctgactcctgggagctggcccagagtttctgattcagggtctggatcaatcaatgagtctgggtcagccataaaatcagtgt

SEQ ID NO: 327280 - DNA, 201 bp, Homo sapiens
tatcttttatccaatttcagtagaatattcagtacaagagagattcaaagaatcagatattctaatggaagtagtattcatatgtggtagaggaatcaggaaaaaaaaactgacttgatgagatgattcttaacggatagataagtattcaacatgtaggtgatcataagaaaactttctggctgagtaagaaatatggat

SEQ ID NO: 327281 - DNA, 201 bp, Homo sapiens
ctggatcaatgcacaccatttggcataacgtttttattgcaggattcttaaatatatttaggtactgtcttggtagtcatcagacatatgtatagatcatmcacacacacacacacacacacacacacacatatacacatacatatttaaatcaccggctactgtttgcattcagtgcacattatagctctcagaaggttg

SEQ ID NO: 327282 - DNA, 201 bp, Homo sapiens
cattttttttgaaatgcagtgcactctggacataatccggaccatcattccttgttagtttctaaatttgtaaagccacatcaagtgtttaaatttatgtkttttaaagaaagatctagtgatttgtttccagtgaagcacaagcatggagacaaatgagtagcaggtgtccccgtttgacttatgtcggacttcttttag

SEQ ID NO: 327283 - DNA, 201 bp, Homo sapiens
ggaaaaagttagctggcaaataaaggtccttactgtctgtgcttctttggaaagcctcccatattcctggggctcagataatgtgtttctctagaaaagcrtgcataatcggcactgaaatgagctgctaccagggtctgcactgcctggggatacaaattagggacttgatatttgaaaagtaatccaactgaaaattgt

SEQ ID NO: 327284 - DNA, 201 bp, Homo sapiens
gattgtgatcttattcactctaggtaatcacatatgtatcgttcatattaacacttttataaaactgaatttagtatgtagaaaagttcaaagtaaaaagstatactattaggtgacatttttaagggcatgactaaaagcaaaaatattattgacaaatctttggagtcttacacaataaaaggaatctaatttacacaa

SEQ ID NO: 327285 - DNA, 201 bp, Homo sapiens
tgtgtgtctcctcataagacatttactctgtggagaaatgaagactttgtttcaataactcttgtgctagatcattttttttgaaatgcagtgcactctgracataatccggaccatcattccttgttagtttctaaatttgtaaagccacatcaagtgtttaaatttatgtgttttaaagaaagatctagtgatttgttt

SEQ ID NO: 327286 - DNA, 201 bp, Homo sapiens
tgtaaatgatggcttcataggcttattctgattacccagctttttgaaatttcatgaattctaagcactgtcacatttcaagaaaagcaaatcagagaaayattccaagaaatatatgttctagcctagttcacatctgggtggctgactcatgccaagccctactgaatggccagaaattgatgggggtagggatgatga

SEQ ID NO: 327287 - DNA, 201 bp, Homo sapiens
tgacattgggtcccataggaaagtcatgattttcttgtcagtgaggccgatgtctttcatatatatatatgtattttttttttttttttacagaatttctstgtaaaagcccctgaaattatttaactgtagtgtgatcaattttattttcttgttttcaaagaataaatttaagagcccttttaggtttttttgtttttt

SEQ ID NO: 327288 - DNA, 201 bp, Homo sapiens
ggagactatatagtggagaatgtaccttcccctgcatcccctgcctcggagccatcctacaccatccctgcctataagagcaccctttaatgtaggaaggygaccaataagtagctgcataaaaggacacaagtacccagaaaaatgctcaggctggagtcaagacgttggctgcatcatcacatagggagtaattagagt

SEQ ID NO: 327289 - DNA, 201 bp, Homo sapiens
ttttttttttttttacagaatttctctgtaaaagcccctgaaattatttaactgtagtgtgatcaattttattttcttgttttcaaagaataaatttaagrgcccttttaggtttttttgttttttttttttttgtttttttgttttttaagaatatcacatcaatacagtggtaggatttagaaaaatagttccaggtcc

SEQ ID NO: 327290 - DNA, 201 bp, Homo sapiens
gatcaattttattttcttgttttcaaagaataaatttaagagcccttttaggtttttttgttttttttttttttgtttttttgttttttaagaatatcacrtcaatacagtggtaggatttagaaaaatagttccaggtcctaaaatagattctaactggttattttaataagtttaccacagttcaataggttaatttca

SEQ ID NO: 327291 - DNA, 201 bp, Homo sapiens
ttccaggtcctaaaatagattctaactggttattttaataagtttaccacagttcaataggttaatttcattccatgacttggtctccagaaataaaatcstacagtagcatccaatggtcatttctttttcttttctttaaattttttatttttgagatggagtttcactcttgtcacccaggttgtagtgcagtggcgt

SEQ ID NO: 327292 - DNA, 201 bp, Homo sapiens
caggagttcgagatcagcatggccaaccgtggtgaaacgctgtctctactaaaaaatagaaaaaaattatctgggagtagtagtggtgcctgtgatcccarctacttgggaggctgaggcaggagaattgtttgaacctgggaggcggaggttgcagtgagccgagatcatgccattgcactccagcctgggtgacagagt

SEQ ID NO: 327293 - DNA, 201 bp, Homo sapiens
attcaatgtctggacctcagtttcctcctctgtcaaaaggttgcaattggatgacatgattttgtagttccctttgagctcaaaaattccacactctaaargaaagaaatgtaaactgactcatcattattccctgggctcaaatgatgttttctgccttagattgtcttaatacttaaaacatttaaatataagaaaggg

SEQ ID NO: 327294 - DNA, 201 bp, Homo sapiens
gctgcgtgaaatgggcagagtaagtgtgtggcccttgtgtgtctcctcataagacatttactctgtggagaaatgaagactttgtttcaataactcttgtrctagatcattttttttgaaatgcagtgcactctggacataatccggaccatcattccttgttagtttctaaatttgtaaagccacatcaagtgtttaaat

SEQ ID NO: 327295 - DNA, 201 bp, Homo sapiens
aaggcgatcagctctttggcccagggcaggtctagaaatgccatccaggatgctggggacccggagagcctgcctggtgctttaccccactatggctgagstggtacctcaggtgcaagacaaagtttcttttttatttttccctctgcttttctcaagcagaagcagtttctccccatagccaccacagttggtaatatg

SEQ ID NO: 327296 - DNA, 201 bp, Homo sapiens
ttctaaagatgttactcaaggtaaaatttactccattgaatcttaagtagctgattctagggcctatgtgtatgccccacatttccttagtgatcagatgstaacataaatacttccatttttcagctccgtgaactttcattcacagaatatactgcaattaagtagctttttagagtagtcttcccaaataggaaggat

SEQ ID NO: 327297 - DNA, 201 bp, Homo sapiens
atgttgaagcatgtcttagaaaagagaaggtgtagaggtaggactcttatttcaagctgttaaattagaattttgccttttttttatgttcttaagagctrgtaaaaatgtagctactaacttgctctgtgaccttaaacaaatcattcaatgtctggacctcagtttcctcctctgtcaaaaggttgcaattggatgaca

SEQ ID NO: 327298 - DNA, 201 bp, Homo sapiens
ctcaattgcattaataatatgttttcgttttttattagcaggttgatgtttatgtatccagtgtgagcttttgcatgttctctaaatactttaacacattmttttcattctctgtaattcagacaacagaaagcctacatcgctacccaggggcccttggcagagaccactgaagacttctggcggatgctctgggaacac

SEQ ID NO: 327299 - DNA, 201 bp, Homo sapiens
tagaagtctcagggcatatcgctgcagtaacactgtacacagtgaccaatttgaacagattgtaagtattccaaaactcacagtggtttccataaaataaytctcacttcaagtaaacattttcagttggtgagtaactctattttccaccgacagcactcatatttgagggctttcttaatgcaatgatgacttgttttt

SEQ ID NO: 327300 - DNA, 201 bp, Homo sapiens
cccaagtagctgagactacaggtgtgtgccaccacactaagctaatttttaaattttttgtagagatgtgatcttgctctgttgcccaggctgctctggarctcctgggctcaagctgtcttcccaccttggcctcccaaagcactgagattacaggtttaagccaccactcctagcccatctccattttaaagatgaggc

SEQ ID NO: 327301 - DNA, 201 bp, Homo sapiens
atatttcatgccaaggggtcaagaagtgaggccatgtatataaagattccttcattcaatatttattgactgtctttgaagagctgggtactgtgcaagaygtaagatgaataagacatagtccctgccctccaggagccgacagctcagtggagagtctcaccacctgctccattaggcagacagattagaagtctcagg

SEQ ID NO: 327302 - DNA, 201 bp, Homo sapiens
gaattagttcaactatttgtattatccgggttaatagggtaacagtaatatcttcaattcaatatgtaatgtatagatatatcctatacagaagtctagattaaaaaaaaaaaggtttagaaatactgtgtcctattctcagctatatgcggaattgaataatggaaaaacagtgtactgggttatcggattagaatgcag

SEQ ID NO: 327303 - DNA, 201 bp, Homo sapiens
gggaaatcaatcctcttcaatccctacccttggggagcttatattctgattggggaaaaagaagatattaaagaaataattaaaacaaccacatacaacaygacagctggtaataatcactcagaagaaaaattaagcagggcaataggatagagatgaaggggtagtgatatttcatgccaaggggtcaagaagtgaggc

SEQ ID NO: 327304 - DNA, 201 bp, Homo sapiens
ggcttgcacaagaattgatttcttcctgattttcactatgaccctaaccataaaaaagcaaaaccaaaaagccaagagacaatcatgcagggatgctcctcccccacccccaaattgctggaaaactaaacttcgtttagagagattcctttaaaaaatatgtgacttatttttggagtacatagggggcagaggattact

SEQ ID NO: 327305 - DNA, 201 bp, Homo sapiens
gcacaagaattgatttcttcctgattttcactatgaccctaaccataaaaaagcaaaaccaaaaagccaagagacaatcatgcagggatgctcctcccccmcccccaaattgctggaaaactaaacttcgtttagagagattcctttaaaaaatatgtgacttatttttggagtacatagggggcagaggattactgacca

SEQ ID NO: 327306 - DNA, 201 bp, Homo sapiens
acacacacacacacacacacatatacacatacatatttaaatcaccggctactgtttgcattcagtgcacattatagctctcagaaggttgcaaacacttytcattgttgccttttatctgtcatgctgttcaaataattttcctggacactactaaagtaggaaatggatacaagtaaattacaacttgtacccatttcc

SEQ ID NO: 327307 - DNA, 201 bp, Homo sapiens
tgccttttatctgtcatgctgttcaaataattttcctggacactactaaagtaggaaatggatacaagtaaattacaacttgtacccatttccaactgtcaaaaaaagcactaaaggagaaatagaatatggacttcataaaacgttgtgatttggaagcagtttttgtcaaattagtatatgtaaatcgtctttgttttg

SEQ ID NO: 327308 - DNA, 201 bp, Homo sapiens
aaattcattctaactgtggctgaaagagacagattgtatgtgagttcttttttaatatttgaagatgatatgtttcattcaggacattacattttaaaggrtttattatacatttgtaggaaagtttaacaagctttaatattgctcacccagttgtttctctttctatttgaaatgactggttttattgaattggattgg

SEQ ID NO: 327309 - DNA, 201 bp, Homo sapiens
aatcatcagaaaagagaatgtctgaaacaagtgcaggaatgaattcatgacagttttggaggggagtctttaataaaaaccattccgcaaccctccctctyactgtcaagtatcagaaaaacaaaacccttttcctgagtctcagtcatcttgtctgcgaagtgtaggagctggattcagtgatgccaaatgtcccttcta

SEQ ID NO: 327310 - DNA, 201 bp, Homo sapiens
cctcactggggggagttgaaggagttttgagatgatcatggtcctcacttttctgtttggtcacagagcacttaattgtgcttgaaacctctcatctgtcsatgattcgatgactgaagcccattctccactttcctttcttgtttaccctcttgtttcttaatatcaagattttttgtttcttgtggacttttgagagtg

SEQ ID NO: 327311 - DNA, 201 bp, Homo sapiens
gggcctgtcatgttggggaatagcattaggagaaatacctaatgtagatgatgggttgatgggtgcagcacaccaccatgacacatgtatgcctatgttayaagcctgcacattctgcacatgtatcccagaacttaaagtataataaaaataaataaataaatatgagaaaaacagtcaatgttgaagcatgtcttagaa

SEQ ID NO: 327312 - DNA, 201 bp, Homo sapiens
gaatgtatctgctctgtctttggtttctacgttacttgcttgctttactctgataaaaggtgtcactgatatatggtattccttacattgcaagtgatggraaatgtaactctaaatggctttttaaaaaaggaaatttgggggttcaagggctgatttttgtttctacttgtgccagggctcaatagtattcctaggatt

SEQ ID NO: 327313 - DNA, 201 bp, Homo sapiens
acctcgtgatccgcccacctcggcctcccaaagtgctgggattacaggcgtgagccactgcgcccggccccggccacccttttctttctttatgatgtttwtgtgtcccttttccctcttttttgtgatcagactcactggaagtttaggattttaattactgtgttcaaacaatgagaatttagttctgtcagtcctccc

SEQ ID NO: 327314 - DNA, 201 bp, Homo sapiens
tatttcttctacctcaaattagtacaaacagagcaaggaaaagaataaattccctacctacattacagagagatgatgcttatttcatatctatgtctgcmcaaaggagactgtgatctgaccagaaaggttgttagctttctttggcagacgtgtgtcatctctagaagcgggatttatgatcactggcttcatttatct

SEQ ID NO: 327315 - DNA, 201 bp, Homo sapiens
agtattaagtagtaccaagcactaagaagcacagtagtactaatgactaccgatattcacatttaattaaatactgacttattttgcattgtaaatatgtmctttggtctccttaactgtatgataatggcttgagggctagaactctagtttttctcttgattttcacacagcacctaacgccttggcacaatgtaaatg

SEQ ID NO: 327316 - DNA, 201 bp, Homo sapiens
cctccagtacatcttgtaaccattgtggaggggaacaaatgaaagtaggctatggcctcactttatgcttactcatccagtttttgatccctacagagagtttttttttttttttttttctaccatggataataaaagcactgtagtaattttatctatagcttgatactgccaggtttgacaaagcagtgttcctctctt

SEQ ID NO: 327317 - DNA, 201 bp, Homo sapiens
tttagtcagtagggtctggattctgcctggactgggtcctttgctacaaggcagcaggttcccttctggccaaagatgtgtctagaaatatcagggacctrgggcctataatggggacctcatgacctgaccagtgccccatcctactgtggctgtgtgggcatccaagatgcaagacagagtcctctttactctttcctc

SEQ ID NO: 327318 - DNA, 201 bp, Homo sapiens
atagctgtttgctatggcttgttgtgcatgaaaaacaacagaagcacagctctaccaatcattcacctcatcacaatctctgtcggctttacaggcttgcrttaacagccaggtttagttagcccagaacacaaagacccagtataaagcatgtaagtaatatttttaaatgccacaagaaagaacagttcattaactgag

SEQ ID NO: 327319 - DNA, 201 bp, Homo sapiens
aacatgcaaaaaatcacaggcattcctatacaccaataatagacagagagtcaaatcatgagtgaactctcattcacaattgctacaaagagaataaaatrcctaggaatacaacttacgagggatgcgaaggacttcttcaggcagaactgcaaaccactgctcaaggaaataagagaggacacaaacaaatggaaaaac

SEQ ID NO: 327320 - DNA, 201 bp, Homo sapiens
gctgtttgctatggcttgttgtgcatgaaaaacaacagaagcacagctctaccaatcattcacctcatcacaatctctgtcggctttacaggcttgcattwacagccaggtttagttagcccagaacacaaagacccagtataaagcatgtaagtaatatttttaaatgccacaagaaagaacagttcattaactgaggaa

SEQ ID NO: 327321 - DNA, 201 bp, Homo sapiens
caagtgtgttcagttaggaaaggaggaagtcaaattgtctctgttagcagatgacatgattgtatatttagaaaaccccatcgtctcagcccaaaatttcygcaagctgataagcaacttcagcaaagtctcaggatacaaaatcaacatgcaaaaaatcacaggcattcctatacaccaataatagacagagagtcaaat

SEQ ID NO: 327322 - DNA, 201 bp, Homo sapiens
ttctagctcttagggaacttggttaaaaaaaaataaagttaacacatatttataattgacctgttatgtgccaggtatcatcctagaaactaggggtataygggaaatcaatcctcttcaatccctacccttggggagcttatattctgattggggaaaaagaagatattaaagaaataattaaaacaaccacatacaaca

SEQ ID NO: 327323 - DNA, 201 bp, Homo sapiens
caggcaagggaaagaaatcaagtgtgttcagttaggaaaggaggaagtcaaattgtctctgttagcagatgacatgattgtatatttagaaaaccccatcrtctcagcccaaaatttctgcaagctgataagcaacttcagcaaagtctcaggatacaaaatcaacatgcaaaaaatcacaggcattcctatacaccaata

SEQ ID NO: 327324 - DNA, 201 bp, Homo sapiens
ctgacaccaacgagacctagtcccccaatgctttcattctttaaaatcaaccacttacataataaagaaactctctttttgtcactattgattaaagctcrgagtataatttccagccttcattaagatgaaatagatgacagtgaaaaggaaatttaaaaaagagatagagaaaactatttatttagcactcattcaaaa

SEQ ID NO: 327325 - DNA, 201 bp, Homo sapiens
ttctttgttcactataaacaattggtcattggattagaccagttgacgaaagtagtgattttgcccctatatagatgttattttgttatgcaatattgatytttatttttctattaaaatatgctcatggtcccttcttttgcttctccccattcattgtctcctgcaggatcaatatcagttttcctatcgtgccgcact

SEQ ID NO: 327326 - DNA, 201 bp, Homo sapiens
tatttggtgtcttacctccctctcttcatttcctgtcactcatatttctctgcagggttgcagacctacgtgcctgacaccaacgagacctagtcccccartgctttcattctttaaaatcaaccacttacataataaagaaactctctttttgtcactattgattaaagctcagagtataatttccagccttcattaaga

SEQ ID NO: 327327 - DNA, 201 bp, Homo sapiens
ttgtaagacttgaactttaattagacagtggataccttctctagttttgggtctttacagaactagagttcagggggaatatcagaggtaaaaaagctgaraaaagcattgacttcaaatgccagataccattttgatttttggcagagcatctagaaaggaaacaggatatggtactcttttatatgttggcattactcg

SEQ ID NO: 327328 - DNA, 201 bp, Homo sapiens
agactccgtattatgttttaatgaccaggtgcacacacatagtctagaaaatggtgcacaaatgcaccattactattcacatgggacagcctgtcagttartatggagtctaccctcaatggcctccaggagactatttggtgtcttacctccctctcttcatttcctgtcactcatatttctctgcagggttgcagacct

SEQ ID NO: 327329 - DNA, 201 bp, Homo sapiens
ccagagcaactgtttagcatctgtcctcaaggcaaagagttgaactgatagatttcataaagaaaatgaggaatcattatacacttcatcggaatttcatsacttgttagaaatttactcaaaggatcataaattctgtatttttcattattcaggaattctgaaaaaagagtgtgcattttgtgataacaaaaattctgg

SEQ ID NO: 327330 - DNA, 201 bp, Homo sapiens
cccccattgggcttctgttgaagttaagcattcaagtaaggttttctttacctaagactattgtcctgcttctacagagagagatgcccaaatttggtcamacaaaaaaaactgtgacagatcctggattcatttataatttaagcaatgtgctttgtgaacattttgaataaagtttctgtaacttaaaatgtggcaact

SEQ ID NO: 327331 - DNA, 201 bp, Homo sapiens
ataaatgtaaggagactagaacaatgcctgattccaacacagtaaagactcagattcaaactttggtatttaatcttcaaattttgtttactggtattacycagtaaatattttctgaaaggtctgttgtctcagctacattataataatgttttatagaattatatagttaatgaagaggtttcatacaagtaatagcat

SEQ ID NO: 327332 - DNA, 201 bp, Homo sapiens
aaatgttgtatatcttgataaggatgtgggttatgtagacataacatttgttaaatgtcatccagctgcacctaaaacccgggcaattcacttatataagytatacttcaattataaaaataaaataatttacatggacaattaaggaaacattagtagtgattatctatttaatttggaaagctctcaacagtaaattta

SEQ ID NO: 327333 - DNA, 201 bp, Homo sapiens
cacatggcagtgagaagtcatttctgtgatgtttcttcttataagagcactattcctgttcacaagggatccaccctcatgacctaattacctctcaaagsctcaccttctaataccatcacattgagtattagagcttcagcatatgaatttagggagatacaaacatttagtccattgtgcatagtcatgtttaaacac

SEQ ID NO: 327334 - DNA, 201 bp, Homo sapiens
gtaattttacatgtctggtaagaagttttggcctctttatttaggagggtcatgtcaacatcgtcaacatccatgttatcttgaatccttgagttgaatasaagccaagttaaaacttgacagtataatgttttgtgacaaagcagcagattaaagtcattcttaaatgacagttatccgtgtagcatcccagaaatgcta

SEQ ID NO: 327335 - DNA, 201 bp, Homo sapiens
aagagagaattcctaaggtattctaaataatgagttttcttcttttatgtaatccatcttgcttatatgtcattttatgcttcagttactttgaatgtttaaaaaaaaaaaaggggagagatattgtagataggcagggggtgaattttgaagtggcagtacacatgaacatttaatatacatattataaacttcgttttc

SEQ ID NO: 327336 - DNA, 201 bp, Homo sapiens
gccccttttcttggcactttgcctccactaaactgcaggtcaaggactctgtcttattcattattgtgttgctactgcctagtagagtgcctggcacacaraaatattgaataattaaatgtatacaagtcaaacagtattaaacaaactcaattccttctacatgttgactccatcactcaatatcaactttattttggc

SEQ ID NO: 327337 - DNA, 201 bp, Homo sapiens
tgttaaaaacaggaggctgggtcttcagtctgttgatggcacagtcctatgatagaaaaatatcttccttctgccaaaatagtttaaaagtaatggaaccaaaaaaaaaaaaaaaaaagcattaaaaggaattgcatagtgtccccagtaggtataaagtgtaaaactcaaaatggagaagttgaggtgctaggaagagca

SEQ ID NO: 327338 - DNA, 201 bp, Homo sapiens
tggtgcaaagaggtgagaaggacaaaaacaaagaaggaacaaagatggtatgaattttaatttttgagatttagggcttcaaagcaacagatgatagatayctgaaaaggaacaagcatggacatctgaaaaactaatcattttgagcagaacaatgcattaacaccccttctttttaatttgtatgggaatgacttgaag

SEQ ID NO: 327339 - DNA, 201 bp, Homo sapiens
ggcgaagtttaaaagatagtacacaaaccaatatctgagttttgtttgtggtcaagattaaaatgggcatttgtgtgtgttgatgtgtttacagagcagamatgtgaggtgtctcataaactgttttgttttgttttgtttgtttttaccaaagattagttttcaagtttgagtacagatcacctaatgatattagcattt

SEQ ID NO: 327340 - DNA, 201 bp, Homo sapiens
tggcattaatcaaaaccaatagtatttttgctgaataccagaatgccacattttgagggaatggcataataagtaaaaacataatagagaagaatgtaaatttttttttttttcagtaactaatcagttagtaccaataccaatatgtactacacacacatattggcaatctaagggaggctagcatctgtgcatttttct

SEQ ID NO: 327341 - DNA, 201 bp, Homo sapiens
ggagttcaagtccagcctggcaacatggcaacatgctaacatgctgtctctaaaaacaaataatccgtgttgaaacatgttgtctaaatcaggggtccccaaccctgggccacagatcattactggtctctggcctgttaagaactgggctgcacagcaggaggtgagcagcggacaagagatcattatggcctgagctct

SEQ ID NO: 327342 - DNA, 201 bp, Homo sapiens
ttgggtagtctttgaagcaaaaagacttgaatcaggaaaaccttagtaatatatttgctgttttgaagcttggctctagctgcattgtggaaggagaatgrattggagggttttagtactgaagttaaaatagacaacaggtgataaaggtccagatggctctgctgacagtgggattggcaagaagagatacacagtaac

SEQ ID NO: 327343 - DNA, 201 bp, Homo sapiens
agtcttgggttctagctccctgcaagtgaagccacccaaatgactttgcaaagactgctacagttgtttgtacttgtgattcaacattatcattttttaastcatttagggggtaggtcaaacgaccatttaagaagctttagtcatcagcctcattgctctggatctggagtgtagcctcataagaatatcctgctgtgg

SEQ ID NO: 327344 - DNA, 201 bp, Homo sapiens
atgagaaccagtgtgtggggttagagagttgggagaagttgtcagagaccagaccacgcaaggctctaaattttaatatttgtagaatttcttctgtttgycaggcatcatgctaaacactgggcatttactggtgatcagaagagatactatgcttgccattaaggggcttaccgtccagcaggagagtaaaataatgga

SEQ ID NO: 327345 - DNA, 201 bp, Homo sapiens
tagtaaggagctctgtgaatgtagtccagttacaagagataggtatgtatgcctttgttgttgtgtttatattttctaaaggcttaggaataaacacatcyttaaaatctgagataataattctacatgtaagtcatttttagagtgaagctttgtggcctgcatactgtacaaaggtacaaattcccaaggtggtctaca

SEQ ID NO: 327346 - DNA, 201 bp, Homo sapiens
ggggttagagagttgggagaagttgtcagagaccagaccacgcaaggctctaaattttaatatttgtagaatttcttctgtttgtcaggcatcatgctaarcactgggcatttactggtgatcagaagagatactatgcttgccattaaggggcttaccgtccagcaggagagtaaaataatggatgaatacacaattgca

SEQ ID NO: 327347 - DNA, 201 bp, Homo sapiens
actggtgatcagaagagatactatgcttgccattaaggggcttaccgtccagcaggagagtaaaataatggatgaatacacaattgcaaattggataagcrctatatagaaaaaaaaaaaaagatggtgcctgcagtcttggaatcttggtcttgtacatttaagtaaagacctgaaggatgagaaggaatcagttggata

SEQ ID NO: 327348 - DNA, 201 bp, Homo sapiens
tcttctcctctttttcacgaagaatcaagggttttcttggataatgaaataaaataatccttcattaggtgttgcatgacaggtgctatgacgctaatttytaggtttttaaattatttacatttcactctctgaaatgtggctttttaatatatctactatgaatgtataattgcttatccccaaacattataacgcttg

SEQ ID NO: 327349 - DNA, 201 bp, Homo sapiens
tgggtttacattttacaggtgagaaaacagaggctctggaagaataaataaatgatgtatttaagatacaagctgcaggtggaagagccagagttagtatstctaaattccataaaatttttgtttgccagcctggttctttcataaaatgagtacatcacatcaaagaccatttgctctgttatgcttaattgaaaacaa

SEQ ID NO: 327350 - DNA, 201 bp, Homo sapiens
cagttctgctgataatgatgactttgatcgagttctttaactcctctgggcttcatttttctaattggtagagataatgggggatcaggttagagagaagsggaggtagatgaacccataggggatgaaccatgcaagaagcatacttctttatatccccagcacaaagcagtatctagtccattgccttgtggatacaag

SEQ ID NO: 327351 - DNA, 201 bp, Homo sapiens
taaagaaaatgaggaatcattatacacttcatcggaatttcatcacttgttagaaatttactcaaaggatcataaattctgtatttttcattattcaggarttctgaaaaaagagtgtgcattttgtgataacaaaaattctggtagggtatgagaaatccatccttaaagaagaaaagaattcacaacttcaaatggatg

SEQ ID NO: 327352 - DNA, 201 bp, Homo sapiens
aatggatgaatacacaattgcaaattggataagcactatatagaaaaaaaaaaaaagatggtgcctgcagtcttggaatcttggtcttgtacatttaagtraagacctgaaggatgagaaggaatcagttggatatgggtagctggtatcagcacgtatgaaggataaaaggcaggaaataactgtgtggtgaacggaagg

SEQ ID NO: 327353 - DNA, 201 bp, Homo sapiens; identical to SEQ ID NO: 68796

SEQ ID NO: 327354 - DNA, 201 bp, Homo sapiens; identical to SEQ ID NO: 68797

SEQ ID NO: 327355 - DNA, 201 bp, Homo sapiens
gatcgcttgaacccaggaggcagtgagccaagattgcaccattgaactccagccttgatacagagcaagaccctgtctcaaaaaacaaaacaaaacaaaasaaaacaaaagacatagatgttctaacaagtatttgatcatattttaaggaatgtactatactagatgtctattcatcttcattttacgtgcacgtaagga

SEQ ID NO: 327356 - DNA, 201 bp, Homo sapiens
ccaatactgcccttcctagaacatggcatagaaatcatcatacagaaacaggagaatagggaagcacagactcttccaacagctactgaacctctcccacrtaactgtatttcaggggcagtgggagactggaagaaacacttcaccgtggctcagaatgagagatttgatgaagattacaagaagaaaatgactgatacc

SEQ ID NO: 327357 - DNA, 201 bp, Homo sapiens
cccacctcagccaccagagtagctgggactacagacatgcaccaccactcctggctaattttttgtttctgttgtttttttgtagagacaaggttttgccrgttgccccaggctggtcttgaactgctgggcacaagcaatctacctgccttggcctcctaaagtgctgggattacaggcatgagccaccatgcccagcct

SEQ ID NO: 327358 - DNA, 201 bp, Homo sapiens; identical to SEQ ID NO: 68799

SEQ ID NO: 327359 - DNA, 201 bp, Homo sapiens; identical to SEQ ID NO: 68800

SEQ ID NO: 327360 - DNA, 201 bp, Homo sapiens
ccactcccggctaatttttttttttgtattcttagtagagacgaggtttcaccgtgttagccaggatgttctcgatctcctgaccccatgatccacccgcytcggcctcccaaagtgctgagattacaggcgtgagccactgcgcccagccggttcaagttaatttttaaatgcatcactaacgtgtaaatagtgactgtt

SEQ ID NO: 327361 - DNA, 201 bp, Homo sapiens
ttttgagacagaggaggagtttcactctgtcgcccagactagagtgcaatggtgcgatctcaagtcactgcaagctccgcctcccgggttcaagagattckcctgcctcagcctccggagtagttgggattacagtcgcctgccaccatgccagctaattatttgtatttttagtagaaaccgggtttcaccatgttggcc

SEQ ID NO: 327362 - DNA, 201 bp, Homo sapiens; identical to SEQ ID NO: 68803

SEQ ID NO: 327363 - DNA, 201 bp, Homo sapiens
taatgcaaccaggtggcaagagactctccttgtctcacagatcagacaagaaagttgtcttctcttcaggataaggaagtgacaggatagcaagagaaacrttttgtccaatactgcccttcctagaacatggcatagaaatcatcatacagaaacaggagaatagggaagcacagactcttccaacagctactgaacctc

SEQ ID NO: 327364 - DNA, 201 bp, Homo sapiens
cttgcatgtctattttaaaatgcagtttagcaggaaaaaaaatcctagcacattttggtttctttggtttttgggttttttttgtttttgtttttgtttttgagacagaggaggagtttcactctgtcgcccagactagagtgcaatggtgcgatctcaagtcactgcaagctccgcctcccgggttcaagagattctcct

SEQ ID NO: 327365 - DNA, 201 bp, Homo sapiens
tctcccttgcatgtctattttaaaatgcagtttagcaggaaaaaaaatcctagcacattttggtttctttggtttttgggttttttttgtttttgtttttktttttgagacagaggaggagtttcactctgtcgcccagactagagtgcaatggtgcgatctcaagtcactgcaagctccgcctcccgggttcaagagatt

SEQ ID NO: 327366 - DNA, 201 bp, Homo sapiens
acataactgtatttcaggggcagtgggagactggaagaaacacttcaccgtggctcagaatgagagatttgatgaagattacaagaagaaaatgactgatmccagactaactttccacttccagttctagtaaggaagaaaaactgaaaatgttttagtttattacccagtatatttgggtaataatgaaagtttaattct

SEQ ID NO: 327367 - DNA, 201 bp, Homo sapiens
gtcattttctcccttgcatgtctattttaaaatgcagtttagcaggaaaaaaaatcctagcacattttggtttctttggtttttgggttttttttgtttttgtttttgtttttgagacagaggaggagtttcactctgtcgcccagactagagtgcaatggtgcgatctcaagtcactgcaagctccgcctcccgggttca

SEQ ID NO: 327368 - DNA, 201 bp, Homo sapiens
atggtgtcattttctcccttgcatgtctattttaaaatgcagtttagcaggaaaaaaaatcctagcacattttggtttctttggtttttgggttttttttgtttttgtttttgtttttgagacagaggaggagtttcactctgtcgcccagactagagtgcaatggtgcgatctcaagtcactgcaagctccgcctcccgg

SEQ ID NO: 327369 - DNA, 201 bp, Homo sapiens
ttagctttgtttcccttcgtttctcaaaatctccaaacaccctagaaggaaagaatcttttcttttgaccagcaggggctctgccttctttaatggaacaytctcacttctcttcaggaattctcctttcagtggtataataggacctctgtgactcattgtcctgttttccatcccatcctccagtgtgctggggctcct

SEQ ID NO: 327370 - DNA, 201 bp, Homo sapiens
ctaatgcaaccaggtggcaagagactctccttgtctcacagatcagacaagaaagttgtcttctcttcaggataaggaagtgacaggatagcaagagaaaygttttgtccaatactgcccttcctagaacatggcatagaaatcatcatacagaaacaggagaatagggaagcacagactcttccaacagctactgaacct

SEQ ID NO: 327371 - DNA, 201 bp, Homo sapiens
tttaagtcataatgcattgaccccatcagggactcagattgatgcggggaaccgaaaattgctgcacttcattggttacagctgtcatttgtcaaagtgcrcatggctgatcatgagtttaagtatcacacagtctcacctgcagcttcctggtgctcccagggatgctgcacatttcccttacaggcaggttattacaca

SEQ ID NO: 327372 - DNA, 201 bp, Homo sapiens; identical to SEQ ID NO: 68798

SEQ ID NO: 327373 - DNA, 201 bp, Homo sapiens
gctacagtcatgagcacccaccatgcttcaatgtgcaacagggcacagggaaagacaagaaagcccttcaggcctgctattgtaacatggcggtctcgccyacccactaatgcaaccaggtggcaagagactctccttgtctcacagatcagacaagaaagttgtcttctcttcaggataaggaagtgacaggatagcaag

SEQ ID NO: 327374 - DNA, 201 bp, Homo sapiens; identical to SEQ ID NO: 68801

SEQ ID NO: 327375 - DNA, 201 bp, Homo sapiens
aggatgacaagaatgcagcctcagaaaaaatgaactgtatgaaatgtatctaccctaacatgacttgcctgggcagtaacagcaaaaaaaaaaaaaaaaawttcctgtttttttgcttcttcccttcccctcccctcatcattcccagataatctatgtagcaagaaatcccaaggacaacatggtgtcctattaccattt

SEQ ID NO: 327376 - DNA, 201 bp, Homo sapiens
atggccacagtggcagtggttgggtctagggcactgggccatggaacgtggaatggtctctgcaaaatttctatctgctggggctactatcagcagccacyacctcaggaaggatgacttctatctccccactgccttccaaaactcaggctaatgcatctcactggagggatctaaatagccttcagaatcttagtggca

SEQ ID NO: 327377 - DNA, 201 bp, Homo sapiens
ggctttgatatacaaactaataaatctaaagccctaactttcctttctagcccatatgccccaggaggtatgctttaatcatccacaaccaggtaccgagyaactagggacaaacccatagcttagataacaccaaaattactcaaatagtcaaacttaaaatacttattctgccctcccttttgtttctcatgtaaactc

SEQ ID NO: 327378 - DNA, 201 bp, Homo sapiens
tctgatcatagaacccaaagcatgaaattcagaagctggcagaatttattgggaagaaattagatgacaaagttctagataaaattgtccattacacttcrtttgatgtcatgaaacagaatccaatggcaaactattcatcgattcctgctgaaatcatggaccactccatttctccattcatgagaaaaggtttttata

SEQ ID NO: 327379 - DNA, 201 bp, Homo sapiens
catggtaaaatgccgtctctacaaaaagtataaaaattagccaggggtgattgtgtatgcatgtaacccctgctactcaggaggctgaggcgagaggatckcttgaacccaggaggcagtgagccaagattgcaccattgaactccagccttgatacagagcaagaccctgtctcaaaaaacaaaacaaaacaaaacaaaa

SEQ ID NO: 327380 - DNA, 201 bp, Homo sapiens
agtgaggccggatctgcctagagtccctttgtcgggtgggggcccctcctggtcagcccggccagtgcgggcgtctgtttaaggaatatgggcaggggccsctcctggtcagcccggcaagcgcgggcatctgtttaaggaatatgggcaggggcccctcctggtcagcctggccagtgcgggcgtctgtttaaggaatac

SEQ ID NO: 327381 - DNA, 201 bp, Homo sapiens
tgttgctagcataagtaacacggtcgtagtacctgttttgcccgcttaccggaaagtgggcttccctctccaccctgctgtatggaagagaaggccagctcgcatgagcagggcgcggctgcattcaaacagggtggactcggtctccatccgcaaatcaaacccctccgtgagaatcagaaagtgagtctatttacaaac

SEQ ID NO: 327382 - DNA, 201 bp, Homo sapiens
gccctccaggcttcctgggctccctgtgcacggccctgtttgtgtcgttcgccgcacaaggaaagcccctggtccagtgggggagagacatgctgcgggcrgtgcctctggcagaagagtactgcaggaagaccatccggcacacggcaggtgagccgctcccccggccccagtccgcactcagagcagatctggacagat

SEQ ID NO: 327383 - DNA, 201 bp, Homo sapiens
caagaccctaagggggctggacttttccttgtgtgaaaccaagttggcccagagtttcggagggcctgagtcgcgggtgcctgcgagcctcgtccaggtcmtggtccagggctctcctggcctccctgtggcctggagctctgtggcaggagcgtagcctccccgctgcagccctccagctctgctctccagcgccctgag

SEQ ID NO: 327384 - DNA, 201 bp, Homo sapiens
gctgtttatcatggcagaattaaaatctgagggctgcagctaagtcaatgaaatctcacttatgcgttcactccaccattctgttcatctgccatggacgygcccagtttagttctgtgctcacagcagaggaatgccatcgagcctgtggccggtccctaaataacgggagagctgaagcgccggcgataagataaggct

SEQ ID NO: 327385 - DNA, 201 bp, Homo sapiens
gctgctactggtgctttaagtcagaagaaccagagagacaggcacacgggggcgaagggcctcacgtcacacacgtccatggagtgtggtcccagcacccstgggtgtggggaaattaactgagaattacctttcaggaaaagaaacccaattaaggtaagtcggaactgttgctagcataagtaacacggtcgtagtacc

SEQ ID NO: 327386 - DNA, 201 bp, Homo sapiens
cggggctcactccttccgggtgtgtctctctgaacagggtccctccttcccggtgagcctctctgactggggctgcctccttccgggtgagcctctctgastggggctgcctccttccgggtgagcctctctgactggggctgcctccttccgggtgagcctctctgaacagggcacgagagcagactctgaaccaggaag

SEQ ID NO: 327387 - DNA, 201 bp, Homo sapiens; identical to SEQ ID NO: 68814

SEQ ID NO: 327388 - DNA, 201 bp, Homo sapiens
actgtttggggattagttctaaattccaatgaattaaagttagaatatcatctcccaaaatggttcagcttggagagttgcccatacacaaatgtgttctragaaaatgacataaacttgattggacgagattggagacaaagcttcttaaaatacctttaagtagcaaattgattttaggatcaagcttttgcatgaatt

SEQ ID NO: 327389 - DNA, 201 bp, Homo sapiens
ttaatactgtttggggattagttctaaattccaatgaattaaagttagaatatcatctcccaaaatggttcagcttggagagttgcccatacacaaatgtrttctaagaaaatgacataaacttgattggacgagattggagacaaagcttcttaaaatacctttaagtagcaaattgattttaggatcaagcttttgcat

SEQ ID NO: 327390 - DNA, 201 bp, Homo sapiens
agtttttaaacgtgacttttcacttgtatttgtaaagcgttaactaggcctagcaccttctgtttctaatagagttaaagccagtgaagcctctctcggcygtgctggtgggagtagggtgagggctcacttctcgctgcagagattaagccttcttgttctgaattcattacaaagggatgtaaaataagccagtttgaa

SEQ ID NO: 327391 - DNA, 201 bp, Homo sapiens
ctcagcccctggaggggtttcctccgtgaccccagctcaagggtgggaccatgcggcctcgggctcccctccctctgccttccttctgcaccttcctggcrcctcactgactcttagtgctgaaacaccgcttcacacagatgcctgccccagggagggagaagggaagcgcctgtccccctcctgtttgtttttgggttt

SEQ ID NO: 327392 - DNA, 201 bp, Homo sapiens
ctactcaggaggctgaggcaggagaacggagtgaacccgggaggcagagtttgcagtgtctgccctccctttcttccccagactatggtgcctgaccccgygggagggaggccacagttcacaccacagctggctctgatgtctgccctccctttcttccgcagactactggtgcctggatgatctgtaccgggagatggt

SEQ ID NO: 327393 - DNA, 201 bp, Homo sapiens
ctcagctgcagggatgtctgcctataggtgtcagcatccacgtcattgtcccaggatgagagaacagcccccagctagcaaccagcgggcaagcccctgcycccgtgtgtggcccgccagccctggccaggtaaccaggtcctcaggtaccttctgtcattgcgttgcctctcagcggtgcaccgtgcacctgatggggtg

SEQ ID NO: 327394 - DNA, 201 bp, Homo sapiens
aggaagtggagctcggaaggtcgagggggaagacgaggccacgatgcccccatgatagcctatgacgccctccttgcagcaggaaacagctggactgagckgtgtcaccgggccatgtttcatggaggtgagatgttccttaatggccgtggcttcctggagggtagcacccttcttctgaagcaccccctcggagtgtcc

SEQ ID NO: 327395 - DNA, 201 bp, Homo sapiens
gatgttgctggggagcgtcggcgatgctcttggctacagaaatgtctgcaaggagaacagcactgtaggcatgaagatccaggaggagctgcaacgttccsggggcctggaccacctcgtactctcgccaggagaatggcccgtgagtgacaacaccatcatgcacatcgcaaccgccgaggccctcaccacaggtaggct

SEQ ID NO: 327396 - DNA, 201 bp, Homo sapiens; identical to SEQ ID NO: 68813

SEQ ID NO: 327397 - DNA, 201 bp, Homo sapiens
ctcttggctacagaaatgtctgcaaggagaacagcactgtaggcatgaagatccaggaggagctgcaacgttccgggggcctggaccacctcgtactctcrccaggagaatggcccgtgagtgacaacaccatcatgcacatcgcaaccgccgaggccctcaccacaggtaggctgggcccaccgcgctccggtgtgcggg

SEQ ID NO: 327398 - DNA, 201 bp, Homo sapiens
aactcctggcctcaagtgatccgcccaccttggcctcccaaaatgctgggattacaggcataagccactgtgcctagccaaggaatacactaaaaacaagsaaacaaacaaacaaccaaaaatctcctgttgcacttcagtaacactttaaatataaagacgtaaatagattaaagcttctaaaaaagaaaaatagaccag

SEQ ID NO: 327399 - DNA, 201 bp, Homo sapiens
aagcaggagaattgcttgaacccaggaggtggatgttgcagtgagccgagatcacatcactgcactccagcctggcgacagagcaagacgccgtctcaggaaaaaaaaaaaaaaaaaattacaaagaaaactgtaggcccaggctgggcacggtggctcacacccgtgatcccagtactttgggaggccaaggccggcaga

SEQ ID NO: 327400 - DNA, 201 bp, Homo sapiens
aagaaaagggtggatggatgaaatggcagttcactaggaggggcccagaaagcttgtgctgtaatatacccagaagtggctccacttgggcacacgccccracccacggctctcttgtcagacctacaggaagtggagctcggaaggtcgagggggaagacgaggccacgatgcccccatgatagcctatgacgccctcct

SEQ ID NO: 327401 - DNA, 201 bp, Homo sapiens
cactaacccccagcatctccaggtggcttcagtgaggccggatctgcctagagtccctttgtcgggtgggggcccctcctggtcagcccggccagtgcggscgtctgtttaaggaatatgggcaggggcccctcctggtcagcccggcaagcgcgggcatctgtttaaggaatatgggcaggggcccctcctggtcagcct

SEQ ID NO: 327402 - DNA, 201 bp, Homo sapiens
gagtgcagtggcgtgatctcagctcactgcaacctccacctcccaggttcaagtgattctcctgcctcagcctcctgagtagctggggctacaggtgcccrccaccacgcccggctgatttttgtatttttagtagagacggggtttcaccacgttgtccaggctggtctcgaactcctgacctcaagtgatccacccacc

SEQ ID NO: 327403 - DNA, 201 bp, Homo sapiens
cttcctccctcacaaggtcacagaggattaaacggagcaaccagcaaagtgtgaggaagcacttaggccagtgtgggaagttggtgcaggcccgtgtggcygaaggcacatctgacatgtctctgccctgaggctcactcagccaacttcagggcccagcaggatggcgggaggtgtcacctggccacagcctccagggca

SEQ ID NO: 327404 - DNA, 201 bp, Homo sapiens
tatttcctgcattttcctgctgtgccctgggttggccccaccacccgccggccaagggagccaaggagaccacgggaaccacgggagcggctccaccccaygggccacaggtttctaacctgtaacggggcgactgccacatgtgaatcacacccccaaatcgggctgtgtgagggtgaagcgggttggatcatgtcgccc

SEQ ID NO: 327405 - DNA, 201 bp, Homo sapiens
ttttggtatcatttgtgtcagaacaaaagacaaagaaacgcaccagtgcctgggtgcaggtgggatcggggggaccctggggacaagggtttgtacaatayttcctgcattttcctgctgtgccctgggttggccccaccacccgccggccaagggagccaaggagaccacgggaaccacgggagcggctccaccccacgg

SEQ ID NO: 327406 - DNA, 201 bp, Homo sapiens
catccgtgctggctctgtgccgccctggccgtctctggccatggagggagaggaggaagcccagcagagtggctgtggcagctccaggcagctcctacccrtaaggtcaaccctgtgccttgtgggagcagctgttatggttctgtgagactggctgaaattgcctcccttcagtgaggcttggagctgagcttgaccaca

SEQ ID NO: 327407 - DNA, 201 bp, Homo sapiens
cctgtccccctcctgtttgtttttgggtttgttgttttttttttgagacaggatctcactctgtcactccggctggagtgcagagaggcaatctcggctcrttgccacctctgcctcccgggttcaagagattctcccatctcagccgcctgtgtagctgggatgacaggcgtgagccaccgcgctggcctgcctgtccct

SEQ ID NO: 327408 - DNA, 201 bp, Homo sapiens
tgacctaagcgtgctcatgtgaggacattacaggatacaggtgcagctgcaggtgcctgctgtgagctccagcagaccaagagtctctcacctggtccacragcctggaggccagtgcagccttagaataggtggggtgtaggggtgtgggggcttctgcccttgccactgctgcctcaggctggccaccttcacagggtt

SEQ ID NO: 327409 - DNA, 201 bp, Homo sapiens
agagccggctcagcccctggaggggtttcctccgtgaccccagctcaagggtgggaccatgcggcctcgggctcccctccctctgccttccttctgcaccktcctggcgcctcactgactcttagtgctgaaacaccgcttcacacagatgcctgccccagggagggagaagggaagcgcctgtccccctcctgtttgttt

SEQ ID NO: 327410 - DNA, 201 bp, Homo sapiens
ctgcggggtgagctcagtaccccagaagccgctggctccatctttccccactgccctggaagatggaccaggacaggcctcccggacttcttccttaaccrtgttttattaaatacatatatactcgcatgcatttatttttcagtaaacagttgtaaaatttgacataccaaagaaaataagggaggcagtgcctataag

SEQ ID NO: 327411 - DNA, 201 bp, Homo sapiens
gccctgggcattgttagcctcattatggccaggatcatcgtaattcagatcagtctcttccgagctcctctctgacggcttgcacactagcggaatgaggycactgcaatggtggatgggagcctagtggggccagacgtggccatgttccctgagagctgcgcacccagtgccacctgctccgtgaggtgcagggctggc

SEQ ID NO: 327412 - DNA, 201 bp, Homo sapiens
aatttcatgtcgctgaacaagaccctaagggggctggacttttccttgtgtgaaaccaagttggcccagagtttcggagggcctgagtcgcgggtgcctgygagcctcgtccaggtcctggtccagggctctcctggcctccctgtggcctggagctctgtggcaggagcgtagcctccccgctgcagccctccagctctg

SEQ ID NO: 327413 - DNA, 201 bp, Homo sapiens
ccgttcaatgaaaaaggtcagggaaatcctctcctctccccctaaagccaccctgctggggaccctgcggtcctaaccatctgccttccactaacccccarcatctccaggtggcttcagtgaggccggatctgcctagagtccctttgtcgggtgggggcccctcctggtcagcccggccagtgcgggcgtctgtttaag

SEQ ID NO: 327414 - DNA, 201 bp, Homo sapiens
cgggatttccaggactgtcctgccagccctgggcattgttagcctcattatggccaggatcatcgtaattcagatcagtctcttccgagctcctctctgayggcttgcacactagcggaatgaggtcactgcaatggtggatgggagcctagtggggccagacgtggccatgttccctgagagctgcgcacccagtgccac

SEQ ID NO: 327415 - DNA, 201 bp, Homo sapiens
tcggttctgtttgtggccacatagatggaaccattagaaaaggggcacggtggggctgggtgcagtggctcacgcctgtaatcccagcactttgggaggcygaggtgggcagatcacaaggtcaggagatcgagaccatcctggccgacatggtgaaaccccgtctctactaaaaatacaaaaaaattagccgggcgtggt

SEQ ID NO: 327416 - DNA, 201 bp, Homo sapiens
gacgccagcgtctgggaagacgcccgttaccaggcggatcgtggtccagcagtagcaaaaggtggcaaggaacaacacctgctacttagcagaccaggaagggggggggggtctccctttccccaggggagtttagagaagactgctcttccacctcttgtggagggcctgacatgagtcaggctcgcccgcagttatccg

SEQ ID NO: 327417 - DNA, 201 bp, Homo sapiens
cctgcgcgggggcagagccgtaggcggggtcaggaccggcccagagccctgggcttgagaaccattcatagactcttgccgctgctgcagccctcccgccrggccaagggaggccctgatgagtgccttcaagagtggcccaacagccgctggaaagcgtctctgcagcctgtctctgcggcctgtctccgcatggcgtgt

SEQ ID NO: 327418 - DNA, 201 bp, Homo sapiens
acctctggcagcaagagccacagtttgtgttacagcctgcatcgcgtgctcccatgagtccagagctgcagccaccctgcgcgggggcagagccgtaggcrgggtcaggaccggcccagagccctgggcttgagaaccattcatagactcttgccgctgctgcagccctcccgccaggccaagggaggccctgatgagtgc

SEQ ID NO: 327419 - DNA, 201 bp, Homo sapiens
aatgaccaaaaatgttttaagggtttgattttatgaaattgacacttcaaagtgctttttaactctactcccttttccattttcaaaccacctctggcagyaagagccacagtttgtgttacagcctgcatcgcgtgctcccatgagtccagagctgcagccaccctgcgcgggggcagagccgtaggcggggtcaggacc

SEQ ID NO: 327420 - DNA, 201 bp, Homo sapiens
gccagctgctcactgggatttgtccccgtccgcagcccgtcctgtggagggcaggcctctgagaggccaggctggggtggctgcggtagcgcctgactctrggcctgactttgaaaggtaatgaggaggcggctcggttggcttccatttaaaaaaagcaaaaaggactcaaaactcctgacctgcagttggcccttagtc

SEQ ID NO: 327421 - DNA, 201 bp, Homo sapiens
ttccactaacccccagcatctccaggtggcttcagtgaggccggatctgcctagagtccctttgtcgggtgggggcccctcctggtcagcccggccagtgygggcgtctgtttaaggaatatgggcaggggcccctcctggtcagcccggcaagcgcgggcatctgtttaaggaatatgggcaggggcccctcctggtcag

SEQ ID NO: 327422 - DNA, 201 bp, Homo sapiens
cggttctgtttgtggccacatagatggaaccattagaaaaggggcacggtggggctgggtgcagtggctcacgcctgtaatcccagcactttgggaggctraggtgggcagatcacaaggtcaggagatcgagaccatcctggccgacatggtgaaaccccgtctctactaaaaatacaaaaaaattagccgggcgtggtg

SEQ ID NO: 327423 - DNA, 201 bp, Homo sapiens
agcccatagagtaggccagtttcggttctgtttgtggccacatagatggaaccattagaaaaggggcacggtggggctgggtgcagtggctcacgcctgtmatcccagcactttgggaggctgaggtgggcagatcacaaggtcaggagatcgagaccatcctggccgacatggtgaaaccccgtctctactaaaaataca

SEQ ID NO: 327424 - DNA, 201 bp, Homo sapiens
ccattagaaaaggggcacggtggggctgggtgcagtggctcacgcctgtaatcccagcactttgggaggctgaggtgggcagatcacaaggtcaggagatsgagaccatcctggccgacatggtgaaaccccgtctctactaaaaatacaaaaaaattagccgggcgtggtggtgggcacctgtagtcccagctactcagg

SEQ ID NO: 327425 - DNA, 201 bp, Homo sapiens
ggctgtgctcagctaaagcccaataactaccttctcgcctggcacacaccgttcaatgaaaaaggtcagggaaatcctctcctctccccctaaagccaccstgctggggaccctgcggtcctaaccatctgccttccactaacccccagcatctccaggtggcttcagtgaggccggatctgcctagagtccctttgtcgg

SEQ ID NO: 327426 - DNA, 201 bp, Homo sapiens
tggggctgggtgcagtggctcacgcctgtaatcccagcactttgggaggctgaggtgggcagatcacaaggtcaggagatcgagaccatcctggccgacakggtgaaaccccgtctctactaaaaatacaaaaaaattagccgggcgtggtggtgggcacctgtagtcccagctactcaggaggctgaggcaggagaacgg

SEQ ID NO: 327427 - DNA, 201 bp, Homo sapiens
aagtggcgaagcccagcccccgtcagaccgagaaccatgctgctgcaggctccctaatggccagccatgcagcaggtggcatttgaatgttatttcccctrtctattccatgctccactagaagcggggccctttttactacccccattttgtagacaaggaaactaagattcagggggtctgagtatttctcccagagct

SEQ ID NO: 327428 - DNA, 201 bp, Homo sapiens
ctgtagtcccagctactcaggaggctgaggcaggagaacggagtgaacccgggaggcagagtttgcagtgtctgccctccctttcttccccagactatggygcctgaccccgcgggagggaggccacagttcacaccacagctggctctgatgtctgccctccctttcttccgcagactactggtgcctggatgatctgta

SEQ ID NO: 327429 - DNA, 201 bp, Homo sapiens
gaatggatgggtgggtggatgggtggatagatgaatggatggtgaatggatgggtgggtggctaaccccatctctactaaaaatacaaaaaattagccacrtgtgctggtgtacgcctgtaatcccaactactcgggaggctgaggcaggagaatcgcttgaacccgggaggtggaggttgcagtgagctgagattgtatc

SEQ ID NO: 327430 - DNA, 201 bp, Homo sapiens
tctccatccgcaaatcaaacccctccgtgagaatcagaaagtgagtctatttacaaactgattatagattaaaacacacaaacacaaaatccacaagcatygtaaacaaaagctggcagtgccttgcttcactttcctgttacagagacacccaaaagttgaaaagaaaaagccaaagaaagcactgaggggacactgagc

SEQ ID NO: 327431 - DNA, 201 bp, Homo sapiens
agacatttattcagcatcatgatcagactattacatttagcaatcaacagcatgggtgcaaaaaaaaaaatccatattaaaactctttgttggaatgcttkgcactttccacagaacaggaactaaaataacttgttacacaatttgtcacaaatacagtcctcgagttttttgcccatacacatgagtatttgtctaaaa

SEQ ID NO: 327432 - DNA, 201 bp, Homo sapiens
aatggtgaagttcaggtcacaatagtaattatcagttcagctacaccgaggtttctgaaaacaatgatttctctacccaagcaagttctgcataaactccmaatagaacctggcatcaccctgaaggaattctaacttcacactgttggggaaatttaccaagatggcttcagcatagactaactttacacagcacattaa

SEQ ID NO: 327433 - DNA, 201 bp, Homo sapiens
ggatgacacacaagcttcattcctgtttataattttatctggtaacattattcaatttagatacattgcatagtatgtgtcaacaatcatttttataaccmataattccatgattttgcttgggtaatcccttttaatggtgaagttcaggtcacaatagtaattatcagttcagctacaccgaggtttctgaaaacaatg

SEQ ID NO: 327434 - DNA, 201 bp, Homo sapiens
tcctgcttaaagttcttcagtggcttcttattcttttgataaaacccaacccccttgccttggagcttataagtctgcataatctgcctcatgcctgtttyttcattccttcccttcctgcgctcactgcattccagtcataccactgctcccttctgttctccagctcctccaacatagcaagccctttcccacctctga

SEQ ID NO: 327435 - DNA, 201 bp, Homo sapiens
ggcttacacagtgaaaatttatttcttgctcacgttacagcccagggctggtccatgaggtaggaggtaaaagagggggattttgctccgtgaaatcattkattccatcttgttgctacatactcctctaggtccttagagtcctctctgtttaatgggtaaatggggaaagaggagtggtgggggagtaggtctggggct

SEQ ID NO: 327436 - DNA, 201 bp, Homo sapiens
ggaggtaaaagagggggattttgctccgtgaaatcatttattccatcttgttgctacatactcctctaggtccttagagtcctctctgtttaatgggtaartggggaaagaggagtggtgggggagtaggtctggggctaggcatggaagtggtgcacatctctttcatatccagtgaccacaactctgtcacatggtctc

SEQ ID NO: 327437 - DNA, 201 bp, Homo sapiens; identical to SEQ ID NO: 68837

SEQ ID NO: 327438 - DNA, 201 bp, Homo sapiens
tttgtatattggctcccctttagatgtgtaacaatattagaatttgggatttttttttagacagaatttcactcttgttgtccaggctggagtgcaaatgkcatgatctcggctcactctaacctccgcctcccacattcaagcaattttcctgcttcagcctcccgaatagctgggattacaggtgcccaccaccatacc

SEQ ID NO: 327439 - DNA, 201 bp, Homo sapiens
tttcactcttgttgtccaggctggagtgcaaatgtcatgatctcggctcactctaacctccgcctcccacattcaagcaattttcctgcttcagcctcccraatagctgggattacaggtgcccaccaccatacctggctaattttttgtatttttagtagaggcggggttttaccatgttgtccaggctggtctcaaact

SEQ ID NO: 327440 - DNA, 201 bp, Homo sapiens
tctttgaatttgggccttatggttctacaatatagaaaaaagaaaactccacaagtactatgtaagaagacactttcttttcttcatttcagccatgtaargttgaagcaaaccataggattagaacctaaaggaaaatttttggtatacaggtaaaatttgaaaataatgtatggcttttttctgtattctgcaccttac

SEQ ID NO: 327441 - DNA, 201 bp, Homo sapiens
ttactttaatttctactataaccagaaaaccattttgtttaaattgtatattaatatgtttttatgtatttctaaggacaaatatactgtaatatttagcrccttttatgtgcactggtttattattctgaatattcattatcattgtatatactatggatgttgaagaagcaaatagaatggactgaattcatattaatc

SEQ ID NO: 327442 - DNA, 201 bp, Homo sapiens
gaagcaccattttcagtgacaggtattcttgagatttatgaaaataagttaaagtacacgacaatgaaatacagaatcccaaatatagatgttggcatgcmctgcctcacaaaccgtgtttggaatgaatttgtattctcattcttaattaaattcacacttaacacataaaacgtttttatggtcaacttgtgccataga

SEQ ID NO: 327443 - DNA, 201 bp, Homo sapiens
ttctgccatgggggcagggttttgctatattaatgaccttacagtaatacagtcaacacaggtaagtattataaagtattaagagtgtacttttgactggmcatggtggctcatgcctgtaatcccagcagtttgggaggctgaggcgggcagatcacgaggtccagagatcgagatcatcctggccaacatggtgaaacc

SEQ ID NO: 327444 - DNA, 201 bp, Homo sapiens
tagttcattcttttcttatacatttagtctcttcatatgctttgattcgaagtaaagatttcttgactttacaaaaaggggtgggggaggtgtttgaaaakcaatttctacagaagtgcacattttcactggatttgggattccatggtgtgaagtggaaaagctggatggaatctgattcttaagccctagcccttttca

SEQ ID NO: 327445 - DNA, 201 bp, Homo sapiens
ggaaccaaatgccaccaattcttcatgactcagatgaggcatataataagttttaaattgattagaggtcaatttgctacttgcgttggtcactaaaattrctaatcttagtctcggttggtgtatttgaaaagtctttatgaaaaaatgttatttgtgcttgaactttcagaattagttaaaattagacttgctaacata

SEQ ID NO: 327446 - DNA, 201 bp, Homo sapiens
gtgaattttctttttaaaagcagtcctatatgtaagatgttaggcactggcaaagtggatggggtcagtggctggatggggaatagagctgggacacaggstagagctgctcagcctgctatagcagctgtcacaaaggtgttgaacttcctatatatcaacaacgatgtggaggcaggaattggccacggcattttaaga

SEQ ID NO: 327447 - DNA, 201 bp, Homo sapiens
cttggctagattttttgttaataataaagaaatgtgtatttcttatacagtagaggtttttcttttaaactttttgattttgaaataatttcacagctggrtgtggtggctcatacctgtaatcccagcactttgggaggccgaagcaggaggattgctcgagcccaggaacacaagaccagcctgggcaacatggcaaga

SEQ ID NO: 327448 - DNA, 201 bp, Homo sapiens
ctataggcatgtaccacttacctgccttttttttttccttcttacctccctccctccgtccctacctccctccctacctccctcccttccttccttccttctctttctctttctttcttttattttattttatttttattttttaagacaaggtcttgctctgtcaccaaggctggagtgcagtggcacaatcacagctca

SEQ ID NO: 327449 - DNA, 201 bp, Homo sapiens
ctaagccagtgattcacacattagtctaatggtagaagttttttttccaatgtcactcacatgattttctgtgcctcctaatgtagcccagatagaaaagrtggtgagtgaatttccttttaagtcatcattatgtgatgggaaatacacctatgacatacctgtacaaaggtggtctactccagggtcattgcgtagaga

SEQ ID NO: 327450 - DNA, 201 bp, Homo sapiens
gctataggcatgtaccacttacctgccttttttttttccttcttacctccctccctccgtccctacctccctccctacctccctcccttccttccttccttctctttctctttctttcttttattttattttatttttattttttaagacaaggtcttgctctgtcaccaaggctggagtgcagtggcacaatcacagctc

SEQ ID NO: 327451 - DNA, 201 bp, Homo sapiens
ggctataggcatgtaccacttacctgccttttttttttccttcttacctccctccctccgtccctacctccctccctacctccctcccttccttccttccttctctttctctttctttcttttattttattttatttttattttttaagacaaggtcttgctctgtcaccaaggctggagtgcagtggcacaatcacagct

SEQ ID NO: 327452 - DNA, 201 bp, Homo sapiens
gggctataggcatgtaccacttacctgccttttttttttccttcttacctccctccctccgtccctacctccctccctacctccctcccttccttccttccttctctttctctttctttcttttattttattttatttttattttttaagacaaggtcttgctctgtcaccaaggctggagtgcagtggcacaatcacagc

SEQ ID NO: 327453 - DNA, 201 bp, Homo sapiens
atgttcctgcctgattgttcctctagaagctttgtctcagaggggtacccggccgtgtgaggtgtcagtctgcccctactggggggtgcctcccagttgcrctactcgggggtcaggaacccacttgaggaggcagtctctccgttctcagatctcaaactccgtgctgggagaaccactactgtcttccaagctgtcaga

SEQ ID NO: 327454 - DNA, 201 bp, Homo sapiens
ttgttcatttctttttacccttttttctctaaacttctcttcttgcttcatttcattcatttgatcttccatcactgataccctttcttccagttgatcamatgggctactgaagcttgtgcattcgtcacgtagttctcatgacatggttttcagctccatcaggtcatttaaggacttctctaccctggttattctagt

SEQ ID NO: 327455 - DNA, 201 bp, Homo sapiens
ccatgtagttgagtggttttgagtgagtttcttaatcctgagttctagtttgattgcactgtggtctgagagacagtttgttataatttctgttcttttayatttgctgaggagtgctttacttccaagtatgtggtcaattttggaacaagtgcgatgtggtgctgagaagaatgtatattctgttgatttggggtggag

SEQ ID NO: 327456 - DNA, 201 bp, Homo sapiens
tcaggagcaggttgttcagtttccatgtagttgagtggttttgagtgagtttcttaatcctgagttctagtttgattgcactgtggtctgagagacagttygttataatttctgttcttttacatttgctgaggagtgctttacttccaagtatgtggtcaattttggaacaagtgcgatgtggtgctgagaagaatgtat

SEQ ID NO: 327457 - DNA, 201 bp, Homo sapiens
gccagtattttattgaggatttttgcattgatgtttatcaggaatatttgtctaaaattctctttttttttgttgtgtctctgccaggctttggtatcagratgatgctggcctcatcaaatgagttagggaggattccctctttttctattgattggaatagtttcagaaggaatggtaccagctcctccttatacctcc

SEQ ID NO: 327458 - DNA, 201 bp, Homo sapiens
ggtggataagctttttgatgtgctgctggattcggtttgccagtattttattgaggatttttgcattgatgtttatcaggaatatttgtctaaaattctcyttttttttgttgtgtctctgccaggctttggtatcaggatgatgctggcctcatcaaatgagttagggaggattccctctttttctattgattggaatag

SEQ ID NO: 327459 - DNA, 201 bp, Homo sapiens
gaggttttaggatagtatcaccatgagaaataagttgttgaatccagctgatatactaagcatgcactcactcatagcttataggttggggaaattaattrtacttgagagactcaggcaccagaagtcactgggactttgtttggtgctaccacatacttatttagcagtgcctgccatataataggtcttcaataaatc

SEQ ID NO: 327460 - DNA, 201 bp, Homo sapiens
aaattctctattgagtgacaataggatttacattattattaagcagaatcacagtctcagcaaatgccaaagaactgcttatcaagccatatacctggatyccatgcaataaaatcagaaataaaaaagcccataaatcttcccctgtttggaatttttaaaacacattcataaactattcatggattaaggaagataaca

SEQ ID NO: 327461 - DNA, 201 bp, Homo sapiens
gaccagcctgaccaacacaacgaaaccccatctctactaaaaatacaaaaattagccaggtgtggtggtgcacgcctgtaatcccagctactcaggaggcwggggcacgagagttgcttgaacctgagaggcagagattgcagtgagctgagattgtgccgctgaactccagcctggacagcagagcaagactccatgtca

SEQ ID NO: 327462 - DNA, 201 bp, Homo sapiens
tcagcattcccacttattttttctataactccatttatgtttaattcaaatttctctctattattactcctttttgtttctttgctgcactttcacctttsttggccaattcccactttccattatccatttttgtacactgtcatgtgggtctattattgggagaaaaggaggcaatagagccacatgttttgcagtttg

SEQ ID NO: 327463 - DNA, 201 bp, Homo sapiens
tgatatgattgatcactcatcatgatgtggctgtgttataaatgtagggatgtgtggactgaagagttagaagccaagtgtgtacttgatgcagttatggytaatattaccgtggtaactgaaatttgaacgtgttgttgggagactggagctattttaacaaaagcatagtatcagtaattttgtgtataggaactgagc

SEQ ID NO: 327464 - DNA, 201 bp, Homo sapiens
taggaactgagcaaagcaaggactgcctgtaggtatttaaaagtgagcaataatgaaaataatacatagcaaaaattatgggatataactaaagccctacytagagggaaatgtatagccttaatgaatatataaggaaaaaaaagattttaaaataataagttggctttcacttaacatgtttgtgctaaaacagaagaa

SEQ ID NO: 327465 - DNA, 201 bp, Homo sapiens
tcttatgttggaggactgcagacataccgagctctgtcttactggcagaaagatttaaatgctaatgtaagattttggccctggtcagctaagtgaagaayagtgttaccattcatagggacagagaagaagcgtgattaattcagtttgggacatattaagttcaaggtgtttgggtcaaccaggtagcaatgtcctata

SEQ ID NO: 327466 - DNA, 201 bp, Homo sapiens
atcatatcctctaccatcaccattctaaaccattgttgtcttcttttgaaagactaaacgagattggtgtcataaaaaccaaagagataaaagagtgcaargaattataggtccactgtcaaagaaagccaagaacccacatctcttctctgatcatctgactacatagccaactgcctacttgatacattgggatgtcta

SEQ ID NO: 327467 - DNA, 201 bp, Homo sapiens
gtcggaggttgcagtgagccgagatcgcgccactgcattccagcctggcaacagagcgagactctgtctcaaaaaaaaagtgtactttttctcagtctggktttttttttttttttttttggctttataaattaggtagtgccattctaaacgcacacacacacaaaactttatttcccagaagttactgttatgtaagta

SEQ ID NO: 327468 - DNA, 201 bp, Homo sapiens
accatcaccattctaaaccattgttgtcttcttttgaaagactaaacgagattggtgtcataaaaaccaaagagataaaagagtgcaaggaattataggtycactgtcaaagaaagccaagaacccacatctcttctctgatcatctgactacatagccaactgcctacttgatacattgggatgtctaacagacacctca

SEQ ID NO: 327469 - DNA, 201 bp, Homo sapiens
ccgggaggcggagcttgcaggggagccgacatcgcgccactgcactccagcctgggcgacagagccagactccgtctcaaaaaaaaaaaaactattttatkggcttttataaagctggagtaggatgtaatattatgcagaataaattgccatggattttttttttttaagagctgaacagttgctttggtctccttggca

SEQ ID NO: 327470 - DNA, 201 bp, Homo sapiens
tgggcgacagagccagactccgtctcaaaaaaaaaaaaactattttattggcttttataaagctggagtaggatgtaatattatgcagaataaattgccakggattttttttttttaagagctgaacagttgctttggtctccttggcaacacagtattctccttctgtccaagaaatttagtacatataaatgaatattt

SEQ ID NO: 327471 - DNA, 201 bp, Homo sapiens
tggagtaacttccccagaaatccaatgtaaagaaatcctagatgaaaatagtgtactgatccacactggggttccagaaatatatcttgaaaaagaattcrgcatctatgccataaatagtaaaaagctggaagatgttagtaatatggtgaagatggcgtgttgtttctggtcaacaacattaaaaaaaaaaagaacaga

SEQ ID NO: 327472 - DNA, 201 bp, Homo sapiens
ttagtaatttagtgcagattttactgaaggagtattgttttcattagtcaactgtggtctgcattactactaattagtactgaggctgctgccctctagtrtcgggagttaatggagaaaatgttctatgctggtgaagaatagacaggaaggcagtgagatagtgtcaccaatcctcatgagatcttttacaccaagtca

SEQ ID NO: 327473 - DNA, 201 bp, Homo sapiens
ccttaaagagtatgaagactataatatggtaaatgaaaaataccatatctctctgattcaaagacattttaatgtctaccttgttagaaaacctctttaaygtaagtaatggttttatgttgtgtttctgcttcagaattttttcacgtcattttctctctgaaatatttcattatttatataggtaaaaatgagggaaaa

SEQ ID NO: 327474 - DNA, 201 bp, Homo sapiens
aaaggacctccaagatatatagatataaagagagatatagatacataggtgtataggtttatatttttttaattttattttatcatattaagaacacttarcatgagatttaccctcttaacagattttccagtattcaatatagtatggttaactgtaggtacagtgctgcacagcatatctctataatgaattcatctg

SEQ ID NO: 327475 - DNA, 201 bp, Homo sapiens
cttaaggagattttggctgagacgatggggttttctaaatatacaatcatgtcatgtgcaaacagggacaatttgacttcttcttttcctaactgaatacsctttatttctttctcctgcctgattgccctggccagaacttccaacactatgttgaataggagtggtgagagagagcatccctgtcttgtgccagttttc

SEQ ID NO: 327476 - DNA, 201 bp, Homo sapiens
tttttgtaagaggtagaatttgagctgggacttgaagggtaagtaggatacaaatagataatggatatggggcaaaaatttaaaatgggcacagtagaatmataaaatggaaaatgacactgatcagggaaatgaaactgagcaggaggcatgcagaaaccatgaacagatttcttaagtatagcgtatgtattgtgctac

SEQ ID NO: 327477 - DNA, 201 bp, Homo sapiens
tataaattaccttgggtggtatggccattttcacaatattgattcttcctatccatgagcatggaatgttcttccatttgtttgtgtcctcttttatttcrttgagtagtggtttgtagttctccttgaagaggtccttcacatcacttgtaagttggattcctaggtattttattctctttgaagcaattgtgaatggga

SEQ ID NO: 327478 - DNA, 201 bp, Homo sapiens
tcagagaagtgtagagagaggggactatttgaatccaagaaggtttcaaactcctttgccctttgggatctgaccccaacctttctaatttttacatttgrtgtaatgagaattgaactctattgctgattcttggctgattaatctggctgcagcatgtaattaggatgagatggaatggagttgtggaggggatcctgg

SEQ ID NO: 327479 - DNA, 201 bp, Homo sapiens
gaagtcaggtagtgtgatgcctccagctttgctcttttggcttaggattgacttggcaatgcaggctcttttttggttccatatgaactttaaagtagttytttccaattctgtgaagaaagtcattggtagcttgatggggatggcattgaatctataaattaccttgggtggtatggccattttcacaatattgattct

SEQ ID NO: 327480 - DNA, 201 bp, Homo sapiens
cctgggtgacagagtgggaccctacctcaaaaaaaaaaaaagtttttttttttgacagatattgccaaattgccttacagagagtgtgcaccaatgtattmttctaccaataatatataaaagtgcctgctttctcaaattcttgactctaccatgcagtatcaaatatttttctttgccattgtgaaaaataaaaactat

SEQ ID NO: 327481 - DNA, 201 bp, Homo sapiens
aatataagggaccaatggaaggaaaacaaattttgctttgagtttattttcattcaacagacatttgttaaacttagctaagaacttgatctataaaagtwgacaagtctacagttatagtgaaatatgttaacatcttctttcagaaattgattcattgggcagacaaaaatgatgaaggatagatttgaacacattgtt

SEQ ID NO: 327482 - DNA, 201 bp, Homo sapiens
ccagcaccatttattaaatagggaatcctttccccatttcttgtttttgtcaggtttgtcaaagatcagatggttgtagatgtgtggtattatttctgagrgctctgttctgttccattggtctatatttctgttttggtaccagtaccatgctgttttggttactgtagccttgtagtatagtttgaagtcaggtagtgt

SEQ ID NO: 327483 - DNA, 201 bp, Homo sapiens
tttgtataaggtgtaaggaagggatccagtttcagctttctacatatggctagccagttttcccagcaccatttattaaatagggaatcctttccccattkcttgtttttgtcaggtttgtcaaagatcagatggttgtagatgtgtggtattatttctgagagctctgttctgttccattggtctatatttctgttttgg

SEQ ID NO: 327484 - DNA, 201 bp, Homo sapiens
ttgaattaatttttgtataaggtgtaaggaagggatccagtttcagctttctacatatggctagccagttttcccagcaccatttattaaatagggaatcmtttccccatttcttgtttttgtcaggtttgtcaaagatcagatggttgtagatgtgtggtattatttctgagagctctgttctgttccattggtctatat

SEQ ID NO: 327485 - DNA, 201 bp, Homo sapiens
agttatttgtagattctggatattagccctttgtcagatgagtaggttgcaaaaagtttctcccattctgtaggttgcctgttcactctgatggtagtttmttttgctgtgcagaagctctttagtttaattagatcccatttgtcaattttggcttttgttgccattgcttttggtgttttagacatgaagtccttgccc

SEQ ID NO: 327486 - DNA, 201 bp, Homo sapiens
atttgtttgagttatttgtagattctggatattagccctttgtcagatgagtaggttgcaaaaagtttctcccattctgtaggttgcctgttcactctgayggtagtttcttttgctgtgcagaagctctttagtttaattagatcccatttgtcaattttggcttttgttgccattgcttttggtgttttagacatgaag

SEQ ID NO: 327487 - DNA, 201 bp, Homo sapiens
ctctgatggccagtgatgatgagcattttttcatgtgtctgttggctgcataaatgtcttcttttgagaagtgtctgttcatatcctttgcccacttttcratggggttgtttttttcctgtaaatttgtttgagttatttgtagattctggatattagccctttgtcagatgagtaggttgcaaaaagtttctcccattc

SEQ ID NO: 327488 - DNA, 201 bp, Homo sapiens
atgagaacatgtggtgtttggttccttgtccttgagatagtttgctgagaatgatggtttccagcttcatccatgtccctacaaaggacatgagctcatcmttttttatggctgcatagtattccatggtgtatatgtgccacattttcttaatccagtctatcattgttggacatttggcttggttccaagtctttgcta

SEQ ID NO: 327489 - DNA, 201 bp, Homo sapiens
tttttgttaataataaagaaatgtgtatttcttatacagtagaggtttttcttttaaactttttgattttgaaataatttcacagctggatgtggtggctyatacctgtaatcccagcactttgggaggccgaagcaggaggattgctcgagcccaggaacacaagaccagcctgggcaacatggcaagaccttgtctcta

SEQ ID NO: 327490 - DNA, 201 bp, Homo sapiens
ctttctttcttttattttattttatttttattttttaagacaaggtcttgctctgtcaccaaggctggagtgcagtggcacaatcacagctcactgcagcytcaaccttccaggttcaagcaatcctcctgcctcagtctcccaaccacaggcatgagccatcatacccagctaatttttttatatttagtagagacaggg

SEQ ID NO: 327491 - DNA, 201 bp, Homo sapiens
tttttttagcttattgacgctcatgtttcttctgcttttcctaatgttttacttattgtattggatttagtggtttagtagtggttactaaatcggtattyccatggtattaaatgtgtctgaaactccaggacatgtttgtcatcttacatttctggattgaacagtattgctcccacactggtaaacatgggcataaag

SEQ ID NO: 327492 - DNA, 201 bp, Homo sapiens
atccaaattttttttttttttttttttttttttgagacggagtctcgctctgtcgcccaggctggagtgcagtggcgcgatctcggctcactgcaagctcygcctcccgggttcacgccattctcctgcctcagcctcccgagtagctgggactacaggcgaccgctaccacgcccggctaattttttgtatttttagtag

SEQ ID NO: 327493 - DNA, 201 bp, Homo sapiens
ccttttctatgaactattcatatcttttgctagcttttctattgagttattaatcttttctcctgttttaatgccaaagaaataagtctttgatgtatcaygtattacaaatgtttttttctcagtttgtcttttgaatttatatatgtaatttttatcatgtagaacataattataattttattgacagcatagtatttc

SEQ ID NO: 327494 - DNA, 201 bp, Homo sapiens
ctggagtgcagtggcgcgatctcggctcactgcaagctccgcctcccgggttcacgccattctcctgcctcagcctcccgagtagctgggactacaggcgmccgctaccacgcccggctaattttttgtatttttagtagagacggggtttgtcacattggccaggctgctgttgaactcctgacctcaggtgatccaccc

SEQ ID NO: 327495 - DNA, 201 bp, Homo sapiens
tcctgttttaatgccaaagaaataagtctttgatgtatcacgtattacaaatgtttttttctcagtttgtcttttgaatttatatatgtaatttttatcaygtagaacataattataattttattgacagcatagtatttcacttggtaaatatatcatatttaaccatttcctttttgctggatgtcttaaagtattctg

SEQ ID NO: 327496 - DNA, 201 bp, Homo sapiens
atagtatttcacttggtaaatatatcatatttaaccatttcctttttgctggatgtcttaaagtattctgatttttaaaaactattttgaataatgctgasagcatcattttgcatataattttttcccttagattatttctataacatgtaaagatgacatatacatgatacagagatatttaacttctgggaaatgctg

SEQ ID NO: 327497 - DNA, 201 bp, Homo sapiens
actaaaaatacaaaaattaggtgggcatgatggcgtgtgcctgtagtcccagctacccgggaggctgaggcaggagaatcgcttgaacctgggagtcggargttgcagtgagccgagatcgcgccactgcattccagcctggcaacagagcgagactctgtctcaaaaaaaaagtgtactttttctcagtctggttttttt

SEQ ID NO: 327498 - DNA, 201 bp, Homo sapiens
aacaaacttagatagaagaaaataattactcattttggcatatggccatttataaaggttaaccagagtatttggaaaatttagttgaaaatattttcctytatcacatatcctttatgtggttttctatatccacatgagagttaatattagttgtgtaatatgatataatttgtgttacttctctccattgttatgcag

SEQ ID NO: 327499 - DNA, 201 bp, Homo sapiens
actcaggcaccagaagtcactgggactttgtttggtgctaccacatacttatttagcagtgcctgccatataataggtcttcaataaatcagtataacttmgttttagttgaatgaatggccttaggcatgacattacatggagctttaatcttattgtctcctattcttaaaagaaatattgaaagagaccaaattagaa

SEQ ID NO: 327500 - DNA, 201 bp, Homo sapiens
tttttttttatactttaagttctagggtacatgtgcacaacgtgcaggtttgttacatatgtatacatgtgccatgttggtgtgctgcacccattaactcrtcatttacattgggtatatctccaaatgctttccctcccccatccccccaccccacaacaggccccggtgtgtgatgttccccttcctgtgtccaagtgt

SEQ ID NO: 327501 - DNA, 201 bp, Homo sapiens
tcactctgttgcccaggctggagtacagtggtatgatcactgtagcctcaaactcctgaactcaagggattcttttttttttttttttatactttaagttytagggtacatgtgcacaacgtgcaggtttgttacatatgtatacatgtgccatgttggtgtgctgcacccattaactcatcatttacattgggtatatct

SEQ ID NO: 327502 - DNA, 201 bp, Homo sapiens
ttctgttttctagagccttcagacaagaaacaattttatgttggctcttctaatcttttttttttttttagcttattgacgctcatgtttcttctgctttycctaatgttttacttattgtattggatttagtggtttagtagtggttactaaatcggtatttccatggtattaaatgtgtctgaaactccaggacatgtt

SEQ ID NO: 327503 - DNA, 201 bp, Homo sapiens
acatatttaaaacatttttttgtctagtagtaggatttctgaaacagtagactgtcagatagaaatgtgatcacatgctaatatttactttaaagctgaamtagaagaaaaagtatctcaaagaaaagctttagattttacagaaagaagtaaaaatttaaaatatttagagttcatatttagaatgacatcatagcttat

SEQ ID NO: 327504 - DNA, 201 bp, Homo sapiens
tatgatctagcaaggacttaagacaattaaaattctgttttctagagccttcagacaagaaacaattttatgttggctcttctaatcttttttttttttttagcttattgacgctcatgtttcttctgcttttcctaatgttttacttattgtattggatttagtggtttagtagtggttactaaatcggtatttccatgg

SEQ ID NO: 327505 - DNA, 201 bp, Homo sapiens
tgtgaagtggaaaagctggatggaatctgattcttaagccctagcccttttcactctattaggttggtgcaaaagtaattgaggttttggtcattttttttaatggcaaaaactacaattacttttccaccaacctaatgcatatagagaaataagatgcattctgatagcagagattaatatgagggtctatgaggtttt

SEQ ID NO: 327506 - DNA, 201 bp, Homo sapiens
cgagatcgcgccactgcattccagcctggcaacagagcgagactctgtctcaaaaaaaaagtgtactttttctcagtctggttttttttttttttttttttggctttataaattaggtagtgccattctaaacgcacacacacacaaaactttatttcccagaagttactgttatgtaagtaaaaactgtagactcaattc

SEQ ID NO: 327507 - DNA, 201 bp, Homo sapiens
agtcggaggttgcagtgagccgagatcgcgccactgcattccagcctggcaacagagcgagactctgtctcaaaaaaaaagtgtactttttctcagtctgkttttttttttttttttttttggctttataaattaggtagtgccattctaaacgcacacacacacaaaactttatttcccagaagttactgttatgtaagt

SEQ ID NO: 327508 - DNA, 201 bp, Homo sapiens
aggtgggcgtatcatgaggtcaggagatcgagaccatcctggctaacacggtgaaacctcgtctctactaaaagtacaaaaaattagctgggcgtggtggygggcgcctgtagtccagctactcgggaggctgaggcaggagaatggtgtgaacccgggaggcggagcttgcagtgagccgagatcgcgccactgctctcc

SEQ ID NO: 327509 - DNA, 201 bp, Homo sapiens
ttgaactcctgacctcaggtgatccgcccgcctcgacctcccaaagtgctgggattacaggcatgagccaatgtgcccagcctggtatgtatgtttcttcmaagcaggtcagtcaaatagttttcctactgtcttcctcctcttttttttttttcctgactaggcttctacccccaagtaatcagtgaattgtaaataaga

SEQ ID NO: 327510 - DNA, 201 bp, Homo sapiens
ggtcttgaactcctgacctcaggtgatccgcccgcctcgacctcccaaagtgctgggattacaggcatgagccaatgtgcccagcctggtatgtatgtttyttcaaagcaggtcagtcaaatagttttcctactgtcttcctcctcttttttttttttcctgactaggcttctacccccaagtaatcagtgaattgtaaat

SEQ ID NO: 327511 - DNA, 201 bp, Homo sapiens
aaaagccaggcgaggtgtcacgtgcctgtagtcccagctactcaaaggctgaggccagagaatcacttgaacttgggaggcggaggttgcagtgagctgaratcgttccactgcactccagcctggatgacagagtgagactccatctcaaaaataaataaaacaaaataaaaataatgaagataaaacttcattgaaagt

SEQ ID NO: 327512 - DNA, 201 bp, Homo sapiens
tataattggatactatggcatatgcatattataatgttatcataataattagccctgcttgtattttactcatattgttattaaggtatacttctaaaagraaatcatatataatcatttgattgaagagtccctgtagagtcattactatctatatcttttaatatttattaaattagtcctcctatgttgacatttttt

SEQ ID NO: 327513 - DNA, 201 bp, Homo sapiens
tgacaaactgaaagctcattgaaatttatatggataattaacacattaattgttaataaactatatttggtatgatataaattctactttataatagaaakatgacttttttctatatcacataactactttataatgttaagttaaatagtatcaagttttagggaatagtctgtggtttcttggattatctttagtaga

SEQ ID NO: 327514 - DNA, 201 bp, Homo sapiens
tttaggagactctgacttagacatgacagcagggggaaggagactttaatgatgcttcctcagcagcatccacgggcagaaagcagtaagctgacctaaamgtttttttaaactagatttttcacacattttttaacatttattcctggacatattttgttgcatgaatttttatgttactatatcagataggaatgcttt

SEQ ID NO: 327515 - DNA, 201 bp, Homo sapiens
ggaaataacccaagtaaccattaactaatgaatggataagtaaaatgtggtatatccatacaatgaaatattattcagcaataaaaataaatgaactactyacataccacaacatggataaaccttgaaaacatcatgctaagtgaaagaagccagtcacaaagaaccacatattgtatgattccatttatatgacatatg

SEQ ID NO: 327516 - DNA, 201 bp, Homo sapiens
tattctcctgcctcagcctcccgagtagctgggactacaggcgcctgccaccacacccggctaattttttgtatttttagtagagacagggtttcaccacrttagccaggatggtctcgatctgctgacctcgtgatctgcccgcctcagcctcccaaagtgctgagattacaggcgtgagccaccgtgcctggcctcaat

SEQ ID NO: 327517 - DNA, 201 bp, Homo sapiens
tttagtagagacaaggtttcatgatgttggccaggctggtctcgaactcctgacctctggtgatccgcctgcctcagcctcccaaggtgctgggattacargtgtgagccaccatgcccagcctagagtttctttcaggagtagtgagaatgttctaaaattgatcatagtcatggttgaacaactctatgaatatagcga

SEQ ID NO: 327518 - DNA, 201 bp, Homo sapiens
agcgtgattaattcagtttgggacatattaagttcaaggtgtttgggtcaaccaggtagcaatgtcctataggtagttggatatatagacttgtagctcargggagaaatgtggacttaagttatagagttgtgggtcaccacacatgttagagcatataagattatttggacatcctttacttgcatgagtagcccagag

SEQ ID NO: 327519 - DNA, 201 bp, Homo sapiens
aaaagatctgggagccaacttgaagggactcccactgaccaaatattggatagttgggcatcaaaaagaataatcacctcaatgaattaaaacattaaacmtaaaaagcccatgactgttagtaatactaaaaaagcagtttattggtcacctttgggagttgctggactgaaaatcacacaggctgaaatttgataaatt

SEQ ID NO: 327520 - DNA, 201 bp, Homo sapiens
aacatcacttctttttttaatttttataaaaaatagagttctttctgcaccccagtacatgcaggatgtgtgcactcctctttggagacgattgataaackgcaaaaatgcttcgcaaatatagaggcagtttggactttggaacttggcttccgcttcttgttctaccacttagttgattgtcttgaatgggttgtttac

SEQ ID NO: 327521 - DNA, 201 bp, Homo sapiens
tcttaacactaattgactgagtaaaagaaaattgtacctggctttatgaaatagagctttcaaccttatgctttctaaaacacaaatagcaaaatagaagrtactgaaagttgattcacacctaagattctgatgttttcctagtttatgtctatagcaagaagaagtataatgggcacaaaagagaaagaagaacaattc

SEQ ID NO: 327522 - DNA, 201 bp, Homo sapiens
atcaaaaagaataatcacctcaatgaattaaaacattaaacctaaaaagcccatgactgttagtaatactaaaaaagcagtttattggtcacctttgggarttgctggactgaaaatcacacaggctgaaatttgataaattctaaattttccttctgaaaatcaataaatgtttgaaactttctcttaatttgttctgcc

SEQ ID NO: 327523 - DNA, 201 bp, Homo sapiens
agtacatgcaggatgtgtgcactcctctttggagacgattgataaacggcaaaaatgcttcgcaaatatagaggcagtttggactttggaacttggcttcygcttcttgttctaccacttagttgattgtcttgaatgggttgtttactctctttgagcctcgtctgtaaaatggcggtaacacttactttgcaggattat

SEQ ID NO: 327524 - DNA, 201 bp, Homo sapiens
tgtctgagtgatgtatgaggtgaagggggaggaaaggaataaggagagaagagaaggtactaattaagtcaccatcttggagagtaaaaaagtaagctttytgggtaacaaagtaggattgcctggcagcattgggtgtccattcagagtgaagctgttcaatccttttgtgagatttattctagcaatattcaactattt

SEQ ID NO: 327525 - DNA, 201 bp, Homo sapiens
aataaggagagaagagaaggtactaattaagtcaccatcttggagagtaaaaaagtaagctttttgggtaacaaagtaggattgcctggcagcattgggtrtccattcagagtgaagctgttcaatccttttgtgagatttattctagcaatattcaactattttggtgcaagcctggaaaaggaacacatttgggttcaa

SEQ ID NO: 327526 - DNA, 201 bp, Homo sapiens
ctgtaaattaacattaccacccacccaaacaaaaaccaaggatcattttttattacttcctttccctaacattttatctactaacgggttctacagatgcwatgtctaaaatagaagttgaatacacttacctctgcccatatcctctaccaatcatcattctaaaccattgttgtcttctatctgaacctaagcatccta

SEQ ID NO: 327527 - DNA, 201 bp, Homo sapiens
ttgggtatgacactcggggtcaagtaactagcagctgcagcagccagaggtacaaagttaattgtttcaaagattaagttgaaatagaataaaacatattkaaaacatttttttgtctagtagtaggatttctgaaacagtagactgtcagatagaaatgtgatcacatgctaatatttactttaaagctgaaatagaaga

SEQ ID NO: 327528 - DNA, 201 bp, Homo sapiens
tatggtgggtgtccctacttttggcttcttgttttaaacgtagctgaattctatgccttctaaaattcctatcactaacattgtgcctacatacaggaacrttaacattgaacttaggttcttcagtacaatccagctttttgggtcactgtttcaggaactttccttgagactggcagagaaagaaaatgcccgggtagt

SEQ ID NO: 327529 - DNA, 201 bp, Homo sapiens
ctctaccaatcatcattctaaaccattgttgtcttctatctgaacctaagcatcctaattggtctcttccctgcttccattgttctccctgcaatccattytccacaaagcagacagatgatctcttagaatatgaactttcctgcttaaagttcttcagtggcttcttattcttttgataaaacccaacccccttgcctt

SEQ ID NO: 327530 - DNA, 201 bp, Homo sapiens
cccaaagcccatagtttatgttagggttcattcttcatttgtacattctttgcattttgacaaatgaataatgacacgtatccaccattatagtatcatasagagtatttttactgcctccggaattctctgtgttctgcctattcatccattcctcctctttaacccctggcaaacactgatctttttactgtctccata

SEQ ID NO: 327531 - DNA, 201 bp, Homo sapiens
ctgggcgacagagccagactccgtctcaaaaaaaaaaaaactattttattggcttttataaagctggagtaggatgtaatattatgcagaataaattgccmtggattttttttttttaagagctgaacagttgctttggtctccttggcaacacagtattctccttctgtccaagaaatttagtacatataaatgaatatt

SEQ ID NO: 327532 - DNA, 201 bp, Homo sapiens
ttcaagttttttatctaagccaaatttatgttaatttctaccaattttttaaagataaggaaattaaatttagaattacacaaaaattatttaaataggaaagaatgattggtttagcatgaatatattttggacttaataaagaaacatctgatttagaaaagctgttctgctccaagactctagacttggatcttcaaa

SEQ ID NO: 327533 - DNA, 201 bp, Homo sapiens
attcaagttttttatctaagccaaatttatgttaatttctaccaattttttaaagataaggaaattaaatttagaattacacaaaaattatttaaataggaaagaatgattggtttagcatgaatatattttggacttaataaagaaacatctgatttagaaaagctgttctgctccaagactctagacttggatcttcaa

SEQ ID NO: 327534 - DNA, 201 bp, Homo sapiens
tcaggtgatccgcccgcctcgacctcccaaagtgctgggattacaggcatgagccaatgtgcccagcctggtatgtatgtttcttcaaagcaggtcagtcmaatagttttcctactgtcttcctcctcttttttttttttcctgactaggcttctacccccaagtaatcagtgaattgtaaataagagagcacattcagaa

SEQ ID NO: 327535 - DNA, 201 bp, Homo sapiens
atattcaagttttttatctaagccaaatttatgttaatttctaccaattttttaaagataaggaaattaaatttagaattacacaaaaattatttaaataggaaagaatgattggtttagcatgaatatattttggacttaataaagaaacatctgatttagaaaagctgttctgctccaagactctagacttggatcttc

SEQ ID NO: 327536 - DNA, 201 bp, Homo sapiens
caggaggtccgggctgcagtgagctgatatatccccactgtactccagcctgagcaacagaacgagactctgtctcaaaaaaaaaaaaaaaaaaaaaaaaagacaaaaacacaaacaaacaaaaaaccctacaaatacgccaaagtttcagtggcttacacagtgaaaatttatttcttgctcacgttacagcccagggct

SEQ ID NO: 327537 - DNA, 201 bp, Homo sapiens
ccaggaggtccgggctgcagtgagctgatatatccccactgtactccagcctgagcaacagaacgagactctgtctcaaaaaaaaaaaaaaaaaaaaaaaaagacaaaaacacaaacaaacaaaaaaccctacaaatacgccaaagtttcagtggcttacacagtgaaaatttatttcttgctcacgttacagcccagggc

SEQ ID NO: 327538 - DNA, 201 bp, Homo sapiens
cccaggaggtccgggctgcagtgagctgatatatccccactgtactccagcctgagcaacagaacgagactctgtctcaaaaaaaaaaaaaaaaaaaaaaaaagacaaaaacacaaacaaacaaaaaaccctacaaatacgccaaagtttcagtggcttacacagtgaaaatttatttcttgctcacgttacagcccaggg

SEQ ID NO: 327539 - DNA, 201 bp, Homo sapiens
gcccaggaggtccgggctgcagtgagctgatatatccccactgtactccagcctgagcaacagaacgagactctgtctcaaaaaaaaaaaaaaaaaaaaaaaaagacaaaaacacaaacaaacaaaaaaccctacaaatacgccaaagtttcagtggcttacacagtgaaaatttatttcttgctcacgttacagcccagg

SEQ ID NO: 327540 - DNA, 201 bp, Homo sapiens
tgctaaaacaaagactatttaatatttaagctacttaaaacattggcaaattgtcatctgagatgttgtattgatttatagtccctctgtagcagattgtrtttttaaagacggctgcacctatatgtcccattccacatgctcttcttattgtgtgactttggtactcctcaattgaaaggtgggatctgtgttccctct

SEQ ID NO: 327541 - DNA, 201 bp, Homo sapiens
cttgcctgtaatcccagctacccaggagacaggcaggagaatcactggaacccgggaggcggaggctgcagtgagccaagatcgcgccactgcactccagyctgggtgacagagcgagactccatctcaaaaaaaataaatttttaaaaaagtatttttcctgtctcttcctctcctcttatttaaaaaaatcaaagaata

SEQ ID NO: 327542 - DNA, 201 bp, Homo sapiens
aaggcaggcggatcacctgaggtcaggagttcgagaccagcctggccaacatggtgaaacccccatctctgttaaaaatacaaaaaattagctgggcgtgrtggcacttgcctgtaatcccagctacccaggagacaggcaggagaatcactggaacccgggaggcggaggctgcagtgagccaagatcgcgccactgcac

SEQ ID NO: 327543 - DNA, 201 bp, Homo sapiens
gattgataaacggcaaaaatgcttcgcaaatatagaggcagtttggactttggaacttggcttccgcttcttgttctaccacttagttgattgtcttgaaygggttgtttactctctttgagcctcgtctgtaaaatggcggtaacacttactttgcaggattattgttgaggcccagagatcatgcattgaggtatataa

SEQ ID NO: 327544 - DNA, 201 bp, Homo sapiens
gctgttgttgccattttgcataggtgctgcctgtgagtaaaaacagccaaatgattacatttacttttcaaaatggctgtgttgctacccttcggacaagyggaacagaaccaaagataaagtattatgcagagatgtgtgcgtcacctgaccagaggtaagaattgatttttttaagatatacatacaaaagctttattg

SEQ ID NO: 327545 - DNA, 201 bp, Homo sapiens
ggaaggagattttttagaattgctttcagagtccaaccaagctatactattttgtatttccccaaatctttgcatttaaggatagatttcatttcctttgsgggggataaagagcccccgaagtcattcaaagtagaatctaaagtaaaccaaattgggtaatgctacatctggttgaaaatgaaggaagattattaaagt

SEQ ID NO: 327546 - DNA, 201 bp, Homo sapiens; identical to SEQ ID NO: 68839

SEQ ID NO: 327547 - DNA, 201 bp, Homo sapiens
ttcaagcagagaggctttgtggttgggtatgacactcggggtcaagtaactagcagctgcagcagccagaggtacaaagttaattgtttcaaagattaagytgaaatagaataaaacatatttaaaacatttttttgtctagtagtaggatttctgaaacagtagactgtcagatagaaatgtgatcacatgctaatattt

SEQ ID NO: 327548 - DNA, 201 bp, Homo sapiens
catttaaggatagatttcatttcctttgggggggataaagagcccccgaagtcattcaaagtagaatctaaagtaaaccaaattgggtaatgctacatctkgttgaaaatgaaggaagattattaaagtaataagaactgatttgttgtgtagcttttaaaatgactgtaaaggcagtttaaaagaggcttgcctcgaaat

SEQ ID NO: 327549 - DNA, 201 bp, Homo sapiens
tatatatagtcaatatgtgtattttaaccttgtgcttgtatattaagaaaaaaatatgtatgtgtgtgtgtgtgtatgtgtatatatttgtatatgtgacmttgtattttttggagaagctcagaagtagagagggctcctctgtcagagagtgcagtgagccgtgatcacaccactgcactccagcctgggctacagagt

SEQ ID NO: 327550 - DNA, 201 bp, Homo sapiens
cctatgaaaataaataattccaaaactcttcatcttttcctcagtgacactgctttactggaggaagaactgaagaaactcattgatgctctgatagagawttttcttcagcctagtaagaatggactgatctggcgttctgtttaggggtacaccaatatgtcatgacactgtgtgggcatatggaacagagcaaccgag

SEQ ID NO: 327551 - DNA, 201 bp, Homo sapiens
ccttacagtaatacagtcaacacaggtaagtattataaagtattaagagtgtacttttgactggacatggtggctcatgcctgtaatcccagcagtttggraggctgaggcgggcagatcacgaggtccagagatcgagatcatcctggccaacatggtgaaaccccgtctctactaaaaatacaaaaattaggtgggcat

SEQ ID NO: 327552 - DNA, 201 bp, Homo sapiens
caaatgcaatagaaaatatagacgttaaagttgaggaaacatagcaaaaggaaataggaaatatgaggaagttgatgtggagtaacttccccagaaatccmatgtaaagaaatcctagatgaaaatagtgtactgatccacactggggttccagaaatatatcttgaaaaagaattcagcatctatgccataaatagtaaa

SEQ ID NO: 327553 - DNA, 201 bp, Homo sapiens
tatgtgtatatatttgtatatgtgacattgtattttttggagaagctcagaagtagagagggctcctctgtcagagagtgcagtgagccgtgatcacaccmctgcactccagcctgggctacagagtgaaactctgtttcaaaaaagaaaaaaaaaagaaaatgaatgtagaagaatgtttattgtggcactgtttataca

SEQ ID NO: 327554 - DNA, 201 bp, Homo sapiens
gaatttgcactttatgtatttgtgtgtggatttcttgtggttttagccaaatgaagtgttatcagtaataaacaggtctcttcataggcatgagtttctgkgtaatttttatttgagatactgtgtagttcataaagcttgctatctaaacaggaaatactcttgaaatacacacatcacataccctagaatccactttgc

SEQ ID NO: 327555 - DNA, 201 bp, Homo sapiens
caaattgtaattaactaaattaagttgtccaaacactacaaagatattgtaaatctgctttctgttaggatattaaaatattcaatacaacacacacacamacaaaaaaacattctgggttttttgtttgttttaaaaattctgctagaacctcaaggatttcactgactgggggcagtttctgtgttaatttattgtttc

SEQ ID NO: 327556 - DNA, 201 bp, Homo sapiens
aaattctgaaggcaattgcacttaaagaaggatttcattttgaagtaagaatcaataatatctgtgtgctactttttaaaacctatttctgtatgttaaaracatctccccaccaagactgactttcattgatttcatttgtaattcccttatttttctaattctgttaacacttgttcagtctcttttgataatttagac

SEQ ID NO: 327557 - DNA, 201 bp, Homo sapiens
aagagacatgcttcctcatgatctctgtaatagtgggcaggactttttctattctgcattttcactgagagtgaaatgcttcaaggatgccatttttattkgggggtctcagttccaactccctaccttgcacatgggcattacaatccaagaaccagataaatggacagttctcaaaccccaggtaaccacaatatcagt

SEQ ID NO: 327558 - DNA, 201 bp, Homo sapiens
aaaaaaaaaaaaaaaaaagataatgtaaagcacctggttcagtccttaatagtaggtgattatactgattatactgtatgtgcttattcatgttactttgkgactacatgaagcaccacttataaatgctggtttatatttggtgtaaatcacctagtactataatctgtaaatagtaggtcattagtagtagcagtgtgt

SEQ ID NO: 327559 - DNA, 201 bp, Homo sapiens
aatgctagcaccctgggaggccaaggtgggcagatcacctgaggtcaggagttcgagaccagcctggccaacatagtgaaaccccgtccctactaaaaatmcaaaaaaaaaaaaaaaaaaaaaaaaaaaaagccaggcgaggtgtcacgtgcctgtagtcccagctactcaaaggctgaggccagagaatcacttgaactt

SEQ ID NO: 327560 - DNA, 201 bp, Homo sapiens
tatggcccttcattactatatgtctgctactgtataaatctttgtggactgaagactatagtaaggatcattatatgaacgttgtgtgcatgtagtggcaratttttctctaataggtatttgtgagacagtcacttaactagagtggcctcctctgcatttcaggaaacattaccaggttttaaatggattggaagtagg

SEQ ID NO: 327561 - DNA, 201 bp, Homo sapiens
tggcgtgaatccgggaggcggagcttgcaggggagccgacatcgcgccactgcactccagcctgggcgacagagccagactccgtctcaaaaaaaaaaaaactattttattggcttttataaagctggagtaggatgtaatattatgcagaataaattgccatggattttttttttttaagagctgaacagttgctttggt

SEQ ID NO: 327562 - DNA, 201 bp, Homo sapiens
tttaaatggattggaagtaggataatagacctcctggaaaatgggaaagaagtcctttttgcatttgaagagtctattggtatgtagtaaatattaaaatmttcaaaatttgattgataatttttaaaatgtaattctgtaggaggagttttttgtgttctggtttcatattttgagttgtaaaaactacagagaatgaga

SEQ ID NO: 327563 - DNA, 201 bp, Homo sapiens
atcatatttcaaaaacttcctatttcttgtgttatgaaccacctaccatcaaaagtatatttgaaaggcttcgtaattttgattctccaaaagaatatccmaaattttgtggaacatttgctatattgcatgtacgggacattaccactggatatgacagtagccagcctaataagaaatcagtaagtacctttttttttt

SEQ ID NO: 327564 - DNA, 201 bp, Homo sapiens
gggcgcagtggctcacgcctctaatcccaacactttgggaggccgaggcgggcggatcacaaggtcaggagatcgagaccatcctggctaacatggtgaarccccgtctctactaaaatacaaaaaattagccgggcgaggtggcgggcacctgtagtcccagctactcgggaggctgaggcaggagaatggcgtgaatcc

SEQ ID NO: 327565 - DNA, 201 bp, Homo sapiens
acctaccatcaaaagtatatttgaaaggcttcgtaattttgattctccaaaagaatatccaaaattttgtggaacatttgctatattgcatgtacgggacrttaccactggatatgacagtagccagcctaataagaaatcagtaagtacctttttttttttccaaacaatttagaaaatttcatggctcatgtcaccaaa

SEQ ID NO: 327566 - DNA, 201 bp, Homo sapiens
cagatcacctgaggtcaggagttcgagaccagcctggccaacatagtgaaaccccgtccctactaaaaatacaaaaaaaaaaaaaaaaaaaaaaaaaaaargccaggcgaggtgtcacgtgcctgtagtcccagctactcaaaggctgaggccagagaatcacttgaacttgggaggcggaggttgcagtgagctgagatc

SEQ ID NO: 327567 - DNA, 201 bp, Homo sapiens
aatacctttgttgaagtagagaaggcagcacatttaaaatggaattaatgacactgaattaaggaatttgtatggtagtatgtgacattatgttgtacaaatgaatttccttaaggcttcactttctgaaagttttgtttttactttattcattcattcattcagcaaaaaaatattgaatgctgagtgcgtgttttaggt

SEQ ID NO: 327568 - DNA, 201 bp, Homo sapiens
gtaaaatttatgcagtcaagaatgaattatttttctgactaaagtgtgtagcagtagttcaaaattgtgcccttgttttaacagtttctgtcaacatcttytcatttttccctacaaaaacaccagggtgtattataagtactgcctgtgagaatttgcactttatgtatttgtgtgtggatttcttgtggttttagccaa

SEQ ID NO: 327569 - DNA, 201 bp, Homo sapiens
cgtttctaaccgctatccgctttagttctggtctggtgtgtttcctccttctgtcgctaggtagttgctggccttttatcactccctggtattgtctagtrtcaccttttgctgttgggaaaggcaaggcgcttacctcttctttctcctgctggcagctattttctggaattaatctgttcaaggaatcgtgttttccag

SEQ ID NO: 327570 - DNA, 201 bp, Homo sapiens
ccattcacctactgaagaacatcatagattcttccaagttttggcaattatgaataaagctgctataaatatttgtgtgcacatcttagtatggacataastcttcattcctttcagtaaataccaaggagtgtgagtgctgaatcatgtaacaagagtatgtttagttttgtaagaaactgccaaactgtctctaaagtg

SEQ ID NO: 327571 - DNA, 201 bp, Homo sapiens
ttctgcagtgctctcaattgtaacctcccttcctcttctttaccctctttcctttcaagtgctgtcttccctctttcttcaaaaaaaaaaaaaaaaaaaaatcatcatcattgtaagttataccctaaacaacgatttcctttccctttttctcccttgacttccttctccacatacctgaaagtggtttctggcaccctt

SEQ ID NO: 327572 - DNA, 201 bp, Homo sapiens
tagtttatgttagggttcattcttcatttgtacattctttgcattttgacaaatgaataatgacacgtatccaccattatagtatcatacagagtattttyactgcctccggaattctctgtgttctgcctattcatccattcctcctctttaacccctggcaaacactgatctttttactgtctccatagttttgccttt

SEQ ID NO: 327573 - DNA, 201 bp, Homo sapiens; identical to SEQ ID NO: 68834

SEQ ID NO: 327574 - DNA, 201 bp, Homo sapiens; identical to SEQ ID NO: 68836

SEQ ID NO: 327575 - DNA, 201 bp, Homo sapiens
ttactgcaacctctgcctcccaggttcaactgattctcctgcctcagcctcctgagtagctggggctacagaagcatgtcaccacgcctgactaatttttrtatttttagtagagacagagtttcaccatgttggccaggctggtcttgaactcctgaccccaagtgatctgcccacctcggcctcccaaaatgctaggat

SEQ ID NO: 327576 - DNA, 201 bp, Homo sapiens
tagccagcaatccatggtactactctgcctatgaagcagccattttcctgtactttgtggctctgataaaattgctttcctttttttttttttttttttttccttgagacagtgtctcgctctgtctaccaggctggagtgcagtggcatgatctcagcttactgcaacctctgcctcccaggttcaactgattctcctgc

SEQ ID NO: 327577 - DNA, 201 bp, Homo sapiens
ttttcccctgactttatacattttttgaaaatattaatttttacaaagacataatatcccaacagatcgctttatgatgtagttatttcctaacctttttktttgtttgtttgcttttttttttttttttttttttttttggagacatagtttcgctcttgttgcttaggctggagtggagtgcaatggtgctatcttggc

SEQ ID NO: 327578 - DNA, 201 bp, Homo sapiens
gacaaggtttcatgatgttggccaggctggtctcgaactcctgacctctggtgatccgcctgcctcagcctcccaaggtgctgggattacaggtgtgagcyaccatgcccagcctagagtttctttcaggagtagtgagaatgttctaaaattgatcatagtcatggttgaacaactctatgaatatagcgaaagccattg

SEQ ID NO: 327579 - DNA, 201 bp, Homo sapiens
ggatagctcatttcttttttagcacagaagaagaatattccatcgtctggaggtaccacagtttatttctccattcacctactgaagaacatcatagattcttccaagttttggcaattatgaataaagctgctataaatatttgtgtgcacatcttagtatggacataagtcttcattcctttcagtaaataccaaggag

SEQ ID NO: 327580 - DNA, 201 bp, Homo sapiens
aaatctatagagacagaaatagattagaggtttcttgtggctggaaggaatgaaagggttgggggctggaagctataggttatagagttagtttctttctytctctctctctctctttctctctctctctctctctctttctttctttccttttttttgagacagagtctcgctcttgtcacccaggctgaagtgcagtgg

SEQ ID NO: 327581 - DNA, 201 bp, Homo sapiens
aattgtaattaactaaattaagttgtccaaacactacaaagatattgtaaatctgctttctgttaggatattaaaatattcaatacaacacacacacacamaaaaaaacattctgggttttttgtttgttttaaaaattctgctagaacctcaaggatttcactgactgggggcagtttctgtgttaatttattgtttctc

SEQ ID NO: 327582 - DNA, 201 bp, Homo sapiens
aaagacgttgtaccattcctaccgtaaaatcacccctggtcagttagaaaagaagtagtaataaatgttttctcaaaaatcccatatgatagtttttgatktttcctaactgaaggatggtaatttttaggccttggagtcaagaagttttaatgagaagaaaggtcttgacattgtattttccttctctctacagtggtt

SEQ ID NO: 327583 - DNA, 201 bp, Homo sapiens
accccccaccccaactcagtgtcttcgccggcccccggcccgtacgcctgtctggtcgccatggctgaaaacacagagggggatctgaactccaacctgcyccacgccccctaccacaccggggaccctcagctggacacggccatcgggcagtggctccgctgggataaggtgggtacctggtcagcccggcaaacgccg

SEQ ID NO: 327584 - DNA, 201 bp, Homo sapiens
agaagttaccttatgtggtttaaacgtggaggaacccttggttccacgaactcctcacactttttctagaaaatttgtgaataacttgcccttatttagcwtataattaaggagaagctataatatagctagccagcaatccatggtactactctgcctatgaagcagccattttcctgtactttgtggctctgataaaat

SEQ ID NO: 327585 - DNA, 201 bp, Homo sapiens
gggcacaaaagagaaagaagaacaattctaaagaccactattataattttatttgcttgtttttgttgtagcagggaggtttttgactttttaatttttaytttgtagtaaggaggtagaaaggtgaattaggaaacaagttagtaatggtgagctttagtattagggtgtatcacatactctttctgttgactctgaaac

SEQ ID NO: 327586 - DNA, 201 bp, Homo sapiens
agttgtttccttagtttacccatttttccaatttctacaggcccatacctcagctactataagacttaaggcaaatgtcacctgttccacgcgacctctargcctcataattagacaccttcctcttcaggtttcattacatagtgtgccttcctcctattactgttttatgtcatcattgtgttgtacatggcatgttcc

SEQ ID NO: 327587 - DNA, 201 bp, Homo sapiens
ctaaattgctttttctctgccatctttgccaaatatcagtgaaaatgtccctggacatttttcttgagccatagtcaggctacaggtcttaacactaattkactgagtaaaagaaaattgtacctggctttatgaaatagagctttcaaccttatgctttctaaaacacaaatagcaaaatagaagatactgaaagttgat

SEQ ID NO: 327588 - DNA, 201 bp, Homo sapiens
gttcatctgtgtatattcacttatcagagtccttctgtgctgcaggcacaggtacactaggaatatagcaatgacaaaaacactgcactcaagaaaaagtmtagtggggaaattgacaagtaaatagcaatttacaaaatgataagtgctaccaggggaggcatgcataggatgtcatggaagagactttgggggcttatg

SEQ ID NO: 327589 - DNA, 201 bp, Homo sapiens; identical to SEQ ID NO: 68826

SEQ ID NO: 327590 - DNA, 201 bp, Homo sapiens
tattaatgcagttcaccttcagtttgtgatagcagtgttttctttgtgtgtaatttttttttttggtcttgttttgttttaaccaagtgaatttctctttkgtttaccaattgtttaatgactccatcaggacctcttaaaaaatcacactaatttaaataaattttaagcctatgaaaataaataattccaaaactcttc

SEQ ID NO: 327591 - DNA, 201 bp, Homo sapiens; identical to SEQ ID NO: 68827

SEQ ID NO: 327592 - DNA, 201 bp, Homo sapiens; identical to SEQ ID NO: 68828

SEQ ID NO: 327593 - DNA, 201 bp, Homo sapiens; identical to SEQ ID NO: 68830

SEQ ID NO: 327594 - DNA, 201 bp, Homo sapiens; identical to SEQ ID NO: 68831

SEQ ID NO: 327595 - DNA, 201 bp, Homo sapiens; identical to SEQ ID NO: 68833

SEQ ID NO: 327596 - DNA, 201 bp, Homo sapiens
ctatgttgacattttttatttgatcaatttgatatgctttatttttatttttatttttatttatttttttttttgagacagagtctcgctctgtagctcargctggagtgtggtggcgctatctcagctcactgcaagctccgcctccggggttcatgctattctcctgcctcagcctcccgagtagctgggactacaggc

SEQ ID NO: 327597 - DNA, 201 bp, Homo sapiens; identical to SEQ ID NO: 68835

SEQ ID NO: 327598 - DNA, 201 bp, Homo sapiens
actatctatatcttttaatatttattaaattagtcctcctatgttgacattttttatttgatcaatttgatatgctttatttttatttttatttttatttatttttttttttgagacagagtctcgctctgtagctcaggctggagtgtggtggcgctatctcagctcactgcaagctccgcctccggggttcatgctatt

SEQ ID NO: 327599 - DNA, 201 bp, Homo sapiens
tcattactatctatatcttttaatatttattaaattagtcctcctatgttgacattttttatttgatcaatttgatatgctttatttttatttttatttttatttatttttttttttgagacagagtctcgctctgtagctcaggctggagtgtggtggcgctatctcagctcactgcaagctccgcctccggggttcatg

SEQ ID NO: 327600 - DNA, 201 bp, Homo sapiens
gtcattactatctatatcttttaatatttattaaattagtcctcctatgttgacattttttatttgatcaatttgatatgctttatttttatttttatttttatttatttttttttttgagacagagtctcgctctgtagctcaggctggagtgtggtggcgctatctcagctcactgcaagctccgcctccggggttcat

SEQ ID NO: 327601 - DNA, 201 bp, Homo sapiens
cttgaactttgaaaagcaatgtattttaagtcttacaggctcattgaaaataatgaaaagataagaaaagaacataaatttcctgtaaatccattatcccraaataaccacctaagttgatactttgataattctttcctgtcttttaaattgaaatatttaaagatgtatttgtttttattaaattatgatcatagtttt

SEQ ID NO: 327602 - DNA, 201 bp, Homo sapiens
aattggatactatggcatatgcatattataatgttatcataataattagccctgcttgtattttactcatattgttattaaggtatacttctaaaagaaaatcatatataatcatttgattgaagagtccctgtagagtcattactatctatatcttttaatatttattaaattagtcctcctatgttgacattttttatt

SEQ ID NO: 327603 - DNA, 201 bp, Homo sapiens
atgtgctgtgtccactcagggttaaatggattaagggcggtgcaagatgtgctttgttaaacagatgcttgaaggcagcatgctccttaagagtcatcacyactccctaatctcaagtacccagggacacaaacactgcggaaggccgcagggtcctctgcctaggaaaaccagagacccttgttcacatgtttatctgct

SEQ ID NO: 327604 - DNA, 201 bp, Homo sapiens
aaggaaagagaaatcagattgttgctgtgtctgtgtagaaagaagtagacgtgggagactccattttgttctgtactaagaaaaattcttctgccttgggwtgctgtgaatctatggccttacccccagccccttgctctctgaaacatgtgctgtgtccactcagggttaaatggattaagggcggtgcaagatgtgctt

SEQ ID NO: 327605 - DNA, 201 bp, Homo sapiens
catgatggcgatggcggttttgtctagtggaagtgggggaagtgtggggaaaggaaagagaaatcagattgttgctgtgtctgtgtagaaagaagtagacrtgggagactccattttgttctgtactaagaaaaattcttctgccttgggatgctgtgaatctatggccttacccccagccccttgctctctgaaacatgt

SEQ ID NO: 327606 - DNA, 201 bp, Homo sapiens
gtacccagcagctcattgagaacgggccatgatggcgatggcggttttgtctagtggaagtgggggaagtgtggggaaaggaaagagaaatcagattgttrctgtgtctgtgtagaaagaagtagacgtgggagactccattttgttctgtactaagaaaaattcttctgccttgggatgctgtgaatctatggccttacc

SEQ ID NO: 327607 - DNA, 201 bp, Homo sapiens
catctgggaggtgtacccagcagctcattgagaacgggccatgatggcgatggcggttttgtctagtggaagtgggggaagtgtggggaaaggaaagagaratcagattgttgctgtgtctgtgtagaaagaagtagacgtgggagactccattttgttctgtactaagaaaaattcttctgccttgggatgctgtgaatc

SEQ ID NO: 327608 - DNA, 201 bp, Homo sapiens
gtcagcacttctcagcatttcccagacctcaacttaggtgagctttccataggagagacggctaagaagtaacggaagactatttcaatttgggtgaaccratttccttttcctccgtattcccattaccattgctcttggtatcttgtgatgcttatacattcttatatttaggttaaatgccgaccatcttccctcaac

SEQ ID NO: 327609 - DNA, 201 bp, Homo sapiens
tgaaagtggtttctggcacccttactgggcgtttctaaccgctatccgctttagttctggtctggtgtgtttcctccttctgtcgctaggtagttgctggycttttatcactccctggtattgtctagtatcaccttttgctgttgggaaaggcaaggcgcttacctcttctttctcctgctggcagctattttctggaat

SEQ ID NO: 327610 - DNA, 201 bp, Homo sapiens
tattatcagatggaagaaggaaaaaatatgggttgtcggtttggtgtgggacgattaggaagttcccatcaaatggctctgtgtctgagtgatgtatgagrtgaagggggaggaaaggaataaggagagaagagaaggtactaattaagtcaccatcttggagagtaaaaaagtaagctttttgggtaacaaagtaggatt

SEQ ID NO: 327611 - DNA, 201 bp, Homo sapiens
gcactgtggtctgagagacagtttgttataatttctgttcttttacatttgctgaggagtgctttacttccaagtatgtggtcaattttggaacaagtgcratgtggtgctgagaagaatgtatattctgttgatttggggtggagagttctgtagatatctattaggtctgcttggtgcagagctgagttcaattcctgg

SEQ ID NO: 327612 - DNA, 201 bp, Homo sapiens
tgttatgtgtgaatttgatcctgtcattatgatgttagctggttattttgctcgttagttgatgcagtttcttcctagcattaatagtctttacaatttgrcatgtttttgcagtggctggtaccggttgttcctttccatgtttagtgcttccttcaggagctcttgtagggcaggcctggtggtgacaaaacctctcag

SEQ ID NO: 327613 - DNA, 201 bp, Homo sapiens
ttcttttttaaagaatgttgaatattggcccccactctcttctggcttgtagagtttctgccaagagatcagctgttagtctgatgggtttccctttgtgrgtaacccaacttttctctctggctgcccttaacattttttccttcatttcaagtttgatgaatctgacaattatgtgtcttggagttgctcttcttgagg

SEQ ID NO: 327614 - DNA, 201 bp, Homo sapiens; identical to SEQ ID NO: 68825

SEQ ID NO: 327615 - DNA, 201 bp, Homo sapiens
agtctgctctttcctgtgcccacccagcgccccgcgggctgcagaggagatggctcgggacaccgagcggggggcagcggagcagggcgttgccacccacytatgcgtggggttgctccttcggactgccagagccgggcggcaacatctgcatcgcttccttctgcagtgctctcaattgtaacctcccttcctcttctt

SEQ ID NO: 327616 - DNA, 201 bp, Homo sapiens
attattcaaataaatctcattttatatgatgagtatattttatattcaagttttttatctaagccaaatttatgttaatttctaccaattttttaaagatraggaaattaaatttagaattacacaaaaattatttaaataggaaagaatgattggtttagcatgaatatattttggacttaataaagaaacatctgattt

SEQ ID NO: 327617 - DNA, 201 bp, Homo sapiens
atcaacctgtaataagtaaatgcacacatctccacaatgggactgtcctaccattagaacccaacaagtcctagatcaaggcatttctcctccaggcagcraacagatgactctactaccagtgctctctccttctatgctctagggctaagtcactcacctccttcctagtttttttttttcagtgctttcttacattct

SEQ ID NO: 327618 - DNA, 201 bp, Homo sapiens
agtaaaatttaaaatataaataaaaattaagtggttaactgtctgacattggcttttaagggcaataggagttcaaagtcaggaagattttttgtaagagrtagaatttgagctgggacttgaagggtaagtaggatacaaatagataatggatatggggcaaaaatttaaaatgggcacagtagaataataaaatggaaa

SEQ ID NO: 327619 - DNA, 201 bp, Homo sapiens
gatatactgaaatattaaagaaacctgtaaaatgcacataaaataataatgctagggtagttttggtggcaattaaatggtttgtaggcagtcagttcttrcagttcaaaagtaggagtaaacggtggactgagatgctcaaggaagacttcattagaagataggatacataaaaagaatgaagagaggtcaggcacggtg

SEQ ID NO: 327620 - DNA, 201 bp, Homo sapiens
gaacagatttcttaagtatagcgtatgtattgtgctactatggtgagtaagtataggtgaaggaaaactagtgtttatgagtgatcatgtaccagacatgrtacttactagatgctttcatgtagaaagtctcttaattctcccaaggattgtttgaggtagttatttccatttttttaagcctatgcacaaacccaggct

SEQ ID NO: 327621 - DNA, 201 bp, Homo sapiens
tttcttcattccttcccttcctgcgctcactgcattccagtcataccactgctcccttctgttctccagctcctccaacatagcaagccctttcccacctytgagactttataattgttttgtcgtctgcttggattgctcttccccaaatcttgccaacttgcttatttttatcctttgggttcctactcagatagtgct

SEQ ID NO: 327622 - DNA, 201 bp, Homo sapiens
aaagacagaaaatgatagttcccatttcgttaaatcatatattttgctaactttgaatcacatcttttaaaagaaagaaattataatttaaattcacatgyccacctctctgattccattttcctcccttcttcctttcctcaaagtaaccaaggcatatctaggaatactagggttttgtttgattttctttttcagtta

SEQ ID NO: 327623 - DNA, 201 bp, Homo sapiens
tggagcttataagtctgcataatctgcctcatgcctgtttcttcattccttcccttcctgcgctcactgcattccagtcataccactgctcccttctgttytccagctcctccaacatagcaagccctttcccacctctgagactttataattgttttgtcgtctgcttggattgctcttccccaaatcttgccaacttgc

SEQ ID NO: 327624 - DNA, 201 bp, Homo sapiens
ataagtaatccttccctataaagatataaggaacaatcacatttttttttagttttatttttctgtgcatttatgtgtattttacaaatttggaattgtaytgcatgtatggtttatatacttactcccttaatatatctaagtgtttttgcatattaaaattctattgtgattttttaatacattattttaatgtattat

SEQ ID NO: 327625 - DNA, 201 bp, Homo sapiens
tcagcctttttatttaaccagttttctattaacatgtggcttgcttacttttttattattaacattactttagtgaatatccttatgactaaatcataacrtgaatccgtgattatttccttgggataaatttctagaagtagaattgctaaaacaaagactatttaatatttaagctacttaaaacattggcaaattgtc

SEQ ID NO: 327626 - DNA, 201 bp, Homo sapiens
gcctccactaggccccagcctacagtcagcatcactgccagatagacaagcctacagcaggacacagacaagccatcctggctgtgccctttctgaattcytaacccatagaaactgtgaaagataattaatgattattgattgaaaccattaagtttagagtggttttttactaagccataacaataaatacactctcat

SEQ ID NO: 327627 - DNA, 201 bp, Homo sapiens
ccaccaccccatctgggaggtgtacccagcagctcattgagaacgggccatgatggcgatggcggttttgtctagtggaagtgggggaagtgtggggaaargaaagagaaatcagattgttgctgtgtctgtgtagaaagaagtagacgtgggagactccattttgttctgtactaagaaaaattcttctgccttgggatg

SEQ ID NO: 327628 - DNA, 201 bp, Homo sapiens
cgtctgcccggccaccaccccatctgggaggtgtacccagcagctcattgagaacgggccatgatggcgatggcggttttgtctagtggaagtgggggaartgtggggaaaggaaagagaaatcagattgttgctgtgtctgtgtagaaagaagtagacgtgggagactccattttgttctgtactaagaaaaattcttct

SEQ ID NO: 327629 - DNA, 201 bp, Homo sapiens
ctgcccggccgccccctctgggaggtggggggcccgtctgcccggccaccaccccatctgggaggtgtacccagcagctcattgagaacgggccatgatgrcgatggcggttttgtctagtggaagtgggggaagtgtggggaaaggaaagagaaatcagattgttgctgtgtctgtgtagaaagaagtagacgtgggaga

SEQ ID NO: 327630 - DNA, 201 bp, Homo sapiens
gggaggtggggggcgcctctgcccggccgccccctctgggaggtggggggcccgtctgcccggccaccaccccatctgggaggtgtacccagcagctcatygagaacgggccatgatggcgatggcggttttgtctagtggaagtgggggaagtgtggggaaaggaaagagaaatcagattgttgctgtgtctgtgtagaa

SEQ ID NO: 327631 - DNA, 201 bp, Homo sapiens
cttatgttttataaattttcacgtgagctttcaggacttatggagagaatcttttttgtggcttgaaatgtgggagcatccctccagaacagttttgtttsttttaaacattctgggttttcagcccccgcccggcagccaccccgtccgggaggtggggggcgcctctgcccggccgccccctctgggaggtggggggcc

SEQ ID NO: 327632 - DNA, 201 bp, Homo sapiens
agtaaagtattggcctccaccaccataggggccagagcttctgcctccaaagtttcttcccttcatggatccaaattttttttttttttttttttttttttgagacggagtctcgctctgtcgcccaggctggagtgcagtggcgcgatctcggctcactgcaagctccgcctcccgggttcacgccattctcctgcctca

SEQ ID NO: 327633 - DNA, 201 bp, Homo sapiens
acatgtgtatatatagtcaatatgtgtattttaaccttgtgcttgtatattaagaaaaaaatatgtatgtgtgtgtgtgtgtatgtgtatatatttgtatwtgtgacattgtattttttggagaagctcagaagtagagagggctcctctgtcagagagtgcagtgagccgtgatcacaccactgcactccagcctgggct

SEQ ID NO: 327634 - DNA, 201 bp, Homo sapiens
tagtaaagtattggcctccaccaccataggggccagagcttctgcctccaaagtttcttcccttcatggatccaaattttttttttttttttttttttttttgagacggagtctcgctctgtcgcccaggctggagtgcagtggcgcgatctcggctcactgcaagctccgcctcccgggttcacgccattctcctgcctc

SEQ ID NO: 327635 - DNA, 201 bp, Homo sapiens; identical to SEQ ID NO: 68842

SEQ ID NO: 327636 - DNA, 201 bp, Homo sapiens
tcctaacaaaacagaactattcacaaaactatttataacttttattttgtgagcttttatagtgcaaaactatatatgtatatatatatatatatatatakagagagagagagagagagagagagagagacagacagacagacatctgatatagcaatcttccaattagcaagctggaaacttgaatttacttctaacaaa

SEQ ID NO: 327637 - DNA, 201 bp, Homo sapiens
  misc_feature (1)...(201): n = A,T,C or G
attttcttcttttttaagttttcttccactaatatgtgttacttttctatcatagaaactatagcataacaaaaaaggcatttgactccttattttccttnccacaaatactattctgaattccattactgtatatcacttcctcatttaaaaaaaggcagaagcaaccttattttatagaatcattgattgtacttatct

SEQ ID NO: 327638 - DNA, 201 bp, Homo sapiens
tatagaatcattgattgtacttatctgctttgactaatgcatttaattcatctgttatgtcaaggatactggacagtaattatcacaatttataattccasgtatcttcttgcctgaatatttttcttctgctccatagatttaactctaatattgatctttttcaccctttcaggtaaacaactacagtttagaagaagt

SEQ ID NO: 327639 - DNA, 201 bp, Homo sapiens
ttatgtaaatgtaagggatagttgtgtcaacagtagtaagcttgctcattctgaaatgttgagagtccatttgtgagactggaaacttggaacgtcttcakaactggccattaattagtactatggtctcaagcaaattgttcaagttctctcagacttacgtgtttctcttgagagaaatgtgttgaacaattttatttc

SEQ ID NO: 327640 - DNA, 201 bp, Homo sapiens
agagtccatttgtgagactggaaacttggaacgtcttcataactggccattaattagtactatggtctcaagcaaattgttcaagttctctcagacttacrtgtttctcttgagagaaatgtgttgaacaattttatttcctgcccattgcattagctattgcttttcttaatgatgattctgaaacaacttacctccaaa

SEQ ID NO: 327641 - DNA, 201 bp, Homo sapiens
catcttcagaatgagatttcaacatctgagatgggttaggtaggagaggcaaattctaggtagatggtacagtggaacaaaggtacagatgtcaggaagcmcagcctatgtttgcggatgataggatatgtgttggggggtattaaaattgattgatcttgcaagaatggcaaagaggagagtttatactatattaaatac

SEQ ID NO: 327642 - DNA, 201 bp, Homo sapiens
tggttttataccctgcctgtctaactgaagtcatttgtcagcctttcaaaaagtagagactttctgccggagaggaaagctttcctcactggtatatgtgsatgctttgatctttctgttctttggtgtatctttttaaatgattaagcattttccatttattttgcaatatcaggtttgctgaagtagctctttatatct

SEQ ID NO: 327643 - DNA, 201 bp, Homo sapiens
agacctagaggaaaaaaattcaacctagcaatcccatcactgggtatatatccaaaggaatatatatcattctattataaagataaatacacatgtatttkcattgcaacactattcccaatagcaaagacatggaatcaacctaaatgccaatcaatgatagactggatgtagaaaatgtggttcatatacaccatggaa

SEQ ID NO: 327644 - DNA, 201 bp, Homo sapiens
gtcccaaaatctcaaaagtagggaagccagcagtgcagccttcagtctgtggtcaaaggtccaagagtcccaaagctgaagaacttggagtctattgtttsagggcagaaagcacccagcacaggagaaagatgtaggctggaagactaagccagtctagtctttccatgttcctctgcctgcttttatcctagctgcact

SEQ ID NO: 327645 - DNA, 201 bp, Homo sapiens
tagaaataccatttgacccagccatcccattactgggtatatacccaaaggattataaatcatgctgctataaagatagatgcacaggtatgtttattgcvgcactattcacaatagcaaagacttggaaccaacccaaatgtccaacaatgatagactggattaagaaaatgtggcacatatacaccatggaatactatg

SEQ ID NO: 327646 - DNA, 201 bp, Homo sapiens
gaaatccttgcttaacttaaataagcattagagatattgggtatgtatcggcatctaattaaattttaagtgttcttctttttgtttacttttttaaaagraaatatgcacagaaaacaatcatctattcactcaataaatattttatttcaaaaacatattaggtctggaagttgtaatgctaaattaaaggaatgagaa

SEQ ID NO: 327647 - DNA, 201 bp, Homo sapiens
cttggcatggtggtgcatgcctgtaatctcagctacttgggaggctgaggcagaagaatcacttaaacctggtatgcagaggttgcagtgagccaagatcrcaccactgtaccccagcctggttgacaagactgaaactccgtctcgaaaaaaaaaaaattattcattttggagtttagtatatccttagccttaatgaag

SEQ ID NO: 327648 - DNA, 201 bp, Homo sapiens
tcctgaaaacatggaaagcatgattggctaattaaaaaattaacaaacccttcacagaaaagcatgttttattcatctttatttatttatttatttattttatttatttatttttgagacagagtctcgctctgtcacccaggctggagtgcagtggcacaatctctgctcactgcaagctccacctcctgggttcacacc

SEQ ID NO: 327649 - DNA, 201 bp, Homo sapiens
tcctttcctgaaaacatggaaagcatgattggctaattaaaaaattaacaaacccttcacagaaaagcatgttttattcatctttatttatttatttatttattttatttatttatttttgagacagagtctcgctctgtcacccaggctggagtgcagtggcacaatctctgctcactgcaagctccacctcctgggttc

SEQ ID NO: 327650 - DNA, 201 bp, Homo sapiens
tagtggaaactgaacgtttgactacgggtcatccagttgccatgagacctgaactgccaatcatgaactaagtgctttctgacccatctagccatagagtrggccgtgcacagcagcattccatcagcaaatggaagtggtatatacatgattggtctcaagtaggtcctgaaggcacaagtaagttacatgatgaagtgg

SEQ ID NO: 327651 - DNA, 201 bp, Homo sapiens
tgtgaacccgggaggcggagcttgcagtgagcagagatcgcgtcactgcactccagcctgggcgaaagagcgagactctgtctaaaaaaaaaaaaaaaaamaaaaaaaaaacaaggcttaaggctgtctaaccaggctcaggatgacaaggctagacaattgaccacagagagggatttggcaaccatctggccccatttt

SEQ ID NO: 327652 - DNA, 201 bp, Homo sapiens
aggtacactcgttgcagtacctgtgtcattttgttttatgtcagtataccagaatagacttaattcagaaactgcctttgccaaacaaaatgaaggattayttacaggagaagcactactgaaagactgagaaccctgcatcttgcactttgggaataagaaaaagagattgaaacacagtttacaaactttcattgccat

SEQ ID NO: 327653 - DNA, 201 bp, Homo sapiens
tagatgaggggatgtgtcctttggaaggatcaagtagctattgtctggacagttcttctaccatggaagtctctgtggttccttctcaagtgggagggcgytctttccccgaagatgagagtcaggcagaccagaacctagttgttgccccagagatctttgtggatcagtccatgaatgggttgttgactggcaccacgg

SEQ ID NO: 327654 - DNA, 201 bp, Homo sapiens
agccctgataggtaggtaggtaggtaggtatactcattttatagaaaaggaagctaaggttcaaagaagttaagtgacttccccaggttacctaggaaacstaggtagacttgagatttaacccgttttgtctaactgcaaatcctttgttccttcccatttttccatgcagttttcttaatgcactgaaaaaaaattcag

SEQ ID NO: 327655 - DNA, 201 bp, Homo sapiens
cacagtattaaaactggttatcataatgatagctttttaaaatataactcaatgaattcaagtggaattcaaacctgaaagtaacatttgtgactttgtttattattattattattattgtgagggtcctgtatttaaacataagaaaccactaggaatcagctgggagctctgatagccaagatttcttgagaaagctca

SEQ ID NO: 327656 - DNA, 201 bp, Homo sapiens
gccacttagagttgtgtggacttttattattattattgcttctcaaatatgcaatatgtatttttactgtattattcatatcacttgtttccctttcatckgtaaagctcatccactccaactaatactctatgatttatctctcttggaggaggagtgcactcccttcctacccatgtcccattttagcatatgacctta

SEQ ID NO: 327657 - DNA, 201 bp, Homo sapiens
tcacagtattaaaactggttatcataatgatagctttttaaaatataactcaatgaattcaagtggaattcaaacctgaaagtaacatttgtgactttgtttattattattattattattgtgagggtcctgtatttaaacataagaaaccactaggaatcagctgggagctctgatagccaagatttcttgagaaagctc

SEQ ID NO: 327658 - DNA, 201 bp, Homo sapiens
tcactaataaaagataatcttttaggtatattacctgttacatggatctcctcgctgcttcaaatagcaaagcagtgtattcacttgcttatctgtcataygtatttctaccctaaattgttactgacaataagcatttcagatggccccagcaagattgataatgatctttttcctgatggctccattagatcagacttc

SEQ ID NO: 327659 - DNA, 201 bp, Homo sapiens
atcacagtattaaaactggttatcataatgatagctttttaaaatataactcaatgaattcaagtggaattcaaacctgaaagtaacatttgtgactttgtttattattattattattattgtgagggtcctgtatttaaacataagaaaccactaggaatcagctgggagctctgatagccaagatttcttgagaaagct

SEQ ID NO: 327660 - DNA, 201 bp, Homo sapiens
cttttcttagaagacgatataccttttaaaaccctgaagttaaagaattaccacaggaagaatggggatggcaactgtaggaaatcaggataggtgtgagkgaatgccttggccactgaggcctcaggcagctactggtatccaataggtcgagagcacctatgaacctccgatcaaagaccttctgctgtaaatcatagc

SEQ ID NO: 327661 - DNA, 201 bp, Homo sapiens
gatcacagtattaaaactggttatcataatgatagctttttaaaatataactcaatgaattcaagtggaattcaaacctgaaagtaacatttgtgactttgtttattattattattattattgtgagggtcctgtatttaaacataagaaaccactaggaatcagctgggagctctgatagccaagatttcttgagaaagc

SEQ ID NO: 327662 - DNA, 201 bp, Homo sapiens
aatttgtaccttgtttggtcttccttggattttctaggtcaattaaatgcataatttattatgctgtgagtttctctccttttgcctcttacctcttgacrtgcttgagtaaatatcaccattgttgactgtgcaaccagcccttagagtacggattcctttggaacttccaagtgctctgagcatcaccttccaagatgc

SEQ ID NO: 327663 - DNA, 201 bp, Homo sapiens
gaacatccaaatatatattagaaaacacgttaagctgctgtttgctttcaaggaaataaatattagcaaaaatgcaacactaatgagaaatttaaaaccgkctcctatagatatttatcatttcctatgtgctcatgagttagccagacataaacacacaacactatgctctataattttatggaaatggtaattgcatat

SEQ ID NO: 327664 - DNA, 201 bp, Homo sapiens
tgtttgctgagtgaacagtttgagatgtgagttaaggatgcagatatccacccttctgggagcttcagattgcagttggaactgattctccagcacaatggtcatattataatctcagtactcagtaacagagtactgaggtggcctttggatttgtagtcttaaagtcaaattatagaaatacaattatcttatcatgag

SEQ ID NO: 327665 - DNA, 201 bp, Homo sapiens
gaattcacagaggcaaaaagatgggaaatatgagaagtgagaggacattgagctaggtgaggactggtgagtatccaacaggcattacagaaggaggggayaaacagcatgtggcagaggcaacatttgaaaagagaagggctaggtgctgtgactcacgcctgtaatctcagcactttgggaggccaaagtggatggatc

SEQ ID NO: 327666 - DNA, 201 bp, Homo sapiens
gcacatttgtggaaatctaaggtgcctggctgtatttaaaatgtatttctctctgtaaattcaaatcaatacaaggattggttggatggttgaaacaattmgtcactaagcatttcaaaatgtgtcttactttgctcatttcttactgctactgaggtacataggtatggttatatggtccagggctttccaataaagata

SEQ ID NO: 327667 - DNA, 201 bp, Homo sapiens
gtgggtgaatcacctgaggtcaggagtttgagaccagcctggccaacatggtgaaaccctgtgtctgctaaaaatacaaaattagctggcagtggtggcayatgcctgtaatcccagctactcgggaggctgaggcaggagaattgcttgaacccgggaggcagaggttgcagtgagccaagatcacgccatggcactcca

SEQ ID NO: 327668 - DNA, 201 bp, Homo sapiens
aggaaatagcagctctataaaattcagtgtatagaacctaaaaagacattgatacaacaaagtaatctgagcttctgcttcttaaggagctagtaaggggytttcaatctgtcccatccatttctgtgatggctaatgtttaaaacaagccagaagaaaccaagtttgattttaagggttcaaattatttaattaccttac

SEQ ID NO: 327669 - DNA, 201 bp, Homo sapiens
tctagtttttgcaatcataggaatagactgtacacacttttcaaagcattttatgattatttggcgtattacttgtggctgataaggatgtctgtcaccartcactctttagcaatcacttagctctccttttattattaatattttcatttcccatatgcataattttatctggaaaaagattctgtatcaagttttagt

SEQ ID NO: 327670 - DNA, 201 bp, Homo sapiens
cacgcctgtaatcccagcactttgagaggctgaggtgggtgaatcacctgaggtcaggagtttgagaccagcctggccaacatggtgaaaccctgtgtctrctaaaaatacaaaattagctggcagtggtggcatatgcctgtaatcccagctactcgggaggctgaggcaggagaattgcttgaacccgggaggcagagg

SEQ ID NO: 327671 - DNA, 201 bp, Homo sapiens
tatgactttatacaaaatggacggagagatgccattatatctgttgtacagatttggaacctgagatgatagattccatgatttcgcctttgacaattagraagtaagtgacaaactcagaagccagaagccagaaggaggataacatcttggttaagagaacagatgttagactcaaaagagtctgggctcaccatttac

SEQ ID NO: 327672 - DNA, 201 bp, Homo sapiens
gccttaggcaatctttttttttttttagaggaaacacccactttcatatacattttaaaccatagaacatcacatgtaaatattcattatcggccaggtgyggtggctcacgcctgtaatcccagcactttgagaggctgaggtgggtgaatcacctgaggtcaggagtttgagaccagcctggccaacatggtgaaaccc

SEQ ID NO: 327673 - DNA, 201 bp, Homo sapiens
ctgtgatgatagttgagctagctgggagtggtagagtgaggttaagaagtgaatgcgggggaaacactcttacagctagcctaataaaacatacatttacrctacacttgtacctgtattaagaatagattttgtgactttatattgattcagtgatgttttctctgtatttcaatgccttttaaaaacatatactgatgt

SEQ ID NO: 327674 - DNA, 201 bp, Homo sapiens
ctcttacagctagcctaataaaacatacatttacactacacttgtacctgtattaagaatagattttgtgactttatattgattcagtgatgttttctctrtatttcaatgccttttaaaaacatatactgatgttaattaagaagaatctgtcaaaaaccaggcctaattgtaaaagtcatgcaaaaagaaaagtctatg

SEQ ID NO: 327675 - DNA, 201 bp, Homo sapiens
tagaatataatacatttacatttcctgaatacaattttataatttagacttgtaattaattcagattaaccccttccccatcaacactcacccaaatccarctatgctagttacaattcgggacattttaaaagttttttctaccttctattaaatcctctgttttggttaaatctttgcatcaattaagcatgttttctt

SEQ ID NO: 327676 - DNA, 201 bp, Homo sapiens
ttttttttttttttttttttggctgaactggcgctactggattttgtgtttgggataaaaagcttataaaggttgattaaagtttaaaaagaaaaaatcaraatatggctgaaataacagaattgaaatggaaaaaataaaagcacctaccaattaactccttagtaattattgctaaacaaaaatttctttcatcaccta

SEQ ID NO: 327677 - DNA, 201 bp, Homo sapiens
gtaacagcaaaatgcaaaaagtaaaagcacattagaaaacacacacacacacacacacacacacacacacacacacacacagaggcatttctctcataggmtaaattttcattaaaatagcggacgaccctaaaccactgagactactagtgataatgtgcaaagaaaatcattgctcctgagcaagagttaccaaacaca

SEQ ID NO: 327678 - DNA, 201 bp, Homo sapiens
agctcttatttatttatttacttacttttcaaaaggttttggcggaacaggcagtgtttgattatataaatacattctttagtggtgatttctgagacttwaaaagagcataaacgggaaagccatatgtatggttgccttaagaatgtgttttgtcagtgagggaagagtgtctatttccctcccataatgcttagtcat

SEQ ID NO: 327679 - DNA, 201 bp, Homo sapiens
atgtgtattgcctatgtatgttttcatgtcacacctatttataatttatgtaattgaatcactagttgagcaaagaacatgtctttctgaactatttttttaaagaaactggacactaactttgagtaattaaaagataatctaaacaatctataaatgaattcatttaagagctacctcacagtatgctgagaagctggg

SEQ ID NO: 327680 - DNA, 201 bp, Homo sapiens
catctgctagcgagagctgaatagacagggagtgtacttggcccaaaggatgccaatccagaggctaacaagtaaccaataaggtggtttactcaaaaagrtgtactaagtccaacaaatactcagttaggaatgtttaattgaaaagcagttcaaccgaggcaatgatcagtgaaaggggaagctagtgatttatgatgt

SEQ ID NO: 327681 - DNA, 201 bp, Homo sapiens
cctgggaggcggaggttgcggtgagccaagatcatgccattgcattccagcctgggcaacaagagtgaaattccatctcaaaaaaaaaaaaaaaaaaaaawatatatatatatatatatatgtgtgtgtgtgtgtgtgtgtatatatatatgtgtatatatatgtctatatatatgtgtatatatatgtgtgtatatatat

SEQ ID NO: 327682 - DNA, 201 bp, Homo sapiens
gttgaacccaggaggcagaggctgcagtgagccaagatcacaccactgcaccccagcctgggcaacagagtgagactctgtcaaaaaaaaaaaaaaaaaaagctaaataaaattcaatacatattaataggtcatgtaagattaatttgcaaataagtcatgttaacaataatgtagtagtttcagagaaaggaagtagaa

SEQ ID NO: 327683 - DNA, 201 bp, Homo sapiens
ccaacatggcacatgtgtacatatgtaacaaacctgcatgttgtgcacatgtaccctagaacttaaagtataataataaaaataaataaataaataaatawgaaaatggctagcttcaaggttcactattggaatttaattgcttaacattgagagaaaagaacagtcttgagaagctcaaacattacaatgtggaaagca

SEQ ID NO: 327684 - DNA, 201 bp, Homo sapiens
catgagaaagacttcagtgtaagtagtaattttccttctttttttttttttttttggagacagagtcttgctctgtcgcccaggctggagtgcagtggcgygatctcagctcactgcaagctctgcctcccaggttcacgccattctcctgcctcagcctcccgagtacctggggctacaggcacccgccaccatgcccgg

SEQ ID NO: 327685 - DNA, 201 bp, Homo sapiens
aggaacccgacctgtagaggacaatcctggcttcccacagatcccaagagagccagaactagaactcagtatcatttttcccaaccactcactttttttttccgttcatgaaacaatatttttgtttgtatgtctcttatatgctcagcctgtacccgcttccaaaattacacaaaacaaggacctaaaagtcctttatct

SEQ ID NO: 327686 - DNA, 201 bp, Homo sapiens
aaggaacccgacctgtagaggacaatcctggcttcccacagatcccaagagagccagaactagaactcagtatcatttttcccaaccactcactttttttttccgttcatgaaacaatatttttgtttgtatgtctcttatatgctcagcctgtacccgcttccaaaattacacaaaacaaggacctaaaagtcctttatc

SEQ ID NO: 327687 - DNA, 201 bp, Homo sapiens
attctcaccatcagtgaaatagtacagggcctatggtacctgtagaccctaagctacactggacatgaggaaagcagctgtgaaatataaaacagagcctytaccagatttctaccattataattgctggagttctgtggttattctttccctccttatagggcctgttggtgaatcacaagatgtcctaggcaaccattt

SEQ ID NO: 327688 - DNA, 201 bp, Homo sapiens
tctggaacttctggcctctagtgatccacccgcctcggcctcccaaagtactgagattactacaggcgtgagccaccgcgcctggcccccaggcccttttytttaccctatgagccaaaatcaggatagatatgtatcctggatattgttgaagtgctaatatttttgtactttatccttttgtttggggtgtagcctcac

SEQ ID NO: 327689 - DNA, 201 bp, Homo sapiens
aaaatagatattactgttcacaatttatagccaaaaaagcaagacctcaagaaactacaccaaggttactcaagtatttattggtaggattatgattcaarcctagatctatgtagctccaatgcccatactctttcccaatatcacagtatcccataccatccccctctagtagggttgttttatcccacacagtaccaa

SEQ ID NO: 327690 - DNA, 201 bp, Homo sapiens
taagcacattttagatgtcaggcactagcattctgggtaaataagaaattcgcgttataaatgtaatattttatgctttttttttaaaaaaaaaaaaaaaaggagctccagattgtaaaacttccagaccacataaaacctgcatctgcccttgcaaagcacatgctatgctgagagaagtaattcacaaagcaaataatt

SEQ ID NO: 327691 - DNA, 201 bp, Homo sapiens
gtaagcacattttagatgtcaggcactagcattctgggtaaataagaaattcgcgttataaatgtaatattttatgctttttttttaaaaaaaaaaaaaaaaggagctccagattgtaaaacttccagaccacataaaacctgcatctgcccttgcaaagcacatgctatgctgagagaagtaattcacaaagcaaataat

SEQ ID NO: 327692 - DNA, 201 bp, Homo sapiens
aggtgtactaagtccaacaaatactcagttaggaatgtttaattgaaaagcagttcaaccgaggcaatgatcagtgaaaggggaagctagtgatttatgaygtaaaggaggcccgatgatccattgtgagtctaatgccagctgatgtcattacagaacagaaactgagggcaagaagaagctatcaggtagaaagtatct

SEQ ID NO: 327693 - DNA, 201 bp, Homo sapiens
taatggcatgacctaatctagcctaagatactcaggggaagccttgtagagagttaatatttaagctgagacataaagggtaactgttacccaagtgaatrgagctggaggagtcttcaggcagagaatgcatgcccaaaggcctgaggaggaatagggaaggtgactggaggtggtgggagagtgcagactggcacaagg

SEQ ID NO: 327694 - DNA, 201 bp, Homo sapiens
aaaggaggcccgatgatccattgtgagtctaatgccagctgatgtcattacagaacagaaactgagggcaagaagaagctatcaggtagaaagtatctcawttataaattagaggtcaaagtggtgatttgagacagaaggaacaagtagcacaaaagaaacagcgttatcttgaagggaaagctgtagagatccagctcc

SEQ ID NO: 327695 - DNA, 201 bp, Homo sapiens
ccttatgtgagagtatgctttatgtgccataaactcatcacctctgcattctcacttctctagcattcagagtgcagcatcaaacttgcaaacctgacttrgaaaagaatatgagctatgtcactgttttgtatgtggggagtgagggaaggtagtttcagggttttcattgtggtgagatagatcttgagtaagctgatt

SEQ ID NO: 327696 - DNA, 201 bp, Homo sapiens
gtttttggtaaatatttgtggaatgaatgaatgaatgaatgtacaaatgaatagccaaaatgattgtactcatttaattccaactagtaggaagaacactrtcttccataacttcttatcaactatggattttaaaattgtactcaagacctgcctaacttttcaattatctactcaaaccattaacaaactccctaaatg

SEQ ID NO: 327697 - DNA, 201 bp, Homo sapiens
tgacaactaatgtcatatgggaatcatcaaagaaattcaatagcatgagctctcataaccctgctgtaagaatgaacccagacagttattctagactcaasgaacctctagacattttagcaacaaaatttgatagagcttcactctggtgctctataattagtggacacagctacagctaccttctccatgtttgcatct

SEQ ID NO: 327698 - DNA, 201 bp, Homo sapiens
ctgcatgacctagccactgcctgcctcttggatacctcatttcactcttccctttgctgaccacatattcatgttggccttctttttattcacaaaatgcmctaaatctcttctagtctcaagtgtttcacatatgcttttccctggaattggaaagctctttttacactttgcctgattaatttctggtcatcttagatc

SEQ ID NO: 327699 - DNA, 201 bp, Homo sapiens
ctcaagtgtttcacatatgcttttccctggaattggaaagctctttttacactttgcctgattaatttctggtcatcttagatccaagcttaaattgcacrtcttcagagaagctctctaaaacagaaaatcaggcccccattatatattttctttctatttttcataagactcaagcaatttataattgtacatttattt

SEQ ID NO: 327700 - DNA, 201 bp, Homo sapiens
agaaatgtgcagagcctgaaatcaaactaaaatttgaaaaacaaataggatttctatgggactcctgcttatctagtacatctctttttctttgaaaaaargtaattttgatgttttaattggtttttctactttgggagagtaagtttttcagcttttgatatttctagggcaaggagaatagtattcttggctgtttta

SEQ ID NO: 327701 - DNA, 201 bp, Homo sapiens
gatcaatgacgacttgatatctgaattccctgataaatttggctcctgtgtgcctcgtaagtgtcatttttctttcctctaggaaaaacaaaaagagcttrgatttctttatgagatggtaaaatgtaattccatcctccagtagtctctccagtaattcaaataccaaccatttccgattagctgagtgccttatttaat

SEQ ID NO: 327702 - DNA, 201 bp, Homo sapiens
caaataggatttctatgggactcctgcttatctagtacatctctttttctttgaaaaaaggtaattttgatgttttaattggtttttctactttgggagartaagtttttcagcttttgatatttctagggcaaggagaatagtattcttggctgttttatcaatatttatggcatacatttatttgtccttttacataaa

SEQ ID NO: 327703 - DNA, 201 bp, Homo sapiens
ggtgtggtggctggtgctggtaatcccagcactttgggaggccgaggtgtgtgtgtgtgtgtgtgtgtgtgtgtgtgtgtgtgtgtgtgtgtgtgtgtgtstgtgtgtgtgagagagagagagagagagagagagacatctactatagcaatcttccagttagcaagctggaaactggaatttactcctaacaaaacagaa

SEQ ID NO: 327704 - DNA, 201 bp, Homo sapiens
atagtattcttggctgttttatcaatatttatggcatacatttatttgtccttttacataaaaggtcctaattattgttattttgcagttgataacagagkctgagataaaccagatgaaggctaattaaaatatattggcaggttttggatgggaaatgaactgtgaagcactatatcgtcataaaacatcttcactcac

SEQ ID NO: 327705 - DNA, 201 bp, Homo sapiens
tttttttggaccaagatttttccaccttgggctgtgacttcacagaggggagtctcatgttacagcactgagatccccactctgccctttgacaggcgccrtgtgggacccatggtcagctgaggcctctttcctcaggcagggactttacttcactttctatcttccacagcagctctgttcctgtgctggccaggttcc

SEQ ID NO: 327706 - DNA, 201 bp, Homo sapiens
tattttgcagttgataacagaggctgagataaaccagatgaaggctaattaaaatatattggcaggttttggatgggaaatgaactgtgaagcactatatygtcataaaacatcttcactcactgaaggatatatatattcatgggacttcaactagttaccaggcatcatccttaatgttagggattcaaaggtgaaaaa

SEQ ID NO: 327707 - DNA, 201 bp, Homo sapiens
gcatctcctttcccactcttgtccacactggagctccatgttgacgctagacttctaagaactgggcagtgtctggcagaggcaagatgagaagccttcartttattttacaaagacttttttttttggaccaagatttttccaccttgggctgtgacttcacagaggggagtctcatgttacagcactgagatccccact

SEQ ID NO: 327708 - DNA, 201 bp, Homo sapiens
gaatggtagggttggcagtatgggggaagggctgtgcaagcctgcctgtatttatatagagatctaaatattttagaatgtagaattttattttaattaaragattaaaatctgcctctcagagaagagaaaataaaccttccctatcaaccctttaatttggttctgtagaccttcagctcatatgaggtttaaaggatc

SEQ ID NO: 327709 - DNA, 201 bp, Homo sapiens
gttcatttacagtaagcacattttagatgtcaggcactagcattctgggtaaataagaaattcgcgttataaatgtaatattttatgctttttttttaaawaaaaaaaaaaaaggagctccagattgtaaaacttccagaccacataaaacctgcatctgcccttgcaaagcacatgctatgctgagagaagtaattcaca

SEQ ID NO: 327710 - DNA, 201 bp, Homo sapiens
agttcatttacagtaagcacattttagatgtcaggcactagcattctgggtaaataagaaattcgcgttataaatgtaatattttatgctttttttttaawaaaaaaaaaaaaaggagctccagattgtaaaacttccagaccacataaaacctgcatctgcccttgcaaagcacatgctatgctgagagaagtaattcac

SEQ ID NO: 327711 - DNA, 201 bp, Homo sapiens
gagttcatttacagtaagcacattttagatgtcaggcactagcattctgggtaaataagaaattcgcgttataaatgtaatattttatgctttttttttawaaaaaaaaaaaaaaggagctccagattgtaaaacttccagaccacataaaacctgcatctgcccttgcaaagcacatgctatgctgagagaagtaattca

SEQ ID NO: 327712 - DNA, 201 bp, Homo sapiens
ggagttcatttacagtaagcacattttagatgtcaggcactagcattctgggtaaataagaaattcgcgttataaatgtaatattttatgctttttttttwaaaaaaaaaaaaaaaggagctccagattgtaaaacttccagaccacataaaacctgcatctgcccttgcaaagcacatgctatgctgagagaagtaattc

SEQ ID NO: 327713 - DNA, 201 bp, Homo sapiens
gtgttgtatccaaacagtcatctcaaaacccaaggtcatctagattttctcctacagtatctccaaggagtttatagttttgtgttttgcattttggtttrtgatgaattttgagtttatttttgttcagggtataatgtctgtgtctacctatttttttctgttttgcatgtggatgtccagttgttctagcaccatgtt

SEQ ID NO: 327714 - DNA, 201 bp, Homo sapiens
tcaacatcactgatcattagagaaatgcaaatcaaaaaaccacaatgagataccatctcatgccagtcagaatggctattatcaaaaagtcaaaaaacaayagatgttggcaaggttgtggagaaaaaggactgcttttacactgttggtggaagtgaaaattagtccaaccattgtggaaagcagtgtggcaattcctca

SEQ ID NO: 327715 - DNA, 201 bp, Homo sapiens
tggattctcattctttttgtggctccattgtgtatacataccacattttctttatcattcatctgttgatgaacactgaggttgcttccaaatcttggctrttataaacagtggtgcaacaaacatagcagtgcagatatctctttgatatgctgatttcttttcttttgggtatatacctagcagtgggagtgctggatc

SEQ ID NO: 327716 - DNA, 201 bp, Homo sapiens
tgctattattaatctacagtctccaaaccctcactagacaatcaacacagctctttgccattttatgcaattctctaagcaattatatcttccattttccctaatagctattccaacacatctgtgatttcttcattctctgacctcactacttccctcattcttggttgatgatcatcctttcttgttaccagagtaaat

SEQ ID NO: 327717 - DNA, 201 bp, Homo sapiens
tcctggcctctaccatttgttgttgatcagcgaccttcacctctctaagcatgggtttcctcaacagctaaaagggaaaatagtatacaactcgccaattkgtttgagatggagtctcgctctgtcacccagattgaagtgaagtggcgtgatctcggctcactgcaacctccaccttctgggttcaggcgattctccggc

SEQ ID NO: 327718 - DNA, 201 bp, Homo sapiens
gcaataattaaagtctaactaatatttcagaatactttataaatattcattaagtccacctatatttttaacaaatcattaaaactatttgttgatacagygaactatgccattttaaagctgaaaggtcaaagtcaccatagccgtaaggaagtgagaagagccacatacctgtaatgacttgctagtaattatgtacct

SEQ ID NO: 327719 - DNA, 201 bp, Homo sapiens
taggaaactcaccttatgtgccaagcactgtgctaggtactagatttaataagtcaaacaagatttcttcttgccctccagagggcttcattgtctagtamaaatgatagaaatacaaacacacacttgtgatacagtgtaagcattacactctataggagatatgcataagggattaatggagaatccaggagggatacc

SEQ ID NO: 327720 - DNA, 201 bp, Homo sapiens
tagaatcactcatgtctatttttatcaattttgtctctgattccagagctaaaatgcaattagggtgggtatgccctgagaagtattggcactgctgagakgaagtgaaagtgctgtttttgcatattcttaaatatttggttaccatcttgcctgcttttaatcgggatttttccaaaagtgaacaatgtattaaaagat

SEQ ID NO: 327721 - DNA, 201 bp, Homo sapiens
agttaatgggtgcagcacaccaacatggcacatgtatacatatgtaactaacctgcacgttgtgcacatgtaccctaaaacttaaagtataataaaaaaawaaaaaaataaaaaataaataaatgatgtgtgtttcttctgtcttttcttgcagtcattcccaacatagcaccgcaactcgtcagccttcaatgactctcc

SEQ ID NO: 327722 - DNA, 201 bp, Homo sapiens
attctgtgatatacattttacttctgtgtatgtatggtatatatggtatgtataccatgtacacacgttacattgagtatgaatgactgtggttggaaacmcacacacacactcaagtctgtaaatatccttcctcactgaaacctgtgctttggaaatcatttcttgtacagctgtgcagtttcttgtaacagctgagga

SEQ ID NO: 327723 - DNA, 201 bp, Homo sapiens
gagcaaagagatagagtcacaaggaaagacaattaatgactttgagctcaaccaactgaactgcctttcttggagctgcacctggaccaagtttattttttaacaattataataacgatgatttaaaaaaagaaacctcccaaagcctataaactgaactagaagagttggtttcccactttagagtggatggcgacatca

SEQ ID NO: 327724 - DNA, 201 bp, Homo sapiens
agaaaaactcttaaggatgactattttatggggatgacacaacagcaaaagaaaaagaaacaaagaaagaaagagagagaaaagaaaagaaaagaaaaaaagaagagagaaaagaaaagagagagaacttgtgtttagaggcagagtatctgatggcctcttaataaccccgacctggtttcagcccctatctctctcttc

SEQ ID NO: 327725 - DNA, 201 bp, Homo sapiens
tagaaaaactcttaaggatgactattttatggggatgacacaacagcaaaagaaaaagaaacaaagaaagaaagagagagaaaagaaaagaaaagaaaaaaagaagagagaaaagaaaagagagagaacttgtgtttagaggcagagtatctgatggcctcttaataaccccgacctggtttcagcccctatctctctctt

SEQ ID NO: 327726 - DNA, 201 bp, Homo sapiens
atagaaaaactcttaaggatgactattttatggggatgacacaacagcaaaagaaaaagaaacaaagaaagaaagagagagaaaagaaaagaaaagaaaaaaagaagagagaaaagaaaagagagagaacttgtgtttagaggcagagtatctgatggcctcttaataaccccgacctggtttcagcccctatctctctct

SEQ ID NO: 327727 - DNA, 201 bp, Homo sapiens
aatagaaaaactcttaaggatgactattttatggggatgacacaacagcaaaagaaaaagaaacaaagaaagaaagagagagaaaagaaaagaaaagaaaaaaagaagagagaaaagaaaagagagagaacttgtgtttagaggcagagtatctgatggcctcttaataaccccgacctggtttcagcccctatctctctc

SEQ ID NO: 327728 - DNA, 201 bp, Homo sapiens
agaagtctcacaggtcattgccctgcagcaaatagctagcaaccagttattacttagagttatgactgtgaaaatctgatactaaaatggtgctaaagagktttatgaggatgaagttatttttgaatggttcaaggagaaagagcaaggagaattaactctgagctgtgtctgtttcctgtgtttcagagcagggcttgt

SEQ ID NO: 327729 - DNA, 201 bp, Homo sapiens
agaaaatagaaaaactcttaaggatgactattttatggggatgacacaacagcaaaagaaaaagaaacaaagaaagaaagagagagaaaagaaaagaaaagaaaaaaagaagagagaaaagaaaagagagagaacttgtgtttagaggcagagtatctgatggcctcttaataaccccgacctggtttcagcccctatctc

SEQ ID NO: 327730 - DNA, 201 bp, Homo sapiens
aggcctcagtttctcaaatgtacctaatctctaggtagctgttaaaataacaaatttaaagaaattaaacttaacagagtttatttgagcaaagaacaatycatgaatcaggcagcactcagaaccagaagaggtttagagagctccactgagcagtttgagaagcaaccttttatagcctgtacacagaagcaaagcaga

SEQ ID NO: 327731 - DNA, 201 bp, Homo sapiens
aaataacaaatttaaagaaattaaacttaacagagtttatttgagcaaagaacaattcatgaatcaggcagcactcagaaccagaagaggtttagagagckccactgagcagtttgagaagcaaccttttatagcctgtacacagaagcaaagcagagaaatcacctgatgggctacagctaggcatctgctttatttggg

SEQ ID NO: 327732 - DNA, 201 bp, Homo sapiens
gcactcagaaccagaagaggtttagagagctccactgagcagtttgagaagcaaccttttatagcctgtacacagaagcaaagcagagaaatcacctgatrggctacagctaggcatctgctttatttgggcacggtgtgatgagttggctgcctgcaattgactgaaacccagctgcttgtgagtatctgaaacgctact

SEQ ID NO: 327733 - DNA, 201 bp, Homo sapiens
actgagcagtttgagaagcaaccttttatagcctgtacacagaagcaaagcagagaaatcacctgatgggctacagctaggcatctgctttatttgggcayggtgtgatgagttggctgcctgcaattgactgaaacccagctgcttgtgagtatctgaaacgctactctgtgtaacacttctaagttaggtttcagattg

SEQ ID NO: 327734 - DNA, 201 bp, Homo sapiens
cagactgttccttctgcagaggcattaacatacacaaagaaatggccccgtccacacctagccatcaatttctaatcatgtataagaagcattatctatgraaaatgcacactcatcttctcataggtctaacttctaactgttctctgctgggctcagagaatccacatttataatttaccacctttgtagaaatcataa

SEQ ID NO: 327735 - DNA, 201 bp, Homo sapiens
aatttctaatcatgtataagaagcattatctatgaaaaatgcacactcatcttctcataggtctaacttctaactgttctctgctgggctcagagaatccrcatttataatttaccacctttgtagaaatcataacgttggcagcctcaagccattcttagttttgggatgcagagcaagatctttattttataagacctc

SEQ ID NO: 327736 - DNA, 201 bp, Homo sapiens
cagagcaagatctttattttataagacctcaatcatatgccagagttatggtaagcccctgaatagtacctcaggctgaggtgagaatgaattttaatttktattaaagaactgttataaaagactgtttccgttcatagcttaatagcgagtccagtgaattgtgaagggagatgaatggtagggttggcagtatggggg

SEQ ID NO: 327737 - DNA, 201 bp, Homo sapiens
atcatatgccagagttatggtaagcccctgaatagtacctcaggctgaggtgagaatgaattttaatttgtattaaagaactgttataaaagactgtttcygttcatagcttaatagcgagtccagtgaattgtgaagggagatgaatggtagggttggcagtatgggggaagggctgtgcaagcctgcctgtatttttat

SEQ ID NO: 327738 - DNA, 201 bp, Homo sapiens
tccagtgaattgtgaagggagatgaatggtagggttggcagtatgggggaagggctgtgcaagcctgcctgtatttttatagagatctaagtattttacarcatgccattttgttttcattaaggcttcaaaatttacttctcagagaagagaaagtaaaccttccattttaaccctttaattcagttctgtagactatca

SEQ ID NO: 327739 - DNA, 201 bp, Homo sapiens
atacaaattccaaaactaatctctaatagaagtgcatgtaagtctctaaaggtaaacataggaggaattacctaactctgcccttgtttttctgggcattwtcatgaagacactgagcttatcagtaggattagggaagagatgtgttccaagtaaaagaaataggaataagttaagcatcgtgttatataaaggcacaca

SEQ ID NO: 327740 - DNA, 201 bp, Homo sapiens
ttttgggttttacatttaagtctttaatccatcttgagttaatttttgtataaggtttaaggaaggggtccagtttcagttttctgcatatggctagccarttctcccagaaccatgtattaaatagagaatcctttcctcattgcttattttcatcaggtttgtcaaagatcagatggttgtaggtgtgaaatctcatct

SEQ ID NO: 327741 - DNA, 201 bp, Homo sapiens
aatgaggaggcaattgagttcctacttgagagatgaaaggtgaaaagggggcaaccttatgacaattcttgggtggtgttacagataaaagactagcatamgcaaggacctcagggttggaaaaagtttgacaagttattataatagaagaaggctagtgtggacaagagaaagtgtcaagaagaaggctgagaatagagt

SEQ ID NO: 327742 - DNA, 201 bp, Homo sapiens
actcacttagtgttacattgccactaataaatacaaccaggatgcatctaaagcctgaactcctaatatctaacttagaccacatgttaacaccaaatacrtgatcttcctttataattgtacccttttctctgaatgagcaatttgctttaaatagaggacatgtttacttgatctagtagatggtttgagcacatgcta

SEQ ID NO: 327743 - DNA, 201 bp, Homo sapiens
caactatcttataattatgtttatctagctccccatttgttcattcattcattcatttactcatctattcattcaacaaataaatgttgaatcagtctccrtgccacatgctgacaaacaagccatggtcttcgccctcaaagaattactgatcagtcaaggagacaaaataaattcacaggtcagagaataaaaacctaa

SEQ ID NO: 327744 - DNA, 201 bp, Homo sapiens
tgactcttcagaggagcataaaatcaaagatgtgtatgaaagggatgttctttttatattgtgccaccatctgacttctgttccctttccatgtggcaatstcccttcaccctgccacttccaatctgcttttaccttcctgctcccatgatgctctgtgtttacttctgtcttcaactatcttataattatgtttatcta

SEQ ID NO: 327745 - DNA, 201 bp, Homo sapiens
ttaggagatatatctaatgttaaatgacgagttaatgggtgcagcacaccaacatggcacatgtatacatatgtaactaacctgcacgttgtgcacatgtwccctaaaacttaaagtataataaaaaaataaaaaaataaaaaataaataaatgatgtgtgtttcttctgtcttttcttgcagtcattcccaacatagcac

SEQ ID NO: 327746 - DNA, 201 bp, Homo sapiens
taagtaaatctttttaaatgtgtagattttttatagagagagcagacaacgtttgagacttttttcattggcattttccttggttctctaatagaattctratgttccttaattaaaactttacatacatagaacatcgttcttaatagagttttcttagtggcgtggcagtaaaacatctgtaacttaaaccagtagctt

SEQ ID NO: 327747 - DNA, 201 bp, Homo sapiens
ctcagatgaaagattctcttgccatctctttctaaagaatattctaagattccaagatgaattcttaaaaatgtgaaaaattgttgtaagaatttaaaatractctagaatcaaacagtctcaatgccatttcaggcacaggaagttaccatgtgactctgagcaactttctaatcctctctgtatctcaatttcttcatc

SEQ ID NO: 327748 - DNA, 201 bp, Homo sapiens
tccctttcaccttgcatattctctcttttttgaattaatagaaccattttgtgatagtcaatagatgttcattgtacaaaacttcaaaaacactaaaaagraagttaaacgagaaaattagaagtatacaaaatcccacacaatacccagagataacatcattgttaatatttttgtacatttccatctattctttctatg

SEQ ID NO: 327749 - DNA, 201 bp, Homo sapiens
gacaaggatactgcagagagaattcaagcatcagatggggacttgtacccaatgaactctcaggttccttctaatcccagatacaaggaaatctagaaacygtagcaaagtatagagagtattttgatctggggaaaagaaatcatgaaaacataagatgttattactactaacaattactttttatagtcatatctaaac

SEQ ID NO: 327750 - DNA, 201 bp, Homo sapiens
tgactaggaaaggaaactccctgaccccttgtgcttcccaagtgaggcaatgcctcgccctgcttcggctcgcgcatggtgccctgcacccactgtcctgyacccactgtctggcactccctagtgagatgaacccggtacttcagttggaaatgcagaaatcacccgtcttctgcgtcactcacgctgggagctgtagac

SEQ ID NO: 327751 - DNA, 201 bp, Homo sapiens
ttcctggaggcatttatacagaggctaattgctactgacaaggatactgcagagagaattcaagcatcagatggggacttgtacccaatgaactctcaggytccttctaatcccagatacaaggaaatctagaaactgtagcaaagtatagagagtattttgatctggggaaaagaaatcatgaaaacataagatgttatt

SEQ ID NO: 327752 - DNA, 201 bp, Homo sapiens
ggcgcccctccccctagcctcgctgccgccttacagtttaatctcagactgctgtgctagcaatcagtgagactctgtgggcgtaggaccctccgagccakatgcgggatataatctcctggtgcgccgttttttaagcccgtcggaaaagcgcagtattagggtgggagtgacccgattttccaggtgccatctgtcacc

SEQ ID NO: 327753 - DNA, 201 bp, Homo sapiens
atttgagtatttattctgagcttcagcacagtatcaatctctgctgccaagcttctgcttcaggccccacctctcactgacacctcctcctcagcgtaggygggcagcaagggaaaagagtgaaccacgatccgttcatggtgttctctttttacaggatgggaaaaagattttgtgtggaaaaactttcagttaaaggct

SEQ ID NO: 327754 - DNA, 201 bp, Homo sapiens
gtgtttttttttctttaacaagttggattttctatcttgtaaccataataacttggagatgtttaggttagcaaaggtattagttatctgaaattcagcavttcatgaccaagcattttaccagaccactggtagaaactaaaaacaaagtttgtacaactggtttgattactggcacccaaccgtttactgtatcagggg

SEQ ID NO: 327755 - DNA, 201 bp, Homo sapiens
tcagatgtagatttggtcttttcacatagtcccatatttcttggaggctttgttcgtttctttttattctttttttctctaaacttcctttgtcacttcayttcattcatttcatcttccatcactgataccctttcttccagttgatcacattggctcctgaggtttctgcattcttcacgtagttctcgagccttggct

SEQ ID NO: 327756 - DNA, 201 bp, Homo sapiens
caggaaagtaagtttcccagcacgctttcattcctaatttctgggccataagaggtgacatcattgaaggagggaaagagtgaaggactaaggagaataarctcggcttaatgctctgttgtcttgagaccgtaccttactcttacgctgtctctcactttctctctctttgaccctatcaccaaacagacaacttcctgc

SEQ ID NO: 327757 - DNA, 201 bp, Homo sapiens
ttttccagcttgattccattctcctcgtcactttcaggtacaccaatcagatgtagatttggtcttttcacatagtcccatatttcttggaggctttgttygtttctttttattctttttttctctaaacttcctttgtcacttcatttcattcatttcatcttccatcactgataccctttcttccagttgatcacattg

SEQ ID NO: 327758 - DNA, 201 bp, Homo sapiens
tatcagagactaggattgcaacccctgccttttttgtttcccatttgcttggtagatcttcctccatccttttattttgagcctatatgtgtctctgcacrtgagatgggtttcctgaatacagcacactgatgggtcttgactctttatccaatttgccagtctgtgtcttttaattggagcatttagtccacttacagt

SEQ ID NO: 327759 - DNA, 201 bp, Homo sapiens
tcccctttatcattttttattgcgtctgtttgattcttctctcttttcttctttattagtcttgctagtggtctatcaattttgttgatcctttcaaaaamccaactcctggattcattaattttttgaagggttttttgtgtctctatttccttcagttctgctctgatcttagttatttctcgccttatgctagctttc

SEQ ID NO: 327760 - DNA, 201 bp, Homo sapiens
caaacagggacaatttgacttcctcttttcctaattgaataccctttatttccttctcctgcctaattgccctggccagaacttccaacactgtgttgaayaggagtggtgagagagggcatccctgtcttgtgccagttttcaaagggaatgcttccagtttttgcccattcagtatgatattggctgtgggtttgtcat

SEQ ID NO: 327761 - DNA, 201 bp, Homo sapiens
ctgttctgttccattgatctatatctctgttttggtaccagtaccatgctgttttggttactgtagccttgtagtatactacaagtttgaagtcaggtagsgtgatgcctccagctttgttcttttggcttaggattgacttggtgatgagggctcttttttggttccatatgaactttaaagtagtttttccaattctgt

SEQ ID NO: 327762 - DNA, 201 bp, Homo sapiens
aaaaaaaatggacacagaaacagacatgcacatagggagaattcatgtgaagatgaagactgagatcgggatgatgcatctatgagataaggagtgccaartactgccagcaaatcaccagaatccagaagaggggcatggaatagatttactcttatagctttcaggaggactcaaccctgctaatgccttgatcttggt

SEQ ID NO: 327763 - DNA, 201 bp, Homo sapiens
atgttctttgttcctttatttttcttttattgttttccattttggtttggtagctttctgtcatgatactatttgagttctttctctttttcctttgtatrtgtgctttaccagtgagttttatacatttgtgtgttttcataatggcagatgtgtccttttccttccaggtttaggactcccttgagcatttcttataga

SEQ ID NO: 327764 - DNA, 201 bp, Homo sapiens
ctaaggattgtgcccgaactgtctaggtctgaagcctcccatttggccatactaatcatgtgcattttagctaaacatgttaccaccctcagagcctcaaytccctcattagaaagtgagaagaataattgtatctgtgctgttcccctcataggattgctgtgatgatcaagggaaattgagcaaatgaattttcatcca

SEQ ID NO: 327765 - DNA, 201 bp, Homo sapiens
ccagatgtggctgacccctgttctcagaagatttagggaccactggacctagagagtttcttttgtggatatagtcaacagccacctgtaatgtaaaaaargagaaataagaaaataaaaggtctagaaatttattatggatagaatatttcaaatatgtatgaattttaatcagcttctgccttatttattttggatcca

SEQ ID NO: 327766 - DNA, 201 bp, Homo sapiens
atgctgtatgttatcatgtgacacatgagcacgtagtagacattcattggaatgacaagtggtgggtatttacctacgactgtgatttatagtcttatagytcaaaggaagagttcacatttaatggaagctcttcttcaggctcaaggatatgtgcggaagaactggcagacagagggaagtccttccagcagggtcaga

SEQ ID NO: 327767 - DNA, 201 bp, Homo sapiens
tcttcttcaggctcaaggatatgtgcggaagaactggcagacagagggaagtccttccagcagggtcagatttcatccttgttctcttgggggatggtgaygcacatagtttcccctgggattttttgatttcagagttaggacacagaaactgattttcatcaacccatctattatgtactataacagtgtctgcttttt

SEQ ID NO: 327768 - DNA, 201 bp, Homo sapiens
agctgttcttcctgatgctccccctttccctgcccacacccgataggccccagtgtatgttgtttaccctgccccaaccatgtgtccatgtgttctcatcrttcagctcccacttataagtgagaacatgcagtgttgggttttctgttcctgcattaattggctgatgataaaggctttcagctccattcatgtccctga

SEQ ID NO: 327769 - DNA, 201 bp, Homo sapiens
ttcatcaacccatctattatgtactataacagtgtctgctttttgttaaagtctttttcatctatactaaacatgtgtcaatatcagatgctctggagaartttcaccatatgtggatgcctctaacataggttaggtcattgtaatgagcatgactagactttgaaaagtagaatcaaggtacatagcaagcaaaattct

SEQ ID NO: 327770 - DNA, 201 bp, Homo sapiens
taatgtttcatgttaagaaacatggcctatcatagagcaagaccggaaggaaggaaataaaacttacctcaggttaacagtgtttacctcagggaagtatrattgggatggggaaagaaattatccttcactttatacaattttaaattgttttgtctgtaagcatgtttaagttttgttattaaaaactaaatttaggct

SEQ ID NO: 327771 - DNA, 201 bp, Homo sapiens
ctggacatgaaaaggggacattcttaccagtagcatttcaatatttttacctagtgtgatgtttgaggagtgttgagaccctggggttacactgtcaaaayttcatagtatgaaaataattctcagctttcccaaaaggacaagcatttaaatccaagtaccaagtatttaaaacttgaccacatgtcctacagagagagt

SEQ ID NO: 327772 - DNA, 201 bp, Homo sapiens
aaattattcagaagaaggttttcagatttttacatttttaacatggctatagttctcatttactaactactttttgtttggtgttttgcaaaaataatcamtaatcctaataataaatctatacagtaggtatttttatttctatttcactgataaagatgatagctaccagagctgagatttcaacctagttttgtttgc

SEQ ID NO: 327773 - DNA, 201 bp, Homo sapiens
gacacatgacactcacgtcttcaacttagtttcatttcttcgaaccctactattttttcaaaaagtgtcattgtatttgtgacaataatattctcaggcamttgtaagcattaaataatttgtctaagaccttatatccttagaataaattaattcccagtatgagtgatactaggattaaaggagatctgaacactttgg

SEQ ID NO: 327774 - DNA, 201 bp, Homo sapiens
accacatccaggtaatttttgtatttttcatagacatagagttttgccatgttgcccaggctggtcttgaattcccaggctcaagcaatccgcacacctcrgcctctcaaagtattggaatgacaggtgtaagcctccatgcctggccttgctgggcttttaaattgactttttgacactgatattttttaggggccagtt

SEQ ID NO: 327775 - DNA, 201 bp, Homo sapiens
tgcacctactctcatagcacttccgttataatggttgtagaaaattccaagattaagggactattttcctccctagatggtgagtttattaaaggagaggyatgctactgtgaggagtatgtttctcatactcctggggtgagatcttatctctgttcattactagaattaagatcttgcacaagtcacttatctttttaa

SEQ ID NO: 327776 - DNA, 201 bp, Homo sapiens
caacactggggatgaaatttcaacatgagtctcagaaaggacaaatatccaaactatatcaccaagcatcatatccatatatctttaatatctcttgaatratttttctgcagtctttccatattatctccagtctacatccaactagaatcactgctcatctgaagtatttacccactggttttcaccacagtctgtcta

SEQ ID NO: 327777 - DNA, 201 bp, Homo sapiens
tttcactgtgtcagctccgattgattcctagtgattgtctggattatggtgctcagaagaatgatgagacttcatcaaggcacccccagaagagaatacartgaaaattagtatagccatgcataagaaagaaaaaagtggcagcctggatgcatagtttcttttatagccctggcatttgataatgccatgtgctttatg

SEQ ID NO: 327778 - DNA, 201 bp, Homo sapiens
acccactgctcttgatcaccaaataggtaaagaagactattttaacttggactctgcctacctctacaccctcctctgctgcttcccctaaaagccctgggatggagcctcaggaagcactttgttccttcatttctcctttcctttgcacaggccctttcttcaatctgcatactgtctcttcctccttcccattcagtt

SEQ ID NO: 327779 - DNA, 201 bp, Homo sapiens
ttctggttctggttcttactgctccagtcttcccgactccatagtacactgctcctcactccccttgctgcctgcctccatagtttgaccctaaccctagyttttcccctctgtgttcttgtttacccatgccactcccctgacttaggcttagcctatcccaggcctctgcaattggttggcatggaaacattaggccag

SEQ ID NO: 327780 - DNA, 201 bp, Homo sapiens
agagtgcagctgagcgccaaagaacatattaatagtttgagtgtgcgcatatgtgtgtgtgcacatgtgtatatagcaatgactgggcttgcagtaaattyaggtacaactaggtttacccaatcctcatttctggttctggttcttactgctccagtcttcccgactccatagtacactgctcctcactccccttgctgc

SEQ ID NO: 327781 - DNA, 201 bp, Homo sapiens
gaaaacaggcacaagacaaggatgccctctctcagcacttctattcaacatggtattagaagttctgccagggaaatcaggcaagagaaagaaataaaagrtattcaagtagaaagagaggaagtcaaaccatcttgtttgcaaaaaaagtgaacctatatttagaaaaccctattgtctcagtcttaaagcttcttaagc

SEQ ID NO: 327782 - DNA, 201 bp, Homo sapiens
gatcaagagcagggagccactgccattgtaaatcaggtctcagcctgtttcctacttcatcaagttcacactggctttctttccagggaggggccaaaaaatcgccttgtttactagctgcctctctgctttatctcattgtatctcaaccttagctcgaggtaagaagcacctgtagagctcttcaaaaccttgatgtct

SEQ ID NO: 327783 - DNA, 201 bp, Homo sapiens
tataaaatagatgattgaaaaaataaatggcaaaaaccaatttactttctatggttatttgttgacttgaggtccaccctgagtcagaaggcttgtagcaratgacattggaggggctgacattttactactgtgtcttccttagttctctatctgaagtttcaacgcacagtttagcagcaattataaccaatgatgtag

SEQ ID NO: 327784 - DNA, 201 bp, Homo sapiens
aaaagaacctccaactccacctccccaccctacactgaatttggaactcacattgatcaagagcagggagccactgccattgtaaatcaggtctcagcctstttcctacttcatcaagttcacactggctttctttccagggaggggccaaaaaatcgccttgtttactagctgcctctctgctttatctcattgtatctc

SEQ ID NO: 327785 - DNA, 201 bp, Homo sapiens
agtcccctgaacacttctggggtggccatgggtacataccacttaggaggagcatcaaggtccactctctgtacccttaagaagtagcttggcatggtggygccattctgagcccaggccctccttgggactgagataagatatgacttcagcctgaggccatttctcacacttgaaaaagtaagacactcctatccccat

SEQ ID NO: 327786 - DNA, 201 bp, Homo sapiens
ttattctgcccaccacaatatgatttatataacattcaagaacaggcaaaatgaacccatgatgatggaagccaagagcgattatgacccttgggtcatgytgctagaataggaataacagtattcattttaataaagcgttgttgcaagtattatagccaacagtaatgtcaattgccttgtaaagtgcctgtcacaaca

SEQ ID NO: 327787 - DNA, 201 bp, Homo sapiens
atcatacacactgacatcaaatatcttattaaagatttgcctttagaacgttccatcagaatgatttgcaaagccattgggaagagatttttatgggaacktgatgtgctctatttatttagagaaaacgatgctttccaaagttaaatgaccatattgacagaaacacaaaatagaacctaccgttggcctcatcactca

SEQ ID NO: 327788 - DNA, 201 bp, Homo sapiens
agatgtccactatgggtctcaccagattaaagtcaaggtatcagcaggctgtgtttctttctggaagtttatttgaattgttggctgaattcaattccackcagttgtaagaccaaagtccctgttatcttgctcctgtcagcctagggccatcctcttctagaggctgctgcattccatggctcgtggcccccttcttcc

SEQ ID NO: 327789 - DNA, 201 bp, Homo sapiens
tatgcaggcactaaaaacaaaattttgagcattaaacgtactgccactggtcttcaactccatcatctctgttttctagtttccaggaattcctaaagaayggcaatttgcttttctctagcataaaggttactagggtctctcattgtgactggcttccagtttaaacacatagtgttttgtggcgactgtgacaaaacc

SEQ ID NO: 327790 - DNA, 201 bp, Homo sapiens
aagccagacacacacacacacatacacactactatatgcatattagttttctaggctgctgtagaaacaaatcaccacaaatttaatggcttaaaaaaacrtaattatcatcttacaattttgtatatcagatgtccactatgggtctcaccagattaaagtcaaggtatcagcaggctgtgtttctttctggaagtttat

SEQ ID NO: 327791 - DNA, 201 bp, Homo sapiens
gattgggaagccgagatatggagaatggatgtctgaatcttctattaacttaacaaactatgataaaacttttggcctctagaggtgagttttttttttttaattctttgcaaatcttaagacatgtgaagggtaagaaaactatcatagatttaaaaattgttacctttatgccctttcaaatcctctcacttgcatcct

SEQ ID NO: 327792 - DNA, 201 bp, Homo sapiens
ggccacacacacatagatacacacaaacatcaatttctaataaatagttcagatctttgctgcatcatctcaagcattataaaataggttttccaactatmtttagcaccagctaaaattgcagctgataaagtgtacattgtctaattgtgcaaaacaccacctcaaaactatcttaattataggctaattctagattta

SEQ ID NO: 327793 - DNA, 201 bp, Homo sapiens
tattatcaggtgaccagcatctattaaaagtgatgctttctgctagtatggaatcagatgaaaacttttataaacaacctagaaatttagagcttaaaaaatacaacactgcttaatgacacatgatttttaaaaaatcttgtactgtagtttcaagctttatattttgccctagactgatttattatacataatttcaca

SEQ ID NO: 327794 - DNA, 201 bp, Homo sapiens
cttgtccatatcactatcagcatttttgtcaaagccattcaaccagtctctagggagttccaaactttcccacatttccctatcttcttctgagccctccraactgttccagcctctgcctattaccaagttccaaagttgcttccacatttttgggtatcttttcagcaatgcactctaatcttaccaatttgctgtatt

SEQ ID NO: 327795 - DNA, 201 bp, Homo sapiens
gaaagagcactgccatgaaaaaagacacacaggtttggaacaaatatattttccaggaggtaccaactttgaagtcaaaataggctgcatttttctagtgmattcctggcttttgctgtaattatgactaaaaatagtataaacaaatacaaaaaaaaacccctcttttcaccaatatccaggtgttgtatttcactgtta

SEQ ID NO: 327796 - DNA, 201 bp, Homo sapiens
tccatctgagaccacctcagcctggactttcttgtccatatcactatcagcatttttgtcaaagccattcaaccagtctctagggagttccaaactttccsacatttccctatcttcttctgagccctccaaactgttccagcctctgcctattaccaagttccaaagttgcttccacatttttgggtatcttttcagcaa

SEQ ID NO: 327797 - DNA, 201 bp, Homo sapiens
gtattgtattaattgaaaactagaattgtttgaggttttcccccccccgttatagcatggtactttacaaaaccatgcctttttgaggtggaaggccaaayagtggtacaacacataatttggatttttaagaaaggctttggaaaatcagaggggtggcaagtaggagcagcagcacaaaagtggaaagatggcagatgg

SEQ ID NO: 327798 - DNA, 201 bp, Homo sapiens
ccctcagaagccacagcccaagctctatgttggcctcttttagccatggctagagtggctgggacacaaggcaccaagtccctaggctgcatacaccagasgtaccctgggaccagcccacaaaaccacttttttctctttggcctctggctctgtgatgggaggggctgccatcaagacctctgacatgccctagagaca

SEQ ID NO: 327799 - DNA, 201 bp, Homo sapiens
ctgatgttttataagatcattatttaagctgttaaatttataagtatttgtaaaattttacatcttttacttcattcttttacatcataaactttttttttcaaattgtcacattgtgcttataacactaatttttataattatacagcacagtggtcctcaatttgtccatgattttgcatatcaatcatggtctaaaaa

SEQ ID NO: 327800 - DNA, 201 bp, Homo sapiens
tctgatgttttataagatcattatttaagctgttaaatttataagtatttgtaaaattttacatcttttacttcattcttttacatcataaactttttttttcaaattgtcacattgtgcttataacactaatttttataattatacagcacagtggtcctcaatttgtccatgattttgcatatcaatcatggtctaaaa

SEQ ID NO: 327801 - DNA, 201 bp, Homo sapiens
atatatacaagtcgtcatcaataatgttactttttggtttttgtgatgtccctgacatcacatatgtctccatttgacatatgtctccatttgacaaaaawtttatataattttgatgacatttttatttttttctttgttttctttttttctatatagctgcattatatgacagcccttgtatgctgatagcccctcagc

SEQ ID NO: 327802 - DNA, 201 bp, Homo sapiens
tatatatacaagtcgtcatcaataatgttactttttggtttttgtgatgtccctgacatcacatatgtctccatttgacatatgtctccatttgacaaaaattttatataattttgatgacatttttatttttttctttgttttctttttttctatatagctgcattatatgacagcccttgtatgctgatagcccctcag

SEQ ID NO: 327803 - DNA, 201 bp, Homo sapiens
tgttgtttgtttttcattctaatatataaaaagagaataatacaatctaccacataggaaattgtaagaaacatagattagtgtttagcatagaataagcrtgcaataaatgttagttcccttaataatgcttttagtattttactaggggctttataattttttaaaatctccttcttatgtagtttaaattatttaagc

SEQ ID NO: 327804 - DNA, 201 bp, Homo sapiens
ctatgtttttccactaaaccgtatcactttattagaaatgttttgaaatattttcatgatactgatagaagtttaaatcttttccaaaaatccaatgaagyggttccttataactaaaatttgtattacttccctaccattgcattagtttttgaattcagaagagacaatgtgatataatggaaagaaaatagtaattga

SEQ ID NO: 327805 - DNA, 201 bp, Homo sapiens
ggtaggtataaatgacatccaggtgtataaagctcctactcatccactcaactgaattctactgggtctcaacaagagtctgtattgtagctgtgtaattragacttattgaatactccctcttgaatggcctgggtgctttctggaactgaaaggggggctgcctgccatggcacagtaaccataccagtggagaaggat

SEQ ID NO: 327806 - DNA, 201 bp, Homo sapiens
gagcaagagtgtgaggcacagacaagactggtaaaaagccacagaggccagatcacatgggtcatgattaaagaccatccaaactactttaaagattatastatcaatgaggataaagagtcccagaaaatgacgtttaactgacaggtatcaagcataaaggacctgatcataattgcattttaggaattactctgggtg

SEQ ID NO: 327807 - DNA, 201 bp, Homo sapiens
ttggttttttaagcaataaaaaaaatatatttaaatcattattcatttatttactcccataagagccctgtatttggtgatcctgtgaaatgctctgtgcyatcaactgagaatacaaagataaattagacttagctctttcctgaagagactcccaatctaacagagaccatagcagacaggaaaacaattagcattcca

SEQ ID NO: 327808 - DNA, 201 bp, Homo sapiens
aataaatttgcaccaggtgaaacctctcagatgtgtttttcagtgtcagttcctgggctccgacttggatgtctcggacccaacaccaatttttcagaaaycaattcacaggtagtttgcaatttatgttttattggcttatgcgtgagatctgaaataaagaagatttctttgaaaggtctcacgaaggcactttggcac

SEQ ID NO: 327809 - DNA, 201 bp, Homo sapiens
atcacagggacagtatgaaagtagctgcccccatgattcagttaccccccaccaggtccctcccacgacatgtgaggattatgggaactacaattcaagawgagatttggtggagacatagccaaaccatatcagcatgtttcctaaaccaaagtcccacattttccaagttcaattcaagtatttactgagaaataataa

SEQ ID NO: 327810 - DNA, 201 bp, Homo sapiens
tggttttttaagcaataaaaaaaatatatttaaatcattattcatttatttactcccataagagccctgtatttggtgatcctgtgaaatgctctgtgccwtcaactgagaatacaaagataaattagacttagctctttcctgaagagactcccaatctaacagagaccatagcagacaggaaaacaattagcattccat

SEQ ID NO: 327811 - DNA, 201 bp, Homo sapiens
atgggaaaacagtcccacaaaagggaaaatggcctgcccaaggttgtgtagcaacttagtaataaatgccctactagaacaagggtcttactgctttcackccaattgtcattccagcacctaaactgaaatctcttgaatagcatatggcataaaaccttgtatttcctttcattccttcaagatgatactcagtgaggc

SEQ ID NO: 327812 - DNA, 201 bp, Homo sapiens
tattctgtcaaaagaggggaaataaatggcaatagtttaaaaaataagctcagctttgaaccatagctccttccaacaggggccctagattacactcctgstgtattagtacttactttttaaatgtaggtgggcattcctttctggtgctggtaaattggagaaacaagtgggtggaattcacatttctccccagttggg

SEQ ID NO: 327813 - DNA, 201 bp, Homo sapiens
aatgccctactagaacaagggtcttactgctttcacgccaattgtcattccagcacctaaactgaaatctcttgaatagcatatggcataaaaccttgtakttcctttcattccttcaagatgatactcagtgaggcaaggatgcagagtctgcagaggctaaaaagctgcatatgagggtggtcatgatagctcatgcct

SEQ ID NO: 327814 - DNA, 201 bp, Homo sapiens
tgtcattccagcacctaaactgaaatctcttgaatagcatatggcataaaaccttgtatttcctttcattccttcaagatgatactcagtgaggcaaggaygcagagtctgcagaggctaaaaagctgcatatgagggtggtcatgatagctcatgcctgtgatcccacactctgggaggctgagacaggaaaattgcttg

SEQ ID NO: 327815 - DNA, 201 bp, Homo sapiens
ctctatgaaaaaatgttttaaataggcaggcatgctggcacaggcctatagtcctagctactggggaggccaaggtgggagaatcacttgagcctaggagytcgaggttacagtgagctgtgattgcaccactctgctacaacctcggtgacagtaagaccctgtcccttaaaaaaaaaaatgctgcatattgagtccctt

SEQ ID NO: 327816 - DNA, 201 bp, Homo sapiens
ctgatctcaggggatacatactctagaccaaacttctaacactttactgtgcataagaagcaacatttccaatgagctctcaggagatgccaatgttgcargtacttgaattgcactttagaaaccaataaacttgcttataaaatgatgattataatataacatgacagttgccataatggaggcaagctacttgggaag

SEQ ID NO: 327817 - DNA, 201 bp, Homo sapiens
aactagttccagagatactgtgtctatctttcaaggctgtatactatacaaatatctttgaaaacatagcccagaacaaagacagtcagtgcttctgctascaacatgtgcagaaatgcaagaggctcataaatgtctcccaagaattatataatcagatctgatgttttataagatcattatttaagctgttaaatttat

SEQ ID NO: 327818 - DNA, 201 bp, Homo sapiens
ctgggactgaacactgaggtttgaattctggtttcaacaatatcacttaccagctgtttgaccttagacacattgtttcatggtaatggaccttagttttytcccctgctctgcctaccatatggggctattgtgaagatgtagagaaatgaaggctataacagtattttcaaaaaaccaaagtcttacacaaaaatgaga

SEQ ID NO: 327819 - DNA, 201 bp, Homo sapiens
gaacaccattgctggctgttcataagataacttttctcttttcctaaaattctgtgttcctgcccctttcctcataaatgggggcctccatgatacttccrcctccacaacacactcaaatcctcttatgagcccttgattacatgatagattcaagtatcctgaggatgaggagctggcagtgaacatttaattctcaca

SEQ ID NO: 327820 - DNA, 201 bp, Homo sapiens
aaggaaactcattgaaaagataaatgaattgtccatatttataaaattaaatcaatacctgttattgagcatcttctgtattaaagaggctgtggttgccygataacacatttctcatccagaaatacctacccataaaattgggtaaaatggagatatgatttgttgtatggacggtgctatgatcatagaacaatggca

SEQ ID NO: 327821 - DNA, 201 bp, Homo sapiens
aaattataatatatatttgaattggttgctctttaatattgccatcattttctagaagagagggcattttaatgccagaagaaacttatgaacataatctragcatcagaaaaagtcctccaaatattataaatttgtagttttaaaacctcactagatagatctccatattttttctatccatataatcttaccttatag

SEQ ID NO: 327822 - DNA, 201 bp, Homo sapiens
taaactgtcaaggggccactttgagtcatctgtcttcactaaagcaaatctttcaaaagctaagtagcatcatttcacatttatttagcacctgcaggacactttggtcttcttgttctgcaaaagtttctgcctcttggcccttctcttcaggcctaagttttaaagaaaatgcataaaagtgcctcagatgactttgaa

SEQ ID NO: 327823 - DNA, 201 bp, Homo sapiens
aacaaaccagacagctctagctaaaaaggagaacagaatagtaaaaagtaagacacagaatgctcacaggaggataggtgagaggggagggcatgaaaaawttgagggagcttccctcttccccctgcccaactgccaatcatgtaggttaggttagtttcaagggaacaaggaaatagacagaaatcacttgtccttaag

SEQ ID NO: 327824 - DNA, 201 bp, Homo sapiens
cttagctgaaaaggtaggtaactatttaaaagttatttctggtctttgtttggtcacctcaagccatttgcttagtgtatgaaactatccaccaaacaccratcacatccttttgatcagtcctcatggttttttaccacctacttacttactggtttttggtgactaacatagatacatatttttactaggattcttatg

SEQ ID NO: 327825 - DNA, 201 bp, Homo sapiens
tgtactgatttcctccaagtagatctggcttctcatccagaattcataacttatcgttatggataatgatagtcgtgcatagcttattgtttgctaaaacytgagtgtcacatttataaaatggacatagtacctagttcacaggcttgttgttaggatgacgttaaactgaatgtatgaaggaggctgctatatgggact

SEQ ID NO: 327826 - DNA, 201 bp, Homo sapiens
tttatttgtataaaacaaaattgcattgaactggactttgttttcaagggctctttctataaccctgagtattgatactcctcataattcaaattgttcayttggagagtttttaaaagatatttatatttttaaaaatctgatcaagagtactgatcttaaagatgaaaactttatttttgagttactatatggaatatg

SEQ ID NO: 327827 - DNA, 201 bp, Homo sapiens
ttgaaatgtttaaagtttggatatgtaataatatgcctatcagtgatttattagctacattataaaatcaggtcttcactttatagcatagagtgaaaaakaaaatatattaagcctttacattttctaattgttcatgtatttagtctgtatctgattgcactaagcaactaaaaaataattatcctgtgtcttaatata

SEQ ID NO: 327828 - DNA, 201 bp, Homo sapiens
attgtgaccactatctgctgacatcatatccatcccccaagagccagttcagtgttaacttctccataaagctatcactaattgacgcaatcagaagcaayctttcatttctaacaacttctgatgtgctttatttcttccttttttgttcattcttttattatcaggccaagtaacccatagggcatgaaaaggatgaat

SEQ ID NO: 327829 - DNA, 201 bp, Homo sapiens
ctttatgttctttcttctgccttttcacatggaaatatttaatgaccttgtcaaatctcataattgggttgcactttgctgttagtaaaggagctgtttcrtagtcaaaaggaacatgcattctctaaaagcaaattttaagctactggagattccatgagtatttatttatttgttattaactttgatttttttttctga

SEQ ID NO: 327830 - DNA, 201 bp, Homo sapiens
tgcctctcagagaagagaaaataaaccttccctatcaaccctttaatttggttctgtagaccttcagctcatatgaggtttaaaggatctcttgaagaggrcttttaaagtcagtaggtgtgtgtgttccaaattgaatactaaaacttaagatcactctatgccagaggaaatgaataccttagagggtaaagaggaatt

SEQ ID NO: 327831 - DNA, 201 bp, Homo sapiens
ccagcttatctaaatatcaacttgacttgcatctgatattatagatgagaatttattaaatatctaacttaaataaattttaccagcttttctatttatcrtactcatttcctttatcagatctgttcttactcctccatctgctcctggtttttgtttttttttctgatgcccatatggccaaagtgaactatccagtct

SEQ ID NO: 327832 - DNA, 201 bp, Homo sapiens
agattaaaatctgcctctcagagaagagaaaataaaccttccctatcaaccctttaatttggttctgtagaccttcagctcatatgaggtttaaaggatcycttgaagagggcttttaaagtcagtaggtgtgtgtgttccaaattgaatactaaaacttaagatcactctatgccagaggaaatgaataccttagagggt

SEQ ID NO: 327833 - DNA, 201 bp, Homo sapiens
agaataggagaaaaattttacaatctatctatctaacaaagctctaatatccagtatctgtaaggaacttaaacaagtttacatgaaaaaaataaccacaktaaaaagtggacaaaggacatgagcagacatttctcaaaggaagacagaggtgtggccaacaaacatgaaaaaaaagctcaacatccctgatcattagag

SEQ ID NO: 327834 - DNA, 201 bp, Homo sapiens
cccaatagatacctcaggctgaggtgagaatgattttttttcaaaagactgttataaaagactgtttccattcataacttaatagtgagtccagtgaattrtgaagggagatgaatggtagggttggcagtatgggggaagggctgtgcaagcctgcctgtatttatatagagatctaaatattttagaatgtagaatttt

SEQ ID NO: 327835 - DNA, 201 bp, Homo sapiens
gttactggagtttaaatatgcttgaaatgtaaaagtggcatgaaactggagtgatgcaagaatatttagtattcttttaaggactatcatttttaactaggaaaatttgggggcagttctcaaccttgtttttggacaccaaccctaaattacaattgatgataaaactatattgaacataggtgctgtcagcagagtaat

SEQ ID NO: 327836 - DNA, 201 bp, Homo sapiens
tatgaagtgctccataaattttagctatcattatatttgtatatgtgagatgatgtattgtgacccccccaatagatacctcaggctgaggtgagaatgawtttttttcaaaagactgttataaaagactgtttccattcataacttaatagtgagtccagtgaattgtgaagggagatgaatggtagggttggcagtatg

SEQ ID NO: 327837 - DNA, 201 bp, Homo sapiens
atgggaataatgatggtactaacttcatgaagttagcatggagattaactcatgtagagcttttggaaccaaatgtggcacataagtgctcaataaatgtkagttattgttttatcatctttaatagttagaactcaacattttaggtcaaattccaaaatagaattcttagatttgccagcttgccccatgccacatttg

SEQ ID NO: 327838 - DNA, 201 bp, Homo sapiens
aaaaccaagagactgagccctctgagaatgactcacaaggcatagcccctttctaagtttatgtagtagcttatttttcaaacgctgtcactgccctttttgaagtaggtgatcactaaacccaatatgaattaaggaaaataaggagagattaattgactcccagagtgacagaggccactcttgctacatttggtttta

SEQ ID NO: 327839 - DNA, 201 bp, Homo sapiens
acctacaaccatctgatcatcaacaaacctgacaaaaacaagcaatggggaaattatttcttatttaataaatgatgctgggagaactggctagccatagrcagaaaattgaaactggaccccttccttataccatatacaaaaatcaactcaagatggattcaggacttaaatgtaaaacccaaaactataaaagccctc

SEQ ID NO: 327840 - DNA, 201 bp, Homo sapiens
aattaaaaccaagagactgagccctctgagaatgactcacaaggcatagcccctttctaagtttatgtagtagcttatttttcaaacgctgtcactgcccyttttgaagtaggtgatcactaaacccaatatgaattaaggaaaataaggagagattaattgactcccagagtgacagaggccactcttgctacatttggt

SEQ ID NO: 327841 - DNA, 201 bp, Homo sapiens
tataacagcacagatggactaagacatctcctttgagtgtgctcagaggtatgttcaaatctctcaagatcaaaacactcaagtcacatagtggcagggcrtctcttccatttctgctaatagtgatgtctcccctggaaaaagcagcttgcttcatgggcttctcagtcctctaacactgcatccattacaatgtgtccc

SEQ ID NO: 327842 - DNA, 201 bp, Homo sapiens
taattaaaaccaagagactgagccctctgagaatgactcacaaggcatagcccctttctaagtttatgtagtagcttatttttcaaacgctgtcactgccytttttgaagtaggtgatcactaaacccaatatgaattaaggaaaataaggagagattaattgactcccagagtgacagaggccactcttgctacatttgg

SEQ ID NO: 327843 - DNA, 201 bp, Homo sapiens
aggtttactggataattgttataactccattttatctcatttgttgatttattagctataactctccagatgttgttgttatattagtggttgctttaggrtttgtagtgtacatgtttaacttatcccattctagcattactatcaatattataatacttcatgtaccgcattagaaccttacaaagtatagttttcttt

SEQ ID NO: 327844 - DNA, 201 bp, Homo sapiens
taaaattgttaacacagcccacagaattttgcagagtctggcccctgcctgcctggacagcctgccccatccacaatacttcccctactctcactgatgcytcagccactctggatttttctttacctatggtcagggatgctattcaaaattttcacaccttggcataaccctggcacccatccacacaatgaatggccg

SEQ ID NO: 327845 - DNA, 201 bp, Homo sapiens
gtctcacaggtcattgccctgcagcaaatagctagcaaccagttattacttagagttatgactgtgaaaatctgatactaaaatggtgctaaagagttttwtgaggatgaagttatttttgaatggttcaaggagaaagagcaaggagaattaactctgagctgtgtctgtttcctgtgtttcagagcagggcttgtctct

SEQ ID NO: 327846 - DNA, 201 bp, Homo sapiens
caccactgcccttcacagcctctggtaaccatcattctattatatccataagttcagttgttttactatttttagctcccacaaataagtgggaacatccraagtttgtctttctgtgcctgtcttatttcacttaacataatgacctccagttccattcgtgttgttgccaatgacaggatctcattcttttttatggct

SEQ ID NO: 327847 - DNA, 201 bp, Homo sapiens
caaagacacaagctgctttgcatttttaaaaagatcactctgccacctgtgtgggaaaagtttgaatgcagggaaactagttagtattatattatagagcmgggttgaaataatgaagaactgaactgagactatcgagatagggaggtacaaatggattcagaactatttattaaataaaacaggtggtacttggtgact

SEQ ID NO: 327848 - DNA, 201 bp, Homo sapiens
aaagctgagcaaagacacaagctgctttgcatttttaaaaagatcactctgccacctgtgtgggaaaagtttgaatgcagggaaactagttagtattatawtatagagcagggttgaaataatgaagaactgaactgagactatcgagatagggaggtacaaatggattcagaactatttattaaataaaacaggtggtac

SEQ ID NO: 327849 - DNA, 201 bp, Homo sapiens
tagtctttttttctttcaacagagaaaactgggtttaactttattttttattgtcaactgacaacttataattgtataaatttatggcatacaaagtgatrttataacttattaacacaatgtggaacaattaagctagttaatatatctgtcacctcaaatacttaacatgccttgtggtgagaacatttgagatttaga

SEQ ID NO: 327850 - DNA, 201 bp, Homo sapiens
aggtcctgtgaatgacaaacagatacactgaatagtctttttttctttcaacagagaaaactgggtttaactttattttttattgtcaactgacaacttakaattgtataaatttatggcatacaaagtgatattataacttattaacacaatgtggaacaattaagctagttaatatatctgtcacctcaaatacttaac

SEQ ID NO: 327851 - DNA, 201 bp, Homo sapiens
tatttctatatcttaaattgtcacctcaatgtttactatatatggttactgggataaaatgagtacatatgcttgagacactttgtaagtagtcaatatastgtagatatgttggtgatggtggtgatcttatttagcaactagcccagaagcagaaagccttgcccaaaatataatttgagaaaataagtttaggaccaa

SEQ ID NO: 327852 - DNA, 201 bp, Homo sapiens
ttaaatgagcacttgtgacttgtccaaagtgagataactagtcaatggaagagttcaaactagagcatgtatcttagtctgttctcatattgctataaagractgcctaagactgggtaatttataaaggaaacaagcttaattgactcacagttctgtatggctggggaggcctcagtaaactgataatcatggcagaag

SEQ ID NO: 327853 - DNA, 201 bp, Homo sapiens
attatagttgatcaaattggattaccattaattagtgagtctgtcttatagtacagagggctagttgaacatatttatctgtttaagtgggctgtcctcakaaagccaaatgtcatgtttgaaaagaaaagtcttgtttgtggggagggaaagataggagtatggaattactttacatgtactaaactgaaggagtgattt

SEQ ID NO: 327854 - DNA, 201 bp, Homo sapiens
agaataatatttcagacatgaaaatcatgagtaattccaattatgctatctataaataaattttattagaacacagccatgcttatttgtttacatattgkctgtagctgtttttgtgctgcaatggcagagttgaatagttgtgatagaaactgtaaggctagaaagtcagaaaaatatttattatccaacccgttaaag

SEQ ID NO: 327855 - DNA, 201 bp, Homo sapiens
atttctccacatcctctccagcatctgtcgtttcttgactttttttttttttttttttttttttgagtctcgcctgtcacccaggctggagtgcagtggcrtgatctcggcttactgcaagctccacctcccgggttcacacccttctcctgcctcagcctcccgagtagctgggactataggcgccgccaccaggcctgg

SEQ ID NO: 327856 - DNA, 201 bp, Homo sapiens
gttctatttgtatcacttactgatttaaatgatttaacaacttcaaatcatttaaagaaggcttcactttaagtgtaatctgacttacacttacgtatctwtggaaatgttaatgagtggtctatgttggattaaacatgttttaagcagttctctattttttatcctaggatttttcaaagctcttgggggcttatatct

SEQ ID NO: 327857 - DNA, 201 bp, Homo sapiens
ttatttgagggcttcatttctctgtgctcccacaaaatgtggaaaatatgcccactttacacttagcattgtagttacttacaggtctgtttcaactatcrtattagaagctttgtgagaaaacaaagtataccttatttatttctgtaactttattgccaggataggacctgaaaatgtttatgagtgattgaaagggtg

SEQ ID NO: 327858 - DNA, 201 bp, Homo sapiens
atttaaagttttatcattcacacaacaagccctgtgaaaagctgtgaatagttactcaaggtaaatatttacctacatggaattgtttgtaagctttaaaraaaatgctgctgtggtaaatacaactataaattttttaaatttatggccagcagcaaagcaatttgatgaaaagactgggatttggagctaggacctaag

SEQ ID NO: 327859 - DNA, 201 bp, Homo sapiens
gccaccatcactgcaatctaattgtataacaaacattttatctcccctaaaaaaaaccttggctgccacttcccaatctctgtgcccactatccccagctstaagcaaccacaatttacctttgtttccacagatttgccagttaatgggcaattaccttttaattgccgttcatggcctgtcacacttaaattctttcct

SEQ ID NO: 327860 - DNA, 201 bp, Homo sapiens
atgagtggtttactctcattcaattaaagataaaaattatttacaccaaataaaattagaaaccggctacaattgtttcttctcagtccatactatgagaytggggagagggtccttttttaaaaagaaatggctttattgagatataattcacatagtatacaattcactcacagtatacaactcaatgttttctagtat

SEQ ID NO: 327861 - DNA, 201 bp, Homo sapiens
gtatgggtgttctaatgtctgtcacaacatgaaaggtattcatttaacagagacaaaacaaaatcagataaacaaaagacatgtagatctaattgattgcragggttggaatgagtggtttactctcattcaattaaagataaaaattatttacaccaaataaaattagaaaccggctacaattgtttcttctcagtccat

SEQ ID NO: 327862 - DNA, 201 bp, Homo sapiens
attcacttaactctgttgactctgcctccttaaaagctctcaaatactcatccccatggctactaccttagctcagacactcatcattacttgcgtcctcytgcaacagcatcctaatagtttttcttgcttttgttctctgccacctgccaagccaatcatactgcagtcagaatgatccttgaaaatgcttacctgtct

SEQ ID NO: 327863 - DNA, 201 bp, Homo sapiens
tgttacattattacttgttcttttacctcacttgttttcaaagttctctttttatgtgtgtgaaaataagatttgtataatacaaagtagtggcccaaatrtacagtaacaactttcccaggggaacacaattattttagaggagaaacaaggagaggaaaatagcatgtataaaacaataagggggtcacagaaaagacg

SEQ ID NO: 327864 - DNA, 201 bp, Homo sapiens
ctttctcttcctatcctcattcaataattcacttaactctgttgactctgcctccttaaaagctctcaaatactcatccccatggctactaccttagctcrgacactcatcattacttgcgtcctcctgcaacagcatcctaatagtttttcttgcttttgttctctgccacctgccaagccaatcatactgcagtcagaa

SEQ ID NO: 327865 - DNA, 201 bp, Homo sapiens
gcatgaccataatgccgttattacacataaaaattgacaattagtggatcaacaagtatccagtattttttcagggccaaattggctcataagtatcacaratgggtttggttgttgtaattgttgctttgttttgttttataatttgtttgtttgaatcaagatcaaaatgaagtctatacattgtaactggttgatcct

SEQ ID NO: 327866 - DNA, 201 bp, Homo sapiens
acccatatctatctttgttagccctagtgcctagcagagagtagtgctcaataaatgttttttttttcctaaaagttgtggcatctattgttttagggatkgcaaattatgatttttatggtaactgtcttttaaattttaaccatgggcatatattttaataaggaaggaaccaaagtagaggaaaaatgggaagagtcc

SEQ ID NO: 327867 - DNA, 201 bp, Homo sapiens
tataatggcctgaaaaatttagagtagcttatggctcccttgaaagaaccagaaggttttttaaaatttccctctgcaaagaatggctaaaaaaaaaaaaattatctattcattcaaacatttaccaaatacctactatgtgccatttctgtgttcagtttgtagcctatgttgtactttctgtatactgtactgtgctct

SEQ ID NO: 327868 - DNA, 201 bp, Homo sapiens
aacccagttctcagccttcactaggctacaagtgatagtcgttgggatttgatttttccctacttttctgatctgcttctttttcttatttctaggtacargtagccccttgtgcttcatgcgagttggaattgtttttattcctggtgttagatttgaagtagtaacaaaaaaaaaaaaacagaaaaaaaactataaaaa

SEQ ID NO: 327869 - DNA, 201 bp, Homo sapiens
ttcaccatcatgagaacagcatagaaaagacctgcccccatgattcagttacctcccacagggtccctcccacaacacatgggaattcaagatgagatttkgttggggacacagccaaaccatatcacattgtgaaatgattaccactaccaagctaattaacatattcattacctcacatagttaccttttttgtgtatg

SEQ ID NO: 327870 - DNA, 201 bp, Homo sapiens
aaggtcctgtgaatgacaaacagatacactgaatagtctttttttctttcaacagagaaaactgggtttaactttattttttattgtcaactgacaacttmtaattgtataaatttatggcatacaaagtgatattataacttattaacacaatgtggaacaattaagctagttaatatatctgtcacctcaaatacttaa

SEQ ID NO: 327871 - DNA, 201 bp, Homo sapiens
tgctgactgagtgatgtgcttttatttagcatgatcagtcttagaaataacataaatgggggaaaaataaaacaggtttcatctgggattccatttcacasaacttaattagaatgattggcatcttgtgattttgatttcttcctaagcaaagaactctaaattgaatttcattttttgagatcaaaagaggattagctc

SEQ ID NO: 327872 - DNA, 201 bp, Homo sapiens
gatggcagcaggcaaagagagagaacttgtgcagggaaactcccccttataaaactttcagatctcatgagacttattcaccatcatgagaacagcatagraaagacctgcccccatgattcagttacctcccacagggtccctcccacaacacatgggaattcaagatgagatttggttggggacacagccaaaccatat

SEQ ID NO: 327873 - DNA, 201 bp, Homo sapiens
cagaagggaagagaagaagggataactttggaggagttttgctgtaaggagaagcagaaagatctgagtggtggctggagaagggtgcaagatgagagagragagaaggtctctatttccttgggagaaataagtatgacatctcagacaaagtgatgctgtagatgtcttgggcctcaacgttaaggaaaacatcctact

SEQ ID NO: 327874 - DNA, 201 bp, Homo sapiens
actgtagcgcaatgatgaagtcttgggtcactacaatctctgcctcccgagttcaagcgattctgaagcctcagcctcctgagtggctgggattataggcrtgcgccaccatgtgccaccattatgcaaaagctatatgtaatatccaccgtgaaagtttgttgttgtacagattaaaggtgatggtatttgtgaccatat

SEQ ID NO: 327875 - DNA, 201 bp, Homo sapiens
agaaggaaaatcatgttaccagaagtaacagcaaaatgcaaaaagtaaaagcacattagaaaacacacacacacacacacacacacacacacacacacacmcacagaggcatttctctcataggataaattttcattaaaatagcggacgaccctaaaccactgagactactagtgataatgtgcaaagaaaatcattgct

SEQ ID NO: 327876 - DNA, 201 bp, Homo sapiens
ccctgaacaagtctctctttgactgctgccatccacataagatgtgacttgctcctccttgccttccaccatgattgtgaggcctccccagccatgtagcrctgagtccattaaaccattttcctgaataaattaaaaataaattgcaaccaccaactgacccatcaaccaacctacaactaaaaggtcctgtgaatgaca

SEQ ID NO: 327877 - DNA, 201 bp, Homo sapiens
tgctagaacctgggagtcagaggttgcggtgagccttgattgtgccattgcactccagcctgggagacagactgagactctgtcaaaaaaaaaaaaaaaaragagagagagaaagagaaagagaaaaggaaggaaggaaaggaaggaaggaaggaaggacggaaggaaggaaggaaagaaggaaagagaaggaaaatcatg

SEQ ID NO: 327878 - DNA, 201 bp, Homo sapiens
gtgcatgtatatttagcattgttacattctcttgctgcattgattccctattatcattatataattttctgatttctcttttttactgtttttttttttttacttgaagtctgttttatccaatataaggatagctactcttactcacttttggtttctgttattatggaatatcttttttcatccctttattttgtgtct

SEQ ID NO: 327879 - DNA, 201 bp, Homo sapiens
tttgcttatttttgtttgtttgtttgttttttgagacagggtttcactcttcttgcccaggctggagtgcaatggcacgatctcagctcactgaaacctcrtctctcgcattcaagctattctactgcctcagcctcccaagtagctaggattacaggcatgcaccaccatgcccagctaatcttgtatttttagtagagg

SEQ ID NO: 327880 - DNA, 201 bp, Homo sapiens
ttaatttctttcatcagtgttttgtagttttccttgtagagatctttccctttcttggttaaatctgttcctaggtatttggtttctgtaaccattgtaawtgaaattgccttctgaatttgttttttgactattattgttgtacagaaatgctactgattttttatattgattttgtatcctctaactttactgaattta

SEQ ID NO: 327881 - DNA, 201 bp, Homo sapiens
ataaaacccagcaaacctttttatcatgtgtgtttgcatctgttgagttctctgaaggttgtgaaaaaataagcctaccactcactcatgttcaaaaaaaattatttcatggttcaaggatcagtgttacagagtttcactttgagatgaatgtgatagagactagattgagttttgttttgttgttgttttctttcctgt

SEQ ID NO: 327882 - DNA, 201 bp, Homo sapiens
gagaaagtgtaggtctaattttaagttcattgagaattcattgaagagtactaatcaggaaaactgatctgatttatgttttttaaaaaaaaaaaaaaaaagttctggctgctgtgtggagtagagagaccactggaaaaaaagagggaaaagattatgacacctgggactgaagtgagggtagcaatggaagagaagagg

SEQ ID NO: 327883 - DNA, 201 bp, Homo sapiens
ttatcctgcttcaggccaaaaaatctacaacagagaagggaataagatttaattcttttttcaacctatttgcttcctatattcattttttttttttttttacctttctggaatagaggagagatgagagagcaatcatgggaaaagtacttagttttatgggtggtataattgtaatttagtttcaatacccttctggtg

SEQ ID NO: 327884 - DNA, 201 bp, Homo sapiens
ccactccaactaatactctatgatttatctctcttggaggaggagtgcactcccttcctacccatgtcccattttagcatatgaccttaaattttcgctcrcttttgagatttttttttctcatttctgcaaagagtgtgaatttcattaggacaaggaaatgtggatgatgtgtcctttgcttctgtatggtgagcattc

SEQ ID NO: 327885 - DNA, 201 bp, Homo sapiens
gagagagcaatcatgggaaaagtacttagttttatgggtggtataattgtaatttagtttcaatacccttctggtgatagatgtataatctgcaggtcttwatcctttctggggcttttctgggttcatctgagttcctcctgctggcaaactcaagactatggttttccggatagaactgagctctcctcctgctgacaa

SEQ ID NO: 327886 - DNA, 201 bp, Homo sapiens
atattacctgttacatggatctcctcgctgcttcaaatagcaaagcagtgtattcacttgcttatctgtcatacgtatttctaccctaaattgttactgayaataagcatttcagatggccccagcaagattgataatgatctttttcctgatggctccattagatcagacttcagaagcattgtactttgcatgagtcct

SEQ ID NO: 327887 - DNA, 201 bp, Homo sapiens
cctgtcatcatgagatgtctttatccagagtggcagtagcttggcataatatccattatcacatcactaaaattactgtatgatagaataccattatagtygccttgacagagtgcatagtcttctgaacagattcttgtttcagttctgtaagctgtgtatttcaagggtcgtggtttaattcaaagatcagcagaaata

SEQ ID NO: 327888 - DNA, 201 bp, Homo sapiens
gggagctgatcactgtctttggagacagacaaaattgaatttaattctatctctacaaatagcaagctttaagaccctagttatgttactcaatatctctmccacttccttttctcacctcttagatgggtacaatgcctatatcacagggttactttatgaaaagacctagtacatgaagaatttagtgctgtacctggt

SEQ ID NO: 327889 - DNA, 201 bp, Homo sapiens
gggataaatggcttcccaggggaatgaggcctgagggaacgacagcagtggcacatttggtccggtgcgatattaggagacagtcccatctggcattccayaggagaaggtctactgccttccacaactatgagatgacttattttagttatgccttagggcactgtcacagccacttatcaccaaggaaagttaaatgta

SEQ ID NO: 327890 - DNA, 201 bp, Homo sapiens
agaaaaataaatcttcattgtaaacactcagtgggataaatggcttcccaggggaatgaggcctgagggaacgacagcagtggcacatttggtccggtgcratattaggagacagtcccatctggcattccataggagaaggtctactgccttccacaactatgagatgacttattttagttatgccttagggcactgtca

SEQ ID NO: 327891 - DNA, 201 bp, Homo sapiens
acatacttcaaaattacatgaagtggttctgctaaatttagggccatacctataagtgctgagttgtgaggaaaatgggattgttgatgtttaaaatatayctatagatcattgagttatggctctgaaagaacttgagagttggttgcatctaatcctttcattttaaaattgagtcattgaagcatgtcaaagcaaaat

SEQ ID NO: 327892 - DNA, 201 bp, Homo sapiens
taggccgggcacggtggctcacgcctgtaatcccagcactttgggaggccgaggcgggcggatcacgaggtcaggaaatcgagaccatcctggctaacacrgtaaaaccccgtctctactaaaaatacaaaaaaaaaaaaaaaaaaaaaaaaaaattggctgggcatggtggcaggcgcctctagttccagctactactcg

SEQ ID NO: 327893 - DNA, 201 bp, Homo sapiens
gccgggcacggtggctcacgcctgtaatcccagcactttgggaggccgaggcgggcggatcacgaggtcaggaaatcgagaccatcctggctaacacagtraaaccccgtctctactaaaaatacaaaaaaaaaaaaaaaaaaaaaaaaaaattggctgggcatggtggcaggcgcctctagttccagctactactcggga

SEQ ID NO: 327894 - DNA, 201 bp, Homo sapiens
ggcgggcggatcacgaggtcaggaaatcgagaccatcctggctaacacagtaaaaccccgtctctactaaaaatacaaaaaaaaaaaaaaaaaaaaaaaawaattggctgggcatggtggcaggcgcctctagttccagctactactcgggaggctgaggcaggagaatggcgtgaaccagggaggcggagcttgcagtga

SEQ ID NO: 327895 - DNA, 201 bp, Homo sapiens
gtagatgctgctattatctttttgctggtaacttcaggggcatggaaaagagaagaatgttcaagagagggtaccataggaaggcacctgggtgtggctayacaatctgcctacagagggatcctatttcctgtgaacacagagaaccagtatcataggagaagatatttgttgggttgatttgatttgccatgacctttc

SEQ ID NO: 327896 - DNA, 201 bp, Homo sapiens
gagagaaagagaggcgtccctgcaagtttgcagcctgcgtaattggaagagttagaatttcccaagttgaacaagactgagggaggaccaaggtttttgtytgcttgcttggtgtttatttgcttgttgagggtttgtggagaagaccacgtgtttggtttgaagactatgtattagatatctaagtaaagatagtgagta

SEQ ID NO: 327897 - DNA, 201 bp, Homo sapiens
agattatgggtgtattttaaagctgagaacacaggatttattaaccaattggatgtggggtatgagagaaagagaggcgtccctgcaagtttgcagcctgsgtaattggaagagttagaatttcccaagttgaacaagactgagggaggaccaaggtttttgtctgcttgcttggtgtttatttgcttgttgagggtttgt

SEQ ID NO: 327898 - DNA, 201 bp, Homo sapiens
tcatcgtgcttattaatgcacatgcctctcttctgctgaataacagtacttttttttttttttttgagacggagtctcgctcgaataacagtacttttatytgcatagtcattatttaatttaatccttacaaattccttgtgagtaagcagagtgggtgatgcaatctctcttttaatgaggaaaaagaggctcagaaag

SEQ ID NO: 327899 - DNA, 201 bp, Homo sapiens
tcaaggaaaagcaacaaggccaatgtggcaggaagacagtgaggcaaagaaggcacagtggcagaggagatcaaagtggtagctagagctggattatggasagcctttccagccatgttgtacattttgggttttattctgaatgaggtgggaagtcactggaggatctcgagcagaatgacatgatctgaattacaattt

SEQ ID NO: 327900 - DNA, 201 bp, Homo sapiens
ttccatttagaatttcctacagagagaatatgcaatgaacagtttcagtccgctcatcagtagtatttctcactatatataacaaactatcatcgtgcttmttaatgcacatgcctctcttctgctgaataacagtacttttttttttttttttgagacggagtctcgctcgaataacagtacttttatctgcatagtcat

SEQ ID NO: 327901 - DNA, 201 bp, Homo sapiens
caagcagagggaacagcaagagcaaagtccctgaatcaagattcaaggaaatcttgaatttaaggattcaaggaaaagcaacaaggccaatgtggcaggargacagtgaggcaaagaaggcacagtggcagaggagatcaaagtggtagctagagctggattatggagagcctttccagccatgttgtacattttgggttt

SEQ ID NO: 327902 - DNA, 201 bp, Homo sapiens
agaaaaatataaagccaaagataacccactcataattccaccactgcaaaggaaacattattcttttagtatatatgctttgtatctttatatataatatrtaaaacaaaattagaatcacaccatacagagagttctgtcttcttttacttagcattatattgtgatcatttctccatattattatatatactttagaaa

SEQ ID NO: 327903 - DNA, 201 bp, Homo sapiens
aggacttcacaggtaatgagaaagtgtaggtctaattttaagttcattgagaattcattgaagagtactaatcaggaaaactgatctgatttatgttttttaaaaaaaaaaaaaaaaagttctggctgctgtgtggagtagagagaccactggaaaaaaagagggaaaagattatgacacctgggactgaagtgagggtag

SEQ ID NO: 327904 - DNA, 201 bp, Homo sapiens
tgactgtgtgaccctgggcaagtcatttaacctctgcaagcttcagttttctcacctgtacaagggaatagaaagtgagtctatctcaataggttgttgtratgattaagtgagctaatgaatgcaaagaacttagaaaggtgcctggcacattataagtactcaacgaatgttatctatttacagtaactatacttactg

SEQ ID NO: 327905 - DNA, 201 bp, Homo sapiens
ttccattgataatctaaatagatgcaggaaaggcctttgacaaaattcaacaacccttcatgctaaaaactctcaataaattaggtattgatgggacatayctcaaaataataagagatatctatgacaaacccacagccaatatcatactgaatgggcaaaaactggaagcattcccttcgaaaactggcacaagacagg

SEQ ID NO: 327906 - DNA, 201 bp, Homo sapiens
acatcacattctctttagattgaatattatttgttcagcttctccaggtcctagttgacagttctattattgttaaagtccctccctaagaacagctccayacatgatgaataattggtcaacttgaaaatcctcccacttttttacaaataagccagtttctgcattgatcattgatttgtttattcactagcagacttt

SEQ ID NO: 327907 - DNA, 201 bp, Homo sapiens
cttatttattttttgactggtcagtgtattaggatgatgcagtatactattaccactggattaagcaggaaatataatgattcctcaagcttttataatastttggaatttattctacttttatatgtaaactcggaaagaaaccctgttctcctaaagggagaaagaacaggtgatatgagccctagcttttaatgaatc

SEQ ID NO: 327908 - DNA, 201 bp, Homo sapiens
aaacaaaagactgaatttgtttttagcagtcttgccttagaaacatttccattgataatctaaatagatgcaggaaaggcctttgacaaaattcaacaacmcttcatgctaaaaactctcaataaattaggtattgatgggacatacctcaaaataataagagatatctatgacaaacccacagccaatatcatactgaat

SEQ ID NO: 327909 - DNA, 201 bp, Homo sapiens
aatatgaaacttctattcaatactgtttttaaaaatggtaattatcagtacaattcattttggttagtctataaataattaggacttaaagtgaaactcaratagcagttttatttgcttcagctctgagttcctgtaatacctgccagagcagcttgatgatgtgacaggtctttaatccacagcggccaggtggcagga

SEQ ID NO: 327910 - DNA, 201 bp, Homo sapiens
tcaagataagctcttgaacactatgaatacccagtcctcagtcaaccctgaataatcaaatctggatttctggggtagggatcatgcttcattttattttwtttttttaggttttccaaatgattttaatgtgcagccgggttaagaaccaccatcctaccttgatctaaccacatcctagcccattctgctgctaccact

SEQ ID NO: 327911 - DNA, 201 bp, Homo sapiens
gtcattctttggagaatacctctccctatacctcccccactccaacagacacacacatctaccacggcgaagtaatttttatgtccacatagaccctgccmactgccaccactgtcataattagatgacacagagctgaacatctaatccgttctgagcacatcagagatcttccctgagattttttagcttgaacccaaa

SEQ ID NO: 327912 - DNA, 201 bp, Homo sapiens
ccttccatgacttttactttgccttaagctaatctccaaaatctgaaatgctactccaatatcagaaaaaaagggggaggtggaaatatatttcctgtgaytttaagagtacagagaatcattcacatctctggttagttcatatatgtctagtgtgtaatagaagtcaagatgaactctcaaaaaaaaatgatttcgaaa

SEQ ID NO: 327913 - DNA, 201 bp, Homo sapiens
acaaaggttagatcttagactgtcttgtatttttctcattcctgttgattacctacctcaaaattgaatatgtttttcctcctgcctaaaacaaaactacytaagggcaaaaatttaaattcttccttggtgtatgtgcaaacaaggttgaatatattcatgcctaccttattttggactaggaatacagtagtgtacttt

SEQ ID NO: 327914 - DNA, 201 bp, Homo sapiens
attatagtaagttggagtgaaggttctaagattctttattttaaatatttttaacattaaaaaatgtttactatataaaattaggaggatacagaaaaatrtaaagccaaagataacccactcataattccaccactgcaaaggaaacattattcttttagtatatatgctttgtatctttatatataatatgtaaaacaa

SEQ ID NO: 327915 - DNA, 201 bp, Homo sapiens
ttggcaggacgtggtggctcatgcctgtaatcccagcactttgggaggcaaagttaggtggatcacctgaggtcaggagttcaagaccagcctggccaacrtttttagtgtctactaaaaatttaaaaaagtagtcagacatggtggcgtgtgcctgttatcccagctactcaggaggctgaggcaggagaaccgcttgaa

SEQ ID NO: 327916 - DNA, 201 bp, Homo sapiens
taatcaatacatatccagtaagttgaaatgaaattacattttatagaactttttcttataaagaatttgaaacactctgtaagtagatcatcttttattgkatacattcatccttgttttattaaagttgtgaataaattgaattgaaaatcaaattgttttctgaaatatactgatatactctattaaaattcttcatgg

SEQ ID NO: 327917 - DNA, 201 bp, Homo sapiens
tactaaaaataccttgcttcaccttgaatagagtcactagttaaaaagaagcacataaacccaatctcaagaaaaaatgttactcgatttttatctatctmtctatctatctatctatctatctatcatctatctatctacagtatccatagtgctttcattgtctttgtgcagtcttcaacttcaaatgtcaactacata

SEQ ID NO: 327918 - DNA, 201 bp, Homo sapiens
caatttatggcagctatagctttctgaaagtatttcttaaataataagacttttaaaaattaaaattaccccttgatccatgggctgtagaatggatatcrtgttagtggacatgaaaacattaatgtttttgcacatctgcataagagctcttggtgactaggtgcatcgacaatgagcaacaatattttgaaaggaatc

SEQ ID NO: 327919 - DNA, 201 bp, Homo sapiens
aagatccagaggaggctgagtgctcaggagttgggaaaggatggagacagatgatacaaaataaagtacagtggtgagcagtgtgtgagaggagagaccascaaaagtgtctacaaaaagccctaaggggagcagctgaaggatgtgaaggggaggtgtgttaccaaaagaacagaagaaattagagcttttccttccttc

SEQ ID NO: 327920 - DNA, 201 bp, Homo sapiens
agaaactaccatcagagtgaacaggcaacctacaaaatgggagaaaattttcgcaacctacttatctgacaaagggctaatatccagaatctacaatgaastcaaacaaatttacaagaaaaagacaaacaaccccatcaaaaagtgggcaaaggacatgaacagacacttctcaaaagaagacatttatgcagcccaaaa

SEQ ID NO: 327921 - DNA, 201 bp, Homo sapiens
agtaaccagaagacatgccttttccctccttacttcaaccctgattaacatccccctgaggaaaaataagagtagggaaatttcttaccaactactttaawctatacttttgtacgcaatcatcacaataccaacatgaaatggatcattgttattatctacatttcagaggattagtggggttaagtaccttgtttaaaa

SEQ ID NO: 327922 - DNA, 201 bp, Homo sapiens
taatttgcccctggtcaccccagcaataggtatgtacttactctctgacattccatctgagatttttttttaacctaaactcagttttcttattcaattcmattgatatttattgagtacctattatgtactaggtacttacttgtactaagagctgagtatacacagtcaaataagacataatgtcttcctccatagagt

SEQ ID NO: 327923 - DNA, 201 bp, Homo sapiens
aattgacaaatgggatcaaattaaactaaagagcttctgcacagcaaaagaaactaccatcagagtgaacaggcaacctacaaaatgggagaaaattttcrcaacctacttatctgacaaagggctaatatccagaatctacaatgaactcaaacaaatttacaagaaaaagacaaacaaccccatcaaaaagtgggcaaa

SEQ ID NO: 327924 - DNA, 201 bp, Homo sapiens
aaacaaatctcatcttgtagttcccataatgcccacgtgtcatgggaggggcctggtgggaggtaattgaatcatgagggaagttacctccatgctgttcyagtgatattgagtgagttcttacaagatctaatggttttataaggggtttttcccctttggctcatcacttctcattcctaacatcatgtgaagaaggat

SEQ ID NO: 327925 - DNA, 201 bp, Homo sapiens
tagtaaccagaagacatgccttttccctccttacttcaaccctgattaacatccccctgaggaaaaataagagtagggaaatttcttaccaactactttawtctatacttttgtacgcaatcatcacaataccaacatgaaatggatcattgttattatctacatttcagaggattagtggggttaagtaccttgtttaaa

SEQ ID NO: 327926 - DNA, 201 bp, Homo sapiens
ctctagatgtcctcaagaagaccacacagccaaattctgggactaaggtcttatcttctaatgaatatgttaattattactagcatgctgtaacctcattyggcaatatcctaagaaaatgctgccatgcattaaataaaattacttcatttctatagacgtatttaagtcgctcatacaagactctctgctggggcatta

SEQ ID NO: 327927 - DNA, 201 bp, Homo sapiens
gcagtagtcaactaaaaaatataatgacagaaagtatatcatttacaataccccaaaatatcttaagaatacacttttaaaagcccagaatgcattagctmtttttcctgttgctctccctccctgcacctcaccccctacaggccccagtatgtgttgtttttccccatgtgtccatgtgttctcattgttcagctccca

SEQ ID NO: 327928 - DNA, 201 bp, Homo sapiens
taacataattatggtttggactgatcatttttggcaagaatttttcttctctcatctatctgttggagatttagattattacagtaaagaagcactttttrgaaataataaagtctctatatatttgtttccatccttcttaagaaaacaagaacataaaaatgtaatttttcaaaaagcccattagatatagaaagtatc

SEQ ID NO: 327929 - DNA, 201 bp, Homo sapiens
ttctttttcttaaagtatgaccctctatttaccctccagaacaatcttttcgtatcttagtcttctcagctatacaacgtttatttgtaaagttctagtcrtcagaagtcacagtgcttaagcagatattccagtctgggacagaacctccaatttaggattcagcaaataatagcattgagataggcactctgagggcca

SEQ ID NO: 327930 - DNA, 201 bp, Homo sapiens
tctttcagattacatgttattacatgttattgtttctgtgtattcttcccactgggctaagagctcctaagggctaggttatgtcttatttttcaaaaatmagagacacagtagatgctcaaaagaaaaaaaataacaaaaacctatccttttgcacattttctttttcttaaagtatgaccctctatttaccctccagaa

SEQ ID NO: 327931 - DNA, 201 bp, Homo sapiens
taaataattctgagattagagagagaagagctgggggtcgtgtctttggggccaaatagtgaggtttcaatacagtgcttgctttttgcagatagagccaytttcaatctgtattgactttgaaagacatttggacctgcctcagagcatgtattctttccatagataattcaggccatctttgagtctggggtgaaagct

SEQ ID NO: 327932 - DNA, 201 bp, Homo sapiens
ttgtttctgtgcctactaagataatcgttaagttgttaattagttttgtttctttaaaaaaaagttaataaatgctcctaattctatccctcccttagcayccccatgccacaacaggccccagtgtgtgatgttcccctccccgtgtccatttgttctcattgttcaactcctacttatgagtgagaacatgtggtgttt

SEQ ID NO: 327933 - DNA, 201 bp, Homo sapiens
tttcttttctctctgtgttcattgttttttgtctcatgtgcattcttgaaacccattctttcctacattgtgtccttttgtttggttattttaggtgggamtgcaaatccaggccctgttactctatttttactggaagtgcaattgtcatgaagttaaatttaaaccattcaccagcagaaagcactcaacgtatggtag

SEQ ID NO: 327934 - DNA, 201 bp, Homo sapiens
atctgaaaacagttgtttcatatattttgtccagttttttagttgcttatggtgggagggtaagactagtacctgttactatgtcatatttcttcatactrcatatttctacatatcaatgttgaggatgtggtggagaatataggtgtaaagcaagtttatgggtataaatgcaccttaattttatcattttttgtttta

SEQ ID NO: 327935 - DNA, 201 bp, Homo sapiens
caataatcaatgaagcctttcccaccctgtgcctttgctgtacctttcctttctcagaattccccctatatctgtataactaaatactaccctaacaacaractctagcaaagtgctaaatcttccatgagcctgccctaatgtccaccatggatataatctcttctttttcattgctttctaaatagtttatgctacctc

SEQ ID NO: 327936 - DNA, 201 bp, Homo sapiens
taacatggcgaaacaccatctctactaaaaatacaaaacaattagctgggcatggtggcgggtgcctgtagtcccagctactcaggaggctaaggcaggaraatggtgtgaacctgaaaggtggagcttgcagtaagctgagattgtgccactgcactccagcctgggcgacagagcgagactccgtctcaagaaaaaaaa

SEQ ID NO: 327937 - DNA, 201 bp, Homo sapiens
gcaagtggggtctggaataatgataagcatttgcttaagaatttcagagaggaatgactgggattttggaaggtaacttaaaagacagctttttattttcytgttgtttcctgagaaattcagaacatttactagtgaaggaatattttctgaaagttgtgggctggctggtcgacaatgcatggagaagaagcatgtggc

SEQ ID NO: 327938 - DNA, 201 bp, Homo sapiens
tactaatgatacacttcattgtttacagtatcgtaataaatcctgaagtatacatatcctatcatgctgagtctattatgttaaatcagtgacaaatatayggctcaaataattgcctcctttaaaataaaccttgttctcttttaaatcaaatacttgaaaatgaacaatgtctataaagtatagtcacatattgatgtc

SEQ ID NO: 327939 - DNA, 201 bp, Homo sapiens
atacttgaaaatgaacaatgtctataaagtatagtcacatattgatgtcgttaatcttaggagaattgacctgaaaaggtcgtaagcaagtaaatgctctwctgtgcatctactgtgagtgtggattcctaacgcatcgttagaatgcggagccacctagatggtccggatcatctcactcacacaccataagctatgaat

SEQ ID NO: 327940 - DNA, 201 bp, Homo sapiens
acctaaagagcactagctacgagactggtgaataaattctcctgagagactgatgtcagctcagtattgagaatgactttctagcagatctgcctaagatrtaggctatctgtaagctgctgctttttcctggaggcatttatacagaggctaattgctactgacaaggatactgcagagagaattcaagcatcagatggg

SEQ ID NO: 327941 - DNA, 201 bp, Homo sapiens
aactcttgaacaaaattaatcaaagctatgctttgccctagttgtctgaatcgcaatcatacacactgacatcaaatatcttattaaagatttgcctttaraacgttccatcagaatgatttgcaaagccattgggaagagatttttatgggaacgtgatgtgctctatttatttagagaaaacgatgctttccaaagtta

SEQ ID NO: 327942 - DNA, 201 bp, Homo sapiens
ttgtcaaatctcataattgggttgcactttgctgttagtaaaggagctgtttcgtagtcaaaaggaacatgcattctctaaaagcaaattttaagctactkgagattccatgagtatttatttatttgttattaactttgatttttttttctgacttgcggtgatcctgcttgaaatgtttaaagtttggatatgtaataa

SEQ ID NO: 327943 - DNA, 201 bp, Homo sapiens
tgcttttcaaatataaaacaaaaatataaaataatgaattatagtaagttggagtgaaggttctaagattctttattttaaatatttttaacattaaaaawtgtttactatataaaattaggaggatacagaaaaatataaagccaaagataacccactcataattccaccactgcaaaggaaacattattcttttagtat

SEQ ID NO: 327944 - DNA, 201 bp, Homo sapiens
accttctgattttggatggccttaaatcctcactgcgcatgtagctttctgggattctgtactgagtattcaattgccttgaatagggggagataggtctrctacctgtctgtatcatcttacttttttcttagaagctcctaggttttatcactgacctcgaaaggtaagatatttggtcttgttttctagctttgtgat

SEQ ID NO: 327945 - DNA, 201 bp, Homo sapiens
ataaacaaaagactgaatttgtttttagcagtcttgccttagaaacatttccattgataatctaaatagatgcaggaaaggcctttgacaaaattcaacarcccttcatgctaaaaactctcaataaattaggtattgatgggacatacctcaaaataataagagatatctatgacaaacccacagccaatatcatactga

SEQ ID NO: 327946 - DNA, 201 bp, Homo sapiens
tgattcttcctacccatgagcatggaatgttcttccatttgtttgtatcctcttttatttcattgagcagtggtttgtagttctccttgaagaggtccttsgtgtcccttgtaagttgcacttcatgtctaaaacaccaaaaacaatggcaacaaaagccaaaattgacaaatgggatcaaattaaactaaagagcttctg

SEQ ID NO: 327947 - DNA, 201 bp, Homo sapiens
tgacttctaattagaaacaatcatggccacaggcaattggaataacatatctaaaatgctaaaagaaaagaactgataacgaagagttttggatccagaaraacaatcctttaaaattaaaagggaaacaaagacaatcccaaataaacaaaagactgaatttgtttttagcagtcttgccttagaaacatttccattgat

SEQ ID NO: 327948 - DNA, 201 bp, Homo sapiens
ttggtcccacatgaactttaaagtagttttttccaattctgtgaagaaagtcattggtagcttgatggggatggcattgaatctataaattaccttgggcrgtatggccattttcacaatattgattcttcctacccatgagcatggaatgttcttccatttgtttgtatcctcttttatttcattgagcagtggtttgta

SEQ ID NO: 327949 - DNA, 201 bp, Homo sapiens
caaagtgacccacagctacaaatgtagtattcaaatgctgaaaagagaaaggcaaagataaaatcttagaaatagcaagaggaagtcaacttgtcatatasaaggtaactacataagtttaacatctgacttctaattagaaacaatcatggccacaggcaattggaataacatatctaaaatgctaaaagaaaagaactg

SEQ ID NO: 327950 - DNA, 201 bp, Homo sapiens
gctttgttcttttggcttaggattgccttggcgatgcgggctcttttttggtcccacatgaactttaaagtagttttttccaattctgtgaagaaagtcaytggtagcttgatggggatggcattgaatctataaattaccttgggcagtatggccattttcacaatattgattcttcctacccatgagcatggaatgttc

SEQ ID NO: 327951 - DNA, 201 bp, Homo sapiens
ttgaattaatttttgtataaggtgtaaggaagggatccagtttcagctttctacatatggctagccagttttcccagcaccatttattaaattgggaatcrtttccccattgcttgtttttctcaggtttgtcaaagatcagatagttgtagatatgcggtattatttctgagggctctgttctgttccattgatctatat

SEQ ID NO: 327952 - DNA, 201 bp, Homo sapiens
aagtaacatttaaaaagataaaagaaaatggtaagctctatagtcttgaaattctctccgatctctcttcctttgagcttgcttaacccttgaatcacaayatctgttgaatccctcaggtcatccctgcagagggagagtacataagagataatctaatatttagaaagtataacccccatttgtactctatattgctct

SEQ ID NO: 327953 - DNA, 201 bp, Homo sapiens
ttatttctgtgtccaaatttcctcttcttataagggcaccaatcaatggaccctaatcctaccctgatccaatataacctcatcttcttaagtcacatctrcaaagaacttctttccaaataaggttaattacattcacaggtaccaggagttagaacttcagcacatctttctgggggacatagttcaacctataacaga

SEQ ID NO: 327954 - DNA, 201 bp, Homo sapiens
cattttccctaatagctattccaacacatctgtgatttcttcattctctgacctcactacttccctcattcttggttgatgatcatcctttcttgttaccmgagtaaatggaagatgagaacttctttagtgtcctgttattatcctacaatcttagcattcatctccactgtcctttcctccttttctaattcagtggag

SEQ ID NO: 327955 - DNA, 201 bp, Homo sapiens
aaaaaaatctcaagaatctccaaagtggtagtagaaattattcatttttccttagacgagttgcctagtggttgacaaggggcacgtctgatctgcctttsttttctctagaacatacggaatggtttgaatatttattattgtagttaaagtaacatttaaaaagataaaagaaaatggtaagctctatagtcttgaaat

SEQ ID NO: 327956 - DNA, 201 bp, Homo sapiens
tgttcaagaaatttttgcccaaaccaatgtcatagaaatcttccccaatgttttcttagagtagtttcatggtttcaggtcttagatttaagtctttaatsccttttgatttgatttttgtatatggcaatagttaggggtctagtttcattcttctgcctatggatatccagtttccccagcaccatttattgaagagac

SEQ ID NO: 327957 - DNA, 201 bp, Homo sapiens
aggggctaatcttgaaaataatgctagtgaagacaggaagcagagaacttgacattcatgtttgtaaaaaaaaatcatgggggagatagtgggtcaagttkgagggggcctgagaaaaattcccgtggaatgtgatagtcctttatttatcttccaattcccatgcacccttgtatatatcacttcttcgtgtttttgact

SEQ ID NO: 327958 - DNA, 201 bp, Homo sapiens
atgatgttgagcacctttcatatgtctgtttgctgtctgtctgtcttcctttaagaaatgtccattcagatattttgcccatctttttatcatattattgktttttttcttagagttgtttgagttccttacatattcttgttactaatcacttgtcaaatgggtagtttacaaacattttctcccattctctggactgtc

SEQ ID NO: 327959 - DNA, 201 bp, Homo sapiens
ggtatatctcccagtgctatccctccccgctccccccaccccaccacagtccccagagtgtgatattccccttcctgtgtccatgtgatctttacaggacwctttgtggacatatgttttaattaattaattaatttaattttttggagacagagtatcactctgtcacccaggctagagtgcagtggctctatcttggct

SEQ ID NO: 327960 - DNA, 201 bp, Homo sapiens
tcatcgggcattagattctcacaagaagcagcaacctagatccctcacatgtgtagttcacaataggctttgcactcctctgagaatctaatgaaaccacrgatctgacaggaggtggagctcaggcagcaatgctcactcacccaccactcacctcctgctgtgcggcccagttcctgcaggccatggacacctaccagt

SEQ ID NO: 327961 - DNA, 201 bp, Homo sapiens
ctacttcccccaccaagctccctgctacccttctcagcctctagtaaccatcctttactttctattgtatgtccatgagttcaattgatttggtttttagrtcctacaactaagtgagaacatgagatgtttgtctttctgtctcttgcttatttcacttaacataatgatctccagttccacccatattgttgcaaatga

SEQ ID NO: 327962 - DNA, 201 bp, Homo sapiens
gaaagagaaaaaatttaaaaattagccaagcatgatggtatgtgcctactgtcctacctaccctggaggctgagggaggaagattacttgagcccaggagktcaaggctgcagtgagctatgatcgtaacactgcactccatcctgggtgacagaacaaggtcttgtctcaaaatagtaataataataataataataataa

SEQ ID NO: 327963 - DNA, 201 bp, Homo sapiens
gcctgccaccatgcccagctaatttttgtatttttagtacagacggggtttcaccgtgttagctaggatggtctcaatctcctgacctcgtgatccgcccrcctcggcctcccaaagtgctgggattacaggcatgagccactgcgcccggcctcttcctttaatttctgtacatgattagtagcaagacctagaccaact

SEQ ID NO: 327964 - DNA, 201 bp, Homo sapiens
tgtatagtcagaaataaggcagtaagtctgataatagtttttcacccttttaagtatttttattttttatttttttttttacttttagtttttgtgagtayatagtagttatatatatttacggggtacatgagatattttgatacaggcatgtcacgcgaagtaagcatatcatggagagtgggatatccatcctctcaa

SEQ ID NO: 327965 - DNA, 201 bp, Homo sapiens
tccttctgtttataagagggttgtattcttttgtgagccttaattgtgtattgcatatctataatatatgtatacattggcatagaaatgtacatgtagayagaaatacatacatctatatatgtattcatgaagatggagtacaccttccatgagacacagcagcctagaatgtttctttatagacttttcagcagaaac

SEQ ID NO: 327966 - DNA, 201 bp, Homo sapiens
gttccatttatttgaatcaactgaatgtggtagcagtttttttaattataataattttgatgttcaagaattctaagatgtcaaatattctgatctctctsaatacacagattcactcatatattttcactcattacgtttaatagcaaaaagcacacaattacttttgcaccaaactaatatttaacaaagcattaattg

SEQ ID NO: 327967 - DNA, 201 bp, Homo sapiens
ttgcagttgtttccaactctttctctttacctacatcttcctttcccattctgcagtaaactacacccggccggtgattatcctggggcccatgaaggatmggatcaatgacgacttgatatctgaattccctgataaatttggctcctgtgtgcctcgtaagtgtcatttttctttcctctaggaaaaacaaaaagagct

SEQ ID NO: 327968 - DNA, 201 bp, Homo sapiens
ctacatcaggatgtgtgattcaagcagtgtgggttcacgttgatttcccctacattcatctaattcttaagaaataaatctcaatttatgttctatatacyacacagcatttgctcacaacggaaagccataaatgcagcactctaattaaaactagataattcacacattttcatttaatattaatagaataccacgttg

SEQ ID NO: 327969 - DNA, 201 bp, Homo sapiens
actacatttatcttattatatgataattatctgttttggtggatcttatcaccagagggagctcattagtaaggacagatttttctttgtccttccattgrctgctcataggaggggctcaatagtattgggtagaaggatgaaaagataaatgaatcgatacagactctacatcaggatgtgtgattcaagcagtgtggg

SEQ ID NO: 327970 - DNA, 201 bp, Homo sapiens
gaggtaggagttcaagaccagcctggccaacatggcaaaacctcatctctactaaaaatacaaaaattagctgcgcatggtggcgggtgcctgtaatcacwgctacttgggaggctgaggcaggagaattggttgaactcgggaggtggaggttgcagtgagccgagattgcaccactgcactccagcctgggcaacagag

SEQ ID NO: 327971 - DNA, 201 bp, Homo sapiens
tgccaaatactgtatgaaagccagggcaaatgaagactgggaaagatcattgtatttaaatgtgaaaaagcttttgttgattattttgggttcaacttttrtataatagtggaacacaaacaaaagctgcagaggattgaggagagagaggggatgaagtagagaacattgatattttccctcatgctacagtcatattat

SEQ ID NO: 327972 - DNA, 201 bp, Homo sapiens
gcatttaaggcagcgtatgtggcattagtaaagataccaaaaggaggaggtgttcagctcaattacttggctagaaaacgtttttgaagacgagaaacagrgtatttagctagaaaggtaggttggggacagctggtggatggtatgaaatgttctctggggattaaaaaattattgaagctacttgagcagtaaaattcc

SEQ ID NO: 327973 - DNA, 201 bp, Homo sapiens
tctatcactcaacatgttttttaagattcattcatattgttatttgtatcaagaacttgttcctttatttctaagtagtagtctattgtttaaacatacaataatttgtttatccatgttcccaataatagacatttcagttgtttgcagttttttgcttttctgaataaagctgcaatgaagattctttttttttttttt

SEQ ID NO: 327974 - DNA, 201 bp, Homo sapiens
ccctatttctctcgtgcatttttttctgctttggattataagcatttgggaggtttcttttatctccacatgacattatgaattccttgcagggcaagacyatgcacttctcctcttcctactttctgcagtgccaagtatggtttcttaaatattatgtttcctaagtaaatctgcatagatggaatggtgaatacttaa

SEQ ID NO: 327975 - DNA, 201 bp, Homo sapiens
ggacaagacagtctttagttggtaaaaatgggagcttcccacaccaccaatagaatgcagctccataaaggcagaggcctttttttgtttaccactatagmcctaggacctaacctaatacatgggaaattttaggcattcaaaatatttttctacattaattagaattttaataaacataaattgcattaaggcatttaa

SEQ ID NO: 327976 - DNA, 201 bp, Homo sapiens
aatttaaaaatatatacacattaaaatctgaaaagctttaatgagctaatactagatatgccatagtttttgaagcttcatttagatatttttatttagcragaagatgcttaggagcaatgggaattctcattttcatcatgtagagttgaaaaaattacaccaatgtttttactcttgctgctgctgctgctaagacta

SEQ ID NO: 327977 - DNA, 201 bp, Homo sapiens
ttttttctggagataacagggttatgatttccagggtatcgataagaaaaatatttttgatttgatggacaagacagtctttagttggtaaaaatgggagmttcccacaccaccaatagaatgcagctccataaaggcagaggcctttttttgtttaccactatagccctaggacctaacctaatacatgggaaattttag

SEQ ID NO: 327978 - DNA, 201 bp, Homo sapiens
atcttccttatatttatttatcttgttacaattttcaaagtagtataaactagattacttctcgttacaactttcacaattaggcaagacgagttttatcrtcttcatagtagttatatgaaaattaaagcttagaaagttgaaatggccaggatcagaaatggttaaacagtaagacataatgtagtaggactaaaatcc

SEQ ID NO: 327979 - DNA, 201 bp, Homo sapiens
tgctaattttgttcaacaaatttatattgagcacatactttccatcagtaagtaaggatgaggatgaacaagattctcctggtttcacattgcttatgaawgcataaccttgaaaaaattgtttaacttagaaactagcttctttgatagtaaaatcaacattaaaatgctaagctctcaaaattgttacaattattagat

SEQ ID NO: 327980 - DNA, 201 bp, Homo sapiens
ccttcttccaccatttgctatcttgggtaaattactcaaattctctgagcctaagtttcatccaatgtaaaattagatgttatatataactttttagcatkgttcgaagtctaacaaaatcatgtgaattgaactcttaacacagtgcctgacccaaaagtgtgcctggtaaaggttgttattactgttgctgcaaatttt

SEQ ID NO: 327981 - DNA, 201 bp, Homo sapiens
aaggtgaaataaaataaagcagcagaatgctttcccttagtatctgatctggaaatactggtatgacctttattgtaacaagcagcccgaagcatttttcsaaaatcacagaacttcagatgaaggagcagggtgatgtggctctatagctcttttcccaaggttgtgaagatagtgatgtgctttttaaatgggatgaaa

SEQ ID NO: 327982 - DNA, 201 bp, Homo sapiens
aaatcatgtgaattgaactcttaacacagtgcctgacccaaaagtgtgcctggtaaaggttgttattactgttgctgcaaatttttaaatattatcccaawtatatacatttacaaattgcataatgtcctcatatatggctacatttgcttcttgaagaaccacatgatattgatgaaataataacttttaacatctata

SEQ ID NO: 327983 - DNA, 201 bp, Homo sapiens
actattattctatgtgaagctactcagaaacggaaaaccaaacattgtatgttctcactgatatgtgggagctaagctctgaggatgcaaaggcctaagartgttgcagtggactttggggatttgaggggaagagtgaaagggggtcaggggatagaagactacaaatatggtgcagtgtatactgctcgagtgatgcgt

SEQ ID NO: 327984 - DNA, 201 bp, Homo sapiens
aactgatagttattgcttgcaggaaattttttaaaacatcactatatatacgattgttataagaatccaatgcaataatgtatgtgaaaatagtatgaaaattaataatactgttgttaccataatctaaaaatgttagatataaacaactttaaaccttacaatttctatgttatcacctgggccagacattcggtaggg

SEQ ID NO: 327985 - DNA, 201 bp, Homo sapiens
tattttctgcaaaatattttactactttgtattttaaaggaggatcaaacagagatggtaactctccagtccaaggggataaaaaatactaatggtgagtkttcaaggataagtaagacaaattgtgttgactagaacagactttacttatcaaatcttaatagggtgcagaagcaaatgtattgcagtggttaggattta

SEQ ID NO: 327986 - DNA, 201 bp, Homo sapiens
agaaggaacttaaaaggagaagaaaatctaggaaagcaaaaagtaaaaactaatctcagtaataagtataataacctaagaaccttttttttttttttttycgagacacagtctccccaggctggagtacagtggcacagtctcagctcactgccacctccacctccaggggttccagccattctcctgcctcagcctccc

SEQ ID NO: 327987 - DNA, 201 bp, Homo sapiens
tgggaaacttttttcttctatcaggataatatgccttatgaaataccaagattctctggcttcctctctttcaggtgaatggcattgacctccgtggtgcwtcccacgagcaggcagctgctgcactaaagggggctggacagacagtgacgattatagcacaatatcaacctgaaggtcagtcagaactcaaactaataa

SEQ ID NO: 327988 - DNA, 201 bp, Homo sapiens
gcagaagctgcatagctggccattatgcatggtaaaaggcattccttcagtggttgagtgtgagactagagttttccatagaccttctgattttggatggscttaaatcctcactgcgcatgtagctttctgggattctgtactgagtattcaattgccttgaatagggggagataggtctactacctgtctgtatcatct

SEQ ID NO: 327989 - DNA, 201 bp, Homo sapiens
agaagagtcaggttcaagtccttagtgtcactatcattatttagatggttatcaggcagaagagggagtggacttattctctgtaacgaattaaggagttyattcagagtaagaaaggactcttgtataaccaagagacccatccaacaaagagtgagttgcctcactaaggagtgagctgcctctccacctcagcagatg

SEQ ID NO: 327990 - DNA, 201 bp, Homo sapiens
aaaaacattcatttacacatttgaaaagctcaacaaattttaagcaggataaacacaaagtgacccacagctacaaatgtagtattcaaatgctgaaaagmgaaaggcaaagataaaatcttagaaatagcaagaggaagtcaacttgtcatatagaaggtaactacataagtttaacatctgacttctaattagaaacaa

SEQ ID NO: 327991 - DNA, 201 bp, Homo sapiens
tctgcaaaggacatgatctccttccttttttatggctgcatagtattccatggtgtatatataccacatttatttatccagtctgtcattgatgggcattkaggttcattccatgtctttgctattgtgaatagtgctgcaatgaacagacacctgcatgtatctttataatagaatgatttatatttctttgggtatata

SEQ ID NO: 327992 - DNA, 201 bp, Homo sapiens
tgcacccagtgatacataataccagggctcagtttgcttagtataaataaaagtttcctacattttagcaaaaggtgatgctaaaatgaaaataaataatraaatgcccaatttttgacaattatctactcttctcaataaaatgttacctttattaggttagattttccttaggcttccaaagtttatattcctagaaat

SEQ ID NO: 327993 - DNA, 201 bp, Homo sapiens
aattattttctctctctgttgaattggtattataaatgtactttgtctttaggaagactctttttgtcctaaattctaagttgtctaatatcagtatagcygctccagctctcttaggtttatatttgcattcatttttaaagaaaaatgaatagattttcagaaacctgtgggacaacattatgcatactaatatatgta

SEQ ID NO: 327994 - DNA, 201 bp, Homo sapiens
attttcagaaggacatttttagtaattatatttacagctttgctaccagcaggtaatttttagctaccattcacttacctaagcttatttatttctggttyaaaaataattttccagccttaatacaatgtttaacatactactagtagtttattgaagctgataattttggcaaattgattatataaatatactgttcaa

SEQ ID NO: 327995 - DNA, 201 bp, Homo sapiens
atagttacttcccagggacctaaaaatagtcattgagtttttagtagtagtagagtcaaaatgaaaattttattcttcatagttccatttatttgaatcarctgaatgtggtagcagtttttttaattataataattttgatgttcaagaattctaagatgtcaaatattctgatctctctcaatacacagattcactcat

SEQ ID NO: 327996 - DNA, 201 bp, Homo sapiens
catatgagatttagaagggtaagttccctaatttcaggtcttctcctgctacagtacggcctgtagtttccatccagttttctgaaaaatcataggcaaartaacaaactcagtattggggcaggcaaagtgattgcccaactgtctgatattgtggtgtgtaaatgtcattacttaccctgatgagctgctatgatggta

SEQ ID NO: 327997 - DNA, 201 bp, Homo sapiens
tatgatgtgcctccccaacccgttgcccctgagtctgaggggaaaccaagagccttctatttgcatgagggtaggaaatagggcaagggatggatgctgtwaatcactgcttgcactcatgagctgagatgtccacacatctgcatgaaaggtcttttgtagtgcaggaagaaactatgaaaaagaagaagggctagccca

SEQ ID NO: 327998 - DNA, 201 bp, Homo sapiens
aaacattcctaagctcactttcaagaggtgtatgatgtgcctccccaacccgttgcccctgagtctgaggggaaaccaagagccttctatttgcatgaggktaggaaatagggcaagggatggatgctgttaatcactgcttgcactcatgagctgagatgtccacacatctgcatgaaaggtcttttgtagtgcaggaag

SEQ ID NO: 327999 - DNA, 201 bp, Homo sapiens
tttatctttcttgccaggggttccttatctgctcagtaagggggtaggactccctaatctctaggactccttgcattccataaattcagtgaataccaaayaaagccatttagtctctctgatctctggtgctcatctgtactgtagcactcctgataccttctttagtcactgagagactcagtgagagtgaaagtgttt

SEQ ID NO: 328000 - DNA, 201 bp, Homo sapiens
ctagccttgggagcgagtataaaaaagaagtctaatgacaaacttggggacactcaaatttaaaatatcagaaagcagagaagcgcccagcaaaggagacstagaaggatagattagtgaagtaggagaaaaaccaagggggtcttgataaccaaacagagacaatgatcgattcagggaagttgtaattgattctgccaa

SEQ ID NO: 328001 - DNA, 201 bp, Homo sapiens
taaagtcgtttcccttctggatgcataaatcttcacttctttctttgaagggaactagcatttactgaaagcttttttatggtgttctagatacttaacaraggtgatctcatttaatcctcagacattcgcacaagcccacaaatcctgaacccgaaagaaaatggatcaagtcaaaagcaactcaagaattttactgaa

SEQ ID NO: 328002 - DNA, 201 bp, Homo sapiens
tgtagttagctattatctattaaatttattactccctggactgagagcctaaggagagggagaatatgaccttgattacatcgttcttctggcattcaacrtaataatgtagtgcctgggacatcgtaagccctccatatatactcacagaatgaaggaatctcttctttactgatttgaagtctgagataactttggcaa

SEQ ID NO: 328003 - DNA, 201 bp, Homo sapiens
ctgagccagtgtaagtttgaagttcgttgggaaagaagataagctggctgagtttctgtaggcaaagagccagtaatgaggtttccagcattccatcacaygtccttttcatcactttcagctcagccagagacagcagagcctcatacgcaggggccaagtgtgtatttgagagactcgaagagggagaatgaaaagtat

SEQ ID NO: 328004 - DNA, 201 bp, Homo sapiens
aatcactttttacagtagtttatgctccagtgagaactaacagatgtcatatatttctgttatatctgtttctacagttgttttgtttcttttcatccaaygatatactttagaaacttgattcaagagttcaagtcagagcttttcttttccttacctaaatgtttaagtgaagtacaattatatacagcaaaatgcaca

SEQ ID NO: 328005 - DNA, 201 bp, Homo sapiens
tcctcagctctactttgagaataacagtgtttgtctcatagaattgtgtgaggattaaataagttaattcacataaagtatttgctatataagtacatacwcttattattatctgtcccagtattaatatatcaggggatttaggtgtggcagggtcataatactacaaaccttcaggtagtgataattgtaggttccaag

SEQ ID NO: 328006 - DNA, 201 bp, Homo sapiens
tcaaagcctgacataactctctaagtacccaaattgttctgttaaatttctggctactgtagacagcatgttgactgcaccagccagtattgcaaccttakactacttccatttttgctttccctgaagtttgccactgaaatcactattgttttcaaaaactatgcatgggattttcccacattctgctccaaatgaagt

SEQ ID NO: 328007 - DNA, 201 bp, Homo sapiens
gtataataggataatactcaattacctaggctgaagtgggttatcatttgcattcatctctgcaataataggaatgccataagagaggaatacagcaatayagaaagtacttttgtatcaccaatatgagagggcttaattgcaatcaggagagtctgagatgactataatcactttttacagtagtttatgctccagtga

SEQ ID NO: 328008 - DNA, 201 bp, Homo sapiens
tagatgtcttacttcaaagttgatggggtatgtgcatagtaaccccaatattctacttccctagccaggattagcatatggtctgactggggctcatcccratggaaatcttctgtgtgaattgtgaagcaaaaagtttgctagcatgctatcttgtagctgccagtctaaaacagctaatatttaccttgaggttctggg

SEQ ID NO: 328009 - DNA, 201 bp, Homo sapiens
tttatgtagtaggccatcagccccaaactctagcaaatttattatttcagtttttgactccaaaattttcatgagattttgatttataatttctatttctytgttaatattttcaatttgatgtgtcattgttgtcatactttaatttttttaaatggctcttttagttctttgcacatatttatggctgctttgatgttt

SEQ ID NO: 328010 - DNA, 201 bp, Homo sapiens
agctgccagtctaaaacagctaatatttaccttgaggttctgggatctccacctctcataatgaaatcacacacatacacatgcacacacatacacccacrtacaggactcattttcaaactttcagtggcttccattttgtttcaaaatgtcatgccataccatatataaaagtcatttatagggcctgtgtccctctaa

SEQ ID NO: 328011 - DNA, 201 bp, Homo sapiens
gatctttggtaatgtagtggcaaggtattggggaggaaagcatgctttattcctgtgattaggtttcagtattttggtgagtttgtctatctggattctaratttcaccagtgcttctctgttgtcccccttatccccaattttaggtgagacaggatggctagagggtctggacttgggtatttccctttccccagttat

SEQ ID NO: 328012 - DNA, 201 bp, Homo sapiens
cctgtcctgtaaggctgataagataagccaaaggtatccaaaaacagctcatatgttattcttgcactattttaccacctatttaaattggcgtaatgacratcacctgccttccatttgcatgtcccgggtcagctgaaatccctgcatagttcctagtaccatgagtgttactgttaatttcttgctgatctagttctc

SEQ ID NO: 328013 - DNA, 201 bp, Homo sapiens
ctttctctgttttgtctccttctggaatttctgttatgcttatgttacacctttgtagatgtctcacatttcttaaatgttctctattggttattttgttytgtgtcttgtctttttttctctgtttttcaatttggaagtttctattattgtatcctcaaactaagggattcttttctcagccacgtaagaatcaaaagt

SEQ ID NO: 328014 - DNA, 201 bp, Homo sapiens
gcctcaaatattgcttctgtttctttctctgttttgtctccttctggaatttctgttatgcttatgttacacctttgtagatgtctcacatttcttaaatrttctctattggttattttgttctgtgtcttgtctttttttctctgtttttcaatttggaagtttctattattgtatcctcaaactaagggattcttttct

SEQ ID NO: 328015 - DNA, 201 bp, Homo sapiens
atgaagcctaggattctgtacctgtaacacaaccactatgatggcaaaagttcttgaagatagagtctggctgggcagggaagattggagaccagctatasgccacaatgtgggtgagtggttgacattatggaggtccaacaaggctttgtgagtgggcgctagctgatgagtggaggatagtgatcaaacaagatggga

SEQ ID NO: 328016 - DNA, 201 bp, Homo sapiens
tttgcttgtgtgtttgtttgctttgtcatttattctgcttggtgttctctgaggttcctggatctgtgatttgttgtctgacattaatttgggtgaaattytcagtcattattgcctcaaatattgcttctgtttctttctctgttttgtctccttctggaatttctgttatgcttatgttacacctttgtagatgtctca

SEQ ID NO: 328017 - DNA, 201 bp, Homo sapiens
gaaagattcatttttactatagatcttagcagcttcatcatacaatgctgtctcttttcttttttcttaagtcaggaattttcaagttttcccttaaaggraacactttagggcttctcttaagcatttctgaattgtcagcatcactattcttgtgctttggggccattattaagtaaaataagagttacttgaacacag

SEQ ID NO: 328018 - DNA, 201 bp, Homo sapiens
caatggttgacagtagataactgaaactgcagaatgtgaaaccacgaataagtgggtgagtggggtgccattgtaccaggttggctggggcatctctgctwcagaagtttcattctggggaccaggaggtgggacagtagctatccagggtatgttttcatattgtgatagtcaaaggacaagaaatcaagcccgtgacac

SEQ ID NO: 328019 - DNA, 201 bp, Homo sapiens
aaatgagaagccactgctagttcaggagttgggccagtagcagttacataggtccatggcttacctacatctagacctttgctgctcagagtgtgacccayggactaacagcagtgatattacctgggagtttgtgagcaatagaatctaaagttccaccaaagacctactaaatcagaaactatgttttaaaataaaaac

SEQ ID NO: 328020 - DNA, 201 bp, Homo sapiens
ttattcttctttgatttgacttttcaacacatggcatcatcactaacaattctagagggggaaaaagacccagtaatgcgtgttttcacttgctttctggktccaaatccaactttgtaaccttgaggttcattaaatcggatgcaatttggaaaatacaaaatttaaactttgtaaccttttctagtcatagtaaagtcc

SEQ ID NO: 328021 - DNA, 201 bp, Homo sapiens
ttttaaaaggctttttaaatcagaaaatgactatattgtatatccttatacatttatttccaaccttaaaaaatactgtcttatatgcaatatttgtattyttgtagttttatttatcaaatatacttgggataagtttagtccctacatatatatcttttatactcccctgtattaaccataaaggaaatttaaattgat

SEQ ID NO: 328022 - DNA, 201 bp, Homo sapiens
ttattagagacaggatttcaccatgttagccaggattatctcgatctcttgacctcatgatccacctgcctcagcctcccaaaatgttgggattagaggcrtgagccaccgtgcccagcctttctttgccaatctcttctgatcataaaataaaatatctcattataaaaaggcccatatattctttacatgcatgtagtt

SEQ ID NO: 328023 - DNA, 201 bp, Homo sapiens
cacatgctttccatagtactctcacctgtgttatctgttttaatcctcataacaagcttgtgaatgttattgttgttccaaattttagattaacatacctyatcttagagatataattactcaccaaagatcacaaattgtcagaatggggatttaaacccagatatttttggctgtaaagactcataaacccttatgcaa

SEQ ID NO: 328024 - DNA, 201 bp, Homo sapiens
tatcatggaactgatcttttcaagttttgctgatctcttcaagttttgcttttaaatttttttagatgggagggcagcatttaggggtaattatgttttaytactgaagcaagatttttctgagcatactacttaatgccccatgaattgtgaagttttctagtttagctggtgagaaccagcactgatctcagcccttta

SEQ ID NO: 328025 - DNA, 201 bp, Homo sapiens
taccccttcctaattgtccctagattttggttcagataatccctgtgctttgctagaagctgacatgactctgaattgcaagggtgggtttttactgattkaggccaattgataccctggcctccattagtggtggatatgcaacctaatccagtaaaatcagagcaaattccatgattcttacttagaactttgaggcag

SEQ ID NO: 328026 - DNA, 201 bp, Homo sapiens
ttctccagcagaagagccatttaccttgctaatgcttttcatttgtttgaagtccttgaagggcatggtggtgagagatttagttagagtcccagctctgytgcttactacctgtgtgatcctggggacacggctttgcttaacctctgagcctcagtttcaatagctctcaagtggaccaataatacttatgtattaagc

SEQ ID NO: 328027 - DNA, 201 bp, Homo sapiens
gttcacatttctatctgcaatgatctgatattcaaaatctatgaggtctgagtccatgaatgactgtgaatcatgttcaggcaggctagtctccagggccsgggacaatggcctttgttcttcccttttcttatctgtttcattattctcttaggcacttaatatgctgaacacaggcagccctgtaggatgttctttcca

SEQ ID NO: 328028 - DNA, 201 bp, Homo sapiens
tcacttttcttccatttgtgactacgaagtccttcatgttagggaccatgtcctatttctctgtttccttactatgacagacccaatactctgcacatagkcatttactcaatatttgtttaattgaattaatcataggctgcctcatttccctctcggaaggtagagaacacatcttggtcatttctgtttccattatat

SEQ ID NO: 328029 - DNA, 201 bp, Homo sapiens
aactctccaatagcagtatcacttttcttccatttgtgactacgaagtccttcatgttagggaccatgtcctatttctctgtttccttactatgacagacmcaatactctgcacatagtcatttactcaatatttgtttaattgaattaatcataggctgcctcatttccctctcggaaggtagagaacacatcttggtca

SEQ ID NO: 328030 - DNA, 201 bp, Homo sapiens
tgtcttgttattcttacgttgaacacctagtataggacctcacccacagaaaaatttttgtttagagtaaaatgaatgatctcttctttcatctgcttttstgaaggtgcttttagcagcattgaaccacagaaagggaaattatatttctgtttactatggcgaaaattaaaaatggatttttgacttggtacatattct

SEQ ID NO: 328031 - DNA, 201 bp, Homo sapiens
acaccattcccaagtttggtctttctagcttacatgtttagaaacagatcagcttgttatacgtaaggggttggaggttgatttgtcttaaggagagttcmaaaaactgaacttactctggcttaaagaactaagtgtggtcaaccaaatgccccttaaagcaattaggtaccatctgcttcccaagactttgggagtaga

SEQ ID NO: 328032 - DNA, 201 bp, Homo sapiens
gatgacaatcaagccagtctgtaatcaaaagctcctatgtgaaatcactgtgttttatcaagttggcctataacaaggttcagagaccatgagccaaaccyattgcaagtcttttagaatcacttcttactggccaaagattttaaagtaaatgtcataattcttaccagctggtatctcaatattctgggcctctctgtt

SEQ ID NO: 328033 - DNA, 201 bp, Homo sapiens
ggatggtcttgatctcctgacctcgttatccacccgcctcggcctcccaaagtgctgggattacaggcatgagccaccgcgcctggcctcttacatacatkctaatttagtaggtcttaagtctggaaattttacatttttaataaactcttgggtaatgccaatgctactagttcatactttggatcataccttgagtag

SEQ ID NO: 328034 - DNA, 201 bp, Homo sapiens
cccgccaccacgccagtctaattttttctatttttagtagagacagggtttgaccatgttagccaggatggtcttgatctcctgacctcgttatccacccrcctcggcctcccaaagtgctgggattacaggcatgagccaccgcgcctggcctcttacatacattctaatttagtaggtcttaagtctggaaattttaca

SEQ ID NO: 328035 - DNA, 201 bp, Homo sapiens
gaattgcagctatttcattaatagttgatctttctctctagaatgtaaacttcatgaagcacaaagaaaatattgctttatctttcccacagttatacctyagaaaccctgcacatttttactgactggtggaaggcaggcagacaggcaggaagggaagaaactacaataataagccatcctatttcaaggaatcagaga

SEQ ID NO: 328036 - DNA, 201 bp, Homo sapiens
ggatttacagccaaggagcagggtggagatcagtggacagaaaattactaggaggaaacatcaagagtaagggggcattcttgatcaattgaacttactgwaagtgggccagagtgatcagatatcaatggtgagggattctctttaaactatatcccagaaaatgtacaatcattatgtatcaatagaataaattaacaa

SEQ ID NO: 328037 - DNA, 201 bp, Homo sapiens
ctgggcatggtgactcatgcctgtaatcccagcactttgggaggccgaggtgggaggatcacctgaggtcagggagttcaagagcagcctggccaaaatgrtgaaaccctgtctctggtaaaaatacaaaaattagctagctgtagtgatgcctgcttttaatctcagctactccggaggctgatgcatgagaatcacttg

SEQ ID NO: 328038 - DNA, 201 bp, Homo sapiens
tctctaaactgattgtagccccttaaaaggcaggatgaatttttgtggcccccaaccatttaaaacagcataggatttatgataggcatcagtatgttttyatagattgatcaaaatgccactgaaacattattttttataggatggaagagatcggaaacaaagccatatattaaaatcctctcaggatgacttagggcc

SEQ ID NO: 328039 - DNA, 201 bp, Homo sapiens
tgcctgcttttaatctcagctactccggaggctgatgcatgagaatcacttgaacccagaaggttgaggttgcagtgagccgagatcacacccctacactscagcctggttgacagagacttggtctcaaataataataataataaaaatgataaaataaataaattccataaatagccatagtccatgcatgtagtggga

SEQ ID NO: 328040 - DNA, 201 bp, Homo sapiens
agatctgtgatgatttgccacaatgcacagtccttatgccttattataatcaatgacttaaataaaaatgtaaaatttgatgatataaagctagatgaaakagtgaaattctataatggccaacacatcttaaatgctcaataaatacttattgaattaaattgataactgaatgttagcttaacaaacttaaaatctaga

SEQ ID NO: 328041 - DNA, 201 bp, Homo sapiens
tgttagagctactgtcacagaaaatcaaagctgggcagtagttaaattggtagaaacagattttattcagggactgttgcagtagaggaaaagagacctcwctataaaaataagctcaatttcagatacaatatgaacaaatggggatttacagccaaggagcagggtggagatcagtggacagaaaattactaggaggaa

SEQ ID NO: 328042 - DNA, 201 bp, Homo sapiens
ttgaatttgactgttttaatagagtgaatttttatttgaaaagtaattcatcaggtaaatatgtgtgttttaatttaatctacatgatcatgtggatcaaygtgcatgtgaccacctaaaagtgggctgcccaatttattggctctttatagtttaacttgctcatagataagcactcttttcaaagtgtggtcgtttaca

SEQ ID NO: 328043 - DNA, 201 bp, Homo sapiens
taactattacactggagggagatctgtgatgatttgccacaatgcacagtccttatgccttattataatcaatgacttaaataaaaatgtaaaatttgatkatataaagctagatgaaatagtgaaattctataatggccaacacatcttaaatgctcaataaatacttattgaattaaattgataactgaatgttagctt

SEQ ID NO: 328044 - DNA, 201 bp, Homo sapiens
tgagcagtttataaattgtgtcattatttagaaaggtctaataatgtggtaagctttgcacaagcatcaagccacttcaaattagcttaacaattaaatgmccaaatcataaagatgttagagctactgtcacagaaaatcaaagctgggcagtagttaaattggtagaaacagattttattcagggactgttgcagtaga

SEQ ID NO: 328045 - DNA, 201 bp, Homo sapiens
taatctacatgatcatgtggatcaatgtgcatgtgaccacctaaaagtgggctgcccaatttattggctctttatagtttaacttgctcatagataagcaytcttttcaaagtgtggtcgtttacaaatgcttttttctttctcaaatatatatttgaaagaaaatgtaggcagtcatagatgatgacagggaagacagtg

SEQ ID NO: 328046 - DNA, 201 bp, Homo sapiens
aatcatgaatgaactcccattcagaattgctacaaaaagaataaaatacctaggaatacagctagcaagggaagtgaaggacctcttcaaggagaactacmaaccactgctcaaagaaatcagagagtacacaaacaaatggaaaaaacattccatgctcatggataggaagaatcaatatcgtgaaaatggccatactgc

SEQ ID NO: 328047 - DNA, 201 bp, Homo sapiens
ttagctatcactattctgaagttgtcaggtaggtcatgtcctagggtcatattgccacagcctgttctcaaaataaatgttgcattgcatagattcttcaygcaatgcaacatttctaaattatttttctaattatttttctaatttctttttctaaattctttctaaattcttttctaatttttacttttaatttctgtt

SEQ ID NO: 328048 - DNA, 201 bp, Homo sapiens
aatatttgataaggtaaatattggatttatagtggaccccacttgaacttagaaagtaggaagtttagaacttatgaaagtgggcaggaatacaaaacacrtaatatttgcttaatgaaaaataataagtaatataacctaaatgattgagccacctagggcctccaaacgtatatcaatgtgcctatttcaaacagtgag

SEQ ID NO: 328049 - DNA, 201 bp, Homo sapiens
ctgccagagttcggggccagggatgtagtcctcatttattattattcaacaatgactgtctaggattccattaataatgtcaaatagatatcccagtaccrctgtccaagaccttaggtgctcaataaattctaattgattaactgacctatcaactacatgcattgttagccacttcagcagatataaaaatcactattc

SEQ ID NO: 328050 - DNA, 201 bp, Homo sapiens
gctccacctcctgggttcactccattctcctgcctcagcctcccaagtaactgggactgcaggcacccaccaccacgcccggctagtttttttttttttttcttttgtatttttagtagagacggggcttcactgtgctagccaggatggtctcgatctcctgacctcgtgatccgcctgcctcagcctcccaaagtgctg

SEQ ID NO: 328051 - DNA, 201 bp, Homo sapiens
ctggtcttgaactcccgacctcgtgatccacccaccttgacctcccaaagtgctgggattacaggcaagagccaccacgccccgccttttttttttttgaraccgagtttcactcttattgctcaggctggagtgcaatggctccatctccgctcactgcaacctctgcctcccgagttcaagcaattctcctgcctcagc

SEQ ID NO: 328052 - DNA, 201 bp, Homo sapiens
ctcaaaatgaactatcacatgtgagcctctgcatatattactgcaaacctttgattcaagctctgctttcctggggattatggaagtgcagttggagaggrtgagaatcataggagttgggggatattatgtatttggattccccctataatatctttgccaagtggtcattcagccgctgccttaacatgtcctatgaaa

SEQ ID NO: 328053 - DNA, 201 bp, Homo sapiens
ctttaatttctctttctattcttcaagacttgcattgaaatgtatcttcatcaaatggatatatttataccttttcctacttaatcacatttctgatataygattgctctttcaatagattacctaagtgcctgaaaagataactactcttaaaattgagccaagatcattttatctctttttgcttgaaaaattccagac

SEQ ID NO: 328054 - DNA, 201 bp, Homo sapiens
accaccttgccttagctgccacgcctctctctgctttctacccgagagcccactcgccactctggcatgcacaaaactggacgtgcaagggagttggcatmgcatgtggcaactctcgacaattggagaggaagggaactggtgggtagagctctcctccatcccttggatagatagttctgaattgcattgtgtatgctc

SEQ ID NO: 328055 - DNA, 201 bp, Homo sapiens
gcctactatgatcaggtggaagttttctaattcagctcatgttgcagagaaaattcagagtatgatttttgaaaaggaaaaaataagctttgacgtgtttyggacctatgtatcaactaaaacaggtacatgcttaactccaccagcaacacgtctactgtgattcatattcttctttctgtgtttttctttgaagttact

SEQ ID NO: 328056 - DNA, 201 bp, Homo sapiens
catccaggtgtaactgacaccaccttgccttagctgccacgcctctctctgctttctacccgagagcccactcgccactctggcatgcacaaaactggacrtgcaagggagttggcatcgcatgtggcaactctcgacaattggagaggaagggaactggtgggtagagctctcctccatcccttggatagatagttctga

SEQ ID NO: 328057 - DNA, 201 bp, Homo sapiens
ggcaactgatttctacttctgttctcctatataggagaagtttggatgcttataggccctgggggagtcagtgttgttctagggctctgcagccagtcctwcagcctcatcttttgttctccatttattgatgacctcaggcagaccacttagttctagaaagctattttctcgtatttgaaatagagataaaagtatata

SEQ ID NO: 328058 - DNA, 201 bp, Homo sapiens
ttggtattttattactctaaatagtcagctttgtcagtcttctattgtaacgttaatgctggtcagctgtgcctgaattccaacgggaggaggaggagggwttaatgaagcatgtccaaccacccattcccatcatggcctgaactagtgttttgggtttactttagaatgcacttggcttggaggaggggtccatttggt

SEQ ID NO: 328059 - DNA, 201 bp, Homo sapiens
tggtttacattagtgatgtcactttgtctaatacataataattagaagttgagagtgatctgggacacatggggtgaaagtcctgaaccaacgcactttcrttagcagtggtgaatccatacggggttctgcagcaacctcaattcttgccttctcagaagaaagaattcaactgatgggcagaaggcagaaggagggacc

SEQ ID NO: 328060 - DNA, 201 bp, Homo sapiens
cctctgattcctcccacctaaatggttattttctgttgggcaggtctttatgggcattgctggaactaagcttccttgtcattcatcagatgggggagctstcctatatcatggccttgatctcttcaatattttattcttatttataaactctcttttagttcagactagtatagcagaatactgaagactgggtggctt

SEQ ID NO: 328061 - DNA, 201 bp, Homo sapiens
ctgcacctggcattgggtgtgtatttccaggggcagaccctttagatcaccaggctttggaatttgcagccagcactggtagggtcagcctgaagtaacayaggggactagacggctgactagatatagctgggagcacctcttgcactgaaggaaaccaaaatatcgagtaaatcatcacacttcgaatagatcttttga

SEQ ID NO: 328062 - DNA, 201 bp, Homo sapiens
gctcttcacctttaaggacacttccagaagttacccagaagaatcaattcatccattggttgaagacaatcccgtgtctatacctagctgagagacgctastgtgtttaattttttagcagggtaacaatttctaatgagaagaagacaatgtatattctgaggtagttaattgtctttgctacattctctgaacagtatt

SEQ ID NO: 328063 - DNA, 201 bp, Homo sapiens
ttccactggcctatgaattctatgatgaaaggaattttctcataatgttctttatgttatcatggtgacattaaaagaaaagaaaaagcccttgggcaatwtgtaaacaagttgacgactcctcctctacagtagcattgtttaaagcattaaccacttgccacacagagtgaacttcatgaatatcttttgtacatttaa

SEQ ID NO: 328064 - DNA, 201 bp, Homo sapiens
aaggctcccagtttaggcacactgaagctaaagttgaagccaggcgacatcaatacagagcccaccagctttaccaatgtactacactggcctgccatgayttcattacaagcattgggctgaaattagcataagcagtagtagggtagtcctttaaattttttttctggattctaaaagacagttattatcttacctgtg

SEQ ID NO: 328065 - DNA, 201 bp, Homo sapiens
gttatatctttacatggtttattctttttattatttaaatatctgctcaaatatcatcaccttagaaaaatcttccctgttcactgtaattaaattagtascatttccatcattcttttttcccattttattattacttaattgcactcaccagtatctgaaatgtatattatttatttatagtttattttgttaacatct

SEQ ID NO: 328066 - DNA, 201 bp, Homo sapiens
aaatgataaatgtttccagcattttaatgttcaaacaacccacttttctttcatgtatcatatcacatccgaatgtgccaactttatttagaaatatgtgrgcttcatttcttaggatcacttcaccaaactccaagaaccacttggaattatttttccctgaattggcatgagctacatataaattggcaatacatagtt

SEQ ID NO: 328067 - DNA, 201 bp, Homo sapiens
aaacagaccaacaaaacttagtatggtaactgtgaagagggagtaagaagtacactggaatgcaaacaagggagtaattagtattgtttaggagttcaggmaaggcaaatcatctttgtaaactaaatttaaagggcaagaaattgtcttcaaaggagaggggacttgggggaagaacaatccatggggataagacagtca

SEQ ID NO: 328068 - DNA, 201 bp, Homo sapiens
caaaattctgtcattcttgggctagattaagaaatagatgtgtcaaaacatctgatacactacaaacatatttctgttgaattttgcattttgaatcttayctattttctttcagtatataaagtgttcattcattactttattaatgaaacatatcaattgaacaacaattaaataataggtattttgcaaggtgatgtg

SEQ ID NO: 328069 - DNA, 201 bp, Homo sapiens
ttgatcccctagagtcaaaatttttaagacagcaggagtaatcctattaaaacattagtcatatcatggtattgctcttagattgcttcctgtctcattcrtagcaaaagccagattgcccacagtagcttatgaggcttacaagatctgctttccacacttcttccttcacctacctgtctagctctccaatcttatttt

SEQ ID NO: 328070 - DNA, 201 bp, Homo sapiens
gatgtggctgggttgttttcccttaaaattggcctccctgaatcactatctagatccatgattgtagtgaatgttcccttcctaagctcctgccagagttyggggccagggatgtagtcctcatttattattattcaacaatgactgtctaggattccattaataatgtcaaatagatatcccagtaccactgtccaagac

SEQ ID NO: 328071 - DNA, 201 bp, Homo sapiens
gagggattactttatcacattgcttattagacatatatactcccgagttttccaggggcattaaaatctgaatatatctaaaacttagcatatcatgaackctttcattttttacatgaatgtggatgtccccctaggcacagcataagctcccaagggcaaacaatgaattagaaaaaataaaataattgacaacacttc

SEQ ID NO: 328072 - DNA, 201 bp, Homo sapiens
ctttcctcagatgcctgtatatctaactccctcacctccttcaagccttgcctcaaacatctctttttcagcgagtcctaccttaaaaaacaccccatttraaaatgcagccttcactgtcaccatagccctactctattccagaatcctgatcccccttaccgtgctctatttttaactttttccatagcaacaatcaac

SEQ ID NO: 328073 - DNA, 201 bp, Homo sapiens
tgtaggctattccctgtacagcataggacccagaacaaactgtgatgtttcttaggtaaaattctaataaaatcaaatatgaggtttaatcaaaagtggaraataattttgaagtattccatagaagacagaattagttgcattagctttgctcttagggtggatgattcactgtataataacaatgaacacttctccatt

SEQ ID NO: 328074 - DNA, 201 bp, Homo sapiens
taaagggtacatgtgcaggtttgttacatgggtatattgcgtgatgctgaggtttggattacagatcagttatacacattctgttccctatgttatttctyctttcaagcatgaattaaataactcttttttttttttggaacacttattatgcaccaggcatgttgttaggcacggaggctacaatgatgaataaacagg

SEQ ID NO: 328075 - DNA, 201 bp, Homo sapiens
tcctgctgctcactctttgggtctgtgccacctttatgatctgtaacactcaccatgaaggtctgcagcctcactcctgaggccagcaaaaccatgaaccsaccagaagaaagaaactccgggcacatctgaacacctgaaggaacaaactccagaggcaccatctttaggaactgtaacactgaccgcaagggtccacgg

SEQ ID NO: 328076 - DNA, 201 bp, Homo sapiens
ctaagttttgatattttgcattgattctcacaatagaatagggaaaataaacatataaacaagtacaaaacaatgtgctgtgtgcagtaatgaattgtgartcacttagagaattatatagaggaggaaaatgaaggggaaagtgaggagttactctgagtcaagcacttttctttatgtgttcctcgggatatataaatc

SEQ ID NO: 328077 - DNA, 201 bp, Homo sapiens
gttttgatattttgcattgattctcacaatagaatagggaaaataaacatataaacaagtacaaaacaatgtgctgtgtgcagtaatgaattgtgaatcasttagagaattatatagaggaggaaaatgaaggggaaagtgaggagttactctgagtcaagcacttttctttatgtgttcctcgggatatataaatctaca

SEQ ID NO: 328078 - DNA, 201 bp, Homo sapiens
agctagttcactgaatggtgagcagtttacaaaatggcgaccctcagactatatctctggcttgcagatgtgtttgctcttcacattgttggcctgtgggkcagtcatgaggatgtgcttcacagactgccaactacagggagcataattcacctggaacccagctgctaagctctaaaatctgaaatctattcttgagtt

SEQ ID NO: 328079 - DNA, 201 bp, Homo sapiens
ctgaatggtgagcagtttacaaaatggcgaccctcagactatatctctggcttgcagatgtgtttgctcttcacattgttggcctgtggggcagtcatgargatgtgcttcacagactgccaactacagggagcataattcacctggaacccagctgctaagctctaaaatctgaaatctattcttgagtttgccccaatg

SEQ ID NO: 328080 - DNA, 201 bp, Homo sapiens
gtgacctagtgctgcatggctactcaggtggggccttttctctgatggactcagagaaaagcaatgaaggatacttccaacctatcttccttctttctgtyctcctctttgggatcggacttgcatggtgatctaatagctcttctagccttttctggatgcttccccattttccttcacaagcatttcccctaacaaaat

SEQ ID NO: 328081 - DNA, 201 bp, Homo sapiens
gacttggactagtacagcctaatatatatttacagatataaattcaataattttctaacatttaaaaattgatattttacttaaggaaatttgattcctgrcttctctggggtgtggggagggtaagacaatcatccagtaagaggaccccatttcagagaggcaataacccataaaagctgaatggcaggttatcgcttt

SEQ ID NO: 328082 - DNA, 201 bp, Homo sapiens
tgggattacttcaccctcctatatgtgttttctgccttcataggcattggagtttgagatttgttgtttttgagcacatccttgcatgagaaggaaggagwgaagtgagtcaggtgtggaagccagaaaaccaatgaggagaactaaagatgttctaaactagagagtgatggcagaagtcgagaggagctggatggattt

SEQ ID NO: 328083 - DNA, 201 bp, Homo sapiens
atataacttaaacacagaataaatttccaacaattatcataatatctaatatttattgcaagattgccatgtgccaagtattaatgataagagcttttacrtaaatttcatgtaataatcaccacaacctcatgatggaatacaattagtatcatgcttttttgcaaatgaggaagctctggatttaaaagactattacat

SEQ ID NO: 328084 - DNA, 201 bp, Homo sapiens
tgatggcagaagtcgagaggagctggatggatttgaggggtatttcaggggtagaatcaacaagatttgagttttaataaaatgtagggaccgatggggakgcaggagtcaaggatgactatcagatttcttgctatggtaataagaattgttgagcattcttgtttcttccttattttcaatacacaaaccagtctaaat

SEQ ID NO: 328085 - DNA, 201 bp, Homo sapiens
actctgtgtctagctcagggattgtaaatgcaccaatcagtaccctgtcaaaatggaccaatcagctctctgtaaaatggaccaatcagcaggatgtgggygggccagataagggaataaaagcagactgcccaagccaacagcgcaagccactcgggtctttgttctttcactgtttgcaataagtcttcctgctgctca

SEQ ID NO: 328086 - DNA, 201 bp, Homo sapiens
ggtccagctggagcgtaggcactatgggagtaaattttcttggccccaggataaatctgtgtcaccaacagagaacgcacatcacagggtcagctggcccytaaccaaccttcccacctctggttacgtgatggtaactatccagaatgaatttattgagaattttgcttcagaggaggttattcaccacagtaaggtctc

SEQ ID NO: 328087 - DNA, 201 bp, Homo sapiens
tatttctcaaactgaaaaaggcccaagcctaagtcttgatttacatctcccaaactgctttcctcatcctcaccacagtcttctcatctcatacacagcawccctgtccagctatgtgtcacgtcatctttgattcttctcttttccacctttcacgttccagccatcagtaagtccagtcatttctaccttcaaattatg

SEQ ID NO: 328088 - DNA, 201 bp, Homo sapiens
tggtgaattgaagggtgtgagacaatggatcttaaacatggcagtcttttcctaaaactgccagatagtgcttccagcaaagattatctcatctctgcaawctccaacctagtgattatcacatcaggtgcatgccaggaaaaaggtgaaacactttaatttagtcagtctaaatgtggccatcgttaaattaatgatgtc

SEQ ID NO: 328089 - DNA, 201 bp, Homo sapiens
ttgtgggaggtaagataggaaggatatgtgaaatacaaaatatttatgacacttgttaatgactgtaaggaagagtttattcaagagggttcactgcaatrgagattttgcagtggaggagagttattggtcttaactctgaatacagaaagcataagtgaagatgtatagccaaagagctgtggagtggggggtggcagt

SEQ ID NO: 328090 - DNA, 201 bp, Homo sapiens
gggtggagtgaaaaggccttgtgtcactgcattgtagttactcaagcaggagccagctgaccatctgcaggcatttagagggcttgggagaaagcattcckgcaaaggatggaatttttttatcaaatctcagaggatcctataaacaatctttgtttctgctcttgaaaatgttggaaatgaaatttgttctcactttga

SEQ ID NO: 328091 - DNA, 201 bp, Homo sapiens
aggttgaatgttaggaaacaggcaaagcattattttaactaactatatcgagattttcacagtatatctactaagtttaagaccaaaacagtgaatctcaratggtgggattataggattcccagtaaaccttatgaggaaagaatttcagaaacatcataagtgcttcataggattattcatttatacatctcaaaaatg

SEQ ID NO: 328092 - DNA, 201 bp, Homo sapiens
caataccagttagcgtcaggacttggagttatgggtacatattgagttatttgcatagaaagcttgactttctacagttaggtctttgagaaaaaattctrtaaagtaggagatcatcttatatatactgagctcctcaagaacagaggctatctaaataatctttgaatccatgggacatggcacagaacctattgtaaa

SEQ ID NO: 328093 - DNA, 201 bp, Homo sapiens
tccttatctacctactttcctcagagaggtttgtttctgatgctgatgctggaccctctataggtatcatctaacatatgctcactagtaacatcattacygcacctcaatatctggttttcctctctttcatgagcatgtagatgggacactacatttcctagctcctttgaagttaggcaggatcttatgttttgttct

SEQ ID NO: 328094 - DNA, 201 bp, Homo sapiens
ttatttaataaacaaaggaactaaagtacaaaattccaaagctaaatgatgacacaagccagagccaaatctaccaagccttcttgaaaatatacctatcyctggatttttcttcctttaggaacataaatgtgctaaggtattatctactcatcaataattaccaaaattatttatatttttatacacagcatatataca

SEQ ID NO: 328095 - DNA, 201 bp, Homo sapiens
tctagcagcagcagagggtttgcttaggagaggaggcgtgtaatgtaggacattgaactctagcattctcatctggactctactacaaatacactgagtgrccttggaaaataacttcattctctgtgcctcactttttccaccaatgatatgggaggactagacagaatccactctaacgttccctcatatcagagaagt

SEQ ID NO: 328096 - DNA, 201 bp, Homo sapiens
caacatatttacttaaaaatattcacatactgttaagggctataaaatgaaatgtaacccattctctcctcttcagcatttctcccctccccaccacaatrccatagccccttaaagcctctgttatcaattcactgtgtaaccttgcaggcattctctataagatcattcatccttttctttttttgaaacaaacaaact

SEQ ID NO: 328097 - DNA, 201 bp, Homo sapiens
gttttccttccactattacctcattattctattttgctttaccaaaaatctaagaaaattgtctattttcattagctcccccttattacctcatttttttwattttaacctgtttcatgttctcatccccacaatagtcataaatccatttatatcaaagtcattactggttccatcttgctaaattgaagcatcagttct

SEQ ID NO: 328098 - DNA, 201 bp, Homo sapiens
tgttttccttccactattacctcattattctattttgctttaccaaaaatctaagaaaattgtctattttcattagctcccccttattacctcattttttwtattttaacctgtttcatgttctcatccccacaatagtcataaatccatttatatcaaagtcattactggttccatcttgctaaattgaagcatcagttc

SEQ ID NO: 328099 - DNA, 201 bp, Homo sapiens
cataccaatctctggcatctttctgactataatcagctttccatttagaatttcctacagagagaatatgcaatgaacagtttcagtccgctcatcagtartatttctcactatatataacaaactatcatcgtgcttattaatgcacatgcctctcttctgctgaataacagtacttttttttttttttttgagacggag

SEQ ID NO: 328100 - DNA, 201 bp, Homo sapiens
attaaattttaaaataacataagtaaacaacaataaagatagtatgtaaacattttaaaaatggctgatgttagaccaatactaaggaaatgcatgttaartactttagtggacaaaatactttgtgcatcttaaagtcaaggcacttttaacttcatataaagatgcttaacataaaaatagctgacatatagaatacaa

SEQ ID NO: 328101 - DNA, 201 bp, Homo sapiens
aagatttgtcacatataaaatgacaaggagcagaaagtaaggtggatagggctgcagacagcagaaacagcatgttcaaaggtacaaatttatagagcacrttggggaaacagaaaataattttgtgaagatccaaagggatggtatggcaaaaatacaacttcatcaaaaatggccaccggatttaagagattattgtat

SEQ ID NO: 328102 - DNA, 201 bp, Homo sapiens
tggaaccctgtctctactaaaaatacaaaaattagctcggcgtggtggcacgtgcctgtaatcccagctattcgggaggcggaggcaggagaatcgcttcracctgggaagcggaggttgcagtgagccgagattgccattgcattccaatctggacgacaagagtgaaactctgtctcaaagaaaaaaaaaaaaaaaagt

SEQ ID NO: 328103 - DNA, 201 bp, Homo sapiens
ttgggaaaactggctagccatatacagaaaactgaaactggacccctttcttacacctgagatttatttattcatagatatgtgtccccagctatataggrctctttgagaaaaagattgtactttattcatttataggcccttaaggtttgacatgtagtaatactcaatacatttttgtggaaaagcattgtttacatt

SEQ ID NO: 328104 - DNA, 201 bp, Homo sapiens
tatcaaatatgcaaacaaaccaatcaaaatctttgtacaattaattttttacattaacttacttatgtctcaatagttattttgtttggtctatattcaayactgaaattacatagcttttcaggccaccagatattaattccttggattgaattttggctctgtttttaaaaataattatctctgatataaatagattat

SEQ ID NO: 328105 - DNA, 201 bp, Homo sapiens
acaggtctgcaccaccaggcttggctaatttttgtattttttgtagggatggagtttggccatgttgcccaggctggttgcaaattcctgggtgcaagcamtccacccacctccgcctcccaaagtgccgagattataggcatgatctatcgctcccagcttgtttattatttttttctattaaagcacgctgcagttgcc

SEQ ID NO: 328106 - DNA, 201 bp, Homo sapiens
ctaagaagctgggtcgcaggttcgtgcacaatgccaggaaggcgaaatcagagaaggtatggaatgagtggggttgaaaattacctttccggtttgccaastgcctgctctggaccattggtctgagtacagacgcagtctttatttgcttggagtgagaacctgcctctcactgtgaatgtggtccttgccactatgaaa

SEQ ID NO: 328107 - DNA, 201 bp, Homo sapiens
ctggagtgcagtggtgtgatcacggctcactgcagcctcaacctccccaggctcaggtgatcttcccacctcagcctccctactagctgcaactacaggtmtgcaccaccaggcttggctaatttttgtattttttgtagggatggagtttggccatgttgcccaggctggttgcaaattcctgggtgcaagcactccacc

SEQ ID NO: 328108 - DNA, 201 bp, Homo sapiens
atttacataatgtattcctataatatcaaagatcatatagttgcaaaacagtggggcatgtaaagtgctactaacgatatgttgccatggtttatcaacaratggaagaagatgtataaaataagattattattgaattttgtttagaaaatgaccagtatacttaattgtgaaagatcatattttagcatttggggagat

SEQ ID NO: 328109 - DNA, 201 bp, Homo sapiens
gtaaatacaccaatcagcactctgtgtctagctcagggattgtaaatgcaccaatcagtaccctgtcaaaatggaccaatcagctctctgtaaaatggacmaatcagcaggatgtgggtgggccagataagggaataaaagcagactgcccaagccaacagcgcaagccactcgggtctttgttctttcactgtttgcaat

SEQ ID NO: 328110 - DNA, 201 bp, Homo sapiens
taggaatgactattaagcagtttactcgagcattattacatgtattttacacataccatctcatttaattcttactacagccttctgaggtactcttattrgctgcatttccttctcttttttttttcttttcttttttttttttgagatggagtctccctctgttgccaggctggagtgaagtggcacgatctcggctca

SEQ ID NO: 328111 - DNA, 201 bp, Homo sapiens
ttcacctttcttaaaagagaccagtgtggcatgtatgtacatgtctgctagggggagggggatggtaagtgaaccatcaggtaaccatcaggaaactgatrgttattgcttgcaggaaattttttaaaacatcactatatatacgattgttataagaatccaatgcaataatgtatgtgaaaatagtatgaaaattaataa

SEQ ID NO: 328112 - DNA, 201 bp, Homo sapiens
ggacgtggtggcgtgtgcctgtagtcccagctactcgggaggctgaggcaggggaattgcttgaacctgggaggcggcaattgcagtgagctgagaccgcrccactgcactccagcccggcaacagagtgggactccatctcaaaaaaatataaataaataaaaaaatgaagagtagagggaaagtgagaggtgacagtgt

SEQ ID NO: 328113 - DNA, 201 bp, Homo sapiens
tttccccaagattcctgtaaaagttctttgtcatcttcgttgacttctgtcctttacccattttgtgaatcctcttattggcacaccacccaagaacagtmaggcagtgaaagactgtagacctggcttcaagactggttgggtgaccttgagcaaatgactgcacctctttgattattagtgctctcatgtattaaaaat

SEQ ID NO: 328114 - DNA, 201 bp, Homo sapiens
agacacttaaatttctttaaaatgtacctttacattataaattgctatggccttaatatttgtatcctcccaaaattcatctgttgaaagctaatccccartgtaatgatatcaggaggtggggcctttgagagatgattaggttttgaaggtggagtactcctgcatgtctctgtaaaagaagccctggcttatattagt

SEQ ID NO: 328115 - DNA, 201 bp, Homo sapiens
cctctgagtcacgtctagattcctgacctgctgaaattctgagataataagtatatgttgtcttaaactgattaatttgtggtaaattgtcatgtaacaamaagaaactaatatagacatataaattctggaccctaaaattcccttaaactgggctgcagagtagcttgctgttgcaggtctccggtaatactgtcacac

SEQ ID NO: 328116 - DNA, 201 bp, Homo sapiens
gaaacactgatcaggcctcatgattggacttgggactttctaatacctaaaggcaagaggccaaagcacaatcaatcaaaagcaagaggtggacccacgcyagtaaaagggaggaatctagtccctcgggtggagggacagcagagatggagactgagacctgttttccctctactggctggagatgtgaatctgagctgg

SEQ ID NO: 328117 - DNA, 201 bp, Homo sapiens
aatgatttttatttcttcacttgtatttgaattataaaaatgccctctgtgtagtttgaagtcctagaattgccagggaccaatattgatatgtcatcatkgggaagagctatcacatgacagcctccacttggcaatgcagcaatgacattttacacaagagtgcgtttattaaaggcatccacagcacaaaagcaccat

SEQ ID NO: 328118 - DNA, 201 bp, Homo sapiens
aagtccaaaatcagactcactgagataaacttggaatgttgacaggggaaccccagagactatatgggataatttgtttcttttccttttcccaacttcaraaggccatctgaatcacttggctcataacccttttctccatccaacctttacttccatcatcctatctcttcattgactatgactctactaactcttctt

SEQ ID NO: 328119 - DNA, 201 bp, Homo sapiens
ataaagtaacatattcacaggttccaggcattgggacataaatttcttgaggtgaggggcattattcagcctaccacaaatttgaatatatatttattcarataagatatgcaaatggccaatgagcacataaaaagatgtccagcatcattattcattggtgaacagcaaatcaaaagtacagggagataccactttata

SEQ ID NO: 328120 - DNA, 201 bp, Homo sapiens
tattcacaggttccaggcattgggacataaatttcttgaggtgaggggcattattcagcctaccacaaatttgaatatatatttattcaaataagatatgyaaatggccaatgagcacataaaaagatgtccagcatcattattcattggtgaacagcaaatcaaaagtacagggagataccactttatacccacaagaat

SEQ ID NO: 328121 - DNA, 201 bp, Homo sapiens
ccatcctggccaacatgggtgaaaccccgtctctactagaataaaaaaaaattagctggacgtggtggcgtgtgcctgtagtcccagctactcgggaggcygaggcaggggaattgcttgaacctgggaggcggcaattgcagtgagctgagaccgcaccactgcactccagcccggcaacagagtgggactccatctcaa

SEQ ID NO: 328122 - DNA, 201 bp, Homo sapiens
gttatcaattcactgtgtaaccttgcaggcattctctataagatcattcatccttttctttttttgaaacaaacaaactagatacacatatagttctacarcttgcttttctttaatttagcaatagataatgacttttttttagtttcaaaatattagacatgtatgctgttgcttttaatgactgcatagtattccatt

SEQ ID NO: 328123 - DNA, 201 bp, Homo sapiens
atggccaatgagcacataaaaagatgtccagcatcattattcattggtgaacagcaaatcaaaagtacagggagataccactttatacccacaagaatggytataataaaaaagatggacagtataagtgttggcaaggatgtagagaatcagaaccctcagcatgcctggtgggattgtaaaatggtgcagctactttag

SEQ ID NO: 328124 - DNA, 201 bp, Homo sapiens
ctttgggaggctgaggcaggtggatcacgaggtcaagagattgagaccatcctggccaacatgggtgaaaccccgtctctactagaataaaaaaaaattasctggacgtggtggcgtgtgcctgtagtcccagctactcgggaggctgaggcaggggaattgcttgaacctgggaggcggcaattgcagtgagctgagacc

SEQ ID NO: 328125 - DNA, 201 bp, Homo sapiens
tctagttcattcttcccttaaactggaaagtgaaataactaagtggatactttttaaaaaacaaatatatttcaatactgtgtttatctctaggcactacrgtaggcacacattaaaagatagtacagtgaaccatagggtaagcatccatattgccatatttgatctcacaatcacttatctgagtctctaatgagatat

SEQ ID NO: 328126 - DNA, 201 bp, Homo sapiens
caaaaaatacaaaaattagccaggtgtggtggtgcatgcctgtagcctcagctacttgggaggctaaggtgggaggatcgcttgagcccaggaggttaagkctgcagtgagccatgattgcactactacactccagtcagggtggcagagcaacaccttgtctcaaaaaaaaaaaaaaagaaagaaagaaaaagaaaaaac

SEQ ID NO: 328127 - DNA, 201 bp, Homo sapiens
tattgccatatttgatctcacaatcacttatctgagtctctaatgagatattacattatatcaagatgctggaaataacacccataagagataacaaaaartagaatttagaaactagggaaggagaattccctgacacaggaggtatgcaagcacaagcaaatggtcacttggtgagaatgatatgaagggatgcggaag

SEQ ID NO: 328128 - DNA, 201 bp, Homo sapiens
cagaaagctcacaacttcttcatattgttgttcatttaaagatacaatttatttaaagtttttgaattcattcaccaagttcttgaatctgttaaagaagrtctttgatttgttcttaaatctaaccaagtagagagtaccatttgtttggggctccatgtctgtatggtgtaagtaatctttaaacaagcaaatatcaca

SEQ ID NO: 328129 - DNA, 201 bp, Homo sapiens
tgatatgaagggatgcggaagggagtgggatcactccctggaaaagtgaaaaatgtgttcaaatattaggatcatatagaagaagaaatgatattgttttrtgagccatcagagggcagaactgaagccaagaggtggaaagaaagattcaacacaaagaactgttttggtttttttcatttgtttgttttaatcactgga

SEQ ID NO: 328130 - DNA, 201 bp, Homo sapiens
gcatccaggtgaaaaagttcaaactgaagcaaaaaaaaaaaaaaaaaaaaaaaaacccattagtaaatatatgaggctgtgtcacacttggtattttaaartgtcatatcaatgatgtaaactgtgaatacttgaaaatgttatttgttcaaggtttactgataaaaactcaaacctcagggatagaaataagaatcaaag

SEQ ID NO: 328131 - DNA, 201 bp, Homo sapiens
tcccaattcacgtaaaagaaaatattagctgatattttctttaaaagttgaacattcttcttgataataggatctgacatgataagaaaattttcttaaaatgctgtacaggtgacttaaactgggcagccagctagaaggaaacttttgatagaaaatggcctggaggaaacaaagaaactttgctacttagcactttac

SEQ ID NO: 328132 - DNA, 201 bp, Homo sapiens
atgaggctgtgtcacacttggtattttaaaatgtcatatcaatgatgtaaactgtgaatacttgaaaatgttatttgttcaaggtttactgataaaaactsaaacctcagggatagaaataagaatcaaagtgatcttgaaaagtttgaaagactggagaagaacatgtttgctaaaaccagggaagaaatcaacaggaac

SEQ ID NO: 328133 - DNA, 201 bp, Homo sapiens
gccctgataggtaggtaggtaggtaggtatactcattttatagaaaaggaagctaaggttcaaagaagttaagtgacttccccaggttacctaggaaaccyaggtagacttgagatttaacccgttttgtctaactgcaaatcctttgttccttcccatttttccatgcagttttcttaatgcactgaaaaaaaattcaga

SEQ ID NO: 328134 - DNA, 201 bp, Homo sapiens
tttgttaaatagattggtgaagagaaaatataatctaaaacttaagagccaaaaaagaaaaggaaattaaataagacttcactaaatgtttaaaaattcastctatctatgatatgaaataatgtacgaaagaaaagttaaaatacaacagtacaaataacaaactaagaatatttgtaatagttacctaagaaggaacaa

SEQ ID NO: 328135 - DNA, 201 bp, Homo sapiens
taactattacaagagtgtgaggaagttgaaaatcgtatattatttgttggcatataaattaatactacacttttagaggcagtctggcgatacctatcaawatttgacattcatatcctttactcaacaacttactgttagatgatatttattacctcattgtttataataacaaaataatgaagctacctagctgtctat

SEQ ID NO: 328136 - DNA, 201 bp, Homo sapiens
ttaattgtatgtcttttcattgtgccttacttatgatatatggatatgatgtgggtatattaattttatttttcatatcagtacactatctgggcaattcrattatggcctgtttttgttttcttatttattagttcctatatgtttaatgaataaataatcattttgaaaatgtgcaatagcaaattaaaaaaaaacaag

SEQ ID NO: 328137 - DNA, 201 bp, Homo sapiens
gatttacctcccataccctacacacacacacacgcatgctcacaagcatgctcccaactctagccctggtcctggtggtgtcagagagaatgtaccttccyggggtcttgcagaagctgccttcatttccccactagaaatgatcttcccaggtagtagcaatttgtttacctgaaattttgaagggagtggtaaccagca

SEQ ID NO: 328138 - DNA, 201 bp, Homo sapiens
ccatccagaataccacttgctaccctttttaagccacccaaagcaaatcagctgtgctatgccattgaaaaacaagtacttcttaaaatattggactaatyagataggattctagaacttaatcttttgctggaagtatcagtctgtggttctaaggatctagcacagaacccaaacagaaagttgcataaatatttgtta

SEQ ID NO: 328139 - DNA, 201 bp, Homo sapiens
ttcttttttctcccactcagttgactaaattcagttgttttgacattatgtaggcagagccagagagtaagcaaaactcctccaaatgtttcttttcatcracagatactgcaattgcctttccctgctagtagattccagaaagtaggcactgccaatctcctgagtgttaaacatcaatttccctatgcaaggctgtat

SEQ ID NO: 328140 - DNA, 201 bp, Homo sapiens
tgtcattctctgcctctgattttgacctgtagtaggactattttgaacaactttgtaatcacatgctccacaatatcagcatggatgggcaagcacatttytgccctaatatagcaaccttgagtttcactgtcactgagcagtacttttggaaggtgactctgatttaagcagttgatcttaccagagatactaggatta

SEQ ID NO: 328141 - DNA, 201 bp, Homo sapiens
attttctgctcttaattaggagcaaaatgggtagccttttgtcagcaggaggctcaggacacaggctaattgcgatgaatataatgggattacctcacacytgagatggtactcgcactaaaggggcacagagccttccctgcaaatctgcactggtctgggggtggggatcttatagagggatgttttgaagatataatt

SEQ ID NO: 328142 - DNA, 201 bp, Homo sapiens
gagacatggttacaatgcttgccctgataaggtggtaggaagaaaaaaatacttagaatgagatcctttcctccctagtcactaactaagtaatggagaarcaatcagtttacataaagcttattgtctttatctttaaaatggaacaaagatttttaacttgttgtaagtattaagtgtggtacatgtagaaagtattgt

SEQ ID NO: 328143 - DNA, 201 bp, Homo sapiens
agagcaggagatgagacttgagcagtaaacagtggccagatcattgaaggcctttgtaaatggtgagtcatcggaggattttaaactttagagtgatgtgrtcagattagcagcaggatcgttctgtcagcagtgtggaggatgaatggaaggaaggtgagactgtagatgcaagatgagcaagggccttgctgtagacat

SEQ ID NO: 328144 - DNA, 201 bp, Homo sapiens
gatttctcctatctgtgagctgcccatctttgaaaactgactgacagtctccttttccctctctcaccttccacctcttctctttctctctgtccctgtcmatttcattgagggtttaccaagttcaaagtatgaatgaataaggaatgtactctggaaggatattgaaaaacagggaaattgataatcacaatacaacgg

SEQ ID NO: 328145 - DNA, 201 bp, Homo sapiens
tgtttttagcagtcttgccttagaaacatttccattgataatctaaatagatgcaggaaaggcctttgacaaaattcaacaacccttcatgctaaaaactstcaataaattaggtattgatgggacatacctcaaaataataagagatatctatgacaaacccacagccaatatcatactgaatgggcaaaaactggaagc

SEQ ID NO: 328146 - DNA, 201 bp, Homo sapiens
atttcattgatttaataatgatctacatacaaataattttattttggtgttggttttatgttaagcacttgttttctttatttcctcatccaacatgtatwcattgttggtccagttgtgtcaggagttctatgtcctagaattataaatgcaaatatagcaggcatgatccttgcacttacagagcttaataatctaatg

SEQ ID NO: 328147 - DNA, 201 bp, Homo sapiens
gaattgccagaacctgggatgtggaggttgcagtgagctgagattttgccactgtactccagcctgggcaacagaataagactgtctcaaaaaaaaaaaaattcttgtgaaattattatgacttttggcttatattattttaaaattaatatgactttggagtttaggattctcttcatgttttaccactaactggctttt

SEQ ID NO: 328148 - DNA, 201 bp, Homo sapiens
cctctgcaggtgatctgatgaatccattacagtcatcttgtcacaatcatatttgtttttcgaatattgttatatgttgccaaagcgctgtatatcaactkgttaaaagaattgtagcaaaagtacaaggaagcctttcagaactaagctgctttaaataacagtatcacttagattcccacagtccaatctgtccttaga

SEQ ID NO: 328149 - DNA, 201 bp, Homo sapiens
caggaaataatttgtccaagatcactcaactagtaaataagtggcagagctggaatgcaatccaagtctttctctcatgatccaaagagaatacccactawgcctacacagccttgggcattgatcttctatcccccagtttcttccttagtatctgggttccatatcccattaaaaaaaaggattccaaaatagatcctt

SEQ ID NO: 328150 - DNA, 201 bp, Homo sapiens
acaatcatatttgtttttcgaatattgttatatgttgccaaagcgctgtatatcaacttgttaaaagaattgtagcaaaagtacaaggaagcctttcagawctaagctgctttaaataacagtatcacttagattcccacagtccaatctgtccttagacagaatccactattataaaaataaagcattatgaagaaagag

SEQ ID NO: 328151 - DNA, 201 bp, Homo sapiens
cacacacacacacacacagtgtaaaattttgtcctaggcatgctgatttcagacttttatttttttcctctcaaaaagattctttcttgatgaattgcatrattaagaaggggacctgaatgaatattattggcagctaccccaggactcagacttgtctcttacctttaagaggggaagagaacaagcagcggttgagta

SEQ ID NO: 328152 - DNA, 201 bp, Homo sapiens
caatggtaatcttaaatattttcaagaattggtttttctgagcagtttataaattgtgtcattatttagaaaggtctaataatgtggtaagctttgcacargcatcaagccacttcaaattagcttaacaattaaatgaccaaatcataaagatgttagagctactgtcacagaaaatcaaagctgggcagtagttaaatt

SEQ ID NO: 328153 - DNA, 201 bp, Homo sapiens
ctttaccctgttcatagaactgaaataatattcatttggggctgtgacttgtagcaatgtatggaaataaagacaagagtatgcctctttgattttttttraaactctttaaagagattaaaaaaattttactgctttagatgatttagagatctaaatgggagtgttagattcgcgaatttgtaccagtttaagtgtgga

SEQ ID NO: 328154 - DNA, 201 bp, Homo sapiens
ttagaatataaactttttagaattctcaaatttctacaccaggaaattccagcacagcgacagcagtccccagcccccagtttatgcatttcgttttctakccccagctccttcttacctcatgagagccctgagtgcatgcctacaatactacaacttgtacacctaaactccacctactttttcttcaaatagttgccc

SEQ ID NO: 328155 - DNA, 201 bp, Homo sapiens
ctaaactccacctactttttcttcaaatagttgccctttggtcacttttgagcctagggttattcataaagctggcactgtcaacccttagaggtatgaastgtggagaaaggttcacatatctactggagtgaactgcggccctctggtcaaggaattcctgattatgtctgttggggtgaatgagagtaaagcctctct

SEQ ID NO: 328156 - DNA, 201 bp, Homo sapiens
atctctaagtctccttaatataccaccattctatatgtcttctatcccatgttattcatttactattctattttctataacatctagcatgtctctcaccmacagcagacacttagaactaatgatagctaccattcattaaatttttttccagaagcctatggaggtgtaaagaggttcagttatttacaggtgtctgag

SEQ ID NO: 328157 - DNA, 201 bp, Homo sapiens
gatttcattgatttaataatgatctacatacaaataattttattttggtgttggttttatgttaagcacttgttttctttatttcctcatccaacatgtayacattgttggtccagttgtgtcaggagttctatgtcctagaattataaatgcaaatatagcaggcatgatccttgcacttacagagcttaataatctaat

SEQ ID NO: 328158 - DNA, 201 bp, Homo sapiens
aataaacttttagctagaggccatttagtatgcttcaattttttaaaataaaattaagaaaaattgattttccttttataaaatatatttccctaaagctrttgcttcttttgagaattactataagaaacaaaattccaataagtataagctctaactttgttactcctatattttgtggtgaaagtattatggtattat

SEQ ID NO: 328159 - DNA, 201 bp, Homo sapiens
aatagcaaattaaaaaaaaacaagtaatgcatataccctttcaccaagaagtctttccagggaacttatccttcagaaacacttttataagtgttcatagyagcagaaaaactggaaacaaccttaacaacatcaagagggatctcactgaaaagtgctgggacatccataacatggaatactgggctttcattaaaaagg

SEQ ID NO: 328160 - DNA, 201 bp, Homo sapiens
caaagtagaacaaataactcactaaatattattttacttttcagtgatgctataccattttagaaaatacttgatttagtgcaaaatttagatgtgactcyttgaatacgggctaccgatagactatcctttttgtttctaaaatatttttggcaaggaatgcaccaaaatttctaaaggaaattctagaaagaatattaa

SEQ ID NO: 328161 - DNA, 201 bp, Homo sapiens
cctggtaaatataacattgtaatagtatttatttccttgtgcttccccacaacaaaaataaacttttagctagaggccatttagtatgcttcaattttttwaaataaaattaagaaaaattgattttccttttataaaatatatttccctaaagctgttgcttcttttgagaattactataagaaacaaaattccaataag

SEQ ID NO: 328162 - DNA, 201 bp, Homo sapiens
taatgcatataccctttcaccaagaagtctttccagggaacttatccttcagaaacacttttataagtgttcatagtagcagaaaaactggaaacaacctyaacaacatcaagagggatctcactgaaaagtgctgggacatccataacatggaatactgggctttcattaaaaaggtagaatgatatgagctgatatgat

SEQ ID NO: 328163 - DNA, 201 bp, Homo sapiens
aactcactaaatattattttacttttcagtgatgctataccattttagaaaatacttgatttagtgcaaaatttagatgtgactctttgaatacgggctamcgatagactatcctttttgtttctaaaatatttttggcaaggaatgcaccaaaatttctaaaggaaattctagaaagaatattaaaattaatctgcggat

SEQ ID NO: 328164 - DNA, 201 bp, Homo sapiens
aatggaatggagatctacaacatatcttctaacaacacttttttctaaattatttcttaggttgtgctaattttattggttgtgagaagttgagcttttcygttgccttcgtttcatctgttgccttcattttcatcttatagtttgcctattataataaatggccttacattaaaaaattgtaaagaaatgtttaccacc

SEQ ID NO: 328165 - DNA, 201 bp, Homo sapiens
cacaaagtttatctactggtaaagagagcaaattaattttaaatagctatgaccctctagccaaaatctatttcaagtttctgggaggaagggaagttgastgccctagtttggcctgacatactttcctctctattttgagaatttgaatgtaaactaccccacctcccctacaaacaccaccattaaaaaaaaaaaaaa

SEQ ID NO: 328166 - DNA, 201 bp, Homo sapiens
aatagatctggaattttatactttaagggggctttagattcatatagcctaacagtctcttccctccgagggaggagaaaattgagtctcaggtagtatgmcagtcagcaagagagtggcacagccagatcaggcctagctcagtggactccccaatgttaccatgtaatcaatgctttctgtaaggagttcaccacacta

SEQ ID NO: 328167 - DNA, 201 bp, Homo sapiens
gtatgtaaacacctggtgtgcccattatgacagtttgcacacctctccactcgagtgagctcctagacagcactaggagctgtgatagacccttctgtcaytcattttatatcttgtgttaatccatgcaatatgaatttgactatggtttattaatgagttattgaatgggtctgctcttaatttaaatgcaatataatg

SEQ ID NO: 328168 - DNA, 201 bp, Homo sapiens
cccaatgattggtcatggctcagtggttttagcagggataggtcaaactgcaggagatctaagaagttcatgtgccattcagctctactttgtctacccckcccatctaaataccaatatcaagcaaattcataagtcttgctagaactcctcagctagtgagacaatgaacctattcgggcttcattgcctttagttatg

SEQ ID NO: 328169 - DNA, 201 bp, Homo sapiens
ctcacagatgcctctatgaaccaagggaaagtcattaaggcttcactataaaatttgaaaatttgaatagcttaccacactttaatgcagaaactcatgtraataatctgtttcactccttttaaattgtgaggctaattcagaaggaaaactattcttttcagcaataagtgaaactctgatgttatttggggtaaccac

SEQ ID NO: 328170 - DNA, 201 bp, Homo sapiens
gtaaataatctgtttcactccttttaaattgtgaggctaattcagaaggaaaactattcttttcagcaataagtgaaactctgatgttatttggggtaacmactgtcacagagcttaaaccacagttggacaccacggtgcatttctctatggggtcaaagatataatgaaagcttgacatgaatatgcaatttatccctt

SEQ ID NO: 328171 - DNA, 201 bp, Homo sapiens
cttgatcagaaattgcatcagaatcatcagagaacatttaagtaagctttcagaacagaaagtaccgtacacgacttggactggacaagaccagttttctrgtgcaaattccaacttaggtgagatagaagcataagtttcattacttgaaagttttgtcgctaacattacatcttttctttgcatttttaatacataagg

SEQ ID NO: 328172 - DNA, 201 bp, Homo sapiens
ctttcattccgtaataaagtatatttatctttgacagtttcatcttgtgattttatattatttgaggggtatgttgacatttagtgacataaatcagtcaytcattaatactggaaaaagccaaataaatccttgtgctagagacattttgacaacaaggagacctcttagattcacatctatcattagcaacacccagat

SEQ ID NO: 328173 - DNA, 201 bp, Homo sapiens
tcttgagcacctatcctgcctctactccccttagagctgaaacaggaaatataatctgtttacaaagtttctttattattattattattattattattatwatacttcaagttctagggtacatgtgcacaacatgcaggtttgttacatatgtatacatgtgccatgttggtgtgctacacccattaactcgtcatttac

SEQ ID NO: 328174 - DNA, 201 bp, Homo sapiens
tttaaaaagtcatctaaaagaaagaaaaaaataaacacaaaacagtttgggcaaattaagagcaaaaataaggtagctagaaagccaaatatgtagcttcytgtattaaacattattgaaactactgctacacaaaactagatagctgcatctcacaatgtaatggtaagagaaataggcaagtcacattttgtgtgattc

SEQ ID NO: 328175 - DNA, 201 bp, Homo sapiens
gggcaaattaagagcaaaaataaggtagctagaaagccaaatatgtagcttcctgtattaaacattattgaaactactgctacacaaaactagatagctgmatctcacaatgtaatggtaagagaaataggcaagtcacattttgtgtgattctgtttctatatagttcaaaataggtaaactgtactatattgtcaaaga

SEQ ID NO: 328176 - DNA, 201 bp, Homo sapiens
gcaagtcacattttgtgtgattctgtttctatatagttcaaaataggtaaactgtactatattgtcaaagaatgaaggatggcaaaatctataaagaaaarcaagaacataactattacaaaagttagagtagtgcttagctgtagacagacagaaaggatttagagtgatacttcataactactttttaaactgcacata

SEQ ID NO: 328177 - DNA, 201 bp, Homo sapiens
ttttaccagggactagtaatttggtgctgagcgaataactgttcctgggctttagaagctcatagtctatcataaaaaaaaaatatatatatatatatatrtgtgtgtgtgtttatatacacatatatatgtttatatacacatatatatgtgtgtttatatacacatatatatgtgtgtttatatacacatatatatgtg

SEQ ID NO: 328178 - DNA, 201 bp, Homo sapiens
aataggtaaactgtactatattgtcaaagaatgaaggatggcaaaatctataaagaaaaacaagaacataactattacaaaagttagagtagtgcttagcygtagacagacagaaaggatttagagtgatacttcataactactttttaaactgcacatattttatatactcttctatatatgttttatatacatatatct

SEQ ID NO: 328179 - DNA, 201 bp, Homo sapiens
tctatatatgttttatatacatatatcttctaataagaatgtttccaaaagataagtttatatataaataaatgataccatatgcatctttgctatacaartttttcttcatgttttgtgttatttctttaaagtaaatgctcagaatggagatcaatggtgaaagatatttatatatttagcctccttaactacagtgat

SEQ ID NO: 328180 - DNA, 201 bp, Homo sapiens
aaaagcttgagaaacagaaatggttttagcttctcaggcataacttacataacttaagtgaatgtcattctttttttttttttttttttttttttttttttctgagatggagtctcactctgtcacccaggctggagtgcagtggtgtgatgttggctcattgcaactccgcctcctgggttcaagtgattcttatgtctc

SEQ ID NO: 328181 - DNA, 201 bp, Homo sapiens
tttccctccctacaattggctttggagagtatgtgcatggtctttgacaaggcaacaaggttccagtcatagatattagccagcccttctcataacattgrcacttcatcagaatgtagaagtagaaaaatctgaagaactgtttttgtagctttatttactttcaggtaatccatatcccgtggtcttctgagtaaacct

SEQ ID NO: 328182 - DNA, 201 bp, Homo sapiens
gaaaaaaatctatttgacctcgatgtgagaaacattctctcatgagtgatccaaggttcgtgacattggatttgcaaagaaaaaaatgcatcaacatattrcctgacctggcactaacagtatttacaaaacaattataatatgatggccatttattgattttcaacttttagcaatattgtgtaacaaaatgtagaaaat

SEQ ID NO: 328183 - DNA, 201 bp, Homo sapiens
ttttcctcattgtactccattttcctcttgggaatcacctgtctcccactgatggtaattttgatatgactgtaaatccagacaggtgtccccatgctccrgaagctgaaggaatcccagaggctgaaacctatgccttcaggcagatgcttcccccttacaggaggcagatagacaatctaagttcagttggaatttaat

SEQ ID NO: 328184 - DNA, 201 bp, Homo sapiens
caaccatccatccattgtcctaaaattagaactgaccatctttgcacctgcagtattcaatatttccagaacctggtagaccaaaacatatttgaatagaygaataaataaacaaataaggaaattttattagttaatgggcttcattgcatagcttactactctttggtgaaacttttctgctagtgaaatagagaaatc

SEQ ID NO: 328185 - DNA, 201 bp, Homo sapiens
gatcctgggttctcttttattagctgtgttaagaagtaggccagatacctcatatgtatgacctcacaacatctctatggggtagatactgcatctacccrtagcccataacgtaattttatacattaaaaaactgaagcttgtagagttgaataaacttacccatgttcacatagaatgtgcacatataaaacacataat

SEQ ID NO: 328186 - DNA, 201 bp, Homo sapiens
aaattgtaaatatttttggctttgtaggccagacagtctcggatactactattcaagtctgctgatgtagcagaaaagcaattatcagcaataaatagacmaatgacctggccatgttccaataaatctttatttgcaaaaacaggaagtgagaaggatttggcctacaagttgcaatttgctaacacttgctctatacca

SEQ ID NO: 328187 - DNA, 201 bp, Homo sapiens
aatgtgttcaacaaccaaagaaggcatattctgcttacaaagtatgtatgataatctaagataaatgtgtgtaacataatggaaaagcaaatgtataaatracaaagcagaggtagagatgttgttttaggtagcaaggatctagcctcaataacaatcagtattaaaatatggccagctaacactgtaattaaaaaaaaa

SEQ ID NO: 328188 - DNA, 201 bp, Homo sapiens
acccaagattcttgaaagctgcttaagcagtaagacgttagcatcaaccatccatccattgtcctaaaattagaactgaccatctttgcacctgcagtatycaatatttccagaacctggtagaccaaaacatatttgaatagatgaataaataaacaaataaggaaattttattagttaatgggcttcattgcatagctt

SEQ ID NO: 328189 - DNA, 201 bp, Homo sapiens
atgggtattcttgctttggagacagctttttaaagacagagtttctcgaggtagtaactttaaatttgggtattgaatataagtctaccagctggagaaaytgggcaatagtccattaaaatctgagactcaagcacatttgtagagacaggaaattataaaatacatattgtatttaggggttaatacacagttctctgt

SEQ ID NO: 328190 - DNA, 201 bp, Homo sapiens
atgaaaattttctgaaaaaattttcctcacagacgaagattttagatgactctgatgctcagtttgtgtaggagaagatgtttaattctttttaattgccmattttcatagtaaatggttgccactctagctacctcctgtgctgaaatgagttgttttttttttaattttccattaggtttttggcttttataatgtgaa

SEQ ID NO: 328191 - DNA, 201 bp, Homo sapiens
ctttgcttattggttttcatactttttcttccttttctaatgtaaatacttaaggctataagttttcttctttcaatcattttagcagcattccacatatkgtaatattcagtattattgctgtttagttttcttctttaactcctgtgttatttagaaatggacttttaaaatttaaaaatatatatgttttcaaagcta

SEQ ID NO: 328192 - DNA, 201 bp, Homo sapiens
aatgggatccatactttataaattgtttaagtaagaacaaataagtgaaatgactggctgatattgcacatagtatgtcctttaaaagtttaaatttccawtctgttcacatttgaacaaatacttgagcacatctttgatccactcaatagcaagaactttcacatctatggtaggttacaatgtacacatctccacaca

SEQ ID NO: 328193 - DNA, 201 bp, Homo sapiens
gctattgtaaatagtgttgtagtgaacacacacttgcatgtatctttataatagaatgatttatattccttgggtatatacccagtaattggattgctggrccaaatggtatttctgcctctaggtctttgagggctcatcacacattcacagtgattaaactaatttacactcccaccaatagtgtaaaagtgtaccttt

SEQ ID NO: 328194 - DNA, 201 bp, Homo sapiens
ggaaaaagaaaaaaaaagagtaaatttaaacccaaccctattttgtggggagagtatagctccaagtcaaaaaaaaaaaaaattgatatgaaactgctctkgggctagtgaaatctctggacaactagaagagggatgtgcaaaattattctgtagcaacagttgcacaactgaaggtcgcagggactcccacagaaacta

SEQ ID NO: 328195 - DNA, 201 bp, Homo sapiens
tgcacatagtatgtcctttaaaagtttaaatttccaatctgttcacatttgaacaaatacttgagcacatctttgatccactcaatagcaagaactttcasatctatggtaggttacaatgtacacatctccacacatcagctatgggtactctcctgcacagtactatacagtacagttactgctctcactgactctgga

SEQ ID NO: 328196 - DNA, 201 bp, Homo sapiens
ctttttctttctgtctttatgtatgctgagccacttatctggaattctaaataaacttctagagtatacttactctctctccaattcacttttttttttttgactacttaactttctagactaagcattatcacttgtgcaagacctttatctggctacttcctttaagtcaaacagggctatatgtgtcttctatggact

SEQ ID NO: 328197 - DNA, 201 bp, Homo sapiens
acatatttcaagtgcaatctgatagatcttgacatatatctacacctgtaaaatcatcaccacaaacaagagaatgaatacatccatcatcccctaaagtycccttttgctcttgtgtaaagccttccttctctcatcctatcattgatcaaccacttataagctttctgtcactataaatttgtttgcatcttccagtac

SEQ ID NO: 328198 - DNA, 201 bp, Homo sapiens
ttgatgaagaactgagactcaaatccaggcctcctgactgctagtcctaaagctgcctacttgatccacatattcaggaatgaacatctgatttaggctaygattttctcacaccagcaattgacaattaaggatcccactgtatacaaaaggaaaaaaatagagtttgaatagatatatatagcctccagaatttttttt

SEQ ID NO: 328199 - DNA, 201 bp, Homo sapiens
tacttttcatataatattatcattgtagtcatcattttgaattgatatacacaacatacatgaaactattcatcacattagatgtatgtggtcctaagagrgaaaagctcaaattttgaaataggaggacctgaaatcaaatccaatctctgctcaaattgctgacagctttaagcagaggacttaatcacttggaagtct

SEQ ID NO: 328200 - DNA, 201 bp, Homo sapiens
ccctacatgttaaaaactctcaataaactgggtattgaaggaacatacctcaaaataataagagccatatgtgacaaacccacaaccaatatcatactgartgagcaaaagctggaagcattcctattgaaaacaggcacaagacaaggatgccctctctcagcacttctattcaacatggtattagaagttctgccaggg

SEQ ID NO: 328201 - DNA, 201 bp, Homo sapiens
agtcatcattttgaattgatatacacaacatacatgaaactattcatcacattagatgtatgtggtcctaagagggaaaagctcaaattttgaaataggargacctgaaatcaaatccaatctctgctcaaattgctgacagctttaagcagaggacttaatcacttggaagtcttctcatttctataatgtagataataa

SEQ ID NO: 328202 - DNA, 201 bp, Homo sapiens
aaaaaaaaaagcccagaaccagacatataaacagctaaattctaccagaggtccaaggaagagctgatacgatttctactgaaactgttccaaaaaactgraaaggagggactcctccctaactcattctatgaggccagcatcatcctgataccaaaatgtggcagagatacaacaacaaaaaagaaaatatcagggcac

SEQ ID NO: 328203 - DNA, 201 bp, Homo sapiens
atttgctaaggaaagatcccctgaacaaaacgggacactgtttggaaggaggaagtggggaatgcaagttgagtaagcaaaccaaccatgttcactgtacsctggccactgtgtagtgaatggattgaaaggtaacaagagagaatccaagaaggctaggtcggcgtttgtggaggtggttcacctgagagatgatgttga

SEQ ID NO: 328204 - DNA, 201 bp, Homo sapiens
aatattaacagtcatctatgtttttctataaatttttaatcttactgggtcatgataacttagctagcatattaatactaatttttcagatacaaatggtraatcctctcatttggcaaaatagtaatataaataataattaaaataatctgtactaatataacaattatatttttataatgttgtgatatgtttaaagtt

SEQ ID NO: 328205 - DNA, 201 bp, Homo sapiens
gtttctagattagtaccttggctctgcagctcactagctgtttggccttgagcaaattgcttaacctctctgggccatattttctcatctacaaagtgcamataagaatagtacttgctcctagagatgttgtgaggattagatgagttgattcacaaaaagtatttagaataaggcctggcacaaactgaccgaccaaca

SEQ ID NO: 328206 - DNA, 201 bp, Homo sapiens
tcttttgccctaaaaaagatattataaaaatatatctattaatttatttagctaagccttatcaaggatcatccacaaagtgcaagatgctactataatgrgacaactttttacaaaggtgcaaggtgaaaaagccaaaaatgttgaagaaatgcctgatttttaggatgcagtagataatgatgtatattttgttcagag

SEQ ID NO: 328207 - DNA, 201 bp, Homo sapiens
attttcatattcactaccttctgacctaggccattctggcagtttataataggataagcaggccctttcaattatgactggctgattcacgctgccaaaartcatttccccttggcacttccttaccaactaaatgggaagtgatagtggcatctgttctgccacccagatttcagtgatggtttataaaacggcatttct

SEQ ID NO: 328208 - DNA, 201 bp, Homo sapiens
gaagtttaggaacctccacctcgatttcagaggatgtatgaaaatgcctggatgtccaggcagaagtttgctgtgggagaggagccctcatggagaacctmtgatagggcaatagggaagggaaatgtcgggtgggcacccccacacagagtccccactggggtactacctagttgagctgtaagaagagggcccccatcc

SEQ ID NO: 328209 - DNA, 201 bp, Homo sapiens
attcagtgtggttttatggaaaaataaacctatgtaccaatctcaacaaactgaatttcttctcatttggtggtggtttttctattttctccacccacccrtgatgaactctatttatagcaacaaaagaaaatttagtatgagttattcccaattaaatttacagcaaggcaaatataagctgtgacaagaaccctctta

SEQ ID NO: 328210 - DNA, 201 bp, Homo sapiens
  misc_feature (1)...(201): n = A,T,C or G
tgttcattcaacaagtaatcctgagcacctgctttatgtgccttggggacacaagcactgccattgctcttaaacataaaatacataatcacccaaccatntaaaattaaactgtgataggttctatgaaggagaggaaaatgctgcggtgaaaacatgtaataggatggtatgacctggtcagcgaggttcctgaaggct

SEQ ID NO: 328211 - DNA, 201 bp, Homo sapiens
tcatgtaagcatttaaggccagatagtcttgtttccaaatgccatgctcttaacaactatgttttgctgcctcttagcttgggattgtcttatacaggttstttgtttgttctcagttttcttgctagcatataagcttcgtgattcagattgtatccacagggcttagaacaatgcctcacatatggtggatactcagta

SEQ ID NO: 328212 - DNA, 201 bp, Homo sapiens
gttttaggacttctagtttggcactttttcagctagtaggagaaaaacacatctacttcatgccatgctgtggagcaagagcgggagaaggtcttcttttkgttggtgggaacccatcttcctttttccttagactgcattgcctcatttgtttaaaaaggttctatgaatcaataaacctttccaaaggcaaggactatg

SEQ ID NO: 328213 - DNA, 201 bp, Homo sapiens
tttcctggaatttaaagtacagaaaaatatttcctgtttgtcctcacatctaaagttctgtataatagactgtacagtgctctccaaaaaataaaatcctktaatacaggtagataggctgatgccaaaccatgactctctaaaaagcatttttttacattgaaaaggggagggataggaataggaaaacattgatttggt

SEQ ID NO: 328214 - DNA, 201 bp, Homo sapiens
accccagaccttacaaagttgcagaacttcatctggttactaaagttcaagtcaaaactcaaaaaagaaggtgggggcagggggtggccatagtacatccygctttagacaccatgcctttgggaaatattttctgacccatcaatattctgtccccagcacccctacttctggctttactaataagatgaaaatcatatt

SEQ ID NO: 328215 - DNA, 201 bp, Homo sapiens
aagacactatgctaagtttggaggcgcttataggctagagtgaagggaagacctataaataaataaacaaatgaaatactctctaatacaggaataaatgygagttagccatagaaaggaatggtcagatccatttgagagtatcaaagaatactttgcactatatgacttaactgagagccttgaaggaaagagtgttgg

SEQ ID NO: 328216 - DNA, 201 bp, Homo sapiens
tgtgggagcccctctctgggctggccgaggcaggagccatctccccctgcttgcagggaggtgtggagggagaggtgcgagtgagaaccgaggctgcacgyggccaggacgagttccgggtgggcgcaggctcaataggccccgcgcttggagcagctggccagcgccgccggccccaggcagtgagaggcctagtgccat

SEQ ID NO: 328217 - DNA, 201 bp, Homo sapiens
tcagatccatttgagagtatcaaagaatactttgcactatatgacttaactgagagccttgaaggaaagagtgttggaattcaccttggtaattagtttcwgaaaaaatttcacagctatgaaataatatgtaaacacatagtagtttttatttataaaaataaaatactacaggtttctgatgactgctttgataaatag

SEQ ID NO: 328218 - DNA, 201 bp, Homo sapiens
cacatgggtacaatatagtaagcatcaaaaatctagccaactgagctaactggattgaattatgtatatataatacagagttatctagatatacattaatrtagtccttcaatgattcaacaaatacgtattgtttagtatgtacctggcacagatccagacaatagagattcacaaagaaaattcagatagttcttgctc

SEQ ID NO: 328219 - DNA, 201 bp, Homo sapiens
agggcagaagtgagagcagagatcagttaggggttacttggaggaaggagaaaaaagtaaatggatttgagctatcttgatgccatttattggtaaaatakatggtggtgtttcaaggatgaggttcagttttttagttggggtgccatttgtgaggtagggaagattatgaaggaatctctgaggacagagggaacctct

SEQ ID NO: 328220 - DNA, 201 bp, Homo sapiens
gcttgaggagcccttcagcccgccactgcactgtgggagcccctctctgggctggccgaggcaggagccatctccccctgcttgcagggaggtgtggaggsagaggtgcgagtgagaaccgaggctgcacgcggccaggacgagttccgggtgggcgcaggctcaataggccccgcgcttggagcagctggccagcgccgc

SEQ ID NO: 328221 - DNA, 201 bp, Homo sapiens
aagtgagagcagagatcagttaggggttacttggaggaaggagaaaaaagtaaatggatttgagctatcttgatgccatttattggtaaaatatatggtgktgtttcaaggatgaggttcagttttttagttggggtgccatttgtgaggtagggaagattatgaaggaatctctgaggacagagggaacctctgatgtgt

SEQ ID NO: 328222 - DNA, 201 bp, Homo sapiens
atcagttaggggttacttggaggaaggagaaaaaagtaaatggatttgagctatcttgatgccatttattggtaaaatatatggtggtgtttcaaggatgrggttcagttttttagttggggtgccatttgtgaggtagggaagattatgaaggaatctctgaggacagagggaacctctgatgtgtctgaaaaggaaatc

SEQ ID NO: 328223 - DNA, 201 bp, Homo sapiens
aaaaagtaaatggatttgagctatcttgatgccatttattggtaaaatatatggtggtgtttcaaggatgaggttcagttttttagttggggtgccatttktgaggtagggaagattatgaaggaatctctgaggacagagggaacctctgatgtgtctgaaaaggaaatctcaaggaagcagaactggagaaggtctgtc

SEQ ID NO: 328224 - DNA, 201 bp, Homo sapiens
gaagaaggacagacaatattgtaggaaccattgtgcctgactagagagaaatttcaaaataaagagtgggatatgggtcctggggtaattaactttgagtytaaaatgcagctaatgtgggatacagcattatatgttatattccattttaaaaacctgcctattttaactataaggtatgatcaactgtaagatgcagcc

SEQ ID NO: 328225 - DNA, 201 bp, Homo sapiens
aaaaaactaaaacgtggatttgtcttcaggatttttcattaaaatcgttcctgccactgtgtgttcttgatgcagtcccccagtcaccctcttgaaatcarctagcactcttttcacggtgccattttttgtacactcatgcacaacatttggtagacactgtgtttgaacatctgattagttttggctgtggacactatt

SEQ ID NO: 328226 - DNA, 201 bp, Homo sapiens
aactatattacaaggctacagtaaccaaaacagcatggtactggtaccaaaacagagatgtagaccaatgcaacagaacagagccctcagaaataatgccrcatatctacaaccatctgatctttgacaaacctgacaaaaacaagaaatggggaaactattccctatttaataaatggtgctgggaaaactggctagcca

SEQ ID NO: 328227 - DNA, 201 bp, Homo sapiens
caagtattatcacagcactaaaataaatttgtgtactttctagtgatcataatagcacttactagttgtttaggcactgttttcagaaatttgcatacagyattttatttactctcatataagctttatcataaaataaattgcaaacacctactgtgagatgttctgctactgtgaggcatttaacagattgtttttgaa

SEQ ID NO: 328228 - DNA, 201 bp, Homo sapiens
agagaaagagtccctcatttcctgtagcaggatacacaaaatattctctaatctagcttttactgcttctcttcaattcttcagtttttgacattctcaamtctattgctttgtatgatccttatctagccatatctagctggactgaattccttgcagtttctacatttgtcaaggtggtctcaggtctctataccttgt

SEQ ID NO: 328229 - DNA, 201 bp, Homo sapiens
gacaccttatttacatatataagatcatacgccttatttacatatatatgcatatggagagaaagagtccctcatttcctgtagcaggatacacaaaataytctctaatctagcttttactgcttctcttcaattcttcagtttttgacattctcaactctattgctttgtatgatccttatctagccatatctagctgga

SEQ ID NO: 328230 - DNA, 201 bp, Homo sapiens
tttactaagcctatgaagcttttagaacctcattcttccatctgtaggttgtaattattatttccctgggcttttgagaatcttgaaaaaggtaaagaacmcaatacacttggagtaccttttgtagtggaaaagcttgagaaacagaaatggttttagcttctcaggcataacttacataacttaagtgaatgtcattct

SEQ ID NO: 328231 - DNA, 201 bp, Homo sapiens
cagcactgtggataggtcaacagacaagaaataataatgaatcacagatgtgaatgcgattttacaaagccttttccttccatgatcttttctgaactcaygacaacctgggaggggatgagagatagaattatctattggacatttttcaagcttcttggactcctgtatcatctgtcaccactgaccattatcacatta

SEQ ID NO: 328232 - DNA, 201 bp, Homo sapiens
gttgaagagaaaaaaggatataatatatgtaaaggacttgacatatagcaaaaaattcaataagatggctgctattattaagatttttattctgatacttratctgtactgtttccatttttctgtgccattctgcctgtcatatgcctcctgacatgagcttactgacataattgtcagaaagaaatagcactgtgattt

SEQ ID NO: 328233 - DNA, 201 bp, Homo sapiens
caagatcaggcaagatactctttcagcaggtatcttatacagctgacaaagaaagcacaaaattatctttctactataataatgtggaatagcctcaggaygtttccctagcagggcaatgctgactatctctcaacttcaaattaagtaagttgatttgttgaacaccaaattacagaaacttccttgtatactcagcat

SEQ ID NO: 328234 - DNA, 201 bp, Homo sapiens
atagaagagaaaacaccttcagaagtactcttttctttactgcttgttaacccactgcctttccctttataccaaagggtagcaaactttttaaacaaagrgtcaaattgtaaatatttttggctttgtaggccagacagtctcggatactactattcaagtctgctgatgtagcagaaaagcaattatcagcaataaata

SEQ ID NO: 328235 - DNA, 201 bp, Homo sapiens
ttgttgcactgtattgtcattattttttggtaagactgccttcttcactagactgaaaagatcctacagggcagggcattgtgtcatccctggtgcctggsacgctgcatgtattatcaggaagggatctgaagcatcaaattcagctggaatgagcacacattccaaattcacaggattacctgattgagctttttgtgt

SEQ ID NO: 328236 - DNA, 201 bp, Homo sapiens
gaatctcggtagatgttaaagaaaagagagcatgttagttgggtaaacgtctgtggacaattgcacgaaggtggagttagattcatgtgggtgctggcttygaactgtacagatttgatacctgtctcaaactgtgcttccaaataatgatttgtgaattaacaaataaatatctctcttatttttttttggtaccaagtt

SEQ ID NO: 328237 - DNA, 201 bp, Homo sapiens
acagtggctctgttttcatgtctgttgctatctgtgttctgtgagaacaacaatcagtgaatttttatcctccttcaactaaatgcaacctcagaatcacrctctgagtttgatttaccactggcctcttcagcaggattatctcatgtgaactgctagactcttgatattctctctctctctctctctctctctctctct

SEQ ID NO: 328238 - DNA, 201 bp, Homo sapiens
tgataaataactaaataactaagttaaagcatctagtttttctaacctgctaacctactatgattctgggaaggccttccaacagaaatgggtggttgggktagtgtgcttattatataggcaataaactgagctgccacctgttaacttggtaacagacacagctactgctaagaaagctagctagctatgcaaggcaca

SEQ ID NO: 328239 - DNA, 201 bp, Homo sapiens
gggtttgactctctctgcctcctacattggcatcatatcctggaacaatcattacataacagtcctgggtttgcatcccagatcagcttcttagccagagscttttgtataacctaaagtctcttcaccactctgatctgcaatttcctcatctgtaaaatgaggattaaaatgttgaagagaaaaaaggatataatatat

SEQ ID NO: 328240 - DNA, 201 bp, Homo sapiens
gcttgaactcgggaggcagaggttgcagtgagccgagatcacgtcactgcactccagcctgggtgacagagtgagactccatctcaaaaaaaaaaaaaaaagcattcagtggaatctcccaagattagttttaatattcatattgcttctaagaagaaaatatgataatagcatttgtcaacatccaagtaactgagcaaa

SEQ ID NO: 328241 - DNA, 201 bp, Homo sapiens
tatacaaatactgtagagcatgacttaatttgccaaggggatctgaaaagcttacagaagtgacattagtttaatcttgaaggatgagaacaaatttctgktagaagtatagtttagcacttagattcaattgcaaaaatatgcaaattttaagtgattattacctttttactagtgtttctttcagaatctttaagaaat

SEQ ID NO: 328242 - DNA, 201 bp, Homo sapiens
ggactccctctacctggagaactgggcaaagtcacatgaggctgcatcactagatttgatttctggcatgtgtcacccaatgattggtcatggctcagtgsttttagcagggataggtcaaactgcaggagatctaagaagttcatgtgccattcagctctactttgtctaccccgcccatctaaataccaatatcaagca

SEQ ID NO: 328243 - DNA, 201 bp, Homo sapiens
cagagatcttcctaataccctgctttgttaaccagccccctgtctaggcagtgttttcatctttgttgtgtgacatgtcctctattaactcaaaatccccwttctctcctcttcactgcctgacttacaaggataagagaaactatccctgggtttgactctctctgcctcctacattggcatcatatcctggaacaatca

SEQ ID NO: 328244 - DNA, 201 bp, Homo sapiens
gataaaggaaattgatctaaactattaagaaaagtgttttgatgagaatatgtgttttcctgagtattctaaaaatagccataaccagtaatagtagtaayagtaatgatattccttcacatttggatagtcatttgcagtttacagggtgcttacattatttctttaaattcatcacatggatcctgggaactaagaaga

SEQ ID NO: 328245 - DNA, 201 bp, Homo sapiens
agtaactcatctgtcatttaacctgagcatagatccctatacccttttcctcctttactatttacctgaagttcttcagattttattcttttcaagcttcytggactcctgtatcatctgtcaccactgaccattatcacattatgaatcttcctcctcccctgcattctgtgacattttcctctggttgtcttcatgtat

SEQ ID NO: 328246 - DNA, 201 bp, Homo sapiens
gcaagcaagtgttccttagcatctcctttgtgtgtagcagacaggacttatgcctcaaaaagatggcagtggatttgcataaacatgtaaaaacttaaaartgaacgtcaggtatctctggttttaaagtcctttgggcagtctcttatgctacccaaatttatctttccccttttcctgacttttcttctctaatgtctt

SEQ ID NO: 328247 - DNA, 201 bp, Homo sapiens
acctcaggtgatccacctgcctcagcctcccaaagtgctgggattacaggtgtgagccactacacctggcctacatttttctttcatttggcggagggtcygcctccatgctgagcgggaactccctttgttgatggggctcgtgatcatcatcaggcacatatagacctgagtcagtagactctgtaattgagaacatca

SEQ ID NO: 328248 - DNA, 201 bp, Homo sapiens
ctccagcccacaaccgagttttttccctaaaacagcttcctatacgtgctttctggaatcacatccaaaaacacaaaatggctttctctttaaatgaacaygtctttaacatactaactagatcgaaattaatcagtaagtacatttcagtcagtctcttctgacaatatagccatggctcagcaaaatcaaattattagt

SEQ ID NO: 328249 - DNA, 201 bp, Homo sapiens
tgtctctctttcctcaagatgcctacaatccttaaaaaaagagagaagaactaatacaaggagaaaacaatcatataaataataaaataatataaatagamccatttgaaccatcatgcacacttaactgagctctgcttatcccccagcactttggacttcactgtcaccaacagtaggcaacatttaaaagatgttgag

SEQ ID NO: 328250 - DNA, 201 bp, Homo sapiens
aatcaatgcagattaatcctactgcattaaacaatgccagccttctcacaggaggcaatgcctccttttctgtgtgaatggtagatttgcattctgagtcrccttacttacccttaacaaattgcaaacaagtgtatggcagagcccccctcactgtgtagtttgtggtgttcacacctatgaccttgctccatccaagtg

SEQ ID NO: 328251 - DNA, 201 bp, Homo sapiens
aaagacaaacacacactcagttttactttggttgtttggtgcatgaaagcaaaagattaagcaaacaaataaacatatttcgtaatgatcttaatagtggstttgagaatttgaaaatagagtcttggaaacattaattgaaatataaaatattagctagcacaagtataagactttgcagtttacaaagcgctctcatgt

SEQ ID NO: 328252 - DNA, 201 bp, Homo sapiens
gtatttggcacaatcagggtatgttgaacaaaagaataactcagctagaaaataaatgtagaatgtccccaaaatctatagcaaggaataaagtcagtctrtggtttgttcatttttattttctaggatttgtaagcttaagtaaaggaaatagtaagcaataactgtggcatgataatgatacttgaaatgcaatactat

SEQ ID NO: 328253 - DNA, 201 bp, Homo sapiens
ccaaatagaaacctgctgtttctgctatagttctccactgaaccgagctagcttgataagctcttgtgtatctgttagtttattctaaaatcaatcaaacmtaagtagattgtatcaaagaggataatttcttaaattgagttatagaaaccagctctgttttggttaaaataaataggaaaattgttgaaatgcgatgat

SEQ ID NO: 328254 - DNA, 201 bp, Homo sapiens
ataataggaaaatgaaccatgctaagacaacagctttgctgaaatgtagacaagtgaaagagtattgagaaggtaagtcggggtcagatcacaaagggccytcttttgtgaattaaggagtatgccaaaagccaagggaaaaatggatgaataccaggcaggaagcaccatggtcagagtttcatggtacaaatgctattc

SEQ ID NO: 328255 - DNA, 201 bp, Homo sapiens
acgaagtcatcaagagccttggattttcaaactgacctggaaggcaaatagatgattgtactggggagaaaggaaagtaccgatgagggactatgtatgayttaaagaaggctgtgatagtttgggaaagagatggactttagtacaaggagaaaagggaaggaaattcgcatgtattgagcacttaatatgtaccaggca

SEQ ID NO: 328256 - DNA, 201 bp, Homo sapiens
aggtgtgttaccaaaagaacagaagaaattagagcttttccttccttctttccctttctctttccctccctcccttccttccttcctctctctctctctcwctctgtttcatatctgaaagcctattaaatagagggagagaatttgttctatataggagataaaaaaggattcagatagtgactcaaaatgggaaacaaa

SEQ ID NO: 328257 - DNA, 201 bp, Homo sapiens
actattcaacaatacctgcctgcacagagagcttccaatcagcattttagtgcctcatcattaatttggacttataagcaaggatcaccagacacctgagracatccttaaaacaaaacggaatcacaaagaatccagagaatcaagaggtaatccacagaatggagggaaacatcaaaatacctcttattaatatactta

SEQ ID NO: 328258 - DNA, 201 bp, Homo sapiens
acagtgcagaggaccagtagcaagagccagaacaggcacctcctatgtgccaggaacagttctgagagtacagggataaatagaagagacaaatattctcrtgtggatcacatttaattgttggagattcattgagttaatgtattgatgcattccatagagccagaattatagcaggttccttagaagtatttgttccct

SEQ ID NO: 328259 - DNA, 201 bp, Homo sapiens
cctcccaggttcaagggattctcttgcctcagcctccagagtagctgggattacaggcgcctgccaccacgcccagctaattttggtatttttagtagagrtggagtttctccatgttggccaggctggtctcaaactcctaacctcaagtgatccacccgcctcagcctcccaaagtgcttggatcacaggtgtgagcca

SEQ ID NO: 328260 - DNA, 201 bp, Homo sapiens
taaatattttgacatcacttctatgtaatactcatcttatttttaaagaacttacggctacaattagggagaataacatttagacacagaaacaatgtgtractaagtattaagatgtttaaggcagccatgtatgagtttttaaaaagtggtaaaggagatatttgaggttgtctggaaagacaggtcagggatttggat

SEQ ID NO: 328261 - DNA, 201 bp, Homo sapiens
acttttacagcatagaagaggaagtgacaaaactgttatttactttctatcacaagcgtgatcatacagttcacaattttctggcatccaaatgcaatgayaaaacattcttttttcactcatgaagcttgtctcagtgctgtcaatccacctacctggtgggtatgctcctaaatattcatttttctatctagcttcttt

SEQ ID NO: 328262 - DNA, 201 bp, Homo sapiens
ttttggtcctgccacactgcctgtctttgtgttagcttcataccaagactaattgccctcatggccccaggacagttgccagtgactcctagacaacttgytttcatagtcacatccagctagaaagagatcctggcaatgattcctagaattcactttgaagagactggcttatatccacccctgaacatgagaccaaat

SEQ ID NO: 328263 - DNA, 201 bp, Homo sapiens
aatggaatctccacatgcaaaagaatgaaattggactctaatgccatatgcaaaaatcagctcaatttggctaaaagacctaaacgtaaaacctaaaaccrtaaaatttctagaaaagaacataggggaaaagcttccttgaccttgtcattgacaatgttgttttggatatcacgttaaaagctcaggctacaaaaggaa

SEQ ID NO: 328264 - DNA, 201 bp, Homo sapiens
tgtaagatgtgttgggtttttctgagctgtgctatcagaatctccattctttagtcaataatttcacaagtgccaagtggttgtgcctagggcatcttctktttagctgtgctgacataggaactgtatcatgtccctggatccaatcgttttagacaacctcctgatccctgtagcttagctaaaaagtacattcttgga

SEQ ID NO: 328265 - DNA, 201 bp, Homo sapiens
ctttggaaactccaattagaggtctattagtctacttgagggtgtctcacagttggttgatactcttgtcattctttagaattattttttcacggttagtwtggttagttggttagtaactaacttggttagtttccattgctatgtattttatgttcattaatattttaggcattgtttaatttgcctttaattctattc

SEQ ID NO: 328266 - DNA, 201 bp, Homo sapiens
tatttttgaaagatattttatctggatatagaattttaagttgacccttacagtgcaggtaactttaaagatgttgccttcactgttttcttacccatgtkgtttctgatgagaagcctcttgtcatccttgtcttccttattctctttgcatgaagcatgtttctttttcctggcataaataaattttttctttttatta

SEQ ID NO: 328267 - DNA, 201 bp, Homo sapiens
aatgtttccaacccggtcagaccatggcacaaacaccacaaggtgaaatttaatgtctctcctaactaaaagtgattaagatcatgaaagtccacaaacayctgagtaggatatgaggggtttctgaggcatgtgatataatgttagacagcctggttttgggaaacttttttcttctatcaggataatatgccttatgaa

SEQ ID NO: 328268 - DNA, 201 bp, Homo sapiens
ggccagatgagcccatctcatacgttacccctaccaccaggacagcacatttatgttagccacctgcagctggagctggagatcacctcgacctcacagckctggagatctattgcgaagatctttcttctacgactcaggtggactctccctcctttattctcccaatttattcagttttatcaattctgtttgcaagtg

SEQ ID NO: 328269 - DNA, 201 bp, Homo sapiens
aagtcggtcataataatcttcatctataacacaatacttgacaaatgtttatgctcgataaacatttgaatggctattaagagcttgcaattttttatttrtttattatttattaatttattatatatattatttatttatatttatttatctcccttatttattaatatggtccaggaatttgcatttattatcccattt

SEQ ID NO: 328270 - DNA, 201 bp, Homo sapiens
atcattatggggaaactggaatgatttcagtggagaaataatgggaagaggtatgaaatgcaagaaagcaccttttgcagtgtggttttgaccccctgacrtacccaagaagccatttttcttgtctgacagcaagaattccttccatgtaattttcagcagcaagcagggcttgggaagagtcctgagttggccttacat

SEQ ID NO: 328271 - DNA, 201 bp, Homo sapiens
ataaggctctagagattaaggcgtgaacatctttggagaaccattattcttcctaccacagtctgccctctggcccccaaagattcttcttttcacataaytacagggcgtaattctactaagctttccaccactgtgtaaccaggatccctttcctacagtttccaatgacatgcttctcatttccatttgagctgtcac

SEQ ID NO: 328272 - DNA, 201 bp, Homo sapiens
ccctagcacttttccctggtcaaatgagcctgcattgagataattttatactctcccaagtcatcctctttgtgtacgtcaggagagggttcaacaatagmtaataattatatgcccttactagatgccaggcactgttctaaatgctttacatgtattaactaatctaaccttacagcaactctgtgatgtggtactctt

SEQ ID NO: 328273 - DNA, 201 bp, Homo sapiens
aaccactcactttttttttccgttcatgaaacaatatttttgtttgtatgtctcttatatgctcagcctgtacccgcttccaaaattacacaaaacaaggrcctaaaagtcctttatctttgtctttcaggaccatacagattgacagcatagatggatgggtaaataaatttatttcagaacagtaaaggcagtgatagt

SEQ ID NO: 328274 - DNA, 201 bp, Homo sapiens
gtacacacaatcataccactcaaatttatattaatgatgtatatgacatcaatatatattaatttctatatatacttatgtttatatgtatgcacacataytcatgaacacgaattcataaaaatagactgccacaatttctataaactgtcatggggatcactgaatgttcaataagagggtgaagtttattaacactct

SEQ ID NO: 328275 - DNA, 201 bp, Homo sapiens
gtttcaatcaacacacaggaattagagctttctctgggcccagccccagtcagaacatggcacaatttagcagtgcaaggtggcctagcttcctctgcctycaaacaaacctggccttcttcttccccaacagactcatttctttctcccaagcctgccatgtaaatcacctacttcaccttcatgggcaataatgacagc

SEQ ID NO: 328276 - DNA, 201 bp, Homo sapiens
tcttatcggaatttcaacacttccccatgagacaaacattattccctccattacccaagcaaggaacccgacctgtagaggacaatcctggcttcccacakatcccaagagagccagaactagaactcagtatcatttttcccaaccactcactttttttttccgttcatgaaacaatatttttgtttgtatgtctcttat

SEQ ID NO: 328277 - DNA, 201 bp, Homo sapiens
gcccagtatagtttaccctcacatctctttgaatagctatttgtcagtcctcaactttaataatgagtaatgaggcacttttctcgtcctgtccctcactytgcaactttattgagcacgcctaagtcatatcacttttctgaacatggattccattgtttgttaattaaggtggttcaagagattagttttaaggccctt

SEQ ID NO: 328278 - DNA, 201 bp, Homo sapiens
ccaccactgggctcacacagtcctattcatgcagccatcaaatctagacactaacacactagctcatcactcttcagtctgctgctattctcagtacttgstttcttctgagtttgcatttctgcttcattttcatcctctgaagatttctcttacttgcaagcttagccaagcatttaaaagtattttataactatttta

SEQ ID NO: 328279 - DNA, 201 bp, Homo sapiens
tttagggagggtgaagacaagaaaatgtgtaacacttcaatttgacctctaggccattacagactttaaactactttcttctcattatagattatcatcargcttctggtccctctgattgtagccttattagattctaactgctctgcctcttcccctccccacccctaccatactttctccactcattcaccccgtcta

SEQ ID NO: 328280 - DNA, 201 bp, Homo sapiens
cacatctctttgaatagctatttgtcagtcctcaactttaataatgagtaatgaggcacttttctcgtcctgtccctcactctgcaactttattgagcacrcctaagtcatatcacttttctgaacatggattccattgtttgttaattaaggtggttcaagagattagttttaaggccctttccagctgatgttctatga

SEQ ID NO: 328281 - DNA, 201 bp, Homo sapiens
agcttatatgctgtaataccatgtttttaatatatgatgcaaaatgtaactactcaagataccagaatgtgctataactagcacattgctctcaataggamaaacactaggataaattatatttttaatgagctggaggcttggtgagcctggactctgagagggaaattagccacccaagtgaccctaatgactactgtc

SEQ ID NO: 328282 - DNA, 201 bp, Homo sapiens
acagtcccaggtttagggagggtgaagacaagaaaatgtgtaacacttcaatttgacctctaggccattacagactttaaactactttcttctcattatakattatcatcaggcttctggtccctctgattgtagccttattagattctaactgctctgcctcttcccctccccacccctaccatactttctccactcatt

SEQ ID NO: 328283 - DNA, 201 bp, Homo sapiens
tcctagactcccagaagtggtgaatcataaacattcatgaggcattttctgtgtcagtattttcagctatgaaattgaagtggtaacggatccaaacactraaagactgctgaggatttccagaattctgaaagcagatgatctctgggtgaggactaaattgtctgttttctagaacatactgtaaatcactctctggta

SEQ ID NO: 328284 - DNA, 201 bp, Homo sapiens
ggacttacaatgatgcatggatacagaaatgatccagctatggtccctatcctagggaagtttaggtatagattggaaaaatctaaaaagaagcatacacwattaaggcaaacacttagcaaactctatactgcttaaacagtgtaaacaatatgccagtttttccctcttatttattctgtcttgcccagaccctctttg

SEQ ID NO: 328285 - DNA, 201 bp, Homo sapiens
aaaaaaaattgatatgaaactgctcttgggctagtgaaatctctggacaactagaagagggatgtgcaaaattattctgtagcaacagttgcacaactgarggtcgcagggactcccacagaaactataatctttctaaagataatctcagaataaaaatgtacaatacgatgcagaaaatactcaccatgagtgaaacca

SEQ ID NO: 328286 - DNA, 201 bp, Homo sapiens
actttcatggtccagatggcagacaacaaggacccatcatcatgcagctatgatgggagaggagctggtgaatatgagaggtgtgtaggaagtcggcttgmcaacacttggtaattaggatatgatgcctaggatttgggtggatggagaatctctgagtagagcaaattttagagaaatgaggaagattatgacaacttt

SEQ ID NO: 328287 - DNA, 201 bp, Homo sapiens
ctctggcaacttcacttacttcacacttttgatactctagagatgaatcatccacctaattctctgctgaaaagacatctgtgttcctagccaatgctctyttcatccttgcacattcgcaagtactctggcaaatactgtatgcctcagtcagaaaacagtgaagtcaggtctcctgaaatgcagccagcagttgacgaa

SEQ ID NO: 328288 - DNA, 201 bp, Homo sapiens
tgttaaattaggtgatggggcactgtagcatttttcccagatgtgaggatccattaatatccaaaggagccagaagctgctgaaatgtgtcagctgcttgrttttagggacctgacaagtctgaataaatgtaatcctagaggggcagattgtccaagatcaatagagctcgtggaaagaacctgttgctgagctcctcag

SEQ ID NO: 328289 - DNA, 201 bp, Homo sapiens
tgaaaccagattggttttactccagaattcctattctgtgacgttcaaataactccgtgataaagcaatctaaatttaattgattagctttttaaaaaaaagttaaaagtgagataatatctctatctgagatgatgtgaatattttctgttagttttagtatgtctgtttgtgttttgggagcaatctttgtatttactt

SEQ ID NO: 328290 - DNA, 201 bp, Homo sapiens
ttaacccttaacctcctcccaaacttctgattgattcaatttttcttcagacaggctaatatattaatcaatcatgctcgtctaggtgtttttttttttttcaattctttgaggttacctcacatgggtgagtattgatcttatgaagtcaattataatttaccacattttaagttggaaattgggagagtatcttaataa

SEQ ID NO: 328291 - DNA, 201 bp, Homo sapiens
agttttctcctttttccatgttgaaaagtttctctcgactgagtgcaaaagtccttcagggtagctgctaggtcctaccctatcatgtaattactgggcastctcccaagcacagaccatattcaacaagtgatggcttgttaaagttcctgcttctactatgacctaaggaataaggggaattatattccctaagtgacc

SEQ ID NO: 328292 - DNA, 201 bp, Homo sapiens
cagaatgttgaaaattatagtaattcagtgtgattatatctttgtaattacagaacaaaagaacaagcagctgatttgagggaagctactagcactgttckggtggaatttcagtaatttttatcaggtgattaccaaacctgaagggtaaatgaacaccctctttaaactaaagaagttgcatgcttacatgggctgata

SEQ ID NO: 328293 - DNA, 201 bp, Homo sapiens
cccaacttccactctcaagtaggacccagtaaatgttgttcccctctttgtgtccatacgtactccaagtttagctcccacttacataaatgagatcatgragtatttggttttctgttcctgtgttagattgcttaggataatggcctgcagctccatctgtgttgctgtaaaggacatgatctcattacttttatggct

SEQ ID NO: 328294 - DNA, 201 bp, Homo sapiens
gacaggcaccatttattcattcagtcattgatttgattgattaacttcttatgcatttgttcaactaagcatttactgaatgtctagtatgtgccaagcaytctggtgagatatttgagaaaatcaagaagaaaaaggcccaagccttgcccctgaagaactcagactaatagggtgacagaatgttgaaaattatagtaa

SEQ ID NO: 328295 - DNA, 201 bp, Homo sapiens
agttcagtgttaacttctccataaagctatcactaattgacgcaatcagaagcaacctttcatttctaacaacttctgatgtgctttatttcttccttttytgttcattcttttattatcaggccaagtaacccatagggcatgaaaaggatgaatatcaacaacccagattaaggagataaagaaaccgctaattctaac

SEQ ID NO: 328296 - DNA, 201 bp, Homo sapiens
gatctcattacttttatggctgcatagtattccattgtatatatgtaccacatttttaaaaatccagtctgctgttgatgggcatttagattgagtctatrtctttgctattgtgaatggtgctgtgttgaacatatgtgtgcatatatcttaacggtagaataatttatattcctttggatataatacccaataagggga

SEQ ID NO: 328297 - DNA, 201 bp, Homo sapiens
aaaggaaggaaatctgaagtgtgtatgtgggtttccaggaaatagatttactataaaaggcttcctagtgactttcgcaagaacacattaaatcataactyccaaggagctattaatatataattaaacaagtacagaactgtttgtttctatggcctgggccaaagaagcctaaagctacaggagaaattagatgacttc

SEQ ID NO: 328298 - DNA, 201 bp, Homo sapiens
tttaaaaatccagtctgctgttgatgggcatttagattgagtctatgtctttgctattgtgaatggtgctgtgttgaacatatgtgtgcatatatcttaayggtagaataatttatattcctttggatataatacccaataaggggatttctaggttgaatggtaattttgttttaagttcttgagaaatccccaaactcc

SEQ ID NO: 328299 - DNA, 201 bp, Homo sapiens
ctgggcccacccacataatctaggatagtctccccatctcaagacccttgaccttaatcacatccacaagtttcctttgccacataaggctctagagattmaggcgtgaacatctttggagaaccattattcttcctaccacagtctgccctctggcccccaaagattcttcttttcacataactacagggcgtaattcta

SEQ ID NO: 328300 - DNA, 201 bp, Homo sapiens
ttcatccaagcagtcttcctcttacccacatttaatttttgagtagcaagctgatggcatttgggggaaaggaaaatgattttaagatgattaatctttgmagcttcacccagccctgaaacctgaaatgccattcactgtggtccagtgagttctggctctgcgcaggttcagatttgcctctgtttccctcagataaga

SEQ ID NO: 328301 - DNA, 201 bp, Homo sapiens
gaatttggtttgagtcctggcctctaccatttgttgttgatcagcgaccttcacctctctaagcatgggtttcctcaacagctaaaagggaaaatagtatmcaactcgccaatttgtttgagatggagtctcgctctgtcacccagattgaagtgaagtggcgtgatctcggctcactgcaacctccaccttctgggttca

SEQ ID NO: 328302 - DNA, 201 bp, Homo sapiens
agaagctgccccatgattcagttatctcccaccaggtccctcccacaacacgtgggaattgtaggagtacagtttaagatgagatttgggtggggacacasagccaaaccacatcacctgtcttacctgattttatttctaaagtagtcctacaagataggtatttttttttctgaacactgattctcagagagtttaagt

SEQ ID NO: 328303 - DNA, 201 bp, Homo sapiens
catggaggaaccttgctttcctagttttcagtactgatgttctctgcctaagaaactctctctccctctgtgtgttcctgaaacaagcacgctctgaaatrctaaagaggatctggggcctatgcagtgttagggacaagtctcatctccacatctcagtgctattatttcaccttgtccccaaaagtgaaacagcttaaa

SEQ ID NO: 328304 - DNA, 201 bp, Homo sapiens
tgaaatgtgtcagctgcttggttttagggacctgacaagtctgaataaatgtaatcctagaggggcagattgtccaagatcaatagagctcgtggaaagarcctgttgctgagctcctcaggaaggacacctgcagctaacagcaggagtgggaaagttccccttaaggactcttgggaatagaagaacacaggcgagtga

SEQ ID NO: 328305 - DNA, 201 bp, Homo sapiens
ctgaagtggtcctcatatgagccgccagacctcatcccttccagtcaccatgccatacctgccgtgccgttcctctctggctctggttcccggtcccatgraggaaccttgctttcctagttttcagtactgatgttctctgcctaagaaactctctctccctctgtgtgttcctgaaacaagcacgctctgaaatgctaa

SEQ ID NO: 328306 - DNA, 201 bp, Homo sapiens
gcactatacagactattctccatcttggggtactgataaggtcaccttatattgttacctcaaataacatttctaaatctcttctggtgttgttgcttccmcctctccactgccatccccagtaaagatgtccaaaattatttcttcgatttcctgaagtggtcctcatatgagccgccagacctcatcccttccagtcac

SEQ ID NO: 328307 - DNA, 201 bp, Homo sapiens
ttcatgcaaagcaagacagaagaaaatgctgcaattttaatattgttttatacctcggcatgatcatgcttaattttcctgtcaatgtcctgttctggaarcaaattctttcaggttctgacttgttcaaaactatgaaagtcctgtctatacagaaggtagaatgatagaccctgaggtttgggaatagagatgagtgag

SEQ ID NO: 328308 - DNA, 201 bp, Homo sapiens
caaactaattttcaatttattgtgaagagaatgggcatttattatgagaagaatggacagtttcaccctgtcacccaagctagacccctactttgtacagyttctttacctgtgtcatcttatttatcttcacaatggtcttgtaattgtagttggcattatttccaactcagaaatgttaagtaatttgcccctggtcac

SEQ ID NO: 328309 - DNA, 201 bp, Homo sapiens
tcagtcagcaacctttattgaccaatggatcacatttggtaaaggctcctgcttattacatagagaattagactgctcaaagaggattttgcaggggacargcaccatttattcattcagtcattgatttgattgattaacttcttatgcatttgttcaactaagcatttactgaatgtctagtatgtgccaagcactctg

SEQ ID NO: 328310 - DNA, 201 bp, Homo sapiens
atttgtaatcagtatgaatgctcaacttccttcagcacaccctgaccttcaaaagtagtgctaagtagtgttggggacagggaggagttgacatgctgatwaatatactgaattatggaagtgctctttgaaacttggaagagattttttttttaagctgttagttgctagggtcgctggtcgaaaatctgagcctttgct

SEQ ID NO: 328311 - DNA, 201 bp, Homo sapiens
ccgttggactttaggtagctggccctttgggctagttggcttgagtcatctctatccacacattcagagatccatctgtacctcaggatttgtaatcagtrtgaatgctcaacttccttcagcacaccctgaccttcaaaagtagtgctaagtagtgttggggacagggaggagttgacatgctgattaatatactgaatt

SEQ ID NO: 328312 - DNA, 201 bp, Homo sapiens
agtattaggcaaatccatttaggcttgccaagcaaccaaaaatcaagcaaaggaaggaaatctgaagtgtgtatgtgggtttccaggaaatagatttactrtaaaaggcttcctagtgactttcgcaagaacacattaaatcataactcccaaggagctattaatatataattaaacaagtacagaactgtttgtttctat

SEQ ID NO: 328313 - DNA, 201 bp, Homo sapiens
gaggtttggttagattctgattcatttgagggagttttgttttgggagtaaatagaggttttcaagactaccttgtaatattttattcttttatcagaagkcgtgaaacatctgactgtctctttgtgattgtagcagctactgatactcaatgcctacatccattagttcattaggtttgcagaagtaatctttttttaa

SEQ ID NO: 328314 - DNA, 201 bp, Homo sapiens
tctccactataaaggtatcttttcccctctttttaataattaaataatctgggaagagataaatatcctattccccaacaaactttcaaccaatgctttargcatccacagatgattcttccctaacttgactattatagtgatgattacaaaatggtgatttcctgactttatccttccttctataattattagtcatac

SEQ ID NO: 328315 - DNA, 201 bp, Homo sapiens
tacttataaacagatctaagggaacccatcctttcaagttaactggtttgtgatgatactgctattgtactttctcaccagggcaggcctaactccatagrgacagccatgtaccactgtttggcacaaaagacacccttcccatactttaaggccacctaggctcatgaaaccatggctccattggggctggggagactc

SEQ ID NO: 328316 - DNA, 201 bp, Homo sapiens
ctcccatctcagcctctcaaatagctgggactacaggcatgcactagtgcatgtggttattattattattattattattattattattattattattattktatttgttttttggtagagacagacccttgctttgttgcccaggctggtcttgaactcctggtcataagtaatcctcctgctttggcctcccaaagtgtt

SEQ ID NO: 328317 - DNA, 201 bp, Homo sapiens
attttctaggagtgaatttctaagtcatacattagttatatgattacatttacaagaagataccaaactatttttcaaagtaactgtatcatgttgcattyccaccaatttaaatgagagttgcaagggctccatgtcttattaacacttaatattgtcagtctttaattttagctactctggtgggtatcaagtgaactt

SEQ ID NO: 328318 - DNA, 201 bp, Homo sapiens
aatgtctcccaaatccagaagtatatgagtatcaaaaagaaaaacaaaaagtagttttacttataaacagatctaagggaacccatcctttcaagttaackggtttgtgatgatactgctattgtactttctcaccagggcaggcctaactccatagggacagccatgtaccactgtttggcacaaaagacacccttccca

SEQ ID NO: 328319 - DNA, 201 bp, Homo sapiens
atatttagaaggcgaagtctcagtaatcctctacaaagtccagaacacaaaaatttgtgctatacatgcccagctggttgtcagatgaagagataacgtggcacatagtgggaaagttatttttcatcttacataggccaatgggtctttagcaggtttcccattaaagtgttatactgctcagtgtaggcaatcaactga

SEQ ID NO: 328320 - DNA, 201 bp, Homo sapiens
taattaaacagaatatgagcactatacagactattctccatcttggggtactgataaggtcaccttatattgttacctcaaataacatttctaaatctctkctggtgttgttgcttccccctctccactgccatccccagtaaagatgtccaaaattatttcttcgatttcctgaagtggtcctcatatgagccgccagac

SEQ ID NO: 328321 - DNA, 201 bp, Homo sapiens
ctctaagaaaggtgggcagaagataaacaaatatacaaatatattttctgtctgttggacagaaaataaacaactatacaaaatatcatatggtaataaaygctatgcagaaaatgaagcagagtgatatagtgatgaatgcctggtggcaactttagattaaataatcaagttaggcctttctgaggaggtgatatttaa

SEQ ID NO: 328322 - DNA, 201 bp, Homo sapiens
gaaaagaacagtcttgagaagctcaaacattacaatgtggaaagcaaaatggcacagaagaattactaataatggaatatggaagataaaatattttcatstataacttgcactggacatacaggggcaagcaaccttcctggaaaatgcaaagcaaaaactctaaataacaatcaagagctagctgggcacagtggctca

SEQ ID NO: 328323 - DNA, 201 bp, Homo sapiens
cctccccactctaggagtccccagtgcctattgttgctatttttatgtccatgagtatccagtatttcgctcccacttataagtaagaacatgtggtattkggctttctgttcctgtgttaatttgcttaggataatagcctccagtggcatctgcattggtgcaaagggcattattttgtaagtaattttcaagggtact

SEQ ID NO: 328324 - DNA, 201 bp, Homo sapiens
ctgaatacaaaaaagggcaggaataagtttgttgcaaactaattttcaatttattgtgaagagaatgggcatttattatgagaagaatggacagtttcacyctgtcacccaagctagacccctactttgtacagcttctttacctgtgtcatcttatttatcttcacaatggtcttgtaattgtagttggcattatttcca

SEQ ID NO: 328325 - DNA, 201 bp, Homo sapiens
caattgatcccattacccagatagtgagagtagtacccagtagtttttcaatcatttcccttttccttccctccccactctaggagtccccagtgcctatkgttgctatttttatgtccatgagtatccagtatttcgctcccacttataagtaagaacatgtggtatttggctttctgttcctgtgttaatttgcttagg

SEQ ID NO: 328326 - DNA, 201 bp, Homo sapiens
ggtataactacaacatataagtaattgtacaagacacttcatgttaagtgtcaatgaaacaactggaggactatccagtttcatgtgggaaggtgatgacrttttaattatgttaaatttgaggtactgattggatatccaagacatactcttctttttaagaatagtgacaatttaatgcatgcgctatattaagagaga

SEQ ID NO: 328327 - DNA, 201 bp, Homo sapiens
agtgaggatatatacttttatcagctagtattccaagtttagcaagcaatgtttgctttttcccttccaaaaaaaaaaaaaaaaaaaaacggatggttcaraaacttttgagccactcacatgctctcacattgtaaatgtgattcactcctctgactggccctgcttgtcatagaaaacacagtctacttgcatttagca

SEQ ID NO: 328328 - DNA, 201 bp, Homo sapiens
ttctctctcaaaaaatgttaataaaatagtatctaccctatagagctgctatgcagattaagtagttactataagtaacaaacttagaacagtatgtggcrctcaataaatactggctattaattttgagttctgaccctgtacctcagggatataggtaaaaagcaggaagaaaatgatagttttaaagaacctaatatg

SEQ ID NO: 328329 - DNA, 201 bp, Homo sapiens
agtgtagagggtgttgaaagggaaaaaaaaagcaatcatgatacattcttgggaccagttattaattacgaataaatggttgctggtggaaatgtcaattmgtacagattatttgaaagcaatttggcagtgtgtcaaaacttttaaactattcataatttttaactcaataatttaacctttagaaatctatcccaagaa

SEQ ID NO: 328330 - DNA, 201 bp, Homo sapiens
gacacatagtgggacatacaggcattcaataaataaatttattaataaaggaataataattataacttaattagtaaataaaataaataaataaatgaacraataacccccctagctgacagtagcataaaagctccatcagctttaatgaacctgaagaaagctgtttcagttttttccaaaaactggacctatgaccca

SEQ ID NO: 328331 - DNA, 201 bp, Homo sapiens
ttataaccaccttctctctaaataactaaccactgtcatgataatattaatccatttatgaggactctgcccgaatgacccaatcacctgttattaggccygacctcccaacactgttgcattgggaattaaatttccaacacatgaacttttgggggacacattcaaacaataagactgtgactggtagagttcttggct

SEQ ID NO: 328332 - DNA, 201 bp, Homo sapiens
aaaattgaaccaataaacagataatttccgtgagtaatcagtgatatggagaaatgtaggaggctatataatacctgggatgggaatggaacacctttagytagaagaccagggaaggcatctcagggatctgaatgaaaaggaggtgtccaggagaaaacctggggtaaagcaatcaatgaatgcagatgcccttagaga

SEQ ID NO: 328333 - DNA, 201 bp, Homo sapiens
aagtaagatcgggaggtcactgacagtaccttcagccccatgaatttaggtattaaattataatataaagagtttttcccatggctggcacatggaaaaayatgtactaatgataaaataatgattcttaatattatcatccccaatagcatgtattaaatttctccttgtataggatactatgtcgggcattgcacaaag

SEQ ID NO: 328334 - DNA, 201 bp, Homo sapiens
tttaagttccctctccatcaaatggatgaaacacttaacttacagcaaagagactagctctgatgcttctggctatgtgaatgtagacaagccgatttacytaagcatcggtaaaataggacttgtaatactttaaagggctttgatcctctaacaggaaaatatatgtgaaatgctttaaaatctacagattgctgtaat

SEQ ID NO: 328335 - DNA, 201 bp, Homo sapiens
ctgagtaaagtgaattctggaatacattggttgtttcctggcacatatgtggtgctcagtaaacattggctaaataaggatgaatgaggatatgccttgayaaagtttggaggtgggagaaaggatttggagcaattacaaaccaatggtatatttagtataaaatgtgacatgaagttgagtaacataataatttccagc

SEQ ID NO: 328336 - DNA, 201 bp, Homo sapiens
ggataaaaagtagcagatatgtaggatgaacaagtctagaggtctaatgtgtaacataaagactatagttaataaaattgtattatattaggaattttgcraaataagtagattttagctgctcttgtcacaaaaaattataactatgatgatggatatgttaatttacttcactatagtgaccactttattatctatatg

SEQ ID NO: 328337 - DNA, 201 bp, Homo sapiens
atgtcttctatacattccatacttaaaacataatatgaaattagctgacagtgagcacctcttatgtaccaggtattggagacaaaaagcaaatgccaacrtatgtcgttttgtatgggtctctgccctgaagttgctcactctagctagaaagggagtcaaataaaccaatccagtggaataagcattatgatagataca

SEQ ID NO: 328338 - DNA, 201 bp, Homo sapiens
atcctgtgcctggcacagagtgggtatccaataaatgtgtattgttgcttgaatgaccttcattcttattgctttactctctgactcaacacaaatgtaaratagaatgcaacacaaatgcttcattctttctataaaatagggaattttgattgcttttcctttggtgttctgcgatcatttttttaaaacttagcttaa

SEQ ID NO: 328339 - DNA, 201 bp, Homo sapiens
cacgtgggcagaacccatatctatctttgttagccctagtgcctagcagagagtagtgctcaataaatgttttttttttcctaaaagttgtggcatctatkgttttagggattgcaaattatgatttttatggtaactgtcttttaaattttaaccatgggcatatattttaataaggaaggaaccaaagtagaggaaaaa

SEQ ID NO: 328340 - DNA, 201 bp, Homo sapiens
aatatattttcctgtaaatgtccccctttattcatagctctgtcacttgaaaacaaaaaggtgaagactaattcctcttccacatatgtttgaaagagctrtgtctttccacttctccacttctcagttttttaggatgttttagaccttttctctctcttccagtaaattttatcacatattcatttatcttctgtaaat

SEQ ID NO: 328341 - DNA, 201 bp, Homo sapiens
cagagcatcttgcttatagaattattactaagctctttgattaacagtgtaattctgtgttctgtttcttgaatctgagcctttccagagaagaataattmtttttaaggcagcagttcccaactggactgtctcaatacactggtttatgtcaataattttattccaggtgattttaaaaagaaaatgacaagcttaagc

SEQ ID NO: 328342 - DNA, 201 bp, Homo sapiens
  misc_feature (1)...(201): n = A,T,C or G
accctcaaccttagacaaatattatctacgtgtcacaggaaaacacctcttcccacctgtggtgaccaaggttctgaatgaaagactctgcagcctgtagnttgattctctgtggcaatgtcagcatttgccatgtttgtgctgagaaatcctagactcaggtttcttttatacatatatgtatatatacacttgttcata

SEQ ID NO: 328343 - DNA, 201 bp, Homo sapiens
tagaaaggcggacaaaggttagatcttagactgtcttgtatttttctcattcctgttgattacctacctcaaaattgaatatgtttttcctcctgcctaaracaaaactacttaagggcaaaaatttaaattcttccttggtgtatgtgcaaacaaggttgaatatattcatgcctaccttattttggactaggaatacag

SEQ ID NO: 328344 - DNA, 201 bp, Homo sapiens
agccagggccatggcctatgactgtgtatatgaatattgcctactaaggttgtacaataaacaacctgcaaaactttgtacagtgcttctaactagagcarcaaaattcaccttctccccaatccacattacagcctttgcctatgtgaagacagctaataattttcagtatttggcaggtggtctagtccaagacataca

SEQ ID NO: 328345 - DNA, 201 bp, Homo sapiens
gggtaattctttaacataaaacagagcatcttgcttatagaattattactaagctctttgattaacagtgtaattctgtgttctgtttcttgaatctgagmctttccagagaagaataattctttttaaggcagcagttcccaactggactgtctcaatacactggtttatgtcaataattttattccaggtgattttaaa

SEQ ID NO: 328346 - DNA, 201 bp, Homo sapiens
ataaaactgccttatgtccatttactgttgtatgccaaaatctacaggataataatcgaatattgtaaattaatagtaggtagctctcaagtaagattagygtatctgtctagtcacatgtctacccttgtaaaacaggacttctaatctgtctgcaaggagccattatctccaacaattttgtgagaagtgtctggggag

SEQ ID NO: 328347 - DNA, 201 bp, Homo sapiens
gattcaatgttatatcgtttcaaaacttccacataggatctttttaatttttatttaaatttgggacaagtcttgctggggaaaaacaaaaagttcctctstagaatcatatctattttcacctgtggtaaaccaagtcaaaattatttgataaatgaacaccataattcaagtgtatgacagctcttatgtcttcttgca

SEQ ID NO: 328348 - DNA, 201 bp, Homo sapiens
aaaatgaaaagtagaaggaaatatgggaacctagtatgtaattctccctaaactcagtttcacttactgttctcttaggatttttatgtggttccatgctrggaccaataaaatggaatgtttgaaaagaaacagtaggtatttcctcaaatctcctttagctctgattaatgcactcttactctttacattgaggcacac

SEQ ID NO: 328349 - DNA, 201 bp, Homo sapiens
catccaaaggttttataattttaaagactttttacataatattaagagaaaaataaaaactgcataaatgaatatagcacatttcatctaagtgatgatgrtaaaagaataataccttttaagaagaaggctggccgctccttactcttggctactttagcttattgctcacaagtttctgtcatagcacttgtccacttc

SEQ ID NO: 328350 - DNA, 201 bp, Homo sapiens
acatagcttaggtagtttgccaattaaatatgcctggggatttattgaaaaatgctatccatgttatttggacatgggccaaatgatttatttgctttcaycattctctttattaccagatatttattgagtactacaatattgaggaatgaaagagtcatcccaagcacctaacacaatccctggtgtataataagtgcc

SEQ ID NO: 328351 - DNA, 201 bp, Homo sapiens
aatgaaaatgtatctcgttaattcagccttcccctattgtcctcttcctatccatcaaagaaaattattttaaaaatcattcatatggaaacatacaaggrgtttgaagtgtgtttgtgtgtgtgtgtgtctgtgtgttttacttttgcatatacaaaacaaaaccctctagaaagctgctaaagctttctgacatcatca

SEQ ID NO: 328352 - DNA, 201 bp, Homo sapiens
agactaagcctggcctttcattggatacactttctgacactgagttaattatagaaaaaaaatacagatttctttttcatgattcagtggagcctgaccartcagccaaaattctgtcattcttgggctagattaagaaatagatgtgtcaaaacatctgatacactacaaacatatttctgttgaattttgcattttgaa

SEQ ID NO: 328353 - DNA, 201 bp, Homo sapiens
gcgtggtggctcacgcctgtaatcccagcactttgggaggccaaggtgggtggatctcctgaggtcaggagtttgagaccagccttgtcaacatggtgaarcctagtccttactaaatatacaaaattagcttggcatggtggtgcatgcctgtaatctcagctacttgggaggctgaggcagaagaatcacttaaacctg

SEQ ID NO: 328354 - DNA, 201 bp, Homo sapiens
taatgtgaatcagaagactaagcctggcctttcattggatacactttctgacactgagttaattatagaaaaaaaatacagatttctttttcatgattcartggagcctgaccaatcagccaaaattctgtcattcttgggctagattaagaaatagatgtgtcaaaacatctgatacactacaaacatatttctgttgaa

SEQ ID NO: 328355 - DNA, 201 bp, Homo sapiens
aaatgagtaagatagtgtcttccaccatagacccttagtgactcattgtgactctaatactcagacaagtgactcagtacaaaagtgtataataggaaacrgagacctggtttgctttgtgttttgtttctcagaagcacatataagtatcttgatgttgtcctttacaagtgttccacaaaattaatgtgaatcagaaga

SEQ ID NO: 328356 - DNA, 201 bp, Homo sapiens
ctttggcagtactaaataattccaataattataggtataaatttaagaagttcttcaagctagagctatcagaattcaaatttgggcagcaaaattgcatrtattttattactgaccaacccaatcttaactaggaagaactattattcattcactcattccttcattgaataattcattttttattcaactctttgctta

SEQ ID NO: 328357 - DNA, 201 bp, Homo sapiens
atacagttggtggctttactcacaaagtttatctactggtaaagagagcaaattaattttaaatagctatgaccctctagccaaaatctatttcaagtttytgggaggaagggaagttgagtgccctagtttggcctgacatactttcctctctattttgagaatttgaatgtaaactaccccacctcccctacaaacacc

SEQ ID NO: 328358 - DNA, 201 bp, Homo sapiens
agtctcattttccaccttgagataagagatgaaggcaaaacgaaatagctgaaataaatgtgatagtcaaatatttcaaagccaattttgtgaagccttgstctgaatttataatagtactagtaaactgtcacagctatctagtactgcacagatactttcctgtttctcattttaattcctatgactttatacaaaatg

SEQ ID NO: 328359 - DNA, 201 bp, Homo sapiens
tattctcttatgcaaatgcttcttgtctctttttcgtaatgatagctaacatttttgatgcttactgtttttcagggactacgctatgtatttcacatgcrttctctcaataacaataacaatcaatcaataacaatctcattatccctattttcagatgaagaaactgaggctttgagatgtcaagtgacttgtctgtag

SEQ ID NO: 328360 - DNA, 201 bp, Homo sapiens
aattccaggaggcagctataattacccccttttacacgtgaggtaactgatgttgactaacccaaggctgactcagctggtaagtgatggaagctacaagmgataaaacattatataaaatgtacagtccatatagaaaataagaggtaaatagattaggcttaacatctgggaactagtctccaaattataacttataaa

SEQ ID NO: 328361 - DNA, 201 bp, Homo sapiens
tctgattataaaagtaatatatatttgtagaaaaactgtaaaataaaaatataaagaaaaactactaaaattactgtttttcctaccacagagagataatyacttgaaatattttcctttgagttttttccatgtctgtatgtttattcatgtaatttggaccatactatgtgcaatgagagtttttgcttttattttttg

SEQ ID NO: 328362 - DNA, 201 bp, Homo sapiens
cctcaggctcagacttgatcaagttaatgaaacacccctccaagggttgttctgctgacacatgtcaccatttatgagttgtaattgggtttattaaaaarggagtcatggcctgtgctttagcagtttggcctaagggcccccaaaaatactgagagaagaaatttgcaagccaaactacagctgaaaactagactgggg

SEQ ID NO: 328363 - DNA, 201 bp, Homo sapiens
tggctgctatttcaactagataccttcaataagatataagtttattggagcagagcagaatctatttattgtcgttttcatattttattccaaaattaagwttcaccactgtattctcaagtggcagtaaatggattcttccattatttatattgtcctttttagtgaatttgtggtataatagagggtatatattaattt

SEQ ID NO: 328364 - DNA, 201 bp, Homo sapiens
attcctgtttaatgggtctgagtctgggtataagaattgggatgttaaaaaatctctccaagtgataaataactaaataactaagttaaagcatctagttyttctaacctgctaacctactatgattctgggaaggccttccaacagaaatgggtggttgggttagtgtgcttattatataggcaataaactgagctgcca

SEQ ID NO: 328365 - DNA, 201 bp, Homo sapiens
acccttgggggttgcccttgcacacgtagtccaagaggcctaccaccatgctgacgtgctaaatagcaggttaaaagaagtacagagatggacattgttcrtccgtttaaagcaatgtctgaaaagttgtaagcatgatttttccctcatacctcaaagattaggcacaaagccattcctagatgcaaagggagactgagc

SEQ ID NO: 328366 - DNA, 201 bp, Homo sapiens
catatccccactagagtgaaaggtttgaaaaagatgctgtgtaattctatgagtcatcgtggggattctgtttgctaacactggaccctaaagaagctctrtttttaaagtttagaaatagatttgttagaggataatttagaaattatctctaaattatcattatggcgggccataatcataatttttcaccactctgtt

SEQ ID NO: 328367 - DNA, 201 bp, Homo sapiens
tgtccagagctagaatgtctatgctgctccacaaggtcttaaaaggacccaagtaccttttattttcttttttaccacccttgggggttgcccttgcacaygtagtccaagaggcctaccaccatgctgacgtgctaaatagcaggttaaaagaagtacagagatggacattgttcatccgtttaaagcaatgtctgaaaa

SEQ ID NO: 328368 - DNA, 201 bp, Homo sapiens
ccctataatgtcctgccatggctaattgcttaaatcgtctacctctgtaacttttatggctgctatttcaactagataccttcaataagatataagtttawtggagcagagcagaatctatttattgtcgttttcatattttattccaaaattaagtttcaccactgtattctcaagtggcagtaaatggattcttccatt

SEQ ID NO: 328369 - DNA, 201 bp, Homo sapiens
tgtctcctattagggagagcaattactatttatagactgctggagaggtggggtttgcataacaatagaaacaacaccctggcttactgataagcgtattyccacagtcctttgtgcaaccagtatagacacagctcctgacttccaagaatttataatctgagttctgctacatgtgtaaatggatctcttcctttcctc

SEQ ID NO: 328370 - DNA, 201 bp, Homo sapiens
gaagaataataattctacaaaagttctgtacttgaaagagatttttaaggcaagcttcctgaaatgactttgcagatcttttgctactgattgaatttcartagtgtttgatttgtgttcgttggtaggtaccacattgaacattgggccaggcactgtgaggaggggatgaagataaatcttttgtttggatgaggcctt

SEQ ID NO: 328371 - DNA, 201 bp, Homo sapiens
aggagagacaataaaaactaccttgcatattgtattctttaggagacaggttcagttacatataacagagaccaaaataatgatgtgtttgcaagataggmatgtatttctttcatatatgacagtccctaggttagctgtccagagctagaatgtctatgctgctccacaaggtcttaaaaggacccaagtaccttttat

SEQ ID NO: 328372 - DNA, 201 bp, Homo sapiens
tcagctgcgttgatggctttcagccttgtttaagcagaccagctacggacagcagtaaaccctataatgtcctgccatggctaattgcttaaatcgtctamctctgtaacttttatggctgctatttcaactagataccttcaataagatataagtttattggagcagagcagaatctatttattgtcgttttcatatttt

SEQ ID NO: 328373 - DNA, 201 bp, Homo sapiens
tcttcctgacttgcaggtggccaccttctcactgtgtcctcacatggcctttcctgggtgtttatgcagagagagatctgtctctctctttctcttcttayaaagccacctcttacaaggcccagtcctattggattacagcaccatctttaactcatttaaccttaattatctcctatagagcctatcctcaaatacagt

SEQ ID NO: 328374 - DNA, 201 bp, Homo sapiens
ttatctcagagggcgaagtattcctccccctacccatggctgagttatgctgtgtcaaaagcgaacttattttttctaatgttacacatgttgtacaagtrtaatgtgtgtgtatgtgcatgtgtatacatgcatatgcgctcattgcaagatatatttataaggaaaattaaagatggagtgctcaaaatgacaaaagaa

SEQ ID NO: 328375 - DNA, 201 bp, Homo sapiens
gaaaatggataatgcatggtgaaaagcacatgttgttaaacacgccttgcttatctctgcctggcttattcttacatatcctaaagggttcagcttaaatwatgcttcttctaggaaagtgagattcagggtagagttcctcttaggagcttccccgaaggctcttcttcctatcaaggtagttatcacactgaattgcag

SEQ ID NO: 328376 - DNA, 201 bp, Homo sapiens
tcatatatttacatacaataaacttcacccatttctagtgtataattcaataatgcttagtaactttacccagtgttacatccatcaccataaatcagtgrtaaaccactttcatgcccccagtaaatccctcatgcccacttacaattaatctcctttcccaccccagccccagacaaccactaaactattttctctata

SEQ ID NO: 328377 - DNA, 201 bp, Homo sapiens
gctactcaggaggctgaggcaggagaaccgcttgaagccgggaggcagaggttgcagcgagctgaaatcataccactgcactccagcctgggcgacagagygagactatctcaaaaattaaattaattaattaattaattaattttttaacattctttttattctttattttccaatagaatatttttaaggaatattttt

SEQ ID NO: 328378 - DNA, 201 bp, Homo sapiens
aggacgtggtggctcatgcctgtaatcccagcactttgggaggcaaagttaggtggatcacctgaggtcaggagttcaagaccagcctggccaacattttyagtgtctactaaaaatttaaaaaagtagtcagacatggtggcgtgtgcctgttatcccagctactcaggaggctgaggcaggagaaccgcttgaagccgg

SEQ ID NO: 328379 - DNA, 201 bp, Homo sapiens
ttttcagcagttccctgagctccagttcccacagtgcaacacaaagaaggccaggtgatgcctgcacatgcaagtggttgtgttataggaaaagaaccccmagtgtagggaacttgaatcttttattaggaacagtaatcctgcctggtctttactatggagaaatgcattattgttattatgatggatggttaaaaaaaa

SEQ ID NO: 328380 - DNA, 201 bp, Homo sapiens
tagatgctaggaataaatgagtaagatagtgtcttccaccatagacccttagtgactcattgtgactctaatactcagacaagtgactcagtacaaaagtstataataggaaacggagacctggtttgctttgtgttttgtttctcagaagcacatataagtatcttgatgttgtcctttacaagtgttccacaaaattaa

SEQ ID NO: 328381 - DNA, 201 bp, Homo sapiens
tttttgtcagtattctggatttcgaccatttcaatgggcgtgtagtggtatctcattattgttataatttgcatttctctgatgatatatgatgtgaggcrtcttttcatgtgcttatttgtcatctgtttatcttctttgatgaggtgtctgaggttctgtggcccatttttagttgagttgtttgtcagttttagattt

SEQ ID NO: 328382 - DNA, 201 bp, Homo sapiens
tgctagtatggaatcagatgaaaacttttataaacaacctagaaatttagagcttaaaaaatacaacactgcttaatgacacatgatttttaaaaaatctygtactgtagtttcaagctttatattttgccctagactgatttattatacataatttcacatcatatatttacatacaataaacttcacccatttctagtg

SEQ ID NO: 328383 - DNA, 201 bp, Homo sapiens
atctttccctttcttggttaaatctgttcctaggtatttggtttctgtaaccattgtaaatgaaattgccttctgaatttgttttttgactattattgttktacagaaatgctactgattttttatattgattttgtatcctctaactttactgaatttattagatctaagagttttttggtgtagtattttgtgggcatt

SEQ ID NO: 328384 - DNA, 201 bp, Homo sapiens
attgttatatggaactgggctatcaactcctttacatcgtaacaaacattaccgaacatattttcgtaagtgtattgacaagacgaatgttttaaacactrctacatgcttagcactgtgttagatgctaggaataaatgagtaagatagtgtcttccaccatagacccttagtgactcattgtgactctaatactcagac

SEQ ID NO: 328385 - DNA, 201 bp, Homo sapiens
tgtaattttcagcagcaagcagggcttgggaagagtcctgagttggccttacatagatcagaactcgtactcagcaaaacagacacgttgcatatttgggrtgccccagcttcattgtgctagatcgaatgtcttcatctcttaaccaccctcctttgtttttggtccccagtgctgcaatcttccttttatcaaaatcag

SEQ ID NO: 328386 - DNA, 201 bp, Homo sapiens
tttctatatatgtaagtctcacagagaatatcccattttggattttaatcagggtaaaaaacaatcttcatctagcaaactattgctccaaaatccaattrattgaaggattttataaacaatacaatccacattatatttttatagctttgaattgaaacacatgtaattttttaattttaaaaattaaaaaataaatgt

SEQ ID NO: 328387 - DNA, 201 bp, Homo sapiens
ggtgaagcgtattctgattgaattcatgacatttagagtaatccctcacttatgctagccgtattgttatatggaactgggctatcaactcctttacatcrtaacaaacattaccgaacatattttcgtaagtgtattgacaagacgaatgttttaaacactgctacatgcttagcactgtgttagatgctaggaataaat

SEQ ID NO: 328388 - DNA, 201 bp, Homo sapiens
ctgagaccagagaaacaataactaaaatgtttcatgacagctactactgtattgtggaaattatttattcttagacataggttgataaacttcaaaatatrgcattagcagattttgttagtcttgaaaagcaagcgaactatccatttaaatgctaggaaatctgttttgttattttctatatatgtaagtctcacagag

SEQ ID NO: 328389 - DNA, 201 bp, Homo sapiens
gtacatgacctgattattgacccaacttcagtaacttcattctcagacttggcacatagaccttaagttattcatttttggtgaagcgtattctgattgarttcatgacatttagagtaatccctcacttatgctagccgtattgttatatggaactgggctatcaactcctttacatcgtaacaaacattaccgaacata

SEQ ID NO: 328390 - DNA, 201 bp, Homo sapiens
atgttttgacacttatttattgaataggtgaatgattaaatgtacaaaatccaataatgaatgctattctacaaaagtaaaggtgaaaaaatcaatgtgargtggtttctttgggaacaattttttggaagaaattaatgagtatctacaccaaattacgtatgtattcaaatgggtaaaccgaggaaggggactttccag

SEQ ID NO: 328391 - DNA, 201 bp, Homo sapiens
tctttgacatgtaccgtgtgggactgctattgtcaagtttatggtaaagaaagagagaaaatgggaaggagagagatccttcactaaacatttgttaagcrtctatcatgacagaaacctttattccacaataaagatccagagatgaatacaaattattttccaccctgctagagagattagtgaggtaaatattcaaca

SEQ ID NO: 328392 - DNA, 201 bp, Homo sapiens
tgtactacatcataggatgacaccagtataactagttgaggtgtgtagggggaaaatctcagaaagtttaagtatggctgtatctaggggcacctatagasaagctacacaagctatctctttataaacgggccaaaagtagcagagagggttgtgggttgttgtgattgtatggtacattccctggccttggttactggt

SEQ ID NO: 328393 - DNA, 201 bp, Homo sapiens
aaagtatggtgtatttattctcatcattctgtttatttaggcaacatagtataataattaatactgcaaccttgactcagattctatgtaaatcttggttstactagattcttgctgtatgaccttgggaatgttttacttgatctcttgtcctttgtttcctcttcaacaaaataagaataataattgtacctatcttat

SEQ ID NO: 328394 - DNA, 201 bp, Homo sapiens
tcccaaatcctacgtcacaagagatgattattaaatgaaatgaacaataataaatagaagctattattttgtactacatcataggatgacaccagtataastagttgaggtgtgtagggggaaaatctcagaaagtttaagtatggctgtatctaggggcacctatagacaagctacacaagctatctctttataaacggg

SEQ ID NO: 328395 - DNA, 201 bp, Homo sapiens
aatgcaagaaagcaccttttgcagtgtggttttgaccccctgacatacccaagaagccatttttcttgtctgacagcaagaattccttccatgtaattttyagcagcaagcagggcttgggaagagtcctgagttggccttacatagatcagaactcgtactcagcaaaacagacacgttgcatatttggggtgccccagc

SEQ ID NO: 328396 - DNA, 201 bp, Homo sapiens
ggtttcccaagccccatcctcatggcacataattataccatggtaatgatataccttgttctcgtgtattttcagccttgaatgttgacttttctgtttcytccagtgtgctctgataggaatactcaaagcttcagaattttttaaacatgtctagtaataaatgcttagaaattctctttgagaaggtagaatgtcacc

SEQ ID NO: 328397 - DNA, 201 bp, Homo sapiens
tgtgtttgagagtgcatggggtttttgcagaagaaaatatcattatcattacctggccttgtgtgtcagtaaaacacacatcactatggagagctgctttrtaataatgtccttctttcaatttactcaagggccatagccattgtggggcaaaaaaggatattataatgtccacctccttgtgagaaaatgatctaaggg

SEQ ID NO: 328398 - DNA, 201 bp, Homo sapiens
cactcaataaatactggctattaattttgagttctgaccctgtacctcagggatataggtaaaaagcaggaagaaaatgatagttttaaagaacctaataygctgatattttatagacacagttatttcattcaacctcacaacagcctcattaagtgggttattctcataagagaagtgaaagctgaggcacagagaagc

SEQ ID NO: 328399 - DNA, 201 bp, Homo sapiens
aatggctgctctgtgttaggcactttacaaagatcatttcatgtaatcatcacaacaccctttgtgaacaggtataacttattcatagccacataactagragaagaggagtcaggatttaaagtcagattgtttttctttgaaagcctcatttactagtgtcaaggaaaatagcttctgtggccattgctctgctaccaa

SEQ ID NO: 328400 - DNA, 201 bp, Homo sapiens
gacagaacacagcacatggtaaagaaacagatagtggagtgagtaagcctcatttagaaagagacatcaagagttcaaacgttttctacaccccccaaaaytgatttcttcagagcagagtttcaggaatagtagtagatgtaaaaagaatatttaggggtagaatgtcaccacaccttacctccttatttacacacaaaa

SEQ ID NO: 328401 - DNA, 201 bp, Homo sapiens
ccaagttatactttattattttcatttaaagattccaaaataatcatccctctagaaatgacctggtaatccaaaacatttttaaaggtctaattttttttaactataagcctgtttttgcatcaggaatccaaatttaaagggaagttaatgtttaactgctaagatacataaatattcaatatcaatttttcactttgc

SEQ ID NO: 328402 - DNA, 201 bp, Homo sapiens
atgtggtatttggagtcctcaactggtgtgttaaatcattgcagcatgggtatacatgtgggaggtttggtgtgtggagggaacatgcacagggaggattrctgttgtttctcacttggctgagtttgaatggaaggactagaacagagagtgggaaaatttgcattcctttcttcctctgggaaattcagaactagccaa

SEQ ID NO: 328403 - DNA, 201 bp, Homo sapiens
aaaaattaaaattaccccttgatccatgggctgtagaatggatatcgtgttagtggacatgaaaacattaatgtttttgcacatctgcataagagctcttrgtgactaggtgcatcgacaatgagcaacaatattttgaaaggaatctttttttctgaccagtgcatctcaagagtaggcttaaaatattcagtaaaccat

SEQ ID NO: 328404 - DNA, 201 bp, Homo sapiens
tcttgacctctgccatcaatatttatttaagtttattcagttcttcgctaacataaaagagtccttttttccatccctccaggtaactatactaattctcstgacccttcgtggctgcatttctcttgctgcctccatttcttcatcatcgtctcactccacaaaccaccctgcaatggttactgtgccccatgagttaca

SEQ ID NO: 328405 - DNA, 201 bp, Homo sapiens
ccctaatccaataaggactgtttcttacagaaaagggaaatttagacacagagacagatacgcacataagaagaacaccatgtgaaggcaaagacagaagkctgagcatagtagctcacacctgtaatcccagggcttttgaaggtggaggcaggaagatagtttgagcccaggagttggaggcagcctgggccgcatagt

SEQ ID NO: 328406 - DNA, 201 bp, Homo sapiens
tactccaacaaagtatacattgacagtatttagcacagtaaatcagtatgttttcatataagcagatattggatacaactagctagacaaatttctaagtrtattggttacaaaaggcctttaatctgagtcccagctactggtctaacatctcacaccttcttcctacttatccaactctctacccctattaaatggctt

SEQ ID NO: 328407 - DNA, 201 bp, Homo sapiens
ttcagtcatcctgaaaaaaactgtaaaagaaagcctgtttaggtccctgaaacaacttttcctctgacccatttagtgtactgtttcacttcattttcatytgccagcagattgaatgactttctctgggctcagcatcattaggctgaaataaaaagactgcttttaagaaaacgagttgacaacttagaagtttctagc

SEQ ID NO: 328408 - DNA, 201 bp, Homo sapiens
ggagagttttctctttattaatgtaaataaacaataaagagaaaactgaccacacaaaactttaaaccacataggtttacttatataaaccatgaagaatsattcatagaactatcctactagaagtaggaagcagagagagtgggtatgctaatggcgaatctaacaaatcttaattcaaggggaacatccaaatatata

SEQ ID NO: 328409 - DNA, 201 bp, Homo sapiens
ttgcatttctgatttctccaacatagagactggtactataatgtatgttttgaagcaaagtgtagaaatgaaaggggggagtgagacaaaactagtgagamagatagatcattatgtggaagcctcaaggagagttttctctttattaatgtaaataaacaataaagagaaaactgaccacacaaaactttaaaccacata

SEQ ID NO: 328410 - DNA, 201 bp, Homo sapiens
cactttctcattcataaatattaattgaatacttcctataagacacctggtgctgcactagagatgcacaaatgaataagaaatagcatctaagaactatycaattgaggcaaaaaaaaaaaatgtgtaaatcaatggattccccaatgcctgttccctaatttatgcagaaccccctccatgaagttttccacaaagcct

SEQ ID NO: 328411 - DNA, 201 bp, Homo sapiens
agagtgattagagcctgcttgtgaatccagttccctgaaggttgactcagtcaaataataatgctttactctctggtactctgcaaccaactgacattgcrctctcctctcctttcagcagacactttagagttcaatattgaacagcaccctaacaaatagtattctttatgctttagaaaataaaattagagagattct

SEQ ID NO: 328412 - DNA, 201 bp, Homo sapiens
gaatagtgtttcatgccaggtactgaaagtactttgttcttagggagctcagagtgattagagcctgcttgtgaatccagttccctgaaggttgactcagycaaataataatgctttactctctggtactctgcaaccaactgacattgcgctctcctctcctttcagcagacactttagagttcaatattgaacagcacc

SEQ ID NO: 328413 - DNA, 201 bp, Homo sapiens
aaaaaaataccttgaatagtggaaaagtagttaataatggtgaaagtaataatagtaataatatttagtgattaattgagtacctactatatcttccatartatatactacatacattgtgtttgatgtcacacaaaaaaaaatcatgaagacttatttttctcatgttgtggatgaggaaattaaggcttagttaagtgg

SEQ ID NO: 328414 - DNA, 201 bp, Homo sapiens
ttcacagtctattttctcattccccagtgttctatactttgttttcctcttttcttcctcatgttctagttgttcacataatttcagctctatttaatgaraaaacgatttcagagttccctagggcattttagtcatgttgcgtaagaacatttccttcttaaaaatattatcagaatgccaagctttaacatatattaa

SEQ ID NO: 328415 - DNA, 201 bp, Homo sapiens
gacagggggtatgaagctgagaagaagggctacaagggtaatggacaacaacaaacagattcctggcctttgattaaatgagtaaaacacagaaagcactyagaacagtacctagcacaaagtaagtgcttggtaagtactggctcttctcagttttagcccacagcctcaaatcccttcaatgaccaagcaaatcacaga

SEQ ID NO: 328416 - DNA, 201 bp, Homo sapiens
aacaaatatgatttcttatcacatttacgcaaaaaaatgttggcactatttaagtgccatgtctaaagacaataaatctagtttgtttggcagattcaatmtttcaaaataagatatccatgagagatcaaataatcaaagaggtccctgattatggaagtctaggacctctttgacatgtaccgtgtgggactgctattg

SEQ ID NO: 328417 - DNA, 201 bp, Homo sapiens
tctccagagtctttatttacccacaagatacgtcccattgagaatcatgaaaatattatgactaactagttgatccattatatacatatgtatgccaaggktatgttttccatgcccagtgtttttggtaaagacatgaaattttgttttgtaaaacctgctggattgctatttgttttatcatttgattaggattccaca

SEQ ID NO: 328418 - DNA, 201 bp, Homo sapiens
atattaaatggaaaatttcagaaataaacaatttatatgttttaaattatgtgccattttgtgaagcatgataaaatctctcactatcctgcccaggaccsgaataatcccttagtccaggtatccatgctgtatacactacccaccctttagtcacataggagccatctcagtgaccagatcaactgttgcagtattgca

SEQ ID NO: 328419 - DNA, 201 bp, Homo sapiens
ttgaaatattttttcttttctgaaatcgatatatatacacctctgttttttagttggcatgtttacattttttcttattgagttttaaaatctttatatamaacccatcaatattttgtcttttatattttgtatcagatgatttccaatgcatacaagtagttaactctgttagtatttcctttagagttttctttcttt

SEQ ID NO: 328420 - DNA, 201 bp, Homo sapiens
ctataaaaaatacaaaaattagccaggcatggtggtacatgcctgcagtcccagctacttgggagtctgagatgggaggatggcttgagcttgggaggcaraggttgtggtaagccaagatgggactactgcactccagcctgcatgacaaggtaagatcctatctcaaaaaaaaaaaaaaaaaaaaaaaaatccagagat

SEQ ID NO: 328421 - DNA, 201 bp, Homo sapiens
tttgctaaaagctttggagaacaaagtagacctcatccctttgctgtgggtctctgtaagatggaagacataccatatataagccatcacaggattcctcrgttagtcatacaattaacataaattgtgataagtgctgcaaaggaaaagaccagagttccttgaggaaataagactagagggaaggtcaaaggaaggttt

SEQ ID NO: 328422 - DNA, 201 bp, Homo sapiens
ctgaatacccaaacttcttcctgctgccatcctcttaaagctcccccagaaggactgcagggacttcaccctttggacatatgccatctagtctgtaaatrtgtcatggttcagtagatgacttcttagtccttcctagatttcaaagttttcttttgggcctgaaggacgttctgttgtattacatctaactataatact

SEQ ID NO: 328423 - DNA, 201 bp, Homo sapiens
cctgcccatattcctcactgtgctgttttattcctattttattccccaatgtttgggatatagtaagtgtttggtgattaactatattctaattcttctgsaatgtgatccttctagtttctttcatgccttctttctcaagatgtttctcccacattaaatgttctctcatttcttctttctcaagctgtttctcccata

SEQ ID NO: 328424 - DNA, 201 bp, Homo sapiens
caagccctgaaataacatgctgactatacccatccactgagttccagtagatacctaggctttaataaatagcacttcttaacccaaattgaaattacctstattcttttgtgtgagcctaagaaaatagtccaaggaagtaaactgtattgttgctgtgacatgataattgcaaaatgaatctgtttattccttcctcct

SEQ ID NO: 328425 - DNA, 201 bp, Homo sapiens
catagaccattgactgaaacatgccacagggccctgcctaaagggtccaggaaatacagggaacagatcagtatttggcaagccataattgtctctttccyagtatttctgtcaaggctaagcaaatctaagggccttgtatttttttacttctcattttaaccttttatttgctattacacttacctaggtttacttttg

SEQ ID NO: 328426 - DNA, 201 bp, Homo sapiens
cctcggattatgtctcccgagttgccacccacaagaagccctaccacagtgcagtagcactatgtgaaggggcctacagctcagcaaagagcagatctgcstagccaaacccggaaaactcagagacgttagggtagtgacaacagatgggattgaaagcagagtctgagaataggaatgaagagtcccccaattagcatg

SEQ ID NO: 328427 - DNA, 201 bp, Homo sapiens
cagtgatgttttctctgtatttcaatgccttttaaaaacatatactgatgttaattaagaagaatctgtcaaaaaccaggcctaattgtaaaagtcatgcmaaaagaaaagtctatgttaaagaaactgattattcatttaaaaacttaaaaaaaaaatctagaatgttgagtaatcacaaatatttgcattccccaaata

SEQ ID NO: 328428 - DNA, 201 bp, Homo sapiens
tctctctagaatacagtgataggtgttttgttttttttttttttaatctggacaagtaaacagaactaataagaaaatacattggttatacttttccactkgggaatgaattacagaatcagaatgttgtcactggtagattattggcagtcaattgtccttctgtacattcttatttctatttttagaaacaaaatcaaa

SEQ ID NO: 328429 - DNA, 201 bp, Homo sapiens
acacacacacacacacacacagataacaaaagaggtctcttgagacaagactacatgtgatgtaattctatttttatctgggaaggagagaccttcaaatmtttggtggtgggaactgtacctagttccctgctgactgggtgacttggaattaaccaggttagaagacactgtgtgtgtgcctagttgggtgttcagaag

SEQ ID NO: 328430 - DNA, 201 bp, Homo sapiens
acttctgtagtcagaatgagcttttataccatatgcattgataaaagaatatgtctaaatatctgtataatgtgaaaagctgagaaactcattaccaccaygacataaagccattaggaatttcattaattgctgtggtacagaaagtggaagatctaccttttagttcaaactcagctcagctgtatggagcctaagcct

SEQ ID NO: 328431 - DNA, 201 bp, Homo sapiens
gcattctattagaatgacatttcctcggattatgtctcccgagttgccacccacaagaagccctaccacagtgcagtagcactatgtgaaggggcctacarctcagcaaagagcagatctgcctagccaaacccggaaaactcagagacgttagggtagtgacaacagatgggattgaaagcagagtctgagaataggaat

SEQ ID NO: 328432 - DNA, 201 bp, Homo sapiens
ggttcagacttccctgtgcttatgcctgcatttcttatgttgacatgagaaatcactgcttggagatatgcaagaaaattggaaagatgaacccagctttstataattgatgtaatcctgaaattctgtatgtgcgtcaagtgattgccaaacaggtcatttttaattacttgagcaattaggtgcttaaatttggcatgc

SEQ ID NO: 328433 - DNA, 201 bp, Homo sapiens
gtttgctctctctagaatacagtgataggtgttttgttttttttttttttaatctggacaagtaaacagaactaataagaaaatacattggttatactttyccacttgggaatgaattacagaatcagaatgttgtcactggtagattattggcagtcaattgtccttctgtacattcttatttctatttttagaaacaaa

SEQ ID NO: 328434 - DNA, 201 bp, Homo sapiens
cctaaactcagatctcctttgatcatcacagaattgcttcactgtctcagtgaagaaaacaagtatattcataatgagctccggtaaaaatctgatgacartgaggaatctaaggtaggaactaaaagctatgagaactgagagaggagaacaattaattttagattaggtcgattctcagaatgtattttcataagaaga

SEQ ID NO: 328435 - DNA, 201 bp, Homo sapiens
cccttctcagcctctagtaaccatcctttactttctattgtatgtccatgagttcaattgatttggtttttagatcctacaactaagtgagaacatgagaygtttgtctttctgtctcttgcttatttcacttaacataatgatctccagttccacccatattgttgcaaatgactagatctcattctttttgtggctgaa

SEQ ID NO: 328436 - DNA, 201 bp, Homo sapiens
gggaaatctttacaggctgcttctgagttcaaccctgcttctccctgcttcctcctacaatgaatacctgcttcagtgggaagaaaggaaaaggaaaaacrcacagagaagtaataaaaacactagtagctcgaaatagagcctagttacacagagatgtacattaggaaaaactgaaattatttcaagcatttgagcaat

SEQ ID NO: 328437 - DNA, 201 bp, Homo sapiens
tttctcattgtgttcttgtcaggttatattatcagactaaccctggcctcaaaaaatgacttgggatgttttcctttgttctctattttgtggaagagttwgtataagaatggtgttatttcttctttacatatttggtagaatttacaagcaaggccatgtggacatggaattactttgtggagtttttaaacttcacat

SEQ ID NO: 328438 - DNA, 201 bp, Homo sapiens
tctactacactgtcattagcctaaacttttccaataagcagccatattctgactgaaatgagaagctattaaatattgtaaaactgaaatatgtgcttggrgtttgttgtcccatctttcactttaagatggtgctcaggagtttctgaaacgttttgctgggaatgagtagacgatgataacttctctgaaagaacagcc

SEQ ID NO: 328439 - DNA, 201 bp, Homo sapiens
tacattgtaaaatcatgcctttcataacagcggattggaatgccctcttcctgatttattagctgtgggaacacaaacatgttgttgaacttttctaagaytcattacatgttaagttgtagtaatagttggcccaaggattaaataaaactatgcaggcaattctttcagacaatgtgcctggcacatggtacgtagtca

SEQ ID NO: 328440 - DNA, 201 bp, Homo sapiens
tgaagcgtaacatctattttagagaaagttctgcctgaataattcatttacatttaatatatgactcccaaagatcctaataatgagctttagtgtatatraagatctaaagtttattaagtagctagtattaaagggtctctatcagtatattacctcatttagcctcaaaataacctgctgggaaagtactcttgaatc

SEQ ID NO: 328441 - DNA, 201 bp, Homo sapiens
aaaataaaatcacgtgcaaaaacctagaagcattttgttaacactgctaagagtaagaagtatcttcagctactcagaaagctttctttcatctaggagarggcactttatgttaccttacaaggtcatttagtgacacacttaatggcagaattttctagtacaaattctagtagcattttcacattggtaaaacagctg

SEQ ID NO: 328442 - DNA, 201 bp, Homo sapiens
tatttaacattagtttagttcttccaaactactaatactgcttttcaactcactgtaggttacagataggataatgagagcaagagagaaagagagaactrgtaggactcaaaaagatactaaccagtgattatagagtgcctgccctgtggttggggcttgataaatgacacaggatcttgtcctcaaaaaacacaatgt

SEQ ID NO: 328443 - DNA, 201 bp, Homo sapiens
gatatgctgtgtagatgttggccttttttttatctcaaaactaattatacagaaaaaaaaaaaagtctgtatcaggattaggatgtaggcaggtgcacctrtgcaagaaacatcattgattttatattggattgtgaaagagaaagtacattgtaaaatcatgcctttcataacagcggattggaatgccctcttcctgat

SEQ ID NO: 328444 - DNA, 201 bp, Homo sapiens
aatgatttttccaaatgaatttatgttcttcagagttaatattgatgatcttatatagttacttcatgactgggtctgtgtcttggcaaatctctctctarataagtgattcttataaatgttgaaaattcctttacaggttaactttcccatcattttttattgcttatgctataaagtttaagcctagatgcatccttt

SEQ ID NO: 328445 - DNA, 201 bp, Homo sapiens
ctccttcactttcactgaggtgactgaacatgtgctcaggctttaggaaaggtaggagttttcagagatagtcattgcttctgagattggtgtgtgggcartaatgcagcccagggcagaggccccagtctgcacatctctctgtacaggagggccgtgtatttgctattgctagactaagaacatggatgacttttggca

SEQ ID NO: 328446 - DNA, 201 bp, Homo sapiens
gacagagtgagaccttgtcaaaaaaaaaaaaaaaaaaaaaaaaaaagaacatcacatattactttgcagctgtaattctcatatttggctgattatacaarttgtttgagaagctaacaggtggttcaaacaaaaagagaatcgttggctccatccccacacttaccaacttaccaagtcagaacatcacagggtagctac

SEQ ID NO: 328447 - DNA, 201 bp, Homo sapiens
agtagtactgagacatgtagcctgggcattgaaatttgggggacatttggacagtttatatagataatgagactgtataattgaccttgagatcaccctgraaaattcaagtaacaggctaaggtctctcacagatgccttcctgaatacccaaacttcttcctgctgccatcctcttaaagctcccccagaaggactgca

SEQ ID NO: 328448 - DNA, 201 bp, Homo sapiens
gactgagcgtaaacactagacaaatatgaatgaatgaatgaatgaaattctatagggtgaaagaaacaccaaaacttcctgctcatggtaggaacacgaaraaatagataccatttatttatgtatgtgtgtgtatacatgtatatgtatgtatatataaacattcatacaagtacgcaacatacaaatccactcaaaggg

SEQ ID NO: 328449 - DNA, 201 bp, Homo sapiens
ctttccatctgcatctcccatgacccccacctcatacctgctgcaatacactcagatgtggttcatcattataatcctagtgccctaatacttgactgagmgtaaacactagacaaatatgaatgaatgaatgaatgaaattctatagggtgaaagaaacaccaaaacttcctgctcatggtaggaacacgaagaaataga

SEQ ID NO: 328450 - DNA, 201 bp, Homo sapiens
cctgatacacaaatcagaataaatatctttctcttgtgcttttgtttatttgtgtgtgtacgtgttcaaacgttttgtagtttatgacaaaaaaaaaacartaagtagaagaagggtcatattcacatacatatatggccagaaacataatgtcatacatgataatgcatccagttttatatgtcaatttaaaagataaat

SEQ ID NO: 328451 - DNA, 201 bp, Homo sapiens
aaatgaactgcttccagtttagctaccaactttttacacaattttttgtatgtggtttggaaccaactctaacctaaaacagaatgctttaaataaaatartcctataaatatttagcaggtacaaacctcctatagcccacactggccattttgagatgatacttctaccagtttctttgtttgtcactatcctaagaag

SEQ ID NO: 328452 - DNA, 201 bp, Homo sapiens
tatcctatattgttccttgtctggttatgaaatatatgaaatatttgaacaaaatatgtcttcttttacctgggcataggggtgtacatctatagtcccarctattaaacaggctgaggtgagagggttgcttgagcccaggagttcaagactagcctgggcaacatagcaaaacactgtctctatttagaagaagaagaa

SEQ ID NO: 328453 - DNA, 201 bp, Homo sapiens
tatcagctgcaaattttccaaacttttatgctctgcttcccttataaaactgagtatctttaacagcacccaagtcacctgttgaatgctttgctgcttaraaatttcctctgccagataccctaaatcatctctctcaagttcaaagttccacaaatctcttgggcagggggaaaatgcttcctgtttctttgctaaaac

SEQ ID NO: 328454 - DNA, 201 bp, Homo sapiens
agaggcagattcactttctcattcataaatattaattgaatacttcctataagacacctggtgctgcactagagatgcacaaatgaataagaaatagcatytaagaactattcaattgaggcaaaaaaaaaaaatgtgtaaatcaatggattccccaatgcctgttccctaatttatgcagaaccccctccatgaagtttt

SEQ ID NO: 328455 - DNA, 201 bp, Homo sapiens
aaattatgttagttcacacacataaacatacacatacacacccctccaccactctcttaccattgttggtgttctctcataggtgcttcacactgtaggcrttaccatgggtctcagaggtatttgctcagaggcagattcactttctcattcataaatattaattgaatacttcctataagacacctggtgctgcactag

SEQ ID NO: 328456 - DNA, 201 bp, Homo sapiens
acattataagtactcaacgaatgttatctatttacagtaactatacttactgtaatcttaatccacttcagatgtcacatgaaatatttttacggtacacrtgagatatgcctcaatatcttagatcctgcccctgcctcctttcctgttcccctagaggacagtctcactagtatttccctacaaaatcagaatggttgg

SEQ ID NO: 328457 - DNA, 201 bp, Homo sapiens
ggatctggctgggtgcggtggcccacacctgtaatcccagcatctggggaggctgaggcaggtggatcacttgagtctaggagttcgagaccagcctgggmagtatagcaaaaccccgtctctataaaaaatacaaaaattagccaggcatggtggtacatgcctgcagtcccagctacttgggagtctgagatgggagga

SEQ ID NO: 328458 - DNA, 201 bp, Homo sapiens
ggcattttattaaatgctagggaaagggaccacaatcttagcttcctccaaagttgcttcctttagacatcctgacacagtctgcaggatgaactagccamgccctcaggcactcacatagtttattcagcactgttcgtgtctcagtaagtccagcggtcttatgtctccgtagagcaggggcaaagcaggtgacaagcc

SEQ ID NO: 328459 - DNA, 201 bp, Homo sapiens
aactaaaactcatacttcatctttgcctctctccctaaaatttcttctcacacaaaagaatcattctagatataaaatattttaagactttctgtatagcytcacctgttatgtttcaaatcttagtgtatgatctagtgtcaaattatggtgagtaggggaaaaatgaaggcagagggattttttttctggagttatacc

SEQ ID NO: 328460 - DNA, 201 bp, Homo sapiens
gtggcagttgtctagatgagcttgaaggtgtgtgcaaagcagcagcagacaaggccaaaaccataaactagaactgtatataaaatggagggccttaaatkccagggcaggaaggaactcaggcttgcttataaacttcttgccacatttcctgagtgtgatttttcttcctttaccagtagtgtcagaaagaattaataa

SEQ ID NO: 328461 - DNA, 201 bp, Homo sapiens
cagctgtggggctaggaactggttggcattttggatccagagatttgtaggctcttggcttggagaacaaagacttcattgcctagttgatgacaatatasaaacacatctgcagagtatattctttggcatcagcaaatgccagcagtatttagtgaacctctatgtttctagtccccattcacgtctcctttttatctg

SEQ ID NO: 328462 - DNA, 201 bp, Homo sapiens
cagaggaagattggaacagaagataagcctgtgatatattcaaacccttgagcaatactgtctccagggatcaaagtccttttccctcaaccagtaatcayttgatgaagcataacaattaatgacccttgggtccagcataagtctctcttttttcagatatttaatttctccccatttcgtttcatcataaatttaaaa

SEQ ID NO: 328463 - DNA, 201 bp, Homo sapiens
atttagaccttttctaaattctaatcatgtctttcaccatggaggtaagatgataaagcaaagctctccagtagaacaacattggcaggttgccataaacyttaataccccaaagcttatacatatagtctcctttaactcattactgtgtcctaacttccaagaatgaaagagcaatttttcttaaagtggcaagtaaaa

SEQ ID NO: 328464 - DNA, 201 bp, Homo sapiens
tctaacaaaatcatgtgaattgaactcttaacacagtgcctgacccaaaagtgtgcctggtaaaggttgttattactgttgctgcaaatttttaaatattwtcccaaatatatacatttacaaattgcataatgtcctcatatatggctacatttgcttcttgaagaaccacatgatattgatgaaataataacttttaac

SEQ ID NO: 328465 - DNA, 201 bp, Homo sapiens
atctcccacatcttcagatagcaaatttaattagaatctccagtggatcactttctagggcaggaacaggacatggagacattgaggctgcttccctggartagaggaagagtcttcccaagctttctttgtattgacctgtatcaaatgtctcagaggaagattggaacagaagataagcctgtgatatattcaaaccct

SEQ ID NO: 328466 - DNA, 201 bp, Homo sapiens
gtatgaaatgagagtatgttactaactttctccaacttgtgatctaacactttgagcattacagaagcaaggtcagaacaaccaggatgagagttgggtcrtatttaaggtcaggaattatacaggtaaatcataaaaacaacactaaataattcaagcccacagacaaaggcactggagcctcagaagagaacctcaaga

SEQ ID NO: 328467 - DNA, 201 bp, Homo sapiens
cgccaccctgcccagataattttttgtattttagtagagacagggtttcaccatgttggccaggatgttatcgatctcctgacctcttgatccgcctgctyctgcctcccaaagtactggaattacaggcatgagccactgcgcccagccctgggggggtattcttagttcttttgttctgtctcattctttccctcaaga

SEQ ID NO: 328468 - DNA, 201 bp, Homo sapiens
aaagtttaatctatttgactgactctccaagtctatgaaaatgtcaatcctctgatttttctagttctcaaagtagagaggaggctgtgacagttagggcyagaactggaataacagaaaccccaactgtgaagctctccgggccccaaactatcagtagcataaaatatgaccaaggtacttaaatattaccgtaagtgt

SEQ ID NO: 328469 - DNA, 201 bp, Homo sapiens
tggtttctggagccaaactgtctagctttgaattctgcctctgacacttaccagatcaatgacttggggcaagtttcttaacctcttggagacacacttttctcatctgtaaaataaggtaattataatagctacctcataagttatcgtgaaagtttgattgtgttaatatatgtaaaatactttaaaatagtgcctggc

SEQ ID NO: 328470 - DNA, 201 bp, Homo sapiens
ctcccactgtaacttggtgtgggaaaacaaaatgattctaggcacaaaggacaaaggtaaaccagtcacatgcgttatatcagagcaaatagaatgtccarttgagctgcccaatcatgagcaggatgaaagaatttagtaactctgtaagaatgccgcaatcaaaaccagaaagaagcgtattattgtaatctaatctat

SEQ ID NO: 328471 - DNA, 201 bp, Homo sapiens
atgattctaggcacaaaggacaaaggtaaaccagtcacatgcgttatatcagagcaaatagaatgtccaattgagctgcccaatcatgagcaggatgaaakaatttagtaactctgtaagaatgccgcaatcaaaaccagaaagaagcgtattattgtaatctaatctattaagcacctggtatgtattaggtggtgttct

SEQ ID NO: 328472 - DNA, 201 bp, Homo sapiens
atagttcaaggggcagaagggaattaattgctcatgatttatgctgtaggaaaacttaaaataaattcaattaaaaagtgctgaaatacaaaaaataaagktagaaaatggggtgaaaagaaagattgaagcccagggaacccaataaagggcctaaataataccattacagaacttatgaatatgttacaaataggaaga

SEQ ID NO: 328473 - DNA, 201 bp, Homo sapiens
tgtttattccttcctcctcaggaagactgtttctacctaagtttctgattggatcagaagctctccctagatgttactgtagcacccaaggtcatttcacrctatgtcatgatagcctgtttcctaggcagtcaccccattccttccctgtgctcaactagagctccttgagggtagtatcttttgtagctgaattcccag

SEQ ID NO: 328474 - DNA, 201 bp, Homo sapiens
tcactgaaaatagcgacaaagagcaaagcttgagataattatgatgagcacagacttcacaaaaattaaaaaaagaagagagaaaaactttaaagctataycaaacaggagctatagagcttcaagaaaatgagctagtggcccaaggagtattgatttagtcaagcattcaaaaaatatatcactttttcagagaaacaa

SEQ ID NO: 328475 - DNA, 201 bp, Homo sapiens
tgactactgcctgctcaaacttcatatgtgaacttgatattatgtccttctaggatccttccctgacataatccttaactcttggacttctttcccctctrttgttatttaaaagtcttcgtcaaggtttactgacccctgtccagtacttgttgatttcctttggtaactgctcaaaataataacagccccatttttctt

SEQ ID NO: 328476 - DNA, 201 bp, Homo sapiens
attttcccagacacaactacccacttcaagccaccattatgtctcatcagaattagagcagccacctaactagtctttatgtcccaggcttaagtccccamaatgtattactcacactgcgcccagtgtgatctttgttcaaataaaccataatactcattatgctcccactgacttttagataaattccgaccttcttgg

SEQ ID NO: 328477 - DNA, 201 bp, Homo sapiens
actttttgggtgctaacatgaaaagggaaatgctcattgtggagtaatttgaatttcagattttttaaagtacatatttcaaaatctaaaaaaaaaaaaaattgaaatctaaaacattactggccccaagcatttcagatgaggaatactcaacctatactataaatcaagcttcattgttagatgattttgcccactgta

SEQ ID NO: 328478 - DNA, 201 bp, Homo sapiens
taaattccacctctcaaattactcttaaattccacctgtattttcccagacacaactacccacttcaagccaccattatgtctcatcagaattagagcagycacctaactagtctttatgtcccaggcttaagtccccacaatgtattactcacactgcgcccagtgtgatctttgttcaaataaaccataatactcatta

SEQ ID NO: 328479 - DNA, 201 bp, Homo sapiens
agtaactcaaatttataatcacatttttattaaatggtagggtcagaattcatccctactattttgataacttctatgaaagtcatttttcttgctgtgarcctatgtggtagatgttatttaaaccattatacagatgaagaaactaaggcttagtaagttaagtaagttactcaatatttagggtttgtatgaaaaagc

SEQ ID NO: 328480 - DNA, 201 bp, Homo sapiens
ggtcatattttatttaaaaatctcagttctagccagtcacgtcctgttcatctttttgtctcatgtacttactattaacatgttacatattgtccttctcragtctatgaaaccatatccttcacttcgttagattattcactagatagaatagattctcatatctcattttcttatagcacagatgtgatgatgatgtaa

SEQ ID NO: 328481 - DNA, 201 bp, Homo sapiens
atgccacgtagagctctccagagactttgccttgaccataagcacaattaacttttagccaactgcaaagtttctgacccactgtttacggtcatattttrtttaaaaatctcagttctagccagtcacgtcctgttcatctttttgtctcatgtacttactattaacatgttacatattgtccttctcgagtctatgaaa

SEQ ID NO: 328482 - DNA, 201 bp, Homo sapiens
gaatgagcctgtggaatagtttgtagtgttttttttctgctgtgcctcctcccttcagttctgcatttggcatgaggttcccttgaataggccagaatccytggtagaaattccaaaagaaaaatgcagtgagacatttttacctcctactttgtatgagtagagtaagtgcaatagatctttcagctcccagcaaatgaa

SEQ ID NO: 328483 - DNA, 201 bp, Homo sapiens
agctccccctttcctgccctgggaccacaatctggttagaatgagcctgtggaatagtttgtagtgttttttttctgctgtgcctcctcccttcagttctscatttggcatgaggttcccttgaataggccagaatccttggtagaaattccaaaagaaaaatgcagtgagacatttttacctcctactttgtatgagtag

SEQ ID NO: 328484 - DNA, 201 bp, Homo sapiens
acgacctggcataaacctttcataccttctccatgttcttacaaacatatacaaatgtattttcagatatacgtggggcctgacattatttttacaaaatragtttatgttttacacattgttccacaatttttctccatgaacaatacttttatcaaaaatgagattacatgtatacatatgtgtgcttaatttcgatat

SEQ ID NO: 328485 - DNA, 201 bp, Homo sapiens
caaactggaagaatgtagcaaaatcagccctgatagtctgtgagccacttcatgcagggcatataaggtcaatgtcaaagacagaaaagggagaaaacgamtctaataaacctaacaaataagtattgagtaatttcagtatgtacaaggcacattgtaaggtaatatgtgggatgcagaggagatagaatcatggccttc

SEQ ID NO: 328486 - DNA, 201 bp, Homo sapiens
aaataaacagttacacatgtatctctattacacacttgaatactatcctatgcaagttgtttacagtgtttctcacaattgcaattcaatattacatgtayacatacacagataaacatcaattatcagaaagtgtagcaatagtagatactttctcagtcactacaaacaaaacaaaagaaataaaacatcctcccaaat

SEQ ID NO: 328487 - DNA, 201 bp, Homo sapiens
aaggctagtcttttcaatgaatgatactgggaaaatggaatctccacatgcaaaagaatgaaattggactctaatgccatatgcaaaaatcagctcaattkggctaaaagacctaaacgtaaaacctaaaaccataaaatttctagaaaagaacataggggaaaagcttccttgaccttgtcattgacaatgttgttttgg

SEQ ID NO: 328488 - DNA, 201 bp, Homo sapiens
ccagacttttgtaatccctccctccaactaccttatcctacctgctctacctccccattcccagtcaactattactctcctttctgtctttatacattaamttgcattttctataattttatataagtgagatcatatagtatgtactttttgtttgtcctctttcactcaacatgattatttaaagattagtccatgttt

SEQ ID NO: 328489 - DNA, 201 bp, Homo sapiens
gggtcttgatgaagtggttgtgaaggctcctgagatttaacttgagaaatggagtgggcggagctgggatttactggatgaggaagttgaaagagaagcakatttgaggagggaagaaggaggatgaaagctcagcttttggagctgttatatctgagaggtctgtgagatatctgagcagagatgaccagcaagcaacag

SEQ ID NO: 328490 - DNA, 201 bp, Homo sapiens
atattttattggggtaaatgtgtcaaattctgaaataaataaaatatttttgacctcctttgaaatttggaagacaactagatataatttaggcatactcyacccttaccccaagctcagagcccagtgtggctaccgcagttctatccaaaggacagattggtgacctacctaacacagaagataacgttcattaagtcc

SEQ ID NO: 328491 - DNA, 201 bp, Homo sapiens
gtctcactgctgctagattgtgcagtagcacaatcatagctcactaaacctttgagctcctgggctcacgcaatcctctcacctcaacttctcaaatagcyaggactatgaacatgcatcaccatacacagctaatttttaaaatatttctaagatactgggtctcaccatgttgcccaggctgtttttcaactcttggcc

SEQ ID NO: 328492 - DNA, 201 bp, Homo sapiens
agccctgtatttggtgatcctgtgaaatgctctgtgccatcaactgagaatacaaagataaattagacttagctctttcctgaagagactcccaatctaasagagaccatagcagacaggaaaacaattagcattccatacaaagctgctataatcgagggcatattctgacagggtatcaagaatggaatatgttaattt

SEQ ID NO: 328493 - DNA, 201 bp, Homo sapiens
tctttctttctttctttctttctttttctctctttcctttctttttctttttccttctttccttccctccttccttccttcctttctctctctctctctcycctccctccctccctcccttccttccttcctttcttcctctctctctctgtctctctctctctttctttctttctttctttgactatcatgtactgaatg

SEQ ID NO: 328494 - DNA, 201 bp, Homo sapiens
atttatttattttttaattagagacagggtctcactgctgctagattgtgcagtagcacaatcatagctcactaaacctttgagctcctgggctcacgcartcctctcacctcaacttctcaaatagctaggactatgaacatgcatcaccatacacagctaatttttaaaatatttctaagatactgggtctcaccatgt

SEQ ID NO: 328495 - DNA, 201 bp, Homo sapiens
ttctttgggagattatgaaaatgttttaaaagttgaccgtcatgatggttgcacaattctgtaaatatactaaaagccactgaacaatgcactttaaatargtgattttactgtaggtaaattatatctcaataaagcttacttaaaattcttacttaaaagttaaataatttatatagccacagtgacattaatactatg

SEQ ID NO: 328496 - DNA, 201 bp, Homo sapiens
ggtgagccttttccttatgactttcccttgagtgtctgaagaaagtgagagcaagttgtttaaggttagaatggcttggaaactttgcagagtaccacggktatgcctgtatgtaaaatattaggccaagaaaaacctgtcattttcacacatgtttgtgggctcatacctctggtggcctgtgaaagtctagggatgccg

SEQ ID NO: 328497 - DNA, 201 bp, Homo sapiens
atttcctggggctagagggagaggctatgggaattaggagatgctgatcatgggtatgggatttctttgggagattatgaaaatgttttaaaagttgaccrtcatgatggttgcacaattctgtaaatatactaaaagccactgaacaatgcactttaaataggtgattttactgtaggtaaattatatctcaataaagct

SEQ ID NO: 328498 - DNA, 201 bp, Homo sapiens
ggatggcaatctggttggaagtaaagactagaagctttattttggagctgtgttgcatagtaatcccacttctttttagattatactgtatgtttatttasggtggctttgggggagttgcctcttgatgcagcctacagaagggtgagtaggaattaattatgtgaaagtatgaagtggggaaaagaacatcctccatgg

SEQ ID NO: 328499 - DNA, 201 bp, Homo sapiens
tgaggaaacagaggcacagagaggttaagtgacttgcccaagttcatagctaataatggtcagagttggtttgggaacccagaagttttactctgaagttyataccttgtccattatgaccaggaaaaatgaggtgcgtaaatgttatacaaagctttatcacattatacacaaacatagaaaacagtgtttcagaagaga

SEQ ID NO: 328500 - DNA, 201 bp, Homo sapiens
agattatgccaagtaaaagaagacaatcgcaaagagccacaccttgcatgattccatttctgtgaaatgtcaacaataggcaaataaatctgtagagtcakaaaatagattagtgatttcctggggctagagggagaggctatgggaattaggagatgctgatcatgggtatgggatttctttgggagattatgaaaatgt

SEQ ID NO: 328501 - DNA, 201 bp, Homo sapiens
aagaggttttatataaagtgctgagagcaatacctgataaatatgaagtgctccataaattttagctatcattatatttgtatatgtgagatgatgtattrtgacccccccaatagatacctcaggctgaggtgagaatgattttttttcaaaagactgttataaaagactgtttccattcataacttaatagtgagtcca

SEQ ID NO: 328502 - DNA, 201 bp, Homo sapiens
tgtcttcacatctcaaaaccaatcatgccttcccaacaacccccaaattcttaactcatttcagtattaactcaaaagtccacagtctaaagtctcatctragacaaggcaagtcccttccgcctatgagcctgtaaaatcaaaagcaagttaattacttcatagatacaatggggctacaggcattgggtaaatacagcc

SEQ ID NO: 328503 - DNA, 201 bp, Homo sapiens
atattagagtttgaattttgcctccacaactttctagctttgtaaacttgagcaagggacttttctaaaaggtagcaattattgtagtatcaatctcatgrggtacctataaggatttcaagaggttttatataaagtgctgagagcaatacctgataaatatgaagtgctccataaattttagctatcattatatttgta

SEQ ID NO: 328504 - DNA, 201 bp, Homo sapiens
atggaaactgtattagtcattttcacactggtgaaaaagagacatacccaagactgggcaatttacaaaagaaataggtttattggacttacagttccacmtggctgggaaaacctcacaatcatggcagaaggtgaaaggcacatcttacatagtgccagacaagagaagagagagcttgtacaaggaaacttagttttt

SEQ ID NO: 328505 - DNA, 201 bp, Homo sapiens
agcattcaaaaaatatatcactttttcagagaaacaacatacactggggcctacttgagagtggagggtttggggaggaagagagtgagaaaagataactrttgagtaccaggcttagcacctgggtgaagaaataatctgtacaacaaacccttgtgacccgagtttacgtatataacaaacctgcacacgtacctcaga

SEQ ID NO: 328506 - DNA, 201 bp, Homo sapiens
ttaaatgaaaaattaatgagcaataatagcaaggaaaatttataaaaagaacaataatgagagagatccaggcttaccatttattaagacatcatacaaarttttaataactaaaataaaaattaagatatatcaaagttaaagactatagattctgaaaatagacaagacacataaaggaatttagtttataatatagtt

SEQ ID NO: 328507 - DNA, 201 bp, Homo sapiens
aaagttttaataactaaaataaaaattaagatatatcaaagttaaagactatagattctgaaaatagacaagacacataaaggaatttagtttataatatrgttggcaatttgattaagtgggaaaaaatggattgttcaataagttatattgggaaaactggacatctatctttaaaaaacagttgtgtccctttttcac

SEQ ID NO: 328508 - DNA, 201 bp, Homo sapiens
gaatcacttgagcctaggagttcgaggttacagtgagctgtgattgcaccactctgctacaacctcggtgacagtaagaccctgtcccttaaaaaaaaaaatgctgcatattgagtcccttcctttggccagtggcctactctaacagtcatgtgcaataatctttaattcaacaaatacttactaagcaaatagtgttta

SEQ ID NO: 328509 - DNA, 201 bp, Homo sapiens
ctagtggaaggtggagccgggaaggagggagaggatcaggaaaaataactaatgggcactatgcttaatacctgggtgatgaaataatctaccacaaaccsccatgacacaaatttacatagataacaaacctgcacttgtactcctgaacttaaaataaaagttaaaaggaaaaaaagaaaacacaaagtttaaaaatgg

SEQ ID NO: 328510 - DNA, 201 bp, Homo sapiens
tttttttttttttttttttttttttttttgactgtttcttaattggaaaaaacaaagtttagagaaattaagtaacattgttgagatcatccagatagtcrtctggagtttgaacgttggccttgcatttgtttcctccacaaactgaaaaaagttcacatttaggactcagttgcttccatctcattcctctcttctctt

SEQ ID NO: 328511 - DNA, 201 bp, Homo sapiens
atattttcatttgtttaataggaagctaaccatttcagactccacatttgcattcactaataaaagataatcttttaggtatattacctgttacatggatytcctcgctgcttcaaatagcaaagcagtgtattcacttgcttatctgtcatacgtatttctaccctaaattgttactgacaataagcatttcagatggcc

SEQ ID NO: 328512 - DNA, 201 bp, Homo sapiens
caggcatttcttcataccaataatgggattagcacagtgtataccatttttttctttctttttttctttttttgtaaaacttatgttttagttatatctttctgaaactagattccatattctgtgaaggaattatctacagggccagctcttcttatctgatttgggaagtatattttcttctacataaagatggctaat

SEQ ID NO: 328513 - DNA, 201 bp, Homo sapiens
tgcaaaatgttccccagaaaaagataccaggtggcttctcacttcatccacactcaattccaggacaccagacaggcttgttattgtatctataaggaggmtttctgatttacagagggtagcagtcccctgattctcttgctgcactctggctacttgctgtctcctatcagatgatggatatagtccactggatgcaaa

SEQ ID NO: 328514 - DNA, 201 bp, Homo sapiens
  misc_feature (1)...(201): n = A,T,C or G
aaagataccaggtggcttctcacttcatccacactcaattccaggacaccagacaggcttgttattgtatctataaggaggatttctgatttacagagggnagcagtcccctgattctcttgctgcactctggctacttgctgtctcctatcagatgatggatatagtccactggatgcaaatttactctgttcctgcatt

SEQ ID NO: 328515 - DNA, 201 bp, Homo sapiens
tgactgatcagggtggtggttgctgaaagatggggtggctatggtaaattttattttattttattatttttatttatttatttattttgagaccgagtttygctcttgttgcccgggctggagtgcaatggcatgatcttggctcaccgcaacctccgcctcctgggttcaagcgattctcctgcctcagcttcctgagta

SEQ ID NO: 328516 - DNA, 201 bp, Homo sapiens
ttactgcttcaaaattaaacttgtgtcagtgttagttaatccccttctcttcaagcatattactttagggacgggctgtcttcagcctgtttggtttgatmgacattacaacacacgtttgacctatcatgtttggtggaacctcgaggatgctcctaggtgaactgatcaaatcctttggcaacactttcagatgcagtt

SEQ ID NO: 328517 - DNA, 201 bp, Homo sapiens
attttattttattttattatttttatttatttatttattttgagaccgagtttcgctcttgttgcccgggctggagtgcaatggcatgatcttggctcacygcaacctccgcctcctgggttcaagcgattctcctgcctcagcttcctgagtagctgggattacaggcatgtgccaacatgcccggctaactgtttttgt

SEQ ID NO: 328518 - DNA, 201 bp, Homo sapiens
ctcttctgaagattcatctacctccacatttctttaactatttcctatatggtttcctccctctggcaatgctcctgattattattctccctcctaaaatkttatcatattttataaatatgcattgaatgcctactgtggtgcctggaattcatgggttgtttattcaacaagtgtaaattgatcacctctgtggcgggt

SEQ ID NO: 328519 - DNA, 201 bp, Homo sapiens
cgactgttcctagtaatattctatttccttttccaaagccttacgctccctttaagagcagatgttgattatgagagaggggatggggcagaagctacagkgataggttgatagcaaactcccaaaatcaaactgcagctggcattgagaaatctcatttctatttcatagattcttagaactttccatatggccattgac

SEQ ID NO: 328520 - DNA, 201 bp, Homo sapiens
catagcaacatggagcaaaataataaagattacgaatagtagtgctgcaaagtatggtatagctgaagtgctaattagatagtatagataatgtgtactayaggaattcagtccaatgcttttgggacatttattttaattttacattataccagtggaaagtaattaaacaattatgtcattaaagaaatagtagccaaa

SEQ ID NO: 328521 - DNA, 201 bp, Homo sapiens
ttacctagtaactttcaaccatttcatactacctataaagttaatacaaacaacaacatttatataacattatgcaccaagtctgattttaaggactgtaygtatattaagttcatcttctgaacatcctatggagacaatttgccatgaatttactatatgaccttaaacaaattacttaaagtctttgagactcagttc

SEQ ID NO: 328522 - DNA, 201 bp, Homo sapiens
aatgatgtgatcctcctctctaggagaaaagatgccctccagaggtagagatacagtggcaagtccagacacatatcacaaacagatctgggttgaattcstaactttcccacttacatgctaggtgaaattgatgtctgtgaaccttgtacgatagagagaatggtaacaaatttacagtgctcttattattcagtgcca

SEQ ID NO: 328523 - DNA, 201 bp, Homo sapiens
ggaacttacatagcaacatggagcaaaataataaagattacgaatagtagtgctgcaaagtatggtatagctgaagtgctaattagatagtatagataatrtgtactataggaattcagtccaatgcttttgggacatttattttaattttacattataccagtggaaagtaattaaacaattatgtcattaaagaaatag

SEQ ID NO: 328524 - DNA, 201 bp, Homo sapiens
ggtaccaactttgaagtcaaaataggctgcatttttctagtgcattcctggcttttgctgtaattatgactaaaaatagtataaacaaatacaaaaaaaaacccctcttttcaccaatatccaggtgttgtatttcactgttatactttaccattccatatccactctgggaacaaaatggctaaataattgtaataattc

SEQ ID NO: 328525 - DNA, 201 bp, Homo sapiens
aatgtcccagcttgaaaacctaagtgctaaagtttaaagactataggcctggcatggtggttcattcctgtaatcccagcactttgggagaccaaggcagraggattgcttgaacccagggcctcaagaccaacctgggccaacaaagcaagacctagcctctacaaaacatgaaaacattagcccgacatggttactact

SEQ ID NO: 328526 - DNA, 201 bp, Homo sapiens
ggttcatatcatactgtccattttggtgacctctgctagagaagaaatttgagtaaatcaaaacaatcactcttgcttgctctctttctttatatggagtraaaggttaagaaatgaattaatgattaatgaaggaagaatagaatcacaatgatggagctttgactgtgtaccttataaactaatatgatctggtgctaa

SEQ ID NO: 328527 - DNA, 201 bp, Homo sapiens
acaaattatgaaggtaccagacagtagagcactgttataaatatattgctgaagttaataatgtgatttctgatgaaatggatttatggtaaatatatttraacactgggagtaaagctgcaagtggttagcagaagcagtgtgttgatgaaggtgatgtaatgactacaatgaagaagaacaagatagtttaggtggttt

SEQ ID NO: 328528 - DNA, 201 bp, Homo sapiens
gattcgtaaaatattattcagtgactcacatcttcctcaaagattttcaactcactcactgaagcagaaaagatcttcaagaattccttttcatcctgagratgtgtttaggaactatttaaatagaaataaaattcaagggattccagggatcaattagcaatttgagcagcgttccagcaaaattcttaaaggctaaaa

SEQ ID NO: 328529 - DNA, 201 bp, Homo sapiens
gtgcttcatgcgagttggaattgtttttattcctggtgttagatttgaagtagtaacaaaaaaaaaaaaacagaaaaaaaactataaaaaggaaacaaacatttttcctgctattagctacttttattaagtatttttaaggcattgcattaagtgctttacaattcatcttttttcttatccttattatgaaaattttta

SEQ ID NO: 328530 - DNA, 201 bp, Homo sapiens
tgtgcttcatgcgagttggaattgtttttattcctggtgttagatttgaagtagtaacaaaaaaaaaaaaacagaaaaaaaactataaaaaggaaacaaacatttttcctgctattagctacttttattaagtatttttaaggcattgcattaagtgctttacaattcatcttttttcttatccttattatgaaaattttt

SEQ ID NO: 328531 - DNA, 201 bp, Homo sapiens
aagtaagggaggaatactttatgagtcaatagtcattccctgagtaggagctcttttatggcatgacaagcaaacatgaagttctgtgagcattgaaaatkgttgggaggaacagaattaaatcaagtccaaaagacactgggcttgcagtagaagattggggaacagggagagatgaagctagagaaattaaatagttat

SEQ ID NO: 328532 - DNA, 201 bp, Homo sapiens
ttgtgcttcatgcgagttggaattgtttttattcctggtgttagatttgaagtagtaacaaaaaaaaaaaaacagaaaaaaaactataaaaaggaaacaaacatttttcctgctattagctacttttattaagtatttttaaggcattgcattaagtgctttacaattcatcttttttcttatccttattatgaaaatttt

SEQ ID NO: 328533 - DNA, 201 bp, Homo sapiens
agggatctcaaatattacatacatagcattagtattgcattgcaaaggattaaaaagtaatataataaggcttcaatctctcttttttttcacttcagctkttattaaatgtacaaaagaaatatcatgtgttttaccctctataatccaaattgtccccaacctggccttccatacggtagaagaaataatgatggaaat

SEQ ID NO: 328534 - DNA, 201 bp, Homo sapiens
cttgtgcttcatgcgagttggaattgtttttattcctggtgttagatttgaagtagtaacaaaaaaaaaaaaacagaaaaaaaactataaaaaggaaacaaacatttttcctgctattagctacttttattaagtatttttaaggcattgcattaagtgctttacaattcatcttttttcttatccttattatgaaaattt

SEQ ID NO: 328535 - DNA, 201 bp, Homo sapiens
tagaactggtcagcaatggaaaatccaagtaaatggcttacgttgtgggcatgatagaaatctcgatatacaatgtattacatatgttaatattctcaagkggtcacacatctaagaagtcatttgctctagccttcacccccaccccaatgcatttatttattcagcagcaccctaaccaattactgccaagcttctgtc

SEQ ID NO: 328536 - DNA, 201 bp, Homo sapiens
ttttcttatttctaggtacaggtagccccttgtgcttcatgcgagttggaattgtttttattcctggtgttagatttgaagtagtaacaaaaaaaaaaaaacagaaaaaaaactataaaaaggaaacaaacatttttcctgctattagctacttttattaagtatttttaaggcattgcattaagtgctttacaattcatc

SEQ ID NO: 328537 - DNA, 201 bp, Homo sapiens
cctgaatattactcttcctagcatacctataaacatcccatggaatatctttcttcttggatagaagaaaaacatagacttgaaagcaaatatgtagaatktagagtgagatctagaataaaatttgaattctatcatttcctaactgcctgacctttggcaaattacttaacgtccttgagctttatttttcttctttag

SEQ ID NO: 328538 - DNA, 201 bp, Homo sapiens
atatctcttcttttattcctaatgtttgcaatgtaaatctttgttttcttggtcagtctagctaaggttaatcaatttcatcaatctttgcaaaaaaaaamaaagatttttcttccccactttgttttgttaatttttctcaatttttaaaattctctgtttcattaatttctgttctaatatttattattgttttttttt

SEQ ID NO: 328539 - DNA, 201 bp, Homo sapiens
tattggatttaggtattgtagatatctttggtagccttaaggcaagcggtaaaaaacagttggcagtaagttgagaagcaagtgagaggtgataaaatggmgagagtagagaaaactctttttgagaggtttgtttgcaaataggagggagacacaatgatatctggagagaaaatatattgaaagtggaacagatatttg

SEQ ID NO: 328540 - DNA, 201 bp, Homo sapiens
ggccattgtgggctgacagccatattgtgagggattaggtagctctctaggcattgacaagaacctttgaattttagaaaatatccaaaaaaaaaaaaaaagaaaagaaaaacagaaaaaaatagaaatcaagaaattagcaatgtgaccaacaacgtatgttctgagccccatttctctatctaacatatgggaatttaa

SEQ ID NO: 328541 - DNA, 201 bp, Homo sapiens
tgatgcgtctctaagtctttcaaattgtcttgctaaccaaatcctaaaactgtctattggatttaggtattgtagatatctttggtagccttaaggcaagyggtaaaaaacagttggcagtaagttgagaagcaagtgagaggtgataaaatggagagagtagagaaaactctttttgagaggtttgtttgcaaataggag

SEQ ID NO: 328542 - DNA, 201 bp, Homo sapiens
gtcattacttgtatttctaacaagcactggtgccacatgaaggtttcaatgttaaaaatggctttttaagaaggttagtttaaatgcctagaaaaaaaaaattacacaatttcttactttacttattaatcaactttaggttttagggaaaaaactctgaagatgaaaaagaatgttggcaattaggtcagcacaatctca

SEQ ID NO: 328543 - DNA, 201 bp, Homo sapiens
ctagctttctacctacctcagctttcaacatgccttcctcactaagcataatcatttctagattttgatttaaaggatatgtgtgtgattactcctttcamttgaacatttggaggccatttaagggttattatttagcctcggggtcttggggaatagggtaagcccaagaagagggagcgagaacaggtaaggacatat

SEQ ID NO: 328544 - DNA, 201 bp, Homo sapiens
gtactatgtttttgaaagaatatttcactggaaagagggagcagagaaatcatacatatgaagcacctattgtgtaacaaatgtttagatcgttgccattygttaactttcaatgctgtgtgaagccttgtacatacattcatacctagtttactgaataagctggacttagtaaggtaaaagcagaaaccaacttcattg

SEQ ID NO: 328545 - DNA, 201 bp, Homo sapiens
gtttttgaaagaatatttcactggaaagagggagcagagaaatcatacatatgaagcacctattgtgtaacaaatgtttagatcgttgccattcgttaackttcaatgctgtgtgaagccttgtacatacattcatacctagtttactgaataagctggacttagtaaggtaaaagcagaaaccaacttcattgttttctc

SEQ ID NO: 328546 - DNA, 201 bp, Homo sapiens
tctctgtaaacctcttggccatttcattgtcacaaaatgggctctgcatctctgaacatcatgtactatttcagcatagggtgctaggagtgggttgtggrgaggcatcaataatgtctgttttatttgtcatgaccacagaagcttttccagatttttcctccatgtcacagaattctgcttttagttcattggccagaa

SEQ ID NO: 328547 - DNA, 201 bp, Homo sapiens
gcaatctgggaaacatatcatgaattctgagtcaacccattgaacccctttctctaaacttgggttgaggagaatgcatccctctctcttcccctttaagrgagtacagataaaaatattgttaattcaatgttttccaaaggaattttctttttttagtttcttcaacttcaccttccataaaggtatgtgttggaggcc

SEQ ID NO: 328548 - DNA, 201 bp, Homo sapiens
ccgtgcaaagcatagaagtttcacatccaagggtgtgtcattcacaatgtagatatatcatagctttgcatatttctcatgacggcttttaagcagtgatwttttactaataaaatctgattattcagaccctttttccaaagggttgaaataaaatataaaagaaaggatgccattttcaaaccccagaccttacaaagt

SEQ ID NO: 328549 - DNA, 201 bp, Homo sapiens
gatggaaaaattaaaagatttaacaattttcccaagttcacaaatttaaaaaatagtgaattttgggatttgaacttaagcctgttagaatccaaagcctrtgttccattagatggattatttttggttaaatttcttccacattagcccactgggaatatggagtggggaaggttaagtgtgttcatttattcattgagt

SEQ ID NO: 328550 - DNA, 201 bp, Homo sapiens
gaattttagcatattaaaaattctgtgaagtcctgccatcaagtaagtgatttgattttgattaacaaatctgttttatcatggagccttcttcttagagyaatacttacaaaacacctaaaactagtgtttagtggaatatactcaggatgtgctatgtgtgagcatatcttatttttatttgaaaataaatatcctaga

SEQ ID NO: 328551 - DNA, 201 bp, Homo sapiens
gcatattacttcatacccatcaaaagtattcagtggtgtcatagcccttggggattgatcaccaaaatctcattgcttgaatcacttgaaaaaaatagagrttatattttagaaataaggtataaaattttataggaagtaatttgcctggagaagttctcagcagtagttattgtggctatccactgagagcagagtaaa

SEQ ID NO: 328552 - DNA, 201 bp, Homo sapiens
ttagttctgtcactccagagaactctgaccaatacaacagtcaagagctctgcttaattccttttgctggtagaataacctccctatcttgctccctattstacttggtgaataatggtctatttaatatttagctcacatgtcccctcttgcttgcctatcctcccctccatagcagaacttatcctgccttcttcatgc

SEQ ID NO: 328553 - DNA, 201 bp, Homo sapiens
ttgagtcaggaactcattgtattcatttcagtagggactaccctgtcttactgtatcataaatacatgttttgattgccaggcatttttgcttcaattttyggatcagtaaagtgggactttattagccctgtgtgacataactcaggacggttgactctttagtcatttatccagcctggaatctgaagacatgttggtt

SEQ ID NO: 328554 - DNA, 201 bp, Homo sapiens
gttaaaaacatgtttgtgcatgtaacctgtactaagaaaatatcttcattttatttcctttttcctttatcatgtgacataagatttattgacctcacatmagcatagaagtattgttaactttaatagtatttgggttggagattggtgcatttctggttgtacgaaggatagttgtattatgttaggtgtaattatgac

SEQ ID NO: 328555 - DNA, 201 bp, Homo sapiens
cagtgttggctggggtgactgacccagactgtcaagatgaaatcagtctactacttcataatggaggtaaggaagagtatgcatggaatacaggagattcrttagggtgtctcttagtattactgtgccctgtgattaaggtcagtgggaaactacaataacccaatccaggaagggatagcccaggccctttaggaatca

SEQ ID NO: 328556 - DNA, 201 bp, Homo sapiens
attgcctctgaccaaggcactcactttatggctaaagaagtgtggcagtgggctcgctcatggaattcactggtcttactatgttccccatcatcctgaarcaactggattgatagaatggtgaaatagctttgtaagtcacaattacaactccaactaagtgacaatactttgcagggctggggcaaagttctccagaag

SEQ ID NO: 328557 - DNA, 201 bp, Homo sapiens
ggtgacaaagaaatttggggaagaggtatatggatggacctctctgagaggtaaaaaaacatgaagatatttgtatcccatgtgagtcctcaccaatgggygacctcagcagaggaggattttaataatcaagtatataggatgacctgttctgtggacgccactcagtctttttccccagccacccctgtcatcgcccaa

SEQ ID NO: 328558 - DNA, 201 bp, Homo sapiens
agctcactgctcacctcctgctgtgtggccagttcctaacaggccatagacctgaccagttgaggactcctgtcctatatcattagctgctgtgggtgagkttactatattaatattagtaattacctgaacaaaatataggaaaattgtgagatacaatcattgcattccaaagacattcttacgacactatcaatttat

SEQ ID NO: 328559 - DNA, 201 bp, Homo sapiens
acactgcaggaagagtccaagtttaggtggaagaaggcgagttcagtttggggtatttgaagtatgatgcgtctctaagtctttcaaattgtcttgctaamcaaatcctaaaactgtctattggatttaggtattgtagatatctttggtagccttaaggcaagcggtaaaaaacagttggcagtaagttgagaagcaagt

SEQ ID NO: 328560 - DNA, 201 bp, Homo sapiens
tgtatattttatcacaaaagcttgcagaatattgtttgctttaaagtaaaaatattcttattacaaactacgttatttttcttccgagtcttaaaatgaartcgacacaccagaaaggttttctgaagatattagtaatccctggcaaataccacaaaccccaaggtacacttaagtacccaagtttgagaaacactgagc

SEQ ID NO: 328561 - DNA, 201 bp, Homo sapiens
tgactttcagatgtatagtttgtgcagctgagtgaatggcagtgtcattcaccaagggagggaacactgcaggaagagtccaagtttaggtggaagaaggygagttcagtttggggtatttgaagtatgatgcgtctctaagtctttcaaattgtcttgctaaccaaatcctaaaactgtctattggatttaggtattgta

SEQ ID NO: 328562 - DNA, 201 bp, Homo sapiens
gtgctgcctgaggcaaatgtgatggcctcccctgaggcaggtgccaggcaagataatgttgattctcctcaggagccacctccaacacccctatttgcgtytagacctataactagactaaacttctggctggtgcctagagggaggttgagagtgtgacccatgaggaggtgcactacactcaaaaatcaatgctttgaa

SEQ ID NO: 328563 - DNA, 201 bp, Homo sapiens
aatgactttcagatgtatagtttgtgcagctgagtgaatggcagtgtcattcaccaagggagggaacactgcaggaagagtccaagtttaggtggaagaargcgagttcagtttggggtatttgaagtatgatgcgtctctaagtctttcaaattgtcttgctaaccaaatcctaaaactgtctattggatttaggtattg

SEQ ID NO: 328564 - DNA, 201 bp, Homo sapiens
acttgggaggctgaggtgagagaattgcttgagcccaggggtttgagcctagcctgggcaacataatgagaccctggctctttaaaaaaaaaaaaaaaaaagtttgcttcttttacattccctcttcccagagagggaagctttttctaatttacacaggcactttttgctattggagggctgagtgtaatatttgacaaa

SEQ ID NO: 328565 - DNA, 201 bp, Homo sapiens
tgggccgtatctcaaaataataagagctatctatgacaaactcacagccaatatcatactgaatgggcaaaaactggaagcattccctttgaaaactggcrcaagacagggatgtcttctctcaccactcctattcaacatagtgttggaagttctggccagggcaatcaggcaggagaaggaaataaagggtattcaatt

SEQ ID NO: 328566 - DNA, 201 bp, Homo sapiens
ataaaatgccacagtcagcttttatcaaggccactgcaaaggacatagctgcagaaatgatttagaaagtgtgcatgagtatgtgtgtgtgcctgcacacwtgtatgtgtttaaataatggctgacatgttgagtaccttctgaatgagcaatgagatactatacggagcagatttttgtagattggaaagcacaattaaa

SEQ ID NO: 328567 - DNA, 201 bp, Homo sapiens
gtgatctgagatcataccattccacaccaggctgggcaacaagagcaaaactccgtctcaaaaataaaaaataaaaaatatttttccccgacttttatttkaagttcagggacacatgtgcaggatgtgcagacttgttacataggtagatgtgtgccatggtggtttgctgcacaggtcatcccatcacctaggtattaa

SEQ ID NO: 328568 - DNA, 201 bp, Homo sapiens
aaatatattccccctgtctgagattttgtactctttaaccatcatctcctcattctcctcacctccaccctctgtaaccaccattctactctctgctttgmtgagttcagttgttttcaattctacatataaatgagaatatagagtgtttatatttgctggacttattttgcttaacataatgttctccaattccatcta

SEQ ID NO: 328569 - DNA, 201 bp, Homo sapiens
tgtgtgtctgtccttgacagtgatttcatctttttagctgcctttcagcttgttttatttacagctgcgaaggatacaagccactgaatgaagagtacatkttctctttctcacattcaaatattacatgtgtgtgtataatattaattaaacatacagtggactcatttttatttatatacctgtttgtatgtatgtatg

SEQ ID NO: 328570 - DNA, 201 bp, Homo sapiens
gagattactgaattttttttgttttaattttgggctgagctaatgatgagaaagctatcagaaattacagttacttattaatcttggttagtgaccataaytgagctgcctaagaactgttggtactttctagatcagtggaaaataaatggtaaaggaaaggattagacattttgcacaaaagatatacaattagccaat

SEQ ID NO: 328571 - DNA, 201 bp, Homo sapiens
ttatgagctttattttcaatgttcttctttaagacgatagagaccactgagtgaatatggcatccttttcttagtacttaaaaggacaatataatgagctrctttctaaaagaaaatgtaatttttgtgtgaaacaccaggcccccaggtgtcatggtagctatttcattgatattattccaaaagagctagctaaataaa

SEQ ID NO: 328572 - DNA, 201 bp, Homo sapiens
gtttcaaaatcctctatgagtacatttttattcttctctttatttgtttataatcatctgtgaatttgtaggcagaagactatactttattatgtaatgcrttattcaaatagagtaatatttgaaaaggctatgcttatttacacaattttaaaaatacccctttttaaaattcattggctagttgttctctttgctctt

SEQ ID NO: 328573 - DNA, 201 bp, Homo sapiens
agctgccctgtttagtggactcacatactgcgggctgctcaatgccagtagtattgaccttgtagggctgccacagaatccactgggcaattgaagttagrgatgtttattttttaaatactccctattttctggacatagttgagtttcagcatgattacttatcataccgtgtatatcttccttgaaaaccttttaaag

SEQ ID NO: 328574 - DNA, 201 bp, Homo sapiens
aggtattgatgggccgtatctcaaaataataagagctatctatgacaaactcacagccaatatcatactgaatgggcaaaaactggaagcattccctttgraaactggcacaagacagggatgtcttctctcaccactcctattcaacatagtgttggaagttctggccagggcaatcaggcaggagaaggaaataaaggg

SEQ ID NO: 328575 - DNA, 201 bp, Homo sapiens
ctcaataaattaggtattgatgggccgtatctcaaaataataagagctatctatgacaaactcacagccaatatcatactgaatgggcaaaaactggaagyattccctttgaaaactggcacaagacagggatgtcttctctcaccactcctattcaacatagtgttggaagttctggccagggcaatcaggcaggagaag

SEQ ID NO: 328576 - DNA, 201 bp, Homo sapiens
tacttgacacataagtagtcatcagtaagtgtttaatgagttaaatagaggaagaaaggctggcacaggttagttctactggagtacaacttagaaatgcragagtttgttccacgcttcttccctagcttttagtggttgcttacaatctttgatgttccttggcttacagatttatcattctaatcgctgtgtcactta

SEQ ID NO: 328577 - DNA, 201 bp, Homo sapiens
tactccgagctaaagaaggaagtttgaacccatggcaaagaagttaaaaaccttgaagaaagattagacgaatggctagctagaataaccaatgcagagargtccataaaggacctgacggagctgaaaaccacagcatgagaactacgtgacgaatgcacaagcctcagtagccaattcgatcaactagaagaaagggta

SEQ ID NO: 328578 - DNA, 201 bp, Homo sapiens
tccttttctaattcagtggagggagtgacctcttatcttcatttattcacttattggatacttggatatttcttgatatccaagtaccaagggctgaatgwacattaatggttctacagacatggttctacagtcatggttcttttccttgtggagactgcactccgcctaaaactacttattactttcacctaaacattt

SEQ ID NO: 328579 - DNA, 201 bp, Homo sapiens
gaaaattctaagaatcagatcacctctcctcctccaaaggaacgcagctcctcaccagcaatggaacaaagctggacagagactgacttcgatgagttgasagaagaaggcttcagaagatcaaactactccgagctaaagaaggaagtttgaacccatggcaaagaagttaaaaaccttgaagaaagattagacgaatgg

SEQ ID NO: 328580 - DNA, 201 bp, Homo sapiens
gaacagcataagtatttgccactgttatttgtttctttttgttctgtttttcttatctcttattgtttaactttgtggattagaactggttagaagccagmccactgtttgtcaaatgtttctactcacatgcccttaacttagaaaataaacttgttctcctcaggctctgaggtagaacatgaagatttctgcccaagc

SEQ ID NO: 328581 - DNA, 201 bp, Homo sapiens
tcttagcattcatctccactgtcctttcctccttttctaattcagtggagggagtgacctcttatcttcatttattcacttattggatacttggatatttmttgatatccaagtaccaagggctgaatgtacattaatggttctacagacatggttctacagtcatggttcttttccttgtggagactgcactccgcctaa

SEQ ID NO: 328582 - DNA, 201 bp, Homo sapiens
acgcccatggagcctcactctttgctagcacagcagtctgagatcaaactgcaaggtggcagcaaggctgggggaggggctcccgccattgccaaggcttsagtaggtaaacaaagcagctgggaagctcaaactgggtggagcccaccacagctcaaggaggcctgcctgcctctgtagactccacctctgggggcaggg

SEQ ID NO: 328583 - DNA, 201 bp, Homo sapiens
tcagtctggagtccacatctactctattgtctccgaattatagaacactagcttactagccatgtcatctaatatatattcaagttgccttttctccttcrttcagttatttgctcattcagtgaatattcagcttctacccatgtcaagcatagttattagcaacatagtcacaatggtgaacaaactggtcaaggtgct

SEQ ID NO: 328584 - DNA, 201 bp, Homo sapiens
gggtctaagcttcagtatgcgtgactcaaaagcatgtgcttttaatcactacattctgttgccagtatcataataccacctgttctgtgactgaaatctawgtaaatttttcaatatttcagtcaccaaatagaaactgagtgaactaccactattttaaaccactattattattctccccagtatcctctttccccattt

SEQ ID NO: 328585 - DNA, 201 bp, Homo sapiens
ttttttttgagatggagtctcactgtagctcagactggagtacagtggcacaatcactgcttaaactgcagtctcaacctctccagactcaggtgatcctyccaccgcagccttccgagtagctgggaacacatgtgtgtgtcaatatgcccggctaatttttgtatttttttgtagagatgaggtttccccatgttcccc

SEQ ID NO: 328586 - DNA, 201 bp, Homo sapiens
tcaggtcactcccaccctaatactgcgcttttccaatggtcttagcaaacgtcacaccaggagattatatcccgcgcctggcttggagggttctacgcccrtggagcctcactctttgctagcacagcagtctgagatcaaactgcaaggtggcagcaaggctgggggaggggctcccgccattgccaaggcttgagtagg

SEQ ID NO: 328587 - DNA, 201 bp, Homo sapiens
tttagttgtgttactttaggtaatctacctttccttttgggttgattttaaagtctgttctgtatgtttggtgttctgcagctttactatagtaagtctavgtttgatttcttatgataaatgctgttggggcttattgtgctacctaaatcaatggacttgtatatttaagttatagaaaattcttagcaaacttgtttt

SEQ ID NO: 328588 - DNA, 201 bp, Homo sapiens
tacctacctatctacctacctgtctgtctgtctttctatctatctacctgcctacctacttacctacctagctagctagctatctttctatctatgacaaygcagtaagcaccatgaacctgccacctaatgtgaaagcatgagcaatgaaaggtatatcatgactaaggattatgatttttccctttctgtgcacttgaa

SEQ ID NO: 328589 - DNA, 201 bp, Homo sapiens
ggcaacaaaattctagttttgtttttttggtgttccttgaaaatgtaactctactctcttatagattccatcttactccatatttagttgtgttactttargtaatctacctttccttttgggttgattttaaagtctgttctgtatgtttggtgttctgcagctttactatagtaagtctaggtttgatttcttatgata

SEQ ID NO: 328590 - DNA, 201 bp, Homo sapiens
tatctatctatctatctatctacctacctacttacctgtctgtctttctttctatctatctatctatctatctatctacctacctacctatctacctacchgtctgtctgtctttctatctatctacctgcctacctacttacctacctagctagctagctatctttctatctatgacaacgcagtaagcaccatgaacct

SEQ ID NO: 328591 - DNA, 201 bp, Homo sapiens
atctatctatctatctatctatctacctacctacttacctgtctgtctttctttctatctatctatctatctatctatctacctacctacctatctaccthcctgtctgtctgtctttctatctatctacctgcctacctacttacctacctagctagctagctatctttctatctatgacaacgcagtaagcaccatgaa

SEQ ID NO: 328592 - DNA, 201 bp, Homo sapiens
ctatctatctatctatctatctatctatctacctacctacttacctgtctgtctttctttctatctatctatctatctatctatctacctacctacctatctacctacctgtctgtctgtctttctatctatctacctgcctacctacttacctacctagctagctagctatctttctatctatgacaacgcagtaagcac

SEQ ID NO: 328593 - DNA, 201 bp, Homo sapiens
actacatacattgtgtttgatgtcacacaaaaaaaaatcatgaagacttatttttctcatgttgtggatgaggaaattaaggcttagttaagtggacttamcaaggtaaccaagctattcagtggtggatcctggatcaaatccaggtcttctgactttgtctttgctacactatgacaacagcagatggaaactgtatta

SEQ ID NO: 328594 - DNA, 201 bp, Homo sapiens
ttcatgcacgtgacatttactattaaaccttttccacccccttaaatttaggacctttgggtcccaaaccttaagctattctcagaaaagatgttgcaccrtcacaaaataaaagagttgaatgagaagaggaatatctctggttgtgggaatcaaaagaactttacagattttccattttgtgggggtgagggttgttag

SEQ ID NO: 328595 - DNA, 201 bp, Homo sapiens
aagacaggatggtgtttggagacagagatccaagtgcagtactgaaaagtctcttttcaagaagtgagactggtgactctacctaagactacaaagtttcrgagaaaaatctcaggaattaatggatatgcccttgataggctaatttccccagaacagatttagcaacaagagtaagtcatgtattcaaagatgattacc

SEQ ID NO: 328596 - DNA, 201 bp, Homo sapiens
tttttttatctcaaaactaattatacagaaaaaaaaaaaagtctgtatcaggattaggatgtaggcaggtgcacctatgcaagaaacatcattgattttayattggattgtgaaagagaaagtacattgtaaaatcatgcctttcataacagcggattggaatgccctcttcctgatttattagctgtgggaacacaaaca

SEQ ID NO: 328597 - DNA, 201 bp, Homo sapiens
acatagtaatttctaaataagtagtatgtattctcattattattttagttttcatttctatcagttcccaccatgacaaggcaagctgaatgaggacaggktttgtttgtttgtcttgtttttcattttattcactcctttatctttgggtcctagagagtacttgtacatagaacattcagtaaatatttgtggaataaa

SEQ ID NO: 328598 - DNA, 201 bp, Homo sapiens
tagtaatttctaaataagtagtatgtattctcattattattttagttttcatttctatcagttcccaccatgacaaggcaagctgaatgaggacagggttkgtttgtttgtcttgtttttcattttattcactcctttatctttgggtcctagagagtacttgtacatagaacattcagtaaatatttgtggaataaatca

SEQ ID NO: 328599 - DNA, 201 bp, Homo sapiens
cacttcaataacgttctgcaatcactctgatatctatgttcacataggaatttaaacatatttcataaatatagcacttctcactgatgctgcagttattyatttttccattctagaccatgagctcctcaatattagatacttgttctctttgtgaagcttgtccctagcccatagtaggtactaggagatgtgtagtat

SEQ ID NO: 328600 - DNA, 201 bp, Homo sapiens
gccaaaatatcatggcaaatgtgagagggatttatatcttaacatttcgaaacttctaggcatattccaacttaaaattcctgaatcaggaccaaaatggyatactattagtcctatacatgaagtaaaatataagaaaccatagttaaaagctagaggaatcaaaaatctaagatgctgatacaaaaagaaaacagcagc

SEQ ID NO: 328601 - DNA, 201 bp, Homo sapiens
agcatctgttacccagtggtttcagacaccttctttggcatgtctgaaaccatacaataaatactggaaatattgtttagttacttcataaatctgaaccrtaatgagtaagccctctgttgtttcatagtgagcaagatgtccttgcaaaaagaaatgcttgtataattgtttcaattacataacttccactctttccta

SEQ ID NO: 328602 - DNA, 201 bp, Homo sapiens
ttgtgaagaagatatgacaaacagtcagtgttgggggaacaaggaaaagctcaaagtaaatcatgagcagagagaaaattgagggaaaaagtctcctagastgagtttttaatgagtgattactgaatatagtaaagaaaaaaggcaaatttgagaaggaataaatgatgctttattataaaaagagaacatattaccaat

SEQ ID NO: 328603 - DNA, 201 bp, Homo sapiens
aaaaaaggcaaatttgagaaggaataaatgatgctttattataaaaagagaacatattaccaatgacacagaatataatttgccatatctttattgatacrtaatattttacatctttatggggtacgtgtgatattttgttacatgcatagaatatgtaatgatcaaagcagggtatttgaggcatccaccactttaagt

SEQ ID NO: 328604 - DNA, 201 bp, Homo sapiens
atgatgctttattataaaaagagaacatattaccaatgacacagaatataatttgccatatctttattgatacgtaatattttacatctttatggggtacrtgtgatattttgttacatgcatagaatatgtaatgatcaaagcagggtatttgaggcatccaccactttaagtatttatcgtaaatacttaagtattaaa

SEQ ID NO: 328605 - DNA, 201 bp, Homo sapiens
taaaaagaatatcacagaggtcaactgtccttctcaatacatcacatgaggtgatgtgtaatatctacttgacgtttctggtgacgttaacctttatcacrtggttaaagtagtgtttccagattctctcaagggacaaatctaggtaatatatgtatgtatattatcctatgtatacacatatatctataatttttaaat

SEQ ID NO: 328606 - DNA, 201 bp, Homo sapiens
atatgaactaattccagatgttagtagcatagctaattctatccattcaagtactgatggtaagactaaagtaatataaataggagttgtataatatgtggttatgtaatataaataacaagtatagttttatcagataacactgagcttttgttaaatcttcttttcatcattaattcaaggtaagtattattcagaaaa

SEQ ID NO: 328607 - DNA, 201 bp, Homo sapiens
aaagagaaaaataatttccatgactccagggctattggtatacataggcaacaatggggaagctatgagaaacatcttttatttgttagtagtgataaccrtaatgcagtttccattcattcacagagttctgagaaatctgagtgacacaactacaaagtgagaacttttccaattactgtctcaaatttattacaagca

SEQ ID NO: 328608 - DNA, 201 bp, Homo sapiens
caaaatcaaactgcagctggcattgagaaatctcatttctatttcatagattcttagaactttccatatggccattgacttaatttacaaatgaagaaactgagactcatttctctaggacacacaaagagctggtagcagagcctactattgtgtcacttatcaaaaaatcaatgtgacagtcagtatttcgttagcaag

SEQ ID NO: 328609 - DNA, 201 bp, Homo sapiens
tgtaagagaaaaagagaaaaataatttccatgactccagggctattggtatacataggcaacaatggggaagctatgagaaacatcttttatttgttagtrgtgataaccgtaatgcagtttccattcattcacagagttctgagaaatctgagtgacacaactacaaagtgagaacttttccaattactgtctcaaattt

SEQ ID NO: 328610 - DNA, 201 bp, Homo sapiens
agtttcatctcctgtgtagactaatggattgatagtttatatctggagtattgttttgaaaaaggattctgaggccataaatgatttcagaaaaaaaaaaagagtgccatgattgagtcatctctagcacaacattgggaattattctctatttgcagttactggattcaatgattttttaaggtgccttacgttagtaac

SEQ ID NO: 328611 - DNA, 201 bp, Homo sapiens
cagccattttggcatcattgaatgatgccaaagcattgactatagcccagttaatgcaaagaagctgaaataaagttagggctgtaacaacagttttagamgaatacaaagagatcaatataaattatcatttgcccttggattaaaatcgagaaaaggtgatgaagtgatgaagctcaaaggaggcattttatcagtgag

SEQ ID NO: 328612 - DNA, 201 bp, Homo sapiens
gaactatacgaagtgtgattatctactcactactttggttctttggtgtggaggagacaagtacaaaactcctctagtcagccatcattaggctgctcctratttgatgtattttttatttattttataacaaaaatattttatattgctttacagcaagccaacaacaaacaaaattgaaaaattataaacatgacactt

SEQ ID NO: 328613 - DNA, 201 bp, Homo sapiens
agaccctgtctcaaacaaatgaacaaacaaacaaaaacaagaaaaacaacaacaaaaaaaggtcaggtattagtttgctgggtagataggcagggcaaggrcagacagagaagagagacctgtgtttgtgggtaggtatgaagttaaggaatgggcatattcaggtaatcaggggttaagtgtggtgacagctagggcagt

SEQ ID NO: 328614 - DNA, 201 bp, Homo sapiens
ttaaaaaactgcaaacctaggcagtctggctccagagcctgcctccttggctactacttgttagcctttctgatggtttctctacctcaactccccatagyttacatccagaaggagcctggagtcaggccagcagttcaaggactttggggataagaaatacttggacaaggactgagcagtaagggagtttcaggaatt

SEQ ID NO: 328615 - DNA, 201 bp, Homo sapiens
tgtatcaatggtcgtgtctcctctttcttttctgattttgtttatttaggtgttctctcttctttgctattttaggtggtagtttatcaattttctctttytgaagaaccaatatgtcattttgttgacccttatattgttctttaaacctattttgtttagttctactcttatctttattatttctctatttcggttaat

SEQ ID NO: 328616 - DNA, 201 bp, Homo sapiens
ctatctatctatctatctatctacctacctacctatctacctacctgtctgtctgtctttctatctatctacctgcctacctacttacctacctagctagytagctatctttctatctatgacaacgcagtaagcaccatgaacctgccacctaatgtgaaagcatgagcaatgaaaggtatatcatgactaaggattatg

SEQ ID NO: 328617 - DNA, 201 bp, Homo sapiens
gagtcctgccccatcacttgatagatggcatgacattgaacatgttgtttaaattatccaaatctgtatttcctcttctataatacaaggctaatatatgyactgcaggatagctgtgagaattgaatgtgtcctctaaaaactactcatgcatcttttttgcaggctagtccatagtatcactataagtgttatcatcaa

SEQ ID NO: 328618 - DNA, 201 bp, Homo sapiens
gcacccccacacagagtccccactggggtactacctagttgagctgtaagaagagggcccccatcctccagaccctaggatggtagatcccagtcttgggmagttatctatagcagtatgaaaacagactaatgcatgtatcaatggtcgtgtctcctctttcttttctgattttgtttatttaggtgttctctcttcttt

SEQ ID NO: 328619 - DNA, 201 bp, Homo sapiens
ctaaaagtgtttgcaaaaatgtgtacaagaagagaagagaatgatgaggtgattccaagtgacttacaatatgtaacagcacaacagcagcagcagcaaamacacacacacacacacacacacacacacacacacacggtgcttacttcttactttgtgccaggtactgatctgagggcttttcatctataattcattaat

SEQ ID NO: 328620 - DNA, 201 bp, Homo sapiens
aggaaacagaatttaagaaccttatctatagccacagagcaagtaaacagcaaaacaagtgttcccaagtcttacaaacattttccattatcctgttgccwaacatgttgtcaatgttcagtaaattaatgagtggatgtatggatgacttacactaggtgcatggaaaaatgtcccagcttgaaaacctaagtgctaaag

SEQ ID NO: 328621 - DNA, 201 bp, Homo sapiens
aaaagttctagactagcctgggcaacatggcaaaactccatctctacaaaaaagacaaaaattagctggcagtttggcgcacacctgtggtcccagctacrcaggaggctgagatgggaggatcacttgaacccgggaggtggaggttgcagtgagtcactatcgcgccactgcactccagcctgggtgacagagtgaaac

SEQ ID NO: 328622 - DNA, 201 bp, Homo sapiens
ggcctgattggttggaagcaccctcgtgatacattttttcctcctgaaattttgcttgaataacacaatgccttaggcatttgatgatgctggtgggtgtkgggggaaataaagtgaaccagctgttttctactagggtcagagtgagtaaaagtgacctgtggttctcagtgactgttaatgcagtaaatatccttagga

SEQ ID NO: 328623 - DNA, 201 bp, Homo sapiens
gcttgaacccgggaagtgaaggttgcagtaagccaagattacaccactgcactccagcctggtgacagagcaagactccatctcaaaaaaaaaaaaaaaaraaaagaaagaaatactaagtcaaactttgcaggattattgtttatgttagaaaaatattatgttcctactgccctacctggtacttattagtaattcagt

SEQ ID NO: 328624 - DNA, 201 bp, Homo sapiens
gagaggaaagcgtgactaaacatgaatgttattatcagtattattgaataattcatgttattgaataacatgagtgttattatcaggtgaccagcatctaytaaaagtgatgctttctgctagtatggaatcagatgaaaacttttataaacaacctagaaatttagagcttaaaaaatacaacactgcttaatgacacat

SEQ ID NO: 328625 - DNA, 201 bp, Homo sapiens
gtctacctctgtaacttttatggctgctatttcaactagataccttcaataagatataagtttattggagcagagcagaatctatttattgtcgttttcayattttattccaaaattaagtttcaccactgtattctcaagtggcagtaaatggattcttccattatttatattgtcctttttagtgaatttgtggtataa

SEQ ID NO: 328626 - DNA, 201 bp, Homo sapiens
gtatatttagtataaaatgtgacatgaagttgagtaacataataatttccagcagggtgtttgactggatgcttcctgttaaatgaagtcaacacattttyctcaggtatttcaaagaaccaaggcagtggggaagtggagtctaagaaagcattacttctgcaaggtacacagcatgcagtagtaatatgaaaacaatga

SEQ ID NO: 328627 - DNA, 201 bp, Homo sapiens
ggatgcttcctgttaaatgaagtcaacacattttcctcaggtatttcaaagaaccaaggcagtggggaagtggagtctaagaaagcattacttctgcaagktacacagcatgcagtagtaatatgaaaacaatgatttttgactggaatcatggcattaaagaattctcagtaagtttacctgattccaactcatggaagc

SEQ ID NO: 328628 - DNA, 201 bp, Homo sapiens
gggaaggcatctcagggatctgaatgaaaaggaggtgtccaggagaaaacctggggtaaagcaatcaatgaatgcagatgcccttagagagaactagcgaraatatctgagaggcaggaagaaggccagcatggctaggttagggagtgatagacagagtggggagcaatgagcaacaaaagacagacagtggccacagga

SEQ ID NO: 328629 - DNA, 201 bp, Homo sapiens
atctgagaggcaggaagaaggccagcatggctaggttagggagtgatagacagagtggggagcaatgagcaacaaaagacagacagtggccacaggatttsatatccctcaaagggactgtgtattttattctaactgcaatggaaaagtctttgagaggttttctgtgagttgggcaacttatgacctgatgttatgctt

SEQ ID NO: 328630 - DNA, 201 bp, Homo sapiens
taaatacttaagtatttattgtaaatacttaaagtgttaaatacttaagtatttatcgtaaatacttaaatacttattctgtgtgttgggaacaattcaaktcctctcttctagctactttgaaatgtacaatacattgtttttaactatagccactctactctgcttttgaacaatagaacttatacgtttcatctaagt

SEQ ID NO: 328631 - DNA, 201 bp, Homo sapiens
aaaataaatcattgaaaatgcctagatttttcaactgaactcagtgagcggtacctctatttacagaaaggaagattgtaggccaaactgacatgggaggraatgaactggaatgaccaaataaatgtcctttctcgcaagttagattatatatgcttgaagatcatggtctttattttaggctttattttttcctttgtc

SEQ ID NO: 328632 - DNA, 201 bp, Homo sapiens
cattttatttttttctacagccaaataatattctgttgtgtatagataccacattctcttcatccatttattcattgatggatacttagattgatttcatrtctttgctattgtgaatagggctgcaataaacatgtgagtaccagtatctatttgatatactgatttatgttcccttggatagatacccagtagtgagat

SEQ ID NO: 328633 - DNA, 201 bp, Homo sapiens
ctttaccagtgagttttatacatttgtgtgttttcataatggcagatgtgtccttttccttccaggtttaggactcccttgagcatttcttatagagctgktctagtggtgttgaatttcttgtttttgcttctttgtaaaagactttattttttcttaatttattaaggataatttttctgtacatagtatcattggctg

SEQ ID NO: 328634 - DNA, 201 bp, Homo sapiens
ttcaaatgtattttctgatatattcaatgaatttgtcagtttcagaatttctgtttggttcttttgtatgatatctatctctttgataaatttgtcattcrtatcctgaattgtttttctgatttctttgtattggttttcataattctcttctatatcactgagattctttagaattgataatatgaattcttttattga

SEQ ID NO: 328635 - DNA, 201 bp, Homo sapiens
gatgccaagcagtccaatctttgggccccaggggtggcagcagtgagctgagcatgtctgttcttgagccccagtatactgtatggttacactaatgttarggggtctaggtgggccaattcttgggcctccagttgacttattcagtgtcagtagttgcagcagtgagccaggcaggtgggcaggttattaggcccctgg

SEQ ID NO: 328636 - DNA, 201 bp, Homo sapiens
ctccagttgacttattcagtgtcagtagttgcagcagtgagccaggcaggtgggcaggttattaggcccctgggaacttggcatggcatggacaatggcartgatagtggtaggacaaccctctaggtcctgagtggtatacactggcattggcagtggctgtgatgggctgggctagccagtctccaggcccacaggtgg

SEQ ID NO: 328637 - DNA, 201 bp, Homo sapiens
atgccttcattaaaaaaagatttaaaaataatttgtttttatttgccttggaaaataaatatttttcttactttcactagtaataatttgaaaaataatacttatatttagaaaagaaacaacaggtagtcaagaatagtgggtctttgttgttactgtgtgaaattcagtttttaatttactcatgttattaccatattt

SEQ ID NO: 328638 - DNA, 201 bp, Homo sapiens
gtaggcagaggtgtcatgattcccaggccaccagcagaatgctcaggtgtgactggtagtagccacactgctgtcctgccactgtggaaggttggactgcwggcaaggcgggaatgtttacatcactcatgcctcatccctggcagcactcatgcctcaattcttgttgtgatagccactaccttacttatgcttcagtcc

SEQ ID NO: 328639 - DNA, 201 bp, Homo sapiens
gattattaaattttccttttcagtgcagatggagcaaaaaaaatgtagattatcaattttgtgactatataaaggattttattcagagccagtttttttttattttcattccattgtggcattttcaattaatcccgcaagatgtattatttaaggacattgaataaattttttaggaacacagtgaaagaaaataacatt

SEQ ID NO: 328640 - DNA, 201 bp, Homo sapiens
tatttagttcagtaattcattttaaaaactagttttgaagctgggtacagtggtgctcacctatagtcccagctacttgggaggctgaggttgggggaatsccttcacctcagaagtttaagtccagcctggacaacatagcatagacccctgtcttttaaaataaaaataaaaaattagttttcaagtatctactttgtc

SEQ ID NO: 328641 - DNA, 201 bp, Homo sapiens
gtgttcatttcataccagctgttaaatgttctaaatatcaacccttcctataaataactatattctaattctatgtagaaaatgatgtatcactaaaaatragataaagacagataaaccgttagatgtggtcagtggagagagagagtacttttaagttaaaggagtggcgactaggaggaagaacttttcagaggagat

SEQ ID NO: 328642 - DNA, 201 bp, Homo sapiens
agaaatgtctgcattattttctcaccttcacatcctagtaatagacctggggctgttcatctttagatatcgtaacatgagacagaaagtggatgtgagaragactttaaataattttaacaagtaatgtgtatgaaaagacacctttttattccctgtgccactccagatttacttttcaaagtaaaatgacttccagga

SEQ ID NO: 328643 - DNA, 201 bp, Homo sapiens
ctctctctctctctctctctcatcagtactgtgccaactcctgctacaagggggaagtagagcactttttatgaagcaacagaggtaaactcagatttttrtttatgaaaccttgaaatatttccaatttctggatcagttatcatgcactgtgccagcaaaatgccatcttccaaattgcaccagagaacctccagtgac

SEQ ID NO: 328644 - DNA, 201 bp, Homo sapiens
gctgggcgtggtggcaggcacctgtagtcccagctactcgggaggctgaggcaggagaatggcatgaacccaggaggtggagcttgcagtgagcaaagatygagccactgcactccagcctgggcaactgagcgagactctgtctcaaaaaaaaaaaaaaaaaaaagaattagggaaacaaaaacagaaacattactgcca

SEQ ID NO: 328645 - DNA, 201 bp, Homo sapiens
gccataaaatgtgctgactaatttacaatagttccatctaccctttacagttattctgagaatgtttcagaaatacttataaatctttcaacttccattaytactttgataagattttgtaacaagaaagcaggagaagtgactttgggtaggtctagagtcatgatgtttaagcattttgttgcaagtaatacaatttaa

SEQ ID NO: 328646 - DNA, 201 bp, Homo sapiens
tcgcgaccatcctggctaacatggtgaaaccctgtctctactaaaaaaatacaaaaaaattagctgggcgtggtggcaggcacctgtagtcccagctactygggaggctgaggcaggagaatggcatgaacccaggaggtggagcttgcagtgagcaaagattgagccactgcactccagcctgggcaactgagcgagact

SEQ ID NO: 328647 - DNA, 201 bp, Homo sapiens
ggccgaggcgggcggatcatgaggtcaggagatcgcgaccatcctggctaacatggtgaaaccctgtctctactaaaaaaatacaaaaaaattagctgggygtggtggcaggcacctgtagtcccagctactcgggaggctgaggcaggagaatggcatgaacccaggaggtggagcttgcagtgagcaaagattgagcca

SEQ ID NO: 328648 - DNA, 201 bp, Homo sapiens
ccaaacattgcatattaattaaattgtatttatgtccatatgaaactgatagagactcttaaagaattcacaatttaagcataaggtagagtaactggagrgagttcactaagaagatgatacaagagtatagggttttatacccagatctgtaatttgtctcattttatttcatgggattaaccaattatgaggataaat

SEQ ID NO: 328649 - DNA, 201 bp, Homo sapiens
atctcatgttttccaaccttcttgcttttgctcctgctgtttcttctggaaaaaaaaaaaaaaaagtacttcttgttctgatctgttttctaagtactaamtcaaattttctttctcacagtaagcctgtcttcaccaatccaactcatgggctaatgttctctgaactcatagaacttgctgcttttatttatttttttt

SEQ ID NO: 328650 - DNA, 201 bp, Homo sapiens
gaaagggaggaatgttctggaacagttcttaaaccaaatttccatctgtcaacagctgtctgaatagagatacataccaaaattaccaaaactccatctcmaaaacatgtgagctaactatatcaatcattgagataacttcatacattctgttacatttggaattgtgctgcaaaagccaaacattgcatattaattaaa

SEQ ID NO: 328651 - DNA, 201 bp, Homo sapiens
ctctaccatgttctcaattcaagttactgacgttttaaaactgcacaagggcttaataaagatactgttatattatcctggctgcctttttctctttccccagtgttctggtgcaaattaaagtgttttacataactctaaaggtagtgaagtaggaagaagagaagatatattgtttttgctttgtttgctgagtgaaca

SEQ ID NO: 328652 - DNA, 201 bp, Homo sapiens
tgtctaaaagatatctccaagttaacatgtccagaacctaacttctttttttaaatttatttttttttgaaaatttatacatagtagatatacatattttkggggtacgtgtgataatctgatacgttcatataatcaaatcagggtgattggaatacctataatcttaaatatttatcttttctgtattttttaaatata

SEQ ID NO: 328653 - DNA, 201 bp, Homo sapiens
gaaatagcactgtgatttataatggccttcagagactgtcttaagaatttagatgtatttcattgttaaacgaatcaaattcagaattaaaaaaaacagagcataaagctttcaatagcaacctacttttctgtacttaaaacagattttttaaatgaatttattaatgatatttcaggaatactaccacccaaagaagga

SEQ ID NO: 328654 - DNA, 201 bp, Homo sapiens
ctacaatataaacctgaaatacttgttggaaccttaactccaacaaacttttgggccttacctggtcttataattattgatcctatcatcttttatctggktcccatttctcttctagccttactaccttttctaccaagcttaaactctaggaaaattctttataaccagttccattacatagaacctcaactttcttat

SEQ ID NO: 328655 - DNA, 201 bp, Homo sapiens
tttactgggagactttttattactatttcagacttcctacttaatattggtctgttcaggttttccgtatcttcctgactaaaccttggaaggttgtatgyttccaggaatttatccatttcctctactttttccagttttttatcacatagttgttcctaatagtctctgataatcttgtatttctgtggaattaatatg

SEQ ID NO: 328656 - DNA, 201 bp, Homo sapiens
agaaatagcactgtgatttataatggccttcagagactgtcttaagaatttagatgtatttcattgttaaacgaatcaaattcagaattaaaaaaaacagagcataaagctttcaatagcaacctacttttctgtacttaaaacagattttttaaatgaatttattaatgatatttcaggaatactaccacccaaagaagg

SEQ ID NO: 328657 - DNA, 201 bp, Homo sapiens
tagtcatcttaaccacacgaagcaaaatatctacaatataaacctgaaatacttgttggaaccttaactccaacaaacttttgggccttacctggtcttayaattattgatcctatcatcttttatctggttcccatttctcttctagccttactaccttttctaccaagcttaaactctaggaaaattctttataaccag

SEQ ID NO: 328658 - DNA, 201 bp, Homo sapiens
ttcaaggtcatcttaacagcgatggacaacgtttgctagaaaaaaaagatttgaaagttcataagtggaggaggtagaattcaggccagatttttttttttaatttttaacttccagtgttcttaatatattattctttggcctcttgcatggtatcttgatttaataaacatttgttaaattgcttgagttaaagtactt

SEQ ID NO: 328659 - DNA, 201 bp, Homo sapiens
ggaggctaggccagtctgtccttttcacgtttttctgcctgctttatattcgctggcagctgattagattgtgcctaccagattaagggtggatctgcctkccccagcccactgactcaaatgttaatctcctttggcagcaccttcaaagacatacccagtatcaatactttgtatccttcaatccaatcaagttgacac

SEQ ID NO: 328660 - DNA, 201 bp, Homo sapiens
ttaagaaagcaaaacgttttcaagttttagatgctaagtgtccttattgaagaataattggcataaaattgcacatatttcaagtgcaatctgatagatcktgacatatatctacacctgtaaaatcatcaccacaaacaagagaatgaatacatccatcatcccctaaagttcccttttgctcttgtgtaaagccttcct

SEQ ID NO: 328661 - DNA, 201 bp, Homo sapiens
aataagatatatatctcctattagaactaataagatacatatatctcctattagaactaataagatatatatatctcctattagaactaataagatatatrtatattctattgtttattaagtattaacttagactatcacaaggtcccacaatagggtgtctgcaagctgaggagcaaggagagccagtccaagtcccaa

SEQ ID NO: 328662 - DNA, 201 bp, Homo sapiens
tccagtgttccatacttgcttgatgagggttatgctcattttcatggatgttaggtcttacacacaaccttaatgtgagccaaattcctttaatggatgtkctggaaagatctcagtgctgtgaagtcaagaatgcaatttgagctgtgccgacaggaaacaaattgatctttttggcctgtattcctgaatctgaagcag

SEQ ID NO: 328663 - DNA, 201 bp, Homo sapiens
tccctgaccccttgcacttcccaagtgaggcaatgcctcgccctgcttcggctcgcgcacggtgcgcgcacccactgacctgcgcccactgtctggcactycctagtgagatgaacccggtacctcagatggaaatgcagaaatcacccgtcttctgcgtagctcacgctgggagctgtagaccggagctgttcctattcc

SEQ ID NO: 328664 - DNA, 201 bp, Homo sapiens
caaaataaataagtgaaatacgctgttagaagctgataagtgcaatgtttaaaaataagagcacatccaaaggaacagattcattgaaaatgtgtcacttyagtgaagacttgaaggagtgaccatatgaatatttgggaaagagaatttcaggaataggttagagcaaagaatgagacctgagaagataatgtatgtggt

SEQ ID NO: 328665 - DNA, 201 bp, Homo sapiens
tttcatgttttcagatgcactcttttttatacttccacagcctgccagcttttacttagaaagttaaatatcttaaaaggatattttattgggatttttttaaattataaaaaataaataaggcaataaaaaataactattgattttgttgtaggtccttgccatttattttctgcatcctataaaactgtaattttattg

SEQ ID NO: 328666 - DNA, 201 bp, Homo sapiens
atctatttcttctcagaggacagtcattccttccatgagaatagctcctaaatttttgccttcttcttcctccttcctttgtaccttatcatcttcctctsgagattcagcttttcaattcatactgctaattggctaattatcttctttagtcatctttttatgagactgtgcagatgggacactggataaaagtaccct

SEQ ID NO: 328667 - DNA, 201 bp, Homo sapiens
gaaagattagtgcacataagagattaatatgtaaggcaattcaatctaactgcctatattttccatgcttatatctagacttctgagaattactggaggaraaaaacctagaacagtgctattattaatctacagtctccaaaccctcactagacaatcaacacagctctttgccattttatgcaattctctaagcaatta

SEQ ID NO: 328668 - DNA, 201 bp, Homo sapiens
acttagaaatgcgagagtttgttccacgcttcttccctagcttttagtggttgcttacaatctttgatgttccttggcttacagatttatcattctaatcrctgtgtcacttaccacataaattgctccctgtgtattttttatttctgtgtccaaatttcctcttcttataagggcaccaatcaatggaccctaatccta

SEQ ID NO: 328669 - DNA, 201 bp, Homo sapiens
agggaagggtttttttgttgttttttagctgaaacttatgcacattcataagttaagttgcctgtgagggtgggtgttttctcagacagggccagccaggrttcaagatagattctgtgtttcctttaataaaaccatgtagacagaatgtgcagaaaactactagtgctttctgtaaagcagtaaacaccttacctagca

SEQ ID NO: 328670 - DNA, 201 bp, Homo sapiens
atagaactcatccaaaccagacagattatgccaaagtgttggtgtcatgttttcccaacaacctgacagtttattgagagcactttatttatcaagtatctattattgctagataatagatatacttactcctttattacaaagaaatggaaactcaaatttgcatagttataagacgaaagaatcagaaagtgaagctgc

SEQ ID NO: 328671 - DNA, 201 bp, Homo sapiens
ataaggtagagagcctgcccctgctttaacagagtctatgcaagaaaaacccaggtaatttgtgtttggtcttattgctcagtggtcctagcccacatttktcttcatagaatagctatccaaaaattgcttgcattatctgggtttagaacattgcttcagacatgtttcaactacactcactcatatgaactcactttt

SEQ ID NO: 328672 - DNA, 201 bp, Homo sapiens
attcagttaaacttacatttactgatctctttttatgtgtcatttgtcggttgggcattggagattcagagatgaacatgactctacctctgctcttgagrcatttgtgggctactaggggagataggcacatggagaggtcattacagtataaagttcttattcattgacaaaatcctgtgcagaacactatgggagcat

SEQ ID NO: 328673 - DNA, 201 bp, Homo sapiens
tggtcaatggataaaaaatacagttagataaaagaaatagatctttctagtgttcagtagtgcaatagggtggctatagttaataatgtattgtgtatttygaaataactaagagtagaattaaaatgttcctaacactaagaaatgataaatgtttaaggtaatggatatcccaattatcctgatttgatcattacacat

SEQ ID NO: 328674 - DNA, 201 bp, Homo sapiens
tattatttaggtccacggtctcttggatgactccctattgtctacagtggacaccaatctgccttccagtctcctcctgccacactgtaccttacatcccmagcttcatccaagtcttacatcagctcactagaagcagacctaagatgagatttcatgtgtgcatgatttatggagggcagttccaagaaaaaaaaaaaa

SEQ ID NO: 328675 - DNA, 201 bp, Homo sapiens
gctttgcccacattttctctccatactcatagtagaaatcattgctcaacattttggttcctgcattcattcagtgagtattgagtacctgtcatgctctmaatcccagagataccaaaatgaaagtaacatgttacctgctattagatcataatgtgataggagagaaatatataaaaataagtggcattcactgtgaca

SEQ ID NO: 328676 - DNA, 201 bp, Homo sapiens
gtaccttacatcccaagcttcatccaagtcttacatcagctcactagaagcagacctaagatgagatttcatgtgtgcatgatttatggagggcagttccmagaaaaaaaaaaaacatagggagtaagggaagcacaaaggaactgtgcagaaatataggttcaggtacagtctaaatttaagctaatctcgctggatact

SEQ ID NO: 328677 - DNA, 201 bp, Homo sapiens
tatgtgtattttaccacaaattttaaaagaagcttaaaaatgagactcaatagtttgtttatatttattttataattattggagtgagaatgttgagaacmaaagtaattcagggctgggtgcggtggctcacgcctgtaatcctagcactttgggaggctgaggtggacggatcacctgcggtaagaattcgagaccagc

SEQ ID NO: 328678 - DNA, 201 bp, Homo sapiens
gtaatactggcctcatagaataagttgggaaatgtctcctcttctatcttttagaaaactttgtgagaattggctttcattcttttttaaatggtgtttartagaattcaccaggaaagccatctaggcatgggcttctgtgtggataattttttaaatcactgattcaatctctttacttgttataggtctattctgcgt

SEQ ID NO: 328679 - DNA, 201 bp, Homo sapiens
ctatttggttccacacattattctggggtaccttgaagagtgcaaaagaaaattttaagataagatcctcctccttacagggttaagctgaagatgaaacraaaaactagcatcaatagagcaattagagaacccttaagtccaaactgagtaactgtggttaaaggaaggaaaggatcaggatagtcagagaaggggcct

SEQ ID NO: 328680 - DNA, 201 bp, Homo sapiens
ctggttgagcaacatttattcactcagtctgtcagtcaataagtatttactgatcacctatcatgtgttctgttctgttctgttctaggcttagtacatayagcagtaaacaaaaattcttactctcagaaagcttatattttagtggggtaaacattaagtaaactaacctaatagataagtaatatattagatagtaat

SEQ ID NO: 328681 - DNA, 201 bp, Homo sapiens
ccactcataatgggcgtaactgatcaaaagtgaatgttaaatttgatccatgtttctgaggcagattacattcccaaattattcataaggttagataaacmaaagcatggtatttgcagttcacagaaatgttctaacctcattgtgtcgtgtattctcagtgatttttttttttctactaagcagccaattcagttttca

SEQ ID NO: 328682 - DNA, 201 bp, Homo sapiens
gattatattttagaaataaggtataaaattttataggaagtaatttgcctggagaagttctcagcagtagttattgtggctatccactgagagcagagtaraatgcacacttggaatctttgcaagcaatcacagaaaaggtagtatcgtataatagataagagcgcaactctggagccaaactgcttgggtatgaatctt

SEQ ID NO: 328683 - DNA, 201 bp, Homo sapiens
tgtgaacttgatattatgtccttctaggatccttccctgacataatccttaactcttggacttctttcccctctattgttatttaaaagtcttcgtcaagrtttactgacccctgtccagtacttgttgatttcctttggtaactgctcaaaataataacagccccatttttcttgtcctttaaaaaacgtatatttgatt

SEQ ID NO: 328684 - DNA, 201 bp, Homo sapiens
ttgagaattcactgaatgctcctaaacctaatttccacatttatatactgatgataatagaagcacattgtgggaagtaattaagattaaggaggttatcmtttgttggcttgaattttaccatctacgcttaaagaaccccttcttccacactcaaattcctgtgtggctacctccacctcaacttctatttccctagtc

SEQ ID NO: 328685 - DNA, 201 bp, Homo sapiens
gaatggtcaatggaaaagtaagagaaacacatgataaagaaaaaggagctgggcagtgagggttgggtggtgggtgggggcgcagaggggaatgtcagcayacatttagttcaaggagttgtcagtatgtgggacttccaaacaaccaatgtaattttaggctacattaatggagttgcatgccaagaacaaagagatgac

SEQ ID NO: 328686 - DNA, 201 bp, Homo sapiens
cagtcacaacattataatgaatgctgtttattattgcacttgatttgttggtttgccctcaatcactcctaggacatgaatgctgcaagtgacctcttackctctgagtctggagtgacatcagatggtggggggtaaagagcgcactgtcagctcctgaaactgagtcaacatccaagggggtaaagctgaataccctct

SEQ ID NO: 328687 - DNA, 201 bp, Homo sapiens
tcttcaatctgaaatctgccattatcagggattatgttaggcacttaatatctcatctaatccttgtaacagccctatgaagcagacattacaattcagtyttatagaggagaaaagtgagtttcaaaaagtttaagtaaattatctaggtagtgtctcagagctggaatttcacatcagatttgatattccctacttcag

SEQ ID NO: 328688 - DNA, 201 bp, Homo sapiens
aaacgggactacaggctaggagtctcagctgtaatggatttgcctctatttgcaagttccccctcttttcattgaagtaggaagaagtgagaattattcartcagtcacaacattataatgaatgctgtttattattgcacttgatttgttggtttgccctcaatcactcctaggacatgaatgctgcaagtgacctctta

SEQ ID NO: 328689 - DNA, 201 bp, Homo sapiens
gtttaatttgacttacagttctacctggctggcgaggccccacaatcatggcagaaggcaaggaggagcaagtcacatcttacgtggatggcggcaggcaratagagtttgtgcaggaaaactcccccttataataaccatcagatcttatgagacttactcactgtcaagagaacagcacgagaaagacctgcccctgat

SEQ ID NO: 328690 - DNA, 201 bp, Homo sapiens
ttctcagatctccagctgcgtgctgggagaaccactgctctcttcaaagctgtcagacagggacatttaagtctgcagaggttactgctgtctttttgttygtctgtgccctgcccccagaggtggagcctacagaggcaggcaggcctccttgagctgtggtgggctccacccagttcgagcttcccagctgctttgttt

SEQ ID NO: 328691 - DNA, 201 bp, Homo sapiens
ttggtaaactattgattattgccacaatttcagctcctgttattggtctattcagagattcaacttcttcctggtttagtcttgggagagtgtatgtgtcraggaatttatccatttcttctagattttctagtttatttgcatagaggtgtttgtagtattctctgatggtagtttgtatttctgtgagatcggtggtga

SEQ ID NO: 328692 - DNA, 201 bp, Homo sapiens
aacttgagactaggatcttgtaatattcatatatgctcccagagcacagagcacagcccttaatatatagtagcttctcagtaatgtctgtcgaatcggtsaatttagttcccaatacaaattatctctgtatgaccaactcattgcaagggtaaccatttttgaatattttagagtaaaattagattgaaattttgcata

SEQ ID NO: 328693 - DNA, 201 bp, Homo sapiens
ttcatacttgccaggactggatttccacatgatttttatagagagaaatgatctctctatataaattctttttttttcttttttttttaatatatttcttytttttattatactttaagttttagggtacatgtgcacattgtgcaggttagttacatatgtatacatgtgccatgctggtgcactgcacccactaactcg

SEQ ID NO: 328694 - DNA, 201 bp, Homo sapiens
cttttgtactatctcttttctgcaatacaatgtaagctccatgaggtagggattgttgtctgttttgttcattgttacgaccccattgcttataaacaggytggtgcatcgtaacattcaaattaggatttgttgaataaataaataagtggaggagggattactttatcacattgcttattagacatatatactcccgag

SEQ ID NO: 328695 - DNA, 201 bp, Homo sapiens
gtattttgaaaggtcaaatattcttacaattgtagagtttatttttattctataagccagttttggtttttgtgtttgtttgtttgtttgtttgtttgttktgagacagggagctcactctgtcttccaggtgggagtgcagtggtgcagcctcagctcactgcagcctccgcctccaaggctcaagtgatcctcccacct

SEQ ID NO: 328696 - DNA, 201 bp, Homo sapiens
ctctacccaatgtgcaaatttatttttgatatgtatgaattcacctgacttcacttgtcagagctttttttcttctttttctttttacccttctctctctmttatcaaaatacctgttgtggatatttttgtatgtctgtctctctagtcttctccaatatgcttattaaaagcatttgatgatcttttggaaagggagga

SEQ ID NO: 328697 - DNA, 201 bp, Homo sapiens
caccttttattccatttatctgctttatttttctctttagcttgtatcactattgaagagactacatttttctatttatcttttgtactatctcttttctrcaatacaatgtaagctccatgaggtagggattgttgtctgttttgttcattgttacgaccccattgcttataaacaggttggtgcatcgtaacattcaaa

SEQ ID NO: 328698 - DNA, 201 bp, Homo sapiens
aagagttgggagaaagtattcccaacataacattaattactacatatttgtatgtagatatgtgtatatctatatacatgtgtacatttttctcttattcrtatctatttatgttgaatttcattcagaagaagcttattcaagtccactataagctttttatcttaatttaatattaataattatagttaacatttattg

SEQ ID NO: 328699 - DNA, 201 bp, Homo sapiens
cattctcctgcctcagcctcctgagcagctgggaccacaggcgcccgccaccatgcccggttaattttttgtgtttttagtagagacggggtttcaatgtrttagccaggatggtcttgatctcctgacctcgtgatccgcccgcctcagcctcccaaagtgctgggattacaggcgtgagctaccgcgcccggccttttt

SEQ ID NO: 328700 - DNA, 201 bp, Homo sapiens
gacatggaaagcagagggctcactggtcctcagctgttctcttacctttagccaggaggagtcacagtgaaggtgccgaaattccagggagcctctccctyccccatgccagtgcctatagatctcccaccagcagagttctctgggtttctttaagcctcttggctcctggataattgcctaacattgcttttccagggc

SEQ ID NO: 328701 - DNA, 201 bp, Homo sapiens
tctactaggtatgtatacaattctatttggtaagtgtacaactctacttgtttgcagagcattgtgaagatatactcaagagcagctttctagccatgagmagttagcatctccaggtccagtcaagacagttatgagttttggttaattaaggaagtttttaactgaagtaggggagctttttttttttttttttttttt

SEQ ID NO: 328702 - DNA, 201 bp, Homo sapiens
gggtcattcatgtgattccgaggtccctttcctatgcattgtcttgagatttttgcttaagagttgggagaaagtattcccaacataacattaattactayatatttgtatgtagatatgtgtatatctatatacatgtgtacatttttctcttattcatatctatttatgttgaatttcattcagaagaagcttattcaa

SEQ ID NO: 328703 - DNA, 201 bp, Homo sapiens
taaatcttatgccaccatgtggctgcgctagagtctctgagcccgctgtgtctcaggaggctgcccgatttgcgaatcgttcattgctcaattaaactccwttaaatttaattcagctgaatttttttttctttttctttttctttttttgagacggagtctctctctgtcgcccaggctggagtgcagtggcgcgatctc

SEQ ID NO: 328704 - DNA, 201 bp, Homo sapiens
cactttatcctaacaaatactgtcacaaataacattgtggatacgctgttttgtatttacagaggtatggctatagagtagaatcctgtaaacgggatttytgaattataggaaagagtcatatgtacttttgttagatattgctaaaagtactctcataggtattctaatacttagtacccccactagaaatatgtgaga

SEQ ID NO: 328705 - DNA, 201 bp, Homo sapiens
ttcttcacagtaagaacatcggagcttagaatgagagtctctttccaaaaacaggcattgttcatcttacgctaaacatcattgtctgcctggctacagtyaccaaaacaaaacagaaatgcaaaattatgcatcttcccatagtcctgaggcttcctttgccaatggaagggctagcaatgcattctccctctcatgaaa

SEQ ID NO: 328706 - DNA, 201 bp, Homo sapiens
tgcttttagcttttatattagaaccagctgtagtatctgaaggatctctctctctctttctctctctctctctctgtgtgtgtgcgtgtgtgtgtgtgtgkcctgatttatttatctgaagtataattatggattgctcctgatttatgatggcttgacataggatttttcaacttttcaatagtgcaaaaatgatacacg

SEQ ID NO: 328707 - DNA, 201 bp, Homo sapiens
tttttgctcttcctcagagcagtgggaagtcaataaggcttataaacacggtaaagcaataatacaatttgaaatttggagactggattggagtatggcamaagtagatggagtgaaaaaagaaaggataagagtgatataaaaatattagataaaaatgcagaagagggattatcttctgttaaaaatgttggaaaagga

SEQ ID NO: 328708 - DNA, 201 bp, Homo sapiens
gtaggctgggtaggagagcaagagatagagccatcagagtgatggggcttcttcacagtaagaacatcggagcttagaatgagagtctctttccaaaaacwggcattgttcatcttacgctaaacatcattgtctgcctggctacagtcaccaaaacaaaacagaaatgcaaaattatgcatcttcccatagtcctgaggc

SEQ ID NO: 328709 - DNA, 201 bp, Homo sapiens
ctgccccaacaaatagcataatcaactctgcttttagcttttatattagaaccagctgtagtatctgaaggatctctctctctctttctctctctctctcyctgtgtgtgtgcgtgtgtgtgtgtgtgtcctgatttatttatctgaagtataattatggattgctcctgatttatgatggcttgacataggatttttcaa

SEQ ID NO: 328710 - DNA, 201 bp, Homo sapiens
taaatgtaagttagaatcctataaaaagtatggctttatagttaaaatgtagtccttctggctgattcctaaattccaatgatgttgccaagacacgtatsagaaataagaaacaaccgatttgagaattttcttgcttagaggttttgcctggttgagaagaattctgagatagatgaaaatgagaaaggaatatttgtt

SEQ ID NO: 328711 - DNA, 201 bp, Homo sapiens
tcacttggcaatagccatttctcagctccattataatcttttgggcccatcatcgtatgtgtactctatcactgatcaaaacattgttatgcagtgcatgrctgtcctctattcttgttattgcttcatagtttaatataagttaagattgtataagccatagtacagtgaaaatcatctcttaaaagagacaatcgccat

SEQ ID NO: 328712 - DNA, 201 bp, Homo sapiens
gttcattcattagcctgctgccccaacaaatagcataatcaactctgcttttagcttttatattagaaccagctgtagtatctgaaggatctctctctctytttctctctctctctctctgtgtgtgtgcgtgtgtgtgtgtgtgtcctgatttatttatctgaagtataattatggattgctcctgatttatgatggctt

SEQ ID NO: 328713 - DNA, 201 bp, Homo sapiens
gatcaaggagacctcatgttttagatggtatagctacaaaatgtggtgtgttagtctagatccttgaatgactatatagatcagagtgccctaacctgcartgagtgagaactagcctttgtattattaagctactgagatttcaggtttactgcattcttacaacaaacctaacctaaccagattaacacaaaataataa

SEQ ID NO: 328714 - DNA, 201 bp, Homo sapiens
ctgtgttaggcaacagggctggctgtctgggccttgcctgcatagaactctcaatccctggtactgggtataaattcttctaagatagaaaagtaaatgtmagttagaatcctataaaaagtatggctttatagttaaaatgtagtccttctggctgattcctaaattccaatgatgttgccaagacacgtatcagaaata

SEQ ID NO: 328715 - DNA, 201 bp, Homo sapiens
tgagatgatgcattaaattgcttgacacacttctaggcagattgaatgtgcttaataaatattacctccattatggttaccacagatctgttaccctgtaactgttcgacagttggttgctatactgccagtccctaaagttcccttcttttccctctttgctttgtttacttctcgtcaaatcacagggttccacagatg

SEQ ID NO: 328716 - DNA, 201 bp, Homo sapiens
agaaagctggagttatatcacccactctactgacaatgatttgcttggactgattagaagcttgtcttgattattccacatatacttgaatgtagttaaamaaatcaaatcatcactgattatatgcagttagcttggcagaaaaattcttcagaacatagattctatggggtaaaataattttaaaaacccttttattca

SEQ ID NO: 328717 - DNA, 201 bp, Homo sapiens
gcagtacaatatatttatccatttttgctattttttattaaatcaagctaggatattagtcttaaacgcttgctttgaaactagtgattgttctatgaagycagtgccaggtcaaagagagttcaataagttatatctcatctaggcattgctctgtgcaccatctgcccatgttaaatcacagtgataagtaggatgtgt

SEQ ID NO: 328718 - DNA, 201 bp, Homo sapiens
attttaaattttataggaaaagccagtttggggtattttactctttggtcatcatttgcttaataaacaaattgtaaatctgaggcaaacaaatatattcmttgttccatggggtggcaaagcatcagtaaaaataattactcacatcacaaggaaattagataacacttgctttaattgccctatcaatttaaatcaatt

SEQ ID NO: 328719 - DNA, 201 bp, Homo sapiens
atcatttgcttaataaacaaattgtaaatctgaggcaaacaaatatattccttgttccatggggtggcaaagcatcagtaaaaataattactcacatcacmaggaaattagataacacttgctttaattgccctatcaatttaaatcaattttccatttatttttaacaactattatggttaatttaacgatcattgcatt

SEQ ID NO: 328720 - DNA, 201 bp, Homo sapiens
actactaatggtgagtgtgactccagcaaaactgtgtgtatatttataaagctcttgttttccagtgtatgactgtctttgtcagttcaggctgccatcasaaaataccacagggtgggtggcttaaaatggcagaaatctattttctcacaattctggagactacaaagtccaaggttccaaccgattaggtttctggtg

SEQ ID NO: 328721 - DNA, 201 bp, Homo sapiens
tgcagttggagtggaagagaaaccagaaattctgtttcccctgtctgcaatcaaatgttttatttttatatttctagaagtttccttttgaagaaaaaaaatgatatattctggtaataaaattttgaaaacattgcccatagattttggtgagagaaacagacagactgacaaacagataggtattggccaaagtaaata

SEQ ID NO: 328722 - DNA, 201 bp, Homo sapiens
catatgattttgtgaggggtccacaatttagaacttggacaaaaattgaaaagaagagacagcagatttatgagtaagagatttcaaaagtacatgtacartgtatctattttgttgacattttcaaaacaaatctaaattttcattaattttcttagatacacatggcatagagattatctgttgttcttccaacataat

SEQ ID NO: 328723 - DNA, 201 bp, Homo sapiens
ttttgatgtactcataggttcatatgtttcttatccttctcaggcaattctcattgcttttaccaaaacacatttagatctaattattaaatctgtcgggktttttttttttttttttgctcatatatgtgtgtgtgtgtattcctgttgaccaacagctagttgttattctgcttgtttctgtcaagacatcaatagcct

SEQ ID NO: 328724 - DNA, 201 bp, Homo sapiens
gctatttcatttgccagcttctcacatgcttcagtagtcctaggcagtgattgacattgacacacagccagtctttctgaaccatggagttatatgataamctaaagcaaaattaaggcgattataagcaacaaagcatttgggactgtgttaataaaactgccttatgtccatttactgttgtatgccaaaatctacagg

SEQ ID NO: 328725 - DNA, 201 bp, Homo sapiens
catggtttcattagtttccttgaatttgtcagtcagttctttcctttcctcctttattcattattgtcattcattaattacttttttaataagtacatgckgcccacctactgtgtctcaggcagtagctgctattcaggaaggaactttgtcttgagaaaactggatgggcaaaaaatataccattaatgacttcagtca

SEQ ID NO: 328726 - DNA, 201 bp, Homo sapiens
aggggtgacagatggcacctggaaaatcaggtcactcccaccctaatactgcgcttttccaatggtcttagcaaacgtcacaccaggagattatatcccgsgcctggcttggagggttctacgcccatggagcctcactctttgctagcacagcagtctgagatcaaactgcaaggtggcagcaaggctgggggaggggct

SEQ ID NO: 328727 - DNA, 201 bp, Homo sapiens
atagtcttataaagtctgtgccaaaatctgacatattaaacatttagcagaggcaaatattaaacttatcgagacacaactgtatgctgatatttctgaaracattttaatatttatctcaccaaagatttttaaaaccagttttatatcctaaagattcatgtgaacttgaaaagcattttgacttaatttttgagtgct

SEQ ID NO: 328728 - DNA, 201 bp, Homo sapiens
cctgctcgacatttgaagaaaaaattgtcagtgagagaacttttataccttttacagagaattagttcttgtgttttctttccttaaagggaagtagtaartgacaggaaaagtaacagagacattgaagtcgagcggaaagacactggactcagatgagaaagctggatttcagtcacaggcacctagcactgattctac

SEQ ID NO: 328729 - DNA, 201 bp, Homo sapiens
ctccagtctacagctcccagcatgagcaacacagaagacaaatcacttctgcatttccaactgaggtactgggttcatctcactggggattgtcggatagygggtgcagtgcaccgagcatgagccgaagcagggtgaggcatcgctgaagcagggtgaggcattgcctcacccgggaagcacaagaggtcagggaattcc

SEQ ID NO: 328730 - DNA, 201 bp, Homo sapiens
catcccaagactttctttttggtacacaccacacacatacatatacacacagctatagcataaggcaaaaaagtttagcaaaacatgaatagagtcttaayaggtattcaaatgggcgggagagcctactccatgtgagagcaattaagaaagggtccgaagaaaaggtagcattttagctaactctgtgaggagtaagtg

SEQ ID NO: 328731 - DNA, 201 bp, Homo sapiens
ttaattgtgttttggttgttctgtatgttctttgttcctttatttttcttttattgttttccattttggtttggtagctttctgtcatgatactatttgasttctttctctttttcctttgtatatgtgctttaccagtgagttttatacatttgtgtgttttcataatggcagatgtgtccttttccttccaggtttagg

SEQ ID NO: 328732 - DNA, 201 bp, Homo sapiens
gtcatattgttaattgtgttttggttgttctgtatgttctttgttcctttatttttcttttattgttttccattttggtttggtagctttctgtcatgatrctatttgagttctttctctttttcctttgtatatgtgctttaccagtgagttttatacatttgtgtgttttcataatggcagatgtgtccttttccttcc

SEQ ID NO: 328733 - DNA, 201 bp, Homo sapiens
agttcatattattttatgtattcctcatagtctatttgtctcaagttgctgatgacgaaactgctattctgtggaatggcgtggagaataaactacattcyttatgtatttttgtgcacaggcatttctgccacttgggtccacaaagcactgccattgaaactgtcaagttaatctgcaaccttatatacaaaatgtatt

SEQ ID NO: 328734 - DNA, 201 bp, Homo sapiens
tatcattatataattttctgatttctcttttttactgtttttttttttttacttgaagtctgttttatccaatataaggatagctactcttactcactttkggtttctgttattatggaatatcttttttcatccctttattttgtgtcttcatgtgtttttataggtaaagtatgtttcttataggcagcatatagttgg

SEQ ID NO: 328735 - DNA, 201 bp, Homo sapiens
gacaggtctgcaaatttaggtctccactgcctagaaacctttctgatttggaaaccagctggcttttgtgtgtgcaaagtgcttttgcagtgttaactatytgagtcagatgtcagggaaaaaaatgtgtgtgttagaaatatagtttacagacattcggaggggcattaatctaacttttctttagatgtaagcatcaaa

SEQ ID NO: 328736 - DNA, 201 bp, Homo sapiens
tgctgcattgattccctattatcattatataattttctgatttctcttttttactgtttttttttttttacttgaagtctgttttatccaatataaggatmgctactcttactcacttttggtttctgttattatggaatatcttttttcatccctttattttgtgtcttcatgtgtttttataggtaaagtatgtttctt

SEQ ID NO: 328737 - DNA, 201 bp, Homo sapiens
cctatacaacagtggtcccataagattataataccctatttgtattgtaacttttctatgtttggatacacaaatattcactattgtgttgcaattgtctrtaatattcagtattaacatattgattgtactggtttgtatcctaagagcaatggtctataccatgtagcctaggctataccatctatgtttgcttaagta

SEQ ID NO: 328738 - DNA, 201 bp, Homo sapiens
catacatacatctcttaatcaccacaagacttcaaaggaaatcatttatttcctctttatagatttaaagaaactgaggcttagagaggtgaagaaaaatwcatgtctgactgattccaaagttcacaatctgcttactatagcatgctttcttttttattgacatcatgtaacacttgtgcaatttaagaaaaataaaga

SEQ ID NO: 328739 - DNA, 201 bp, Homo sapiens
tgttttgttgtttttggttttggggttttttggttggggggatttttgttcgtttgtttttgctcaggattgcttcagctattctggctctttttttttttgattctatataaattttagaattctttttctcatttctgtaaaaaaaaatgactctggtatttttatagggattgcattgaatctgtagattgctttggg

SEQ ID NO: 328740 - DNA, 201 bp, Homo sapiens
tttaaatcaattttccatttatttttaacaactattatggttaatttaacgatcattgcatttcaaatataattccagagatgttgctttataatttactrtgccatcatttttcaattaactatttatgctatcttaagagtgcataaccttacccaatatttattcaataaaagtatagtgaagtagagttaatatttt

SEQ ID NO: 328741 - DNA, 201 bp, Homo sapiens
atgagatgatgcattaaattgcttgacacacttctaggcagattgaatgtgcttaataaatattacctccattatggttaccacagatctgttaccctgtaactgttcgacagttggttgctatactgccagtccctaaagttcccttcttttccctctttgctttgtttacttctcgtcaaatcacagggttccacagat

SEQ ID NO: 328742 - DNA, 201 bp, Homo sapiens
aaacatgtggatgtatttctgacttctctattctgttccattggtctaagtgtctatttttataccaataccatgcctagtaatatatttctaagtcaggytgtatgatgcctccagctttgttttttgtttgtttgtttttgtgttttgttttgttttgttgtttttggttttggggttttttggttggggggatttttg

SEQ ID NO: 328743 - DNA, 201 bp, Homo sapiens
tagcagctttgtcaaatgtcagttggctataaacatgtggatgtatttctgacttctctattctgttccattggtctaagtgtctatttttataccaatascatgcctagtaatatatttctaagtcaggttgtatgatgcctccagctttgttttttgtttgtttgtttttgtgttttgttttgttttgttgtttttggt

SEQ ID NO: 328744 - DNA, 201 bp, Homo sapiens
tacaattcttaaaggaccatttagcattttggccaacaatgagtaattaggattagtacctttttgttttacagagtaactgagagttttgtaacatccasagatggtactagagccaatgagagatctgttcctagatgcactatttctttgaggaagagagagaagagaagtgtctggttgggggtgagggggtgcaga

SEQ ID NO: 328745 - DNA, 201 bp, Homo sapiens
gacagagcacaggaaaagatatttgtaatccagacatctggaaaagaaatttatcttcagaatatgtaaagagcagctacaagtctttgagaaaaaaaaaacatttttttttaatggacaaaagacttgaacaggcatttcttaaaagaggatatgtaaaacggtcaattcacatgaaatggtggtactcccagaatggct

SEQ ID NO: 328746 - DNA, 201 bp, Homo sapiens
tgatatgacatagttttgtgtgtctaataactcattttatattctagtattttgctttagatattaataatacctaaaatttaaataaatgtaaatggttyaaagtgtatgatgtattacattacatttgtctctcattacaatcttgaaagaaaatgcaaagggaatagatatcctttcaatactggaacttatactgtg

SEQ ID NO: 328747 - DNA, 201 bp, Homo sapiens
agtttttgcaatcataggaatagactgtacacacttttcaaagcattttatgattatttggcgtattacttgtggctgataaggatgtctgtcaccagtcmctctttagcaatcacttagctctccttttattattaatattttcatttcccatatgcataattttatctggaaaaagattctgtatcaagttttagtgca

SEQ ID NO: 328748 - DNA, 201 bp, Homo sapiens
ctaacatgaaaatctaattctcatttaaattaactttgtagctcttactgtagacaaacctctttactagttccagtggcttctttggagccagtgtcathtttttctgttaatgagggttcctaggcaatcatcaggaaggggtctctgcttgtgtttctggttgctgtaaatccagatgagtggggagtttctccacct

SEQ ID NO: 328749 - DNA, 201 bp, Homo sapiens
gaatagatgatgtgagtgaccatgatatgacatagttttgtgtgtctaataactcattttatattctagtattttgctttagatattaataatacctaaamtttaaataaatgtaaatggtttaaagtgtatgatgtattacattacatttgtctctcattacaatcttgaaagaaaatgcaaagggaatagatatccttt

SEQ ID NO: 328750 - DNA, 201 bp, Homo sapiens
gacagctttattgagatataattgatatgcaaaaagttacacgttttatacatacaattttgtgtgtttaaaaaaacagattttttttaaagatatcatcacattatagtatctttcattgtattttataacattgtatattctacattgtttcaaaccagattgcttacctcatgtactttttccccttaattgtcttaa

SEQ ID NO: 328751 - DNA, 201 bp, Homo sapiens
tattgaaagtctagtattttctaggtatggagcatcaagaagagaggtagtttgagtagtacatgcttgattcccactctaggtcaaaaaacaacaacaamaaaaaaaaaaaacaagaaaaaatctgtagataaagacagacactagatgtaactgcacaaagaagagagtgatccacctaatgacaactgggtcatccca

SEQ ID NO: 328752 - DNA, 201 bp, Homo sapiens
tgacagctttattgagatataattgatatgcaaaaagttacacgttttatacatacaattttgtgtgtttaaaaaaacagattttttttaaagatatcatcacattatagtatctttcattgtattttataacattgtatattctacattgtttcaaaccagattgcttacctcatgtactttttccccttaattgtctta

SEQ ID NO: 328753 - DNA, 201 bp, Homo sapiens
aatcttgagtattttggatctaaatcattctaagatccttaggaatgcattttttttttttttttttttttttttttgagacggagtctcgctctgtcgcycaggctggagtgcagtggcgggatctcggctcactgcaagctccgcctcctgggttcacgccattctcctgcctcagcctcccaagtagctgggactaca

SEQ ID NO: 328754 - DNA, 201 bp, Homo sapiens
acaatagcaaagacttggaaccaatccaaatgtccaccaacaatagactggattaagaaaaggtggcacatatacaccatggaatactatgcagccataaraaatgatgagttcatgtcctttgtagggacatggatgaagctggaaaccatcgttctgagcaaactgtcgcaaggacagaaaaccaaacaccgcatcttc

SEQ ID NO: 328755 - DNA, 201 bp, Homo sapiens
gggtatatacccaaaggattataaatcatgctgctataaagacacatgcacacgcatgtttattgcggcactattcacaatagcaaagacttggaaccaayccaaatgtccaccaacaatagactggattaagaaaaggtggcacatatacaccatggaatactatgcagccataagaaatgatgagttcatgtcctttgt

SEQ ID NO: 328756 - DNA, 201 bp, Homo sapiens
gtactttagtggtgctgtgcaagtggaactgattattgctaatgttaactgttcttgttctgtgggaatgatttgggtatgtttgatttaatatgctactkgtattgtgtatttcctgcattgtgaaacatatagcagtaaagcattgtgaaacatgtagttcatttaaaagtaaataaagttacaaatatgaataaaatg

SEQ ID NO: 328757 - DNA, 201 bp, Homo sapiens
agaatctcttgaacctgggaggcagaggttgcaatgagccaagatcgtgccacggcactccagccttggcaacagagcaagactccatctaaaaaaaaaawaaaaatctaacttctacctcttaacgtgatttatttttgtgctccttggacatgtgcggtcactttatcaacagacaaaatgtatgtatttcttggggaa

SEQ ID NO: 328758 - DNA, 201 bp, Homo sapiens
caaatgtacataaatataattatttatagaccaatcttatatcctgcaaccttgctaaagccacagttttctagtgaattcctcagagttttctatatacragatatacatgcaaaaagagagagttttgcttctttccttcaaatatggatgccttttttccttgcttaattgcaccagctagaaccttcagtataatgt

SEQ ID NO: 328759 - DNA, 201 bp, Homo sapiens
aaatagattttgatttaattatttaagcatttaaatagcaaatattatttttttctacctctctgttgcttacaaataccatgacgtgactctcagtataygtatcggagtaatttcaagggacatgttagaaacttagagactttgtaccaagattttttatatggaacaaaggaagagaaatattttagaacacatttt

SEQ ID NO: 328760 - DNA, 201 bp, Homo sapiens
ggcttattaaagcatggccatttggtgctctctagagatgtgaaatgtcagaattgattgctcaaattttgccattccatttatgtttttggtattttggycagtgatgagacttggacagggaggattatttctgctcaaacaatctaattaattgcttgagtctaagtgtgagtggggaaggaaggcagttgttgtcat

SEQ ID NO: 328761 - DNA, 201 bp, Homo sapiens
catttaccaatgaatgttatagaaaggccaagtcgaaggcaaatgaagtaggcaatttactaggctaaggtcctggctgtgtgatatctccaaatattagyagaaaaaaatggaaaaccttcatctcaaattcaggtgcttgggatgtgagctgtcaaacatctggtgaggtctaaggactgggtttacaattttttttct

SEQ ID NO: 328762 - DNA, 201 bp, Homo sapiens
atagtcaatctgcaggaaaattgtcagtggtgacaggtgacatgaattaaaaatcctctttttcctatattagggttttaccaaaattggtgactgtgacwagaaataaaggaagaaagaggatcagcttacactgtgttcctaaaacttttaccagtgtgtgcatgtgcaaacttgtgcttatcagctcatatgccgact

SEQ ID NO: 328763 - DNA, 201 bp, Homo sapiens
aggagtaaaaatgccaactgacaataatgagtcttctcacaatctgtaacatttagaagagtaaagctggtttttcttgttattaattaattaattaattwatttatttatttattagagatgaggccttactctgtcacccaagctggaatacagtggtactgtcacaactcactgcagcttttacctcccaggctcaag

SEQ ID NO: 328764 - DNA, 201 bp, Homo sapiens
agttagcatctccaggtccagtcaagacagttatgagttttggttaattaaggaagtttttaactgaagtaggggagctttttttttttttttttttttttgagacgcagtcccactctgtcacccaggttggagctcagtggtgcaaactcagctcactgcaacctctatctccctggttcaaggaattctcctgcctca

SEQ ID NO: 328765 - DNA, 201 bp, Homo sapiens
gtaaacagacaacctacagaataggagaaaaattttacaatctatctatctaacaaagctctaatatccagtatctgtaaggaacttaaacaagtttacaygaaaaaaataaccacattaaaaagtggacaaaggacatgagcagacatttctcaaaggaagacagaggtgtggccaacaaacatgaaaaaaaagctcaac

SEQ ID NO: 328766 - DNA, 201 bp, Homo sapiens
ctctcctctgtcttggaagcctggcatataacccatatgctatgttgcctacccaataaattgagtgagacaatgaatataaaatgcttactacattgtgmgacacctaaaaagcactattttgttagggtacccaggtatctcacagccatgttgcatagtcatgaggatgagcagctgcttcactcttcccttactaga

SEQ ID NO: 328767 - DNA, 201 bp, Homo sapiens
ggcagaattgttgtcagaaataataacaaagaggaactcacctgtgttgggtactttacatgtgtcatcccattgtcgtatctccgcagcacccttttgcrttagtgccattactatctgaatttcctaaataagagaatggccatctatggtaaagtggttatctaagaggttaagtaacatgcccaaattatacagtta

SEQ ID NO: 328768 - DNA, 201 bp, Homo sapiens
tgcatcttttttgcaggctagtccatagtatcactataagtgttatcatcaaatcatgaaatccttaggtataagatctaagtacaacatttcttatcagraattccaagaattctaagattaggaacatgagcttttgagtgagacacatctacctatactttaatcctggttctgctacttagtatcttattttcattt

SEQ ID NO: 328769 - DNA, 201 bp, Homo sapiens
aaaagtagtcctttatgttcttttcatctattcctttatgttttaagctggatgctctattcctatatgttttcctggatacactattttagtcttgcccrttttttttttagcttaatttgtcttttcagtcttctttaatttgttgaattccactctatattttatttaccttatagtttatctgctgaagaactcagg

SEQ ID NO: 328770 - DNA, 201 bp, Homo sapiens
tttatttatcaagtatctattattgctagataatagatatacttactcctttattacaaagaaatggaaactcaaatttgcatagttataagacgaaagartcagaaagtgaagctgcctctgctgttgtcccattgcctgctcagtgcttaccataaaccctgtacaggttgaggatggagagctcatcaaagtttacct

SEQ ID NO: 328771 - DNA, 201 bp, Homo sapiens
cagcagcacaaccagggtcagctctttcgtcaagaataggttgaaacatgaacttttggggagaaagggcttataacagattgtaaatcatttttttttttctttctcagcttggtgaagttgaaatagtacaggtttggttgtcagattaggttcagttgctggatatgattcttatttgtacatgtccattaacataga

SEQ ID NO: 328772 - DNA, 201 bp, Homo sapiens
aggtattaaagcaatgtgctaaaggtatgagtgggtattacaagatatgtaatagaagaaaaagttttgggctgtggctatagtaagttaattgggtgacytgtgagcagttcttcaagcaggattgaagatgctttgtcagtgccttagaaattttaagcagaatcacttctttcaacctcagattttgtctttggaatc

SEQ ID NO: 328773 - DNA, 201 bp, Homo sapiens
tatacacatatatatgtgtttatatacacatatatatacacatacatatatacttatacatatatacatacacatgtgtgtatatatacatgtgtgtgtgtatatatagtttttcttccattttattgtaatttaaattacagtaatagcatatgagtacaattatattactgttaaaaaagtacagaggtaacccagaga

SEQ ID NO: 328774 - DNA, 201 bp, Homo sapiens
ccaatgtatctagacggcagtgatttctttctctacctggaattccacccacaggtactgtcatggactcatacttcctaagcagttgctgctgacaagcwtatcagagaggagtatcctattattagcagctgcttaaggaccagactggaagaagttctaagacctgtcagctccttctcttgagaactactgcagcag

SEQ ID NO: 328775 - DNA, 201 bp, Homo sapiens
atatacacatatatatgtgtttatatacacatatatatacacatacatatatacttatacatatatacatacacatgtgtgtatatatacatgtgtgtgtgtatatatagtttttcttccattttattgtaatttaaattacagtaatagcatatgagtacaattatattactgttaaaaaagtacagaggtaacccagag

SEQ ID NO: 328776 - DNA, 201 bp, Homo sapiens
acatgcctgtagtcccagctacctgggaggctgaggcaggagaatcgcttgaacccggtaggcggaggttgaggtgagccaattgcactccagcctgggcmacaagagcgaaactccatctcaaaaaaaaaaaagaagtagttgtttttctcaataacaatgagaaaaaagtgaaataatatactcaggtttaaaaaattc

SEQ ID NO: 328777 - DNA, 201 bp, Homo sapiens
atgtgtgtttatatacacatatatatgtgtgtttatatacacatatatatgtgtttatatacacatatatatgtgtttatatacacatatatatgtgtttrtatacacatatatatacacatacatatatacttatacatatatacatacacatgtgtgtatatatacatgtgtgtgtgtatatatagtttttcttccatt

SEQ ID NO: 328778 - DNA, 201 bp, Homo sapiens
tgaagagagattttttgttgctgttattgtaaaagcatagttttacaatgaggtcttctattttggtttgctctctctagaatacagtgataggtgttttkttttttttttttttaatctggacaagtaaacagaactaataagaaaatacattggttatacttttccacttgggaatgaattacagaatcagaatgttgt

SEQ ID NO: 328779 - DNA, 201 bp, Homo sapiens
tatatatgtttatatacacatatatatgtgtgtttatatacacatatatatgtgtgtttatatacacatatatatgtgtttatatacacatatatatgtgtttatatacacatatatatgtgtttatatacacatatatatacacatacatatatacttatacatatatacatacacatgtgtgtatatatacatgtgtgt

SEQ ID NO: 328780 - DNA, 201 bp, Homo sapiens
gaatagggtaagcccaagaagagggagcgagaacaggtaaggacatatttttggtagagtaagaacacacacatttatcagttaagttcatcatcttataygggcatattctgtggcaccccaaaactattgtgatagtaacatcaatgaccactgatcacatgttactatatcagatataataatcattaaaaattttga

SEQ ID NO: 328781 - DNA, 201 bp, Homo sapiens
atatatatgtttatatacacatatatatgtgtgtttatatacacatatatatgtgtgtttatatacacatatatatgtgtttatatacacatatatatgtktttatatacacatatatatgtgtttatatacacatatatatacacatacatatatacttatacatatatacatacacatgtgtgtatatatacatgtgtg

SEQ ID NO: 328782 - DNA, 201 bp, Homo sapiens
agttcaaccattgtggaagacagtgtgaggattcctcaaagacctagggccaaaagaattcaacctagcaatcccattactgaatatatacccaaaggaayataaatcattctattataaagatacatgcacatgtaagttcattgtagcactattcacaatagcaaagacatggaatcagcctaaatactgatcagtgat

SEQ ID NO: 328783 - DNA, 201 bp, Homo sapiens
gtgtgtgtgtttatatacacatatatatgtttatatacacatatatatgtgtgtttatatacacatatatatgtgtgtttatatacacatatatatgtgtttatatacacatatatatgtgtttatatacacatatatatgtgtttatatacacatatatatacacatacatatatacttatacatatatacatacacatg

SEQ ID NO: 328784 - DNA, 201 bp, Homo sapiens
tgtgtgtgtgtttatatacacatatatatgtttatatacacatatatatgtgtgtttatatacacatatatatgtgtgtttatatacacatatatatgtgtttatatacacatatatatgtgtttatatacacatatatatgtgtttatatacacatatatatacacatacatatatacttatacatatatacatacacat

SEQ ID NO: 328785 - DNA, 201 bp, Homo sapiens
caggagaatcacttgaacccgggaggcagaggttgcggtgagctgagatggcaccattgcagtagcctgggcaacaagagcgaaattccatcaaaaagaaraagaaaaagaaagaaagaaggggaagaaagggaaggaagggaaggaaaggaaagaagggaaggaagggaaatcaaggaaggcctcaatgtttctacaaca

SEQ ID NO: 328786 - DNA, 201 bp, Homo sapiens
tttgttttgttttgctttgttttgtttttgagacagccttgctatgtcgtccaggttggagtgagtgcagtggcgctatcttggctcactgcaacctccgmctcccgggttcaagtgattctcctgcctcagcctcccgagtagctaggactacaggtgtgtgccactacatccagctaatttttttgcatttttagtaga

SEQ ID NO: 328787 - DNA, 201 bp, Homo sapiens
gtcaccctggttttataaaatgaggaggtgtgtaattatatctctgtctttggctagaggcagaaaatgactaagaagaacatctttctttaactagttggaattgttagtataatgactctgagagagttctaggtttttatttccttttaaataattttctagatcctccttataaaatattgtccccctgctcccagc

SEQ ID NO: 328788 - DNA, 201 bp, Homo sapiens
ttctattgctaccataacaaattatcacagaactaatgacttaaaacaacacaaatttattatcttatagttctgtaggtctggtacagatctcaccagamtaaaataaagctttcagcagtctgtaacccttctagaggctcaataggagaattgttttctgctcattcaggtcatcatatggttgtaggactaaggtgc

SEQ ID NO: 328789 - DNA, 201 bp, Homo sapiens
agccatttctacacttttaggtatttgttacatagcacctcacttccagtaccaaagttgatattagttttctattgctaccataacaaattatcacagamctaatgacttaaaacaacacaaatttattatcttatagttctgtaggtctggtacagatctcaccagactaaaataaagctttcagcagtctgtaaccct

SEQ ID NO: 328790 - DNA, 201 bp, Homo sapiens
tctaggttttcttctatcatgttcctcaacattcttctagcctctgtccacttcccaattcaaaagccatttctacacttttaggtatttgttacatagcrcctcacttccagtaccaaagttgatattagttttctattgctaccataacaaattatcacagaactaatgacttaaaacaacacaaatttattatcttat

SEQ ID NO: 328791 - DNA, 201 bp, Homo sapiens
tctggcccccaaagattcttcttttcacataactacagggcgtaattctactaagctttccaccactgtgtaaccaggatccctttcctacagtttccaaygacatgcttctcatttccatttgagctgtcaccctcagcattctccaagtccagatttccataagaagtatttaaagcttcactggaaatatccttaaag

SEQ ID NO: 328792 - DNA, 201 bp, Homo sapiens
atctttgacagaatcctcaaactggtggcccttgtcttctacctgccctctattaaagcatgttgtttcttgtcctctgttttagctttacattactgccrtgacaaatttgcttcctccattttcaaatcttagcaatggcactcaagtccttttcatgttccatctctattctgcctttctcttctagttttaaggact

SEQ ID NO: 328793 - DNA, 201 bp, Homo sapiens
aagaactcttcctttgtatttacaacttggctgtttggcataggaggcctagctttctacctacctcagctttcaacatgccttcctcactaagcataatsatttctagattttgatttaaaggatatgtgtgtgattactcctttcaattgaacatttggaggccatttaagggttattatttagcctcggggtcttggg

SEQ ID NO: 328794 - DNA, 201 bp, Homo sapiens
ctctaatcaagcagaggcctcaacttcaagaaatgaaggaaattgagtcaaagcactctgttccttgcatcttaatgttgtcaggaaagcaaaggcctccmtagaccaaacaagttcacagcacagaagggagtaatttgctgattcacttgttcatttataaatccatctgtgaaaactctgtgctgagacttggtctgg

SEQ ID NO: 328795 - DNA, 201 bp, Homo sapiens
tatcgtgttagtggacatgaaaacattaatgtttttgcacatctgcataagagctcttggtgactaggtgcatcgacaatgagcaacaatattttgaaagraatctttttttctgaccagtgcatctcaagagtaggcttaaaatattcagtaaaccatgctataaacagacgtgatatcatccaggctttgcagtttcat

SEQ ID NO: 328796 - DNA, 201 bp, Homo sapiens
ctagtgttctttctcttgctgcatagaaaggtgaggaccaggtctcctctaatcaagcagaggcctcaacttcaagaaatgaaggaaattgagtcaaagcrctctgttccttgcatcttaatgttgtcaggaaagcaaaggcctccctagaccaaacaagttcacagcacagaagggagtaatttgctgattcacttgttc

SEQ ID NO: 328797 - DNA, 201 bp, Homo sapiens
cctctcaaaccctgctaatgcttcatcaactaaatttaggcaatattctaaatcctttgttttcatttcaacaatattcacatcttcaccagaggagtagrttccatctcaagaaaccactttctttgctttttcctgagaaacaactcttcatttgttagttttattacgagattgcagcaattcagtcatatcttcagg

SEQ ID NO: 328798 - DNA, 201 bp, Homo sapiens
cttgcactattcatatgtgcttaccttgacaatgtgaaaatgggtcatatgtgtccaagccaggcacagtgggatggagcagagagcagactttattttcygttgctagtgttctttctcttgctgcatagaaaggtgaggaccaggtctcctctaatcaagcagaggcctcaacttcaagaaatgaaggaaattgagtca

SEQ ID NO: 328799 - DNA, 201 bp, Homo sapiens
catcctttcccatacccctctagtgagaaaatgttttgaagaagtttactacatatgcatttttatgtcacatttgtaaaaacaccatccttatttcatcycccttccagtacttgtgggacacttgctcatctttagagtagagaagaggtgaagtaaaggaacttttgttttgccagttattatgtgaaatgctcttcc

SEQ ID NO: 328800 - DNA, 201 bp, Homo sapiens
caagcgattctcctgcctcagcttcctgagtagctgggattacaggcatgtgccaacatgcccggctaactgtttttgtttgtttgtttgtttgtttgtttttgtttttgttttttgtatttttagtaaagacggagtttctccatgttggtcaggctggtcttgaactcctggccttaggtgatctgcccatctgggcct

SEQ ID NO: 328801 - DNA, 201 bp, Homo sapiens
ctaaagtttagatctctctgctcccagcatcctttcccatacccctctagtgagaaaatgttttgaagaagtttactacatatgcatttttatgtcacatktgtaaaaacaccatccttatttcatctcccttccagtacttgtgggacacttgctcatctttagagtagagaagaggtgaagtaaaggaacttttgtttt

SEQ ID NO: 328802 - DNA, 201 bp, Homo sapiens
tcaagcgattctcctgcctcagcttcctgagtagctgggattacaggcatgtgccaacatgcccggctaactgtttttgtttgtttgtttgtttgtttgtttttgtttttgttttttgtatttttagtaaagacggagtttctccatgttggtcaggctggtcttgaactcctggccttaggtgatctgcccatctgggcc

SEQ ID NO: 328803 - DNA, 201 bp, Homo sapiens
ttcaagcgattctcctgcctcagcttcctgagtagctgggattacaggcatgtgccaacatgcccggctaactgtttttgtttgtttgtttgtttgtttgtttttgtttttgttttttgtatttttagtaaagacggagtttctccatgttggtcaggctggtcttgaactcctggccttaggtgatctgcccatctgggc

SEQ ID NO: 328804 - DNA, 201 bp, Homo sapiens
aaagaatacattttatttcaaatagagaacatggaaataaactgatgccaaataacatatcatagctttccacgttatttgccaaataacaactaggccakaattccagccctaacattgtattaaaatacctgacaatactagtaaatatagtttatgatgtcccaggcactgtgctaatggtttgacaagcattttctc

SEQ ID NO: 328805 - DNA, 201 bp, Homo sapiens
gttcaagcgattctcctgcctcagcttcctgagtagctgggattacaggcatgtgccaacatgcccggctaactgtttttgtttgtttgtttgtttgtttgtttttgtttttgttttttgtatttttagtaaagacggagtttctccatgttggtcaggctggtcttgaactcctggccttaggtgatctgcccatctggg

SEQ ID NO: 328806 - DNA, 201 bp, Homo sapiens
ttgagggagaaggtgtggcagaaattcattttgtcaaaggaaatacggcaggaatgagaaccatttgggggtacatactataaactaggcactatattttmttgatattctccatttagtcttgtgatgtacgtttcaatatacccattttacagataaaacaatctgcgttttagtaaattagtggcaaagacagggtta

SEQ ID NO: 328807 - DNA, 201 bp, Homo sapiens
ggttgctgaaagatggggtggctatggtaaattttattttattttattatttttatttatttatttattttgagaccgagtttcgctcttgttgcccgggytggagtgcaatggcatgatcttggctcaccgcaacctccgcctcctgggttcaagcgattctcctgcctcagcttcctgagtagctgggattacaggcat

SEQ ID NO: 328808 - DNA, 201 bp, Homo sapiens
tctagttttgtgctctaggagaagaggaaatgagtttggtgaaccagatagtctctgcctcaaagtagtaatgacaaaaattaacatttataaagcatttrttttgtgccaggcattggctaagccctttacctacattatttttaaattcatataccatattattcacttgtttaaaatatacaattcagtggattttat

SEQ ID NO: 328809 - DNA, 201 bp, Homo sapiens
cagggtggtggttgctgaaagatggggtggctatggtaaattttattttattttattatttttatttatttatttattttgagaccgagtttcgctcttgytgcccgggctggagtgcaatggcatgatcttggctcaccgcaacctccgcctcctgggttcaagcgattctcctgcctcagcttcctgagtagctgggat

SEQ ID NO: 328810 - DNA, 201 bp, Homo sapiens
gtgatctctgctcactgcaggctccacctcctgggttcactccattctcctgcctcagcctcccaagtaactgggactgcaggcacccaccaccacgcccrgctagtttttttttttttttcttttgtatttttagtagagacggggcttcactgtgctagccaggatggtctcgatctcctgacctcgtgatccgcctgc

SEQ ID NO: 328811 - DNA, 201 bp, Homo sapiens
ttcagtgagtcaatcatctttttctggcagaagatattgcctcagtgttgatggctgctgactgatcagggtggtggctgctgactgatcagggtggtggytgctgaaagatggggtggctatggtaaattttattttattttattatttttatttatttatttattttgagaccgagtttcgctcttgttgcccgggctg

SEQ ID NO: 328812 - DNA, 201 bp, Homo sapiens
tttagccccattcttatataccaaaggagcattctataaacactattctgtattattattattattattattatttttaaattattattatgtttttttttagacggagtcttgctctgtcacccaagctggagtgcagtggcgtgatctctgctcactgcaggctccacctcctgggttcactccattctcctgcctcag

SEQ ID NO: 328813 - DNA, 201 bp, Homo sapiens
tcaacctgggaagcggaggttgcagtgagccgagattgccattgcattccaatctggacgacaagagtgaaactctgtctcaaagaaaaaaaaaaaaaaaagtatacaataataacatgacattttgcagatactataaaagtgctctattgtacaaatttatgaaaattaacttgaaaagttagatcaagtgaaaaggat

SEQ ID NO: 328814 - DNA, 201 bp, Homo sapiens
atagatagatagatagataaatttttagccccattcttatataccaaaggagcattctataaacactattctgtattattattattattattattatttttaaattattattatgtttttttttagacggagtcttgctctgtcacccaagctggagtgcagtggcgtgatctctgctcactgcaggctccacctcctggg

SEQ ID NO: 328815 - DNA, 201 bp, Homo sapiens
gatagatagatagatagataaatttttagccccattcttatataccaaaggagcattctataaacactattctgtattattattattattattattatttttaaattattattatgtttttttttagacggagtcttgctctgtcacccaagctggagtgcagtggcgtgatctctgctcactgcaggctccacctcctgg

SEQ ID NO: 328816 - DNA, 201 bp, Homo sapiens
gatagatagatagatagatagataaatttttagccccattcttatataccaaaggagcattctataaacactattctgtattattattattattattattatttttaaattattattatgtttttttttagacggagtcttgctctgtcacccaagctggagtgcagtggcgtgatctctgctcactgcaggctccacctc

SEQ ID NO: 328817 - DNA, 201 bp, Homo sapiens
atgcagcaaactgtatttgtgtgtgtgtgtgtgtgtgtgtgtgtgcatgtgtggtggggggatagataagatagatacatacatacatacatacatacatagaaagacagacagatacatgcatacatacatacatacatggaaagatagatagatagatagatagataaatttttagccccattcttatataccaaagga

SEQ ID NO: 328818 - DNA, 201 bp, Homo sapiens
aatgcagcaaactgtatttgtgtgtgtgtgtgtgtgtgtgtgtgtgcatgtgtggtggggggatagataagatagatacatacatacatacatacatacatagaaagacagacagatacatgcatacatacatacatacatggaaagatagatagatagatagatagataaatttttagccccattcttatataccaaagg

SEQ ID NO: 328819 - DNA, 201 bp, Homo sapiens
atatactcatgagtaaaacgagttttatccagcacctctgctgagctagggaccgtactagctttatcatttgtcagtccataaacacttaaaagagtgcyactggatagcagaggtaggcttaagttgtttatattccagtgagtaacagtagaaccagggtatagaatttacaggggaaaaaatttagatttttttaga

SEQ ID NO: 328820 - DNA, 201 bp, Homo sapiens
aatcccagagcagcaccctatactaattcctaacatagcacatatgagactcaactgtaactgtatttacagcctttgcacttgttgttccctctgagatmactctttcctcagatgcctgtatatctaactccctcacctccttcaagccttgcctcaaacatctctttttcagcgagtcctaccttaaaaaacacccca

SEQ ID NO: 328821 - DNA, 201 bp, Homo sapiens
acctgatgaggcttcctaggagctctacaatcccagagcagcaccctatactaattcctaacatagcacatatgagactcaactgtaactgtatttacagsctttgcacttgttgttccctctgagatcactctttcctcagatgcctgtatatctaactccctcacctccttcaagccttgcctcaaacatctctttttc

SEQ ID NO: 328822 - DNA, 201 bp, Homo sapiens
gcagggtgagttgcttataaatcagcctgcaaatatgatgaattggatgtctccaactcaattagcttaatgtgggtaggaggatttccaggctttatggkctctgttttactaatctactgagcagactgttatataaaatgtgtctgagtattaatgtctgaacctcagagaaatgtggttggtatttttcacttcagc

SEQ ID NO: 328823 - DNA, 201 bp, Homo sapiens
ctcaggactacattcagtatactgtgcctttagatgaggggatgtgtcctttggaaggatcaagtagctattgtctggacagttcttctaccatggaagtytctgtggttccttctcaagtgggagggcgctctttccccgaagatgagagtcaggcagaccagaacctagttgttgccccagagatctttgtggatcagt

SEQ ID NO: 328824 - DNA, 201 bp, Homo sapiens
ccagctcatgtgcatgtttccaatgagacttaggaagggggagaggctgaaggaaggaagctgagccctcaagaatatgagattactatattacagaggcrgcttccactaagaaaatgcctaaagatcaggctgcttagtaggtaggggtgggcagatgtgctaccacccctctgctagtaaatctggatgaatcatctc

SEQ ID NO: 328825 - DNA, 201 bp, Homo sapiens
accttcagtgagtcaatcatctttttctggcagaagatattgcctcagtgttgatggctgctgactgatcagggtggtggctgctgactgatcagggtggyggttgctgaaagatggggtggctatggtaaattttattttattttattatttttatttatttatttattttgagaccgagtttcgctcttgttgcccggg

SEQ ID NO: 328826 - DNA, 201 bp, Homo sapiens
ttctcttgttctctatgaatgtgtcaaacttcgaacgagatttctcttcttccaaggaaccaccttctgcttattaatataaacagcctctgagcagaaasaagtcttctcctcaaaacacgtgccataaatagctactgaattctgttgagtggctgtggttactcctgtgaggactaatcacagtttcatcctgcagag

SEQ ID NO: 328827 - DNA, 201 bp, Homo sapiens
aaatgctaatgatcatctgaaccttcagtgagtcaatcatctttttctggcagaagatattgcctcagtgttgatggctgctgactgatcagggtggtggytgctgactgatcagggtggtggttgctgaaagatggggtggctatggtaaattttattttattttattatttttatttatttatttattttgagaccgag

SEQ ID NO: 328828 - DNA, 201 bp, Homo sapiens
tctcagtagaaatgtttccctgcctgtcaaattgccctcagtccatacgcatgtttcgctggatgtgctattgacttcctcctgggaactttctcttgttytctatgaatgtgtcaaacttcgaacgagatttctcttcttccaaggaaccaccttctgcttattaatataaacagcctctgagcagaaacaagtcttctc

SEQ ID NO: 328829 - DNA, 201 bp, Homo sapiens
accccatctcaaaaaaaaaaaaagaaagaaaaaggacaaaactgaaaatatgtatatatcaaatagaaatctctctttctttttttcttctcagtagaaaygtttccctgcctgtcaaattgccctcagtccatacgcatgtttcgctggatgtgctattgacttcctcctgggaactttctcttgttctctatgaatgtg

SEQ ID NO: 328830 - DNA, 201 bp, Homo sapiens
aatttgtttaacttccttataaatgttggatattagacctttgttagatgcatattttgagagaattttctctcattctgtagattgtctgtttgctcagytgatagtttattttgttgtggagaagccatagaggggaacaaccacactggggcctagtggaaggtggagccgggaaggagggagaggatcaggaaaaat

SEQ ID NO: 328831 - DNA, 201 bp, Homo sapiens
cattaggcacacttgagaattatctacttttttgaggagtgaaaaagaatatccacctcactgaaagactggccaattcttccctttgcctttggatgaawtgaagttgaaattagttcaggcatcaagccaattctcttcctagccccctccttccagccatacctccaaataatcagttaatgcaaagtatgctgccta

SEQ ID NO: 328832 - DNA, 201 bp, Homo sapiens
ccaacttcaggtttcccaattacttccttatcaaagcccagcttttgctaacatgcaaaaaatggtatcgggctgggtgcagtggctcatgcctgtaatcycagcactttgggaggctgagacaggagcatcacttgagtctaaaagttctagactagcctgggcaacatggcaaaactccatctctacaaaaaagacaaa

SEQ ID NO: 328833 - DNA, 201 bp, Homo sapiens
tcacactctggggactgttgtggggtggggggcggggggagggatagcattaggagatacacctaatggtagatgacgagttagtgggtgcagcgcaccarcatggcacatgtatacatatgtaactaacctgcacaatgtgcacatgtaccctaaatcttaaagtataataataaaaaaaaaattaactagaaaaaaaaa

SEQ ID NO: 328834 - DNA, 201 bp, Homo sapiens
tattgtaatcatggttgttgagattgtgggatggaaaaacacagtcatggcttcatattatgggctgataattagagttctggatgttgctggtttgaagyaccactggccaggggtcagttagacagcctgaatgccttttacctctggttccttgtctagtcatcttccccgcatcatcccagcttgccttccactgga

SEQ ID NO: 328835 - DNA, 201 bp, Homo sapiens
gccctcagaaataatgccgcatatctacaactatctgatctttgacaaacctgagaaaaacaggcaatggggaaaggattccctatttaataaatggtgcygggaaaactggctagccatatgtagaaagctgaaactggatcccttccttacacattatacaaaaatcaattcaagatggattaaagacttaaacgttag

SEQ ID NO: 328836 - DNA, 201 bp, Homo sapiens
aaatgcagcaaactgtatttgtgtgtgtgtgtgtgtgtgtgtgtgtgcatgtgtggtggggggatagataagatagatacatacatacatacatacatacatagaaagacagacagatacatgcatacatacatacatacatggaaagatagatagatagatagatagataaatttttagccccattcttatataccaaag

SEQ ID NO: 328837 - DNA, 201 bp, Homo sapiens
tccagcacccgttatttcctgactttttaatgatcgccattctaagtggtgtgagatggtatctcactgtgattttgatttgcatttctctgatggccagygatgatgagcattttttcatgtgtcttttggctgcataaatgtcttctcaatcctaagccaaaagaacaaagctggaggcatcttgctacctggcttcaa

SEQ ID NO: 328838 - DNA, 201 bp, Homo sapiens
caaatgcagcaaactgtatttgtgtgtgtgtgtgtgtgtgtgtgtgtgcatgtgtggtggggggatagataagatagatacatacatacatacatacatacatagaaagacagacagatacatgcatacatacatacatacatggaaagatagatagatagatagatagataaatttttagccccattcttatataccaaa

SEQ ID NO: 328839 - DNA, 201 bp, Homo sapiens
cacactgacttccacaatggttgaactagtttacactcccaccaacagtgtaaaagtgttcctatttctccacatcctctccagcacccgttatttcctgwctttttaatgatcgccattctaagtggtgtgagatggtatctcactgtgattttgatttgcatttctctgatggccagcgatgatgagcattttttcatg

SEQ ID NO: 328840 - DNA, 201 bp, Homo sapiens
aatatttcctaggttatcttccagggtttttatatgtttaggttttatatttaagtctttaattcatctcgagattatttttacagattgtttaaggaagrggtccaattgcaatcttctgcatatgactgtccagttatctcagcaccatttattgaatagggagtcctttccccattgcttgtttttgtcaatgttgtt

SEQ ID NO: 328841 - DNA, 201 bp, Homo sapiens
gtgtgtgtgtgtgtatatatattatatatatgtatatataatatatataactttatacatatatacgtatatgtatatatgtacatatatgtatatatacmtacatatatacacacatatacacacacacacacacacagtgtaaaattttgtcctaggcatgctgatttcagacttttatttttttcctctcaaaaagat

SEQ ID NO: 328842 - DNA, 201 bp, Homo sapiens
ccagtctatcattgttggacatttgggttggttccaagtctttgctattgtgaatagtgccacaataaacatacgtgtgcatgtgtctttctagcaacacratttataatcctttgggtatatacccagtaatgggatttctgggtcaaatggtatttctagttctagatccctgaggaatcaccacactgacttccacaa

SEQ ID NO: 328843 - DNA, 201 bp, Homo sapiens
gaactcatcatttttgatggctgcatagtattccatggtgtatgtgtgccatattttcttaatccagtctatcattgttggacatttgggttggttccaartctttgctattgtgaatagtgccacaataaacatacgtgtgcatgtgtctttctagcaacacgatttataatcctttgggtatatacccagtaatgggat

SEQ ID NO: 328844 - DNA, 201 bp, Homo sapiens
gagtaccttttgtagtggaaaagcttgagaaacagaaatggttttagcttctcaggcataacttacataacttaagtgaatgtcattcttttttttttttyttttttttttttttttttctgagatggagtctcactctgtcacccaggctggagtgcagtggtgtgatgttggctcattgcaactccgcctcctgggttc

SEQ ID NO: 328845 - DNA, 201 bp, Homo sapiens
ttaccactggcctcttcagcaggattatctcatgtgaactgctagactcttgatattctctctctctctctctctctctctctctctctctctctctctcwcacacacacacacacacacggagagagagattgattaaggaatgtgaaatatttgctttagacttaaattggttccagcaatacctggatccacattgat

SEQ ID NO: 328846 - DNA, 201 bp, Homo sapiens
tagtagaatcattttgcaatggtgggagaatcattttcaattattttttatccgtggtggtgattgggaagaggtaagacacctgtcttagatgcaacagrcatttgtgggcaggaagagagtgttcatctgaaggggtcattattgtctttctaggagccaaaaggggcatgctatcaggatgcctgcagagaaacggaa

SEQ ID NO: 328847 - DNA, 201 bp, Homo sapiens
tggagagattttgttaagtcctagtgagtggttttattagtgactcacagagctcctcatttaccagggttgccatttgactcaatttctttttccttttytctttccttttttttttttttttttttttttgagatggggtctccctccattgcccaggctggagtgcagtggcatgatctcagctccctgcaacctctg

SEQ ID NO: 328848 - DNA, 201 bp, Homo sapiens
agagagagagacagagagagaaaggaaggagggagggaaggagggagggaaggaaggaaggaaggaaggaaggaaggaaggaaggaaggaaggaaggaaggaaggaaggaaggaagggaaaattagtgatcataaattgatttgatttcacaatccacttttgggttgtgatttgcaatttggaaagcatacttttaaaga

SEQ ID NO: 328849 - DNA, 201 bp, Homo sapiens
atggggataagacagtcatatacaaagaaagatcagatacatgaaaaaggataggtaattcagtaaactgttttcagtttggtgtttcaggaataagatcygtaagattagaaacagtgagaggatgcagaacaggtggctgttcctgcagcagtagagcgcatggtataatagttaagagcattgactcaagccaaactg

SEQ ID NO: 328850 - DNA, 201 bp, Homo sapiens
gagagagagagacagagagagaaaggaaggagggagggaaggagggagggaaggaaggaaggaaggaaggaaggaaggaaggaaggaaggaaggaaggaaggaaggaaggaaggaagggaaaattagtgatcataaattgatttgatttcacaatccacttttgggttgtgatttgcaatttggaaagcatacttttaaag

SEQ ID NO: 328851 - DNA, 201 bp, Homo sapiens
ttcaggaataagatccgtaagattagaaacagtgagaggatgcagaacaggtggctgttcctgcagcagtagagcgcatggtataatagttaagagcattsactcaagccaaactgcagggatttgaatttaggttctgcaacctgtgtgaccttgagcagggacttagtttctttttctgtgagttgggggtaataataa

SEQ ID NO: 328852 - DNA, 201 bp, Homo sapiens
ttattcaataattcctaagaaaaatgtgaagtagaaattgaaagatcaaacaaacagcctcttaagaccttaggaggtttgtcaggctggttcagtgtaamaaaagcagcctaggattgactggactcaactggggcatctgactgttagctggctaagcttctcactgatgcaacttcagtcaatgcctggacctctcag

SEQ ID NO: 328853 - DNA, 201 bp, Homo sapiens
ttaaatttgagttggctgtgggtcactctctttgcttaactgccatatgattctaggaaggctacatgctcagaacagcacaggacaatgtgtgacatcastttgattttctggccaccagagaaatctaccagctgtcaccacagaaccataaagttcagaaaaatcaagtatcttaaacatgcacacacatttttcaaa

SEQ ID NO: 328854 - DNA, 201 bp, Homo sapiens
cactgcttaatgttgtaaaaataaccaagtcaactagggacaaaaagttcatttaggaaattattgtaatacctcaggaaagaggaaatgcatatcttagyaggattgtgccagctaaaacacagaggttggaattacattcagaaattctctgaaggtagagtcagcgcatcttgacaaccagtaaatcatggtatttac

SEQ ID NO: 328855 - DNA, 201 bp, Homo sapiens
ttgccaatggaagggctagcaatgcattctccctctcatgaaagttaaatttccagagacttccttagattgctcaaaatgttaaagatatgtccatgtckgcaattcgccagtttcaggtcaaggcctactttcatcaatattgctcccagaagttttctgacaccagaatgccattcctgatcccagctctatttttag

SEQ ID NO: 328856 - DNA, 201 bp, Homo sapiens
aagcaaagtggcattgccccaccttactctggaagtgacaagagaccacaagaactggaggtcccaatttgcatgatgatcacattcctcccaaagtccarttgtagtgctagatgctaaaacaataataatcagaggtataccttgttaactatatcataattacttataataaggagaaggattagaacatcgtctgtc

SEQ ID NO: 328857 - DNA, 201 bp, Homo sapiens
aggcgtgtttttctctcttggaagttgtttttttctccccagtttgcagcactttaataatgtgaagtgattcagtttggagaagcactgaagcaaagaaragcctcatggagccatactgagggaatgaaaatgtatctcgttaattcagccttcccctattgtcctcttcctatccatcaaagaaaattattttaaaaa

SEQ ID NO: 328858 - DNA, 201 bp, Homo sapiens
ctggcctgctgatgcttgcttgaatagataggggcccacaaagaaagcatgagaaggaaattacttcaaccagtgagcttagacccagagccttatattasgaacacagccatgggtgacactttgatgtaacctagtgagactcagttgagaatcccattatgtcatatcaaacttctgacctacagaaatgtgagataa

SEQ ID NO: 328859 - DNA, 201 bp, Homo sapiens
taaatgttatgcctaataaatttagactttattccctaagcagtagggagccaatgcacgtttcacttgtccctctaacattcatttgacacttaaaatayactgacatttaatgtcattttatgtttatatatcctgcttcttcacaaaatggtaaattctgtggtgttaggactttagctttacttgtcatacacatgt

SEQ ID NO: 328860 - DNA, 201 bp, Homo sapiens
tggtccccagacaattattgtaatcatggttgttgagattgtgggatggaaaaacacagtcatggcttcatattatgggctgataattagagttctggatsttgctggtttgaagcaccactggccaggggtcagttagacagcctgaatgccttttacctctggttccttgtctagtcatcttccccgcatcatcccagc

SEQ ID NO: 328861 - DNA, 201 bp, Homo sapiens
acacactatttggagttcttaagaaacacctaagaaatactgggacccaggtaagaagagaaaacagagaacaaataaagggacataggccagtttcaagrtggtccccagacaattattgtaatcatggttgttgagattgtgggatggaaaaacacagtcatggcttcatattatgggctgataattagagttctggat

SEQ ID NO: 328862 - DNA, 201 bp, Homo sapiens
tttattgttgcatttaacaaacaaaccaaatagaaagaatttgcttacagtacttttttgcctattagtctcataaattgtgtgaaggcagagataccatcttgttcatcttttgccttcagcactgaacacactatttggagttcttaagaaacacctaagaaatactgggacccaggtaagaagagaaaacagagaaca

SEQ ID NO: 328863 - DNA, 201 bp, Homo sapiens
aagtaccatatacccctactgcttacatttgatgtgtcagactataggctcatggatatagctagatgcaaagaaatatagtattttaggtacatggcaaygtacctggttaaaacttggaattctgttaatttgagagagaaggataaatggccaaacatggcttccgtgatcaactgtggaccaataacttaaatctgt

SEQ ID NO: 328864 - DNA, 201 bp, Homo sapiens
attaacaaacagactggagcctctggaaaactctttccactaagctacagtacaaataatagagtctatgatctttaaggaaaaccaaaattactcttcayttgcagaacttacagagactctttacttgcagtctccttacaaatgactgtcagtgccaggatctgaaggtccatgggatgcagcatgcacaggtagagc

SEQ ID NO: 328865 - DNA, 201 bp, Homo sapiens
ctacaaaggacatgaactcatcatttttgatggctgcatagtattccatggtgtatgtgtgccatattttcttaatccagtctatcattgttggacatttsggttggttccaagtctttgctattgtgaatagtgccacaataaacatacgtgtgcatgtgtctttctagcaacacgatttataatcctttgggtatatac

SEQ ID NO: 328866 - DNA, 201 bp, Homo sapiens
atgtaaagaagtggagtttgccatccagatttgttccatattagtttatccttgatttctaattagaataaaaagtaacatgaaagaacaacaaaattttrtagaaaaaacctacttcaacctcactaagttatcatattttccttagctatgtattttttcaatatactgaaaacacagattgtactgatatgtacctat

SEQ ID NO: 328867 - DNA, 201 bp, Homo sapiens
tgtcttccacaatggttaaactcatttacactcccaccaacagtgtaaaagcattccattttctccacaaccttgcctgcatctgttttttttttttttttgactttttaataatagccattctagctggtgtgagatggtatctcattgtggttttaatttgcatttctctgatgatcagtgacgttgagctttttttca

SEQ ID NO: 328868 - DNA, 201 bp, Homo sapiens
tgagcgagactctgtctcaaaaaaaaaaaaaaaaaaaagaattagggaaacaaaaacagaaacattactgccaactccccatgtgcagagaacaacctactagggaaatcttaaagaccagatgcagattggtaaggcgctcaagaaatgtaaagaagtggagtttgccatccagatttgttccatattagtttatccttg

SEQ ID NO: 328869 - DNA, 201 bp, Homo sapiens
gggaacttcacacaccagggcctgttccggggttgtggggaaggggagggatagcattaggacaaataactaatgcacacggggcttaaaacctagatgaygggttgataggtgcagcaaaccaccatggtacatgtatatctatgtaacaaacctgcacattctgtacatgtattccagaactttaaaagaaaaaaaaaa

SEQ ID NO: 328870 - DNA, 201 bp, Homo sapiens
attttcagcaaactaatgcagtaacagaaaaccaaacaccacatggtctcagtcgtgggagttgaacaatgagaacacatggacacagggaggggaacttyacacaccagggcctgttccggggttgtggggaaggggagggatagcattaggacaaataactaatgcacacggggcttaaaacctagatgacgggttgat

SEQ ID NO: 328871 - DNA, 201 bp, Homo sapiens
ctattgggcctgttgcggttatgctgagtcagtcatacttctttctactgtcgctgtccagaggtcactgatggagatttgtttctctatataaagcttaytgatttacagaaaaactattttagtcattgtttaaattcctcatccctctcctagtaccataaacacagctagtgctgaatcagagtaagttgaatactt

SEQ ID NO: 328872 - DNA, 201 bp, Homo sapiens
gagaaccttaactggtgatggactttaaagatccccagtaacacttccatgtacttcataaaaggaagagtgagataacaggcagacataattaagtataygtattatggcaggccattatgatttgaagtcatttgagtcagcctgtgtttgtgtgtgtgtgtgtgtgtgtgtgtggtggggggtgtattattttctcct

SEQ ID NO: 328873 - DNA, 201 bp, Homo sapiens
gtgccctagtttggcctgacatactttcctctctattttgagaatttgaatgtaaactaccccacctcccctacaaacaccaccattaaaaaaaaaaaaaattaaaacaatcaactctgagtgtctgagtatctttgtatcagtagaagctctagaaaaagtaaaaacaggttgaaattatgtccctgttttcaccaacac

SEQ ID NO: 328874 - DNA, 201 bp, Homo sapiens
taactgggccaaagatggcatcctagaagatgagataagcttgaattaagttttaaaagggaaaaaggaatgagctaagggagataacacatgtaaagtaytggtcacaaagtctgcctgtattaatcagaaatatttgttggcaagtaaaagacccaccagcttacttactcaaaagggagaattaattagaaggacatt

SEQ ID NO: 328875 - DNA, 201 bp, Homo sapiens
agtgccctagtttggcctgacatactttcctctctattttgagaatttgaatgtaaactaccccacctcccctacaaacaccaccattaaaaaaaaaaaaaattaaaacaatcaactctgagtgtctgagtatctttgtatcagtagaagctctagaaaaagtaaaaacaggttgaaattatgtccctgttttcaccaaca

SEQ ID NO: 328876 - DNA, 201 bp, Homo sapiens
gagtgccctagtttggcctgacatactttcctctctattttgagaatttgaatgtaaactaccccacctcccctacaaacaccaccattaaaaaaaaaaaaaattaaaacaatcaactctgagtgtctgagtatctttgtatcagtagaagctctagaaaaagtaaaaacaggttgaaattatgtccctgttttcaccaac

SEQ ID NO: 328877 - DNA, 201 bp, Homo sapiens
agtcacactgcagaaaatattttagtaccttgagagagtagatattacctgttactttaaattatattgtcaaagtagaacaaataactcactaaatattrttttacttttcagtgatgctataccattttagaaaatacttgatttagtgcaaaatttagatgtgactctttgaatacgggctaccgatagactatcctt

SEQ ID NO: 328878 - DNA, 201 bp, Homo sapiens
attggcaaggtactaaaaaagaggaatgcaaatgagtgtgtgtgtgtgtgtgtgtgtgtgtgtgtgtgtgtgtgtatgtgtgtgtgtgtgttgatttgctktggcatttgatggtggtgtgaccctgtaattcagggcttctgagaggagccaagctcagagatgaggataaataaacaaggaatggcaaaaggcatgggc

SEQ ID NO: 328879 - DNA, 201 bp, Homo sapiens
ttaatatacaacctgtgctctcatgaacatgaggatataggaaatgccttgagaatagccttaagaaagtgagtgccaatagcagagcaacataatgatcmatactgggcaagggaatattttttttaaatgaaaagtgagtatacacaagattgggagaaagtttagttgagattttttttttttttttgagaccaagtc

SEQ ID NO: 328880 - DNA, 201 bp, Homo sapiens
aaggtacaagggtaaaaaaaaggttaatatacaacctgtgctctcatgaacatgaggatataggaaatgccttgagaatagccttaagaaagtgagtgccmatagcagagcaacataatgatcaatactgggcaagggaatattttttttaaatgaaaagtgagtatacacaagattgggagaaagtttagttgagatttt

SEQ ID NO: 328881 - DNA, 201 bp, Homo sapiens
gcatgtgtcacccaatgattggtcatggctcagtggttttagcagggataggtcaaactgcaggagatctaagaagttcatgtgccattcagctctacttkgtctaccccgcccatctaaataccaatatcaagcaaattcataagtcttgctagaactcctcagctagtgagacaatgaacctattcgggcttcattgcc

SEQ ID NO: 328882 - DNA, 201 bp, Homo sapiens
ccaaattttacgaaggctccccttcttctggcacgcactgtgtcagggtctgtggcatggtgaacagcattcagactagatttcagccctaactcatcccygtgaccaagtgttctttgagcaacctgcctaacataataaattgacccaaatgaagatggatatcaggatatgaataagaatttcatttctctgtgttat

SEQ ID NO: 328883 - DNA, 201 bp, Homo sapiens
ttcctaggttatcttccagggtttttatatgtttaggttttatatttaagtctttaattcatctcgagattatttttacagattgtttaaggaagaggtcsaattgcaatcttctgcatatgactgtccagttatctcagcaccatttattgaatagggagtcctttccccattgcttgtttttgtcaatgttgttgaaaa

SEQ ID NO: 328884 - DNA, 201 bp, Homo sapiens
gggcacagtggctcatgcctgtaatcccagcactttgggaggccgaggcgggcggatcatgaggtcaggagatcgcgaccatcctggctaacatggtgaarccctgtctctactaaaaaaatacaaaaaaattagctgggcgtggtggcaggcacctgtagtcccagctactcgggaggctgaggcaggagaatggcatga

SEQ ID NO: 328885 - DNA, 201 bp, Homo sapiens
atgcttcttgtctctttttcgtaatgatagctaacatttttgatgcttactgtttttcagggactacgctatgtatttcacatgcgttctctcaataacartaacaatcaatcaataacaatctcattatccctattttcagatgaagaaactgaggctttgagatgtcaagtgacttgtctgtagtcacagagctcccaa

SEQ ID NO: 328886 - DNA, 201 bp, Homo sapiens
gaacgtttaatttagaagtttcaaagttaaagccagtagtaaagaattagggaggctgggcacagtggctcatgcctgtaatcccagcactttgggaggcygaggcgggcggatcatgaggtcaggagatcgcgaccatcctggctaacatggtgaaaccctgtctctactaaaaaaatacaaaaaaattagctgggcgtg

SEQ ID NO: 328887 - DNA, 201 bp, Homo sapiens
tctctttttcgtaatgatagctaacatttttgatgcttactgtttttcagggactacgctatgtatttcacatgcgttctctcaataacaataacaatcartcaataacaatctcattatccctattttcagatgaagaaactgaggctttgagatgtcaagtgacttgtctgtagtcacagagctcccaagttttagagc

SEQ ID NO: 328888 - DNA, 201 bp, Homo sapiens
ttatcatagaaaacaaaaaaaaaaaacacatgaaaaattaggtttatattactgatttccaataatatgttggaacaggcccatggtgagcaattgaaaamttctggccaacagtctaattatctgctatttgataaaaaataaatcaaaacaatggataatatcactgtcagttttctctcagacagaagtatttcaaga

SEQ ID NO: 328889 - DNA, 201 bp, Homo sapiens
ccttaccttgtcacaagaggatattcatatgtttcaaatttattatatccaacataaacattcccaccaatgattttatcatagaaaacaaaaaaaaaaaacacatgaaaaattaggtttatattactgatttccaataatatgttggaacaggcccatggtgagcaattgaaaacttctggccaacagtctaattatctg

SEQ ID NO: 328890 - DNA, 201 bp, Homo sapiens
tgatagtcattaagataggcgcctgccctcaaggagatcatagtccagtgagggaaacagataaagaactgcatgattgattataatacagttatgtaaaytgtttggattaggtaatgcataaagtgcaatggcaacttggaatgaagttctttgactagaagatatttgcaaatccccttccttgatccaatcagtgca

SEQ ID NO: 328891 - DNA, 201 bp, Homo sapiens
ggaggctgaggcaggagaatggcgtgaacccgggaggcggaggttgcagtgagccgagatcacgccactgcactccagcctgggcgacagagcaagactcyacctcaaaaaaaaaaaaaaaaattagaaactctggtttccgtctagagaatatattaaagaaaacaggagtggaacccgtgagccaacatgtttgggtag

SEQ ID NO: 328892 - DNA, 201 bp, Homo sapiens
ttggaactgattctccagcacaatggtcatattataatctcagtactcagtaacagagtactgaggtggcctttggatttgtagtcttaaagtcaaattayagaaatacaattatcttatcatgagggattgtaccaggaactatgctagtgaatggcaacatgatagtcattaagataggcgcctgccctcaaggagatc

SEQ ID NO: 328893 - DNA, 201 bp, Homo sapiens
ccaggaggcagaggttgcagtgagccaagattgtgccactgcactccagcctgggtgacagagcaagactccatctcaaaaagaaaaacaaaaaaaaaaaacaaaccaaaaatagaagctattatagtaattcagctaatgaaagattgtaacttgaactaaggtgttggcaaaaagattgagagaaatagacatattttg

SEQ ID NO: 328894 - DNA, 201 bp, Homo sapiens
aagaagcccagagccacatatatcagagaaaaatccaaacacatgtaaagcaacaaggaggaaaacacagtggggaagcaaatattctatactaggcaggycttgaatgctcaattctatcactcactgtctgtgtggtctgagaacattctttgtatgacttgaatccttaagacttgttttatgacccagaaatataat

SEQ ID NO: 328895 - DNA, 201 bp, Homo sapiens
cttatattgaattttaatagcatttttcctatctctcttgctaaactgtgaagctacttcaggatatgcatttgtctttaaaggtacttaacagacaaccsgggtctggaggtggctaattcaggcagaggaagaggcctgaccaatgaacttgcataatgtttgaagaaactacttatatagcaagagacagggctgggg

SEQ ID NO: 328896 - DNA, 201 bp, Homo sapiens
tttagtagagatggggtttcaccttgttggccaggctggtctggaactccagacctcaggtgatccacccacctcagcttcccaaaggtctgggattttaygtgtaagccactgtgcccagcccaaagcaatgctttctttcagaaaacaatgaattgaaaaatgaattattagctgtttcccctgtttatctgcatgttg

SEQ ID NO: 328897 - DNA, 201 bp, Homo sapiens
atactgacaatgtcttaattcataattgcatccccagcatcaagcactatgcctgggacatgatcggcattcagtaaatgtacacagacctgaggtgaaargtgtctttttggttattggatccccatccttgaattggaaaagtctagagtctgactgtaatattccagtaactttggcctggacagtcttggaaccaaa

SEQ ID NO: 328898 - DNA, 201 bp, Homo sapiens
gcgtggcgtaggtcttgattttaacaatgaaacagaagatattgttgaagtgttttgtaaatagtgagcgctagatagacagaagttattaccagagcctmctgcagctgttgtcacaggtgtcctaggaagatgtgtgatttcatgtttggctttctgtctgatctcctttctcttctggagaagcttctctcttctgct

SEQ ID NO: 328899 - DNA, 201 bp, Homo sapiens
acaatgagaacacttggacacagtgtggggatttgttgttacttacatatttctgggtttgaaattaactggctccagtattccttgttacttttttttttcttttttctttgtaaattatagacctgaagtattttttaacatttgtctgattgaattaataataatagtgtttattaattaaaaccagcttctggagag

SEQ ID NO: 328900 - DNA, 201 bp, Homo sapiens
gatgagctgtgggcattcctccttttcttgtgaggatactgacaatgtcttaattcataattgcatccccagcatcaagcactatgcctgggacatgatcrgcattcagtaaatgtacacagacctgaggtgaaaggtgtctttttggttattggatccccatccttgaattggaaaagtctagagtctgactgtaatatt

SEQ ID NO: 328901 - DNA, 201 bp, Homo sapiens
cccaggctggagtgcagtggcatgatctcagctcactggaatctccacctcctgggttcaagcgattctcctgcctcagcctcccgagtagctgggattamaggtgcctgccaccatgcccagctaatttttgtattttcaatagagatggggttttaccatgttagccaggctggtcttgaactcctgacctcaggtgat

SEQ ID NO: 328902 - DNA, 201 bp, Homo sapiens
agagacaatgtgatataatggaaagaaaatagtaattgaagtctgagaattacttttaaatctgaattcactatttacttgcttcacgtctttaagtaagttacttcactcctctcagcctcagtttttgtttgtttgcttgttgtttgtttttcattctaatatataaaaagagaataatacaatctaccacataggaaa

SEQ ID NO: 328903 - DNA, 201 bp, Homo sapiens
aagagacaatgtgatataatggaaagaaaatagtaattgaagtctgagaattacttttaaatctgaattcactatttacttgcttcacgtctttaagtaagttacttcactcctctcagcctcagtttttgtttgtttgcttgttgtttgtttttcattctaatatataaaaagagaataatacaatctaccacataggaa

SEQ ID NO: 328904 - DNA, 201 bp, Homo sapiens
ctggggattcagagaagtgatggttgaactgagttttaaggtggcctgagccaaaacgtagaggtatgaagcaacatgtcaaactcagggaagcacagggwctttgatgtggctggaacatagggtgcctggagacgtttaagcagggtagtaaggtgatctgatttgtattttagggaggagaatgtatttggaagattg

SEQ ID NO: 328905 - DNA, 201 bp, Homo sapiens
gaagagacaatgtgatataatggaaagaaaatagtaattgaagtctgagaattacttttaaatctgaattcactatttacttgcttcacgtctttaagtaagttacttcactcctctcagcctcagtttttgtttgtttgcttgttgtttgtttttcattctaatatataaaaagagaataatacaatctaccacatagga

SEQ ID NO: 328906 - DNA, 201 bp, Homo sapiens
agaaaagttacaagtggaaaattgggtttcttttagtaacaaatcaagataaaatggcattgtttttacttttgcacatgctgagatgctactggttgcamaggtgttccttgtatgtactaaccatgcatatctttctcttcctcttgtatcaccaggcctccggaacctgtttacagcactgtgaacaaactatgtgat

SEQ ID NO: 328907 - DNA, 201 bp, Homo sapiens
agaagagacaatgtgatataatggaaagaaaatagtaattgaagtctgagaattacttttaaatctgaattcactatttacttgcttcacgtctttaagtaagttacttcactcctctcagcctcagtttttgtttgtttgcttgttgtttgtttttcattctaatatataaaaagagaataatacaatctaccacatagg

SEQ ID NO: 328908 - DNA, 201 bp, Homo sapiens
ctgaaaacataaaaggattctcatttgtgaaaggactttttaaaaactttattcaccagcccagggtagcaacaaggatgcatgtttctattaggagtggraaaagaaaaaaaaagagtaaatttaaacccaaccctattttgtggggagagtatagctccaagtcaaaaaaaaaaaaaattgatatgaaactgctcttgg

SEQ ID NO: 328909 - DNA, 201 bp, Homo sapiens
catagagcctacatcctaggaattgaagggagcccacagatggcaatggcatgtaggggagactgttaaaaatgtcattcatgaacatgtgggggaccctsaatagaattggtagagaaggggtaaaaggcgaatggtgcaaagtaactgcccactaggaggacagtggaagggaaataaacttggcagagtccagaccgg

SEQ ID NO: 328910 - DNA, 201 bp, Homo sapiens
taagacagagatattcagaggtcagagagatatcacctggcaaaattatgggttgccagttaggatctttagaataaagagtaatagaaaaatcacagtarcaattggtcaggtgcactagatgggaagaaaagccctgttgctaggtcagagctgggagggacctcagaggttatctatctgcatgagaaaattaaagca

SEQ ID NO: 328911 - DNA, 201 bp, Homo sapiens
tactggtagaacaaattcaggtgaataataggaatagtgatcttaccaaactcagaatcttaactaagaatatcagtgattgtttttatagcttgtgagcrtttatttaaagaaaggaataatgaactatgatgagtttttaataaaactgcatattttaaaccagtcttattataacttcatagtattcataaaataacc

SEQ ID NO: 328912 - DNA, 201 bp, Homo sapiens
tattgagaccagggcagtacttaagtgtttactcagaaaaaaaaaaaaaaaaaaggccggggggtgaagtcaaaactcaggtagattataaaagcaacaarggacagagcttggcaaatgttcatatctggcaggagtaaaataaatggtcatcactgccgtggacagagcagtagggaggagactagcaaggatagaccc

SEQ ID NO: 328913 - DNA, 201 bp, Homo sapiens
ggggatggcctatgcaggaatgactagtgctaagtatgaaccagtttatgattttgctgatgagctgtgggcattcctccttttcttgtgaggatactgasaatgtcttaattcataattgcatccccagcatcaagcactatgcctgggacatgatcggcattcagtaaatgtacacagacctgaggtgaaaggtgtctt

SEQ ID NO: 328914 - DNA, 201 bp, Homo sapiens
ttattatcacagtgatagtagaagaatcttaattatttccatgtaatattttatgattacaaaatgttattttgtaataacattacaaatatttgcaatamtgctaccattttatcttcaaactctactgaggtagggaggtcactttacagatgaaaaatttaaagcacagaagcagttacatgatgtcctttttatttc

SEQ ID NO: 328915 - DNA, 201 bp, Homo sapiens
tgctctgtgttaggcactttacaaagatcatttcatgtaatcatcacaacaccctttgtgaacaggtataacttattcatagccacataactagaagaagrggagtcaggatttaaagtcagattgtttttctttgaaagcctcatttactagtgtcaaggaaaatagcttctgtggccattgctctgctaccaacttcga

SEQ ID NO: 328916 - DNA, 201 bp, Homo sapiens
ctcaaattaaaaaaaaaaaaagtagcaaattcaatgttagatgggagaaactggagctgatatggctgcttatagccaaacatttaaagataatttaaaaraaactataagcagcagatgtgttgttttcttttttaatccaaagcataacaataataggaactacattctggaatggctgctctgtgttaggcactttac

SEQ ID NO: 328917 - DNA, 201 bp, Homo sapiens
cagagcaagaccctgtctcaaattaaaaaaaaaaaaagtagcaaattcaatgttagatgggagaaactggagctgatatggctgcttatagccaaacattwaaagataatttaaaaaaaactataagcagcagatgtgttgttttcttttttaatccaaagcataacaataataggaactacattctggaatggctgctct

SEQ ID NO: 328918 - DNA, 201 bp, Homo sapiens
tttataaaagagcatagactttagaactttagaatcataatccttcccctcttcttaggtagaataaattgttttctcctcttcactaatgtgtggggtgygtgtgtgtgtctatgtgtgtgtgttatatgtttggtctgtctcttccatgaataccacgagattataaaaaaccttcaagggcaatttaatttgctacct

SEQ ID NO: 328919 - DNA, 201 bp, Homo sapiens
aaccctggaggcaaatgttgcggtaagccaagatcacgccattgcactccagcctgggcaacaagagcgaaacaccctctcaaaaaaaaaaaaaaaaaaaagtgaaaacaagttatttctcaacaaatatgatttcttatcacatttacgcaaaaaaatgttggcactatttaagtgccatgtctaaagacaataaatcta

SEQ ID NO: 328920 - DNA, 201 bp, Homo sapiens
aagaacgatcatatacagatttttatatgtgtgtgtgtgtgtgtgtgtctatgtgtgcgtatacttatatatactttatatatatatacacacacacacawgtgtgtgtgtgtgtgtgtatatatatatatatacttttccacttgtacatgtttgatgtttgataatttcttacagttgcagagctgacagatcaccctg

SEQ ID NO: 328921 - DNA, 201 bp, Homo sapiens
ttaagaacgatcatatacagatttttatatgtgtgtgtgtgtgtgtgtgtctatgtgtgcgtatacttatatatactttatatatatatacacacacacayatgtgtgtgtgtgtgtgtgtatatatatatatatacttttccacttgtacatgtttgatgtttgataatttcttacagttgcagagctgacagatcaccc

SEQ ID NO: 328922 - DNA, 201 bp, Homo sapiens
tctttgacagtttcatcttgtgattttatattatttgaggggtatgttgacatttagtgacataaatcagtcactcattaatactggaaaaagccaaataratccttgtgctagagacattttgacaacaaggagacctcttagattcacatctatcattagcaacacccagatcaaatgcatggaaataaagggttctaa

SEQ ID NO: 328923 - DNA, 201 bp, Homo sapiens
atagagtactaaagaagcagtaatacatgattattttaccttagtagctgcttaagaacgatcatatacagatttttatatgtgtgtgtgtgtgtgtgtgtctatgtgtgcgtatacttatatatactttatatatatatacacacacacacatgtgtgtgtgtgtgtgtgtatatatatatatatacttttccacttgta

SEQ ID NO: 328924 - DNA, 201 bp, Homo sapiens
ttcatcttgtgattttatattatttgaggggtatgttgacatttagtgacataaatcagtcactcattaatactggaaaaagccaaataaatccttgtgcwagagacattttgacaacaaggagacctcttagattcacatctatcattagcaacacccagatcaaatgcatggaaataaagggttctaatactactcttg

SEQ ID NO: 328925 - DNA, 201 bp, Homo sapiens
aatagagtactaaagaagcagtaatacatgattattttaccttagtagctgcttaagaacgatcatatacagatttttatatgtgtgtgtgtgtgtgtgtgtctatgtgtgcgtatacttatatatactttatatatatatacacacacacacatgtgtgtgtgtgtgtgtgtatatatatatatatacttttccacttgt

SEQ ID NO: 328926 - DNA, 201 bp, Homo sapiens
aacatggattccattgtttgttaattaaggtggttcaagagattagttttaaggccctttccagctgatgttctatgaagtttagtttattgtgtcttctrattaaaacatgccatcaaataacaattattacaagaaggtaatttctaaatgtttccttttttccccatacattttaaacacacagaaattatctttcac

SEQ ID NO: 328927 - DNA, 201 bp, Homo sapiens
caaatatatcagttgtacaaacataaaaacagtctccatttcaaattagttgaggtacacacatagacacagacacacacacacacacacacacacacacmgataacaaaagaggtctcttgagacaagactacatgtgatgtaattctatttttatctgggaaggagagaccttcaaatatttggtggtgggaactgtac

SEQ ID NO: 328928 - DNA, 201 bp, Homo sapiens
ttagtagagatggggtttcaccttgttggccaggctggtctggaactccagacctcaggtgatccacccacctcagcttcccaaaggtctgggattttacrtgtaagccactgtgcccagcccaaagcaatgctttctttcagaaaacaatgaattgaaaaatgaattattagctgtttcccctgtttatctgcatgttga

SEQ ID NO: 328929 - DNA, 201 bp, Homo sapiens
acaaatatatcagttgtacaaacataaaaacagtctccatttcaaattagttgaggtacacacatagacacagacacacacacacacacacacacacacacagataacaaaagaggtctcttgagacaagactacatgtgatgtaattctatttttatctgggaaggagagaccttcaaatatttggtggtgggaactgta

SEQ ID NO: 328930 - DNA, 201 bp, Homo sapiens
aatttttgtgtttttagtagagatggggtttcaccttgttggccaggctggtctggaactccagacctcaggtgatccacccacctcagcttcccaaaggkctgggattttacgtgtaagccactgtgcccagcccaaagcaatgctttctttcagaaaacaatgaattgaaaaatgaattattagctgtttcccctgttt

SEQ ID NO: 328931 - DNA, 201 bp, Homo sapiens
aaaaaataatctttcttattcactttgctgtggtaaaatgaaaacccagccttttccattggccagttgttaaagtgaattttttttttttttttttttttgagatggagtcttactctgccatgcagtttgggatgcagtggcatgatctcggctcattgcaacttccccctcttgggttcaagcaattctcctgcctca

SEQ ID NO: 328932 - DNA, 201 bp, Homo sapiens
caacaaaaacaaaaattgacaaacgggacctaattaaagtaaggagcttctgcacaccagagaaactatcaagggaataaacaaccaacttacagaatggkagaaaaatctgcaaactatacatctacaaaggtctaatattcagaatctacaaggaatttaaacaaataaacaggccaaaagacaaataactccactaaa

SEQ ID NO: 328933 - DNA, 201 bp, Homo sapiens
ctgggttcacaccattctcctgcctcagcctcccgagtagctgggactacaggctcctgccaccacacctggctaattttttgtatttttagtagagacgrggtttcaccgtattagccaggatggtctcgatctcctgatcttgtgatccgcccgccttggcctcccaaggtgctgggattacaggcgtgagccactgcg

SEQ ID NO: 328934 - DNA, 201 bp, Homo sapiens
aaaaaaaagaattcctactgtgaaatcggatagatatgttcaaattccagctccaccattaacagctctgtagccttggaaaattacttcacttcttggartctcattctttatctgtaaaatgatgattcatacctatctcacaggatgactctggggattaaacgaaggcgtacatataaaatgcctggcactgtcctg

SEQ ID NO: 328935 - DNA, 201 bp, Homo sapiens
aaatgatgattcatacctatctcacaggatgactctggggattaaacgaaggcgtacatataaaatgcctggcactgtcctgacagatagtatgtcctccrtaagcgataattatcgttattatcataattatcagaaacaacagaaaccctataatgtggctattatgtggagagagagataattagacccagaggagga

SEQ ID NO: 328936 - DNA, 201 bp, Homo sapiens
ctcttcgaactatgggtaacaaagtaaattcatccccgctgaaatgcttgttgggagttctgttagttaactagagctcccaaatattgatcttcaatgcygaaaaatagccattctatgggagcagattttctttgcttccaagaatgattctgacactcctgctgaccaggttaactaaagacaaacacacactcagtt

SEQ ID NO: 328937 - DNA, 201 bp, Homo sapiens
ttgcattaaggcatttaaggcagcgtatgtggcattagtaaagataccaaaaggaggaggtgttcagctcaattacttggctagaaaacgtttttgaagaygagaaacagggtatttagctagaaaggtaggttggggacagctggtggatggtatgaaatgttctctggggattaaaaaattattgaagctacttgagca

SEQ ID NO: 328938 - DNA, 201 bp, Homo sapiens
aggcagggtttgtgatgatattagatggaaggagaggagaatcatggaagatgtttttaaaggctaagtaggagttatacagggaaaacttggcaagcaaraccatcctaagcagaggatgattaagaaaacaaagagtataatgaaaacatgatttgaattttcttccatctcttctccctgccctaccaactgctttca

SEQ ID NO: 328939 - DNA, 201 bp, Homo sapiens
catttccttaatttttgtttgtctgaggaagtcttttctttttcattcttgaaggataattttataaatttttactttggtctttttctccccacactttmaatatttcacttcactctcttccagtttgcatggtttctgggggggttcagatataatttttatctttgctcctccgtagatatggctcccacctgcccc

SEQ ID NO: 328940 - DNA, 201 bp, Homo sapiens
tgtgaaaggactttttaaaaactttattcaccagcccagggtagcaacaaggatgcatgtttctattaggagtggaaaaagaaaaaaaaagagtaaatttwaacccaaccctattttgtggggagagtatagctccaagtcaaaaaaaaaaaaaattgatatgaaactgctcttgggctagtgaaatctctggacaactag

SEQ ID NO: 328941 - DNA, 201 bp, Homo sapiens
aggactttttaaaaactttattcaccagcccagggtagcaacaaggatgcatgtttctattaggagtggaaaaagaaaaaaaaagagtaaatttaaacccmaccctattttgtggggagagtatagctccaagtcaaaaaaaaaaaaaattgatatgaaactgctcttgggctagtgaaatctctggacaactagaagagg

SEQ ID NO: 328942 - DNA, 201 bp, Homo sapiens
atacagggaacagatcagtatttggcaagccataattgtctctttcctagtatttctgtcaaggctaagcaaatctaagggccttgtatttttttacttcycattttaaccttttatttgctattacacttacctaggtttacttttggtttacgatatatatagccattttttaagtagtctcaataaggacttattcaa

SEQ ID NO: 328943 - DNA, 201 bp, Homo sapiens
ttttccctgtatttaatataaaccttgattgcttcaatgtacgacaatacagcctctaattttatgctttttggaccaaatgaatgttctttaagcatgtygtcagtttaaacaagatcatgcatctgaaatgtctgtgtaaattatacagtgctgtataaaattactcaagactgtattaacaaagctaagacaggcaat

SEQ ID NO: 328944 - DNA, 201 bp, Homo sapiens
cttacacagctggattttgagaattgtaagagaaaagacttaatacattatctagcataaaagcacttaatgccttcattaatagttgaaaccccagtgcrgcaatgctttatttaatacccaagagctgggagaaaactcacctcacattttatttacatttgagaaacaaagggcctagaaagaagtggttttttttcc

SEQ ID NO: 328945 - DNA, 201 bp, Homo sapiens
tgccctggtctcaaacttttgggctaaagagatcctgccacctcggcctcccaaagtactgggattacaggcatgagccactgtgtctgaccaagttttaytctatgtttcctagattaaaaagtagaaaattttatctcattctttttattttcttcaccaaatattctttgagcacataccatgtgtgggtacagtgga

SEQ ID NO: 328946 - DNA, 201 bp, Homo sapiens
tctgggatgtgaggttggctccatatatgcaaatcaataaatgtaattaattgcataaacagaactaaaaacaaaattcatatgatgatctcaatagattyagaaaaagctttggataaaattcaacatccttcatcataaaaaatctcaaccaactagacatcaaagaaacatacctcaaaataataagagccatctatg

SEQ ID NO: 328947 - DNA, 201 bp, Homo sapiens
gcttctttttcacttccacatttttcctttgatttctaactttttttaaaaatgcatttgggcaaagagagggagcataacacagtcccagggtctcttaraatagtttgcttgccaaaggttgctgaggttaatcatttaggagatagacttggtaaattttgtttcctaagcaagcagcagaaaatagagtagaaaatc

SEQ ID NO: 328948 - DNA, 201 bp, Homo sapiens
cagcctccgcctccaaggctcaagtgatcctcccacctcagcctcctgagtagctaggactaaggaacacaccaccatgtctggctaatttttttttttttggggtagagatggggttttgcctcagcctcctgagtagctggggcgactataggcacacactaccatgactggataattttgtttatttatttatttaat

SEQ ID NO: 328949 - DNA, 201 bp, Homo sapiens
actagacacttgaccaattggacctaataaacatctacagaatattctatccaacattgatagaaagtacattcttcttgtctgtatatggaacacactcyaagatctactacatgctttactggtaaagcaagactcaataaatgcaaagaaataaaaatcataccaaacatactctcaaactacagtgcaataaaaata

SEQ ID NO: 328950 - DNA, 201 bp, Homo sapiens
aactaagaaaggaatcatgaacttaaactagacacttgaccaattggacctaataaacatctacagaatattctatccaacattgatagaaagtacattcytcttgtctgtatatggaacacactccaagatctactacatgctttactggtaaagcaagactcaataaatgcaaagaaataaaaatcataccaaacatac

SEQ ID NO: 328951 - DNA, 201 bp, Homo sapiens
cagcatgacagaagcctactctcctctggaggggttaggcatgagggaaggggaagtccgagaggtgataaggtgagctcacagaggtatttacatacctyccatgctgaatttggacttaaggctgtagttcatagagagccattgaaagaattgttttgtttattaagcaagcatgtcaagtactcagatgtggttttg

SEQ ID NO: 328952 - DNA, 201 bp, Homo sapiens
tgtttttgttgagactttgaccgcctcccatgaatcatgaatcttcctaatggcatctggaagattgtcaatttactttactcagatgcatcagaggaatsacaatttatggcagctatagctttctgaaagtatttcttaaataataagacttttaaaaattaaaattaccccttgatccatgggctgtagaatggatat

SEQ ID NO: 328953 - DNA, 201 bp, Homo sapiens
ctactgacagtattagatagatcatcaatgcagcaaactaagaaaggaatcatgaacttaaactagacacttgaccaattggacctaataaacatctacakaatattctatccaacattgatagaaagtacattcttcttgtctgtatatggaacacactccaagatctactacatgctttactggtaaagcaagactcaa

SEQ ID NO: 328954 - DNA, 201 bp, Homo sapiens
atgtttaacaatggatcacatatacaacggtggtcttataagattataataccatatgtttatagtactttttatatgtttagatatacaaatacttacgktgtgttacagttgcctagagtattcagtacagtaacagtaacatgctgtacatatttgtagcgcaggaacaagaggccataccacacagcctagttgtct

SEQ ID NO: 328955 - DNA, 201 bp, Homo sapiens
tacttctccaccaaagtcttgaattcttcaaagtcatctgtaagagttggaatcaacttttttcaaactcctgtttttgttgagactttgaccgcctcccrtgaatcatgaatcttcctaatggcatctggaagattgtcaatttactttactcagatgcatcagaggaatcacaatttatggcagctatagctttctgaa

SEQ ID NO: 328956 - DNA, 201 bp, Homo sapiens
gcaacagtgcaagactccgtctgaaaaaaaaaaaaagagaaaacaaaaaagagcagaggacagtattcttatttcagaaaaaacaaacaaacaaacaaacagattttaaaataacaagtcaaaagtgacaaagaagggcattatatgataatgaagagttcaattcaaagaggacttaactatcctaaatatatacatacc

SEQ ID NO: 328957 - DNA, 201 bp, Homo sapiens
ggcaacagtgcaagactccgtctgaaaaaaaaaaaaagagaaaacaaaaaagagcagaggacagtattcttatttcagaaaaaacaaacaaacaaacaaacagattttaaaataacaagtcaaaagtgacaaagaagggcattatatgataatgaagagttcaattcaaagaggacttaactatcctaaatatatacatac

SEQ ID NO: 328958 - DNA, 201 bp, Homo sapiens
gggcaacagtgcaagactccgtctgaaaaaaaaaaaaagagaaaacaaaaaagagcagaggacagtattcttatttcagaaaaaacaaacaaacaaacaaacagattttaaaataacaagtcaaaagtgacaaagaagggcattatatgataatgaagagttcaattcaaagaggacttaactatcctaaatatatacata

SEQ ID NO: 328959 - DNA, 201 bp, Homo sapiens
gagggggccaacagccagatcttaactgccaatctctgggtcctcacctattcctcacttctttagaaggagaaaaaggccatgctcctttaactagtatrggcgaagttcatggattttacagcactttcccttcacagcctcattaaacttatatgcatggcctcaggatctgctgagccacgttgtgctgccaagccc

SEQ ID NO: 328960 - DNA, 201 bp, Homo sapiens
tgggcaacagtgcaagactccgtctgaaaaaaaaaaaaagagaaaacaaaaaagagcagaggacagtattcttatttcagaaaaaacaaacaaacaaacaaacagattttaaaataacaagtcaaaagtgacaaagaagggcattatatgataatgaagagttcaattcaaagaggacttaactatcctaaatatatacat

SEQ ID NO: 328961 - DNA, 201 bp, Homo sapiens
acttttcttaaatctggcaagttgttgcttaataaaatatacaccaactatctgagcaattgagggaagagggtagtgattatggtttaaaactggatgtwaaagaaagcagattaccaccgaagtgagaatttctgaatgtcatttggtctaaatggaactgtgattaggaaaagaaaagagacatctgaaaaagtcatg

SEQ ID NO: 328962 - DNA, 201 bp, Homo sapiens
ggagaaaccccatctctactaaaaatacaaaaaattagccgggcatggtggtgggcgcctgtagtcccagctactcgggaggctgaggcaggagaatggcrtgaacccaggaggtggagcttgcagtgagccgagattgcgccactgcactccagcctgggcaacagtgcaagactccgtctgaaaaaaaaaaaaagagaa

SEQ ID NO: 328963 - DNA, 201 bp, Homo sapiens
atcaaacttacgtcttatgaagagaggcaaagatgtttgaggacagagcagaagtcaaatgcagtgcttctgctacttggctagctgcatgaccttgtgayagttatttagcctctccaaccttcagatttctcatctgtgaaaagggactaacacctacttcatagggtaattttgatggacaagttataataataattt

SEQ ID NO: 328964 - DNA, 201 bp, Homo sapiens
cctgtcttacatataatgacaaccacagtctcaaagtaaaagaatggagaaagacctatcatgcaaatagaaaacaaaaaagaggccgggcgcggtggctyacgcctgtaatcccagcactttggggggccgagacaggcagatcacgaggtcaggagatcgagaccatcctggctaacatggagaaaccccatctctact

SEQ ID NO: 328965 - DNA, 201 bp, Homo sapiens
atcacgtcactgcactccagcctgggtgacagagtgagactccatctcaaaaaaaaaaaaaaaagcattcagtggaatctcccaagattagttttaatatycatattgcttctaagaagaaaatatgataatagcatttgtcaacatccaagtaactgagcaaaacacagtgtcaaggaaataaataaaatggacattgta

SEQ ID NO: 328966 - DNA, 201 bp, Homo sapiens
aaatccagcctatggtgtacaaatggacacttttgtgatttctgttaaacgccaaccccaaatcaaaagccattttcctttctggatattaaacaacaatsaagagccagaattttgatttagaatgtatttatagtatggaattttaaaaggtaaatatttctccttttcaagacagaaactcagatatcaggattattt

SEQ ID NO: 328967 - DNA, 201 bp, Homo sapiens
gtcttccctgctctgtcacatagcatcagaaaggaccagatacttgttaagaacatctttaaactgtgttgtttatgcttttgtttttgagtcagcaatcrctgacagattttagaaactggcgggaataaagaatcagacatttaatttggcagggcagtcttgtacttcagataaatggatctggatttgtgatgcctt

SEQ ID NO: 328968 - DNA, 201 bp, Homo sapiens
tttgtgatgccttcttcaaaatattaatttctcttttgaaaccaaatcatatttggcttcaatatcttatttaaaatgcatttttacttacatatcatctkctttgagctcttaaatagcctgggagttagatcatggactttgagcttctcaaggattagaacagtgttcttctcacggtttgttggtacttgcccagca

SEQ ID NO: 328969 - DNA, 201 bp, Homo sapiens
gaaaatcttggctcttgaattgatgtatttataccattgatatttaaagtgattattgatgtatttactacttggattaatatctgccatatctgttaccmttttctaattactgttctaattactgttcttgttctttcatcctatttttgtcttccacactttttctgccttttttcgttttaaatggcattttatatt

SEQ ID NO: 328970 - DNA, 201 bp, Homo sapiens
gtggttcaaacaaaaagagaatcgttggctccatccccacacttaccaacttaccaagtcagaacatcacagggtagctacatacatcacaggaattctayatacagaacaccttagggaattaaactaagtttggaaactactagcccatatagaataatgcccccaactcttcggcatggcattgaggacccttggcaa

SEQ ID NO: 328971 - DNA, 201 bp, Homo sapiens
atacacacacatacacacacatgcacacacatacacacacacacacagtcactgggttttatccctaaaacaaaaaaagatggtaaagcataggcctagaytgagtgtatggatatagaaaatagaatcatgaaggaaaataataagaatgctctttaaaatgtgatcatattgcctcagtttgttctataaataggtgag

SEQ ID NO: 328972 - DNA, 201 bp, Homo sapiens
ttttaataacattgttcacgtgaacgtagttgcatttaatagagaaatgaaggaaaaaggattcaggaagactagctgtagacttcccatatgacttccamgggtaatagaccctttttgggttgtcgttatactagatctgggccttccatctacagtctctggaactcagtttttgtcagtgtatccaggagtaatcaa

SEQ ID NO: 328973 - DNA, 201 bp, Homo sapiens
ccttcatcatcacagtgctgtctttttgtttttaatttagtttagtttagtttagtttaattagcttttcagcactttctgcaagcttgagcaaagatatkcatgaatatatttctgctaaaccacagtaatgaattatttattttgaaatctgtctatatttttagctactcataccagcagtttagagaaataaaaacc

SEQ ID NO: 328974 - DNA, 201 bp, Homo sapiens
gagtactaaatatttattaaatcatcaagtggaattgtggttttagaaatgggaacgccccacttctgattttcattaagcaagcatgtgaaatgctagarctggaagggatcgtggcgattctggtttgcctttttcacccctcccctagttatacaatatggaaacttgttcagaggctgttttcaaggacactcaggc

SEQ ID NO: 328975 - DNA, 201 bp, Homo sapiens
cacccaaagtctatggtttcacattaggtttttctcttggtattgaacaatacatggctttagacaaatgtataatgacatgtatccattattatagtatygtatggagtactttcactaccctaaaaaaccctgaaatttgacaaagtgtatttttcagctcccagaaacacttgtttcagaaaaaagcaggtgaggata

SEQ ID NO: 328976 - DNA, 201 bp, Homo sapiens
aaatgtcacatacattccaatcacgtcttttagtctgactgacaaaagtccttttccgtcttgtctttatctttcatgaaaataagtctagacaaaagtcrtggtcagaggggttttctggtggctcatccatcacatgagtagaaacagccttagtcttatctgatgaatatttgcgggacaataaatttgaccttggat

SEQ ID NO: 328977 - DNA, 201 bp, Homo sapiens
ttagaaaacacaaaattttaaccaatttgatttaaagattgaattggctttcattcatgaatcaggcagcatctcatccaaagacttagataaggcactcyagtgagctgaggagaggagattggctttataggcagaaaatggctcaagaaagcagaaatgggaaacaaaattgaattgggcattttaaagctgtcctcc

SEQ ID NO: 328978 - DNA, 201 bp, Homo sapiens
agagtaaacaacttggaaaatgtatttgaggatataattcatgaacatgtccccagtttcactagagaggttgacaggcaaattcaagaaatacagaaaamcgctgcaagatactatacaagatgaccaaccccaagaaacaaagtcatcagattctccaagattaacatgaaagaaaaaatcttacaggcacctaggaaa

SEQ ID NO: 328979 - DNA, 201 bp, Homo sapiens
agaaccattattccatgacaagatttagttgcttaaactatcaaaaagattttatctgtcccaaactttctaactgtagccccagcaccaacctcttcttkacatttgcaccattacctctctttgaatactgtccttttttaacttgattctgtttatgatgatgccaaccaataaattcaattaggaatataatgatga

SEQ ID NO: 328980 - DNA, 201 bp, Homo sapiens
tttttattgctacctttcatggcttgatagcagaaaaatgctgactgctgactgccatgaaatggaagaagtatgaagttctcacatttgtggacaatagkggaacactgcaagtactcttgcatgtattgttctgtgttccattcacaaacctggcttttgcagtcctttagaacatagctgataatatagaaagtaaga

SEQ ID NO: 328981 - DNA, 201 bp, Homo sapiens
ttttgagacgggatctcactctttcacccaggctggagtgtagtggtgcgatctcggctcactgtaacctccatctcccctgttcaagcaattcttctgcytcagcctctgaagtagctgggactacaggcacgtgtcactatgcccagctaatttttgtatttttagtagagacggggtttcaccatattggccaggctg

SEQ ID NO: 328982 - DNA, 201 bp, Homo sapiens
ccaacatggtaaaaccccatctctactaaaaatacaaaaattagcggggtgttgtggtgggcgcctgtaatcccagctactcaggaggctgaggcaggagratggcttgaaccagggaggcagaggttgcagtaagctgagatcgtaccactgcactccagcctgggcaacagagcgagaccccatctcaaaataaataaa

SEQ ID NO: 328983 - DNA, 201 bp, Homo sapiens
ttgagcatcccaaatctgaaaatccaaaatctgaaatgttccaaaatccaaaactttttgggtgctaacatgaaaagggaaatgctcattgtggagtaatytgaatttcagattttttaaagtacatatttcaaaatctaaaaaaaaaaaaaattgaaatctaaaacattactggccccaagcatttcagatgaggaatac

SEQ ID NO: 328984 - DNA, 201 bp, Homo sapiens
aattagctgcgcatggtggcgggtgcctgtaatcacagctacttgggaggctgaggcaggagaattggttgaactcgggaggtggaggttgcagtgagccragattgcaccactgcactccagcctgggcaacagagcaagactccaccttaaataaataaataaataaataaataaataaataagaatggaaaaaattat

SEQ ID NO: 328985 - DNA, 201 bp, Homo sapiens
aaattttaaaaacatagtagttattaagtctgtgattatttttctagacccaaagttgcgtgtgttataaatacttcataacaaaggcagataattttttwaaaaaaaagttatttaagggccttgcacagtggctcacacctgtaatcccagcactttgggaggccaaggcggttggatcacctgaggtaggagttcaag

SEQ ID NO: 328986 - DNA, 201 bp, Homo sapiens
aattattaagaggccaatttaggattagcctacatgtctgactgaatccaaagcctgagctgatacttaacacagcctgataatataatcagagcaaaaasaatctacagaagtagtctgtaaacacagagaaacagcattagcagagcctggcctgtgtatatatgtgcatgcatatgtgtgtattagagtgcgtaggag

SEQ ID NO: 328987 - DNA, 201 bp, Homo sapiens
aactaagtaatctactctagattacccagccattaagtagcagtgctgggtttcacatacaactcatatatataacttcatttatgctgtactatgcaacraagtctcatagatttcgataaatgtgactagagaatagaagccacctattctcctatagactgcaaagatatggaaaaggaacatggctggtaagctaaa

SEQ ID NO: 328988 - DNA, 201 bp, Homo sapiens
attaaagaatacattgtttgacatctgttctcccttactgtcctcaaactcgtaaggaccctttaaacagtgctatgcatcaaaccaaaggaattgaactmacattgcttgatcatcacccatgtgctgtgcttagcacttgctggtgcctgtgtcatttgaattcatctcattatctccatttgacagatgatgaaacta

SEQ ID NO: 328989 - DNA, 201 bp, Homo sapiens
ctttaaaaaaatccttgattttctgaagtttgaatatggtatgcctagatgccagttattgggagtaggaggattttttgtttgcttgtgtgtttgtttgytttgtcatttattctgcttggtgttctctgaggttcctggatctgtgatttgttgtctgacattaatttgggtgaaattttcagtcattattgcctcaaa

SEQ ID NO: 328990 - DNA, 201 bp, Homo sapiens
aagatgtaaggtgatctgttcaggctcacagcttgtaggaggaagacccaggactccagctaggaagtctggccttagagccaggacttgaaactactacrcttctcttcacaagttcttattgttttgtttgtttgcttttagcataaaagctatgaaaattagcaatatatctcagtcttttaaagcacagtaaaaata

SEQ ID NO: 328991 - DNA, 201 bp, Homo sapiens
ataattttataaatttttactttggtctttttctccccacactttaaatatttcacttcactctcttccagtttgcatggtttctgggggggttcagatayaatttttatctttgctcctccgtagatatggctcccacctgcccccactagcttctttcaagactttaaaaaaatccttgattttctgaagtttgaatat

SEQ ID NO: 328992 - DNA, 201 bp, Homo sapiens
ggctctagagcttataaagtaaagcaaaggattagttaagaagaattaaatataccgaggaatagacaacccaatttaatcttttgctgaagcaaaaagtrtatgcagtaggaccttgacattttcaaaattaatttgcaactatttgagtgtaactcataaggcccatagcttgtagtgatttgtaattttgttaaaggc

SEQ ID NO: 328993 - DNA, 201 bp, Homo sapiens
atgtgtatatataagcacatatatataatcatatgcattattcctattattattttgaacaaactgttatctgttagattaagaaaaataaaacttttatwttgttttattttcatatattctttctccagagctctttctttctttatgtagatcaatgtttctgacctttatgatttttcttctctccgaagtacttac

SEQ ID NO: 328994 - DNA, 201 bp, Homo sapiens
ttcacttatatataatcatacatgattataagtgacatgcatatatatgattatatataagtgatcatacatatatgtgtatatataagcacatatatataatcatatgcattattcctattattattttgaacaaactgttatctgttagattaagaaaaataaaacttttattttgttttattttcatatattctttct

SEQ ID NO: 328995 - DNA, 201 bp, Homo sapiens
ggtaatgatttcagaaattctacatgcacctgtgatgcatcctgatcagccaaccaaattgcatttggcaggacattttttttttaacacctggaagaccyggaaagataaagctgccagtagttaagaatcaatagattaggttttagagagaattcaagaatttttcatttctctcccaccttgatttatccttgagcc

SEQ ID NO: 328996 - DNA, 201 bp, Homo sapiens
gtagctagctagaaaatggctagcttctggaaaccatcattctcagcaaactatcgcaaggacagaaaacgaaacaccgcatgttctcactcataggtggraattgaacaatgagaacacttggacacaggatggcgaacatcacacaccggggcctgtcgtatggtggggcaagtggggagggatagcattaggggatat

SEQ ID NO: 328997 - DNA, 201 bp, Homo sapiens
ctgaagagtgtcccttggtttagcccagcatcttctccacccacgagtaacatccattcacagcatgtacagctgagactgtttggaagaaaaattatacrtaacacccctcaggacaagatgagtttagcaacaagagttcaggaaattctcactactttgtatttcagccattaatgtctaatgtcaatatattgtttt

SEQ ID NO: 328998 - DNA, 201 bp, Homo sapiens
tttcacttatatataatcatacatgattataagtgacatgcatatatatgattatatataagtgatcatacatatatgtgtatatataagcacatatatataatcatatgcattattcctattattattttgaacaaactgttatctgttagattaagaaaaataaaacttttattttgttttattttcatatattctttc

SEQ ID NO: 328999 - DNA, 201 bp, Homo sapiens
aaataataagagatatctatgacaaacccacagccaatatcatactgaatgggcaaaaactggaagcattcccttcgaaaactggcacaagacagggatgycctctctcaccactcctattcaacatagtgttggaagttctggccagggcaatcaggcaggagaaggaaataaagggtattcaattaggaaaagaggaag

SEQ ID NO: 329000 - DNA, 201 bp, Homo sapiens
taggcctctctgataagacccagtgtgtgttgtttcaccatgatgtatccatgtgttcttatcattcagctcccacttacaaatgagaacatgtagtattkggttttctgttcctgcattagtttgttgagaataatgacttccaacttcatccatgttcctgcaaagaacatgatctctttcctttttatggctccatag

SEQ ID NO: 329001 - DNA, 201 bp, Homo sapiens
tccccaaatcagtctcattatcaaaacagtcgatcatattaactcttcttatgaaattacctctctttctgtggtgctgtggctgttgaaggaggaaaacytggcattgatagactatgaatgtgcttcaggggtgggtggtgaggatatacagcaaaggtgaattgccctttggtttcagaagttacctcatattccact

SEQ ID NO: 329002 - DNA, 201 bp, Homo sapiens
ttgtttgctgagtgaacagtttgagatgtgagttaaggatgcagatatccacccttctgggagcttcagattgcagttggaactgattctccagcacaatkgtcatattataatctcagtactcagtaacagagtactgaggtggcctttggatttgtagtcttaaagtcaaattatagaaatacaattatcttatcatga

SEQ ID NO: 329003 - DNA, 201 bp, Homo sapiens
catgattaggagtgtttacatttgcagtcctctgagatgtcaatatagtttaattcataagaaacatttgatttaaatttccttacttcccaatttctttyatttttttatttttttattttttgagatggagtctcgccctgtcgcccaggctggagtgcagtggtgcgatcttggctcactgcaacctccacctcctgg

SEQ ID NO: 329004 - DNA, 201 bp, Homo sapiens
acgagttttatttgttacctagctgtgaatgctcctacaaagtaactttcgatcgttttgttctgcatgtcagcatttaaaagcaaaatgtatcaggcacyctaacttctgttgcagttaacaccatccctttctgaccatgtgatattatcaacatggtcctgatgcccaccatagcatcacttgctctgccgcttaata

SEQ ID NO: 329005 - DNA, 201 bp, Homo sapiens
agaatttgacacaatgttgaacagatagcaggttctcaaagaaacaaatgcagaattaattaggtgattcaaagtttagccctcctacattaaaatttcargtaaaccccttcacctgacccttccttattagctcaatcatgcaaatattttggattattcttcagtttagtttaactcatcaaacatttactgagcatt

SEQ ID NO: 329006 - DNA, 201 bp, Homo sapiens
ggccacagcatccattctggccacgcttgaggagcccttcagcccgccactgcactgtgggagcccctctctgggctggccgaggcaggagccatctcccsctgcttgcagggaggtgtggagggagaggtgcgagtgagaaccgaggctgcacgcggccaggacgagttccgggtgggcgcaggctcaataggccccgcg

SEQ ID NO: 329007 - DNA, 201 bp, Homo sapiens
tgaaagaagttgtagtgagcagagatcgtgccactgcactccagcctgtctcaaagaaacaaaaagaaaaaaagaaaaagaatgtgaagtcatactaggcrtgaggcagtaggaaacctgggtgcatgcttttaaaatctccgtgcagccgcagaaaaacacatcatattgaaaaatcttttctctttaggagttgattcc

SEQ ID NO: 329008 - DNA, 201 bp, Homo sapiens
attgagaccatcctggccaacatgggtgaaaccccgtctctactagaataaaaaaaaattagctggacgtggtggcgtgtgcctgtagtcccagctactcrggaggctgaggcaggggaattgcttgaacctgggaggcggcaattgcagtgagctgagaccgcaccactgcactccagcccggcaacagagtgggactcc

SEQ ID NO: 329009 - DNA, 201 bp, Homo sapiens
gaagcattcctattgaaaacaggcacaagacaaggatgccctctctcagcacttctattcaacatggtattagaagttctgccagggaaatcaggcaagakaaagaaataaaagatattcaagtagaaagagaggaagtcaaaccatcttgtttgcaaaaaaagtgaacctatatttagaaaaccctattgtctcagtctt

SEQ ID NO: 329010 - DNA, 201 bp, Homo sapiens
ttcctctactgtttctgctgtattcctactggcttcctagtgttcctctaacacactgggcacacttccagctcaggtccttgctgttctctagccaagartgttatttctgaaagtatctgcataaccacctttcttcaaactttattaaaaagttagcttccacatgagaacttttctgcctccacagtatacatatac

SEQ ID NO: 329011 - DNA, 201 bp, Homo sapiens
tctctatttctattttttgtgttactcttacctatgctgtacatccccacaaaacgttgtttgctttaaaaatcaaatatcttggcaggcacggtggcttrcgcctgtaatcccagcactttgggaggccgaggtgggcggatcacctgaggtcgggagttcgagaccagcctgacaaacatggagaaaccccgtctctac

SEQ ID NO: 329012 - DNA, 201 bp, Homo sapiens
cttcaaactttattaaaaagttagcttccacatgagaacttttctgcctccacagtatacatatactttatatcccacttctctgctttgtattctgactktttacattgaacactatcaatatatattttacttatctaacatatttttctgtctctctcattagaagagaagttcagtgaggacagagagtttatcttg

SEQ ID NO: 329013 - DNA, 201 bp, Homo sapiens
aagcgtggtatatttttccatttatgtaagctatctcagcagtattttgtaattttcagtgtaggagtagtcatatatacatacatatatatatatatagwgagagagagagagagagagagatttattcttatatatcttgtattttttgttgctgatgaattggcattgattttttaaatttaattttccaacagttgg

SEQ ID NO: 329014 - DNA, 201 bp, Homo sapiens
tcttatctcaatatttgattaaccagaagactctgctctttaactatattggatttcagtgcaattcaggtattcagaatgttaagaaaacattcctcatrcttgtcgatagtattatacgtggtcattagcctcagtcacagaataacaactaaactgccagagggacttcccatgaacaccactagaaaaacccatatt

SEQ ID NO: 329015 - DNA, 201 bp, Homo sapiens
cataattcttaggaagcagagaaaacgcttcacttattttatcttatgaggtcaggctttgtggctgttctctctttgaaacaaaacttcagtgtttacaracatacccataggagacaatttgaaggtatctgccaattttccccagtgtaggtccctacatacacatttctaagaaataatcttacttcgctgtgcata

SEQ ID NO: 329016 - DNA, 201 bp, Homo sapiens
gatgagaatctcgttgatggagggggccagattttactcatacacacacacacacacacacacacacacacacacacacacgacatctagcactgtttttyaccgggagtaggtagttaattcatgtatgctgggtaaatggaaattaacatgaaagtagaagctttaattagtcagtcaacctctgagggctaatgatgt

SEQ ID NO: 329017 - DNA, 201 bp, Homo sapiens
ggaagctgaggtggctgaatggcttgagctcaggagttcgagacaaggctgggcaacatggcaaaaccctgtctctataaaaaatgaaaaaaaaaaaaaaatagccaggcttcatggtttgtgcctgtattcccagctacttgggaagctgacgtgaaagaagttgtagtgagcagagatcgtgccactgcactccagcct

SEQ ID NO: 329018 - DNA, 201 bp, Homo sapiens
gtaattggtacactttgaattttataactatgcacatcttttgatttcttaacaagcaaatgaaagaaagaaggaaaaaagaaaggaatccctttggagaygacatactatcagggaaggataagtgtgtagttttttgactggcatctgcaaagacaagaatttcataaaatttgcaagtgtatggaggactaacctcac

SEQ ID NO: 329019 - DNA, 201 bp, Homo sapiens
tagaattccaatgtggtacctgcacaagtctagaaggacctattgcctatgatggtcaacccacaaaagccatatggggagccatgaccactaatgaactwcatactgcagctgcctcagagtcagtcaaaactgatataattgaccaaaatctatgtagaatttttcccataaaatgttagagtatgaaaaatgttttag

SEQ ID NO: 329020 - DNA, 201 bp, Homo sapiens
cctctaatgcttttattttcatctttctttggccaacttgtattcattcttctaggcttgcaacaaatactacctattccatgaagccttgtctggttccycatgattggaattcatgttacttcttcttcaatttattcagcagcatgttgttcatcattcccttatgcatcttttacagtatgtcttgccctgtattta

SEQ ID NO: 329021 - DNA, 201 bp, Homo sapiens
caaaactgatataattgaccaaaatctatgtagaatttttcccataaaatgttagagtatgaaaaatgttttagagataaattgatcttttaaaagagtayggaaaatattatctttcatttatttcatttcaaatggcaaaaaaagcttgtaaaattgctacttctgcttttctgggaaatggaggggaacaaagtagta
